United States Patent Application Publication US 2005/0244851 A1 - sequence listing, part 68

SEQ ID NO: 2644205 - DNA, 25 bp, Homo sapien
ccatacacaggagggtagtgctggc

SEQ ID NO: 2644206 - DNA, 25 bp, Homo sapien
tcccatacacaggagggtagtgctg

SEQ ID NO: 2644207 - DNA, 25 bp, Homo sapien
tacacaggagggtagtgctggccaa

SEQ ID NO: 2644208 - DNA, 25 bp, Homo sapien
cattcccatacacaggagggtagtg

SEQ ID NO: 2644209 - DNA, 25 bp, Homo sapien
tgattcgatctatactgctgaaaac

SEQ ID NO: 2644210 - DNA, 25 bp, Homo sapien
gaattctgagtgattcgatctatac

SEQ ID NO: 2644211 - DNA, 25 bp, Homo sapien
gagtgattcgatctatactgctgaa

SEQ ID NO: 2644212 - DNA, 25 bp, Homo sapien
cttctgctgaattctgagtgattcg

SEQ ID NO: 2644213 - DNA, 25 bp, Homo sapien
tctgttgaaatagccagtttgggaa

SEQ ID NO: 2644214 - DNA, 25 bp, Homo sapien
tttcctggctcctcatgggggtctc

SEQ ID NO: 2644215 - DNA, 25 bp, Homo sapien
ccagaactgagtttatgtctgttgc

SEQ ID NO: 2644216 - DNA, 25 bp, Homo sapien
ctccctctgttgaaatagccagttt

SEQ ID NO: 2644217 - DNA, 25 bp, Homo sapien
tctgccaatggtagataatgtcact

SEQ ID NO: 2644218 - DNA, 25 bp, Homo sapien
gccagagtgtggatatacaaccttg

SEQ ID NO: 2644219 - DNA, 25 bp, Homo sapien
tgcagcactgcatataagcgtgagc

SEQ ID NO: 2644220 - DNA, 25 bp, Homo sapien
ccttggctataagcaaatcagctca

SEQ ID NO: 2644221 - DNA, 25 bp, Homo sapien
gacagcaggaagagtaaacgccaga

SEQ ID NO: 2644222 - DNA, 25 bp, Homo sapien
tgttagaacacacctcatactaggc

SEQ ID NO: 2644223 - DNA, 25 bp, Homo sapien
tgtggccagtaagtccagacggtgt

SEQ ID NO: 2644224 - DNA, 25 bp, Homo sapien
cagacggtgtcaggcgaacattaac

SEQ ID NO: 2644225 - DNA, 25 bp, Homo sapien
tgtgctttctaatcgctgccgagcc

SEQ ID NO: 2644226 - DNA, 25 bp, Homo sapien
ccgagccatgtgagaagcgggttca

SEQ ID NO: 2644227 - DNA, 25 bp, Homo sapien
cagagagggactttgtgactttccc

SEQ ID NO: 2644228 - DNA, 25 bp, Homo sapien
tgtactgtccacacactcgcttcgt

SEQ ID NO: 2644229 - DNA, 25 bp, Homo sapien
ttcagcttatgaagagtcacacaga

SEQ ID NO: 2644230 - DNA, 25 bp, Homo sapien
gcagctgcaccaggaccatcatctt

SEQ ID NO: 2644231 - DNA, 25 bp, Homo sapien
aggaccatcatcttcagcttatgaa

SEQ ID NO: 2644232 - DNA, 25 bp, Homo sapien
catcatcttcagcttatgaagagtc

SEQ ID NO: 2644233 - DNA, 25 bp, Homo sapien
aatctcggctgggagaggaatctcg

SEQ ID NO: 2644234 - DNA, 25 bp, Homo sapien
ccagacgatatggtgcactgtatag

SEQ ID NO: 2644235 - DNA, 25 bp, Homo sapien
gaatctcgtgaagaagaagggtccg

SEQ ID NO: 2644236 - DNA, 25 bp, Homo sapien
caatcggctgatgtggactggcaga

SEQ ID NO: 2644237 - DNA, 25 bp, Homo sapien
gcatgccggacttccttcttctaca

SEQ ID NO: 2644238 - DNA, 25 bp, Homo sapien
gagtgataagatctccagccttcag

SEQ ID NO: 2644239 - DNA, 25 bp, Homo sapien
aagtccatgcactggttctccattg

SEQ ID NO: 2644240 - DNA, 25 bp, Homo sapien
taacttctgtgtggacaagtccatg

SEQ ID NO: 2644241 - DNA, 25 bp, Homo sapien
catcagcggcttgacagatatggga

SEQ ID NO: 2644242 - DNA, 25 bp, Homo sapien
attttagtacactgaagctccccag

SEQ ID NO: 2644243 - DNA, 25 bp, Homo sapien
tttacggcttctcctatgcattggg

SEQ ID NO: 2644244 - DNA, 25 bp, Homo sapien
ggtaatcaagctatttgatggcccc

SEQ ID NO: 2644245 - DNA, 25 bp, Homo sapien
gaacgactgcttttgcatttccttc

SEQ ID NO: 2644246 - DNA, 25 bp, Homo sapien
aacgactgcttttgcatttccttct

SEQ ID NO: 2644247 - DNA, 25 bp, Homo sapien
cgaacgactgcttttgcatttcctt

SEQ ID NO: 2644248 - DNA, 25 bp, Homo sapien
gtttgtttcaccctcatggcctaga

SEQ ID NO: 2644249 - DNA, 25 bp, Homo sapien
gagagtccagtggaaaagcccatgc

SEQ ID NO: 2644250 - DNA, 25 bp, Homo sapien
gtttccgaggtcactgagagtccag

SEQ ID NO: 2644251 - DNA, 25 bp, Homo sapien
cacttgattgacacgtggcatggta

SEQ ID NO: 2644252 - DNA, 25 bp, Homo sapien
tcctttcaaggtcacagatggcccc

SEQ ID NO: 2644253 - DNA, 25 bp, Homo sapien
tatgccagccagtaggaaacctctt

SEQ ID NO: 2644254 - DNA, 25 bp, Homo sapien
gatggccccgattaccatgaaagta

SEQ ID NO: 2644255 - DNA, 25 bp, Homo sapien
ttctcacgcatgtgtaaataggcac

SEQ ID NO: 2644256 - DNA, 25 bp, Homo sapien
gggtagtagtgattgacaccttatt

SEQ ID NO: 2644257 - DNA, 25 bp, Homo sapien
attgatgtgttttcaaatggggtag

SEQ ID NO: 2644258 - DNA, 25 bp, Homo sapien
gtagtgattgacaccttattcccac

SEQ ID NO: 2644259 - DNA, 25 bp, Homo sapien
tagtagtgattgacaccttattccc

SEQ ID NO: 2644260 - DNA, 25 bp, Homo sapien
ttcttggatttcttgctccgcctca

SEQ ID NO: 2644261 - DNA, 25 bp, Homo sapien
tcttggatttcttgctccgcctcac

SEQ ID NO: 2644262 - DNA, 25 bp, Homo sapien
aggctgcttggctagctttttgaaa

SEQ ID NO: 2644263 - DNA, 25 bp, Homo sapien
aggagaaggctgcttggctagcttt

SEQ ID NO: 2644264 - DNA, 25 bp, Homo sapien
caagcaggagaaacttcggctggtg

SEQ ID NO: 2644265 - DNA, 25 bp, Homo sapien
aaacttcggctggtgtggagtaaag

SEQ ID NO: 2644266 - DNA, 25 bp, Homo sapien
gagtgggggaacctgggaggctctc

SEQ ID NO: 2644267 - DNA, 25 bp, Homo sapien
gtgggggaacctgggaggctctcac

SEQ ID NO: 2644268 - DNA, 25 bp, Homo sapien
atgagtgggggaacctgggaggctc

SEQ ID NO: 2644269 - DNA, 25 bp, Homo sapien
ctatgagtgggggaacctgggaggc

SEQ ID NO: 2644270 - DNA, 25 bp, Homo sapien
gagcggtagcttggtgttggagacc

SEQ ID NO: 2644271 - DNA, 25 bp, Homo sapien
agcggtagcttggtgttggagaccg

SEQ ID NO: 2644272 - DNA, 25 bp, Homo sapien
tggagcggtagcttggtgttggaga

SEQ ID NO: 2644273 - DNA, 25 bp, Homo sapien
ggtggagcggtagcttggtgttgga

SEQ ID NO: 2644274 - DNA, 25 bp, Homo sapien
tcactgccgtaagagggcgacagct

SEQ ID NO: 2644275 - DNA, 25 bp, Homo sapien
gcttgcgcgatcttggaattgccca

SEQ ID NO: 2644276 - DNA, 25 bp, Homo sapien
taacttttcacatcggagaagctcc

SEQ ID NO: 2644277 - DNA, 25 bp, Homo sapien
gctgctgacaaaagctcggctctca

SEQ ID NO: 2644278 - DNA, 25 bp, Homo sapien
gaaccaaggctccagcaggtaggat

SEQ ID NO: 2644279 - DNA, 25 bp, Homo sapien
gagcaatgtccagagtgccctcgat

SEQ ID NO: 2644280 - DNA, 25 bp, Homo sapien
tctttcagacgattccctcaggcct

SEQ ID NO: 2644281 - DNA, 25 bp, Homo sapien
cctgaggtccggacaggagagcaat

SEQ ID NO: 2644282 - DNA, 25 bp, Homo sapien
gccatctttgtggttcgttttccca

SEQ ID NO: 2644283 - DNA, 25 bp, Homo sapien
ctgggccatctttgtggttcgtttt

SEQ ID NO: 2644284 - DNA, 25 bp, Homo sapien
tgggccatctttgtggttcgttttc

SEQ ID NO: 2644285 - DNA, 25 bp, Homo sapien
acagggaattccagctgagtgcaga

SEQ ID NO: 2644286 - DNA, 25 bp, Homo sapien
aagcgcttcgggcttgggttccacg

SEQ ID NO: 2644287 - DNA, 25 bp, Homo sapien
ggaaactggagagcttttcactctt

SEQ ID NO: 2644288 - DNA, 25 bp, Homo sapien
ctctctgccagaagcgtggcttggg

SEQ ID NO: 2644289 - DNA, 25 bp, Homo sapien
tggagggcccgggtcagggccaggc

SEQ ID NO: 2644290 - DNA, 25 bp, Homo sapien
tcggggtgcttagtctttggagggc

SEQ ID NO: 2644291 - DNA, 25 bp, Homo sapien
cccgacacttggtttctgagaggag

SEQ ID NO: 2644292 - DNA, 25 bp, Homo sapien
tctgagaggagagggaccggtcggg

SEQ ID NO: 2644293 - DNA, 25 bp, Homo sapien
ctgctagagccaccgagggactgag

SEQ ID NO: 2644294 - DNA, 25 bp, Homo sapien
cccaccactggtgggttgtggcttg

SEQ ID NO: 2644295 - DNA, 25 bp, Homo sapien
cttggcgtctagaggagccctgtca

SEQ ID NO: 2644296 - DNA, 25 bp, Homo sapien
tggccaatcccatcgctggctttgt

SEQ ID NO: 2644297 - DNA, 25 bp, Homo sapien
gacagtttctggtccgctggctcac

SEQ ID NO: 2644298 - DNA, 25 bp, Homo sapien
ccttccgcccttctgtcggtgttgg

SEQ ID NO: 2644299 - DNA, 25 bp, Homo sapien
cacagggtggggcaatctttcacag

SEQ ID NO: 2644300 - DNA, 25 bp, Homo sapien
aatctttcacagtggatggtttggg

SEQ ID NO: 2644301 - DNA, 25 bp, Homo sapien
ttccgcccttctgtcggtgttggcg

SEQ ID NO: 2644302 - DNA, 25 bp, Homo sapien
aaaggccggcctcgagcttgtcgcc

SEQ ID NO: 2644303 - DNA, 25 bp, Homo sapien
aggccggcctcgagcttgtcgccct

SEQ ID NO: 2644304 - DNA, 25 bp, Homo sapien
ggaaaggccggcctcgagcttgtcg

SEQ ID NO: 2644305 - DNA, 25 bp, Homo sapien
aaggaaaggccggcctcgagcttgt

SEQ ID NO: 2644306 - DNA, 25 bp, Homo sapien
acccccgcggctggccgctccgcgc

SEQ ID NO: 2644307 - DNA, 25 bp, Homo sapien
cccacccccgcggctggccgctccg

SEQ ID NO: 2644308 - DNA, 25 bp, Homo sapien
cgctccgcgcctttcaaccggttct

SEQ ID NO: 2644309 - DNA, 25 bp, Homo sapien
tggccgctccgcgcctttcaaccgg

SEQ ID NO: 2644310 - DNA, 25 bp, Homo sapien
tgtgagggctgctacgcaaactctc

SEQ ID NO: 2644311 - DNA, 25 bp, Homo sapien
tggtttcccctacggtggcagtcac

SEQ ID NO: 2644312 - DNA, 25 bp, Homo sapien
gccgtggatcggaaagaactctgcc

SEQ ID NO: 2644313 - DNA, 25 bp, Homo sapien
gagcagctcagagacttttccggga

SEQ ID NO: 2644314 - DNA, 25 bp, Homo sapien
gacgcaatcagcagccaggtataga

SEQ ID NO: 2644315 - DNA, 25 bp, Homo sapien
taccggttacaactgggaaggcatc

SEQ ID NO: 2644316 - DNA, 25 bp, Homo sapien
cgtgtaatgaaaatggctagctcca

SEQ ID NO: 2644317 - DNA, 25 bp, Homo sapien
tttacaacgaaggacaactgagcag

SEQ ID NO: 2644318 - DNA, 25 bp, Homo sapien
cacagagactgaccaaatagaacac

SEQ ID NO: 2644319 - DNA, 25 bp, Homo sapien
tgtaaaccatgaactacctccccga

SEQ ID NO: 2644320 - DNA, 25 bp, Homo sapien
cgacagacttgtcccgatggctgaa

SEQ ID NO: 2644321 - DNA, 25 bp, Homo sapien
gagcacatcctacaatcacacagag

SEQ ID NO: 2644322 - DNA, 25 bp, Homo sapien
ctctggtcctcttgatagtcttgcc

SEQ ID NO: 2644323 - DNA, 25 bp, Homo sapien
ggtcctcttgatagtcttgccccat

SEQ ID NO: 2644324 - DNA, 25 bp, Homo sapien
ttaattcctatctctagttcatgaa

SEQ ID NO: 2644325 - DNA, 25 bp, Homo sapien
gttcatgaattctctggtcctcttg

SEQ ID NO: 2644326 - DNA, 25 bp, Homo sapien
agcttctgtggacaggatgtccaca

SEQ ID NO: 2644327 - DNA, 25 bp, Homo sapien
acatccatactaccgcttcatcttt

SEQ ID NO: 2644328 - DNA, 25 bp, Homo sapien
gcttctgtggacaggatgtccacat

SEQ ID NO: 2644329 - DNA, 25 bp, Homo sapien
catactaccgcttcatctttaaaag

SEQ ID NO: 2644330 - DNA, 25 bp, Homo sapien
ggcagcagctgcacatacatattct

SEQ ID NO: 2644331 - DNA, 25 bp, Homo sapien
tcgtccatattcatgggcactgagg

SEQ ID NO: 2644332 - DNA, 25 bp, Homo sapien
cacatacatattctctctgggtcgt

SEQ ID NO: 2644333 - DNA, 25 bp, Homo sapien
tctctgggtcgtccatattcatggg

SEQ ID NO: 2644334 - DNA, 25 bp, Homo sapien
tttcttcttcccccttcagctcatg

SEQ ID NO: 2644335 - DNA, 25 bp, Homo sapien
cttttcttcttcccccttcagctca

SEQ ID NO: 2644336 - DNA, 25 bp, Homo sapien
ccttccaagctgctttcctttcctc

SEQ ID NO: 2644337 - DNA, 25 bp, Homo sapien
tcttcttcccccttcagctcatgca

SEQ ID NO: 2644338 - DNA, 25 bp, Homo sapien
tagccagatgtggagttgccctggg

SEQ ID NO: 2644339 - DNA, 25 bp, Homo sapien
ccagatgtggagttgccctggggca

SEQ ID NO: 2644340 - DNA, 25 bp, Homo sapien
aatagccagatgtggagttgccctg

SEQ ID NO: 2644341 - DNA, 25 bp, Homo sapien
aagaagagtaagagccaggaatagc

SEQ ID NO: 2644342 - DNA, 25 bp, Homo sapien
ggcctgtcagacaagggctgcatac

SEQ ID NO: 2644343 - DNA, 25 bp, Homo sapien
gaggaaccatgagtcttggtggctt

SEQ ID NO: 2644344 - DNA, 25 bp, Homo sapien
caagggctgcatacaggaggaacca

SEQ ID NO: 2644345 - DNA, 25 bp, Homo sapien
taccacgtggcctgtcagacaaggg

SEQ ID NO: 2644346 - DNA, 25 bp, Homo sapien
aaaatgcttcaaacttcctcccact

SEQ ID NO: 2644347 - DNA, 25 bp, Homo sapien
ctaaaatgcttcaaacttcctccca

SEQ ID NO: 2644348 - DNA, 25 bp, Homo sapien
aatgcttcaaacttcctcccacttt

SEQ ID NO: 2644349 - DNA, 25 bp, Homo sapien
tgcttcaaacttcctcccactttct

SEQ ID NO: 2644350 - DNA, 25 bp, Homo sapien
tttgtttgccaagaagatgtgagac

SEQ ID NO: 2644351 - DNA, 25 bp, Homo sapien
agaaatcatggtgcccatcactccg

SEQ ID NO: 2644352 - DNA, 25 bp, Homo sapien
ccatcactccgccaaacttctttct

SEQ ID NO: 2644353 - DNA, 25 bp, Homo sapien
ggaatgcagaaatcatggtgcccat

SEQ ID NO: 2644354 - DNA, 25 bp, Homo sapien
ctgttgttgaacaccgaggaccctt

SEQ ID NO: 2644355 - DNA, 25 bp, Homo sapien
gagggctttatctgatagcctgaag

SEQ ID NO: 2644356 - DNA, 25 bp, Homo sapien
ctgaagaacacatcctctgttgtca

SEQ ID NO: 2644357 - DNA, 25 bp, Homo sapien
gttccctagcgagggaagcctgcca

SEQ ID NO: 2644358 - DNA, 25 bp, Homo sapien
gaatcacagatcttgggaatagatc

SEQ ID NO: 2644359 - DNA, 25 bp, Homo sapien
acgccagcaccttggatggttcagc

SEQ ID NO: 2644360 - DNA, 25 bp, Homo sapien
taaaagcattctgcacgacaagacc

SEQ ID NO: 2644361 - DNA, 25 bp, Homo sapien
tggttcagcgcagacagaatcacag

SEQ ID NO: 2644362 - DNA, 25 bp, Homo sapien
tccctcttaaagctgacatgacctg

SEQ ID NO: 2644363 - DNA, 25 bp, Homo sapien
cctcttaaagctgacatgacctggt

SEQ ID NO: 2644364 - DNA, 25 bp, Homo sapien
atgtccctcttaaagctgacatgac

SEQ ID NO: 2644365 - DNA, 25 bp, Homo sapien
tgtccctcttaaagctgacatgacc

SEQ ID NO: 2644366 - DNA, 25 bp, Homo sapien
tgagtctcccgcagcaaacgtttcc

SEQ ID NO: 2644367 - DNA, 25 bp, Homo sapien
tcctttgagtctcccgcagcaaacg

SEQ ID NO: 2644368 - DNA, 25 bp, Homo sapien
tagggtttggaatgccacccactct

SEQ ID NO: 2644369 - DNA, 25 bp, Homo sapien
agcccaatagggtttggaatgccac

SEQ ID NO: 2644370 - DNA, 25 bp, Homo sapien
gtaaacagtggaataatttagaatc

SEQ ID NO: 2644371 - DNA, 25 bp, Homo sapien
ggaaaagcacgcactccagagagga

SEQ ID NO: 2644372 - DNA, 25 bp, Homo sapien
taaaatcgtgagtcatccgccatcc

SEQ ID NO: 2644373 - DNA, 25 bp, Homo sapien
ctggaagtgtctcgtaaaatcgtga

SEQ ID NO: 2644374 - DNA, 25 bp, Homo sapien
gggtagccaggaagatgactcagtt

SEQ ID NO: 2644375 - DNA, 25 bp, Homo sapien
ttgggtagccaggaagatgactcag

SEQ ID NO: 2644376 - DNA, 25 bp, Homo sapien
tgttgggtagccaggaagatgactc

SEQ ID NO: 2644377 - DNA, 25 bp, Homo sapien
ctgttgggtagccaggaagatgact

SEQ ID NO: 2644378 - DNA, 25 bp, Homo sapien
gccagatggttcacaataattgatg

SEQ ID NO: 2644379 - DNA, 25 bp, Homo sapien
ccctttgccagatggttcacaataa

SEQ ID NO: 2644380 - DNA, 25 bp, Homo sapien
ttgcccctttgccagatggttcaca

SEQ ID NO: 2644381 - DNA, 25 bp, Homo sapien
tttgccagatggttcacaataattg

SEQ ID NO: 2644382 - DNA, 25 bp, Homo sapien
aggtcagaaagcgagagtttggtgg

SEQ ID NO: 2644383 - DNA, 25 bp, Homo sapien
gagaggctgataggttacaatcaca

SEQ ID NO: 2644384 - DNA, 25 bp, Homo sapien
tcagaaagcgagagtttggtggtgc

SEQ ID NO: 2644385 - DNA, 25 bp, Homo sapien
gtttctgcaaagtcaacaacagcct

SEQ ID NO: 2644386 - DNA, 25 bp, Homo sapien
ttgtggtgtgtgcatagggcagaat

SEQ ID NO: 2644387 - DNA, 25 bp, Homo sapien
gtgtgcatagggcagaatggctaac

SEQ ID NO: 2644388 - DNA, 25 bp, Homo sapien
ggtgtgtgcatagggcagaatggct

SEQ ID NO: 2644389 - DNA, 25 bp, Homo sapien
gtggtgtgtgcatagggcagaatgg

SEQ ID NO: 2644390 - DNA, 25 bp, Homo sapien
gctgtgtctagggcctcaacatctg

SEQ ID NO: 2644391 - DNA, 25 bp, Homo sapien
ctgctgtgtctagggcctcaacatc

SEQ ID NO: 2644392 - DNA, 25 bp, Homo sapien
tgctgtgtctagggcctcaacatct

SEQ ID NO: 2644393 - DNA, 25 bp, Homo sapien
gggaatgtgtgattccttttggaaa

SEQ ID NO: 2644394 - DNA, 25 bp, Homo sapien
gagtactgtgggagccaggcccact

SEQ ID NO: 2644395 - DNA, 25 bp, Homo sapien
ccttttggaaactggagtactgtgg

SEQ ID NO: 2644396 - DNA, 25 bp, Homo sapien
gcacaggaagggaatgtgtgattcc

SEQ ID NO: 2644397 - DNA, 25 bp, Homo sapien
tgaagactgtgaccgaggagtgaat

SEQ ID NO: 2644398 - DNA, 25 bp, Homo sapien
gtgaccgaggagtgaattcctgttc

SEQ ID NO: 2644399 - DNA, 25 bp, Homo sapien
ttcctggtgatcctgcattactttc

SEQ ID NO: 2644400 - DNA, 25 bp, Homo sapien
tcagactatgaagactgtgaccgag

SEQ ID NO: 2644401 - DNA, 25 bp, Homo sapien
aggtaggagactcaggggacatggc

SEQ ID NO: 2644402 - DNA, 25 bp, Homo sapien
tggttcttgggagttttccaaatgc

SEQ ID NO: 2644403 - DNA, 25 bp, Homo sapien
gggacatggctctgtttggttcttg

SEQ ID NO: 2644404 - DNA, 25 bp, Homo sapien
cagtaagcagatgaggtaggagact

SEQ ID NO: 2644405 - DNA, 25 bp, Homo sapien
tttcggcacagtccacaaaagtcca

SEQ ID NO: 2644406 - DNA, 25 bp, Homo sapien
ccttgcccacgagtactggttggtg

SEQ ID NO: 2644407 - DNA, 25 bp, Homo sapien
cacgagtactggttggtgtttttga

SEQ ID NO: 2644408 - DNA, 25 bp, Homo sapien
ctgaaaataactttcggcacagtcc

SEQ ID NO: 2644409 - DNA, 25 bp, Homo sapien
aagactggcaaagcttggagaatca

SEQ ID NO: 2644410 - DNA, 25 bp, Homo sapien
gaatcagtgctaaagtcctaaaggc

SEQ ID NO: 2644411 - DNA, 25 bp, Homo sapien
gatgagtcttgaaaggcatccagct

SEQ ID NO: 2644412 - DNA, 25 bp, Homo sapien
tcttaaacccagctggtatgtgtcc

SEQ ID NO: 2644413 - DNA, 25 bp, Homo sapien
aggtcatcaccccactgacctacag

SEQ ID NO: 2644414 - DNA, 25 bp, Homo sapien
gctgtcaaattgagacgtggtcctc

SEQ ID NO: 2644415 - DNA, 25 bp, Homo sapien
caaattgagacgtggtcctccctcc

SEQ ID NO: 2644416 - DNA, 25 bp, Homo sapien
tgtcaaattgagacgtggtcctccc

SEQ ID NO: 2644417 - DNA, 25 bp, Homo sapien
cttttgaaggatttatggggttctg

SEQ ID NO: 2644418 - DNA, 25 bp, Homo sapien
gactggcaccaatccaatggagaaa

SEQ ID NO: 2644419 - DNA, 25 bp, Homo sapien
ttctagtggtgcttgagagagccaa

SEQ ID NO: 2644420 - DNA, 25 bp, Homo sapien
tgcttcggtcaatgattctagtggt

SEQ ID NO: 2644421 - DNA, 25 bp, Homo sapien
taatgattctagtggtgcttcggtc

SEQ ID NO: 2644422 - DNA, 25 bp, Homo sapien
catttccctggtgagagtgcacgcc

SEQ ID NO: 2644423 - DNA, 25 bp, Homo sapien
tcttctggcctcttagcttgatggg

SEQ ID NO: 2644424 - DNA, 25 bp, Homo sapien
tgctccattatgctaaaagggtctc

SEQ ID NO: 2644425 - DNA, 25 bp, Homo sapien
catgtcccctaggatagagctggag

SEQ ID NO: 2644426 - DNA, 25 bp, Homo sapien
ggctacaggggtgttccaatgtctt

SEQ ID NO: 2644427 - DNA, 25 bp, Homo sapien
tgaaagaatctacagattcctctcc

SEQ ID NO: 2644428 - DNA, 25 bp, Homo sapien
tcatgtgaaagaatctacagattcc

SEQ ID NO: 2644429 - DNA, 25 bp, Homo sapien
aaaagagctactatggctacagggg

SEQ ID NO: 2644430 - DNA, 25 bp, Homo sapien
gcttggattgtcctccctaccgtca

SEQ ID NO: 2644431 - DNA, 25 bp, Homo sapien
ttggattgtcctccctaccgtcacc

SEQ ID NO: 2644432 - DNA, 25 bp, Homo sapien
tgcttggattgtcctccctaccgtc

SEQ ID NO: 2644433 - DNA, 25 bp, Homo sapien
ggattgtcctccctaccgtcaccat

SEQ ID NO: 2644434 - DNA, 25 bp, Homo sapien
gatcagaaaatcatccttttttccc

SEQ ID NO: 2644435 - DNA, 25 bp, Homo sapien
atcagaaaatcatccttttttccca

SEQ ID NO: 2644436 - DNA, 25 bp, Homo sapien
tttcttcatcttcacatttttgcat

SEQ ID NO: 2644437 - DNA, 25 bp, Homo sapien
acttttcttcatcttcacatttttg

SEQ ID NO: 2644438 - DNA, 25 bp, Homo sapien
ttttcttcatcttcacatttttgca

SEQ ID NO: 2644439 - DNA, 25 bp, Homo sapien
cttttcttcatcttcacatttttgc

SEQ ID NO: 2644440 - DNA, 25 bp, Homo sapien
tggacatcagtgagctaaacttgct

SEQ ID NO: 2644441 - DNA, 25 bp, Homo sapien
tttctttcaggatggcactgtagga

SEQ ID NO: 2644442 - DNA, 25 bp, Homo sapien
acagctgctggagtcatcatgagaa

SEQ ID NO: 2644443 - DNA, 25 bp, Homo sapien
ttgttcctcggtgtacctacttgtg

SEQ ID NO: 2644444 - DNA, 25 bp, Homo sapien
gagagttggaggacgtagggtgtgg

SEQ ID NO: 2644445 - DNA, 25 bp, Homo sapien
tactcagtaaattatctatattgag

SEQ ID NO: 2644446 - DNA, 25 bp, Homo sapien
gataatctaggtccaaccactccca

SEQ ID NO: 2644447 - DNA, 25 bp, Homo sapien
tctatattgagataatctaggtcca

SEQ ID NO: 2644448 - DNA, 25 bp, Homo sapien
tttctgttgaattcttagactatca

SEQ ID NO: 2644449 - DNA, 25 bp, Homo sapien
ttcttagactatcagagcaggtgcc

SEQ ID NO: 2644450 - DNA, 25 bp, Homo sapien
tgaattcttagactatcagagcagg

SEQ ID NO: 2644451 - DNA, 25 bp, Homo sapien
tgttgaattcttagactatcagagc

SEQ ID NO: 2644452 - DNA, 25 bp, Homo sapien
tgaagtgcttgcattgctaatgagg

SEQ ID NO: 2644453 - DNA, 25 bp, Homo sapien
tgctaatgagggctttccatgcaca

SEQ ID NO: 2644454 - DNA, 25 bp, Homo sapien
aatgagggctttccatgcacaatac

SEQ ID NO: 2644455 - DNA, 25 bp, Homo sapien
cacaatacagcaagaatccttcaaa

SEQ ID NO: 2644456 - DNA, 25 bp, Homo sapien
ggctctccatttccttgtgtgtcac

SEQ ID NO: 2644457 - DNA, 25 bp, Homo sapien
atggctctccatttccttgtgtgtc

SEQ ID NO: 2644458 - DNA, 25 bp, Homo sapien
gctctccatttccttgtgtgtcacc

SEQ ID NO: 2644459 - DNA, 25 bp, Homo sapien
tctccatttccttgtgtgtcaccat

SEQ ID NO: 2644460 - DNA, 25 bp, Homo sapien
ttgaccagtggacgctcaatccaca

SEQ ID NO: 2644461 - DNA, 25 bp, Homo sapien
atattgaccagtggacgctcaatcc

SEQ ID NO: 2644462 - DNA, 25 bp, Homo sapien
tagcaatggctcaaggtgttcccat

SEQ ID NO: 2644463 - DNA, 25 bp, Homo sapien
ctagcaatggctcaaggtgttccca

SEQ ID NO: 2644464 - DNA, 25 bp, Homo sapien
taacatgatgttgtgggatacatac

SEQ ID NO: 2644465 - DNA, 25 bp, Homo sapien
tattatcctagtccataggttgcct

SEQ ID NO: 2644466 - DNA, 25 bp, Homo sapien
gttactttttcatgacaagagcagc

SEQ ID NO: 2644467 - DNA, 25 bp, Homo sapien
tagtaactatagtcttcaccttgca

SEQ ID NO: 2644468 - DNA, 25 bp, Homo sapien
gtcattctgctcatcccatccctca

SEQ ID NO: 2644469 - DNA, 25 bp, Homo sapien
tgctcatcccatccctcattctgtt

SEQ ID NO: 2644470 - DNA, 25 bp, Homo sapien
cattctgctcatcccatccctcatt

SEQ ID NO: 2644471 - DNA, 25 bp, Homo sapien
aggtcattctgctcatcccatccct

SEQ ID NO: 2644472 - DNA, 25 bp, Homo sapien
ttaagcccttttagaggctcaggta

SEQ ID NO: 2644473 - DNA, 25 bp, Homo sapien
gaaccactcatcattactcaatttt

SEQ ID NO: 2644474 - DNA, 25 bp, Homo sapien
aaccataaaagttgttctaatgtca

SEQ ID NO: 2644475 - DNA, 25 bp, Homo sapien
ggtataatctcctcacatgtgaaaa

SEQ ID NO: 2644476 - DNA, 25 bp, Homo sapien
tagtttgatccaatcttatttattt

SEQ ID NO: 2644477 - DNA, 25 bp, Homo sapien
taggttgtttcccttgtgtgtagaa

SEQ ID NO: 2644478 - DNA, 25 bp, Homo sapien
tttagtttgatccaatcttatttat

SEQ ID NO: 2644479 - DNA, 25 bp, Homo sapien
aggttgtttcccttgtgtgtagaag

SEQ ID NO: 2644480 - DNA, 25 bp, Homo sapien
cagccactactatcatctggagtta

SEQ ID NO: 2644481 - DNA, 25 bp, Homo sapien
tgcagagcagccactactatcatct

SEQ ID NO: 2644482 - DNA, 25 bp, Homo sapien
tcagaagagacttgctgacacccag

SEQ ID NO: 2644483 - DNA, 25 bp, Homo sapien
gacacccagatgtgtgatgtatgtg

SEQ ID NO: 2644484 - DNA, 25 bp, Homo sapien
tgagccatattaagaggtaataccc

SEQ ID NO: 2644485 - DNA, 25 bp, Homo sapien
catattaagaggtaataccctcttt

SEQ ID NO: 2644486 - DNA, 25 bp, Homo sapien
gccatattaagaggtaataccctct

SEQ ID NO: 2644487 - DNA, 25 bp, Homo sapien
tatgagccatattaagaggtaatac

SEQ ID NO: 2644488 - DNA, 25 bp, Homo sapien
tgtgggcttccgtctgtggtttctt

SEQ ID NO: 2644489 - DNA, 25 bp, Homo sapien
ttcttttacacttgagccaagggga

SEQ ID NO: 2644490 - DNA, 25 bp, Homo sapien
ctgtgggcttccgtctgtggtttct

SEQ ID NO: 2644491 - DNA, 25 bp, Homo sapien
acacttgagccaaggggatctggaa

SEQ ID NO: 2644492 - DNA, 25 bp, Homo sapien
aacaaagacgcagctgtatgatcag

SEQ ID NO: 2644493 - DNA, 25 bp, Homo sapien
tttctgtaccaacaaagacgcagct

SEQ ID NO: 2644494 - DNA, 25 bp, Homo sapien
ccaacaaagacgcagctgtatgatc

SEQ ID NO: 2644495 - DNA, 25 bp, Homo sapien
gttttctgtaccaacaaagacgcag

SEQ ID NO: 2644496 - DNA, 25 bp, Homo sapien
taggattcatgtccagtataccagg

SEQ ID NO: 2644497 - DNA, 25 bp, Homo sapien
ctctttcgggaaaataggattcatg

SEQ ID NO: 2644498 - DNA, 25 bp, Homo sapien
gattcatgtccagtataccaggctt

SEQ ID NO: 2644499 - DNA, 25 bp, Homo sapien
aaataggattcatgtccagtatacc

SEQ ID NO: 2644500 - DNA, 25 bp, Homo sapien
cagcctatctgtaaatgcaagggcc

SEQ ID NO: 2644501 - DNA, 25 bp, Homo sapien
agtccgtgtgaggtactggccttca

SEQ ID NO: 2644502 - DNA, 25 bp, Homo sapien
gctccacggttgacagcacggactt

SEQ ID NO: 2644503 - DNA, 25 bp, Homo sapien
caccaggtatgtaagtggctttgca

SEQ ID NO: 2644504 - DNA, 25 bp, Homo sapien
caaggtctgcttcagttgagtaggt

SEQ ID NO: 2644505 - DNA, 25 bp, Homo sapien
cagttgagtaggtaaataacgcgtc

SEQ ID NO: 2644506 - DNA, 25 bp, Homo sapien
caccaaggtctgcttcagttgagta

SEQ ID NO: 2644507 - DNA, 25 bp, Homo sapien
gagtaggtaaataacgcgtctgaac

SEQ ID NO: 2644508 - DNA, 25 bp, Homo sapien
gattcccagagagaactgtagctgg

SEQ ID NO: 2644509 - DNA, 25 bp, Homo sapien
ttttactgcccatatactgcccttc

SEQ ID NO: 2644510 - DNA, 25 bp, Homo sapien
tcctagaaaatctaatggattccca

SEQ ID NO: 2644511 - DNA, 25 bp, Homo sapien
actgtagctggtgagacggttcttt

SEQ ID NO: 2644512 - DNA, 25 bp, Homo sapien
acatggggtgtctacaaaggcctac

SEQ ID NO: 2644513 - DNA, 25 bp, Homo sapien
ttttttcaaagcgatctggagtctt

SEQ ID NO: 2644514 - DNA, 25 bp, Homo sapien
ccacatggggtgtctacaaaggcct

SEQ ID NO: 2644515 - DNA, 25 bp, Homo sapien
agcgatctggagtcttttaaagttg

SEQ ID NO: 2644516 - DNA, 25 bp, Homo sapien
tttctttgatgcttataattggagt

SEQ ID NO: 2644517 - DNA, 25 bp, Homo sapien
tgcttataattggagtgtaaagagc

SEQ ID NO: 2644518 - DNA, 25 bp, Homo sapien
tgatgcttataattggagtgtaaag

SEQ ID NO: 2644519 - DNA, 25 bp, Homo sapien
ctttgatgcttataattggagtgta

SEQ ID NO: 2644520 - DNA, 25 bp, Homo sapien
taaggcagttgtctcctcagacact

SEQ ID NO: 2644521 - DNA, 25 bp, Homo sapien
ggcccatcatttcctactggcagga

SEQ ID NO: 2644522 - DNA, 25 bp, Homo sapien
tatttttaggcagcacagtcattgg

SEQ ID NO: 2644523 - DNA, 25 bp, Homo sapien
ttggctcactgacaatctaaggcag

SEQ ID NO: 2644524 - DNA, 25 bp, Homo sapien
tactgttggccatggaagcctgaac

SEQ ID NO: 2644525 - DNA, 25 bp, Homo sapien
gagggttggagtataaaagctgtac

SEQ ID NO: 2644526 - DNA, 25 bp, Homo sapien
ttaaagggcttcttgatggtagagg

SEQ ID NO: 2644527 - DNA, 25 bp, Homo sapien
caggattgtgctccaaacctagtct

SEQ ID NO: 2644528 - DNA, 25 bp, Homo sapien
tctctgccagcattgactaggcctg

SEQ ID NO: 2644529 - DNA, 25 bp, Homo sapien
tcccttcagtgtagggtttaggaga

SEQ ID NO: 2644530 - DNA, 25 bp, Homo sapien
ccagcattgactaggcctgtctggg

SEQ ID NO: 2644531 - DNA, 25 bp, Homo sapien
acactccacgtagacccattctctg

SEQ ID NO: 2644532 - DNA, 25 bp, Homo sapien
gatcatcatctgcaagtcagggtca

SEQ ID NO: 2644533 - DNA, 25 bp, Homo sapien
cagctgggaattgggcctgagaacc

SEQ ID NO: 2644534 - DNA, 25 bp, Homo sapien
ccctgagtgagagccagagtccaat

SEQ ID NO: 2644535 - DNA, 25 bp, Homo sapien
gagtccaataccacagggagaataa

SEQ ID NO: 2644536 - DNA, 25 bp, Homo sapien
ctgtgtgagtatggttagtctccat

SEQ ID NO: 2644537 - DNA, 25 bp, Homo sapien
tgcctgttacatgccctggatggta

SEQ ID NO: 2644538 - DNA, 25 bp, Homo sapien
ctgcctgttacatgccctggatggt

SEQ ID NO: 2644539 - DNA, 25 bp, Homo sapien
ctctgtgtgagtatggttagtctcc

SEQ ID NO: 2644540 - DNA, 25 bp, Homo sapien
tgaattactagaagacggtgggtcc

SEQ ID NO: 2644541 - DNA, 25 bp, Homo sapien
cacatactgcgtgcctcctctttcc

SEQ ID NO: 2644542 - DNA, 25 bp, Homo sapien
taaaaggcctagagcacacatactg

SEQ ID NO: 2644543 - DNA, 25 bp, Homo sapien
ctgaaaagatcagatagagttttac

SEQ ID NO: 2644544 - DNA, 25 bp, Homo sapien
ggagctggctggtccttcagtggaa

SEQ ID NO: 2644545 - DNA, 25 bp, Homo sapien
cttcttcctttttatgctcattttc

SEQ ID NO: 2644546 - DNA, 25 bp, Homo sapien
agctggctggtccttcagtggaacc

SEQ ID NO: 2644547 - DNA, 25 bp, Homo sapien
tggctggtccttcagtggaacccag

SEQ ID NO: 2644548 - DNA, 25 bp, Homo sapien
ttgaaaatggatccctgagccagtc

SEQ ID NO: 2644549 - DNA, 25 bp, Homo sapien
ttggcagttggctgtataatcacac

SEQ ID NO: 2644550 - DNA, 25 bp, Homo sapien
tgccaaatccgacattcatatccat

SEQ ID NO: 2644551 - DNA, 25 bp, Homo sapien
tcatatccatctggacatttgaaaa

SEQ ID NO: 2644552 - DNA, 25 bp, Homo sapien
tgcgcagtctcaaggtcaggatgac

SEQ ID NO: 2644553 - DNA, 25 bp, Homo sapien
tcaggatgacccacagtatcagaca

SEQ ID NO: 2644554 - DNA, 25 bp, Homo sapien
gacacactctgaatctgccagggca

SEQ ID NO: 2644555 - DNA, 25 bp, Homo sapien
tatcagacagcttctgccaagtcag

SEQ ID NO: 2644556 - DNA, 25 bp, Homo sapien
gcttgaacgcacatgcaccacttgg

SEQ ID NO: 2644557 - DNA, 25 bp, Homo sapien
ggagtagatgggaatgcctcccttg

SEQ ID NO: 2644558 - DNA, 25 bp, Homo sapien
tctgagcaatagtctggctatggga

SEQ ID NO: 2644559 - DNA, 25 bp, Homo sapien
taggactgattgacaagctcccatg

SEQ ID NO: 2644560 - DNA, 25 bp, Homo sapien
tctggatttggaaagaggcgtcagt

SEQ ID NO: 2644561 - DNA, 25 bp, Homo sapien
ggatttggaaagaggcgtcagtttc

SEQ ID NO: 2644562 - DNA, 25 bp, Homo sapien
aaaggcacatatggccctggttggc

SEQ ID NO: 2644563 - DNA, 25 bp, Homo sapien
ctctatcttgctgctaggaattttc

SEQ ID NO: 2644564 - DNA, 25 bp, Homo sapien
gcacagctgagctacctgactgtaa

SEQ ID NO: 2644565 - DNA, 25 bp, Homo sapien
ctgagggtgctcaccacatggcagg

SEQ ID NO: 2644566 - DNA, 25 bp, Homo sapien
tacctgactgtaattcaccatctcc

SEQ ID NO: 2644567 - DNA, 25 bp, Homo sapien
gagctacctgactgtaattcaccat

SEQ ID NO: 2644568 - DNA, 25 bp, Homo sapien
tttcccgagggcaagtcccatattg

SEQ ID NO: 2644569 - DNA, 25 bp, Homo sapien
taggcccaccaggtatgatggaacc

SEQ ID NO: 2644570 - DNA, 25 bp, Homo sapien
caagatggtgcagtttaatggaagc

SEQ ID NO: 2644571 - DNA, 25 bp, Homo sapien
tcaggatttgccattaggcccacca

SEQ ID NO: 2644572 - DNA, 25 bp, Homo sapien
taggactcgtgacttatcataggat

SEQ ID NO: 2644573 - DNA, 25 bp, Homo sapien
agtatgctgggttccgtggcattca

SEQ ID NO: 2644574 - DNA, 25 bp, Homo sapien
tgagaagtggctaggttattcccac

SEQ ID NO: 2644575 - DNA, 25 bp, Homo sapien
aaagcaggccccattggagcactat

SEQ ID NO: 2644576 - DNA, 25 bp, Homo sapien
gctattccccagcatagcaaaggag

SEQ ID NO: 2644577 - DNA, 25 bp, Homo sapien
tgccaccgtggaacttatctgcctg

SEQ ID NO: 2644578 - DNA, 25 bp, Homo sapien
cccttgagggaaatagttcactgtc

SEQ ID NO: 2644579 - DNA, 25 bp, Homo sapien
tgaccctagaccaagcaatgccagt

SEQ ID NO: 2644580 - DNA, 25 bp, Homo sapien
catcagcatgacttttcacttcagc

SEQ ID NO: 2644581 - DNA, 25 bp, Homo sapien
gggcggtcatcagcatgacttttca

SEQ ID NO: 2644582 - DNA, 25 bp, Homo sapien
tgcagggcggtcatcagcatgactt

SEQ ID NO: 2644583 - DNA, 25 bp, Homo sapien
cagtgcagggcggtcatcagcatga

SEQ ID NO: 2644584 - DNA, 25 bp, Homo sapien
tcatggacacatatgctcaaatgtc

SEQ ID NO: 2644585 - DNA, 25 bp, Homo sapien
ggccatgtgccccttattactctta

SEQ ID NO: 2644586 - DNA, 25 bp, Homo sapien
gcttcccaaactcagatacaaattc

SEQ ID NO: 2644587 - DNA, 25 bp, Homo sapien
taaccggcggcctcagggtatttgc

SEQ ID NO: 2644588 - DNA, 25 bp, Homo sapien
gaaggccaggccatgcgtatcttgt

SEQ ID NO: 2644589 - DNA, 25 bp, Homo sapien
tctcaacttggaaggccaggccatg

SEQ ID NO: 2644590 - DNA, 25 bp, Homo sapien
gtactgccagcaattgctctcaact

SEQ ID NO: 2644591 - DNA, 25 bp, Homo sapien
tcttgtccgtggagtgtcggtgcca

SEQ ID NO: 2644592 - DNA, 25 bp, Homo sapien
catcccattgcttaggaatcaagga

SEQ ID NO: 2644593 - DNA, 25 bp, Homo sapien
tctgctcttgtggtctataattgtc

SEQ ID NO: 2644594 - DNA, 25 bp, Homo sapien
tataattgtcatcccattgcttagg

SEQ ID NO: 2644595 - DNA, 25 bp, Homo sapien
aaggatgcatccatgcagggaccca

SEQ ID NO: 2644596 - DNA, 25 bp, Homo sapien
gctttggccagtaaccccgaagctc

SEQ ID NO: 2644597 - DNA, 25 bp, Homo sapien
caagaacttaaccacagcctcacag

SEQ ID NO: 2644598 - DNA, 25 bp, Homo sapien
agagaagggtgacagtgttcaccaa

SEQ ID NO: 2644599 - DNA, 25 bp, Homo sapien
caatgcttgctttctaagagaaggg

SEQ ID NO: 2644600 - DNA, 25 bp, Homo sapien
acgcccggccagtttcttttgctgt

SEQ ID NO: 2644601 - DNA, 25 bp, Homo sapien
cacgcccggccagtttcttttgctg

SEQ ID NO: 2644602 - DNA, 25 bp, Homo sapien
cctcagtaataagtgcagcatccat

SEQ ID NO: 2644603 - DNA, 25 bp, Homo sapien
gcatgactcacgataacaactgcag

SEQ ID NO: 2644604 - DNA, 25 bp, Homo sapien
tgattcttaccactctattacagcc

SEQ ID NO: 2644605 - DNA, 25 bp, Homo sapien
ttgtacgatgccaaagaacagcttt

SEQ ID NO: 2644606 - DNA, 25 bp, Homo sapien
gataccaccgtggatcagtcatatg

SEQ ID NO: 2644607 - DNA, 25 bp, Homo sapien
gaccactggcagtccctgatatgct

SEQ ID NO: 2644608 - DNA, 25 bp, Homo sapien
tcccagtccaaaagccagaggtctg

SEQ ID NO: 2644609 - DNA, 25 bp, Homo sapien
tgggtcagtaccacgtagtctctgg

SEQ ID NO: 2644610 - DNA, 25 bp, Homo sapien
gatccaagaagctacacaagaacca

SEQ ID NO: 2644611 - DNA, 25 bp, Homo sapien
taaggaaacgaccaacatgagaagg

SEQ ID NO: 2644612 - DNA, 25 bp, Homo sapien
aatatggaaactacaatgcccagtg

SEQ ID NO: 2644613 - DNA, 25 bp, Homo sapien
taaaaagagtgtccatgagctgtga

SEQ ID NO: 2644614 - DNA, 25 bp, Homo sapien
gtggatgatagtgatgttccttact

SEQ ID NO: 2644615 - DNA, 25 bp, Homo sapien
tagctacccgtgatgtttccttgtc

SEQ ID NO: 2644616 - DNA, 25 bp, Homo sapien
ccagaggtggccatttaacttgtca

SEQ ID NO: 2644617 - DNA, 25 bp, Homo sapien
actgtggattagatggccagaggtg

SEQ ID NO: 2644618 - DNA, 25 bp, Homo sapien
actcctactctgatcacctcgttag

SEQ ID NO: 2644619 - DNA, 25 bp, Homo sapien
cagatgcagtaatgaatgcatgctg

SEQ ID NO: 2644620 - DNA, 25 bp, Homo sapien
ttccatcagatgcagtaatgaatgc

SEQ ID NO: 2644621 - DNA, 25 bp, Homo sapien
tgtgcttccatcagatgcagtaatg

SEQ ID NO: 2644622 - DNA, 25 bp, Homo sapien
catcagatgcagtaatgaatgcatg

SEQ ID NO: 2644623 - DNA, 25 bp, Homo sapien
aattggactgtttgtaacacacaaa

SEQ ID NO: 2644624 - DNA, 25 bp, Homo sapien
caaaaattagttagatcgaatgaag

SEQ ID NO: 2644625 - DNA, 25 bp, Homo sapien
gagtagggattgttagtgagtacaa

SEQ ID NO: 2644626 - DNA, 25 bp, Homo sapien
ctatgtacccacaaatattagacac

SEQ ID NO: 2644627 - DNA, 25 bp, Homo sapien
atgcaaatactgagaccagcatggc

SEQ ID NO: 2644628 - DNA, 25 bp, Homo sapien
gaagaggattgtgtgcaatacagcc

SEQ ID NO: 2644629 - DNA, 25 bp, Homo sapien
ccatgcaaatactgagaccagcatg

SEQ ID NO: 2644630 - DNA, 25 bp, Homo sapien
ttgtgtgcaatacagccattctgag

SEQ ID NO: 2644631 - DNA, 25 bp, Homo sapien
tcagcctcttcacacggctcagctg

SEQ ID NO: 2644632 - DNA, 25 bp, Homo sapien
cccttaatgttgaatttggtgtggt

SEQ ID NO: 2644633 - DNA, 25 bp, Homo sapien
ttggtgtggtgatttcaacagactc

SEQ ID NO: 2644634 - DNA, 25 bp, Homo sapien
gtggccacgccgctgtcagcctctt

SEQ ID NO: 2644635 - DNA, 25 bp, Homo sapien
tcagcacgttggctgagcagagcag

SEQ ID NO: 2644636 - DNA, 25 bp, Homo sapien
ggttcattctcacgcacatcttgat

SEQ ID NO: 2644637 - DNA, 25 bp, Homo sapien
cttgatatgtaactgaagttgttgc

SEQ ID NO: 2644638 - DNA, 25 bp, Homo sapien
ggatatttcatgacaacctgtttgt

SEQ ID NO: 2644639 - DNA, 25 bp, Homo sapien
gctttgctgaaccatttaacaccca

SEQ ID NO: 2644640 - DNA, 25 bp, Homo sapien
ttcaaagcacaccaactgctctggc

SEQ ID NO: 2644641 - DNA, 25 bp, Homo sapien
acacccacttgcatctcagaaagtt

SEQ ID NO: 2644642 - DNA, 25 bp, Homo sapien
aagcacaccaactgctctggcttgg

SEQ ID NO: 2644643 - DNA, 25 bp, Homo sapien
cactggttacttggtctgggctcat

SEQ ID NO: 2644644 - DNA, 25 bp, Homo sapien
tgtcaagcagcggtcaagttgtacc

SEQ ID NO: 2644645 - DNA, 25 bp, Homo sapien
tgtttgcctgccatactgacaccag

SEQ ID NO: 2644646 - DNA, 25 bp, Homo sapien
tgaatcgctgtaagtggatgagcct

SEQ ID NO: 2644647 - DNA, 25 bp, Homo sapien
tcctctccacgtgtaagccttctta

SEQ ID NO: 2644648 - DNA, 25 bp, Homo sapien
tggtaggaggatggtcatgcctttc

SEQ ID NO: 2644649 - DNA, 25 bp, Homo sapien
catgtcctaggtcaccaaaggtgtc

SEQ ID NO: 2644650 - DNA, 25 bp, Homo sapien
tcttgctcattctacagtccactga

SEQ ID NO: 2644651 - DNA, 25 bp, Homo sapien
caggcggtcatgttagcacagatca

SEQ ID NO: 2644652 - DNA, 25 bp, Homo sapien
gggatttaagaacctagccacacat

SEQ ID NO: 2644653 - DNA, 25 bp, Homo sapien
gcacttggtaagaggtgaagctatc

SEQ ID NO: 2644654 - DNA, 25 bp, Homo sapien
tatggtttggtgactccaagctttc

SEQ ID NO: 2644655 - DNA, 25 bp, Homo sapien
tgcttaaagcactgacgggatccca

SEQ ID NO: 2644656 - DNA, 25 bp, Homo sapien
gttgtccaattaagctccacgtgtg

SEQ ID NO: 2644657 - DNA, 25 bp, Homo sapien
gaaaaggcttcaggcggtagtacaa

SEQ ID NO: 2644658 - DNA, 25 bp, Homo sapien
tccagacggcattgatggagcatcc

SEQ ID NO: 2644659 - DNA, 25 bp, Homo sapien
tccaaaagccccttacaatactcag

SEQ ID NO: 2644660 - DNA, 25 bp, Homo sapien
atccaaaagccccttacaatactca

SEQ ID NO: 2644661 - DNA, 25 bp, Homo sapien
cactctctgagtaaaagtctctatc

SEQ ID NO: 2644662 - DNA, 25 bp, Homo sapien
tctgagtaaaagtctctatcttttc

SEQ ID NO: 2644663 - DNA, 25 bp, Homo sapien
ctttgccccagttgtaggaggtgat

SEQ ID NO: 2644664 - DNA, 25 bp, Homo sapien
tcttgcacatccttggaggaacagt

SEQ ID NO: 2644665 - DNA, 25 bp, Homo sapien
tatttcctgcctatggtcttgcaca

SEQ ID NO: 2644666 - DNA, 25 bp, Homo sapien
gctttgcctggcaaaacatgatgga

SEQ ID NO: 2644667 - DNA, 25 bp, Homo sapien
gttccctttgccacttctgtcagtg

SEQ ID NO: 2644668 - DNA, 25 bp, Homo sapien
gattaagtgtggatccttgtttgca

SEQ ID NO: 2644669 - DNA, 25 bp, Homo sapien
aaggagagctcacagcactgggatg

SEQ ID NO: 2644670 - DNA, 25 bp, Homo sapien
cacctgctgattaagtgtggatcct

SEQ ID NO: 2644671 - DNA, 25 bp, Homo sapien
cagaactagacttgtcaatatttgg

SEQ ID NO: 2644672 - DNA, 25 bp, Homo sapien
agtcttccagataatggggacacca

SEQ ID NO: 2644673 - DNA, 25 bp, Homo sapien
aagcccaagtcttccagataatggg

SEQ ID NO: 2644674 - DNA, 25 bp, Homo sapien
cccaagtcttccagataatggggac

SEQ ID NO: 2644675 - DNA, 25 bp, Homo sapien
caagtcttccagataatggggacac

SEQ ID NO: 2644676 - DNA, 25 bp, Homo sapien
attagaacatcctttcagcaccctg

SEQ ID NO: 2644677 - DNA, 25 bp, Homo sapien
tttcagcaccctggtgtgagggccc

SEQ ID NO: 2644678 - DNA, 25 bp, Homo sapien
ctttcagcaccctggtgtgagggcc

SEQ ID NO: 2644679 - DNA, 25 bp, Homo sapien
taaaaaggccaaggacaatggcagg

SEQ ID NO: 2644680 - DNA, 25 bp, Homo sapien
aggacaatggcagggccttccgcat

SEQ ID NO: 2644681 - DNA, 25 bp, Homo sapien
ctgacagctctctggtttgcacctg

SEQ ID NO: 2644682 - DNA, 25 bp, Homo sapien
gcacctgggtttctgataaaaaggc

SEQ ID NO: 2644683 - DNA, 25 bp, Homo sapien
taagtgtgctctgaaagtgaagtct

SEQ ID NO: 2644684 - DNA, 25 bp, Homo sapien
cttgagagaggatcccaggtagtag

SEQ ID NO: 2644685 - DNA, 25 bp, Homo sapien
tcaaggcaagcctgttgaccctctg

SEQ ID NO: 2644686 - DNA, 25 bp, Homo sapien
cttggagaatgggaaggctgcttat

SEQ ID NO: 2644687 - DNA, 25 bp, Homo sapien
gggaatggggtacatttgcagaaaa

SEQ ID NO: 2644688 - DNA, 25 bp, Homo sapien
tcaagcaattctcgcacaggggaat

SEQ ID NO: 2644689 - DNA, 25 bp, Homo sapien
cagaaaacttttctatttgcggcat

SEQ ID NO: 2644690 - DNA, 25 bp, Homo sapien
ttgcagaaaacttttctatttgcgg

SEQ ID NO: 2644691 - DNA, 25 bp, Homo sapien
ttccctttgtaagttctcacagccg

SEQ ID NO: 2644692 - DNA, 25 bp, Homo sapien
tacttctatggtgactctgaccttc

SEQ ID NO: 2644693 - DNA, 25 bp, Homo sapien
ctttgtaagttctcacagccgggct

SEQ ID NO: 2644694 - DNA, 25 bp, Homo sapien
gtaagttctcacagccgggctaaat

SEQ ID NO: 2644695 - DNA, 25 bp, Homo sapien
gggaacctgaggttgattagctttg

SEQ ID NO: 2644696 - DNA, 25 bp, Homo sapien
ggttgattagctttgaggcttcgga

SEQ ID NO: 2644697 - DNA, 25 bp, Homo sapien
gcttcggagggctcttcttgctgct

SEQ ID NO: 2644698 - DNA, 25 bp, Homo sapien
tagctttgaggcttcggagggctct

SEQ ID NO: 2644699 - DNA, 25 bp, Homo sapien
ctgcagcatgattactgtatgaatg

SEQ ID NO: 2644700 - DNA, 25 bp, Homo sapien
gctgcagcatgtgatggtaaatatt

SEQ ID NO: 2644701 - DNA, 25 bp, Homo sapien
aacagacgataactttattggagat

SEQ ID NO: 2644702 - DNA, 25 bp, Homo sapien
tttattggagatttacttggctaca

SEQ ID NO: 2644703 - DNA, 25 bp, Homo sapien
cctggagtttcagccccacacagaa

SEQ ID NO: 2644704 - DNA, 25 bp, Homo sapien
ctacacccttgcagctggaatcctt

SEQ ID NO: 2644705 - DNA, 25 bp, Homo sapien
taggcgttacctggagtttcagccc

SEQ ID NO: 2644706 - DNA, 25 bp, Homo sapien
ctggaatccttaggcgttacctgga

SEQ ID NO: 2644707 - DNA, 25 bp, Homo sapien
ctatccgactgactctatccctgag

SEQ ID NO: 2644708 - DNA, 25 bp, Homo sapien
cccctctgttgctactaagccaaca

SEQ ID NO: 2644709 - DNA, 25 bp, Homo sapien
agacattttttagctgggtccattt

SEQ ID NO: 2644710 - DNA, 25 bp, Homo sapien
gccaacatgttcctatccgactgac

SEQ ID NO: 2644711 - DNA, 25 bp, Homo sapien
gcctatattgatcctttcatctgtc

SEQ ID NO: 2644712 - DNA, 25 bp, Homo sapien
gctgcctatattgatcctttcatct

SEQ ID NO: 2644713 - DNA, 25 bp, Homo sapien
tgcctatattgatcctttcatctgt

SEQ ID NO: 2644714 - DNA, 25 bp, Homo sapien
tgctgcctatattgatcctttcatc

SEQ ID NO: 2644715 - DNA, 25 bp, Homo sapien
tctggaactgtgtagacacatcagc

SEQ ID NO: 2644716 - DNA, 25 bp, Homo sapien
ctttctggaactgtgtagacacatc

SEQ ID NO: 2644717 - DNA, 25 bp, Homo sapien
tctttctggaactgtgtagacacat

SEQ ID NO: 2644718 - DNA, 25 bp, Homo sapien
ctctgtggtctaattggctattggt

SEQ ID NO: 2644719 - DNA, 25 bp, Homo sapien
attggctattggtaaagtggtccct

SEQ ID NO: 2644720 - DNA, 25 bp, Homo sapien
tgaacaggacaagccataggcatct

SEQ ID NO: 2644721 - DNA, 25 bp, Homo sapien
acaggacaagccataggcatctggc

SEQ ID NO: 2644722 - DNA, 25 bp, Homo sapien
gagtgtagagggttttagcaccatg

SEQ ID NO: 2644723 - DNA, 25 bp, Homo sapien
tgtagagggttttagcaccatgtac

SEQ ID NO: 2644724 - DNA, 25 bp, Homo sapien
gtgtagagggttttagcaccatgta

SEQ ID NO: 2644725 - DNA, 25 bp, Homo sapien
agtgtagagggttttagcaccatgt

SEQ ID NO: 2644726 - DNA, 25 bp, Homo sapien
gctaaacagcagtttgcatgcaaat

SEQ ID NO: 2644727 - DNA, 25 bp, Homo sapien
gatgatgctccttatcacatcgtgg

SEQ ID NO: 2644728 - DNA, 25 bp, Homo sapien
gcaaatgcaaggcatcttctagcca

SEQ ID NO: 2644729 - DNA, 25 bp, Homo sapien
ctagttgagatgcaatgatgggaac

SEQ ID NO: 2644730 - DNA, 25 bp, Homo sapien
ctgaggtactccaggacggctactc

SEQ ID NO: 2644731 - DNA, 25 bp, Homo sapien
tggttttcaggggtcaatgagtcct

SEQ ID NO: 2644732 - DNA, 25 bp, Homo sapien
cacccctgcaggatgatggttttca

SEQ ID NO: 2644733 - DNA, 25 bp, Homo sapien
ctctgtatagagtgggggtcacccc

SEQ ID NO: 2644734 - DNA, 25 bp, Homo sapien
ggaaagctggcacggtgggctgtga

SEQ ID NO: 2644735 - DNA, 25 bp, Homo sapien
taattcacggatgtctttgttggcc

SEQ ID NO: 2644736 - DNA, 25 bp, Homo sapien
gggctgtgacgataattcacggatg

SEQ ID NO: 2644737 - DNA, 25 bp, Homo sapien
tgttggccagcgctctaagaaagaa

SEQ ID NO: 2644738 - DNA, 25 bp, Homo sapien
ggatgagtaggaattagcaaaacaa

SEQ ID NO: 2644739 - DNA, 25 bp, Homo sapien
tttaacttgttggggatgagtagga

SEQ ID NO: 2644740 - DNA, 25 bp, Homo sapien
tgagtaggaattagcaaaacaaaca

SEQ ID NO: 2644741 - DNA, 25 bp, Homo sapien
taacttgttggggatgagtaggaat

SEQ ID NO: 2644742 - DNA, 25 bp, Homo sapien
cagggtggacttctttgacgcattg

SEQ ID NO: 2644743 - DNA, 25 bp, Homo sapien
ccccaagattagatgttttgctgac

SEQ ID NO: 2644744 - DNA, 25 bp, Homo sapien
gctgactgctttgggccgctatcag

SEQ ID NO: 2644745 - DNA, 25 bp, Homo sapien
ttgacgcattgtggaaagactgtgt

SEQ ID NO: 2644746 - DNA, 25 bp, Homo sapien
agaatcccattttgtggttggtgat

SEQ ID NO: 2644747 - DNA, 25 bp, Homo sapien
gaatcccattttgtggttggtgatg

SEQ ID NO: 2644748 - DNA, 25 bp, Homo sapien
gcatgacccgtagcacgggcgtcgt

SEQ ID NO: 2644749 - DNA, 25 bp, Homo sapien
tccatggcagagatgcggaaccttc

SEQ ID NO: 2644750 - DNA, 25 bp, Homo sapien
gtcggctcttgagttccccattcca

SEQ ID NO: 2644751 - DNA, 25 bp, Homo sapien
tgcggaaccttcctagttggccttc

SEQ ID NO: 2644752 - DNA, 25 bp, Homo sapien
ccttcttggggtttaattatgctgt

SEQ ID NO: 2644753 - DNA, 25 bp, Homo sapien
tccttcttggggtttaattatgctg

SEQ ID NO: 2644754 - DNA, 25 bp, Homo sapien
gaagtgcccacatggcgtgtctgcc

SEQ ID NO: 2644755 - DNA, 25 bp, Homo sapien
ggtctgcacatgacgctccgatttt

SEQ ID NO: 2644756 - DNA, 25 bp, Homo sapien
ctccgattttcccagcagacctgag

SEQ ID NO: 2644757 - DNA, 25 bp, Homo sapien
cactgagctgccatttaactgaagg

SEQ ID NO: 2644758 - DNA, 25 bp, Homo sapien
tctttacacgcagtcctcttgcgca

SEQ ID NO: 2644759 - DNA, 25 bp, Homo sapien
tttctttacacgcagtcctcttgcg

SEQ ID NO: 2644760 - DNA, 25 bp, Homo sapien
ctttctttacacgcagtcctcttgc

SEQ ID NO: 2644761 - DNA, 25 bp, Homo sapien
ttctttacacgcagtcctcttgcgc

SEQ ID NO: 2644762 - DNA, 25 bp, Homo sapien
ctgtgcattcagcatgcagattccc

SEQ ID NO: 2644763 - DNA, 25 bp, Homo sapien
tgcattcagcatgcagattcccagg

SEQ ID NO: 2644764 - DNA, 25 bp, Homo sapien
tgctgcgttcctgtgcattcagcat

SEQ ID NO: 2644765 - DNA, 25 bp, Homo sapien
gctgcgttcctgtgcattcagcatg

SEQ ID NO: 2644766 - DNA, 25 bp, Homo sapien
gcttaaaggtgtttgtgttgccaga

SEQ ID NO: 2644767 - DNA, 25 bp, Homo sapien
ttgtgcttaaaggtgtttgtgttgc

SEQ ID NO: 2644768 - DNA, 25 bp, Homo sapien
tgcttaaaggtgtttgtgttgccag

SEQ ID NO: 2644769 - DNA, 25 bp, Homo sapien
gtgcttaaaggtgtttgtgttgcca

SEQ ID NO: 2644770 - DNA, 25 bp, Homo sapien
tgtcaagtttgtcgacttcatatgc

SEQ ID NO: 2644771 - DNA, 25 bp, Homo sapien
agatgtcaagtttgtcgacttcata

SEQ ID NO: 2644772 - DNA, 25 bp, Homo sapien
tgaaggactgtagagctggtagctt

SEQ ID NO: 2644773 - DNA, 25 bp, Homo sapien
gttcttgagaactctctagggtctt

SEQ ID NO: 2644774 - DNA, 25 bp, Homo sapien
ggtgtcagacttatagtcctgaaga

SEQ ID NO: 2644775 - DNA, 25 bp, Homo sapien
gggaggtgtcagacttatagtcctg

SEQ ID NO: 2644776 - DNA, 25 bp, Homo sapien
gtcagacttatagtcctgaagatag

SEQ ID NO: 2644777 - DNA, 25 bp, Homo sapien
cagacttatagtcctgaagataggg

SEQ ID NO: 2644778 - DNA, 25 bp, Homo sapien
ctctctctcatcatcagggagtgga

SEQ ID NO: 2644779 - DNA, 25 bp, Homo sapien
tattttgcctccatcttgcttttca

SEQ ID NO: 2644780 - DNA, 25 bp, Homo sapien
catcagggagtggaatgtgcctcac

SEQ ID NO: 2644781 - DNA, 25 bp, Homo sapien
tctccctgactttctattttgcctc

SEQ ID NO: 2644782 - DNA, 25 bp, Homo sapien
tcaagtgcatggctctcagacatca

SEQ ID NO: 2644783 - DNA, 25 bp, Homo sapien
tcaagaccatgttgcagggagactg

SEQ ID NO: 2644784 - DNA, 25 bp, Homo sapien
acggccaggacactgccggctttca

SEQ ID NO: 2644785 - DNA, 25 bp, Homo sapien
tctcttctgaaggtatgtggtctgt

SEQ ID NO: 2644786 - DNA, 25 bp, Homo sapien
ctgatgcctgggcaatctggaatcc

SEQ ID NO: 2644787 - DNA, 25 bp, Homo sapien
tcgataggatgagtattttccctct

SEQ ID NO: 2644788 - DNA, 25 bp, Homo sapien
gcaatctggaatcccgtggagttct

SEQ ID NO: 2644789 - DNA, 25 bp, Homo sapien
ctctcgataggatgagtattttccc

SEQ ID NO: 2644790 - DNA, 25 bp, Homo sapien
gatctttaagaccatgggattgaag

SEQ ID NO: 2644791 - DNA, 25 bp, Homo sapien
tggatctttaagaccatgggattga

SEQ ID NO: 2644792 - DNA, 25 bp, Homo sapien
aaaatggatctttaagaccatggga

SEQ ID NO: 2644793 - DNA, 25 bp, Homo sapien
ctttaagaccatgggattgaagttt

SEQ ID NO: 2644794 - DNA, 25 bp, Homo sapien
tgtgcgtgcactcgtctccatacct

SEQ ID NO: 2644795 - DNA, 25 bp, Homo sapien
cattctgcagataagggaagtactt

SEQ ID NO: 2644796 - DNA, 25 bp, Homo sapien
tttgtgatctggcttctggcccgcc

SEQ ID NO: 2644797 - DNA, 25 bp, Homo sapien
tacttggagctcttcaggtgtgctg

SEQ ID NO: 2644798 - DNA, 25 bp, Homo sapien
tgtggtggagaccttatctcgagct

SEQ ID NO: 2644799 - DNA, 25 bp, Homo sapien
tggtggagaccttatctcgagctgt

SEQ ID NO: 2644800 - DNA, 25 bp, Homo sapien
gtggagaccttatctcgagctgttg

SEQ ID NO: 2644801 - DNA, 25 bp, Homo sapien
tgtgtggtggagaccttatctcgag

SEQ ID NO: 2644802 - DNA, 25 bp, Homo sapien
gacagaaggtatagagattgtcccc

SEQ ID NO: 2644803 - DNA, 25 bp, Homo sapien
tcttgagatacagttgtgccaggat

SEQ ID NO: 2644804 - DNA, 25 bp, Homo sapien
tacagttgtgccaggatgaaatctt

SEQ ID NO: 2644805 - DNA, 25 bp, Homo sapien
gatgaaatcttaagccactggctgt

SEQ ID NO: 2644806 - DNA, 25 bp, Homo sapien
gatggaatctagaaccatcacgagc

SEQ ID NO: 2644807 - DNA, 25 bp, Homo sapien
ccagacctgatgtagacatttccag

SEQ ID NO: 2644808 - DNA, 25 bp, Homo sapien
cacgagccactgtactaatacaggt

SEQ ID NO: 2644809 - DNA, 25 bp, Homo sapien
taatacaggtaagacaggcctggga

SEQ ID NO: 2644810 - DNA, 25 bp, Homo sapien
tttaggcctatattcgttgtaactc

SEQ ID NO: 2644811 - DNA, 25 bp, Homo sapien
taggcctatattcgttgtaactcac

SEQ ID NO: 2644812 - DNA, 25 bp, Homo sapien
gcctatattcgttgtaactcacttc

SEQ ID NO: 2644813 - DNA, 25 bp, Homo sapien
ggcctatattcgttgtaactcactt

SEQ ID NO: 2644814 - DNA, 25 bp, Homo sapien
aattccacatgaagtactatgctgt

SEQ ID NO: 2644815 - DNA, 25 bp, Homo sapien
tactatgctgtccataaattatttc

SEQ ID NO: 2644816 - DNA, 25 bp, Homo sapien
catgaagtactatgctgtccataaa

SEQ ID NO: 2644817 - DNA, 25 bp, Homo sapien
tccacatgaagtactatgctgtcca

SEQ ID NO: 2644818 - DNA, 25 bp, Homo sapien
tgtcaagaacagaactcagtaattc

SEQ ID NO: 2644819 - DNA, 25 bp, Homo sapien
cagtaattctgtatctctatcagcc

SEQ ID NO: 2644820 - DNA, 25 bp, Homo sapien
tgaagactgtgagattgtcaagaac

SEQ ID NO: 2644821 - DNA, 25 bp, Homo sapien
taattctgtatctctatcagccagc

SEQ ID NO: 2644822 - DNA, 25 bp, Homo sapien
ccttcccttgtttatctgtactcat

SEQ ID NO: 2644823 - DNA, 25 bp, Homo sapien
tccaccttcccttgtttatctgtac

SEQ ID NO: 2644824 - DNA, 25 bp, Homo sapien
caccttcccttgtttatctgtactc

SEQ ID NO: 2644825 - DNA, 25 bp, Homo sapien
ttccaccttcccttgtttatctgta

SEQ ID NO: 2644826 - DNA, 25 bp, Homo sapien
tgaggactccctggactgggttacc

SEQ ID NO: 2644827 - DNA, 25 bp, Homo sapien
catcccagacataacaggagcagcc

SEQ ID NO: 2644828 - DNA, 25 bp, Homo sapien
tcatcccagacataacaggagcagc

SEQ ID NO: 2644829 - DNA, 25 bp, Homo sapien
tttgcatgctcagagtttgtcaagg

SEQ ID NO: 2644830 - DNA, 25 bp, Homo sapien
tgcatgctcagagtttgtcaaggca

SEQ ID NO: 2644831 - DNA, 25 bp, Homo sapien
gcatgctcagagtttgtcaaggcaa

SEQ ID NO: 2644832 - DNA, 25 bp, Homo sapien
ttgcatgctcagagtttgtcaaggc

SEQ ID NO: 2644833 - DNA, 25 bp, Homo sapien
ctagagagaagagccttccatagca

SEQ ID NO: 2644834 - DNA, 25 bp, Homo sapien
agagagaagagccttccatagcagt

SEQ ID NO: 2644835 - DNA, 25 bp, Homo sapien
aacagttggactggctactgatagt

SEQ ID NO: 2644836 - DNA, 25 bp, Homo sapien
ggctactgatagtgaagcaatggga

SEQ ID NO: 2644837 - DNA, 25 bp, Homo sapien
ttgtgtcatgccctacgttggtata

SEQ ID NO: 2644838 - DNA, 25 bp, Homo sapien
ctccaggtgctcaacgattacctgg

SEQ ID NO: 2644839 - DNA, 25 bp, Homo sapien
gtcatgccctacgttggtataatca

SEQ ID NO: 2644840 - DNA, 25 bp, Homo sapien
gtatgtgccatcacaagcagatgtg

SEQ ID NO: 2644841 - DNA, 25 bp, Homo sapien
gccggagcagctcgggagggagcgc

SEQ ID NO: 2644842 - DNA, 25 bp, Homo sapien
cgccgccgcgttgctgggagccggg

SEQ ID NO: 2644843 - DNA, 25 bp, Homo sapien
cagctgcaagccctcaatgggcgct

SEQ ID NO: 2644844 - DNA, 25 bp, Homo sapien
gaggctttatgtcggatttgggcaa

SEQ ID NO: 2644845 - DNA, 25 bp, Homo sapien
cagtgagccgagatcatgccacttt

SEQ ID NO: 2644846 - DNA, 25 bp, Homo sapien
cgagatcatgccactttactccagc

SEQ ID NO: 2644847 - DNA, 25 bp, Homo sapien
ttgaacctggcgggggcggaggctg

SEQ ID NO: 2644848 - DNA, 25 bp, Homo sapien
atcacttgaacctggcgggggcgga

SEQ ID NO: 2644849 - DNA, 25 bp, Homo sapien
gattaagtaggccaatgacacggac

SEQ ID NO: 2644850 - DNA, 25 bp, Homo sapien
gacacggacttagcatgttcaatag

SEQ ID NO: 2644851 - DNA, 25 bp, Homo sapien
gactggtaaatgaagtacgggtgac

SEQ ID NO: 2644852 - DNA, 25 bp, Homo sapien
gcttcttcaagttacaatcgagggc

SEQ ID NO: 2644853 - DNA, 25 bp, Homo sapien
aaatgatatgttaatatttccctaa

SEQ ID NO: 2644854 - DNA, 25 bp, Homo sapien
tgtccgggagtgtttgcacacacca

SEQ ID NO: 2644855 - DNA, 25 bp, Homo sapien
tcaccacctccattcgccaatccat

SEQ ID NO: 2644856 - DNA, 25 bp, Homo sapien
tccgggagtgtttgcacacaccatc

SEQ ID NO: 2644857 - DNA, 25 bp, Homo sapien
ggagtgtttgcacacaccatcattt

SEQ ID NO: 2644858 - DNA, 25 bp, Homo sapien
gtcagtgctgccgacagaacctggc

SEQ ID NO: 2644859 - DNA, 25 bp, Homo sapien
cagtgctgccgacagaacctggccc

SEQ ID NO: 2644860 - DNA, 25 bp, Homo sapien
tcagtgctgccgacagaacctggcc

SEQ ID NO: 2644861 - DNA, 25 bp, Homo sapien
cactgccttccgagtgggcggaaaa

SEQ ID NO: 2644862 - DNA, 25 bp, Homo sapien
aagagagttttctgagggcgtacgc

SEQ ID NO: 2644863 - DNA, 25 bp, Homo sapien
gcaattcctggtctcgccagcactg

SEQ ID NO: 2644864 - DNA, 25 bp, Homo sapien
gaggactcggattccagagctcgcc

SEQ ID NO: 2644865 - DNA, 25 bp, Homo sapien
agcccggctgcgacccgccggccgt

SEQ ID NO: 2644866 - DNA, 25 bp, Homo sapien
tctccgacagctagcctgccgccct

SEQ ID NO: 2644867 - DNA, 25 bp, Homo sapien
tgcccgctcggttccgaccggcctc

SEQ ID NO: 2644868 - DNA, 25 bp, Homo sapien
gatccgtgcttgccgtctccgacag

SEQ ID NO: 2644869 - DNA, 25 bp, Homo sapien
accctccgaagtgtgcggtgacgga

SEQ ID NO: 2644870 - DNA, 25 bp, Homo sapien
aggaagcccgagctcgtcggcaact

SEQ ID NO: 2644871 - DNA, 25 bp, Homo sapien
agaggagggcggcaaacttcggaag

SEQ ID NO: 2644872 - DNA, 25 bp, Homo sapien
tccttcccgcaacacgaaggcagcg

SEQ ID NO: 2644873 - DNA, 25 bp, Homo sapien
caataaacgctgagttagggcccca

SEQ ID NO: 2644874 - DNA, 25 bp, Homo sapien
aagcttggctggcaataaacgctga

SEQ ID NO: 2644875 - DNA, 25 bp, Homo sapien
ggctggcaataaacgctgagttagg

SEQ ID NO: 2644876 - DNA, 25 bp, Homo sapien
gcttggctggcaataaacgctgagt

SEQ ID NO: 2644877 - DNA, 25 bp, Homo sapien
gcaagcagtgacaatacccagcagt

SEQ ID NO: 2644878 - DNA, 25 bp, Homo sapien
ataaaagctgaagaggcaagcagtg

SEQ ID NO: 2644879 - DNA, 25 bp, Homo sapien
cggtttttcaagaacagtgtaatct

SEQ ID NO: 2644880 - DNA, 25 bp, Homo sapien
ttcccaaactttagccgcaggcacg

SEQ ID NO: 2644881 - DNA, 25 bp, Homo sapien
gacggctctacagaggtcaggacaa

SEQ ID NO: 2644882 - DNA, 25 bp, Homo sapien
ggagaggccaagggatgtgtacatg

SEQ ID NO: 2644883 - DNA, 25 bp, Homo sapien
ctgaggtagaggacggctctacaga

SEQ ID NO: 2644884 - DNA, 25 bp, Homo sapien
ctacagaggtcaggacaaaggaggc

SEQ ID NO: 2644885 - DNA, 25 bp, Homo sapien
cattccggttctctgcatcatcaca

SEQ ID NO: 2644886 - DNA, 25 bp, Homo sapien
tctctgcatcatcacaatgaagagg

SEQ ID NO: 2644887 - DNA, 25 bp, Homo sapien
tccggttctctgcatcatcacaatg

SEQ ID NO: 2644888 - DNA, 25 bp, Homo sapien
ccggttctctgcatcatcacaatga

SEQ ID NO: 2644889 - DNA, 25 bp, Homo sapien
cacccagaaaaggccatgaggctga

SEQ ID NO: 2644890 - DNA, 25 bp, Homo sapien
tcacccagaaaaggccatgaggctg

SEQ ID NO: 2644891 - DNA, 25 bp, Homo sapien
acccagaaaaggccatgaggctgac

SEQ ID NO: 2644892 - DNA, 25 bp, Homo sapien
gggagaaagggtgacgtagcttctg

SEQ ID NO: 2644893 - DNA, 25 bp, Homo sapien
ccaggtgacagcaacgcttaggcac

SEQ ID NO: 2644894 - DNA, 25 bp, Homo sapien
caacgcttaggcacgcagtagccat

SEQ ID NO: 2644895 - DNA, 25 bp, Homo sapien
cgcagtagccattacgcggaggctg

SEQ ID NO: 2644896 - DNA, 25 bp, Homo sapien
tccaattaaccttaactgtctgtct

SEQ ID NO: 2644897 - DNA, 25 bp, Homo sapien
tgcacaagctgatcactccaattaa

SEQ ID NO: 2644898 - DNA, 25 bp, Homo sapien
ctttggtgtggatgatgcaggttcg

SEQ ID NO: 2644899 - DNA, 25 bp, Homo sapien
tctttaactctctcagacagcggct

SEQ ID NO: 2644900 - DNA, 25 bp, Homo sapien
tctgtcgtctgattgtaccgtggca

SEQ ID NO: 2644901 - DNA, 25 bp, Homo sapien
tgtgaccgaagacagggctccactt

SEQ ID NO: 2644902 - DNA, 25 bp, Homo sapien
gctgactctcacagcgaggcccaat

SEQ ID NO: 2644903 - DNA, 25 bp, Homo sapien
aggtgactggccatacggctgtcca

SEQ ID NO: 2644904 - DNA, 25 bp, Homo sapien
tgcaacagttgagcctggttgtaca

SEQ ID NO: 2644905 - DNA, 25 bp, Homo sapien
ctaccatgcaacagttgagcctggt

SEQ ID NO: 2644906 - DNA, 25 bp, Homo sapien
aacagttgagcctggttgtacagag

SEQ ID NO: 2644907 - DNA, 25 bp, Homo sapien
catgcaacagttgagcctggttgta

SEQ ID NO: 2644908 - DNA, 25 bp, Homo sapien
caatatgtcacccaagtgcaagtca

SEQ ID NO: 2644909 - DNA, 25 bp, Homo sapien
tgtccatcactgaatccaagagcta

SEQ ID NO: 2644910 - DNA, 25 bp, Homo sapien
taaccagccaatttcttcaggcctg

SEQ ID NO: 2644911 - DNA, 25 bp, Homo sapien
cagttttcgaagaacctggtgcaac

SEQ ID NO: 2644912 - DNA, 25 bp, Homo sapien
gcatgttgggaaactaccacactgt

SEQ ID NO: 2644913 - DNA, 25 bp, Homo sapien
cataccaggcaatggttaaggccaa

SEQ ID NO: 2644914 - DNA, 25 bp, Homo sapien
ccattaagctttgtatgactgcaca

SEQ ID NO: 2644915 - DNA, 25 bp, Homo sapien
gagcacgtggtcaatttcaaaagca

SEQ ID NO: 2644916 - DNA, 25 bp, Homo sapien
ttattcccatatccctatatcccca

SEQ ID NO: 2644917 - DNA, 25 bp, Homo sapien
cctatatccccattttcaatcaact

SEQ ID NO: 2644918 - DNA, 25 bp, Homo sapien
aaatacaggaccctggctgaatggg

SEQ ID NO: 2644919 - DNA, 25 bp, Homo sapien
tagcgggatgggatgccaggatctg

SEQ ID NO: 2644920 - DNA, 25 bp, Homo sapien
caataacatgccttgggaaaccatg

SEQ ID NO: 2644921 - DNA, 25 bp, Homo sapien
actgcactgcacaaactaacatggg

SEQ ID NO: 2644922 - DNA, 25 bp, Homo sapien
taggttatgaccaacgggctcagca

SEQ ID NO: 2644923 - DNA, 25 bp, Homo sapien
tttgcctcaaggagacagcgtaggt

SEQ ID NO: 2644924 - DNA, 25 bp, Homo sapien
catgtgccaagtctgagagcattat

SEQ ID NO: 2644925 - DNA, 25 bp, Homo sapien
gcaggctagaaccagtgcttgctgt

SEQ ID NO: 2644926 - DNA, 25 bp, Homo sapien
ctttaggagaaagcttggaagatga

SEQ ID NO: 2644927 - DNA, 25 bp, Homo sapien
tattacacccttgagtagttctgaa

SEQ ID NO: 2644928 - DNA, 25 bp, Homo sapien
gcctgccttgcccaaaatgttcttg

SEQ ID NO: 2644929 - DNA, 25 bp, Homo sapien
gcagacataattgaagaccacccaa

SEQ ID NO: 2644930 - DNA, 25 bp, Homo sapien
atctcaaaaacggttatagggccag

SEQ ID NO: 2644931 - DNA, 25 bp, Homo sapien
tcagttaccgatcacttcacaagag

SEQ ID NO: 2644932 - DNA, 25 bp, Homo sapien
tgtcaggactaccagtcagaggcct

SEQ ID NO: 2644933 - DNA, 25 bp, Homo sapien
gaaagacctacccatgcctggtgac

SEQ ID NO: 2644934 - DNA, 25 bp, Homo sapien
gagaaaaatctcctgcgttcaccgc

SEQ ID NO: 2644935 - DNA, 25 bp, Homo sapien
tgctctgagctaagggatccacttg

SEQ ID NO: 2644936 - DNA, 25 bp, Homo sapien
ctgaattttctctgaggaaaatcct

SEQ ID NO: 2644937 - DNA, 25 bp, Homo sapien
tccatagatggttcttcccagggct

SEQ ID NO: 2644938 - DNA, 25 bp, Homo sapien
ttttctctgaggaaaatcctctcat

SEQ ID NO: 2644939 - DNA, 25 bp, Homo sapien
gaattttctctgaggaaaatcctct

SEQ ID NO: 2644940 - DNA, 25 bp, Homo sapien
catgctggggcctgtctctaggacc

SEQ ID NO: 2644941 - DNA, 25 bp, Homo sapien
ggcagtgaagcctaagctccttaga

SEQ ID NO: 2644942 - DNA, 25 bp, Homo sapien
gacgtgtggcaatgccagagagcaa

SEQ ID NO: 2644943 - DNA, 25 bp, Homo sapien
gcaatgcatgggtttccactgcctt

SEQ ID NO: 2644944 - DNA, 25 bp, Homo sapien
ttccataataacaagggtgagagta

SEQ ID NO: 2644945 - DNA, 25 bp, Homo sapien
taataacaagggtgagagtaactaa

SEQ ID NO: 2644946 - DNA, 25 bp, Homo sapien
agggtgagagtaactaatataacca

SEQ ID NO: 2644947 - DNA, 25 bp, Homo sapien
caagggtgagagtaactaatataac

SEQ ID NO: 2644948 - DNA, 25 bp, Homo sapien
gctcaaacacttggcagacagaaag

SEQ ID NO: 2644949 - DNA, 25 bp, Homo sapien
gtgagggccctacacaactcctgat

SEQ ID NO: 2644950 - DNA, 25 bp, Homo sapien
cgagagtggtctacaatgcggccct

SEQ ID NO: 2644951 - DNA, 25 bp, Homo sapien
gatgcaagctcacgtctgcctgaaa

SEQ ID NO: 2644952 - DNA, 25 bp, Homo sapien
tcaagtactgtgtcaggtgccatct

SEQ ID NO: 2644953 - DNA, 25 bp, Homo sapien
taccatgccgtatagccaattgcca

SEQ ID NO: 2644954 - DNA, 25 bp, Homo sapien
tccagcttgaatcctatgggacaca

SEQ ID NO: 2644955 - DNA, 25 bp, Homo sapien
catgctaggaaattggtaaaccaca

SEQ ID NO: 2644956 - DNA, 25 bp, Homo sapien
caggccacttattagtccattcagg

SEQ ID NO: 2644957 - DNA, 25 bp, Homo sapien
agtaagttacaactggtgacaggcc

SEQ ID NO: 2644958 - DNA, 25 bp, Homo sapien
gttagaggcctaagatgaaaatacc

SEQ ID NO: 2644959 - DNA, 25 bp, Homo sapien
agaaacacgattatgggtatgaacc

SEQ ID NO: 2644960 - DNA, 25 bp, Homo sapien
taatgtgaaacgtcttgcagaccca

SEQ ID NO: 2644961 - DNA, 25 bp, Homo sapien
gaattccagtgctatagggagcagc

SEQ ID NO: 2644962 - DNA, 25 bp, Homo sapien
gatttttgtgaacacgcccctatga

SEQ ID NO: 2644963 - DNA, 25 bp, Homo sapien
cagtcagttaccaagcctgcaaggc

SEQ ID NO: 2644964 - DNA, 25 bp, Homo sapien
tatggtttccttacaaactgtgccc

SEQ ID NO: 2644965 - DNA, 25 bp, Homo sapien
gcactactttggacattgactgcca

SEQ ID NO: 2644966 - DNA, 25 bp, Homo sapien
cccatgaggtcccatagggcatatg

SEQ ID NO: 2644967 - DNA, 25 bp, Homo sapien
taagagatgacctggtttagaggac

SEQ ID NO: 2644968 - DNA, 25 bp, Homo sapien
ctaaaagctgcccttagtatttgat

SEQ ID NO: 2644969 - DNA, 25 bp, Homo sapien
ctgcccttagtatttgatgctttca

SEQ ID NO: 2644970 - DNA, 25 bp, Homo sapien
aaagctgcccttagtatttgatgct

SEQ ID NO: 2644971 - DNA, 25 bp, Homo sapien
gctgcccttagtatttgatgctttc

SEQ ID NO: 2644972 - DNA, 25 bp, Homo sapien
ctccatttccagaacctctgtgggt

SEQ ID NO: 2644973 - DNA, 25 bp, Homo sapien
atttccagaacctctgtgggtttat

SEQ ID NO: 2644974 - DNA, 25 bp, Homo sapien
ggaaactgctccatttccagaacct

SEQ ID NO: 2644975 - DNA, 25 bp, Homo sapien
tccagaacctctgtgggtttatcca

SEQ ID NO: 2644976 - DNA, 25 bp, Homo sapien
aaattagctcatgatctacacagtg

SEQ ID NO: 2644977 - DNA, 25 bp, Homo sapien
gacaaaggggcttaattggaagtca

SEQ ID NO: 2644978 - DNA, 25 bp, Homo sapien
gtgacagggataaaacagacaaagg

SEQ ID NO: 2644979 - DNA, 25 bp, Homo sapien
gggagagtccaagcaaaattagctc

SEQ ID NO: 2644980 - DNA, 25 bp, Homo sapien
actgaattcagtagtcttgggcaag

SEQ ID NO: 2644981 - DNA, 25 bp, Homo sapien
gatggcctgtgctctttgactaagc

SEQ ID NO: 2644982 - DNA, 25 bp, Homo sapien
tattaagctttacgggtgacactac

SEQ ID NO: 2644983 - DNA, 25 bp, Homo sapien
tattctggtgggcaaatctaatccc

SEQ ID NO: 2644984 - DNA, 25 bp, Homo sapien
gcaaaatgaaaccaccacacagttg

SEQ ID NO: 2644985 - DNA, 25 bp, Homo sapien
tggtgacagccaatcacatggaata

SEQ ID NO: 2644986 - DNA, 25 bp, Homo sapien
gatgccaacaccgttatgaagtgca

SEQ ID NO: 2644987 - DNA, 25 bp, Homo sapien
aaaccactaacatggacaggcctcg

SEQ ID NO: 2644988 - DNA, 25 bp, Homo sapien
ctgaataagtaatgggttttggttg

SEQ ID NO: 2644989 - DNA, 25 bp, Homo sapien
caatcccagtttttcactagctaaa

SEQ ID NO: 2644990 - DNA, 25 bp, Homo sapien
ctgtagcacagtgtataagtgtgga

SEQ ID NO: 2644991 - DNA, 25 bp, Homo sapien
ggagaaccaactccactcttaagaa

SEQ ID NO: 2644992 - DNA, 25 bp, Homo sapien
ccaaatttggcaaggtgttctttga

SEQ ID NO: 2644993 - DNA, 25 bp, Homo sapien
tacaaaatgtctgcgagtcaatcca

SEQ ID NO: 2644994 - DNA, 25 bp, Homo sapien
atgtgaaagttctacccaaaaagct

SEQ ID NO: 2644995 - DNA, 25 bp, Homo sapien
taaagcaccatgttacaaagtttga

SEQ ID NO: 2644996 - DNA, 25 bp, Homo sapien
caaattcacgttatgaaagtaatgt

SEQ ID NO: 2644997 - DNA, 25 bp, Homo sapien
tgcgactacagtgcacagcatcact

SEQ ID NO: 2644998 - DNA, 25 bp, Homo sapien
aaagtcaacatagaacaaattcacg

SEQ ID NO: 2644999 - DNA, 25 bp, Homo sapien
taattaagcctgtatttcaagtact

SEQ ID NO: 2645000 - DNA, 25 bp, Homo sapien
cattgtatttaatttggatagttga

SEQ ID NO: 2645001 - DNA, 25 bp, Homo sapien
ctgcaaacaacaaaatcccaccatt

SEQ ID NO: 2645002 - DNA, 25 bp, Homo sapien
aacaacaaaatcccaccattgtatt

SEQ ID NO: 2645003 - DNA, 25 bp, Homo sapien
tatttaatttggatagttgaatgca

SEQ ID NO: 2645004 - DNA, 25 bp, Homo sapien
gcaaactgctctgcaagatccggga

SEQ ID NO: 2645005 - DNA, 25 bp, Homo sapien
gctctgcaagatccgggagagtcaa

SEQ ID NO: 2645006 - DNA, 25 bp, Homo sapien
ccacgagcttgataagaagaggcgg

SEQ ID NO: 2645007 - DNA, 25 bp, Homo sapien
gcttccacgagcttgataagaagag

SEQ ID NO: 2645008 - DNA, 25 bp, Homo sapien
caaaggaactgatgccctctagcag

SEQ ID NO: 2645009 - DNA, 25 bp, Homo sapien
aataataagagccatgaaataaggg

SEQ ID NO: 2645010 - DNA, 25 bp, Homo sapien
tagaacaaaggaactgatgccctct

SEQ ID NO: 2645011 - DNA, 25 bp, Homo sapien
gacatagctggtagtaggaaattta

SEQ ID NO: 2645012 - DNA, 25 bp, Homo sapien
ctgtgttctgtatagagttgaacat

SEQ ID NO: 2645013 - DNA, 25 bp, Homo sapien
caatcaagaagctgtcgtaattctg

SEQ ID NO: 2645014 - DNA, 25 bp, Homo sapien
atcaagaagctgtcgtaattctgcc

SEQ ID NO: 2645015 - DNA, 25 bp, Homo sapien
cacaatcaagaagctgtcgtaattc

SEQ ID NO: 2645016 - DNA, 25 bp, Homo sapien
ctgtctttcccatttgcatttctag

SEQ ID NO: 2645017 - DNA, 25 bp, Homo sapien
tcccatttgcatttctagctctgtg

SEQ ID NO: 2645018 - DNA, 25 bp, Homo sapien
tctttcccatttgcatttctagctc

SEQ ID NO: 2645019 - DNA, 25 bp, Homo sapien
tttcccatttgcatttctagctctg

SEQ ID NO: 2645020 - DNA, 25 bp, Homo sapien
tgatgatgaccaacatgcctgcagg

SEQ ID NO: 2645021 - DNA, 25 bp, Homo sapien
tgggcagatgctacaaaccagggcc

SEQ ID NO: 2645022 - DNA, 25 bp, Homo sapien
cagagcgagagaaacaccaagaggt

SEQ ID NO: 2645023 - DNA, 25 bp, Homo sapien
aagccccggtgggaatattcatgcc

SEQ ID NO: 2645024 - DNA, 25 bp, Homo sapien
tgtgttgatcacattataaacctaa

SEQ ID NO: 2645025 - DNA, 25 bp, Homo sapien
tcttcctgtgactaaacgtgttcat

SEQ ID NO: 2645026 - DNA, 25 bp, Homo sapien
aacttccacttcatcgggctctgat

SEQ ID NO: 2645027 - DNA, 25 bp, Homo sapien
ggctctgatgtctaaactcttcctg

SEQ ID NO: 2645028 - DNA, 25 bp, Homo sapien
acacactagggatgcacaggcacag

SEQ ID NO: 2645029 - DNA, 25 bp, Homo sapien
acatgcttttttctcggacttctag

SEQ ID NO: 2645030 - DNA, 25 bp, Homo sapien
gcctccagaaccacgagaagtaagt

SEQ ID NO: 2645031 - DNA, 25 bp, Homo sapien
tgtaactgatatccttctaggaggg

SEQ ID NO: 2645032 - DNA, 25 bp, Homo sapien
tggtaagtccaggagatagcgtttg

SEQ ID NO: 2645033 - DNA, 25 bp, Homo sapien
catttccaagtccacggagggtgta

SEQ ID NO: 2645034 - DNA, 25 bp, Homo sapien
catttcactgtaaacggctgctgga

SEQ ID NO: 2645035 - DNA, 25 bp, Homo sapien
gcgtcagccaaaacgtgcacatcga

SEQ ID NO: 2645036 - DNA, 25 bp, Homo sapien
tcaagctataggagtcatttaaaaa

SEQ ID NO: 2645037 - DNA, 25 bp, Homo sapien
gagaaatgagtaagcgactacttcc

SEQ ID NO: 2645038 - DNA, 25 bp, Homo sapien
gaagcacacagtacatttgtccttc

SEQ ID NO: 2645039 - DNA, 25 bp, Homo sapien
ttccaggtatcagtgaataaacacc

SEQ ID NO: 2645040 - DNA, 25 bp, Homo sapien
cagagagtactcttgcattcaacag

SEQ ID NO: 2645041 - DNA, 25 bp, Homo sapien
tactgatgaggtatgctaggcgacc

SEQ ID NO: 2645042 - DNA, 25 bp, Homo sapien
ttaacaaatactgaagcgtaagcca

SEQ ID NO: 2645043 - DNA, 25 bp, Homo sapien
gctaggcgacctaataagcttcttc

SEQ ID NO: 2645044 - DNA, 25 bp, Homo sapien
ataacttttatgaggttttcagtat

SEQ ID NO: 2645045 - DNA, 25 bp, Homo sapien
tatgaggttttcagtattatcagag

SEQ ID NO: 2645046 - DNA, 25 bp, Homo sapien
tgcaggctgtcgttcattccattca

SEQ ID NO: 2645047 - DNA, 25 bp, Homo sapien
ctggtgcaggctgtcgttcattcca

SEQ ID NO: 2645048 - DNA, 25 bp, Homo sapien
tggagccattcctgaatacgaagat

SEQ ID NO: 2645049 - DNA, 25 bp, Homo sapien
cattcctgaatacgaagatgttctg

SEQ ID NO: 2645050 - DNA, 25 bp, Homo sapien
cctgaatacgaagatgttctggatg

SEQ ID NO: 2645051 - DNA, 25 bp, Homo sapien
tgaatacgaagatgttctggatggg

SEQ ID NO: 2645052 - DNA, 25 bp, Homo sapien
tcactgccggctcctcattgagaag

SEQ ID NO: 2645053 - DNA, 25 bp, Homo sapien
tgttcttccaccaagtgggccaagc

SEQ ID NO: 2645054 - DNA, 25 bp, Homo sapien
gaaatgcctgtatccgacaatgaaa

SEQ ID NO: 2645055 - DNA, 25 bp, Homo sapien
ctgttcccggcaggcagtgctcgtg

SEQ ID NO: 2645056 - DNA, 25 bp, Homo sapien
aaatggtaaaagtggctgtatgccc

SEQ ID NO: 2645057 - DNA, 25 bp, Homo sapien
tatctcaaatgcctcactccgggac

SEQ ID NO: 2645058 - DNA, 25 bp, Homo sapien
ggaaaagcaggctcaccttgtctct

SEQ ID NO: 2645059 - DNA, 25 bp, Homo sapien
cagctgtggcgggtgtaacagccca

SEQ ID NO: 2645060 - DNA, 25 bp, Homo sapien
cacttagtgcatctgggtttataga

SEQ ID NO: 2645061 - DNA, 25 bp, Homo sapien
taatgccaacctcactaagaagcta

SEQ ID NO: 2645062 - DNA, 25 bp, Homo sapien
gggctgcactgaaacctattacatc

SEQ ID NO: 2645063 - DNA, 25 bp, Homo sapien
ctccagcagcgagttttctaattcc

SEQ ID NO: 2645064 - DNA, 25 bp, Homo sapien
ctggtgggtccatttctatataaaa

SEQ ID NO: 2645065 - DNA, 25 bp, Homo sapien
taaaacatcaagtctgtgccacaat

SEQ ID NO: 2645066 - DNA, 25 bp, Homo sapien
catattctaaatccaggtcttccat

SEQ ID NO: 2645067 - DNA, 25 bp, Homo sapien
cacaatttatatctgtcttggcata

SEQ ID NO: 2645068 - DNA, 25 bp, Homo sapien
gctacactgttctcatccactggca

SEQ ID NO: 2645069 - DNA, 25 bp, Homo sapien
cacccagggaaggatctcgattaac

SEQ ID NO: 2645070 - DNA, 25 bp, Homo sapien
gaataagcatttaccacacacagcc

SEQ ID NO: 2645071 - DNA, 25 bp, Homo sapien
taacaaataaattgggctggccatg

SEQ ID NO: 2645072 - DNA, 25 bp, Homo sapien
taccgttgttggctacagtagtagg

SEQ ID NO: 2645073 - DNA, 25 bp, Homo sapien
gatatctccccagtaccattcagca

SEQ ID NO: 2645074 - DNA, 25 bp, Homo sapien
taaggacatattgttattcataccg

SEQ ID NO: 2645075 - DNA, 25 bp, Homo sapien
ccattcagcatcttgtaaggacata

SEQ ID NO: 2645076 - DNA, 25 bp, Homo sapien
gccttcacactctgttcttaggcag

SEQ ID NO: 2645077 - DNA, 25 bp, Homo sapien
gcaagaattcttagagttgtgctta

SEQ ID NO: 2645078 - DNA, 25 bp, Homo sapien
taggcagtgccacttcactctggca

SEQ ID NO: 2645079 - DNA, 25 bp, Homo sapien
gcttaatagatagagtgccttcaca

SEQ ID NO: 2645080 - DNA, 25 bp, Homo sapien
gaaatgttagcaattgcagtctcat

SEQ ID NO: 2645081 - DNA, 25 bp, Homo sapien
ttcctcctgcccacatagatttaaa

SEQ ID NO: 2645082 - DNA, 25 bp, Homo sapien
acagtgagtgcccatattcctcctg

SEQ ID NO: 2645083 - DNA, 25 bp, Homo sapien
cattttcagagctcactaataagag

SEQ ID NO: 2645084 - DNA, 25 bp, Homo sapien
cgtaccaaaaaggtcccgtctgctg

SEQ ID NO: 2645085 - DNA, 25 bp, Homo sapien
gctgtatctcgaagtttttcattca

SEQ ID NO: 2645086 - DNA, 25 bp, Homo sapien
aaggtcccgtctgctgtatctcgaa

SEQ ID NO: 2645087 - DNA, 25 bp, Homo sapien
tagacgcatctcgtaccaaaaaggt

SEQ ID NO: 2645088 - DNA, 25 bp, Homo sapien
tatactgagctagagattcattccg

SEQ ID NO: 2645089 - DNA, 25 bp, Homo sapien
cacagaactgaaggttaatgggtca

SEQ ID NO: 2645090 - DNA, 25 bp, Homo sapien
ggtatttggatactggataaagtaa

SEQ ID NO: 2645091 - DNA, 25 bp, Homo sapien
tcccatctcgatgaaatattttgat

SEQ ID NO: 2645092 - DNA, 25 bp, Homo sapien
ttctaagtattaaaaggatcttgtc

SEQ ID NO: 2645093 - DNA, 25 bp, Homo sapien
tgattacatgtaattcatctgcttc

SEQ ID NO: 2645094 - DNA, 25 bp, Homo sapien
gatcttgtctaaacatcgtaactgg

SEQ ID NO: 2645095 - DNA, 25 bp, Homo sapien
caattatgtaattacgagtgtcaag

SEQ ID NO: 2645096 - DNA, 25 bp, Homo sapien
gggatgtgcgggtatattcttcata

SEQ ID NO: 2645097 - DNA, 25 bp, Homo sapien
atcatattctcgacttttttcttga

SEQ ID NO: 2645098 - DNA, 25 bp, Homo sapien
gatgtgcgggtatattcttcatata

SEQ ID NO: 2645099 - DNA, 25 bp, Homo sapien
cttcatataatctatcatattctcg

SEQ ID NO: 2645100 - DNA, 25 bp, Homo sapien
cacctcattcgtaaaaactcaacct

SEQ ID NO: 2645101 - DNA, 25 bp, Homo sapien
tcaacttgaaactcagtgactgctt

SEQ ID NO: 2645102 - DNA, 25 bp, Homo sapien
taaacaggatccttctatcacgaat

SEQ ID NO: 2645103 - DNA, 25 bp, Homo sapien
tgactgcttcagttatcacgtgaac

SEQ ID NO: 2645104 - DNA, 25 bp, Homo sapien
tttgctgtaccgctcttgggtctgg

SEQ ID NO: 2645105 - DNA, 25 bp, Homo sapien
ctgtaccgctcttgggtctggcact

SEQ ID NO: 2645106 - DNA, 25 bp, Homo sapien
ttctttgctgtaccgctcttgggtc

SEQ ID NO: 2645107 - DNA, 25 bp, Homo sapien
tgtattctttgctgtaccgctcttg

SEQ ID NO: 2645108 - DNA, 25 bp, Homo sapien
ttatctctagcacaagaacaaggga

SEQ ID NO: 2645109 - DNA, 25 bp, Homo sapien
caaagcacagaaagcgagatcatct

SEQ ID NO: 2645110 - DNA, 25 bp, Homo sapien
gtccacgtgatcattcaaagcacag

SEQ ID NO: 2645111 - DNA, 25 bp, Homo sapien
gattttggttatctctagcacaaga

SEQ ID NO: 2645112 - DNA, 25 bp, Homo sapien
aatttcactgattcgagacttcaac

SEQ ID NO: 2645113 - DNA, 25 bp, Homo sapien
tctttctcagctggataaggtctgg

SEQ ID NO: 2645114 - DNA, 25 bp, Homo sapien
agtattggtctctcgtctttctcag

SEQ ID NO: 2645115 - DNA, 25 bp, Homo sapien
caatttctcgatactcagctgcctg

SEQ ID NO: 2645116 - DNA, 25 bp, Homo sapien
attgcccaaccactcgttcaacttc

SEQ ID NO: 2645117 - DNA, 25 bp, Homo sapien
gttttcattgcccaaccactcgttc

SEQ ID NO: 2645118 - DNA, 25 bp, Homo sapien
tgcccaaccactcgttcaacttctt

SEQ ID NO: 2645119 - DNA, 25 bp, Homo sapien
tttcattgcccaaccactcgttcaa

SEQ ID NO: 2645120 - DNA, 25 bp, Homo sapien
ggacaagaaaagtgccatctcgctt

SEQ ID NO: 2645121 - DNA, 25 bp, Homo sapien
tcgcttccctcgcaacaggttttca

SEQ ID NO: 2645122 - DNA, 25 bp, Homo sapien
caggttttcagctttgtttcggttg

SEQ ID NO: 2645123 - DNA, 25 bp, Homo sapien
ggcatagcagccctgtttactgctc

SEQ ID NO: 2645124 - DNA, 25 bp, Homo sapien
gggctcggcaaagccatagccagtt

SEQ ID NO: 2645125 - DNA, 25 bp, Homo sapien
atcgcctctgctgtgcatatactgg

SEQ ID NO: 2645126 - DNA, 25 bp, Homo sapien
gctgtacaagttatagggctcggca

SEQ ID NO: 2645127 - DNA, 25 bp, Homo sapien
catatactgggtaggctagtgtgac

SEQ ID NO: 2645128 - DNA, 25 bp, Homo sapien
tgtgaaagaaagctctagtcccatc

SEQ ID NO: 2645129 - DNA, 25 bp, Homo sapien
taggaacgtgtggtcatcatacagc

SEQ ID NO: 2645130 - DNA, 25 bp, Homo sapien
gcaacatccaggctaaaccaggctg

SEQ ID NO: 2645131 - DNA, 25 bp, Homo sapien
cccttgtgagtggacgtgcctttct

SEQ ID NO: 2645132 - DNA, 25 bp, Homo sapien
gcagagacgcagactaaaaccaggg

SEQ ID NO: 2645133 - DNA, 25 bp, Homo sapien
tgcaatgaccatgactttagcgagc

SEQ ID NO: 2645134 - DNA, 25 bp, Homo sapien
gctttgaagcttatcaggcactgcc

SEQ ID NO: 2645135 - DNA, 25 bp, Homo sapien
taaacaaaggtgagcgctgttccag

SEQ ID NO: 2645136 - DNA, 25 bp, Homo sapien
tgtaatgtgaggtcccaatgctccc

SEQ ID NO: 2645137 - DNA, 25 bp, Homo sapien
gacaaatgcggtgggcaagctacac

SEQ ID NO: 2645138 - DNA, 25 bp, Homo sapien
tctttaggatgctacactgggtggg

SEQ ID NO: 2645139 - DNA, 25 bp, Homo sapien
caaagtggccggctagcaaagtatc

SEQ ID NO: 2645140 - DNA, 25 bp, Homo sapien
gaaggcaaagttacaactgaccgtg

SEQ ID NO: 2645141 - DNA, 25 bp, Homo sapien
agctccattgaatctataacttgaa

SEQ ID NO: 2645142 - DNA, 25 bp, Homo sapien
gcaacttaaaacaagacatagctcc

SEQ ID NO: 2645143 - DNA, 25 bp, Homo sapien
cttgaacgaaatgtcaaggaggcac

SEQ ID NO: 2645144 - DNA, 25 bp, Homo sapien
caggaagccgactgcctgcagaagt

SEQ ID NO: 2645145 - DNA, 25 bp, Homo sapien
gttttgccagggaacacctgtgtgg

SEQ ID NO: 2645146 - DNA, 25 bp, Homo sapien
tctgcttggatctggtgccttcctc

SEQ ID NO: 2645147 - DNA, 25 bp, Homo sapien
tgctactagcacttcctgcgttgcc

SEQ ID NO: 2645148 - DNA, 25 bp, Homo sapien
cacttctggtttttaggacaagctc

SEQ ID NO: 2645149 - DNA, 25 bp, Homo sapien
tgtgagaagcttagattttagccac

SEQ ID NO: 2645150 - DNA, 25 bp, Homo sapien
ctcgtggattggtgtaagttgtgcc

SEQ ID NO: 2645151 - DNA, 25 bp, Homo sapien
aagcagattgggcagggaccctcca

SEQ ID NO: 2645152 - DNA, 25 bp, Homo sapien
tgttgccaggacctcagaaagtgaa

SEQ ID NO: 2645153 - DNA, 25 bp, Homo sapien
ttaacggtgtccgtatgtgaggaca

SEQ ID NO: 2645154 - DNA, 25 bp, Homo sapien
ctccactgaggaccaatggaaagat

SEQ ID NO: 2645155 - DNA, 25 bp, Homo sapien
accaatggaaagatgagccttgacc

SEQ ID NO: 2645156 - DNA, 25 bp, Homo sapien
cttgtccattaacggtgtccgtatg

SEQ ID NO: 2645157 - DNA, 25 bp, Homo sapien
ctctcaaatggagcagggttcccag

SEQ ID NO: 2645158 - DNA, 25 bp, Homo sapien
actggaaatcaagggtcatgatatc

SEQ ID NO: 2645159 - DNA, 25 bp, Homo sapien
tgacatagctgaagcaagctctcaa

SEQ ID NO: 2645160 - DNA, 25 bp, Homo sapien
tgatatcatcagtgctaagggcatg

SEQ ID NO: 2645161 - DNA, 25 bp, Homo sapien
aacgatgaccacctcatttgccttc

SEQ ID NO: 2645162 - DNA, 25 bp, Homo sapien
taaactgaattcaacgatgaccacc

SEQ ID NO: 2645163 - DNA, 25 bp, Homo sapien
ctctaaactgaattcaacgatgacc

SEQ ID NO: 2645164 - DNA, 25 bp, Homo sapien
tgaattcaacgatgaccacctcatt

SEQ ID NO: 2645165 - DNA, 25 bp, Homo sapien
gcacacatactgaaatgcctcacca

SEQ ID NO: 2645166 - DNA, 25 bp, Homo sapien
cacacatactgaaatgcctcaccat

SEQ ID NO: 2645167 - DNA, 25 bp, Homo sapien
catactgaaatgcctcaccataggc

SEQ ID NO: 2645168 - DNA, 25 bp, Homo sapien
cacatactgaaatgcctcaccatag

SEQ ID NO: 2645169 - DNA, 25 bp, Homo sapien
agtgctgatacccatcatagcacct

SEQ ID NO: 2645170 - DNA, 25 bp, Homo sapien
atcacgacagtaggcaatgtttgcc

SEQ ID NO: 2645171 - DNA, 25 bp, Homo sapien
catagcaccttgtagtttaatcacg

SEQ ID NO: 2645172 - DNA, 25 bp, Homo sapien
gtagtttaatcacgacagtaggcaa

SEQ ID NO: 2645173 - DNA, 25 bp, Homo sapien
cattttccctaagtaagtgatcatc

SEQ ID NO: 2645174 - DNA, 25 bp, Homo sapien
cctaagtaagtgatcatctggctgt

SEQ ID NO: 2645175 - DNA, 25 bp, Homo sapien
cttcagatcttgaatgcatcaaggc

SEQ ID NO: 2645176 - DNA, 25 bp, Homo sapien
gatcttgaatgcatcaaggcctttt

SEQ ID NO: 2645177 - DNA, 25 bp, Homo sapien
gcgatgacgctatccaggacatgga

SEQ ID NO: 2645178 - DNA, 25 bp, Homo sapien
gacatggaaggaaggttttcgcacc

SEQ ID NO: 2645179 - DNA, 25 bp, Homo sapien
tgaccacaaacgagattcccaagaa

SEQ ID NO: 2645180 - DNA, 25 bp, Homo sapien
tctctgtgaaaagatagcggaccat

SEQ ID NO: 2645181 - DNA, 25 bp, Homo sapien
attcttatgtgtttaccaagtctca

SEQ ID NO: 2645182 - DNA, 25 bp, Homo sapien
cattcttatgtgtttaccaagtctc

SEQ ID NO: 2645183 - DNA, 25 bp, Homo sapien
ttcttatgtgtttaccaagtctcat

SEQ ID NO: 2645184 - DNA, 25 bp, Homo sapien
ctgcagcctcctaaggtccttgagc

SEQ ID NO: 2645185 - DNA, 25 bp, Homo sapien
tgcagcctcctaaggtccttgagct

SEQ ID NO: 2645186 - DNA, 25 bp, Homo sapien
gcagcctcctaaggtccttgagctt

SEQ ID NO: 2645187 - DNA, 25 bp, Homo sapien
agcctcctaaggtccttgagcttgc

SEQ ID NO: 2645188 - DNA, 25 bp, Homo sapien
tcatttttgactcttgctttttttc

SEQ ID NO: 2645189 - DNA, 25 bp, Homo sapien
tccccggtatgaagggtctggtgct

SEQ ID NO: 2645190 - DNA, 25 bp, Homo sapien
ctgcccttcctccccggtatgaagg

SEQ ID NO: 2645191 - DNA, 25 bp, Homo sapien
ctctccagatatggggtctgagtcc

SEQ ID NO: 2645192 - DNA, 25 bp, Homo sapien
gtgctctccagatatggggtctgag

SEQ ID NO: 2645193 - DNA, 25 bp, Homo sapien
gttagaaacagatgataccatcacc

SEQ ID NO: 2645194 - DNA, 25 bp, Homo sapien
tccctgtgaatcatcaacgtcagtg

SEQ ID NO: 2645195 - DNA, 25 bp, Homo sapien
cagattttgtattggctccccgaca

SEQ ID NO: 2645196 - DNA, 25 bp, Homo sapien
tttgtattggctccccgacatctcc

SEQ ID NO: 2645197 - DNA, 25 bp, Homo sapien
agagagcaaatgtgtgggtttcagc

SEQ ID NO: 2645198 - DNA, 25 bp, Homo sapien
gaagagagcaaatgtgtgggtttca

SEQ ID NO: 2645199 - DNA, 25 bp, Homo sapien
ctgcagaagagagcaaatgtgtggg

SEQ ID NO: 2645200 - DNA, 25 bp, Homo sapien
cagaagagagcaaatgtgtgggttt

SEQ ID NO: 2645201 - DNA, 25 bp, Homo sapien
gagttccagatcatatactgacatg

SEQ ID NO: 2645202 - DNA, 25 bp, Homo sapien
gatcatatactgacatgagattaag

SEQ ID NO: 2645203 - DNA, 25 bp, Homo sapien
gattaagaaggtacaagagaggtag

SEQ ID NO: 2645204 - DNA, 25 bp, Homo sapien
aagagaggtagaagccacataatgc

SEQ ID NO: 2645205 - DNA, 25 bp, Homo sapien
tacagaagacttagagtgggaggta

SEQ ID NO: 2645206 - DNA, 25 bp, Homo sapien
acagaagacttagagtgggaggtat

SEQ ID NO: 2645207 - DNA, 25 bp, Homo sapien
cagaagacttagagtgggaggtatt

SEQ ID NO: 2645208 - DNA, 25 bp, Homo sapien
caatgaaatctgacggctaggctaa

SEQ ID NO: 2645209 - DNA, 25 bp, Homo sapien
tgagattgtattgtgccgagcctaa

SEQ ID NO: 2645210 - DNA, 25 bp, Homo sapien
taaacacggtgtaaggagcctgact

SEQ ID NO: 2645211 - DNA, 25 bp, Homo sapien
caccacctgactatagctgagcgag

SEQ ID NO: 2645212 - DNA, 25 bp, Homo sapien
ggatctaaatgtgtagctggcagca

SEQ ID NO: 2645213 - DNA, 25 bp, Homo sapien
aacttccactcgatgtgagaacaca

SEQ ID NO: 2645214 - DNA, 25 bp, Homo sapien
catgcctgcctcctaaaagtttaag

SEQ ID NO: 2645215 - DNA, 25 bp, Homo sapien
tatacatctatacaagtgtcaggga

SEQ ID NO: 2645216 - DNA, 25 bp, Homo sapien
ttatttgtatattataaaaagcatc

SEQ ID NO: 2645217 - DNA, 25 bp, Homo sapien
cgatattttctgtgatgatttgact

SEQ ID NO: 2645218 - DNA, 25 bp, Homo sapien
tctgtgatgatttgacttttatttg

SEQ ID NO: 2645219 - DNA, 25 bp, Homo sapien
atccgatattttctgtgatgatttg

SEQ ID NO: 2645220 - DNA, 25 bp, Homo sapien
tggccggcccatgggcaccctgtga

SEQ ID NO: 2645221 - DNA, 25 bp, Homo sapien
cctgatttgtctgtatgaaggggca

SEQ ID NO: 2645222 - DNA, 25 bp, Homo sapien
gcttttgcatttgcgagagaaaaat

SEQ ID NO: 2645223 - DNA, 25 bp, Homo sapien
gggcagaaattgatggcccacacag

SEQ ID NO: 2645224 - DNA, 25 bp, Homo sapien
tggcttcagtatgtagatgcacaca

SEQ ID NO: 2645225 - DNA, 25 bp, Homo sapien
tgccttttcatttcgcagtggaggg

SEQ ID NO: 2645226 - DNA, 25 bp, Homo sapien
tattcttctagacaggtgagcagag

SEQ ID NO: 2645227 - DNA, 25 bp, Homo sapien
tgggagcaaccagggcatgtgcctt

SEQ ID NO: 2645228 - DNA, 25 bp, Homo sapien
taagagcaacagaatgtgagctggc

SEQ ID NO: 2645229 - DNA, 25 bp, Homo sapien
tgatgtattagcctctctgtttcct

SEQ ID NO: 2645230 - DNA, 25 bp, Homo sapien
gttattatatgtatcaccttggtta

SEQ ID NO: 2645231 - DNA, 25 bp, Homo sapien
tacctgtcttacctacacggagctg

SEQ ID NO: 2645232 - DNA, 25 bp, Homo sapien
agatgatgccactctagcgggtgcc

SEQ ID NO: 2645233 - DNA, 25 bp, Homo sapien
tcaatcctagagcaagtgagcagag

SEQ ID NO: 2645234 - DNA, 25 bp, Homo sapien
tagtcccattagtcagtagcaagag

SEQ ID NO: 2645235 - DNA, 25 bp, Homo sapien
tcagagcagggaagatggccaacaa

SEQ ID NO: 2645236 - DNA, 25 bp, Homo sapien
atgaacatcagaagcctattgttta

SEQ ID NO: 2645237 - DNA, 25 bp, Homo sapien
aatgaacatcagaagcctattgttt

SEQ ID NO: 2645238 - DNA, 25 bp, Homo sapien
tgaacatcagaagcctattgtttag

SEQ ID NO: 2645239 - DNA, 25 bp, Homo sapien
aagcacatcgtatgtttcttcaagg

SEQ ID NO: 2645240 - DNA, 25 bp, Homo sapien
tgtcaagcacatcgtatgtttcttc

SEQ ID NO: 2645241 - DNA, 25 bp, Homo sapien
gcacatcgtatgtttcttcaaggtg

SEQ ID NO: 2645242 - DNA, 25 bp, Homo sapien
caagcacatcgtatgtttcttcaag

SEQ ID NO: 2645243 - DNA, 25 bp, Homo sapien
tgtggcccaggcgaaaatgacctca

SEQ ID NO: 2645244 - DNA, 25 bp, Homo sapien
gtggcccaggcgaaaatgacctcat

SEQ ID NO: 2645245 - DNA, 25 bp, Homo sapien
ctgtggcccaggcgaaaatgacctc

SEQ ID NO: 2645246 - DNA, 25 bp, Homo sapien
tctgtggcccaggcgaaaatgacct

SEQ ID NO: 2645247 - DNA, 25 bp, Homo sapien
aaaacgaggttgttggattgcagga

SEQ ID NO: 2645248 - DNA, 25 bp, Homo sapien
gtaaaacgaggttgttggattgcag

SEQ ID NO: 2645249 - DNA, 25 bp, Homo sapien
agagagtaaaacgaggttgttggat

SEQ ID NO: 2645250 - DNA, 25 bp, Homo sapien
gagtaaaacgaggttgttggattgc

SEQ ID NO: 2645251 - DNA, 25 bp, Homo sapien
tctatgacctctttggtagtaatgt

SEQ ID NO: 2645252 - DNA, 25 bp, Homo sapien
tgacctctttggtagtaatgtccac

SEQ ID NO: 2645253 - DNA, 25 bp, Homo sapien
tatgacctctttggtagtaatgtcc

SEQ ID NO: 2645254 - DNA, 25 bp, Homo sapien
atgacctctttggtagtaatgtcca

SEQ ID NO: 2645255 - DNA, 25 bp, Homo sapien
caggcagtaaacaggccaagatctt

SEQ ID NO: 2645256 - DNA, 25 bp, Homo sapien
gagcttggcagcacgaatttaggaa

SEQ ID NO: 2645257 - DNA, 25 bp, Homo sapien
ttaggaagatgccaacattgttgcc

SEQ ID NO: 2645258 - DNA, 25 bp, Homo sapien
ggtgcccaaattgtgcaacagacac

SEQ ID NO: 2645259 - DNA, 25 bp, Homo sapien
catgacctgagccaccctgagtctg

SEQ ID NO: 2645260 - DNA, 25 bp, Homo sapien
ccaccctgagtctggactgactgca

SEQ ID NO: 2645261 - DNA, 25 bp, Homo sapien
ctgagccaccctgagtctggactga

SEQ ID NO: 2645262 - DNA, 25 bp, Homo sapien
tcaccatgacctgagccaccctgag

SEQ ID NO: 2645263 - DNA, 25 bp, Homo sapien
ttcaatggtaacttgaccatgctgt

SEQ ID NO: 2645264 - DNA, 25 bp, Homo sapien
tggtaacttgaccatgctgtctctc

SEQ ID NO: 2645265 - DNA, 25 bp, Homo sapien
aatggtaacttgaccatgctgtctc

SEQ ID NO: 2645266 - DNA, 25 bp, Homo sapien
actcttagttttgggaaatggactg

SEQ ID NO: 2645267 - DNA, 25 bp, Homo sapien
tgtccatctcaaaatttgccctaga

SEQ ID NO: 2645268 - DNA, 25 bp, Homo sapien
tgtggggattcattcaaatccctgg

SEQ ID NO: 2645269 - DNA, 25 bp, Homo sapien
ccctggagctggcataaagattttt

SEQ ID NO: 2645270 - DNA, 25 bp, Homo sapien
gagatgatatatgtcttgagtcttg

SEQ ID NO: 2645271 - DNA, 25 bp, Homo sapien
acttgacaggaatgagctcttgaaa

SEQ ID NO: 2645272 - DNA, 25 bp, Homo sapien
aaacataagacttgacaggaatgag

SEQ ID NO: 2645273 - DNA, 25 bp, Homo sapien
aacaaatagctactgccagggcaga

SEQ ID NO: 2645274 - DNA, 25 bp, Homo sapien
gaatgagctcttgaaaacaaatagc

SEQ ID NO: 2645275 - DNA, 25 bp, Homo sapien
tgtttttactgctattccggaatct

SEQ ID NO: 2645276 - DNA, 25 bp, Homo sapien
gagttctctctcaacaggcatgttg

SEQ ID NO: 2645277 - DNA, 25 bp, Homo sapien
tataaatagtatgagtgggtaaaca

SEQ ID NO: 2645278 - DNA, 25 bp, Homo sapien
tcactcctaatagcacatactaagg

SEQ ID NO: 2645279 - DNA, 25 bp, Homo sapien
gattctgtaggccttgtaagtcaca

SEQ ID NO: 2645280 - DNA, 25 bp, Homo sapien
caggtagggcaaacatacttgacaa

SEQ ID NO: 2645281 - DNA, 25 bp, Homo sapien
tggaagtaggcataagatctcagtc

SEQ ID NO: 2645282 - DNA, 25 bp, Homo sapien
aaatgcaaaggcatataggctgccc

SEQ ID NO: 2645283 - DNA, 25 bp, Homo sapien
gcccatcattgcaagggctttttcc

SEQ ID NO: 2645284 - DNA, 25 bp, Homo sapien
tagccaaggtaaagggccagcttct

SEQ ID NO: 2645285 - DNA, 25 bp, Homo sapien
cctccacaagtggtattctccaagg

SEQ ID NO: 2645286 - DNA, 25 bp, Homo sapien
ctccacaagtggtattctccaaggt

SEQ ID NO: 2645287 - DNA, 25 bp, Homo sapien
ctaatagccaaggtaaagggccagc

SEQ ID NO: 2645288 - DNA, 25 bp, Homo sapien
tattcacgtcatacctcacattgct

SEQ ID NO: 2645289 - DNA, 25 bp, Homo sapien
gtcatacctcacattgctcccgagt

SEQ ID NO: 2645290 - DNA, 25 bp, Homo sapien
catacctcacattgctcccgagttt

SEQ ID NO: 2645291 - DNA, 25 bp, Homo sapien
cattattcacgtcatacctcacatt

SEQ ID NO: 2645292 - DNA, 25 bp, Homo sapien
ctttcctgaattgccgtgtagcttc

SEQ ID NO: 2645293 - DNA, 25 bp, Homo sapien
tgaattgccgtgtagcttcctcaga

SEQ ID NO: 2645294 - DNA, 25 bp, Homo sapien
tcctgaattgccgtgtagcttcctc

SEQ ID NO: 2645295 - DNA, 25 bp, Homo sapien
gaattgccgtgtagcttcctcagac

SEQ ID NO: 2645296 - DNA, 25 bp, Homo sapien
aagtctctagggaagtccccattcg

SEQ ID NO: 2645297 - DNA, 25 bp, Homo sapien
gctgtgggtggctctaagtctctag

SEQ ID NO: 2645298 - DNA, 25 bp, Homo sapien
gaagtccccattcggttcagtgcca

SEQ ID NO: 2645299 - DNA, 25 bp, Homo sapien
agacacccagaggttcccacatgcc

SEQ ID NO: 2645300 - DNA, 25 bp, Homo sapien
aatgacggaagaggtctccgtcctg

SEQ ID NO: 2645301 - DNA, 25 bp, Homo sapien
tggtgctccttcttgacccaggtcc

SEQ ID NO: 2645302 - DNA, 25 bp, Homo sapien
cctggtgctccttcttgacccaggt

SEQ ID NO: 2645303 - DNA, 25 bp, Homo sapien
gctccttcttgacccaggtcccatc

SEQ ID NO: 2645304 - DNA, 25 bp, Homo sapien
ctgggaggatttggggatgcaccag

SEQ ID NO: 2645305 - DNA, 25 bp, Homo sapien
ccatccagggaggcgagagcttctg

SEQ ID NO: 2645306 - DNA, 25 bp, Homo sapien
gatttggggatgcaccagattcccc

SEQ ID NO: 2645307 - DNA, 25 bp, Homo sapien
cagggaggcgagagcttctgcttct

SEQ ID NO: 2645308 - DNA, 25 bp, Homo sapien
ttgctgttgtcggtgaccttgtttg

SEQ ID NO: 2645309 - DNA, 25 bp, Homo sapien
ttgtcggtgaccttgtttgtgggca

SEQ ID NO: 2645310 - DNA, 25 bp, Homo sapien
ctggttgctgttgtcggtgaccttg

SEQ ID NO: 2645311 - DNA, 25 bp, Homo sapien
gttgtcggtgaccttgtttgtgggc

SEQ ID NO: 2645312 - DNA, 25 bp, Homo sapien
ggcggcctcatggatccttctgaag

SEQ ID NO: 2645313 - DNA, 25 bp, Homo sapien
tcagccattgaatggcggcctcatg

SEQ ID NO: 2645314 - DNA, 25 bp, Homo sapien
ttgaatggcggcctcatggatcctt

SEQ ID NO: 2645315 - DNA, 25 bp, Homo sapien
tggatccttctgaaggagaatatgt

SEQ ID NO: 2645316 - DNA, 25 bp, Homo sapien
gtatctcactactatcgacaaagtg

SEQ ID NO: 2645317 - DNA, 25 bp, Homo sapien
gacattgtcttccttgtatctcact

SEQ ID NO: 2645318 - DNA, 25 bp, Homo sapien
ggacactgctggtgtatagaatgac

SEQ ID NO: 2645319 - DNA, 25 bp, Homo sapien
cttgttgaacgtcctgggttctgaa

SEQ ID NO: 2645320 - DNA, 25 bp, Homo sapien
agaggctcaggcaaaccacagaagt

SEQ ID NO: 2645321 - DNA, 25 bp, Homo sapien
gtcccaagtgaatgcgaaagaagag

SEQ ID NO: 2645322 - DNA, 25 bp, Homo sapien
tagttgtaccccattctgaaagtcc

SEQ ID NO: 2645323 - DNA, 25 bp, Homo sapien
gaacccttgtgttatagaggctcag

SEQ ID NO: 2645324 - DNA, 25 bp, Homo sapien
ggcatgattgccaacagcaagcctt

SEQ ID NO: 2645325 - DNA, 25 bp, Homo sapien
tggcaaaccgcaactccatcattag

SEQ ID NO: 2645326 - DNA, 25 bp, Homo sapien
gggatagttctacccagttctagga

SEQ ID NO: 2645327 - DNA, 25 bp, Homo sapien
cgttaagctgtagcaaggacattcc

SEQ ID NO: 2645328 - DNA, 25 bp, Homo sapien
aggcctgcctcctacagcggctgta

SEQ ID NO: 2645329 - DNA, 25 bp, Homo sapien
gcctgcctcctacagcggctgtatt

SEQ ID NO: 2645330 - DNA, 25 bp, Homo sapien
ctgtattgtttatgaaatgagtcac

SEQ ID NO: 2645331 - DNA, 25 bp, Homo sapien
cctacagcggctgtattgtttatga

SEQ ID NO: 2645332 - DNA, 25 bp, Homo sapien
atttcttattgactcaagatagatt

SEQ ID NO: 2645333 - DNA, 25 bp, Homo sapien
ttgactcaagatagatttgatatgg

SEQ ID NO: 2645334 - DNA, 25 bp, Homo sapien
gactcaagatagatttgatatggtt

SEQ ID NO: 2645335 - DNA, 25 bp, Homo sapien
cttattgactcaagatagatttgat

SEQ ID NO: 2645336 - DNA, 25 bp, Homo sapien
tcagatgtgaagctgcggtcaaaag

SEQ ID NO: 2645337 - DNA, 25 bp, Homo sapien
cgtgtcgagtaggtccagagtccca

SEQ ID NO: 2645338 - DNA, 25 bp, Homo sapien
tttaccattggtgcgaagagttctc

SEQ ID NO: 2645339 - DNA, 25 bp, Homo sapien
cgctctgaaagggagaacgactctc

SEQ ID NO: 2645340 - DNA, 25 bp, Homo sapien
caactatcatgtatccattctccca

SEQ ID NO: 2645341 - DNA, 25 bp, Homo sapien
ctttcttcaaagcaactatcatgta

SEQ ID NO: 2645342 - DNA, 25 bp, Homo sapien
tggatttgtcctcttaaacacacat

SEQ ID NO: 2645343 - DNA, 25 bp, Homo sapien
tttgtcctcttaaacacacatttgc

SEQ ID NO: 2645344 - DNA, 25 bp, Homo sapien
gggcgattcatctgggaaagctttc

SEQ ID NO: 2645345 - DNA, 25 bp, Homo sapien
ctgccactgatgggcgattcatctg

SEQ ID NO: 2645346 - DNA, 25 bp, Homo sapien
gccttggggaatgttaattccactc

SEQ ID NO: 2645347 - DNA, 25 bp, Homo sapien
cactgatgggcgattcatctgggaa

SEQ ID NO: 2645348 - DNA, 25 bp, Homo sapien
aacagcaaagagcttgttgctcaag

SEQ ID NO: 2645349 - DNA, 25 bp, Homo sapien
aagaaatttcctcacactgtagtag

SEQ ID NO: 2645350 - DNA, 25 bp, Homo sapien
gttgctcaagaaatttcctcacact

SEQ ID NO: 2645351 - DNA, 25 bp, Homo sapien
actgtagtagaaagggatgtgctca

SEQ ID NO: 2645352 - DNA, 25 bp, Homo sapien
aagagtgagtggctagtgctggcct

SEQ ID NO: 2645353 - DNA, 25 bp, Homo sapien
ggcccgactgcaccgctgggacttg

SEQ ID NO: 2645354 - DNA, 25 bp, Homo sapien
cttgggctcggaaagagtgagtggc

SEQ ID NO: 2645355 - DNA, 25 bp, Homo sapien
cctcagctcttctgtccaaggtgct

SEQ ID NO: 2645356 - DNA, 25 bp, Homo sapien
tcatgagcaggtggacgagagacac

SEQ ID NO: 2645357 - DNA, 25 bp, Homo sapien
ggagccctggtattccatgaagctg

SEQ ID NO: 2645358 - DNA, 25 bp, Homo sapien
tagtttgtggtatgtcgcagggtca

SEQ ID NO: 2645359 - DNA, 25 bp, Homo sapien
catttctcgcctgaagcttgctgca

SEQ ID NO: 2645360 - DNA, 25 bp, Homo sapien
gatggagttgtggtttcccaggcca

SEQ ID NO: 2645361 - DNA, 25 bp, Homo sapien
tacaagcttgcccaagtatcaggtg

SEQ ID NO: 2645362 - DNA, 25 bp, Homo sapien
aggccagtggagttatggtcccaga

SEQ ID NO: 2645363 - DNA, 25 bp, Homo sapien
agaaagatcatcacgttgaggcggg

SEQ ID NO: 2645364 - DNA, 25 bp, Homo sapien
tgtagcttacaacataggtggtgac

SEQ ID NO: 2645365 - DNA, 25 bp, Homo sapien
cgtagccttttcatggtgtaatgtg

SEQ ID NO: 2645366 - DNA, 25 bp, Homo sapien
taggtggtgacatgtctcagataca

SEQ ID NO: 2645367 - DNA, 25 bp, Homo sapien
ccttttcatggtgtaatgtgtagct

SEQ ID NO: 2645368 - DNA, 25 bp, Homo sapien
tctacttggactcaaaccaacccga

SEQ ID NO: 2645369 - DNA, 25 bp, Homo sapien
ttgtttaacctctgtctacttggac

SEQ ID NO: 2645370 - DNA, 25 bp, Homo sapien
cctgggctggcaaggtagacataat

SEQ ID NO: 2645371 - DNA, 25 bp, Homo sapien
tgctcccactgtcaacgtgtattct

SEQ ID NO: 2645372 - DNA, 25 bp, Homo sapien
tggttgaatgacgaaccatcttccc

SEQ ID NO: 2645373 - DNA, 25 bp, Homo sapien
tgaatgacgaaccatcttcccacat

SEQ ID NO: 2645374 - DNA, 25 bp, Homo sapien
catggaatggttgaatgacgaacca

SEQ ID NO: 2645375 - DNA, 25 bp, Homo sapien
gaatggttgaatgacgaaccatctt

SEQ ID NO: 2645376 - DNA, 25 bp, Homo sapien
tctgggctagacagtattgttgaaa

SEQ ID NO: 2645377 - DNA, 25 bp, Homo sapien
gagtgtttcctattcatttgctgcc

SEQ ID NO: 2645378 - DNA, 25 bp, Homo sapien
tatgctgatcacctttctcacaaat

SEQ ID NO: 2645379 - DNA, 25 bp, Homo sapien
gcaggatagactggctttggttcag

SEQ ID NO: 2645380 - DNA, 25 bp, Homo sapien
ggtcctggcttcctgacttgcgatt

SEQ ID NO: 2645381 - DNA, 25 bp, Homo sapien
gacattgccacattttgaccttctg

SEQ ID NO: 2645382 - DNA, 25 bp, Homo sapien
gggtccggtggcaagacatagacac

SEQ ID NO: 2645383 - DNA, 25 bp, Homo sapien
tatgtatgctgggttggctcttcaa

SEQ ID NO: 2645384 - DNA, 25 bp, Homo sapien
gaaccaagcccaggtcatttcctga

SEQ ID NO: 2645385 - DNA, 25 bp, Homo sapien
ctagaaccaagcccaggtcatttcc

SEQ ID NO: 2645386 - DNA, 25 bp, Homo sapien
tagaaccaagcccaggtcatttcct

SEQ ID NO: 2645387 - DNA, 25 bp, Homo sapien
aaccaagcccaggtcatttcctgac

SEQ ID NO: 2645388 - DNA, 25 bp, Homo sapien
tggacacccagtgccaagcataatc

SEQ ID NO: 2645389 - DNA, 25 bp, Homo sapien
gctgccattgaatgaatccgccctg

SEQ ID NO: 2645390 - DNA, 25 bp, Homo sapien
cctggcacatccatttgggctcaaa

SEQ ID NO: 2645391 - DNA, 25 bp, Homo sapien
cctaagagtaaatcagtgactggac

SEQ ID NO: 2645392 - DNA, 25 bp, Homo sapien
agtactagcagctttctaatctgac

SEQ ID NO: 2645393 - DNA, 25 bp, Homo sapien
gcatcctgctcttgtttgatgagtt

SEQ ID NO: 2645394 - DNA, 25 bp, Homo sapien
cagatttgtattcttggcatcctgc

SEQ ID NO: 2645395 - DNA, 25 bp, Homo sapien
agcctcatgcaaaaacaggtttgct

SEQ ID NO: 2645396 - DNA, 25 bp, Homo sapien
tcccaggcccagatacagatttgta

SEQ ID NO: 2645397 - DNA, 25 bp, Homo sapien
cagaatctcttctgatttctttcaa

SEQ ID NO: 2645398 - DNA, 25 bp, Homo sapien
ctcctcagaatctcttctgatttct

SEQ ID NO: 2645399 - DNA, 25 bp, Homo sapien
gaatctcttctgatttctttcaagg

SEQ ID NO: 2645400 - DNA, 25 bp, Homo sapien
atctcttctgatttctttcaaggct

SEQ ID NO: 2645401 - DNA, 25 bp, Homo sapien
aggtgatctgggattccttagctac

SEQ ID NO: 2645402 - DNA, 25 bp, Homo sapien
gttggtaaactgtggcctgtaggcc

SEQ ID NO: 2645403 - DNA, 25 bp, Homo sapien
gctctctggtatagcagaaatgcta

SEQ ID NO: 2645404 - DNA, 25 bp, Homo sapien
atcttagaactctgttgaagcaggg

SEQ ID NO: 2645405 - DNA, 25 bp, Homo sapien
taatctggggcgtaaaagctctctg

SEQ ID NO: 2645406 - DNA, 25 bp, Homo sapien
gcgtttttgcagagtgttcagattg

SEQ ID NO: 2645407 - DNA, 25 bp, Homo sapien
cgtttttgcagagtgttcagattgg

SEQ ID NO: 2645408 - DNA, 25 bp, Homo sapien
ctgcgtttttgcagagtgttcagat

SEQ ID NO: 2645409 - DNA, 25 bp, Homo sapien
tttttgcagagtgttcagattggtc

SEQ ID NO: 2645410 - DNA, 25 bp, Homo sapien
ttgaatagaccacataattcctggg

SEQ ID NO: 2645411 - DNA, 25 bp, Homo sapien
ttatctcagtccccaaatcctcaga

SEQ ID NO: 2645412 - DNA, 25 bp, Homo sapien
caacaggcttgatgtataattatat

SEQ ID NO: 2645413 - DNA, 25 bp, Homo sapien
attctttgttcgtactccttgcagg

SEQ ID NO: 2645414 - DNA, 25 bp, Homo sapien
tctgaagctgggatgattaaactga

SEQ ID NO: 2645415 - DNA, 25 bp, Homo sapien
cagggcagtgttgcaagaacaagag

SEQ ID NO: 2645416 - DNA, 25 bp, Homo sapien
cttcttttcaagaagtgaggtgcat

SEQ ID NO: 2645417 - DNA, 25 bp, Homo sapien
gaagtgaggtgcatcactcagggca

SEQ ID NO: 2645418 - DNA, 25 bp, Homo sapien
tcttcacttcggacccacagctggt

SEQ ID NO: 2645419 - DNA, 25 bp, Homo sapien
taggcaaccgacctccaaagtcttg

SEQ ID NO: 2645420 - DNA, 25 bp, Homo sapien
cacagctggttctgtataccccaga

SEQ ID NO: 2645421 - DNA, 25 bp, Homo sapien
ccccagagaacaatcagggtccatt

SEQ ID NO: 2645422 - DNA, 25 bp, Homo sapien
ttctgacttcagaaagatcctggca

SEQ ID NO: 2645423 - DNA, 25 bp, Homo sapien
tcctggcaactagctgtaaacctcc

SEQ ID NO: 2645424 - DNA, 25 bp, Homo sapien
tcagaaagatcctggcaactagctg

SEQ ID NO: 2645425 - DNA, 25 bp, Homo sapien
gaaagatcctggcaactagctgtaa

SEQ ID NO: 2645426 - DNA, 25 bp, Homo sapien
acaagtcctggggtgtagatctaaa

SEQ ID NO: 2645427 - DNA, 25 bp, Homo sapien
tgggacaagtcctggggtgtagatc

SEQ ID NO: 2645428 - DNA, 25 bp, Homo sapien
gtgtttgtgtgggacaagtcctggg

SEQ ID NO: 2645429 - DNA, 25 bp, Homo sapien
aagtcctggggtgtagatctaaaag

SEQ ID NO: 2645430 - DNA, 25 bp, Homo sapien
cttaccagtggagtcagctgtccct

SEQ ID NO: 2645431 - DNA, 25 bp, Homo sapien
ttaccagtggagtcagctgtccctt

SEQ ID NO: 2645432 - DNA, 25 bp, Homo sapien
gtcctgagtcccgttgttccagact

SEQ ID NO: 2645433 - DNA, 25 bp, Homo sapien
tcccgttgttccagacttgttctct

SEQ ID NO: 2645434 - DNA, 25 bp, Homo sapien
tttgtcggtgacaccaggttttcca

SEQ ID NO: 2645435 - DNA, 25 bp, Homo sapien
cttgttctctttgtcggtgacacca

SEQ ID NO: 2645436 - DNA, 25 bp, Homo sapien
agtcaggacaggtccatctgatgtt

SEQ ID NO: 2645437 - DNA, 25 bp, Homo sapien
ggtccatctgatgttgccagttctt

SEQ ID NO: 2645438 - DNA, 25 bp, Homo sapien
ggacaggtccatctgatgttgccag

SEQ ID NO: 2645439 - DNA, 25 bp, Homo sapien
ctgatgttgccagttctttgtcaca

SEQ ID NO: 2645440 - DNA, 25 bp, Homo sapien
gacctaagagggtatcccgccatgt

SEQ ID NO: 2645441 - DNA, 25 bp, Homo sapien
tgacaagtgccattcacaagccaga

SEQ ID NO: 2645442 - DNA, 25 bp, Homo sapien
caagccagatctgtggacctaagag

SEQ ID NO: 2645443 - DNA, 25 bp, Homo sapien
tcttcaaggtcaggataagcaccca

SEQ ID NO: 2645444 - DNA, 25 bp, Homo sapien
atgcaaggcatcgatattgtggttc

SEQ ID NO: 2645445 - DNA, 25 bp, Homo sapien
aggcatcgatattgtggttcacagg

SEQ ID NO: 2645446 - DNA, 25 bp, Homo sapien
ttttgatgggaccaagtgtcattgt

SEQ ID NO: 2645447 - DNA, 25 bp, Homo sapien
cattgtgttggcatggattgtggca

SEQ ID NO: 2645448 - DNA, 25 bp, Homo sapien
gaaacagcgtgcaggcaacacagct

SEQ ID NO: 2645449 - DNA, 25 bp, Homo sapien
aggtcctcctggtacagaaacagcg

SEQ ID NO: 2645450 - DNA, 25 bp, Homo sapien
tggtacagaaacagcgtgcaggcaa

SEQ ID NO: 2645451 - DNA, 25 bp, Homo sapien
tcctcctggtacagaaacagcgtgc

SEQ ID NO: 2645452 - DNA, 25 bp, Homo sapien
aggacggtcactatcagagccactg

SEQ ID NO: 2645453 - DNA, 25 bp, Homo sapien
taaaaggacggtcactatcagagcc

SEQ ID NO: 2645454 - DNA, 25 bp, Homo sapien
ctgctaaaaggacggtcactatcag

SEQ ID NO: 2645455 - DNA, 25 bp, Homo sapien
gtcactatcagagccactggtggtc

SEQ ID NO: 2645456 - DNA, 25 bp, Homo sapien
ctggatcaccttggcccatgtggga

SEQ ID NO: 2645457 - DNA, 25 bp, Homo sapien
tccaggctccctggatcaccttggc

SEQ ID NO: 2645458 - DNA, 25 bp, Homo sapien
gtcttgcccccttccaatttggaca

SEQ ID NO: 2645459 - DNA, 25 bp, Homo sapien
gggaaattgttgtctgggtctgtaa

SEQ ID NO: 2645460 - DNA, 25 bp, Homo sapien
ttttcacaggtccaagaacacagca

SEQ ID NO: 2645461 - DNA, 25 bp, Homo sapien
tgtacagataatgggtgcagtttct

SEQ ID NO: 2645462 - DNA, 25 bp, Homo sapien
cattctgaaggcgttttttctagga

SEQ ID NO: 2645463 - DNA, 25 bp, Homo sapien
tcttccctgtaggagggttgcagga

SEQ ID NO: 2645464 - DNA, 25 bp, Homo sapien
taaaagaccctgatatactctgcat

SEQ ID NO: 2645465 - DNA, 25 bp, Homo sapien
ccctaacagcgattttgctgtccac

SEQ ID NO: 2645466 - DNA, 25 bp, Homo sapien
ccacataaaagaccctgatatactc

SEQ ID NO: 2645467 - DNA, 25 bp, Homo sapien
ggagagtttctggtgtttgcaccct

SEQ ID NO: 2645468 - DNA, 25 bp, Homo sapien
gggcagctgaccaatctcagggcac

SEQ ID NO: 2645469 - DNA, 25 bp, Homo sapien
gcagctgaccaatctcagggcacat

SEQ ID NO: 2645470 - DNA, 25 bp, Homo sapien
tggggcagctgaccaatctcagggc

SEQ ID NO: 2645471 - DNA, 25 bp, Homo sapien
ccctggggcagctgaccaatctcag

SEQ ID NO: 2645472 - DNA, 25 bp, Homo sapien
agttctctggcctgaagttccctca

SEQ ID NO: 2645473 - DNA, 25 bp, Homo sapien
tcctggttgtacgatcttcagaaag

SEQ ID NO: 2645474 - DNA, 25 bp, Homo sapien
tgtggtctctcccagagatatggtt

SEQ ID NO: 2645475 - DNA, 25 bp, Homo sapien
cacagaagggcctcagtaaaggacc

SEQ ID NO: 2645476 - DNA, 25 bp, Homo sapien
aaattcacagcaagagcccagcatg

SEQ ID NO: 2645477 - DNA, 25 bp, Homo sapien
gcatgcattggtcacgtctaccttt

SEQ ID NO: 2645478 - DNA, 25 bp, Homo sapien
tggagacttctcctttcaatgcctt

SEQ ID NO: 2645479 - DNA, 25 bp, Homo sapien
tctgcctggccctaatggaaatcca

SEQ ID NO: 2645480 - DNA, 25 bp, Homo sapien
gggtgcctcacagttccatcacagt

SEQ ID NO: 2645481 - DNA, 25 bp, Homo sapien
tgatcagctgggtgcctcacagttc

SEQ ID NO: 2645482 - DNA, 25 bp, Homo sapien
gagcttctaagaaatgatcagctgg

SEQ ID NO: 2645483 - DNA, 25 bp, Homo sapien
catctgcccttataccgagcttcta

SEQ ID NO: 2645484 - DNA, 25 bp, Homo sapien
tggtgacctcgggacggcacaagct

SEQ ID NO: 2645485 - DNA, 25 bp, Homo sapien
tgttcttgaactgtggttaatctca

SEQ ID NO: 2645486 - DNA, 25 bp, Homo sapien
agctgaatgatagccgactgcttct

SEQ ID NO: 2645487 - DNA, 25 bp, Homo sapien
ctacgttgcggagagagtttgttct

SEQ ID NO: 2645488 - DNA, 25 bp, Homo sapien
aatagaggatgttgcaacacagtgc

SEQ ID NO: 2645489 - DNA, 25 bp, Homo sapien
tgttgcaacacagtgctgggtgtca

SEQ ID NO: 2645490 - DNA, 25 bp, Homo sapien
cagtgctgggtgtcataccagccac

SEQ ID NO: 2645491 - DNA, 25 bp, Homo sapien
cttggaatagaggatgttgcaacac

SEQ ID NO: 2645492 - DNA, 25 bp, Homo sapien
ctattcaatcacatcacattcagca

SEQ ID NO: 2645493 - DNA, 25 bp, Homo sapien
gaccacatgggccataaatatcctt

SEQ ID NO: 2645494 - DNA, 25 bp, Homo sapien
gggcacctgtgtttatactgagttc

SEQ ID NO: 2645495 - DNA, 25 bp, Homo sapien
tcctcttgtaacacatgaacttcca

SEQ ID NO: 2645496 - DNA, 25 bp, Homo sapien
tctgcttgccaaggatatgaataag

SEQ ID NO: 2645497 - DNA, 25 bp, Homo sapien
cttaaattgtaggtggcattgggaa

SEQ ID NO: 2645498 - DNA, 25 bp, Homo sapien
tgccagaccaaggaatttgatttta

SEQ ID NO: 2645499 - DNA, 25 bp, Homo sapien
tcagagattgaagaggtgaagactt

SEQ ID NO: 2645500 - DNA, 25 bp, Homo sapien
gtgaagacttaaattgtaggtggca

SEQ ID NO: 2645501 - DNA, 25 bp, Homo sapien
tgcaggtctaggtctctgtagttgt

SEQ ID NO: 2645502 - DNA, 25 bp, Homo sapien
ctgtagttgttcattggccgaagta

SEQ ID NO: 2645503 - DNA, 25 bp, Homo sapien
gccctgtactatcttctgtgcaggt

SEQ ID NO: 2645504 - DNA, 25 bp, Homo sapien
tgttcattggccgaagtagtttctt

SEQ ID NO: 2645505 - DNA, 25 bp, Homo sapien
tgacagcaggccttgataagtccct

SEQ ID NO: 2645506 - DNA, 25 bp, Homo sapien
taaggtgtgaagtgttgattccaaa

SEQ ID NO: 2645507 - DNA, 25 bp, Homo sapien
aagtccctttattgctcctgacaaa

SEQ ID NO: 2645508 - DNA, 25 bp, Homo sapien
tggaaagaccgcaacaaacagaaac

SEQ ID NO: 2645509 - DNA, 25 bp, Homo sapien
gttccaaagtacatgtgcctttgtg

SEQ ID NO: 2645510 - DNA, 25 bp, Homo sapien
taaagggctgagagtacttgagtca

SEQ ID NO: 2645511 - DNA, 25 bp, Homo sapien
aattcctgttccaaagtacatgtgc

SEQ ID NO: 2645512 - DNA, 25 bp, Homo sapien
gtacttgagtcaatgacctcaccct

SEQ ID NO: 2645513 - DNA, 25 bp, Homo sapien
ccggggcctggaaaagcgatgaaat

SEQ ID NO: 2645514 - DNA, 25 bp, Homo sapien
ttgaagtggaattgggtaaacagtg

SEQ ID NO: 2645515 - DNA, 25 bp, Homo sapien
tctttgaagtggaattgggtaaaca

SEQ ID NO: 2645516 - DNA, 25 bp, Homo sapien
agtggaattgggtaaacagtgagct

SEQ ID NO: 2645517 - DNA, 25 bp, Homo sapien
acattgttgagacacccacccgttc

SEQ ID NO: 2645518 - DNA, 25 bp, Homo sapien
catccataagttcctcgaggtgctg

SEQ ID NO: 2645519 - DNA, 25 bp, Homo sapien
gcatacatgatggaggattgctctg

SEQ ID NO: 2645520 - DNA, 25 bp, Homo sapien
catgcatgcaggtccttcggctgta

SEQ ID NO: 2645521 - DNA, 25 bp, Homo sapien
tgtcatagttagcacggggttcaca

SEQ ID NO: 2645522 - DNA, 25 bp, Homo sapien
ttagcacggggttcacatctttgtc

SEQ ID NO: 2645523 - DNA, 25 bp, Homo sapien
tcatagttagcacggggttcacatc

SEQ ID NO: 2645524 - DNA, 25 bp, Homo sapien
tcaatgtcatagttagcacggggtt

SEQ ID NO: 2645525 - DNA, 25 bp, Homo sapien
tgccttgtccactgcttggaagcct

SEQ ID NO: 2645526 - DNA, 25 bp, Homo sapien
gtccactgcttggaagccttgtcat

SEQ ID NO: 2645527 - DNA, 25 bp, Homo sapien
gatggttgccttgtccactgcttgg

SEQ ID NO: 2645528 - DNA, 25 bp, Homo sapien
ggttgccttgtccactgcttggaag

SEQ ID NO: 2645529 - DNA, 25 bp, Homo sapien
tgtaggagggctgcccctttctgtc

SEQ ID NO: 2645530 - DNA, 25 bp, Homo sapien
gggctgtaggagggctgcccctttc

SEQ ID NO: 2645531 - DNA, 25 bp, Homo sapien
catacaatgtgtggcttctgctggg

SEQ ID NO: 2645532 - DNA, 25 bp, Homo sapien
gctgtaggagggctgcccctttctg

SEQ ID NO: 2645533 - DNA, 25 bp, Homo sapien
gataggtgtgtgatgaggcggtatg

SEQ ID NO: 2645534 - DNA, 25 bp, Homo sapien
tgataggtgtgtgatgaggcggtat

SEQ ID NO: 2645535 - DNA, 25 bp, Homo sapien
gctgttcacgtggccgcatttcagg

SEQ ID NO: 2645536 - DNA, 25 bp, Homo sapien
tcaggccctgtcaggtggccatggc

SEQ ID NO: 2645537 - DNA, 25 bp, Homo sapien
ccaacacactgtgccagagcatgcg

SEQ ID NO: 2645538 - DNA, 25 bp, Homo sapien
ctgcctggatttgctgttcacgtgg

SEQ ID NO: 2645539 - DNA, 25 bp, Homo sapien
aatattgccttgccaggtctgcttt

SEQ ID NO: 2645540 - DNA, 25 bp, Homo sapien
ctgcctgcaaatggctccttgacac

SEQ ID NO: 2645541 - DNA, 25 bp, Homo sapien
tctgcctgcaaatggctccttgaca

SEQ ID NO: 2645542 - DNA, 25 bp, Homo sapien
tattgccttgccaggtctgctttct

SEQ ID NO: 2645543 - DNA, 25 bp, Homo sapien
tgcgtccagcctgactaagttcagg

SEQ ID NO: 2645544 - DNA, 25 bp, Homo sapien
tcccaacgaggttagattctctagt

SEQ ID NO: 2645545 - DNA, 25 bp, Homo sapien
tacgtgtaaactttggagaccagcc

SEQ ID NO: 2645546 - DNA, 25 bp, Homo sapien
taagttcaggttataccattgatcc

SEQ ID NO: 2645547 - DNA, 25 bp, Homo sapien
aagcatcgccttgtctctggtgccg

SEQ ID NO: 2645548 - DNA, 25 bp, Homo sapien
caagtcctcttcattagtgctgctg

SEQ ID NO: 2645549 - DNA, 25 bp, Homo sapien
tggcctgggagccattgcactatag

SEQ ID NO: 2645550 - DNA, 25 bp, Homo sapien
agatactgcctggatcacttgcccc

SEQ ID NO: 2645551 - DNA, 25 bp, Homo sapien
cagcaaccgtgtgatccatggcggg

SEQ ID NO: 2645552 - DNA, 25 bp, Homo sapien
tccttttgagcaggacagcaaccgt

SEQ ID NO: 2645553 - DNA, 25 bp, Homo sapien
agggctaggatgctcgtctgtgttc

SEQ ID NO: 2645554 - DNA, 25 bp, Homo sapien
ccatggcgggatgtatcattgaatc

SEQ ID NO: 2645555 - DNA, 25 bp, Homo sapien
gtatcataaccatagtgaccatatg

SEQ ID NO: 2645556 - DNA, 25 bp, Homo sapien
gagaacaggttcatgggtgaaagaa

SEQ ID NO: 2645557 - DNA, 25 bp, Homo sapien
caagaatcaagtttcgtggagaaca

SEQ ID NO: 2645558 - DNA, 25 bp, Homo sapien
tggatgctgttacccctagtgtgcc

SEQ ID NO: 2645559 - DNA, 25 bp, Homo sapien
gcgttgcttaagtcttggcctcact

SEQ ID NO: 2645560 - DNA, 25 bp, Homo sapien
tgtttccctgtgaggaactgtttta

SEQ ID NO: 2645561 - DNA, 25 bp, Homo sapien
tttatgcgttgcttaagtcttggcc

SEQ ID NO: 2645562 - DNA, 25 bp, Homo sapien
ggaactgttttatgcgttgcttaag

SEQ ID NO: 2645563 - DNA, 25 bp, Homo sapien
ttatcatcaagtactttatgtgttt

SEQ ID NO: 2645564 - DNA, 25 bp, Homo sapien
tcttatccactttgtgaatcctttt

SEQ ID NO: 2645565 - DNA, 25 bp, Homo sapien
cttatcatcaagtactttatgtgtt

SEQ ID NO: 2645566 - DNA, 25 bp, Homo sapien
ttcttatccactttgtgaatccttt

SEQ ID NO: 2645567 - DNA, 25 bp, Homo sapien
gacaatggcagtactcctgttctct

SEQ ID NO: 2645568 - DNA, 25 bp, Homo sapien
tgtgaaaggccactggctgcttgct

SEQ ID NO: 2645569 - DNA, 25 bp, Homo sapien
ctggctgcttgctaagggtgaaaag

SEQ ID NO: 2645570 - DNA, 25 bp, Homo sapien
cacattcagggtggtttctttcact

SEQ ID NO: 2645571 - DNA, 25 bp, Homo sapien
gcaaggagaaggcttatgagtcaca

SEQ ID NO: 2645572 - DNA, 25 bp, Homo sapien
agaaggcttatgagtcacagcagtg

SEQ ID NO: 2645573 - DNA, 25 bp, Homo sapien
gttcccgatgctgagaacattcttc

SEQ ID NO: 2645574 - DNA, 25 bp, Homo sapien
gctgagaacattcttctgaaccaac

SEQ ID NO: 2645575 - DNA, 25 bp, Homo sapien
atagggatgcagtttagagtcagaa

SEQ ID NO: 2645576 - DNA, 25 bp, Homo sapien
gatagggatgcagtttagagtcaga

SEQ ID NO: 2645577 - DNA, 25 bp, Homo sapien
gggatagggatgcagtttagagtca

SEQ ID NO: 2645578 - DNA, 25 bp, Homo sapien
cagggatagggatgcagtttagagt

SEQ ID NO: 2645579 - DNA, 25 bp, Homo sapien
ggcaggttcgaaagcatcatttttc

SEQ ID NO: 2645580 - DNA, 25 bp, Homo sapien
tcagaggtgtattcattgctctgga

SEQ ID NO: 2645581 - DNA, 25 bp, Homo sapien
gattttagcacacaactccatggga

SEQ ID NO: 2645582 - DNA, 25 bp, Homo sapien
tttaaatttactgcaccacgaggca

SEQ ID NO: 2645583 - DNA, 25 bp, Homo sapien
tatacagagagattaatcacgtttc

SEQ ID NO: 2645584 - DNA, 25 bp, Homo sapien
attatacagagagattaatcacgtt

SEQ ID NO: 2645585 - DNA, 25 bp, Homo sapien
atacagagagattaatcacgtttca

SEQ ID NO: 2645586 - DNA, 25 bp, Homo sapien
ttatacagagagattaatcacgttt

SEQ ID NO: 2645587 - DNA, 25 bp, Homo sapien
cagagcagcgtggatggtggagtga

SEQ ID NO: 2645588 - DNA, 25 bp, Homo sapien
gtcctaaacagagcagcgtggatgg

SEQ ID NO: 2645589 - DNA, 25 bp, Homo sapien
gcgtggatggtggagtgacagctgc

SEQ ID NO: 2645590 - DNA, 25 bp, Homo sapien
ggtcctaaacagagcagcgtggatg

SEQ ID NO: 2645591 - DNA, 25 bp, Homo sapien
tcctttaatgcctctccgcagttcc

SEQ ID NO: 2645592 - DNA, 25 bp, Homo sapien
tgcatgtgaagagagttcctttaat

SEQ ID NO: 2645593 - DNA, 25 bp, Homo sapien
aacacctaaaaatgcgtccaactgg

SEQ ID NO: 2645594 - DNA, 25 bp, Homo sapien
caggagcccttccaagcttacaaaa

SEQ ID NO: 2645595 - DNA, 25 bp, Homo sapien
ttagatgggaccagtgaagcacagc

SEQ ID NO: 2645596 - DNA, 25 bp, Homo sapien
gggaagaatctggagaacacctaaa

SEQ ID NO: 2645597 - DNA, 25 bp, Homo sapien
ccacaatagtggctacgctcagcct

SEQ ID NO: 2645598 - DNA, 25 bp, Homo sapien
gttcccccacaatagtggctacgct

SEQ ID NO: 2645599 - DNA, 25 bp, Homo sapien
agccgttcccccacaatagtggcta

SEQ ID NO: 2645600 - DNA, 25 bp, Homo sapien
caatagtggctacgctcagccttgc

SEQ ID NO: 2645601 - DNA, 25 bp, Homo sapien
ccacatggtttgttaccaaataggc

SEQ ID NO: 2645602 - DNA, 25 bp, Homo sapien
gtggctggatggatattacctctat

SEQ ID NO: 2645603 - DNA, 25 bp, Homo sapien
ccaaataggccattgctgctaacat

SEQ ID NO: 2645604 - DNA, 25 bp, Homo sapien
cacaggctgtcagcaattccacatg

SEQ ID NO: 2645605 - DNA, 25 bp, Homo sapien
gcatttgggtgcatctctaagtgac

SEQ ID NO: 2645606 - DNA, 25 bp, Homo sapien
caggaagtcgtttccaagggagctg

SEQ ID NO: 2645607 - DNA, 25 bp, Homo sapien
tccaggaagtcgtttccaagggagc

SEQ ID NO: 2645608 - DNA, 25 bp, Homo sapien
catccaggaagtcgtttccaaggga

SEQ ID NO: 2645609 - DNA, 25 bp, Homo sapien
gaagtcgtttccaagggagctgtct

SEQ ID NO: 2645610 - DNA, 25 bp, Homo sapien
gaacaggacacagaagaagctgact

SEQ ID NO: 2645611 - DNA, 25 bp, Homo sapien
agaagctgacttggaggaaaggaaa

SEQ ID NO: 2645612 - DNA, 25 bp, Homo sapien
aaagtacagtgctttgctctgaggg

SEQ ID NO: 2645613 - DNA, 25 bp, Homo sapien
gaaagacctggagtcttgggctcag

SEQ ID NO: 2645614 - DNA, 25 bp, Homo sapien
ggcaccgagtgtggtgtttctcttc

SEQ ID NO: 2645615 - DNA, 25 bp, Homo sapien
aacttcacagccgggcaccgagtgt

SEQ ID NO: 2645616 - DNA, 25 bp, Homo sapien
cgggcaccgagtgtggtgtttctct

SEQ ID NO: 2645617 - DNA, 25 bp, Homo sapien
ttaaacttcacagccgggcaccgag

SEQ ID NO: 2645618 - DNA, 25 bp, Homo sapien
taagggtgacttaacgtggacagtc

SEQ ID NO: 2645619 - DNA, 25 bp, Homo sapien
aaggagcaaacagccggtaagggtg

SEQ ID NO: 2645620 - DNA, 25 bp, Homo sapien
gacttaacgtggacagtccggtcac

SEQ ID NO: 2645621 - DNA, 25 bp, Homo sapien
cagccggtaagggtgacttaacgtg

SEQ ID NO: 2645622 - DNA, 25 bp, Homo sapien
tatccatgaactatggaagagccga

SEQ ID NO: 2645623 - DNA, 25 bp, Homo sapien
cagagccgtctgcatgaaacatttc

SEQ ID NO: 2645624 - DNA, 25 bp, Homo sapien
tctgacacgatgtttttacagccca

SEQ ID NO: 2645625 - DNA, 25 bp, Homo sapien
taaactgtaatcagtccagccaaga

SEQ ID NO: 2645626 - DNA, 25 bp, Homo sapien
ggagatcctgagattggcaaaggga

SEQ ID NO: 2645627 - DNA, 25 bp, Homo sapien
cttggactggagtgtaccaggacca

SEQ ID NO: 2645628 - DNA, 25 bp, Homo sapien
cccaggaatccttggactggagtgt

SEQ ID NO: 2645629 - DNA, 25 bp, Homo sapien
agtgtaccaggaccaacgctctggg

SEQ ID NO: 2645630 - DNA, 25 bp, Homo sapien
ggttttgcatctagcatatttgcag

SEQ ID NO: 2645631 - DNA, 25 bp, Homo sapien
gtttgtgcgtcctccagcaccggga

SEQ ID NO: 2645632 - DNA, 25 bp, Homo sapien
catatttgcaggtcagtgctccagg

SEQ ID NO: 2645633 - DNA, 25 bp, Homo sapien
gggacactaaatggcttgttggcag

SEQ ID NO: 2645634 - DNA, 25 bp, Homo sapien
tacgatcaatttcaacttggaccag

SEQ ID NO: 2645635 - DNA, 25 bp, Homo sapien
agtttgggccactgatgatgtgtga

SEQ ID NO: 2645636 - DNA, 25 bp, Homo sapien
cttctggctctgctaattacgatca

SEQ ID NO: 2645637 - DNA, 25 bp, Homo sapien
gctctgctaattacgatcaatttca

SEQ ID NO: 2645638 - DNA, 25 bp, Homo sapien
caccatcagggagaagttcagttca

SEQ ID NO: 2645639 - DNA, 25 bp, Homo sapien
ctggggggcctgaggatgcaccatc

SEQ ID NO: 2645640 - DNA, 25 bp, Homo sapien
cagggagaagttcagttcaatgtaa

SEQ ID NO: 2645641 - DNA, 25 bp, Homo sapien
catcagggagaagttcagttcaatg

SEQ ID NO: 2645642 - DNA, 25 bp, Homo sapien
tgatttagcttggacaacccatgct

SEQ ID NO: 2645643 - DNA, 25 bp, Homo sapien
aatttgggttgttcagatttagcat

SEQ ID NO: 2645644 - DNA, 25 bp, Homo sapien
tcttcctttgatttagcttggacaa

SEQ ID NO: 2645645 - DNA, 25 bp, Homo sapien
ttggacaacccatgctaaatttggg

SEQ ID NO: 2645646 - DNA, 25 bp, Homo sapien
atcctcaaagagaacaacatagatg

SEQ ID NO: 2645647 - DNA, 25 bp, Homo sapien
taaagtctcctgcttcttgacgagg

SEQ ID NO: 2645648 - DNA, 25 bp, Homo sapien
catggattcttctgaaaaatcctca

SEQ ID NO: 2645649 - DNA, 25 bp, Homo sapien
ggctgcccatatgagcctgcaggct

SEQ ID NO: 2645650 - DNA, 25 bp, Homo sapien
ctgtgtgagctgagaaactccagga

SEQ ID NO: 2645651 - DNA, 25 bp, Homo sapien
gctggtcaaatgacaccctgagaaa

SEQ ID NO: 2645652 - DNA, 25 bp, Homo sapien
catgtgacacccatgaggtggtgga

SEQ ID NO: 2645653 - DNA, 25 bp, Homo sapien
ctccaggaataaccacatgtgacac

SEQ ID NO: 2645654 - DNA, 25 bp, Homo sapien
ttatttgtaaactgctagcctggtt

SEQ ID NO: 2645655 - DNA, 25 bp, Homo sapien
tgtaaactgctagcctggtttcctg

SEQ ID NO: 2645656 - DNA, 25 bp, Homo sapien
ctgttgtaacgctatcttgatgggt

SEQ ID NO: 2645657 - DNA, 25 bp, Homo sapien
cctgtgctgttgtaacgctatcttg

SEQ ID NO: 2645658 - DNA, 25 bp, Homo sapien
gaagaatggtccagcctgcactgct

SEQ ID NO: 2645659 - DNA, 25 bp, Homo sapien
aaatgcctttgaaccgtccactcca

SEQ ID NO: 2645660 - DNA, 25 bp, Homo sapien
gtcaatcctccttgaagaatggtcc

SEQ ID NO: 2645661 - DNA, 25 bp, Homo sapien
tgctttttaccatcagggggcagtg

SEQ ID NO: 2645662 - DNA, 25 bp, Homo sapien
ccctcagatattaccagattaatct

SEQ ID NO: 2645663 - DNA, 25 bp, Homo sapien
tccctcagatattaccagattaatc

SEQ ID NO: 2645664 - DNA, 25 bp, Homo sapien
tttccctcagatattaccagattaa

SEQ ID NO: 2645665 - DNA, 25 bp, Homo sapien
ttccctcagatattaccagattaat

SEQ ID NO: 2645666 - DNA, 25 bp, Homo sapien
gagcagaagacagctctatcggcaa

SEQ ID NO: 2645667 - DNA, 25 bp, Homo sapien
tatccagcacttagatctccttctg

SEQ ID NO: 2645668 - DNA, 25 bp, Homo sapien
ggtttggcagctttatatccagcac

SEQ ID NO: 2645669 - DNA, 25 bp, Homo sapien
tatcggcaaaggcagtgcgaaagcc

SEQ ID NO: 2645670 - DNA, 25 bp, Homo sapien
actgctacaggatccatgtaacgga

SEQ ID NO: 2645671 - DNA, 25 bp, Homo sapien
taagaagtggctatacttttgggcc

SEQ ID NO: 2645672 - DNA, 25 bp, Homo sapien
ttttgggccatctaaatttaagcca

SEQ ID NO: 2645673 - DNA, 25 bp, Homo sapien
gattagtatctaccacacattttca

SEQ ID NO: 2645674 - DNA, 25 bp, Homo sapien
ccaactcttgaactatatgcaggaa

SEQ ID NO: 2645675 - DNA, 25 bp, Homo sapien
gatgttcactgacttagctttattg

SEQ ID NO: 2645676 - DNA, 25 bp, Homo sapien
gaatgtgaatcgacaaagatgagca

SEQ ID NO: 2645677 - DNA, 25 bp, Homo sapien
ttgagcacccgtgttgtgccaggtg

SEQ ID NO: 2645678 - DNA, 25 bp, Homo sapien
tggcatttgcacagaatgtcaccca

SEQ ID NO: 2645679 - DNA, 25 bp, Homo sapien
tcccactctagactcatgaacactg

SEQ ID NO: 2645680 - DNA, 25 bp, Homo sapien
gaacactgtagaaattggtccatgg

SEQ ID NO: 2645681 - DNA, 25 bp, Homo sapien
gaaattggtccatggcatttgcaca

SEQ ID NO: 2645682 - DNA, 25 bp, Homo sapien
attggccctgcctgtgcaaagcttc

SEQ ID NO: 2645683 - DNA, 25 bp, Homo sapien
ctccaacaagcaggagacttgtgtc

SEQ ID NO: 2645684 - DNA, 25 bp, Homo sapien
gccatggcagatgatttctcgtcac

SEQ ID NO: 2645685 - DNA, 25 bp, Homo sapien
ctcccgttctcttgtggccatggca

SEQ ID NO: 2645686 - DNA, 25 bp, Homo sapien
tttgccaggccgctttgataaggag

SEQ ID NO: 2645687 - DNA, 25 bp, Homo sapien
catgtttagagttcgaatcctcctt

SEQ ID NO: 2645688 - DNA, 25 bp, Homo sapien
gccgctttgataaggagatcttcat

SEQ ID NO: 2645689 - DNA, 25 bp, Homo sapien
tcatataattcctttctgtgttgct

SEQ ID NO: 2645690 - DNA, 25 bp, Homo sapien
ggaaacaagaagtggtgtccttgga

SEQ ID NO: 2645691 - DNA, 25 bp, Homo sapien
aaacaagaagtggtgtccttggagg

SEQ ID NO: 2645692 - DNA, 25 bp, Homo sapien
cactgagtcagctgggttgaggaaa

SEQ ID NO: 2645693 - DNA, 25 bp, Homo sapien
tcagctgggttgaggaaacaagaag

SEQ ID NO: 2645694 - DNA, 25 bp, Homo sapien
gatgagaagcagaaattccccaggg

SEQ ID NO: 2645695 - DNA, 25 bp, Homo sapien
ctgaatatatggagttgatggagac

SEQ ID NO: 2645696 - DNA, 25 bp, Homo sapien
gatggagacattccttgatgagaag

SEQ ID NO: 2645697 - DNA, 25 bp, Homo sapien
tatatggagttgatggagacattcc

SEQ ID NO: 2645698 - DNA, 25 bp, Homo sapien
tcagagaggtttccacaagtgctta

SEQ ID NO: 2645699 - DNA, 25 bp, Homo sapien
caaggctgctaggatgtgtacttac

SEQ ID NO: 2645700 - DNA, 25 bp, Homo sapien
tgcattgtgagtatgggccttttcc

SEQ ID NO: 2645701 - DNA, 25 bp, Homo sapien
ttcagatcagattagtacagaggac

SEQ ID NO: 2645702 - DNA, 25 bp, Homo sapien
caattgataacggaagcagatctgg

SEQ ID NO: 2645703 - DNA, 25 bp, Homo sapien
gaggcagacaattgataacggaagc

SEQ ID NO: 2645704 - DNA, 25 bp, Homo sapien
aggacaagaggcagacaattgataa

SEQ ID NO: 2645705 - DNA, 25 bp, Homo sapien
tgataacggaagcagatctgggctc

SEQ ID NO: 2645706 - DNA, 25 bp, Homo sapien
cagcagctgaggagactggtgcttg

SEQ ID NO: 2645707 - DNA, 25 bp, Homo sapien
ctcgtttggtgtggacttggtgcct

SEQ ID NO: 2645708 - DNA, 25 bp, Homo sapien
gcttgtgtgctcgtttggtgtggac

SEQ ID NO: 2645709 - DNA, 25 bp, Homo sapien
tgtggacttggtgcctcttttgtga

SEQ ID NO: 2645710 - DNA, 25 bp, Homo sapien
cttttccttggaaaacatgtctctc

SEQ ID NO: 2645711 - DNA, 25 bp, Homo sapien
ccttggaaaacatgtctctcttcat

SEQ ID NO: 2645712 - DNA, 25 bp, Homo sapien
tgagtggacttcccttgtccttttc

SEQ ID NO: 2645713 - DNA, 25 bp, Homo sapien
tgtccttttccttggaaaacatgtc

SEQ ID NO: 2645714 - DNA, 25 bp, Homo sapien
tggcctttctagcatgccctgtggc

SEQ ID NO: 2645715 - DNA, 25 bp, Homo sapien
ttggcctttctagcatgccctgtgg

SEQ ID NO: 2645716 - DNA, 25 bp, Homo sapien
ggcctttctagcatgccctgtggca

SEQ ID NO: 2645717 - DNA, 25 bp, Homo sapien
ccttggcctttctagcatgccctgt

SEQ ID NO: 2645718 - DNA, 25 bp, Homo sapien
gagccatggcttggccagtcaatgc

SEQ ID NO: 2645719 - DNA, 25 bp, Homo sapien
cctggacctggatgaaatctgccat

SEQ ID NO: 2645720 - DNA, 25 bp, Homo sapien
ccagtcaatgccaagagagggcaga

SEQ ID NO: 2645721 - DNA, 25 bp, Homo sapien
caagagagggcagatcctggacctg

SEQ ID NO: 2645722 - DNA, 25 bp, Homo sapien
agtggagtaggacccctgtaggcgg

SEQ ID NO: 2645723 - DNA, 25 bp, Homo sapien
ctgggcacggtaccccggtgcctgt

SEQ ID NO: 2645724 - DNA, 25 bp, Homo sapien
accgcgggcactgacgccagctggt

SEQ ID NO: 2645725 - DNA, 25 bp, Homo sapien
tggctgcagccaagcgtcagttcac

SEQ ID NO: 2645726 - DNA, 25 bp, Homo sapien
cctaagaggcgggtgaagatattag

SEQ ID NO: 2645727 - DNA, 25 bp, Homo sapien
aggtggaggtggtgcaccatgcacg

SEQ ID NO: 2645728 - DNA, 25 bp, Homo sapien
ccgagaaggctgcccctaagaggcg

SEQ ID NO: 2645729 - DNA, 25 bp, Homo sapien
caccatgcacgccagggccgagaag

SEQ ID NO: 2645730 - DNA, 25 bp, Homo sapien
cagtttcacgggttggcggattggt

SEQ ID NO: 2645731 - DNA, 25 bp, Homo sapien
tttcacgggttggcggattggttca

SEQ ID NO: 2645732 - DNA, 25 bp, Homo sapien
cccagtttcacgggttggcggattg

SEQ ID NO: 2645733 - DNA, 25 bp, Homo sapien
cacgggttggcggattggttcactt

SEQ ID NO: 2645734 - DNA, 25 bp, Homo sapien
gggtgcgccaggtttcatctcggtt

SEQ ID NO: 2645735 - DNA, 25 bp, Homo sapien
tgcactggcaacaggggccgcttga

SEQ ID NO: 2645736 - DNA, 25 bp, Homo sapien
ttgagggtgcgccaggtttcatctc

SEQ ID NO: 2645737 - DNA, 25 bp, Homo sapien
gggccgcttgagggtgcgccaggtt

SEQ ID NO: 2645738 - DNA, 25 bp, Homo sapien
cttgccactgcccagacatttcaag

SEQ ID NO: 2645739 - DNA, 25 bp, Homo sapien
ctgcccagacatttcaagttgtaca

SEQ ID NO: 2645740 - DNA, 25 bp, Homo sapien
acagcctttcatctagggtccctcc

SEQ ID NO: 2645741 - DNA, 25 bp, Homo sapien
ctccccgtccctctttgcatcctct

SEQ ID NO: 2645742 - DNA, 25 bp, Homo sapien
aatctggccgcaccccgacttcgga

SEQ ID NO: 2645743 - DNA, 25 bp, Homo sapien
gatgggaggtctccaacagactgca

SEQ ID NO: 2645744 - DNA, 25 bp, Homo sapien
gcggagcctacagtgtccttttaaa

SEQ ID NO: 2645745 - DNA, 25 bp, Homo sapien
acttcggaccccacctgcagcttgg

SEQ ID NO: 2645746 - DNA, 25 bp, Homo sapien
tgccacctatgggccgtcagaagta

SEQ ID NO: 2645747 - DNA, 25 bp, Homo sapien
tatgggccgtcagaagtacagcgga

SEQ ID NO: 2645748 - DNA, 25 bp, Homo sapien
cctatgggccgtcagaagtacagcg

SEQ ID NO: 2645749 - DNA, 25 bp, Homo sapien
cacctatgggccgtcagaagtacag

SEQ ID NO: 2645750 - DNA, 25 bp, Homo sapien
acgttgccaagccacgtcatcaggc

SEQ ID NO: 2645751 - DNA, 25 bp, Homo sapien
atgtctcgccgctgccgcggaacag

SEQ ID NO: 2645752 - DNA, 25 bp, Homo sapien
gactaggccgcgatcagttccggcg

SEQ ID NO: 2645753 - DNA, 25 bp, Homo sapien
ggctcactagcacacacgcgtcggg

SEQ ID NO: 2645754 - DNA, 25 bp, Homo sapien
cgagcgctgggtacgtccaccggcc

SEQ ID NO: 2645755 - DNA, 25 bp, Homo sapien
cgctgggtacgtccaccggcccaag

SEQ ID NO: 2645756 - DNA, 25 bp, Homo sapien
cggccagcacgtccccgccgtattt

SEQ ID NO: 2645757 - DNA, 25 bp, Homo sapien
ggccggccagcacgtccccgccgta

SEQ ID NO: 2645758 - DNA, 25 bp, Homo sapien
ggctttagcgccttccttctgcagc

SEQ ID NO: 2645759 - DNA, 25 bp, Homo sapien
tgaactggcgggcagttctaagact

SEQ ID NO: 2645760 - DNA, 25 bp, Homo sapien
gcagttctaagactgactgtctgcc

SEQ ID NO: 2645761 - DNA, 25 bp, Homo sapien
ttctgcagcaggcacccgaagagcc

SEQ ID NO: 2645762 - DNA, 25 bp, Homo sapien
tcagaccagaattgcctattgcatt

SEQ ID NO: 2645763 - DNA, 25 bp, Homo sapien
tttaatctactgtccatagtccagt

SEQ ID NO: 2645764 - DNA, 25 bp, Homo sapien
tgtcaattgacccagtaacatcctt

SEQ ID NO: 2645765 - DNA, 25 bp, Homo sapien
gcgaccggcctgatatgaaactttt

SEQ ID NO: 2645766 - DNA, 25 bp, Homo sapien
gcagtgcacttataggatcatagct

SEQ ID NO: 2645767 - DNA, 25 bp, Homo sapien
ggctgcagtgcacttataggatcat

SEQ ID NO: 2645768 - DNA, 25 bp, Homo sapien
tgcagtgcacttataggatcatagc

SEQ ID NO: 2645769 - DNA, 25 bp, Homo sapien
gctgcagtgcacttataggatcata

SEQ ID NO: 2645770 - DNA, 25 bp, Homo sapien
tatgattcgaaaagtcccacagcct

SEQ ID NO: 2645771 - DNA, 25 bp, Homo sapien
atatgattcgaaaagtcccacagcc

SEQ ID NO: 2645772 - DNA, 25 bp, Homo sapien
tcagaaccagctaacaagccacaaa

SEQ ID NO: 2645773 - DNA, 25 bp, Homo sapien
cctctgaataaatcatactggagaa

SEQ ID NO: 2645774 - DNA, 25 bp, Homo sapien
gagctatcacacctggccgagaact

SEQ ID NO: 2645775 - DNA, 25 bp, Homo sapien
ttttctaactgtcttcagaaccagc

SEQ ID NO: 2645776 - DNA, 25 bp, Homo sapien
tcccagaagaaaatggcttttgaaa

SEQ ID NO: 2645777 - DNA, 25 bp, Homo sapien
ttgaaacaaaaccataaaaaatgca

SEQ ID NO: 2645778 - DNA, 25 bp, Homo sapien
tgaaacaaaaccataaaaaatgcag

SEQ ID NO: 2645779 - DNA, 25 bp, Homo sapien
cagaagaaaatggcttttgaaacaa

SEQ ID NO: 2645780 - DNA, 25 bp, Homo sapien
ctggcccactaaacgagaagctgct

SEQ ID NO: 2645781 - DNA, 25 bp, Homo sapien
ctctaaaattgttctgtggcatact

SEQ ID NO: 2645782 - DNA, 25 bp, Homo sapien
aaaacattccatgatcttagtactt

SEQ ID NO: 2645783 - DNA, 25 bp, Homo sapien
aaagacaagagcaagttaactctaa

SEQ ID NO: 2645784 - DNA, 25 bp, Homo sapien
caggaatttttagtgatccaattat

SEQ ID NO: 2645785 - DNA, 25 bp, Homo sapien
cactagtttcctaggatcatttaac

SEQ ID NO: 2645786 - DNA, 25 bp, Homo sapien
tcccactagtttcctaggatcattt

SEQ ID NO: 2645787 - DNA, 25 bp, Homo sapien
ctagtttcctaggatcatttaactt

SEQ ID NO: 2645788 - DNA, 25 bp, Homo sapien
cccactagtttcctaggatcattta

SEQ ID NO: 2645789 - DNA, 25 bp, Homo sapien
agtattcttattctgggccgggtgc

SEQ ID NO: 2645790 - DNA, 25 bp, Homo sapien
gacagtattcttattctgggccggg

SEQ ID NO: 2645791 - DNA, 25 bp, Homo sapien
acataagatcccttgactaagtcta

SEQ ID NO: 2645792 - DNA, 25 bp, Homo sapien
ttgactaagtctagatttccaagac

SEQ ID NO: 2645793 - DNA, 25 bp, Homo sapien
aatacacccagcaactgcatgttta

SEQ ID NO: 2645794 - DNA, 25 bp, Homo sapien
tgaaataatacacccagcaactgca

SEQ ID NO: 2645795 - DNA, 25 bp, Homo sapien
aataatacacccagcaactgcatgt

SEQ ID NO: 2645796 - DNA, 25 bp, Homo sapien
agagtgaaataatacacccagcaac

SEQ ID NO: 2645797 - DNA, 25 bp, Homo sapien
actgtgctcaaatagcagcaaagtc

SEQ ID NO: 2645798 - DNA, 25 bp, Homo sapien
cactgtgctcaaatagcagcaaagt

SEQ ID NO: 2645799 - DNA, 25 bp, Homo sapien
tactattttagcaacttcctaggaa

SEQ ID NO: 2645800 - DNA, 25 bp, Homo sapien
tgaaatactaggtctaattgactgg

SEQ ID NO: 2645801 - DNA, 25 bp, Homo sapien
gggtgagggtcctctatgtactatt

SEQ ID NO: 2645802 - DNA, 25 bp, Homo sapien
ccaactacggattatattttcacaa

SEQ ID NO: 2645803 - DNA, 25 bp, Homo sapien
gcaataatgaaaaaagcagctcccc

SEQ ID NO: 2645804 - DNA, 25 bp, Homo sapien
cacagcaataatgaaaaaagcagct

SEQ ID NO: 2645805 - DNA, 25 bp, Homo sapien
gagatcatcattgtcaaaaagcaat

SEQ ID NO: 2645806 - DNA, 25 bp, Homo sapien
taatgaaaaaagcagctccccttgt

SEQ ID NO: 2645807 - DNA, 25 bp, Homo sapien
gtgatctgccacacctaagaaggca

SEQ ID NO: 2645808 - DNA, 25 bp, Homo sapien
cttgtgatctgccacacctaagaag

SEQ ID NO: 2645809 - DNA, 25 bp, Homo sapien
tgtgatctgccacacctaagaaggc

SEQ ID NO: 2645810 - DNA, 25 bp, Homo sapien
gatctgccacacctaagaaggcaat

SEQ ID NO: 2645811 - DNA, 25 bp, Homo sapien
tgacccatgggcacaagagaagcac

SEQ ID NO: 2645812 - DNA, 25 bp, Homo sapien
gcttgaagacgtttagctccaccaa

SEQ ID NO: 2645813 - DNA, 25 bp, Homo sapien
tttacaacacaaagccagtactagc

SEQ ID NO: 2645814 - DNA, 25 bp, Homo sapien
caccaacgtcgacagagagctttct

SEQ ID NO: 2645815 - DNA, 25 bp, Homo sapien
gggaaaggatccataacgagcacat

SEQ ID NO: 2645816 - DNA, 25 bp, Homo sapien
tccagacaggacgtgttcagtgctc

SEQ ID NO: 2645817 - DNA, 25 bp, Homo sapien
tggaatccacgtagaaatccaggat

SEQ ID NO: 2645818 - DNA, 25 bp, Homo sapien
tgttcatagcccgaagctggtctgt

SEQ ID NO: 2645819 - DNA, 25 bp, Homo sapien
acaaaatgaagaatatagcactcac

SEQ ID NO: 2645820 - DNA, 25 bp, Homo sapien
tagagggagatgataagatattggc

SEQ ID NO: 2645821 - DNA, 25 bp, Homo sapien
cttagagggagatgataagatattg

SEQ ID NO: 2645822 - DNA, 25 bp, Homo sapien
gagggagatgataagatattggcag

SEQ ID NO: 2645823 - DNA, 25 bp, Homo sapien
agagggagatgataagatattggca

SEQ ID NO: 2645824 - DNA, 25 bp, Homo sapien
caggagaatatccaataagggtacc

SEQ ID NO: 2645825 - DNA, 25 bp, Homo sapien
aagttataaagaggtgttccttcag

SEQ ID NO: 2645826 - DNA, 25 bp, Homo sapien
tataaagaggtgttccttcaggaga

SEQ ID NO: 2645827 - DNA, 25 bp, Homo sapien
tgttccttcaggagaatatccaata

SEQ ID NO: 2645828 - DNA, 25 bp, Homo sapien
gaagtaaaagatctgcctagagtca

SEQ ID NO: 2645829 - DNA, 25 bp, Homo sapien
tcgattgagagctatgctgaaaagc

SEQ ID NO: 2645830 - DNA, 25 bp, Homo sapien
tgattccttaataaacctagggatc

SEQ ID NO: 2645831 - DNA, 25 bp, Homo sapien
gagtcactctcctcaagaatttgtt

SEQ ID NO: 2645832 - DNA, 25 bp, Homo sapien
aagtcccatgactaaagcagagcag

SEQ ID NO: 2645833 - DNA, 25 bp, Homo sapien
gatcaggcccagactattggtcagc

SEQ ID NO: 2645834 - DNA, 25 bp, Homo sapien
tcatcagggcagcaaaaagtcccat

SEQ ID NO: 2645835 - DNA, 25 bp, Homo sapien
tgtggaatccatccgagatcaggcc

SEQ ID NO: 2645836 - DNA, 25 bp, Homo sapien
cataggagaaaatccgagtggcttt

SEQ ID NO: 2645837 - DNA, 25 bp, Homo sapien
gagaaaatccgagtggctttccacc

SEQ ID NO: 2645838 - DNA, 25 bp, Homo sapien
aggagaaaatccgagtggctttcca

SEQ ID NO: 2645839 - DNA, 25 bp, Homo sapien
gaaaatccgagtggctttccaccta

SEQ ID NO: 2645840 - DNA, 25 bp, Homo sapien
tgtgagtgtctaattctggaggatc

SEQ ID NO: 2645841 - DNA, 25 bp, Homo sapien
tctaattctggaggatcaatcaatc

SEQ ID NO: 2645842 - DNA, 25 bp, Homo sapien
tcaatcaatctagccactgactcca

SEQ ID NO: 2645843 - DNA, 25 bp, Homo sapien
cacaaaaaacgctattactattaga

SEQ ID NO: 2645844 - DNA, 25 bp, Homo sapien
ccaagtactgcttacagagactcca

SEQ ID NO: 2645845 - DNA, 25 bp, Homo sapien
ttcctgattcggaccatttgactcc

SEQ ID NO: 2645846 - DNA, 25 bp, Homo sapien
cactggtggacagtgaattgtttcc

SEQ ID NO: 2645847 - DNA, 25 bp, Homo sapien
taccaccaagggttagtcacgctta

SEQ ID NO: 2645848 - DNA, 25 bp, Homo sapien
aaatttgaacagtttatatgccaac

SEQ ID NO: 2645849 - DNA, 25 bp, Homo sapien
tgaaagtactgcttactagggcaag

SEQ ID NO: 2645850 - DNA, 25 bp, Homo sapien
ggtcttattatgtcttaaacacagt

SEQ ID NO: 2645851 - DNA, 25 bp, Homo sapien
taatgagcagattccaaatatggtc

SEQ ID NO: 2645852 - DNA, 25 bp, Homo sapien
ttactatcagccctccaactgagac

SEQ ID NO: 2645853 - DNA, 25 bp, Homo sapien
catatggtgtgaatggctgtgatca

SEQ ID NO: 2645854 - DNA, 25 bp, Homo sapien
aatggctgtgatcagatgagtgaca

SEQ ID NO: 2645855 - DNA, 25 bp, Homo sapien
ccatggtcactgtgtccatgcatat

SEQ ID NO: 2645856 - DNA, 25 bp, Homo sapien
cactgtgtccatgcatatggtgtga

SEQ ID NO: 2645857 - DNA, 25 bp, Homo sapien
tcagctgtcactatgaaaaggacta

SEQ ID NO: 2645858 - DNA, 25 bp, Homo sapien
cttgaggcaagttttgacattaccc

SEQ ID NO: 2645859 - DNA, 25 bp, Homo sapien
gacataggcactcatgacacagcgt

SEQ ID NO: 2645860 - DNA, 25 bp, Homo sapien
gacacagcgtgccaaattttatggt

SEQ ID NO: 2645861 - DNA, 25 bp, Homo sapien
gaacagagtgggtcagcgatgaacc

SEQ ID NO: 2645862 - DNA, 25 bp, Homo sapien
tggatacgatcacaccaatgctgcc

SEQ ID NO: 2645863 - DNA, 25 bp, Homo sapien
caaactgctctataagaactgtgga

SEQ ID NO: 2645864 - DNA, 25 bp, Homo sapien
caatgctgccaagtgtatctgccaa

SEQ ID NO: 2645865 - DNA, 25 bp, Homo sapien
tttcatattctggtggcaatctcag

SEQ ID NO: 2645866 - DNA, 25 bp, Homo sapien
agcaatatgtagttctttttcatat

SEQ ID NO: 2645867 - DNA, 25 bp, Homo sapien
cttttctaaagcaatatgtagttct

SEQ ID NO: 2645868 - DNA, 25 bp, Homo sapien
ctggtggcaatctcaggagtagaac

SEQ ID NO: 2645869 - DNA, 25 bp, Homo sapien
tatttggttgtctgttttacttcca

SEQ ID NO: 2645870 - DNA, 25 bp, Homo sapien
ttttacttccagcaaagacttcaaa

SEQ ID NO: 2645871 - DNA, 25 bp, Homo sapien
gtagtgaagaaattacatacagtac

SEQ ID NO: 2645872 - DNA, 25 bp, Homo sapien
caaaaatgtgattttcaaggaagaa

SEQ ID NO: 2645873 - DNA, 25 bp, Homo sapien
tctgcctattctaatcatgacctag

SEQ ID NO: 2645874 - DNA, 25 bp, Homo sapien
ctttacacggacacattcatatgca

SEQ ID NO: 2645875 - DNA, 25 bp, Homo sapien
taaaatgggctcttatcaatagcag

SEQ ID NO: 2645876 - DNA, 25 bp, Homo sapien
tgaactacaagttctcctttacacg

SEQ ID NO: 2645877 - DNA, 25 bp, Homo sapien
ttgttctagcacatcagatgtcacc

SEQ ID NO: 2645878 - DNA, 25 bp, Homo sapien
gcagaatgacgccaaaaatgagggt

SEQ ID NO: 2645879 - DNA, 25 bp, Homo sapien
tgttcctgccacaatactagcagaa

SEQ ID NO: 2645880 - DNA, 25 bp, Homo sapien
cacctgtatatgaattgttcctgcc

SEQ ID NO: 2645881 - DNA, 25 bp, Homo sapien
catatgttgaaagtatgcctccttt

SEQ ID NO: 2645882 - DNA, 25 bp, Homo sapien
gaacatcatgaaatccagtacttag

SEQ ID NO: 2645883 - DNA, 25 bp, Homo sapien
gtacttaggccagacatatgttgaa

SEQ ID NO: 2645884 - DNA, 25 bp, Homo sapien
gtttactccagcatctttaagtatt

SEQ ID NO: 2645885 - DNA, 25 bp, Homo sapien
agaaagattccttgatccagtagta

SEQ ID NO: 2645886 - DNA, 25 bp, Homo sapien
ctttaggctatgcaaaaaatggact

SEQ ID NO: 2645887 - DNA, 25 bp, Homo sapien
ggagatgcttcctgatagaaagtaa

SEQ ID NO: 2645888 - DNA, 25 bp, Homo sapien
taattttggtcttcactagaatcca

SEQ ID NO: 2645889 - DNA, 25 bp, Homo sapien
tcattgcttatctcatatcagtggt

SEQ ID NO: 2645890 - DNA, 25 bp, Homo sapien
gatgttatacacttccctattctca

SEQ ID NO: 2645891 - DNA, 25 bp, Homo sapien
cagtggttgaagtttctcccaaata

SEQ ID NO: 2645892 - DNA, 25 bp, Homo sapien
ttacatttaaagtggcaatacagat

SEQ ID NO: 2645893 - DNA, 25 bp, Homo sapien
tcacaacgttatggagctaagaaag

SEQ ID NO: 2645894 - DNA, 25 bp, Homo sapien
cataggcagagaattcaactgtgag

SEQ ID NO: 2645895 - DNA, 25 bp, Homo sapien
ttaccactgcttggataccagcttg

SEQ ID NO: 2645896 - DNA, 25 bp, Homo sapien
cattctttggtgctgataaaactgc

SEQ ID NO: 2645897 - DNA, 25 bp, Homo sapien
tccctcaaaacaggcttctattttg

SEQ ID NO: 2645898 - DNA, 25 bp, Homo sapien
cctcaaaacaggcttctattttggg

SEQ ID NO: 2645899 - DNA, 25 bp, Homo sapien
cctccctcaaaacaggcttctattt

SEQ ID NO: 2645900 - DNA, 25 bp, Homo sapien
tcaaaacaggcttctattttgggca

SEQ ID NO: 2645901 - DNA, 25 bp, Homo sapien
caaaaagccataaatgattgtatta

SEQ ID NO: 2645902 - DNA, 25 bp, Homo sapien
agagcgagactctaaaaactaataa

SEQ ID NO: 2645903 - DNA, 25 bp, Homo sapien
acacaaaaagccataaatgattgta

SEQ ID NO: 2645904 - DNA, 25 bp, Homo sapien
gcgagactctaaaaactaataaata

SEQ ID NO: 2645905 - DNA, 25 bp, Homo sapien
taagctccattagggcaggactttg

SEQ ID NO: 2645906 - DNA, 25 bp, Homo sapien
catactggtcttgtcttctacatta

SEQ ID NO: 2645907 - DNA, 25 bp, Homo sapien
tatccctagctcctagtgcagtgta

SEQ ID NO: 2645908 - DNA, 25 bp, Homo sapien
tattactgaggactttatccctagc

SEQ ID NO: 2645909 - DNA, 25 bp, Homo sapien
tcaagctctgccaaaacaatggttt

SEQ ID NO: 2645910 - DNA, 25 bp, Homo sapien
aagctctgccaaaacaatggttttt

SEQ ID NO: 2645911 - DNA, 25 bp, Homo sapien
cctcaagctctgccaaaacaatggt

SEQ ID NO: 2645912 - DNA, 25 bp, Homo sapien
gtatcttggttacttcctcaagctc

SEQ ID NO: 2645913 - DNA, 25 bp, Homo sapien
ccatttctacggtagcagcaataat

SEQ ID NO: 2645914 - DNA, 25 bp, Homo sapien
tccatttctacggtagcagcaataa

SEQ ID NO: 2645915 - DNA, 25 bp, Homo sapien
ttccatttctacggtagcagcaata

SEQ ID NO: 2645916 - DNA, 25 bp, Homo sapien
catttctacggtagcagcaataata

SEQ ID NO: 2645917 - DNA, 25 bp, Homo sapien
agcagtgaagccagtgcgccgccca

SEQ ID NO: 2645918 - DNA, 25 bp, Homo sapien
gagcagtgaagccagtgcgccgccc

SEQ ID NO: 2645919 - DNA, 25 bp, Homo sapien
tggagagcagtgaagccagtgcgcc

SEQ ID NO: 2645920 - DNA, 25 bp, Homo sapien
gagagcagtgaagccagtgcgccgc

SEQ ID NO: 2645921 - DNA, 25 bp, Homo sapien
tattggcctgttcgtggcactcact

SEQ ID NO: 2645922 - DNA, 25 bp, Homo sapien
acagtgaggctaggccggaaggcct

SEQ ID NO: 2645923 - DNA, 25 bp, Homo sapien
gtttccagggcgatcgcgcgaaggc

SEQ ID NO: 2645924 - DNA, 25 bp, Homo sapien
gctgccggtcgcagagaatgcgttt

SEQ ID NO: 2645925 - DNA, 25 bp, Homo sapien
ctagcctcagatttaaaccccgcac

SEQ ID NO: 2645926 - DNA, 25 bp, Homo sapien
gaaaccaacagccgttccgccgcag

SEQ ID NO: 2645927 - DNA, 25 bp, Homo sapien
gcagaaaccaacagccgttccgccg

SEQ ID NO: 2645928 - DNA, 25 bp, Homo sapien
aaccaacagccgttccgccgcagca

SEQ ID NO: 2645929 - DNA, 25 bp, Homo sapien
ttccgccgcagcacgccgagaagag

SEQ ID NO: 2645930 - DNA, 25 bp, Homo sapien
gaggcccgaccagccaaggacctac

SEQ ID NO: 2645931 - DNA, 25 bp, Homo sapien
ggggagaagcagaacaccggaggcc

SEQ ID NO: 2645932 - DNA, 25 bp, Homo sapien
agaagcagaacaccggaggcccgac

SEQ ID NO: 2645933 - DNA, 25 bp, Homo sapien
gagaagcagaacaccggaggcccga

SEQ ID NO: 2645934 - DNA, 25 bp, Homo sapien
agcagctaagaaggccgcgttagtt

SEQ ID NO: 2645935 - DNA, 25 bp, Homo sapien
gctcgggaggctcccgcaggcgagg

SEQ ID NO: 2645936 - DNA, 25 bp, Homo sapien
cgttagttcgcagtccgaagcggct

SEQ ID NO: 2645937 - DNA, 25 bp, Homo sapien
cccacctcggcgctctcttggtgag

SEQ ID NO: 2645938 - DNA, 25 bp, Homo sapien
cgtaggaacgcgctttgcgcctgcc

SEQ ID NO: 2645939 - DNA, 25 bp, Homo sapien
cactgactttgttaccaatgtcccc

SEQ ID NO: 2645940 - DNA, 25 bp, Homo sapien
tgtccccaagagctgttcttggcct

SEQ ID NO: 2645941 - DNA, 25 bp, Homo sapien
gttgatcttcgccttattttcagca

SEQ ID NO: 2645942 - DNA, 25 bp, Homo sapien
tttccagtagctgaaggttttgctt

SEQ ID NO: 2645943 - DNA, 25 bp, Homo sapien
tatcaatgacttttccagtagctga

SEQ ID NO: 2645944 - DNA, 25 bp, Homo sapien
tttttatcaatgacttttccagtag

SEQ ID NO: 2645945 - DNA, 25 bp, Homo sapien
agttttttatcaatgacttttccag

SEQ ID NO: 2645946 - DNA, 25 bp, Homo sapien
ataggctcaggcgaaagtttttctt

SEQ ID NO: 2645947 - DNA, 25 bp, Homo sapien
aataggctcaggcgaaagtttttct

SEQ ID NO: 2645948 - DNA, 25 bp, Homo sapien
caaaataggctcaggcgaaagtttt

SEQ ID NO: 2645949 - DNA, 25 bp, Homo sapien
tcatttactgcaagaattacatcag

SEQ ID NO: 2645950 - DNA, 25 bp, Homo sapien
ctcaagttgtctcagataagcataa

SEQ ID NO: 2645951 - DNA, 25 bp, Homo sapien
ctttcacatattcactacaaaggtt

SEQ ID NO: 2645952 - DNA, 25 bp, Homo sapien
attacatcagagaaagcctgacaca

SEQ ID NO: 2645953 - DNA, 25 bp, Homo sapien
tgtactagccagtcaattaggatgg

SEQ ID NO: 2645954 - DNA, 25 bp, Homo sapien
gaaccgatcaataatggagacagtc

SEQ ID NO: 2645955 - DNA, 25 bp, Homo sapien
catggtctcctgcaacaacctgaat

SEQ ID NO: 2645956 - DNA, 25 bp, Homo sapien
ttaggatggctctcatgtttccagt

SEQ ID NO: 2645957 - DNA, 25 bp, Homo sapien
ctgcaatgggaatttcaatagggtg

SEQ ID NO: 2645958 - DNA, 25 bp, Homo sapien
gcaaaatcttaatgacaccatatcc

SEQ ID NO: 2645959 - DNA, 25 bp, Homo sapien
gactcggctagaatcctggaaggga

SEQ ID NO: 2645960 - DNA, 25 bp, Homo sapien
atcagtttcttatgactcggctaga

SEQ ID NO: 2645961 - DNA, 25 bp, Homo sapien
tgcaaaggtagaggccgacccagac

SEQ ID NO: 2645962 - DNA, 25 bp, Homo sapien
ccaatcttagatgctctccgaagga

SEQ ID NO: 2645963 - DNA, 25 bp, Homo sapien
cttagtataagtgttgtcagtcaca

SEQ ID NO: 2645964 - DNA, 25 bp, Homo sapien
gaagtgcaaaggtagaggccgaccc

SEQ ID NO: 2645965 - DNA, 25 bp, Homo sapien
acaaaacccatgttactgagtttct

SEQ ID NO: 2645966 - DNA, 25 bp, Homo sapien
ctgaaacaaaacccatgttactgag

SEQ ID NO: 2645967 - DNA, 25 bp, Homo sapien
tgttactgagtttctttcagaaaat

SEQ ID NO: 2645968 - DNA, 25 bp, Homo sapien
aacccatgttactgagtttctttca

SEQ ID NO: 2645969 - DNA, 25 bp, Homo sapien
tagttagttccatcaggtatttggc

SEQ ID NO: 2645970 - DNA, 25 bp, Homo sapien
ttccatcaggtatttggccaaagta

SEQ ID NO: 2645971 - DNA, 25 bp, Homo sapien
ggccaaagtatgttgctcgacatca

SEQ ID NO: 2645972 - DNA, 25 bp, Homo sapien
gcaccatgtcatagtccaacatagt

SEQ ID NO: 2645973 - DNA, 25 bp, Homo sapien
tggtgggcgactcttttgtagttca

SEQ ID NO: 2645974 - DNA, 25 bp, Homo sapien
ataagtgtgatgatttggtgttcat

SEQ ID NO: 2645975 - DNA, 25 bp, Homo sapien
atgtgaacatgtgaaacgtgccacc

SEQ ID NO: 2645976 - DNA, 25 bp, Homo sapien
caaaccttgttacaatgtgggcata

SEQ ID NO: 2645977 - DNA, 25 bp, Homo sapien
tataactgaaatttaagacaaagct

SEQ ID NO: 2645978 - DNA, 25 bp, Homo sapien
cctctgctcaaacctaattgcactt

SEQ ID NO: 2645979 - DNA, 25 bp, Homo sapien
tgttagatgttattcaggagtggaa

SEQ ID NO: 2645980 - DNA, 25 bp, Homo sapien
gatgggtactgtataattaatataa

SEQ ID NO: 2645981 - DNA, 25 bp, Homo sapien
ccatgactacattcttagccaggtg

SEQ ID NO: 2645982 - DNA, 25 bp, Homo sapien
tagccaggtgctgcataactggaag

SEQ ID NO: 2645983 - DNA, 25 bp, Homo sapien
tcttcagtatatgacaggtaatgtt

SEQ ID NO: 2645984 - DNA, 25 bp, Homo sapien
gctttgtaagtccttgatttaccat

SEQ ID NO: 2645985 - DNA, 25 bp, Homo sapien
aaaaagatagcaattaaagaggcaa

SEQ ID NO: 2645986 - DNA, 25 bp, Homo sapien
caagatgcaatgatacaggtattca

SEQ ID NO: 2645987 - DNA, 25 bp, Homo sapien
acaagatgcaatgatacaggtattc

SEQ ID NO: 2645988 - DNA, 25 bp, Homo sapien
agatagcaattaaagaggcaaaaga

SEQ ID NO: 2645989 - DNA, 25 bp, Homo sapien
cttgaactagtgcagaattcagctg

SEQ ID NO: 2645990 - DNA, 25 bp, Homo sapien
ttcgatgtggcatacttgttcttga

SEQ ID NO: 2645991 - DNA, 25 bp, Homo sapien
ttcagctgtggtagagtgctgatct

SEQ ID NO: 2645992 - DNA, 25 bp, Homo sapien
tcttagcatgcttcgatgtggcata

SEQ ID NO: 2645993 - DNA, 25 bp, Homo sapien
tgtaaatatagtactccaactcaag

SEQ ID NO: 2645994 - DNA, 25 bp, Homo sapien
gtaaatatagtactccaactcaagt

SEQ ID NO: 2645995 - DNA, 25 bp, Homo sapien
ttgtaaatatagtactccaactcaa

SEQ ID NO: 2645996 - DNA, 25 bp, Homo sapien
aaatatagtactccaactcaagttt

SEQ ID NO: 2645997 - DNA, 25 bp, Homo sapien
tttattaaaagtaaatgcaacagta

SEQ ID NO: 2645998 - DNA, 25 bp, Homo sapien
tattaaaagtaaatgcaacagtaat

SEQ ID NO: 2645999 - DNA, 25 bp, Homo sapien
acaagctttattaaaagtaaatgca

SEQ ID NO: 2646000 - DNA, 25 bp, Homo sapien
ccacaagctttattaaaagtaaatg

SEQ ID NO: 2646001 - DNA, 25 bp, Homo sapien
cagattctccatgacttggcttaca

SEQ ID NO: 2646002 - DNA, 25 bp, Homo sapien
ttacatgcagtatgtcctatggaag

SEQ ID NO: 2646003 - DNA, 25 bp, Homo sapien
gccaggtatataaaacaagaaccca

SEQ ID NO: 2646004 - DNA, 25 bp, Homo sapien
catatacatcaattggatccccagg

SEQ ID NO: 2646005 - DNA, 25 bp, Homo sapien
aacactgggattacaccgctggtgt

SEQ ID NO: 2646006 - DNA, 25 bp, Homo sapien
acactgggattacaccgctggtgtg

SEQ ID NO: 2646007 - DNA, 25 bp, Homo sapien
cagaaagatgcctttttaacatgcc

SEQ ID NO: 2646008 - DNA, 25 bp, Homo sapien
gcctttttaacatgccacatcttca

SEQ ID NO: 2646009 - DNA, 25 bp, Homo sapien
cttctgaagatcagggacgggccac

SEQ ID NO: 2646010 - DNA, 25 bp, Homo sapien
ccacaagtgcgaggcattgcagaca

SEQ ID NO: 2646011 - DNA, 25 bp, Homo sapien
acgggccacaagtgcgaggcattgc

SEQ ID NO: 2646012 - DNA, 25 bp, Homo sapien
tgtttggcggagaaaccagtggctt

SEQ ID NO: 2646013 - DNA, 25 bp, Homo sapien
ttgccgtggttactacgggctcctc

SEQ ID NO: 2646014 - DNA, 25 bp, Homo sapien
gtggttactacgggctcctctttca

SEQ ID NO: 2646015 - DNA, 25 bp, Homo sapien
tgccgtggttactacgggctcctct

SEQ ID NO: 2646016 - DNA, 25 bp, Homo sapien
actcaacaggcaaacgcgctcagaa

SEQ ID NO: 2646017 - DNA, 25 bp, Homo sapien
gcaaacgcgctcagaaaaggtcgct

SEQ ID NO: 2646018 - DNA, 25 bp, Homo sapien
gctcagaaaaggtcgcttttcccgc

SEQ ID NO: 2646019 - DNA, 25 bp, Homo sapien
ggaaaggctaccactcaacaggcaa

SEQ ID NO: 2646020 - DNA, 25 bp, Homo sapien
ggcgtcttgcatctggggctgctcc

SEQ ID NO: 2646021 - DNA, 25 bp, Homo sapien
agggtcatgcggtcctcgctgcacg

SEQ ID NO: 2646022 - DNA, 25 bp, Homo sapien
tgggcgccggcgacctgcggtggcc

SEQ ID NO: 2646023 - DNA, 25 bp, Homo sapien
ggagtccgcgggctcgtcggcgtct

SEQ ID NO: 2646024 - DNA, 25 bp, Homo sapien
ttggccccggctgaggaggccaaag

SEQ ID NO: 2646025 - DNA, 25 bp, Homo sapien
ccggctgaggaggccaaagggaaca

SEQ ID NO: 2646026 - DNA, 25 bp, Homo sapien
ggctgaggaggccaaagggaacaac

SEQ ID NO: 2646027 - DNA, 25 bp, Homo sapien
gccccggctgaggaggccaaaggga

SEQ ID NO: 2646028 - DNA, 25 bp, Homo sapien
gacctgacgtgaccgagcgtgaatt

SEQ ID NO: 2646029 - DNA, 25 bp, Homo sapien
tgaatgaggcaatcacggagacctg

SEQ ID NO: 2646030 - DNA, 25 bp, Homo sapien
ccttctgagcaagggcggagttccg

SEQ ID NO: 2646031 - DNA, 25 bp, Homo sapien
gaattcgaaccctagcccttctgag

SEQ ID NO: 2646032 - DNA, 25 bp, Homo sapien
acaccgtccgcttagtagaatttat

SEQ ID NO: 2646033 - DNA, 25 bp, Homo sapien
ttctcatcgaatcttccccagcaac

SEQ ID NO: 2646034 - DNA, 25 bp, Homo sapien
cccagcaaccgcttagtggaaaagt

SEQ ID NO: 2646035 - DNA, 25 bp, Homo sapien
agtataaacaccgtccgcttagtag

SEQ ID NO: 2646036 - DNA, 25 bp, Homo sapien
tattcttagcttgagtggtcacaca

SEQ ID NO: 2646037 - DNA, 25 bp, Homo sapien
acggtctctgttttagctactcaat

SEQ ID NO: 2646038 - DNA, 25 bp, Homo sapien
tagggtttgtgagtcacacggtctc

SEQ ID NO: 2646039 - DNA, 25 bp, Homo sapien
ttgtggcaggaaagttgtactccaa

SEQ ID NO: 2646040 - DNA, 25 bp, Homo sapien
ttgcatcaaccattgatttatattc

SEQ ID NO: 2646041 - DNA, 25 bp, Homo sapien
gcttcgatttgcttttcttgcataa

SEQ ID NO: 2646042 - DNA, 25 bp, Homo sapien
ttcgatttgcttttcttgcataatt

SEQ ID NO: 2646043 - DNA, 25 bp, Homo sapien
cttcgatttgcttttcttgcataat

SEQ ID NO: 2646044 - DNA, 25 bp, Homo sapien
caaaagcaacttttacctcttcaat

SEQ ID NO: 2646045 - DNA, 25 bp, Homo sapien
ctcaaaagcaacttttacctcttca

SEQ ID NO: 2646046 - DNA, 25 bp, Homo sapien
ctagactgtctgctaattttctcca

SEQ ID NO: 2646047 - DNA, 25 bp, Homo sapien
gactgtctgctaattttctccaggt

SEQ ID NO: 2646048 - DNA, 25 bp, Homo sapien
ttttaagtgcagttgaaagtctcat

SEQ ID NO: 2646049 - DNA, 25 bp, Homo sapien
tttttaagtgcagttgaaagtctca

SEQ ID NO: 2646050 - DNA, 25 bp, Homo sapien
agacatgagctactgaggccccacc

SEQ ID NO: 2646051 - DNA, 25 bp, Homo sapien
cccaaagtccggattttacatcaag

SEQ ID NO: 2646052 - DNA, 25 bp, Homo sapien
tagcctacgggtttgttttctgtga

SEQ ID NO: 2646053 - DNA, 25 bp, Homo sapien
caaggttcactcttgcttgtgtata

SEQ ID NO: 2646054 - DNA, 25 bp, Homo sapien
gacattgaagaataccaaatttaaa

SEQ ID NO: 2646055 - DNA, 25 bp, Homo sapien
caccctaataacttcctaacaagct

SEQ ID NO: 2646056 - DNA, 25 bp, Homo sapien
taataacttcctaacaagctgcttt

SEQ ID NO: 2646057 - DNA, 25 bp, Homo sapien
tgttaaaactagatatgcatttccc

SEQ ID NO: 2646058 - DNA, 25 bp, Homo sapien
taggtgtttcatgttatccatgagc

SEQ ID NO: 2646059 - DNA, 25 bp, Homo sapien
tagctctaataggtgtttcatgtta

SEQ ID NO: 2646060 - DNA, 25 bp, Homo sapien
tctaataggtgtttcatgttatcca

SEQ ID NO: 2646061 - DNA, 25 bp, Homo sapien
gtgtttcatgttatccatgagcaca

SEQ ID NO: 2646062 - DNA, 25 bp, Homo sapien
tctttctaatatcaagcagtttttc

SEQ ID NO: 2646063 - DNA, 25 bp, Homo sapien
aagagatctggccttatcaatctat

SEQ ID NO: 2646064 - DNA, 25 bp, Homo sapien
ataaagtaagcaaaatgtgttctgc

SEQ ID NO: 2646065 - DNA, 25 bp, Homo sapien
aatttctcagtggctaagagatctg

SEQ ID NO: 2646066 - DNA, 25 bp, Homo sapien
tggccttatcaatctataaagtaag

SEQ ID NO: 2646067 - DNA, 25 bp, Homo sapien
gttttgtcgtatgatctttatcctc

SEQ ID NO: 2646068 - DNA, 25 bp, Homo sapien
taggttttgtcgtatgatctttatc

SEQ ID NO: 2646069 - DNA, 25 bp, Homo sapien
ccatactgtccaaatcaatcttctg

SEQ ID NO: 2646070 - DNA, 25 bp, Homo sapien
tctgtaggttttgtcgtatgatctt

SEQ ID NO: 2646071 - DNA, 25 bp, Homo sapien
tcaagctgcagaacaatttccttaa

SEQ ID NO: 2646072 - DNA, 25 bp, Homo sapien
ggatcctctgcccaattgactttac

SEQ ID NO: 2646073 - DNA, 25 bp, Homo sapien
gatcctctgcccaattgactttact

SEQ ID NO: 2646074 - DNA, 25 bp, Homo sapien
attcttctcaagctgcagaacaatt

SEQ ID NO: 2646075 - DNA, 25 bp, Homo sapien
ttacggtggacagacaaatgcacag

SEQ ID NO: 2646076 - DNA, 25 bp, Homo sapien
aaaatgcaaactagaccaggctcgg

SEQ ID NO: 2646077 - DNA, 25 bp, Homo sapien
tgcacagaagtattccaaataagag

SEQ ID NO: 2646078 - DNA, 25 bp, Homo sapien
caactgtaaacgttatggatatgct

SEQ ID NO: 2646079 - DNA, 25 bp, Homo sapien
catttcaagtttcaagtccttctaa

SEQ ID NO: 2646080 - DNA, 25 bp, Homo sapien
gaattgatccttaagaaggaacttg

SEQ ID NO: 2646081 - DNA, 25 bp, Homo sapien
gatccttaagaaggaacttggccag

SEQ ID NO: 2646082 - DNA, 25 bp, Homo sapien
atgctagcatcatttcaagtttcaa

SEQ ID NO: 2646083 - DNA, 25 bp, Homo sapien
tgggctctctcaggcaagtattgca

SEQ ID NO: 2646084 - DNA, 25 bp, Homo sapien
tggatgagactcaaggccatgactc

SEQ ID NO: 2646085 - DNA, 25 bp, Homo sapien
tttgatgggcacagttccaacccag

SEQ ID NO: 2646086 - DNA, 25 bp, Homo sapien
tcagcagttgaagagaggtacctgg

SEQ ID NO: 2646087 - DNA, 25 bp, Homo sapien
gaacactgcttcatccgaggggttt

SEQ ID NO: 2646088 - DNA, 25 bp, Homo sapien
gggtttaacactgtgtgctcacatg

SEQ ID NO: 2646089 - DNA, 25 bp, Homo sapien
ccagcagtttcggtgttttgtgagg

SEQ ID NO: 2646090 - DNA, 25 bp, Homo sapien
tttgtgagggctcagtcttttcttc

SEQ ID NO: 2646091 - DNA, 25 bp, Homo sapien
gatcactggagtcccgggcagctgt

SEQ ID NO: 2646092 - DNA, 25 bp, Homo sapien
gcgagccgcggcgatcactggagtc

SEQ ID NO: 2646093 - DNA, 25 bp, Homo sapien
gggcagtttccggggcgcgagcgag

SEQ ID NO: 2646094 - DNA, 25 bp, Homo sapien
gcgcgagcgagccgcggcgatcact

SEQ ID NO: 2646095 - DNA, 25 bp, Homo sapien
gaccctactagcagacgccatcttg

SEQ ID NO: 2646096 - DNA, 25 bp, Homo sapien
cagacgccatcttgctgcccatcat

SEQ ID NO: 2646097 - DNA, 25 bp, Homo sapien
tagcagacgccatcttgctgcccat

SEQ ID NO: 2646098 - DNA, 25 bp, Homo sapien
ctgaacgaccctactagcagacgcc

SEQ ID NO: 2646099 - DNA, 25 bp, Homo sapien
gcggaaacgcgacaaattgctttac

SEQ ID NO: 2646100 - DNA, 25 bp, Homo sapien
gtccctaccgcccaagatgcggaaa

SEQ ID NO: 2646101 - DNA, 25 bp, Homo sapien
tgccaagatgctgcacggttgccgc

SEQ ID NO: 2646102 - DNA, 25 bp, Homo sapien
cggtccaacaggctcaaagtcccat

SEQ ID NO: 2646103 - DNA, 25 bp, Homo sapien
acccgcacacgcctaagactaacaa

SEQ ID NO: 2646104 - DNA, 25 bp, Homo sapien
tcctagacggcgattggccaggcta

SEQ ID NO: 2646105 - DNA, 25 bp, Homo sapien
agactaacaaggtcctggcggagga

SEQ ID NO: 2646106 - DNA, 25 bp, Homo sapien
gatcccggcagtaggtacaggacct

SEQ ID NO: 2646107 - DNA, 25 bp, Homo sapien
ctttgttcctatgttagaagggcac

SEQ ID NO: 2646108 - DNA, 25 bp, Homo sapien
tatatatagtacctgcctgctgaga

SEQ ID NO: 2646109 - DNA, 25 bp, Homo sapien
gggaccccatggcagtatatatagt

SEQ ID NO: 2646110 - DNA, 25 bp, Homo sapien
gaagggcacagaccattccttactg

SEQ ID NO: 2646111 - DNA, 25 bp, Homo sapien
taaactctaactggcactgtagtcc

SEQ ID NO: 2646112 - DNA, 25 bp, Homo sapien
agctttataggcctgtcacagagat

SEQ ID NO: 2646113 - DNA, 25 bp, Homo sapien
cacagagatactcaacaaattttgc

SEQ ID NO: 2646114 - DNA, 25 bp, Homo sapien
tacaggcatacatcagtgagcctgg

SEQ ID NO: 2646115 - DNA, 25 bp, Homo sapien
gaaatgatctactaaacctcataag

SEQ ID NO: 2646116 - DNA, 25 bp, Homo sapien
tgtactatcgaaggtgtacttcact

SEQ ID NO: 2646117 - DNA, 25 bp, Homo sapien
gaaaagtaatatgcatgaaaaacaa

SEQ ID NO: 2646118 - DNA, 25 bp, Homo sapien
accaggaaagctggtctatgaatta

SEQ ID NO: 2646119 - DNA, 25 bp, Homo sapien
gggtttaggattgtctcttctgtca

SEQ ID NO: 2646120 - DNA, 25 bp, Homo sapien
ccttattaatggagtgtgtggtttg

SEQ ID NO: 2646121 - DNA, 25 bp, Homo sapien
aggattgtctcttctgtcaggaaac

SEQ ID NO: 2646122 - DNA, 25 bp, Homo sapien
cattgggtttaggattgtctcttct

SEQ ID NO: 2646123 - DNA, 25 bp, Homo sapien
acatcagcaaatctggtgatttact

SEQ ID NO: 2646124 - DNA, 25 bp, Homo sapien
tacatcagcaaatctggtgatttac

SEQ ID NO: 2646125 - DNA, 25 bp, Homo sapien
tcttcttgagacacaagtttccttc

SEQ ID NO: 2646126 - DNA, 25 bp, Homo sapien
atttcttcttgagacacaagtttcc

SEQ ID NO: 2646127 - DNA, 25 bp, Homo sapien
ttcttcttgagacacaagtttcctt

SEQ ID NO: 2646128 - DNA, 25 bp, Homo sapien
tccatttcttcttgagacacaagtt

SEQ ID NO: 2646129 - DNA, 25 bp, Homo sapien
tgcagtggcgtgaccttggctcact

SEQ ID NO: 2646130 - DNA, 25 bp, Homo sapien
gagatggagtttccggagtttcact

SEQ ID NO: 2646131 - DNA, 25 bp, Homo sapien
gagtttcactcttgcccaagctaga

SEQ ID NO: 2646132 - DNA, 25 bp, Homo sapien
gcgtgaccttggctcactgcaacct

SEQ ID NO: 2646133 - DNA, 25 bp, Homo sapien
ggtgtttaatatacagtttctcatc

SEQ ID NO: 2646134 - DNA, 25 bp, Homo sapien
aggtgtttaatatacagtttctcat

SEQ ID NO: 2646135 - DNA, 25 bp, Homo sapien
tgtttaatatacagtttctcatctg

SEQ ID NO: 2646136 - DNA, 25 bp, Homo sapien
aaggtgtttaatatacagtttctca

SEQ ID NO: 2646137 - DNA, 25 bp, Homo sapien
tataaacaattaggtaagcttgtgg

SEQ ID NO: 2646138 - DNA, 25 bp, Homo sapien
taaacaattaggtaagcttgtggag

SEQ ID NO: 2646139 - DNA, 25 bp, Homo sapien
agtatataaacaattaggtaagctt

SEQ ID NO: 2646140 - DNA, 25 bp, Homo sapien
acaattaggtaagcttgtggagaag

SEQ ID NO: 2646141 - DNA, 25 bp, Homo sapien
cactggtaatgtttgataatcaaga

SEQ ID NO: 2646142 - DNA, 25 bp, Homo sapien
ctaagccagttatactccagtaaac

SEQ ID NO: 2646143 - DNA, 25 bp, Homo sapien
tgcttttaatagttcaacactggta

SEQ ID NO: 2646144 - DNA, 25 bp, Homo sapien
gaatcctatgatagtttactacaca

SEQ ID NO: 2646145 - DNA, 25 bp, Homo sapien
gagaaggttaatggttatcaggatt

SEQ ID NO: 2646146 - DNA, 25 bp, Homo sapien
gaggctctcagacattaagtttgag

SEQ ID NO: 2646147 - DNA, 25 bp, Homo sapien
aatatacgtacccttggcacaggag

SEQ ID NO: 2646148 - DNA, 25 bp, Homo sapien
tatttagctttgtgaggctttactt

SEQ ID NO: 2646149 - DNA, 25 bp, Homo sapien
gcagtaatgagtacccaaccccttg

SEQ ID NO: 2646150 - DNA, 25 bp, Homo sapien
tcgccgtggttgctatggacgccaa

SEQ ID NO: 2646151 - DNA, 25 bp, Homo sapien
gccaagttcttacgggctggtcaag

SEQ ID NO: 2646152 - DNA, 25 bp, Homo sapien
tcagattactgagacgagtgccaag

SEQ ID NO: 2646153 - DNA, 25 bp, Homo sapien
agcccgactccagccgaaaagggcg

SEQ ID NO: 2646154 - DNA, 25 bp, Homo sapien
caggacaacacgaatttaaagctac

SEQ ID NO: 2646155 - DNA, 25 bp, Homo sapien
cgactccagccgaaaagggcgagct

SEQ ID NO: 2646156 - DNA, 25 bp, Homo sapien
aaaagggcgagctcccaggacaaca

SEQ ID NO: 2646157 - DNA, 25 bp, Homo sapien
gtccagcttctcataacgctttgcc

SEQ ID NO: 2646158 - DNA, 25 bp, Homo sapien
cagcttctcataacgctttgcccga

SEQ ID NO: 2646159 - DNA, 25 bp, Homo sapien
ctttgcccgagacttcacgtccaga

SEQ ID NO: 2646160 - DNA, 25 bp, Homo sapien
tcataacgctttgcccgagacttca

SEQ ID NO: 2646161 - DNA, 25 bp, Homo sapien
tacatttcgcgaagcaaagagccca

SEQ ID NO: 2646162 - DNA, 25 bp, Homo sapien
agagtttctgagcagactcgcggcg

SEQ ID NO: 2646163 - DNA, 25 bp, Homo sapien
cccaggatgtaaagaatgggcagca

SEQ ID NO: 2646164 - DNA, 25 bp, Homo sapien
gaaacgtggcgggtcagtctccgtc

SEQ ID NO: 2646165 - DNA, 25 bp, Homo sapien
tttcttaatggcgacaatttggttg

SEQ ID NO: 2646166 - DNA, 25 bp, Homo sapien
tcttaatggcgacaatttggttggt

SEQ ID NO: 2646167 - DNA, 25 bp, Homo sapien
tggttggtgttcttatctctggcct

SEQ ID NO: 2646168 - DNA, 25 bp, Homo sapien
tctctggccttgtaaacggtggcaa

SEQ ID NO: 2646169 - DNA, 25 bp, Homo sapien
tgttgactcagaataacaagttgca

SEQ ID NO: 2646170 - DNA, 25 bp, Homo sapien
aataatgttgactcagaataacaag

SEQ ID NO: 2646171 - DNA, 25 bp, Homo sapien
gaggatttcggaaataatgttgact

SEQ ID NO: 2646172 - DNA, 25 bp, Homo sapien
gatatagaggatttcggaaataatg

SEQ ID NO: 2646173 - DNA, 25 bp, Homo sapien
actggacaacaaagtgaaaccttgt

SEQ ID NO: 2646174 - DNA, 25 bp, Homo sapien
tgacaccagactggacaacaaagtg

SEQ ID NO: 2646175 - DNA, 25 bp, Homo sapien
gtttgacaccagactggacaacaaa

SEQ ID NO: 2646176 - DNA, 25 bp, Homo sapien
aggccgatgctggaggattgcttaa

SEQ ID NO: 2646177 - DNA, 25 bp, Homo sapien
cacagcacattcacagctgtagtgg

SEQ ID NO: 2646178 - DNA, 25 bp, Homo sapien
tgaaactccgagacatattggcttc

SEQ ID NO: 2646179 - DNA, 25 bp, Homo sapien
tcacagctgtagtggctaccagcag

SEQ ID NO: 2646180 - DNA, 25 bp, Homo sapien
catgggcctcaggtgaaactccgag

SEQ ID NO: 2646181 - DNA, 25 bp, Homo sapien
ctttagcttctgatctatgtccaag

SEQ ID NO: 2646182 - DNA, 25 bp, Homo sapien
ttagcttctgatctatgtccaagtt

SEQ ID NO: 2646183 - DNA, 25 bp, Homo sapien
cttctgatctatgtccaagtttgat

SEQ ID NO: 2646184 - DNA, 25 bp, Homo sapien
agcttctgatctatgtccaagtttg

SEQ ID NO: 2646185 - DNA, 25 bp, Homo sapien
acacccagccacaaacacatatttt

SEQ ID NO: 2646186 - DNA, 25 bp, Homo sapien
cacacccagccacaaacacatattt

SEQ ID NO: 2646187 - DNA, 25 bp, Homo sapien
accacacccagccacaaacacatat

SEQ ID NO: 2646188 - DNA, 25 bp, Homo sapien
ccacacccagccacaaacacatatt

SEQ ID NO: 2646189 - DNA, 25 bp, Homo sapien
tttatctctcttaaggcggttctat

SEQ ID NO: 2646190 - DNA, 25 bp, Homo sapien
ttatctctcttaaggcggttctatt

SEQ ID NO: 2646191 - DNA, 25 bp, Homo sapien
attagatttatgtccaaaagcatca

SEQ ID NO: 2646192 - DNA, 25 bp, Homo sapien
taaaatcaaagacaaggctaatatt

SEQ ID NO: 2646193 - DNA, 25 bp, Homo sapien
ggctaatattagatttatgtccaaa

SEQ ID NO: 2646194 - DNA, 25 bp, Homo sapien
gacaaggctaatattagatttatgt

SEQ ID NO: 2646195 - DNA, 25 bp, Homo sapien
gaaaataactagagatccttttgcc

SEQ ID NO: 2646196 - DNA, 25 bp, Homo sapien
aaaatgacgtcaactagctatggga

SEQ ID NO: 2646197 - DNA, 25 bp, Homo sapien
tgcctcagagtacatccaaatttca

SEQ ID NO: 2646198 - DNA, 25 bp, Homo sapien
ccaaatctttgtatgtaacactggg

SEQ ID NO: 2646199 - DNA, 25 bp, Homo sapien
gtccttccaggatcaataccattag

SEQ ID NO: 2646200 - DNA, 25 bp, Homo sapien
tgtgatctagcaataccactgctag

SEQ ID NO: 2646201 - DNA, 25 bp, Homo sapien
cactaatattgtgatcgataccact

SEQ ID NO: 2646202 - DNA, 25 bp, Homo sapien
catagcctagtggtgagtccatagc

SEQ ID NO: 2646203 - DNA, 25 bp, Homo sapien
ccccataaccgctgatctggtttct

SEQ ID NO: 2646204 - DNA, 25 bp, Homo sapien
tgaaatggttcaatacatagtcttt

SEQ ID NO: 2646205 - DNA, 25 bp, Homo sapien
acagttagaatgagggatgtttgga

SEQ ID NO: 2646206 - DNA, 25 bp, Homo sapien
taatcaaagcatagttccgtaacct

SEQ ID NO: 2646207 - DNA, 25 bp, Homo sapien
tacaatatacaggtaccctttatta

SEQ ID NO: 2646208 - DNA, 25 bp, Homo sapien
tacaggagactctcaaaagaggtta

SEQ ID NO: 2646209 - DNA, 25 bp, Homo sapien
taaaatgtaagtatcaatacaggag

SEQ ID NO: 2646210 - DNA, 25 bp, Homo sapien
taagtatcaatacaggagactctca

SEQ ID NO: 2646211 - DNA, 25 bp, Homo sapien
cctatgtaggatccaatgttgatgt

SEQ ID NO: 2646212 - DNA, 25 bp, Homo sapien
atattctaatccttgaagagtcatc

SEQ ID NO: 2646213 - DNA, 25 bp, Homo sapien
taggatccaatgttgatgtaaatat

SEQ ID NO: 2646214 - DNA, 25 bp, Homo sapien
aatattctaatccttgaagagtcat

SEQ ID NO: 2646215 - DNA, 25 bp, Homo sapien
gccaaaatctgccagttttagaact

SEQ ID NO: 2646216 - DNA, 25 bp, Homo sapien
ccaaaatctgccagttttagaactc

SEQ ID NO: 2646217 - DNA, 25 bp, Homo sapien
tgctaatatacagccaacagcccac

SEQ ID NO: 2646218 - DNA, 25 bp, Homo sapien
tacatcctagctccaaatagtaact

SEQ ID NO: 2646219 - DNA, 25 bp, Homo sapien
cacatgtccacacctacaccataca

SEQ ID NO: 2646220 - DNA, 25 bp, Homo sapien
acaccatacatcctagctccaaata

SEQ ID NO: 2646221 - DNA, 25 bp, Homo sapien
ttttcaattgagcacaagaacagct

SEQ ID NO: 2646222 - DNA, 25 bp, Homo sapien
gctttctcaatggagtgatcagtca

SEQ ID NO: 2646223 - DNA, 25 bp, Homo sapien
ccaagtatgattgttaacaggtcca

SEQ ID NO: 2646224 - DNA, 25 bp, Homo sapien
taaagatgattccagcaacaatgcc

SEQ ID NO: 2646225 - DNA, 25 bp, Homo sapien
gggcgacaaagactctgtctcaaaa

SEQ ID NO: 2646226 - DNA, 25 bp, Homo sapien
gcgacaaagactctgtctcaaaaaa

SEQ ID NO: 2646227 - DNA, 25 bp, Homo sapien
gacaaagactctgtctcaaaaaaaa

SEQ ID NO: 2646228 - DNA, 25 bp, Homo sapien
aggaatccttatagagaaaaatact

SEQ ID NO: 2646229 - DNA, 25 bp, Homo sapien
ctgttcctcagttggtgtgcccaaa

SEQ ID NO: 2646230 - DNA, 25 bp, Homo sapien
actgttcctcagttggtgtgcccaa

SEQ ID NO: 2646231 - DNA, 25 bp, Homo sapien
atcatgttagccaagtgcgctggct

SEQ ID NO: 2646232 - DNA, 25 bp, Homo sapien
tgttagccaagtgcgctggctcatg

SEQ ID NO: 2646233 - DNA, 25 bp, Homo sapien
agaaacatcagtaagcaattactat

SEQ ID NO: 2646234 - DNA, 25 bp, Homo sapien
catcagtaagcaattactatttaga

SEQ ID NO: 2646235 - DNA, 25 bp, Homo sapien
taaataagaataagccttgtatgag

SEQ ID NO: 2646236 - DNA, 25 bp, Homo sapien
ttaaatgtcacataatctggaagac

SEQ ID NO: 2646237 - DNA, 25 bp, Homo sapien
gtctcctgctgcactgaagatgtga

SEQ ID NO: 2646238 - DNA, 25 bp, Homo sapien
tgagatctagtaagtcgtctcctgc

SEQ ID NO: 2646239 - DNA, 25 bp, Homo sapien
ggtgttggccctggccgattactga

SEQ ID NO: 2646240 - DNA, 25 bp, Homo sapien
gattgctcctttaaggtttccactg

SEQ ID NO: 2646241 - DNA, 25 bp, Homo sapien
tttgattgctcctttaaggtttcca

SEQ ID NO: 2646242 - DNA, 25 bp, Homo sapien
acatccaggtgttggccctggccga

SEQ ID NO: 2646243 - DNA, 25 bp, Homo sapien
ccctcagtagtaaaatgttgtccag

SEQ ID NO: 2646244 - DNA, 25 bp, Homo sapien
tctacagcatttacttaatgtttac

SEQ ID NO: 2646245 - DNA, 25 bp, Homo sapien
gcctttttggctatttccctcagta

SEQ ID NO: 2646246 - DNA, 25 bp, Homo sapien
tatttacaaactcacttctacagca

SEQ ID NO: 2646247 - DNA, 25 bp, Homo sapien
ttgaacttttctcacttttgcactc

SEQ ID NO: 2646248 - DNA, 25 bp, Homo sapien
tattgaacttttctcacttttgcac

SEQ ID NO: 2646249 - DNA, 25 bp, Homo sapien
aagttttccctaatgcattttcaat

SEQ ID NO: 2646250 - DNA, 25 bp, Homo sapien
attgaacttttctcacttttgcact

SEQ ID NO: 2646251 - DNA, 25 bp, Homo sapien
caatggaatactctacaaaatggag

SEQ ID NO: 2646252 - DNA, 25 bp, Homo sapien
ggtgttgcagtaatcatgtcctggg

SEQ ID NO: 2646253 - DNA, 25 bp, Homo sapien
tcctgggtggtcctctgcacaggtg

SEQ ID NO: 2646254 - DNA, 25 bp, Homo sapien
cacaggtgcagtagctgttaatgct

SEQ ID NO: 2646255 - DNA, 25 bp, Homo sapien
gagtaagaagaccttcgggcagaga

SEQ ID NO: 2646256 - DNA, 25 bp, Homo sapien
ccttcgggcagagactgttgggtat

SEQ ID NO: 2646257 - DNA, 25 bp, Homo sapien
caaggagtaagaagaccttcgggca

SEQ ID NO: 2646258 - DNA, 25 bp, Homo sapien
gagactgttgggtatgctcccttca

SEQ ID NO: 2646259 - DNA, 25 bp, Homo sapien
gagggaacccctgttcttgtgccag

SEQ ID NO: 2646260 - DNA, 25 bp, Homo sapien
gaggtattgcgttatcacaacagca

SEQ ID NO: 2646261 - DNA, 25 bp, Homo sapien
agaatggcagcatccactcggaaac

SEQ ID NO: 2646262 - DNA, 25 bp, Homo sapien
ttaaagcttgcggtcctcggagcct

SEQ ID NO: 2646263 - DNA, 25 bp, Homo sapien
tctgtctcttacacaaagaaaagga

SEQ ID NO: 2646264 - DNA, 25 bp, Homo sapien
ttcctggctgattgggaggttaagg

SEQ ID NO: 2646265 - DNA, 25 bp, Homo sapien
cgggatgcgcagattcgtggaaact

SEQ ID NO: 2646266 - DNA, 25 bp, Homo sapien
cacgcgcacggagaggaggctactt

SEQ ID NO: 2646267 - DNA, 25 bp, Homo sapien
tctgcaggttgtggacaaactgccc

SEQ ID NO: 2646268 - DNA, 25 bp, Homo sapien
ttcgctgagctggagtccgggctcc

SEQ ID NO: 2646269 - DNA, 25 bp, Homo sapien
agcattacttcctcccctgaaagcc

SEQ ID NO: 2646270 - DNA, 25 bp, Homo sapien
taatggcgtgacccacagcagagcc

SEQ ID NO: 2646271 - DNA, 25 bp, Homo sapien
cctcccctgaaagccccagtaatgg

SEQ ID NO: 2646272 - DNA, 25 bp, Homo sapien
aacgactggtactggcctgggtgca

SEQ ID NO: 2646273 - DNA, 25 bp, Homo sapien
aaccctcacagagcttgatgtcacc

SEQ ID NO: 2646274 - DNA, 25 bp, Homo sapien
agcacctcattgaaaccctcacaga

SEQ ID NO: 2646275 - DNA, 25 bp, Homo sapien
cctcacagagcttgatgtcaccctg

SEQ ID NO: 2646276 - DNA, 25 bp, Homo sapien
tcagcacctcattgaaaccctcaca

SEQ ID NO: 2646277 - DNA, 25 bp, Homo sapien
ttaggccaatccgtttgcaagtcgg

SEQ ID NO: 2646278 - DNA, 25 bp, Homo sapien
ccaatccgtttgcaagtcggcactg

SEQ ID NO: 2646279 - DNA, 25 bp, Homo sapien
gccaatccgtttgcaagtcggcact

SEQ ID NO: 2646280 - DNA, 25 bp, Homo sapien
aggccaatccgtttgcaagtcggca

SEQ ID NO: 2646281 - DNA, 25 bp, Homo sapien
cataacagctagtttaaggaggcca

SEQ ID NO: 2646282 - DNA, 25 bp, Homo sapien
taacagctagtttaaggaggccaca

SEQ ID NO: 2646283 - DNA, 25 bp, Homo sapien
cagctagtttaaggaggccacacaa

SEQ ID NO: 2646284 - DNA, 25 bp, Homo sapien
ctagtttaaggaggccacacaaaca

SEQ ID NO: 2646285 - DNA, 25 bp, Homo sapien
tatgaagaagccacagcatcctaca

SEQ ID NO: 2646286 - DNA, 25 bp, Homo sapien
catcctacaaggaagaaatcgtgca

SEQ ID NO: 2646287 - DNA, 25 bp, Homo sapien
ctcttgacttataaggctagctact

SEQ ID NO: 2646288 - DNA, 25 bp, Homo sapien
tcagctgcccagtaataaaccagaa

SEQ ID NO: 2646289 - DNA, 25 bp, Homo sapien
gaaaaaggcatcaacttctgcggga

SEQ ID NO: 2646290 - DNA, 25 bp, Homo sapien
gatcaagccatattcaggtcctagg

SEQ ID NO: 2646291 - DNA, 25 bp, Homo sapien
ttcaactaaagtagggactcccatg

SEQ ID NO: 2646292 - DNA, 25 bp, Homo sapien
gattggcaatccagtgccgcgctga

SEQ ID NO: 2646293 - DNA, 25 bp, Homo sapien
tcttcagaggccggccgagggccac

SEQ ID NO: 2646294 - DNA, 25 bp, Homo sapien
cgaggcggttgtcagcgccccggga

SEQ ID NO: 2646295 - DNA, 25 bp, Homo sapien
cggccgagggccacgaggcggttgt

SEQ ID NO: 2646296 - DNA, 25 bp, Homo sapien
gggagccgaccctcgcgggcgttgc

SEQ ID NO: 2646297 - DNA, 25 bp, Homo sapien
gctgggggcgcagagtgctctgggc

SEQ ID NO: 2646298 - DNA, 25 bp, Homo sapien
tgttgcttccgaacatcctgctcac

SEQ ID NO: 2646299 - DNA, 25 bp, Homo sapien
gggaccatgttgcttccgaacatcc

SEQ ID NO: 2646300 - DNA, 25 bp, Homo sapien
cggcggggaccatgttgcttccgaa

SEQ ID NO: 2646301 - DNA, 25 bp, Homo sapien
gtgagcgaggcgcccgaagccgtcg

SEQ ID NO: 2646302 - DNA, 25 bp, Homo sapien
ccgtgggcttttgctgccgcccgcc

SEQ ID NO: 2646303 - DNA, 25 bp, Homo sapien
gggccgtgggcttttgctgccgccc

SEQ ID NO: 2646304 - DNA, 25 bp, Homo sapien
ttggggccgtgggcttttgctgccg

SEQ ID NO: 2646305 - DNA, 25 bp, Homo sapien
cgtgggcttttgctgccgcccgccc

SEQ ID NO: 2646306 - DNA, 25 bp, Homo sapien
ctccaactttgcgacggaaatgtgt

SEQ ID NO: 2646307 - DNA, 25 bp, Homo sapien
ctttgcgacggaaatgtgtcatcga

SEQ ID NO: 2646308 - DNA, 25 bp, Homo sapien
aatgtgtcatcgaaagccaggtaac

SEQ ID NO: 2646309 - DNA, 25 bp, Homo sapien
gacggaaatgtgtcatcgaaagcca

SEQ ID NO: 2646310 - DNA, 25 bp, Homo sapien
ttccagactggtcggcgcaagcgaa

SEQ ID NO: 2646311 - DNA, 25 bp, Homo sapien
gggctcaacgccgagcctctcggag

SEQ ID NO: 2646312 - DNA, 25 bp, Homo sapien
aacgccgagcctctcggaggtacgg

SEQ ID NO: 2646313 - DNA, 25 bp, Homo sapien
gggaccttccagactggtcggcgca

SEQ ID NO: 2646314 - DNA, 25 bp, Homo sapien
aagagcggaggcgaccagggactac

SEQ ID NO: 2646315 - DNA, 25 bp, Homo sapien
tttcccggagctgcatccccttttg

SEQ ID NO: 2646316 - DNA, 25 bp, Homo sapien
gcatccccttttgggcgaagagcgg

SEQ ID NO: 2646317 - DNA, 25 bp, Homo sapien
ccggagctgcatccccttttgggcg

SEQ ID NO: 2646318 - DNA, 25 bp, Homo sapien
ccctgaagatgcgaggttactgaaa

SEQ ID NO: 2646319 - DNA, 25 bp, Homo sapien
gtgccgggttgagctcgcaaatccc

SEQ ID NO: 2646320 - DNA, 25 bp, Homo sapien
tatacataatatagccgcaaccgcg

SEQ ID NO: 2646321 - DNA, 25 bp, Homo sapien
gaccttcaagactattcctagccga

SEQ ID NO: 2646322 - DNA, 25 bp, Homo sapien
ttgtcacggtcaggtctctattcac

SEQ ID NO: 2646323 - DNA, 25 bp, Homo sapien
ggtctctattcactcttgaaaacaa

SEQ ID NO: 2646324 - DNA, 25 bp, Homo sapien
tgttgtcacggtcaggtctctattc

SEQ ID NO: 2646325 - DNA, 25 bp, Homo sapien
aggtctctattcactcttgaaaaca

SEQ ID NO: 2646326 - DNA, 25 bp, Homo sapien
gcgacaagagtgagactccgtctca

SEQ ID NO: 2646327 - DNA, 25 bp, Homo sapien
gaggcggaggttgcactccagcctg

SEQ ID NO: 2646328 - DNA, 25 bp, Homo sapien
gggcgacaagagtgagactccgtct

SEQ ID NO: 2646329 - DNA, 25 bp, Homo sapien
gacaagagtgagactccgtctcaaa

SEQ ID NO: 2646330 - DNA, 25 bp, Homo sapien
tataaacacctcgacacactagaaa

SEQ ID NO: 2646331 - DNA, 25 bp, Homo sapien
cacgattagagactgtgacgtttca

SEQ ID NO: 2646332 - DNA, 25 bp, Homo sapien
gaaaacacattgttcagccctccgc

SEQ ID NO: 2646333 - DNA, 25 bp, Homo sapien
tcaacgattttaagttagccagaag

SEQ ID NO: 2646334 - DNA, 25 bp, Homo sapien
ttaaaatcaggcaattctatttgag

SEQ ID NO: 2646335 - DNA, 25 bp, Homo sapien
aaaatcaggcaattctatttgagca

SEQ ID NO: 2646336 - DNA, 25 bp, Homo sapien
ttcaaattacagttgcaggtcttca

SEQ ID NO: 2646337 - DNA, 25 bp, Homo sapien
taaaatcaggcaattctatttgagc

SEQ ID NO: 2646338 - DNA, 25 bp, Homo sapien
cttgcagtacattaaactataattc

SEQ ID NO: 2646339 - DNA, 25 bp, Homo sapien
actgtaatagttcccatccgtagtt

SEQ ID NO: 2646340 - DNA, 25 bp, Homo sapien
ttcccatccgtagtttaggacttgc

SEQ ID NO: 2646341 - DNA, 25 bp, Homo sapien
ccgtagtttaggacttgcagtacat

SEQ ID NO: 2646342 - DNA, 25 bp, Homo sapien
tttgtggaagatacctttggtctaa

SEQ ID NO: 2646343 - DNA, 25 bp, Homo sapien
gtggaagatacctttggtctaagaa

SEQ ID NO: 2646344 - DNA, 25 bp, Homo sapien
tggaagatacctttggtctaagaaa

SEQ ID NO: 2646345 - DNA, 25 bp, Homo sapien
tgtggaagatacctttggtctaaga

SEQ ID NO: 2646346 - DNA, 25 bp, Homo sapien
tcgacagcaattctgatttgcaaat

SEQ ID NO: 2646347 - DNA, 25 bp, Homo sapien
tatagtaaaactttcgacagcaatt

SEQ ID NO: 2646348 - DNA, 25 bp, Homo sapien
tcttacataaatgtggactcccata

SEQ ID NO: 2646349 - DNA, 25 bp, Homo sapien
gtgactggtactataatcttggccc

SEQ ID NO: 2646350 - DNA, 25 bp, Homo sapien
ttttctcgctggaaatctgctgctt

SEQ ID NO: 2646351 - DNA, 25 bp, Homo sapien
cagtaatagtagagacgccactaca

SEQ ID NO: 2646352 - DNA, 25 bp, Homo sapien
ctctttttctcgctggaaatctgct

SEQ ID NO: 2646353 - DNA, 25 bp, Homo sapien
gtaatagtagagacgccactacact

SEQ ID NO: 2646354 - DNA, 25 bp, Homo sapien
ttctttttatgcacagcaagttcat

SEQ ID NO: 2646355 - DNA, 25 bp, Homo sapien
tgatagtatttttaaggtcgttgtc

SEQ ID NO: 2646356 - DNA, 25 bp, Homo sapien
ttgttttgagacggaatcttgctct

SEQ ID NO: 2646357 - DNA, 25 bp, Homo sapien
ttgagacggaatcttgctctgtcgc

SEQ ID NO: 2646358 - DNA, 25 bp, Homo sapien
cttcagtgataagggtttggtttgt

SEQ ID NO: 2646359 - DNA, 25 bp, Homo sapien
gactgatagggaaacatatggaagc

SEQ ID NO: 2646360 - DNA, 25 bp, Homo sapien
ctgagactgatagggaaacatatgg

SEQ ID NO: 2646361 - DNA, 25 bp, Homo sapien
actgatagggaaacatatggaagct

SEQ ID NO: 2646362 - DNA, 25 bp, Homo sapien
gagactgatagggaaacatatggaa

SEQ ID NO: 2646363 - DNA, 25 bp, Homo sapien
tgttatactttgtcgctcttagtag

SEQ ID NO: 2646364 - DNA, 25 bp, Homo sapien
tactttgtcgctcttagtagaaact

SEQ ID NO: 2646365 - DNA, 25 bp, Homo sapien
gtagaaactctttgaaaactgctat

SEQ ID NO: 2646366 - DNA, 25 bp, Homo sapien
tgtaacttgttatactttgtcgctc

SEQ ID NO: 2646367 - DNA, 25 bp, Homo sapien
tgagaatcccgataaaactggttag

SEQ ID NO: 2646368 - DNA, 25 bp, Homo sapien
atgagaatcccgataaaactggtta

SEQ ID NO: 2646369 - DNA, 25 bp, Homo sapien
aagtatgagaatcccgataaaactg

SEQ ID NO: 2646370 - DNA, 25 bp, Homo sapien
agtatgagaatcccgataaaactgg

SEQ ID NO: 2646371 - DNA, 25 bp, Homo sapien
ccgagattataaatataagaggaca

SEQ ID NO: 2646372 - DNA, 25 bp, Homo sapien
atataagaggacatcgaccaatcct

SEQ ID NO: 2646373 - DNA, 25 bp, Homo sapien
gaggacatcgaccaatcctcacata

SEQ ID NO: 2646374 - DNA, 25 bp, Homo sapien
actgtccgagattataaatataaga

SEQ ID NO: 2646375 - DNA, 25 bp, Homo sapien
agtcactattcgattaagaaatttc

SEQ ID NO: 2646376 - DNA, 25 bp, Homo sapien
tctatagtcactattcgattaagaa

SEQ ID NO: 2646377 - DNA, 25 bp, Homo sapien
gagaagttttgtcagggacagtaat

SEQ ID NO: 2646378 - DNA, 25 bp, Homo sapien
agagaagttttgtcagggacagtaa

SEQ ID NO: 2646379 - DNA, 25 bp, Homo sapien
ttgcacttctgatatcaccagaaca

SEQ ID NO: 2646380 - DNA, 25 bp, Homo sapien
gtttattgcacttctgatatcacca

SEQ ID NO: 2646381 - DNA, 25 bp, Homo sapien
gaggctgtttattgcacttctgata

SEQ ID NO: 2646382 - DNA, 25 bp, Homo sapien
aactggaggctgtttattgcacttc

SEQ ID NO: 2646383 - DNA, 25 bp, Homo sapien
cttcgttttgattttgacagcacag

SEQ ID NO: 2646384 - DNA, 25 bp, Homo sapien
gacagcacagcatctgattttaaag

SEQ ID NO: 2646385 - DNA, 25 bp, Homo sapien
caatagcttggacctcttgattttc

SEQ ID NO: 2646386 - DNA, 25 bp, Homo sapien
cagagaaacatctttgccaccaata

SEQ ID NO: 2646387 - DNA, 25 bp, Homo sapien
gaggtgagtctaattctgttaaaga

SEQ ID NO: 2646388 - DNA, 25 bp, Homo sapien
ccgaggtgagtctaattctgttaaa

SEQ ID NO: 2646389 - DNA, 25 bp, Homo sapien
gcaaccgaggtgagtctaattctgt

SEQ ID NO: 2646390 - DNA, 25 bp, Homo sapien
agagggcaaccgaggtgagtctaat

SEQ ID NO: 2646391 - DNA, 25 bp, Homo sapien
gttcaacaagtaatgtatcccgttc

SEQ ID NO: 2646392 - DNA, 25 bp, Homo sapien
caggttcaacaagtaatgtatcccg

SEQ ID NO: 2646393 - DNA, 25 bp, Homo sapien
ctcaggttcaacaagtaatgtatcc

SEQ ID NO: 2646394 - DNA, 25 bp, Homo sapien
caacaagtaatgtatcccgttcata

SEQ ID NO: 2646395 - DNA, 25 bp, Homo sapien
ttccagtcaccactgaggatatctg

SEQ ID NO: 2646396 - DNA, 25 bp, Homo sapien
taaattaaataagtctccaggcatg

SEQ ID NO: 2646397 - DNA, 25 bp, Homo sapien
tcactggctctcacaatatcatcaa

SEQ ID NO: 2646398 - DNA, 25 bp, Homo sapien
tgcaaaactcagaaattcactggct

SEQ ID NO: 2646399 - DNA, 25 bp, Homo sapien
ttgtgcaagggtcgaaaacttgatc

SEQ ID NO: 2646400 - DNA, 25 bp, Homo sapien
cgtagctatagatgtgctatattcc

SEQ ID NO: 2646401 - DNA, 25 bp, Homo sapien
tcgtagctatagatgtgctatattc

SEQ ID NO: 2646402 - DNA, 25 bp, Homo sapien
cttttgctgccaggcaattttcccg

SEQ ID NO: 2646403 - DNA, 25 bp, Homo sapien
tctcattggaatggttagtagagca

SEQ ID NO: 2646404 - DNA, 25 bp, Homo sapien
tagagcaaggtatggcaatagctga

SEQ ID NO: 2646405 - DNA, 25 bp, Homo sapien
tgagtttggcggcataaagctggta

SEQ ID NO: 2646406 - DNA, 25 bp, Homo sapien
ctgtatcatctgatgctttttgttt

SEQ ID NO: 2646407 - DNA, 25 bp, Homo sapien
tatatatttctgtatcatctgatgc

SEQ ID NO: 2646408 - DNA, 25 bp, Homo sapien
taacctccagtgatctccctgtctt

SEQ ID NO: 2646409 - DNA, 25 bp, Homo sapien
caccacgttcggctctttatatatt

SEQ ID NO: 2646410 - DNA, 25 bp, Homo sapien
aatgtaataatcaggaaacttagtg

SEQ ID NO: 2646411 - DNA, 25 bp, Homo sapien
acatatatgtgcatgcttataaaga

SEQ ID NO: 2646412 - DNA, 25 bp, Homo sapien
tactcaagactagtttagcaaaata

SEQ ID NO: 2646413 - DNA, 25 bp, Homo sapien
taagaataatgggatatcatgcctg

SEQ ID NO: 2646414 - DNA, 25 bp, Homo sapien
tggaaaaatttgaatggggactata

SEQ ID NO: 2646415 - DNA, 25 bp, Homo sapien
tgttaagccttaatgttaagcagtt

SEQ ID NO: 2646416 - DNA, 25 bp, Homo sapien
ggtcctttgccttttgagacagcat

SEQ ID NO: 2646417 - DNA, 25 bp, Homo sapien
ttcatataccttttggccagtcttc

SEQ ID NO: 2646418 - DNA, 25 bp, Homo sapien
ccctgatcattagtgttaagcctta

SEQ ID NO: 2646419 - DNA, 25 bp, Homo sapien
caggtgggtacagccaagaactaag

SEQ ID NO: 2646420 - DNA, 25 bp, Homo sapien
gatgaacatttcattccaggtgggt

SEQ ID NO: 2646421 - DNA, 25 bp, Homo sapien
gaggttctaacccaaaggcactgtc

SEQ ID NO: 2646422 - DNA, 25 bp, Homo sapien
gttcaagcctaaagggcaccctgga

SEQ ID NO: 2646423 - DNA, 25 bp, Homo sapien
tgtcgcttcagagggagccttccaa

SEQ ID NO: 2646424 - DNA, 25 bp, Homo sapien
aagtgtcgcttcagagggagccttc

SEQ ID NO: 2646425 - DNA, 25 bp, Homo sapien
cttccaaagtgtcgcttcagaggga

SEQ ID NO: 2646426 - DNA, 25 bp, Homo sapien
ccaaagtgtcgcttcagagggagcc

SEQ ID NO: 2646427 - DNA, 25 bp, Homo sapien
gagaccaggtttccggcacagtggc

SEQ ID NO: 2646428 - DNA, 25 bp, Homo sapien
aattaagagatttgaaggcttgatc

SEQ ID NO: 2646429 - DNA, 25 bp, Homo sapien
gatgacagaagagtaggtttcttgt

SEQ ID NO: 2646430 - DNA, 25 bp, Homo sapien
ttgtgatgaaatactacaagaatga

SEQ ID NO: 2646431 - DNA, 25 bp, Homo sapien
tgatgaaatactacaagaatgaaga

SEQ ID NO: 2646432 - DNA, 25 bp, Homo sapien
cccaataacgtttttgcatcctgaa

SEQ ID NO: 2646433 - DNA, 25 bp, Homo sapien
catcaaaactatctgagaagcggga

SEQ ID NO: 2646434 - DNA, 25 bp, Homo sapien
tatctaagatattccactgtacaac

SEQ ID NO: 2646435 - DNA, 25 bp, Homo sapien
aaataaggcacacagtttacactcg

SEQ ID NO: 2646436 - DNA, 25 bp, Homo sapien
gcagccgccaggaagagcgcgcacg

SEQ ID NO: 2646437 - DNA, 25 bp, Homo sapien
agccgccaggaagagcgcgcacgct

SEQ ID NO: 2646438 - DNA, 25 bp, Homo sapien
cgccaggaagagcgcgcacgctgcc

SEQ ID NO: 2646439 - DNA, 25 bp, Homo sapien
gccgccaggaagagcgcgcacgctg

SEQ ID NO: 2646440 - DNA, 25 bp, Homo sapien
tcgggaaaggctctgcggttctaac

SEQ ID NO: 2646441 - DNA, 25 bp, Homo sapien
ttggagattccgacccaacgaggcc

SEQ ID NO: 2646442 - DNA, 25 bp, Homo sapien
ggtagatttcggatacttctgcgct

SEQ ID NO: 2646443 - DNA, 25 bp, Homo sapien
tcattgtgtcctcggttctgcccgc

SEQ ID NO: 2646444 - DNA, 25 bp, Homo sapien
tcttggaaagccgcggcaatggcag

SEQ ID NO: 2646445 - DNA, 25 bp, Homo sapien
agatgtcactgagagttcgttctgg

SEQ ID NO: 2646446 - DNA, 25 bp, Homo sapien
tggatacccctaatgtctttcaaga

SEQ ID NO: 2646447 - DNA, 25 bp, Homo sapien
ttctggtcccgcaggtcgcggcagc

SEQ ID NO: 2646448 - DNA, 25 bp, Homo sapien
caagcaaggcacacagggtatgtac

SEQ ID NO: 2646449 - DNA, 25 bp, Homo sapien
taatagggcactccgaccttagagg

SEQ ID NO: 2646450 - DNA, 25 bp, Homo sapien
gattaactgtgatggccccagcagg

SEQ ID NO: 2646451 - DNA, 25 bp, Homo sapien
ggtgcccaatgcaaagcggctctgt

SEQ ID NO: 2646452 - DNA, 25 bp, Homo sapien
tggtggcaagggatcagcgctcact

SEQ ID NO: 2646453 - DNA, 25 bp, Homo sapien
atcgtagcgcctgtcccgattcctg

SEQ ID NO: 2646454 - DNA, 25 bp, Homo sapien
tagggcaggtcgcttgggacctcat

SEQ ID NO: 2646455 - DNA, 25 bp, Homo sapien
cactgcccgctcactgtcatgaaga

SEQ ID NO: 2646456 - DNA, 25 bp, Homo sapien
tcttagggccagtgtagtaatagcc

SEQ ID NO: 2646457 - DNA, 25 bp, Homo sapien
caattagagtccagaagaatggtcc

SEQ ID NO: 2646458 - DNA, 25 bp, Homo sapien
ggtggtgatccaagctaatccagca

SEQ ID NO: 2646459 - DNA, 25 bp, Homo sapien
caggagtcagggacaaagcgcctta

SEQ ID NO: 2646460 - DNA, 25 bp, Homo sapien
tttcagtggcataggagagtctact

SEQ ID NO: 2646461 - DNA, 25 bp, Homo sapien
gccagtggaacatactctaacattt

SEQ ID NO: 2646462 - DNA, 25 bp, Homo sapien
tctactatacacatatccttggaag

SEQ ID NO: 2646463 - DNA, 25 bp, Homo sapien
gttttgcccaatatataccatgtgc

SEQ ID NO: 2646464 - DNA, 25 bp, Homo sapien
ccttttcgatgacaatgatggctca

SEQ ID NO: 2646465 - DNA, 25 bp, Homo sapien
attttccttttcgatgacaatgatg

SEQ ID NO: 2646466 - DNA, 25 bp, Homo sapien
tttccttttcgatgacaatgatggc

SEQ ID NO: 2646467 - DNA, 25 bp, Homo sapien
tcgatgacaatgatggctcatttat

SEQ ID NO: 2646468 - DNA, 25 bp, Homo sapien
gctatgagcttgttgatcctctgga

SEQ ID NO: 2646469 - DNA, 25 bp, Homo sapien
atctcagatctcctggtcaaagctg

SEQ ID NO: 2646470 - DNA, 25 bp, Homo sapien
gcagcagtcccagcatcaatctcag

SEQ ID NO: 2646471 - DNA, 25 bp, Homo sapien
aacaatccagatctcatggtgctga

SEQ ID NO: 2646472 - DNA, 25 bp, Homo sapien
atgtgtccactcagtagttcaggtt

SEQ ID NO: 2646473 - DNA, 25 bp, Homo sapien
tgtccactcagtagttcaggtttca

SEQ ID NO: 2646474 - DNA, 25 bp, Homo sapien
agtagttcaggtttcatttttgctg

SEQ ID NO: 2646475 - DNA, 25 bp, Homo sapien
cactcagtagttcaggtttcatttt

SEQ ID NO: 2646476 - DNA, 25 bp, Homo sapien
cacatagtcgggcatcacgataggt

SEQ ID NO: 2646477 - DNA, 25 bp, Homo sapien
ggcatcacgataggtttaggaatgt

SEQ ID NO: 2646478 - DNA, 25 bp, Homo sapien
tagtcgggcatcacgataggtttag

SEQ ID NO: 2646479 - DNA, 25 bp, Homo sapien
gccacatagtcgggcatcacgatag

SEQ ID NO: 2646480 - DNA, 25 bp, Homo sapien
cacagctttatagcgttctcgctca

SEQ ID NO: 2646481 - DNA, 25 bp, Homo sapien
cgaatgatgtggcaatctgctcatc

SEQ ID NO: 2646482 - DNA, 25 bp, Homo sapien
gcgttctcgctcatcatctgtctga

SEQ ID NO: 2646483 - DNA, 25 bp, Homo sapien
ctgaaaactggtcttggaacacagc

SEQ ID NO: 2646484 - DNA, 25 bp, Homo sapien
acacccggccttacaggtcaggatt

SEQ ID NO: 2646485 - DNA, 25 bp, Homo sapien
cacccggccttacaggtcaggattt

SEQ ID NO: 2646486 - DNA, 25 bp, Homo sapien
ccggccttacaggtcaggattttct

SEQ ID NO: 2646487 - DNA, 25 bp, Homo sapien
tgtaataacagatcctggacaagga

SEQ ID NO: 2646488 - DNA, 25 bp, Homo sapien
catgtctgtgggagaacctgcctcc

SEQ ID NO: 2646489 - DNA, 25 bp, Homo sapien
gctgtaacatccatctagagtctgt

SEQ ID NO: 2646490 - DNA, 25 bp, Homo sapien
caatatttctactttatgggctcag

SEQ ID NO: 2646491 - DNA, 25 bp, Homo sapien
ttcttaaactcttcatggattcttg

SEQ ID NO: 2646492 - DNA, 25 bp, Homo sapien
ttaaactcttcatggattcttgaaa

SEQ ID NO: 2646493 - DNA, 25 bp, Homo sapien
aactcttcatggattcttgaaattc

SEQ ID NO: 2646494 - DNA, 25 bp, Homo sapien
ctcttcatggattcttgaaattctc

SEQ ID NO: 2646495 - DNA, 25 bp, Homo sapien
ctttgctttatgtgagaaagtttat

SEQ ID NO: 2646496 - DNA, 25 bp, Homo sapien
ttctttaggtaatcacagcgttctt

SEQ ID NO: 2646497 - DNA, 25 bp, Homo sapien
tattctttaggtaatcacagcgttc

SEQ ID NO: 2646498 - DNA, 25 bp, Homo sapien
ctttaggtaatcacagcgttctttt

SEQ ID NO: 2646499 - DNA, 25 bp, Homo sapien
cttgtacatcccaattcattacttt

SEQ ID NO: 2646500 - DNA, 25 bp, Homo sapien
tacatcccaattcattactttatca

SEQ ID NO: 2646501 - DNA, 25 bp, Homo sapien
attcattactttatcatattcttga

SEQ ID NO: 2646502 - DNA, 25 bp, Homo sapien
tgtacatcccaattcattactttat

SEQ ID NO: 2646503 - DNA, 25 bp, Homo sapien
caggctaaggccatgagttaacacc

SEQ ID NO: 2646504 - DNA, 25 bp, Homo sapien
cactgccaggatacgatctctaaaa

SEQ ID NO: 2646505 - DNA, 25 bp, Homo sapien
gccacagtgaagcaccaggctaagg

SEQ ID NO: 2646506 - DNA, 25 bp, Homo sapien
ccacagaggctagcattaaaaaggc

SEQ ID NO: 2646507 - DNA, 25 bp, Homo sapien
gactgtagcatgtatgtccaaaggg

SEQ ID NO: 2646508 - DNA, 25 bp, Homo sapien
aatgcacctagggattgaccacaac

SEQ ID NO: 2646509 - DNA, 25 bp, Homo sapien
tagaaaagcaataccagctgggcgc

SEQ ID NO: 2646510 - DNA, 25 bp, Homo sapien
aaaaaccagggagtgcattcagtga

SEQ ID NO: 2646511 - DNA, 25 bp, Homo sapien
tgaacacaggaatgctaggaaggca

SEQ ID NO: 2646512 - DNA, 25 bp, Homo sapien
ccagtttattttctgacaagtgaaa

SEQ ID NO: 2646513 - DNA, 25 bp, Homo sapien
tttcaagaacatgcacagtgaacac

SEQ ID NO: 2646514 - DNA, 25 bp, Homo sapien
ggaaggcaaacataaaagggcacac

SEQ ID NO: 2646515 - DNA, 25 bp, Homo sapien
attaagacagtcattccgggaaaag

SEQ ID NO: 2646516 - DNA, 25 bp, Homo sapien
tcaatttaagcgaaaaattagcttc

SEQ ID NO: 2646517 - DNA, 25 bp, Homo sapien
ttaagcgaaaaattagcttctctga

SEQ ID NO: 2646518 - DNA, 25 bp, Homo sapien
ttggatgggattaagacagtcattc

SEQ ID NO: 2646519 - DNA, 25 bp, Homo sapien
caaaatttctgttagtgcatggcta

SEQ ID NO: 2646520 - DNA, 25 bp, Homo sapien
gattttgtaccatcctgggcattta

SEQ ID NO: 2646521 - DNA, 25 bp, Homo sapien
gactgtgatgattttgtaccatcct

SEQ ID NO: 2646522 - DNA, 25 bp, Homo sapien
aatttctgttagtgcatggctaaag

SEQ ID NO: 2646523 - DNA, 25 bp, Homo sapien
caaaagtcgtgtgtaaacattggcg

SEQ ID NO: 2646524 - DNA, 25 bp, Homo sapien
gctgttaaaggaaccgcgcgatgtt

SEQ ID NO: 2646525 - DNA, 25 bp, Homo sapien
tattgctccaacgaaagactcctgg

SEQ ID NO: 2646526 - DNA, 25 bp, Homo sapien
caattcacctgaaactcggatggga

SEQ ID NO: 2646527 - DNA, 25 bp, Homo sapien
tggaagggggtgcgggaagcctgcg

SEQ ID NO: 2646528 - DNA, 25 bp, Homo sapien
ggccaacggtgccagggagcgcgct

SEQ ID NO: 2646529 - DNA, 25 bp, Homo sapien
cgggggccaacggtgccagggagcg

SEQ ID NO: 2646530 - DNA, 25 bp, Homo sapien
ggcgcacctgacgccgcaccgaccg

SEQ ID NO: 2646531 - DNA, 25 bp, Homo sapien
acggtgccagggagcgcgctcacct

SEQ ID NO: 2646532 - DNA, 25 bp, Homo sapien
gcctcccaagttggccggtgctgct

SEQ ID NO: 2646533 - DNA, 25 bp, Homo sapien
ctctctggttcccacgagtcccagc

SEQ ID NO: 2646534 - DNA, 25 bp, Homo sapien
gaataaagcttgatcggcggctcca

SEQ ID NO: 2646535 - DNA, 25 bp, Homo sapien
gctttcagcgtttccgcggaataaa

SEQ ID NO: 2646536 - DNA, 25 bp, Homo sapien
tccggcctaaggatgccgcggcttt

SEQ ID NO: 2646537 - DNA, 25 bp, Homo sapien
gtaattccccaagcgggcagtgtgg

SEQ ID NO: 2646538 - DNA, 25 bp, Homo sapien
cgcctcctcctcgagcagggtaatt

SEQ ID NO: 2646539 - DNA, 25 bp, Homo sapien
cacacactgactggcctggaaagcc

SEQ ID NO: 2646540 - DNA, 25 bp, Homo sapien
tcatgggaaacgtttctcttttcca

SEQ ID NO: 2646541 - DNA, 25 bp, Homo sapien
cttgggaacgcctagttttctatca

SEQ ID NO: 2646542 - DNA, 25 bp, Homo sapien
ttgggaacgcctagttttctatcac

SEQ ID NO: 2646543 - DNA, 25 bp, Homo sapien
cataagtgccttcatgggaaacgtt

SEQ ID NO: 2646544 - DNA, 25 bp, Homo sapien
cagcctgagtaacagtaataccctg

SEQ ID NO: 2646545 - DNA, 25 bp, Homo sapien
ttgtatacggtattataactagaga

SEQ ID NO: 2646546 - DNA, 25 bp, Homo sapien
tatacggtattataactagagatta

SEQ ID NO: 2646547 - DNA, 25 bp, Homo sapien
actacaatatcacaattctacatag

SEQ ID NO: 2646548 - DNA, 25 bp, Homo sapien
gattgtcaatggtcagctgatcttc

SEQ ID NO: 2646549 - DNA, 25 bp, Homo sapien
ctgattgtcaatggtcagctgatct

SEQ ID NO: 2646550 - DNA, 25 bp, Homo sapien
gtcaatggtcagctgatcttcagga

SEQ ID NO: 2646551 - DNA, 25 bp, Homo sapien
caggatgagcaatgccctttagctt

SEQ ID NO: 2646552 - DNA, 25 bp, Homo sapien
gaggtggactttcaagaggcctgga

SEQ ID NO: 2646553 - DNA, 25 bp, Homo sapien
aggcctgtaaggaggtggactttca

SEQ ID NO: 2646554 - DNA, 25 bp, Homo sapien
catgttatatttctacagtgctatg

SEQ ID NO: 2646555 - DNA, 25 bp, Homo sapien
tatatttctacagtgctatgaagcc

SEQ ID NO: 2646556 - DNA, 25 bp, Homo sapien
gaaaaaatacatatcgcattattat

SEQ ID NO: 2646557 - DNA, 25 bp, Homo sapien
tgaagccaaaactgatgaactatga

SEQ ID NO: 2646558 - DNA, 25 bp, Homo sapien
aatgtatctagtccggctgggcacg

SEQ ID NO: 2646559 - DNA, 25 bp, Homo sapien
gccacttgggtctatcatacacttg

SEQ ID NO: 2646560 - DNA, 25 bp, Homo sapien
gattgtaccaattacctacagtgga

SEQ ID NO: 2646561 - DNA, 25 bp, Homo sapien
aacttcactagacagtatcaaactg

SEQ ID NO: 2646562 - DNA, 25 bp, Homo sapien
gcttggtgcataatgattcggtttg

SEQ ID NO: 2646563 - DNA, 25 bp, Homo sapien
ccatatatgtcattgcttggtgcat

SEQ ID NO: 2646564 - DNA, 25 bp, Homo sapien
cattggtcgaacatgcatctctcca

SEQ ID NO: 2646565 - DNA, 25 bp, Homo sapien
ctgggtaaaaagagtaggctggctg

SEQ ID NO: 2646566 - DNA, 25 bp, Homo sapien
gacaggatccgaatcactcctggag

SEQ ID NO: 2646567 - DNA, 25 bp, Homo sapien
caataatgagcatagacaggatccg

SEQ ID NO: 2646568 - DNA, 25 bp, Homo sapien
ctggaggagaggtccatttgtagaa

SEQ ID NO: 2646569 - DNA, 25 bp, Homo sapien
ggcaaagatggcaatgcacatcaca

SEQ ID NO: 2646570 - DNA, 25 bp, Homo sapien
taaaagggaagttccatagcctctg

SEQ ID NO: 2646571 - DNA, 25 bp, Homo sapien
aaagggaagttccatagcctctgtc

SEQ ID NO: 2646572 - DNA, 25 bp, Homo sapien
ctaaaagggaagttccatagcctct

SEQ ID NO: 2646573 - DNA, 25 bp, Homo sapien
aaaagggaagttccatagcctctgt

SEQ ID NO: 2646574 - DNA, 25 bp, Homo sapien
ttcctccataagggtagcctacact

SEQ ID NO: 2646575 - DNA, 25 bp, Homo sapien
tcctccataagggtagcctacacta

SEQ ID NO: 2646576 - DNA, 25 bp, Homo sapien
cttcctccataagggtagcctacac

SEQ ID NO: 2646577 - DNA, 25 bp, Homo sapien
cctccataagggtagcctacactac

SEQ ID NO: 2646578 - DNA, 25 bp, Homo sapien
ctccgtagccatagccataaccata

SEQ ID NO: 2646579 - DNA, 25 bp, Homo sapien
tccgtagccatagccataaccatag

SEQ ID NO: 2646580 - DNA, 25 bp, Homo sapien
caaagatcaccaacgcggcaatgaa

SEQ ID NO: 2646581 - DNA, 25 bp, Homo sapien
aagactgagcagttgggttcactcc

SEQ ID NO: 2646582 - DNA, 25 bp, Homo sapien
accatatagagatccagaagactga

SEQ ID NO: 2646583 - DNA, 25 bp, Homo sapien
tgatgcccaggatagcactcactat

SEQ ID NO: 2646584 - DNA, 25 bp, Homo sapien
gggatccacaacacagtagtgatac

SEQ ID NO: 2646585 - DNA, 25 bp, Homo sapien
tcctggggatccacaacacagtagt

SEQ ID NO: 2646586 - DNA, 25 bp, Homo sapien
tactgatccacgtagagtccagtag

SEQ ID NO: 2646587 - DNA, 25 bp, Homo sapien
gtagtgatacaaatactgatccacg

SEQ ID NO: 2646588 - DNA, 25 bp, Homo sapien
actaaaagcttttatgcaaaggaca

SEQ ID NO: 2646589 - DNA, 25 bp, Homo sapien
ggcacgccaccgtgtccaggtaatt

SEQ ID NO: 2646590 - DNA, 25 bp, Homo sapien
catgcccggcccaaaactaaaagct

SEQ ID NO: 2646591 - DNA, 25 bp, Homo sapien
agcttttatgcaaaggacaccatca

SEQ ID NO: 2646592 - DNA, 25 bp, Homo sapien
gggctgctcatcataaatgtgttcc

SEQ ID NO: 2646593 - DNA, 25 bp, Homo sapien
aatattggacttgtcatacctgtcc

SEQ ID NO: 2646594 - DNA, 25 bp, Homo sapien
ccatctttcttcgagttttcacagc

SEQ ID NO: 2646595 - DNA, 25 bp, Homo sapien
catgaaccccagtacaatggcaatg

SEQ ID NO: 2646596 - DNA, 25 bp, Homo sapien
cgatggccacattatcagggtgaaa

SEQ ID NO: 2646597 - DNA, 25 bp, Homo sapien
gaacagtttagatgcaggatgacac

SEQ ID NO: 2646598 - DNA, 25 bp, Homo sapien
tccactgtgaacagtttagatgcag

SEQ ID NO: 2646599 - DNA, 25 bp, Homo sapien
ggatgacacaattccacagcgatgg

SEQ ID NO: 2646600 - DNA, 25 bp, Homo sapien
gggactagagtcgagctaccatgcc

SEQ ID NO: 2646601 - DNA, 25 bp, Homo sapien
gagcaatttcatataccatcagggt

SEQ ID NO: 2646602 - DNA, 25 bp, Homo sapien
tgcaacttggtaatcccttgtaaaa

SEQ ID NO: 2646603 - DNA, 25 bp, Homo sapien
ttaatgacagataataaccagaaca

SEQ ID NO: 2646604 - DNA, 25 bp, Homo sapien
attaagacagtcattccgggaaaag

SEQ ID NO: 2646605 - DNA, 25 bp, Homo sapien
ttggatgggattaagacagtcattc

SEQ ID NO: 2646606 - DNA, 25 bp, Homo sapien
ttaagcgaaaaattagcttctctga

SEQ ID NO: 2646607 - DNA, 25 bp, Homo sapien
tcaatttaagcgaaaaattagcttc

SEQ ID NO: 2646608 - DNA, 25 bp, Homo sapien
ctttgtgagaggcatgttctcctgg

SEQ ID NO: 2646609 - DNA, 25 bp, Homo sapien
agaggcatgttctcctgggtaggtc

SEQ ID NO: 2646610 - DNA, 25 bp, Homo sapien
tgttctcctgggtaggtcgtcaccg

SEQ ID NO: 2646611 - DNA, 25 bp, Homo sapien
gcatgttctcctgggtaggtcgtca

SEQ ID NO: 2646612 - DNA, 25 bp, Homo sapien
gattttgtaccatcctgggcattta

SEQ ID NO: 2646613 - DNA, 25 bp, Homo sapien
caaaatttctgttagtgcatggcta

SEQ ID NO: 2646614 - DNA, 25 bp, Homo sapien
aatttctgttagtgcatggctaaag

SEQ ID NO: 2646615 - DNA, 25 bp, Homo sapien
gactgtgatgattttgtaccatcct

SEQ ID NO: 2646616 - DNA, 25 bp, Homo sapien
caaaagtcgtgtgtaaacattggcg

SEQ ID NO: 2646617 - DNA, 25 bp, Homo sapien
caattcacctgaaactcggatggga

SEQ ID NO: 2646618 - DNA, 25 bp, Homo sapien
tattgctccaacgaaagactcctgg

SEQ ID NO: 2646619 - DNA, 25 bp, Homo sapien
gctgttaaaggaaccgcgcgatgtt

SEQ ID NO: 2646620 - DNA, 25 bp, Homo sapien
tggaagggggtgcgggaagcctgcg

SEQ ID NO: 2646621 - DNA, 25 bp, Homo sapien
ggcgcacctgacgccgcaccgaccg

SEQ ID NO: 2646622 - DNA, 25 bp, Homo sapien
cgggggccaacggtgccagggagcg

SEQ ID NO: 2646623 - DNA, 25 bp, Homo sapien
ggccaacggtgccagggagcgcgct

SEQ ID NO: 2646624 - DNA, 25 bp, Homo sapien
acggtgccagggagcgcgctcacct

SEQ ID NO: 2646625 - DNA, 25 bp, Homo sapien
gctttcagcgtttccgcggaataaa

SEQ ID NO: 2646626 - DNA, 25 bp, Homo sapien
gcctcccaagttggccggtgctgct

SEQ ID NO: 2646627 - DNA, 25 bp, Homo sapien
ctctctggttcccacgagtcccagc

SEQ ID NO: 2646628 - DNA, 25 bp, Homo sapien
gaataaagcttgatcggcggctcca

SEQ ID NO: 2646629 - DNA, 25 bp, Homo sapien
cacacactgactggcctggaaagcc

SEQ ID NO: 2646630 - DNA, 25 bp, Homo sapien
cgcctcctcctcgagcagggtaatt

SEQ ID NO: 2646631 - DNA, 25 bp, Homo sapien
gtaattccccaagcgggcagtgtgg

SEQ ID NO: 2646632 - DNA, 25 bp, Homo sapien
tccggcctaaggatgccgcggcttt

SEQ ID NO: 2646633 - DNA, 25 bp, Homo sapien
cataagtgccttcatgggaaacgtt

SEQ ID NO: 2646634 - DNA, 25 bp, Homo sapien
cttgggaacgcctagttttctatca

SEQ ID NO: 2646635 - DNA, 25 bp, Homo sapien
ttgggaacgcctagttttctatcac

SEQ ID NO: 2646636 - DNA, 25 bp, Homo sapien
tcatgggaaacgtttctcttttcca

SEQ ID NO: 2646637 - DNA, 25 bp, Homo sapien
actacaatatcacaattctacatag

SEQ ID NO: 2646638 - DNA, 25 bp, Homo sapien
tatacggtattataactagagatta

SEQ ID NO: 2646639 - DNA, 25 bp, Homo sapien
ttgtatacggtattataactagaga

SEQ ID NO: 2646640 - DNA, 25 bp, Homo sapien
cagcctgagtaacagtaataccctg

SEQ ID NO: 2646641 - DNA, 25 bp, Homo sapien
gattgtcaatggtcagctgatcttc

SEQ ID NO: 2646642 - DNA, 25 bp, Homo sapien
gtcaatggtcagctgatcttcagga

SEQ ID NO: 2646643 - DNA, 25 bp, Homo sapien
ctgattgtcaatggtcagctgatct

SEQ ID NO: 2646644 - DNA, 25 bp, Homo sapien
caggatgagcaatgccctttagctt

SEQ ID NO: 2646645 - DNA, 25 bp, Homo sapien
aggcctgtaaggaggtggactttca

SEQ ID NO: 2646646 - DNA, 25 bp, Homo sapien
gaggtggactttcaagaggcctgga

SEQ ID NO: 2646647 - DNA, 25 bp, Homo sapien
cattggtcgaacatgcatctctcca

SEQ ID NO: 2646648 - DNA, 25 bp, Homo sapien
ctgggtaaaaagagtaggctggctg

SEQ ID NO: 2646649 - DNA, 25 bp, Homo sapien
gcttggtgcataatgattcggtttg

SEQ ID NO: 2646650 - DNA, 25 bp, Homo sapien
ccatatatgtcattgcttggtgcat

SEQ ID NO: 2646651 - DNA, 25 bp, Homo sapien
gacaggatccgaatcactcctggag

SEQ ID NO: 2646652 - DNA, 25 bp, Homo sapien
caataatgagcatagacaggatccg

SEQ ID NO: 2646653 - DNA, 25 bp, Homo sapien
ctggaggagaggtccatttgtagaa

SEQ ID NO: 2646654 - DNA, 25 bp, Homo sapien
ggcaaagatggcaatgcacatcaca

SEQ ID NO: 2646655 - DNA, 25 bp, Homo sapien
aaagggaagttccatagcctctgtc

SEQ ID NO: 2646656 - DNA, 25 bp, Homo sapien
aaaagggaagttccatagcctctgt

SEQ ID NO: 2646657 - DNA, 25 bp, Homo sapien
taaaagggaagttccatagcctctg

SEQ ID NO: 2646658 - DNA, 25 bp, Homo sapien
ctaaaagggaagttccatagcctct

SEQ ID NO: 2646659 - DNA, 25 bp, Homo sapien
ttcctccataagggtagcctacact

SEQ ID NO: 2646660 - DNA, 25 bp, Homo sapien
cctccataagggtagcctacactac

SEQ ID NO: 2646661 - DNA, 25 bp, Homo sapien
cttcctccataagggtagcctacac

SEQ ID NO: 2646662 - DNA, 25 bp, Homo sapien
tcctccataagggtagcctacacta

SEQ ID NO: 2646663 - DNA, 25 bp, Homo sapien
ctccgtagccatagccataaccata

SEQ ID NO: 2646664 - DNA, 25 bp, Homo sapien
tccgtagccatagccataaccatag

SEQ ID NO: 2646665 - DNA, 25 bp, Homo sapien
tgatgcccaggatagcactcactat

SEQ ID NO: 2646666 - DNA, 25 bp, Homo sapien
caaagatcaccaacgcggcaatgaa

SEQ ID NO: 2646667 - DNA, 25 bp, Homo sapien
aagactgagcagttgggttcactcc

SEQ ID NO: 2646668 - DNA, 25 bp, Homo sapien
accatatagagatccagaagactga

SEQ ID NO: 2646669 - DNA, 25 bp, Homo sapien
tcctggggatccacaacacagtagt

SEQ ID NO: 2646670 - DNA, 25 bp, Homo sapien
gggatccacaacacagtagtgatac

SEQ ID NO: 2646671 - DNA, 25 bp, Homo sapien
tactgatccacgtagagtccagtag

SEQ ID NO: 2646672 - DNA, 25 bp, Homo sapien
gtagtgatacaaatactgatccacg

SEQ ID NO: 2646673 - DNA, 25 bp, Homo sapien
actaaaagcttttatgcaaaggaca

SEQ ID NO: 2646674 - DNA, 25 bp, Homo sapien
catgcccggcccaaaactaaaagct

SEQ ID NO: 2646675 - DNA, 25 bp, Homo sapien
ggcacgccaccgtgtccaggtaatt

SEQ ID NO: 2646676 - DNA, 25 bp, Homo sapien
agcttttatgcaaaggacaccatca

SEQ ID NO: 2646677 - DNA, 25 bp, Homo sapien
gggctgctcatcataaatgtgttcc

SEQ ID NO: 2646678 - DNA, 25 bp, Homo sapien
catgaaccccagtacaatggcaatg

SEQ ID NO: 2646679 - DNA, 25 bp, Homo sapien
aatattggacttgtcatacctgtcc

SEQ ID NO: 2646680 - DNA, 25 bp, Homo sapien
ccatctttcttcgagttttcacagc

SEQ ID NO: 2646681 - DNA, 25 bp, Homo sapien
tgcaacttggtaatcccttgtaaaa

SEQ ID NO: 2646682 - DNA, 25 bp, Homo sapien
gagcaatttcatataccatcagggt

SEQ ID NO: 2646683 - DNA, 25 bp, Homo sapien
gggactagagtcgagctaccatgcc

SEQ ID NO: 2646684 - DNA, 25 bp, Homo sapien
ttaatgacagataataaccagaaca

SEQ ID NO: 2646685 - DNA, 25 bp, Homo sapien
agactctggataaaaccgcttgtca

SEQ ID NO: 2646686 - DNA, 25 bp, Homo sapien
cactttgccattggaagagtatgcc

SEQ ID NO: 2646687 - DNA, 25 bp, Homo sapien
ctgtcaactctttccacatagtcag

SEQ ID NO: 2646688 - DNA, 25 bp, Homo sapien
ggataaaaccgcttgtcattcactt

SEQ ID NO: 2646689 - DNA, 25 bp, Homo sapien
tcagtacactacagccctttgccag

SEQ ID NO: 2646690 - DNA, 25 bp, Homo sapien
cagcagacatctgcacgcaggtgca

SEQ ID NO: 2646691 - DNA, 25 bp, Homo sapien
cactcacgcgaggacttcagatgtt

SEQ ID NO: 2646692 - DNA, 25 bp, Homo sapien
ttgccagtgcactgtaatcacagag

SEQ ID NO: 2646693 - DNA, 25 bp, Homo sapien
aatggaagctcctgaaccacttcag

SEQ ID NO: 2646694 - DNA, 25 bp, Homo sapien
gaagtcatccacaggcgaagttaat

SEQ ID NO: 2646695 - DNA, 25 bp, Homo sapien
tgtctcaaagttaccaccgctgctg

SEQ ID NO: 2646696 - DNA, 25 bp, Homo sapien
tgtgtagtctgtctcatagtgatct

SEQ ID NO: 2646697 - DNA, 25 bp, Homo sapien
tctttgttgatctgaagtgataggt

SEQ ID NO: 2646698 - DNA, 25 bp, Homo sapien
agctcttgtattcctgtaggccagt

SEQ ID NO: 2646699 - DNA, 25 bp, Homo sapien
caaacgggagagttctttattgatc

SEQ ID NO: 2646700 - DNA, 25 bp, Homo sapien
ttctctatagtcatccaattcttta

SEQ ID NO: 2646701 - DNA, 25 bp, Homo sapien
tggacaaattctatctcagccaggt

SEQ ID NO: 2646702 - DNA, 25 bp, Homo sapien
tgtcaaagggacacgggaagcaact

SEQ ID NO: 2646703 - DNA, 25 bp, Homo sapien
agattaatctccctctaaaaggtgg

SEQ ID NO: 2646704 - DNA, 25 bp, Homo sapien
tgaaagttcccaacggtcaaagcga

SEQ ID NO: 2646705 - DNA, 25 bp, Homo sapien
cttgcttcagtctattgtattcatc

SEQ ID NO: 2646706 - DNA, 25 bp, Homo sapien
cacttgcttcagtctattgtattca

SEQ ID NO: 2646707 - DNA, 25 bp, Homo sapien
ttcacttgcttcagtctattgtatt

SEQ ID NO: 2646708 - DNA, 25 bp, Homo sapien
ttgcttcagtctattgtattcatca

SEQ ID NO: 2646709 - DNA, 25 bp, Homo sapien
gtctatcatagtctccaaccatctt

SEQ ID NO: 2646710 - DNA, 25 bp, Homo sapien
tctgtctatcatagtctccaaccat

SEQ ID NO: 2646711 - DNA, 25 bp, Homo sapien
tgtctatcatagtctccaaccatct

SEQ ID NO: 2646712 - DNA, 25 bp, Homo sapien
gcaatgattcttcttacttttgtaa

SEQ ID NO: 2646713 - DNA, 25 bp, Homo sapien
tctcaaacaacttggcatcagcctt

SEQ ID NO: 2646714 - DNA, 25 bp, Homo sapien
tccttaattggagtgttcagcccag

SEQ ID NO: 2646715 - DNA, 25 bp, Homo sapien
tcagagacttcattgcaggaaccca

SEQ ID NO: 2646716 - DNA, 25 bp, Homo sapien
aaccaaaagtgtgtgctaggaaaca

SEQ ID NO: 2646717 - DNA, 25 bp, Homo sapien
ctgtgtgttaacagcactaataaca

SEQ ID NO: 2646718 - DNA, 25 bp, Homo sapien
tgttaacagcactaataacatcaaa

SEQ ID NO: 2646719 - DNA, 25 bp, Homo sapien
attgctgtgtgttaacagcactaat

SEQ ID NO: 2646720 - DNA, 25 bp, Homo sapien
gtgtgttaacagcactaataacatc

SEQ ID NO: 2646721 - DNA, 25 bp, Homo sapien
tgacaaacttgccttcacgaactga

SEQ ID NO: 2646722 - DNA, 25 bp, Homo sapien
tacatccagctagttaatgccaacg

SEQ ID NO: 2646723 - DNA, 25 bp, Homo sapien
ggtgctcatcaagagagtccttttc

SEQ ID NO: 2646724 - DNA, 25 bp, Homo sapien
cactttatacgcagggaatctttac

SEQ ID NO: 2646725 - DNA, 25 bp, Homo sapien
gatcctaatcccttgttttgccact

SEQ ID NO: 2646726 - DNA, 25 bp, Homo sapien
gacaacagccagttaatctatcata

SEQ ID NO: 2646727 - DNA, 25 bp, Homo sapien
cacatgtcaaaagatcgttgtgagg

SEQ ID NO: 2646728 - DNA, 25 bp, Homo sapien
tgccacttgctagtgtgacaacagc

SEQ ID NO: 2646729 - DNA, 25 bp, Homo sapien
tcctttcacacaagagatggcatgg

SEQ ID NO: 2646730 - DNA, 25 bp, Homo sapien
tccccggagccatgataaaagcact

SEQ ID NO: 2646731 - DNA, 25 bp, Homo sapien
tgtaggcaataccaagcagttcttg

SEQ ID NO: 2646732 - DNA, 25 bp, Homo sapien
caagtaactgcagaagggcaaagca

SEQ ID NO: 2646733 - DNA, 25 bp, Homo sapien
tattccaatagacaggctcccttac

SEQ ID NO: 2646734 - DNA, 25 bp, Homo sapien
tatgcataaatccataatctcttgg

SEQ ID NO: 2646735 - DNA, 25 bp, Homo sapien
tgggagaagtgaacctgtctattcc

SEQ ID NO: 2646736 - DNA, 25 bp, Homo sapien
tagacatggatgttaagattcaact

SEQ ID NO: 2646737 - DNA, 25 bp, Homo sapien
ctctcggaaggtcgaaggctctgca

SEQ ID NO: 2646738 - DNA, 25 bp, Homo sapien
cgacctgggttctgaggagctcgat

SEQ ID NO: 2646739 - DNA, 25 bp, Homo sapien
tcaggtgcagggcatggcctccgct

SEQ ID NO: 2646740 - DNA, 25 bp, Homo sapien
gagaaccggaaagagtgatcgccat

SEQ ID NO: 2646741 - DNA, 25 bp, Homo sapien
tagaaggactctcagccggaaactc

SEQ ID NO: 2646742 - DNA, 25 bp, Homo sapien
gccgctagaaggactctcagccgga

SEQ ID NO: 2646743 - DNA, 25 bp, Homo sapien
cgacactcctctccgccgctttagg

SEQ ID NO: 2646744 - DNA, 25 bp, Homo sapien
cggcgccgctagaaggactctcagc

SEQ ID NO: 2646745 - DNA, 25 bp, Homo sapien
aaaacgctcccagccgcctagctag

SEQ ID NO: 2646746 - DNA, 25 bp, Homo sapien
tcacagacttccacacgcggactca

SEQ ID NO: 2646747 - DNA, 25 bp, Homo sapien
tccttccctatgagcccaggcaggg

SEQ ID NO: 2646748 - DNA, 25 bp, Homo sapien
caggcagggcaattcaacctccgtt

SEQ ID NO: 2646749 - DNA, 25 bp, Homo sapien
ctggcaggtagacactggagcgagc

SEQ ID NO: 2646750 - DNA, 25 bp, Homo sapien
agacactggagcgagccaaggttgt

SEQ ID NO: 2646751 - DNA, 25 bp, Homo sapien
gcaggtagacactggagcgagccaa

SEQ ID NO: 2646752 - DNA, 25 bp, Homo sapien
tgaacctggcaggtagacactggag

SEQ ID NO: 2646753 - DNA, 25 bp, Homo sapien
tcaaaactgtattttattattcaat

SEQ ID NO: 2646754 - DNA, 25 bp, Homo sapien
ttcaaaactgtattttattattcaa

SEQ ID NO: 2646755 - DNA, 25 bp, Homo sapien
caaaactgtattttattattcaata

SEQ ID NO: 2646756 - DNA, 25 bp, Homo sapien
cttcccatcgcttagttctttcagg

SEQ ID NO: 2646757 - DNA, 25 bp, Homo sapien
tagcctccttcccatcgcttagttc

SEQ ID NO: 2646758 - DNA, 25 bp, Homo sapien
catagcctccttcccatcgcttagt

SEQ ID NO: 2646759 - DNA, 25 bp, Homo sapien
cctccttcccatcgcttagttcttt

SEQ ID NO: 2646760 - DNA, 25 bp, Homo sapien
gacagggcaataaagctctccttac

SEQ ID NO: 2646761 - DNA, 25 bp, Homo sapien
gacattgtctaaaagaaaagacagg

SEQ ID NO: 2646762 - DNA, 25 bp, Homo sapien
gaaaagacagggcaataaagctctc

SEQ ID NO: 2646763 - DNA, 25 bp, Homo sapien
aagacattgtctaaaagaaaagaca

SEQ ID NO: 2646764 - DNA, 25 bp, Homo sapien
agattcatcttctttaagaatctcc

SEQ ID NO: 2646765 - DNA, 25 bp, Homo sapien
gacagtctctaaagaccatttcctg

SEQ ID NO: 2646766 - DNA, 25 bp, Homo sapien
tcagaaggcaataggtcagttaccc

SEQ ID NO: 2646767 - DNA, 25 bp, Homo sapien
gttctttccccatagtcagaaggca

SEQ ID NO: 2646768 - DNA, 25 bp, Homo sapien
gcaagggtaggtggctagttctttc

SEQ ID NO: 2646769 - DNA, 25 bp, Homo sapien
attccaagtcgaacttgtccatggt

SEQ ID NO: 2646770 - DNA, 25 bp, Homo sapien
cattccaagtcgaacttgtccatgg

SEQ ID NO: 2646771 - DNA, 25 bp, Homo sapien
ctattgttttttctagcaagacaga

SEQ ID NO: 2646772 - DNA, 25 bp, Homo sapien
gcctcaagtgccattttgactagta

SEQ ID NO: 2646773 - DNA, 25 bp, Homo sapien
tctctaacctaaactagttctgtac

SEQ ID NO: 2646774 - DNA, 25 bp, Homo sapien
tattctatgcacgtatttttaacat

SEQ ID NO: 2646775 - DNA, 25 bp, Homo sapien
agtacacgtcagtctattaggcttt

SEQ ID NO: 2646776 - DNA, 25 bp, Homo sapien
ctttaaagtacacgtcagtctatta

SEQ ID NO: 2646777 - DNA, 25 bp, Homo sapien
catctactaccacataaaggtggcg

SEQ ID NO: 2646778 - DNA, 25 bp, Homo sapien
tctactaccacataaaggtggcgca

SEQ ID NO: 2646779 - DNA, 25 bp, Homo sapien
tggtacaaatttaaatgatttagta

SEQ ID NO: 2646780 - DNA, 25 bp, Homo sapien
atcaaaatattcctctacaaagtat

SEQ ID NO: 2646781 - DNA, 25 bp, Homo sapien
caaaatattcctctacaaagtattc

SEQ ID NO: 2646782 - DNA, 25 bp, Homo sapien
tcaaaatattcctctacaaagtatt

SEQ ID NO: 2646783 - DNA, 25 bp, Homo sapien
cagctcttttactcttagttacaat

SEQ ID NO: 2646784 - DNA, 25 bp, Homo sapien
tactcttagttacaattattccaat

SEQ ID NO: 2646785 - DNA, 25 bp, Homo sapien
aaagttcagtcaatttttcagctct

SEQ ID NO: 2646786 - DNA, 25 bp, Homo sapien
ctgaaagttcagtcaatttttcagc

SEQ ID NO: 2646787 - DNA, 25 bp, Homo sapien
gagttctccctagacgtgtgctgaa

SEQ ID NO: 2646788 - DNA, 25 bp, Homo sapien
tggatgggcagatcgtaactcaggc

SEQ ID NO: 2646789 - DNA, 25 bp, Homo sapien
gctgaagctataggctacgggtaca

SEQ ID NO: 2646790 - DNA, 25 bp, Homo sapien
catcagcaggcaatcgaagcgtaca

SEQ ID NO: 2646791 - DNA, 25 bp, Homo sapien
tatgcctgcttaactgcaggaccag

SEQ ID NO: 2646792 - DNA, 25 bp, Homo sapien
tgaaaagtacctcgctaagcagtcc

SEQ ID NO: 2646793 - DNA, 25 bp, Homo sapien
tggagctcccttgagtttttactca

SEQ ID NO: 2646794 - DNA, 25 bp, Homo sapien
tgtctattcatcaacttggagctcc

SEQ ID NO: 2646795 - DNA, 25 bp, Homo sapien
agcactataaataacagtttctctg

SEQ ID NO: 2646796 - DNA, 25 bp, Homo sapien
tttaatctgtcactattatacataa

SEQ ID NO: 2646797 - DNA, 25 bp, Homo sapien
caaagagtatctttgtagagtgatc

SEQ ID NO: 2646798 - DNA, 25 bp, Homo sapien
gaactaatttgtaagactatcagca

SEQ ID NO: 2646799 - DNA, 25 bp, Homo sapien
atggctctccatggcaggtcatatc

SEQ ID NO: 2646800 - DNA, 25 bp, Homo sapien
gctctccatggcaggtcatatccac

SEQ ID NO: 2646801 - DNA, 25 bp, Homo sapien
gcttagggaattataaagagatggc

SEQ ID NO: 2646802 - DNA, 25 bp, Homo sapien
gggaattataaagagatggctctcc

SEQ ID NO: 2646803 - DNA, 25 bp, Homo sapien
tatttttgtactattgatactgccg

SEQ ID NO: 2646804 - DNA, 25 bp, Homo sapien
tactaaccaacaccacactaaacat

SEQ ID NO: 2646805 - DNA, 25 bp, Homo sapien
tatgggccccatattaacacatcac

SEQ ID NO: 2646806 - DNA, 25 bp, Homo sapien
tgatactgccgacagttttaaatta

SEQ ID NO: 2646807 - DNA, 25 bp, Homo sapien
aagagacctagccttcagccagtct

SEQ ID NO: 2646808 - DNA, 25 bp, Homo sapien
caatgtgactaagtgtttagcacaa

SEQ ID NO: 2646809 - DNA, 25 bp, Homo sapien
ttagcacaagagacctagccttcag

SEQ ID NO: 2646810 - DNA, 25 bp, Homo sapien
gccactggagggttattattggtgt

SEQ ID NO: 2646811 - DNA, 25 bp, Homo sapien
cagcccctcttacacttttatgttt

SEQ ID NO: 2646812 - DNA, 25 bp, Homo sapien
cccagcccctcttacacttttatgt

SEQ ID NO: 2646813 - DNA, 25 bp, Homo sapien
gtctcacagtgttgtctgggctaaa

SEQ ID NO: 2646814 - DNA, 25 bp, Homo sapien
gtgttgtctgggctaaagtgcaatg

SEQ ID NO: 2646815 - DNA, 25 bp, Homo sapien
ccaagggttgcagaatgagtgctat

SEQ ID NO: 2646816 - DNA, 25 bp, Homo sapien
tgctcagatccatctatggcagtca

SEQ ID NO: 2646817 - DNA, 25 bp, Homo sapien
catgcccagccagtgtagatatttt

SEQ ID NO: 2646818 - DNA, 25 bp, Homo sapien
ggcagtcacagccttatgatatgta

SEQ ID NO: 2646819 - DNA, 25 bp, Homo sapien
ttaccaagtactctcaagttctggg

SEQ ID NO: 2646820 - DNA, 25 bp, Homo sapien
tcatatggatcagctttaaagtgca

SEQ ID NO: 2646821 - DNA, 25 bp, Homo sapien
gagctatgcacttcaaaaaattgtt

SEQ ID NO: 2646822 - DNA, 25 bp, Homo sapien
acaagactgacaatgttcccgacat

SEQ ID NO: 2646823 - DNA, 25 bp, Homo sapien
taaacataggattacacatttagac

SEQ ID NO: 2646824 - DNA, 25 bp, Homo sapien
gaatatctcatttgtttcaacaatg

SEQ ID NO: 2646825 - DNA, 25 bp, Homo sapien
cacatttagactatagaatatctca

SEQ ID NO: 2646826 - DNA, 25 bp, Homo sapien
taggtacaacaaattatactaccaa

SEQ ID NO: 2646827 - DNA, 25 bp, Homo sapien
ctcgacttgtatgtccaggcatgtg

SEQ ID NO: 2646828 - DNA, 25 bp, Homo sapien
taaatattagatggatcgcaagttg

SEQ ID NO: 2646829 - DNA, 25 bp, Homo sapien
taaggctgctaaagatgattagtac

SEQ ID NO: 2646830 - DNA, 25 bp, Homo sapien
gatgattagtacttctcgacttgta

SEQ ID NO: 2646831 - DNA, 25 bp, Homo sapien
aaattcaatacatctaccacaaaga

SEQ ID NO: 2646832 - DNA, 25 bp, Homo sapien
ttgctacagaattctctttacagtt

SEQ ID NO: 2646833 - DNA, 25 bp, Homo sapien
cagaattctctttacagttataact

SEQ ID NO: 2646834 - DNA, 25 bp, Homo sapien
catctaccacaaagatgaatcacac

SEQ ID NO: 2646835 - DNA, 25 bp, Homo sapien
gtacagtgcaaacgcgaacttctgc

SEQ ID NO: 2646836 - DNA, 25 bp, Homo sapien
cagtttcacgagcaagtacagtgca

SEQ ID NO: 2646837 - DNA, 25 bp, Homo sapien
cgcgaacttctgcagacaatccaat

SEQ ID NO: 2646838 - DNA, 25 bp, Homo sapien
tgcagacaatccaataacagatact

SEQ ID NO: 2646839 - DNA, 25 bp, Homo sapien
aacaccttcatagacataacgaact

SEQ ID NO: 2646840 - DNA, 25 bp, Homo sapien
ttcatagacataacgaactgtacgt

SEQ ID NO: 2646841 - DNA, 25 bp, Homo sapien
tagacataacgaactgtacgttcta

SEQ ID NO: 2646842 - DNA, 25 bp, Homo sapien
ctaaatcaacttctctaggaataac

SEQ ID NO: 2646843 - DNA, 25 bp, Homo sapien
tcatctaaaataacatggtacgtgc

SEQ ID NO: 2646844 - DNA, 25 bp, Homo sapien
gatgtgtgagcaactctttgtaatg

SEQ ID NO: 2646845 - DNA, 25 bp, Homo sapien
attcagaacttgagctagcaggagg

SEQ ID NO: 2646846 - DNA, 25 bp, Homo sapien
ccatacgaataagtgagcattcaga

SEQ ID NO: 2646847 - DNA, 25 bp, Homo sapien
catccagtacagagaattttgtagc

SEQ ID NO: 2646848 - DNA, 25 bp, Homo sapien
ccacgcccggactttgtagcttatt

SEQ ID NO: 2646849 - DNA, 25 bp, Homo sapien
gctttgatcatccagtacagagaat

SEQ ID NO: 2646850 - DNA, 25 bp, Homo sapien
cccctcctttgagcaatttggtgta

SEQ ID NO: 2646851 - DNA, 25 bp, Homo sapien
tcagataaagaagcaatggtgtgct

SEQ ID NO: 2646852 - DNA, 25 bp, Homo sapien
taaagaagcaatggtgtgctgagga

SEQ ID NO: 2646853 - DNA, 25 bp, Homo sapien
gataaagaagcaatggtgtgctgag

SEQ ID NO: 2646854 - DNA, 25 bp, Homo sapien
agaagcaatggtgtgctgaggaaat

SEQ ID NO: 2646855 - DNA, 25 bp, Homo sapien
ccatgctgaaagagggttttgcatc

SEQ ID NO: 2646856 - DNA, 25 bp, Homo sapien
gccatgctgaaagagggttttgcat

SEQ ID NO: 2646857 - DNA, 25 bp, Homo sapien
gcttttccctacacactcactgagg

SEQ ID NO: 2646858 - DNA, 25 bp, Homo sapien
gcgatgttagtaggctacactatct

SEQ ID NO: 2646859 - DNA, 25 bp, Homo sapien
cattatcactgatattttcaaggtc

SEQ ID NO: 2646860 - DNA, 25 bp, Homo sapien
ggctatactatataactgcgatgtt

SEQ ID NO: 2646861 - DNA, 25 bp, Homo sapien
gaacagctgttagtctagatttttc

SEQ ID NO: 2646862 - DNA, 25 bp, Homo sapien
tggtctagaacagctgttagtctag

SEQ ID NO: 2646863 - DNA, 25 bp, Homo sapien
tatacttcattaacttggaaatagt

SEQ ID NO: 2646864 - DNA, 25 bp, Homo sapien
ggctggtctagaacagctgttagtc

SEQ ID NO: 2646865 - DNA, 25 bp, Homo sapien
attctaccaactgggttatttctgg

SEQ ID NO: 2646866 - DNA, 25 bp, Homo sapien
ctttgcatccctggtaatttctgcc

SEQ ID NO: 2646867 - DNA, 25 bp, Homo sapien
catgcctggtctaaaagtctatttt

SEQ ID NO: 2646868 - DNA, 25 bp, Homo sapien
gactatgaattttgctttgccagac

SEQ ID NO: 2646869 - DNA, 25 bp, Homo sapien
tgtaagccctggctcagtattgcca

SEQ ID NO: 2646870 - DNA, 25 bp, Homo sapien
ctggctcagtattgccatccaaatg

SEQ ID NO: 2646871 - DNA, 25 bp, Homo sapien
tactttgcccgacactgtgggcaga

SEQ ID NO: 2646872 - DNA, 25 bp, Homo sapien
cagaaatagcctcctaatgtaagcc

SEQ ID NO: 2646873 - DNA, 25 bp, Homo sapien
cagagagacatgttgagtagtccaa

SEQ ID NO: 2646874 - DNA, 25 bp, Homo sapien
taagtgtgtaaccaacctgtctcgg

SEQ ID NO: 2646875 - DNA, 25 bp, Homo sapien
tacctgtggctataacagaagattg

SEQ ID NO: 2646876 - DNA, 25 bp, Homo sapien
tgaagacaacggctgaaaagccaaa

SEQ ID NO: 2646877 - DNA, 25 bp, Homo sapien
tggggagcagacaccaaagtaagac

SEQ ID NO: 2646878 - DNA, 25 bp, Homo sapien
atgatggtaagaccgtgccaagtgg

SEQ ID NO: 2646879 - DNA, 25 bp, Homo sapien
gaaacaaatgatggtaagaccgtgc

SEQ ID NO: 2646880 - DNA, 25 bp, Homo sapien
tcttgaaaagcatccaaaggaaaca

SEQ ID NO: 2646881 - DNA, 25 bp, Homo sapien
actggattgtactggatcaaaagga

SEQ ID NO: 2646882 - DNA, 25 bp, Homo sapien
cttattttcagtagtgtgctaggac

SEQ ID NO: 2646883 - DNA, 25 bp, Homo sapien
gagattcagatctatttagcaacga

SEQ ID NO: 2646884 - DNA, 25 bp, Homo sapien
tgttaattgtagctaaaaattggcc

SEQ ID NO: 2646885 - DNA, 25 bp, Homo sapien
taatgtgattcctaaatcctggatg

SEQ ID NO: 2646886 - DNA, 25 bp, Homo sapien
tctaaatgacttaagtgtgaaaagc

SEQ ID NO: 2646887 - DNA, 25 bp, Homo sapien
tgtttttggctagccagtaagtgtt

SEQ ID NO: 2646888 - DNA, 25 bp, Homo sapien
tatccaacaggaagcaattgattat

SEQ ID NO: 2646889 - DNA, 25 bp, Homo sapien
gttggtctttcaattccccctgaca

SEQ ID NO: 2646890 - DNA, 25 bp, Homo sapien
tttcaattccccctgacatccataa

SEQ ID NO: 2646891 - DNA, 25 bp, Homo sapien
ttccccctgacatccataacaaaat

SEQ ID NO: 2646892 - DNA, 25 bp, Homo sapien
tggtctttcaattccccctgacatc

SEQ ID NO: 2646893 - DNA, 25 bp, Homo sapien
cagctagatgacattcaaggtgtgc

SEQ ID NO: 2646894 - DNA, 25 bp, Homo sapien
actttattacttccaatgtactcta

SEQ ID NO: 2646895 - DNA, 25 bp, Homo sapien
caaaagttaattacagcacagctag

SEQ ID NO: 2646896 - DNA, 25 bp, Homo sapien
atgacattcaaggtgtgctttgctc

SEQ ID NO: 2646897 - DNA, 25 bp, Homo sapien
caacagtgtagagaatcatgaacaa

SEQ ID NO: 2646898 - DNA, 25 bp, Homo sapien
aaggagctggaatcttatgaataca

SEQ ID NO: 2646899 - DNA, 25 bp, Homo sapien
tgaaggagctggaatcttatgaata

SEQ ID NO: 2646900 - DNA, 25 bp, Homo sapien
cagggcaacagtgtagagaatcatg

SEQ ID NO: 2646901 - DNA, 25 bp, Homo sapien
tcttctaaagaagtccttttattca

SEQ ID NO: 2646902 - DNA, 25 bp, Homo sapien
catacaatgtatactacatgctgga

SEQ ID NO: 2646903 - DNA, 25 bp, Homo sapien
ctaaagaagtccttttattcacagt

SEQ ID NO: 2646904 - DNA, 25 bp, Homo sapien
tattcacagttgcaaatttcttttt

SEQ ID NO: 2646905 - DNA, 25 bp, Homo sapien
catactgcataatgactttgaaaac

SEQ ID NO: 2646906 - DNA, 25 bp, Homo sapien
attaattgaatgaagtactactgaa

SEQ ID NO: 2646907 - DNA, 25 bp, Homo sapien
taagtttatacatactgcataatga

SEQ ID NO: 2646908 - DNA, 25 bp, Homo sapien
taagtcagattatcctttcatgttt

SEQ ID NO: 2646909 - DNA, 25 bp, Homo sapien
cactgaatttacattcagacttaac

SEQ ID NO: 2646910 - DNA, 25 bp, Homo sapien
actttcttcttacactaaattaatg

SEQ ID NO: 2646911 - DNA, 25 bp, Homo sapien
ttacattcagacttaactttcttct

SEQ ID NO: 2646912 - DNA, 25 bp, Homo sapien
gcccagcctaatttcataagtattg

SEQ ID NO: 2646913 - DNA, 25 bp, Homo sapien
ctctggtggatgtagcagtacatca

SEQ ID NO: 2646914 - DNA, 25 bp, Homo sapien
tactaacttgataaacatattccag

SEQ ID NO: 2646915 - DNA, 25 bp, Homo sapien
cctaaaaagacctctctggtggatg

SEQ ID NO: 2646916 - DNA, 25 bp, Homo sapien
caaataatttcagatgtactaactt

SEQ ID NO: 2646917 - DNA, 25 bp, Homo sapien
aatgtaaagtgacttctgttggtca

SEQ ID NO: 2646918 - DNA, 25 bp, Homo sapien
ggcagtcttgtgagtttgaatgttt

SEQ ID NO: 2646919 - DNA, 25 bp, Homo sapien
tcttgtgagtttgaatgtttaatgt

SEQ ID NO: 2646920 - DNA, 25 bp, Homo sapien
gaatgtttaatgtaaagtgacttct

SEQ ID NO: 2646921 - DNA, 25 bp, Homo sapien
tttaatatccttctgagtaagcggg

SEQ ID NO: 2646922 - DNA, 25 bp, Homo sapien
agtaagcgggtaccaagtatggcca

SEQ ID NO: 2646923 - DNA, 25 bp, Homo sapien
catcccttgtggatacctggaagct

SEQ ID NO: 2646924 - DNA, 25 bp, Homo sapien
ctagtggactgctacaaggacttcc

SEQ ID NO: 2646925 - DNA, 25 bp, Homo sapien
tgggatgcactataaataaatggag

SEQ ID NO: 2646926 - DNA, 25 bp, Homo sapien
actcgttaattgttacgtatctgga

SEQ ID NO: 2646927 - DNA, 25 bp, Homo sapien
tatcaactatgattttaggcaactt

SEQ ID NO: 2646928 - DNA, 25 bp, Homo sapien
gtcaaactttagagctctgttaacc

SEQ ID NO: 2646929 - DNA, 25 bp, Homo sapien
ggtgggattacgttgtctttactga

SEQ ID NO: 2646930 - DNA, 25 bp, Homo sapien
actcctgagagaaactcccgttact

SEQ ID NO: 2646931 - DNA, 25 bp, Homo sapien
ccactgggtccaggctcatggagta

SEQ ID NO: 2646932 - DNA, 25 bp, Homo sapien
gaaactcccgttactctgatcagtg

SEQ ID NO: 2646933 - DNA, 25 bp, Homo sapien
ccagggtcctgaggtgtgacgcaaa

SEQ ID NO: 2646934 - DNA, 25 bp, Homo sapien
cgcaaatagcaattcagtcaggtga

SEQ ID NO: 2646935 - DNA, 25 bp, Homo sapien
cacagatgcatgaggttaggtttac

SEQ ID NO: 2646936 - DNA, 25 bp, Homo sapien
tgcctgacccctttagacatctgag

SEQ ID NO: 2646937 - DNA, 25 bp, Homo sapien
aaaagatccctattcctccaaagag

SEQ ID NO: 2646938 - DNA, 25 bp, Homo sapien
caaagagtcaattcttaatgcttaa

SEQ ID NO: 2646939 - DNA, 25 bp, Homo sapien
catggtgtgaaaccacgtcactact

SEQ ID NO: 2646940 - DNA, 25 bp, Homo sapien
gatgctaatgctacttactggtcca

SEQ ID NO: 2646941 - DNA, 25 bp, Homo sapien
catggaattactcaagatgggagca

SEQ ID NO: 2646942 - DNA, 25 bp, Homo sapien
tagggagtactcactgcaaaggagc

SEQ ID NO: 2646943 - DNA, 25 bp, Homo sapien
accggccgctggaactcctagggag

SEQ ID NO: 2646944 - DNA, 25 bp, Homo sapien
aaaacagatcaatgtcaccggccgc

SEQ ID NO: 2646945 - DNA, 25 bp, Homo sapien
ggtggttaatcaatcgccagccctt

SEQ ID NO: 2646946 - DNA, 25 bp, Homo sapien
gaagttgtctaaaggatcccagcca

SEQ ID NO: 2646947 - DNA, 25 bp, Homo sapien
cttagaagctcttgtgtcaggaacc

SEQ ID NO: 2646948 - DNA, 25 bp, Homo sapien
taatggaggtgccatcacttaggca

SEQ ID NO: 2646949 - DNA, 25 bp, Homo sapien
tgcaccttggaatcccagacgaagt

SEQ ID NO: 2646950 - DNA, 25 bp, Homo sapien
gacgaagtccccaatatgaagtggc

SEQ ID NO: 2646951 - DNA, 25 bp, Homo sapien
atgaatgcaccttggaatcccagac

SEQ ID NO: 2646952 - DNA, 25 bp, Homo sapien
tggaatcccagacgaagtccccaat

SEQ ID NO: 2646953 - DNA, 25 bp, Homo sapien
tgtccgtcctttagtaggaagcagt

SEQ ID NO: 2646954 - DNA, 25 bp, Homo sapien
aatgctctgtccgtcctttagtagg

SEQ ID NO: 2646955 - DNA, 25 bp, Homo sapien
gtcctttagtaggaagcagtgagaa

SEQ ID NO: 2646956 - DNA, 25 bp, Homo sapien
aacaaatgctctgtccgtcctttag

SEQ ID NO: 2646957 - DNA, 25 bp, Homo sapien
ctttggtaagaagctccatcagcgt

SEQ ID NO: 2646958 - DNA, 25 bp, Homo sapien
ctgaggtgctatggccccaaagtaa

SEQ ID NO: 2646959 - DNA, 25 bp, Homo sapien
caaagtaatctcttcgaagttccca

SEQ ID NO: 2646960 - DNA, 25 bp, Homo sapien
ggttgctgacattgctaacatcatt

SEQ ID NO: 2646961 - DNA, 25 bp, Homo sapien
aaaggaatgcctggaatttcaacac

SEQ ID NO: 2646962 - DNA, 25 bp, Homo sapien
gcacctactatatatcaggtacagt

SEQ ID NO: 2646963 - DNA, 25 bp, Homo sapien
gagcatttcccactgtttccgaaga

SEQ ID NO: 2646964 - DNA, 25 bp, Homo sapien
gggatctagcaaccaacaagacaga

SEQ ID NO: 2646965 - DNA, 25 bp, Homo sapien
tgaaaaggaaaataaagcaggttga

SEQ ID NO: 2646966 - DNA, 25 bp, Homo sapien
ctgaaaaggaaaataaagcaggttg

SEQ ID NO: 2646967 - DNA, 25 bp, Homo sapien
gatcctctcgtcagaggctttctgc

SEQ ID NO: 2646968 - DNA, 25 bp, Homo sapien
tctggcagcaaattgtgatcaaact

SEQ ID NO: 2646969 - DNA, 25 bp, Homo sapien
ctctggcagcaaattgtgatcaaac

SEQ ID NO: 2646970 - DNA, 25 bp, Homo sapien
caaactgggagatcctctcgtcaga

SEQ ID NO: 2646971 - DNA, 25 bp, Homo sapien
cactgcgcatttgagagttgtagcc

SEQ ID NO: 2646972 - DNA, 25 bp, Homo sapien
taggctacagcagaagcactgaatc

SEQ ID NO: 2646973 - DNA, 25 bp, Homo sapien
tgaactgcatctaggcccagaagag

SEQ ID NO: 2646974 - DNA, 25 bp, Homo sapien
tgtggtatccatgagctgtacggct

SEQ ID NO: 2646975 - DNA, 25 bp, Homo sapien
gggatatcccttggacataaaatgg

SEQ ID NO: 2646976 - DNA, 25 bp, Homo sapien
gatatcccttggacataaaatggcc

SEQ ID NO: 2646977 - DNA, 25 bp, Homo sapien
cagcctctgagagcacacaagggga

SEQ ID NO: 2646978 - DNA, 25 bp, Homo sapien
tgagagcacacaaggggatatccct

SEQ ID NO: 2646979 - DNA, 25 bp, Homo sapien
cttgccatgacatttcggtagaaac

SEQ ID NO: 2646980 - DNA, 25 bp, Homo sapien
catgacatttcggtagaaacatagg

SEQ ID NO: 2646981 - DNA, 25 bp, Homo sapien
ttttagccttgccatgacatttcgg

SEQ ID NO: 2646982 - DNA, 25 bp, Homo sapien
gacatttcggtagaaacataggcat

SEQ ID NO: 2646983 - DNA, 25 bp, Homo sapien
ttggggaaccatttggcatgttcct

SEQ ID NO: 2646984 - DNA, 25 bp, Homo sapien
ttcctaaacatccaccacaggaaaa

SEQ ID NO: 2646985 - DNA, 25 bp, Homo sapien
caggaaaaacactgtaccgtgtcct

SEQ ID NO: 2646986 - DNA, 25 bp, Homo sapien
atttcctaaacatccaccacaggaa

SEQ ID NO: 2646987 - DNA, 25 bp, Homo sapien
catggatgccatcagatgatctgca

SEQ ID NO: 2646988 - DNA, 25 bp, Homo sapien
atcacaggagaacatggatgccatc

SEQ ID NO: 2646989 - DNA, 25 bp, Homo sapien
gccatgattctatgtgataggcagc

SEQ ID NO: 2646990 - DNA, 25 bp, Homo sapien
ggattgccgtaagtctgcacataac

SEQ ID NO: 2646991 - DNA, 25 bp, Homo sapien
ttaccccagtactgtgatagagctg

SEQ ID NO: 2646992 - DNA, 25 bp, Homo sapien
tagagctgtcctatatcacaatgaa

SEQ ID NO: 2646993 - DNA, 25 bp, Homo sapien
ggttatatgaaagctactggcagta

SEQ ID NO: 2646994 - DNA, 25 bp, Homo sapien
taagcagtggtgactaaatctagtc

SEQ ID NO: 2646995 - DNA, 25 bp, Homo sapien
ctctgaggatttcttactccgaaga

SEQ ID NO: 2646996 - DNA, 25 bp, Homo sapien
tttcttactccgaagaaattcacat

SEQ ID NO: 2646997 - DNA, 25 bp, Homo sapien
tatgtcaacaaatcccttgtagctt

SEQ ID NO: 2646998 - DNA, 25 bp, Homo sapien
gaatatactgggtaatttcctctga

SEQ ID NO: 2646999 - DNA, 25 bp, Homo sapien
aatgcctatgcccttctgagtcaga

SEQ ID NO: 2647000 - DNA, 25 bp, Homo sapien
aaggctctaggtcagcaagtgaatg

SEQ ID NO: 2647001 - DNA, 25 bp, Homo sapien
gaaatcaaacccatgacataaaaag

SEQ ID NO: 2647002 - DNA, 25 bp, Homo sapien
cacttacaggtaatccaaaaacttg

SEQ ID NO: 2647003 - DNA, 25 bp, Homo sapien
ttatgcagtgcaagcaaacatacac

SEQ ID NO: 2647004 - DNA, 25 bp, Homo sapien
cacgcatgcaagctgtgaatgttta

SEQ ID NO: 2647005 - DNA, 25 bp, Homo sapien
tttatgcatactcaggaggaagcct

SEQ ID NO: 2647006 - DNA, 25 bp, Homo sapien
tatgcagtgcaagcaaacatacaca

SEQ ID NO: 2647007 - DNA, 25 bp, Homo sapien
cccaggaattcacaaaatgttctcc

SEQ ID NO: 2647008 - DNA, 25 bp, Homo sapien
ctgatgccataggtaattctctctg

SEQ ID NO: 2647009 - DNA, 25 bp, Homo sapien
aggtaattctctctggacccaggaa

SEQ ID NO: 2647010 - DNA, 25 bp, Homo sapien
aattctctctggacccaggaattca

SEQ ID NO: 2647011 - DNA, 25 bp, Homo sapien
agtccttaaaagagtccagccgtag

SEQ ID NO: 2647012 - DNA, 25 bp, Homo sapien
cagtccttaaaagagtccagccgta

SEQ ID NO: 2647013 - DNA, 25 bp, Homo sapien
taaaagagtccagccgtagttcttc

SEQ ID NO: 2647014 - DNA, 25 bp, Homo sapien
gtccagccgtagttcttcgtaagca

SEQ ID NO: 2647015 - DNA, 25 bp, Homo sapien
tgcagataataaccaccagacctgt

SEQ ID NO: 2647016 - DNA, 25 bp, Homo sapien
cagaagttggttaccagtgaggcaa

SEQ ID NO: 2647017 - DNA, 25 bp, Homo sapien
aaagcctattcagtctccagttggg

SEQ ID NO: 2647018 - DNA, 25 bp, Homo sapien
cagttgggttttgtgacagtcagaa

SEQ ID NO: 2647019 - DNA, 25 bp, Homo sapien
gaaaagcactggacgatgtccttta

SEQ ID NO: 2647020 - DNA, 25 bp, Homo sapien
gggaaaacatctggtgtgatcgtct

SEQ ID NO: 2647021 - DNA, 25 bp, Homo sapien
tctaatgggtcatcaccttcctgcc

SEQ ID NO: 2647022 - DNA, 25 bp, Homo sapien
tttctctaaacaccctccacaggaa

SEQ ID NO: 2647023 - DNA, 25 bp, Homo sapien
tatatgaatctagccaaaactatgc

SEQ ID NO: 2647024 - DNA, 25 bp, Homo sapien
tcatggagcaaagggatgaaagaca

SEQ ID NO: 2647025 - DNA, 25 bp, Homo sapien
tcatccttcatagcctgaatccgag

SEQ ID NO: 2647026 - DNA, 25 bp, Homo sapien
tgcagatggttaacattcattccac

SEQ ID NO: 2647027 - DNA, 25 bp, Homo sapien
tatctggtaggtctgaatgacttaa

SEQ ID NO: 2647028 - DNA, 25 bp, Homo sapien
aaattaagcagatggctggccgggc

SEQ ID NO: 2647029 - DNA, 25 bp, Homo sapien
catttgggataagttgaagatgagc

SEQ ID NO: 2647030 - DNA, 25 bp, Homo sapien
aagatgagctggtgttcgtcttcat

SEQ ID NO: 2647031 - DNA, 25 bp, Homo sapien
gacagagccgagacccagtctctta

SEQ ID NO: 2647032 - DNA, 25 bp, Homo sapien
gagccgagacccagtctcttaacaa

SEQ ID NO: 2647033 - DNA, 25 bp, Homo sapien
aaaacactaaaggccaggtgtggcg

SEQ ID NO: 2647034 - DNA, 25 bp, Homo sapien
agagccgagacccagtctcttaaca

SEQ ID NO: 2647035 - DNA, 25 bp, Homo sapien
tgagggtagtgacacgaccaaggat

SEQ ID NO: 2647036 - DNA, 25 bp, Homo sapien
tgccttcaggtgacttggcgatgag

SEQ ID NO: 2647037 - DNA, 25 bp, Homo sapien
gaccaaggatcaatgtagcctccaa

SEQ ID NO: 2647038 - DNA, 25 bp, Homo sapien
tttaacgtttctgtccaaagtcagc

SEQ ID NO: 2647039 - DNA, 25 bp, Homo sapien
taaggcacttaggttgtggctctct

SEQ ID NO: 2647040 - DNA, 25 bp, Homo sapien
tgcgtatatgacactcctccatgca

SEQ ID NO: 2647041 - DNA, 25 bp, Homo sapien
gggtatggcaatatataggaactct

SEQ ID NO: 2647042 - DNA, 25 bp, Homo sapien
gaattggtacactgatgattttgac

SEQ ID NO: 2647043 - DNA, 25 bp, Homo sapien
tctggagtcacttccgcagaggact

SEQ ID NO: 2647044 - DNA, 25 bp, Homo sapien
gaaggtctggagtcacttccgcaga

SEQ ID NO: 2647045 - DNA, 25 bp, Homo sapien
gagtcacttccgcagaggacttcat

SEQ ID NO: 2647046 - DNA, 25 bp, Homo sapien
ctctgaaggtctggagtcacttccg

SEQ ID NO: 2647047 - DNA, 25 bp, Homo sapien
caaacatctgcaggaatgtgtgttc

SEQ ID NO: 2647048 - DNA, 25 bp, Homo sapien
tccaaaagtcattaggtgcagcctc

SEQ ID NO: 2647049 - DNA, 25 bp, Homo sapien
tccaggtaacgagaatcatagtgtc

SEQ ID NO: 2647050 - DNA, 25 bp, Homo sapien
caatccatgggtgatactatccagg

SEQ ID NO: 2647051 - DNA, 25 bp, Homo sapien
ctataggaccaactgctattgaatc

SEQ ID NO: 2647052 - DNA, 25 bp, Homo sapien
ggcactataggaccaactgctattg

SEQ ID NO: 2647053 - DNA, 25 bp, Homo sapien
ctggcactataggaccaactgctat

SEQ ID NO: 2647054 - DNA, 25 bp, Homo sapien
cactataggaccaactgctattgaa

SEQ ID NO: 2647055 - DNA, 25 bp, Homo sapien
ctggagaagccacaagaatcttgac

SEQ ID NO: 2647056 - DNA, 25 bp, Homo sapien
gacttttgctcatacacgacactgt

SEQ ID NO: 2647057 - DNA, 25 bp, Homo sapien
gactggtttgcttgtacctgagaca

SEQ ID NO: 2647058 - DNA, 25 bp, Homo sapien
actatcagtttggtcctgcctgcac

SEQ ID NO: 2647059 - DNA, 25 bp, Homo sapien
taggcgcttacagtcatcatgggtg

SEQ ID NO: 2647060 - DNA, 25 bp, Homo sapien
caatcaataggcaggtccgggataa

SEQ ID NO: 2647061 - DNA, 25 bp, Homo sapien
tagaatggtctctaggtatcggcgg

SEQ ID NO: 2647062 - DNA, 25 bp, Homo sapien
gatcgccgccacaaagagaggagtt

SEQ ID NO: 2647063 - DNA, 25 bp, Homo sapien
caaatggagaacacgcagcaacagt

SEQ ID NO: 2647064 - DNA, 25 bp, Homo sapien
tctgggtggtcgaaaaagtactgta

SEQ ID NO: 2647065 - DNA, 25 bp, Homo sapien
aagtcagtgttctcccttgaaggaa

SEQ ID NO: 2647066 - DNA, 25 bp, Homo sapien
taagttaagcgcacccaaagtcagt

SEQ ID NO: 2647067 - DNA, 25 bp, Homo sapien
ggattgtccctgagacttcaagaga

SEQ ID NO: 2647068 - DNA, 25 bp, Homo sapien
aatggagttcgatgcgctgtgaagc

SEQ ID NO: 2647069 - DNA, 25 bp, Homo sapien
cattcacatcgacttctagacaggg

SEQ ID NO: 2647070 - DNA, 25 bp, Homo sapien
cacttggtgacagaggccttagaca

SEQ ID NO: 2647071 - DNA, 25 bp, Homo sapien
tcttcctttaggcagctagggtgaa

SEQ ID NO: 2647072 - DNA, 25 bp, Homo sapien
catggcctcagaagttttcaaccac

SEQ ID NO: 2647073 - DNA, 25 bp, Homo sapien
gagcatgcatgctttcatggcctca

SEQ ID NO: 2647074 - DNA, 25 bp, Homo sapien
aagatgggttaagtctacactgaaa

SEQ ID NO: 2647075 - DNA, 25 bp, Homo sapien
caacatagtgaatgcttaatgccac

SEQ ID NO: 2647076 - DNA, 25 bp, Homo sapien
ttcagtgcacctcaagcaagataca

SEQ ID NO: 2647077 - DNA, 25 bp, Homo sapien
taaatttggtaaatgtcaacccaca

SEQ ID NO: 2647078 - DNA, 25 bp, Homo sapien
cccacacattccaaaaaagttcagt

SEQ ID NO: 2647079 - DNA, 25 bp, Homo sapien
taaaccgatacttataatgccagtg

SEQ ID NO: 2647080 - DNA, 25 bp, Homo sapien
aatataggctacaacatgatgtacc

SEQ ID NO: 2647081 - DNA, 25 bp, Homo sapien
ggtgcagctactgtgcaagttcctc

SEQ ID NO: 2647082 - DNA, 25 bp, Homo sapien
ggaacctttgtacatggatagtggg

SEQ ID NO: 2647083 - DNA, 25 bp, Homo sapien
aaactttcgtgcacaaaggacatta

SEQ ID NO: 2647084 - DNA, 25 bp, Homo sapien
ctgataacaggttgaaatccagaat

SEQ ID NO: 2647085 - DNA, 25 bp, Homo sapien
aaagtaaaatgacaacctatggaat

SEQ ID NO: 2647086 - DNA, 25 bp, Homo sapien
tcacaactactagaatggctttatg

SEQ ID NO: 2647087 - DNA, 25 bp, Homo sapien
aacatttatattgccctccagatcc

SEQ ID NO: 2647088 - DNA, 25 bp, Homo sapien
cttatccagattaggaaagatttgg

SEQ ID NO: 2647089 - DNA, 25 bp, Homo sapien
caggaacttatccagattaggaaag

SEQ ID NO: 2647090 - DNA, 25 bp, Homo sapien
attgccctccagatccacagacagt

SEQ ID NO: 2647091 - DNA, 25 bp, Homo sapien
aataatttctccatatggtggaagt

SEQ ID NO: 2647092 - DNA, 25 bp, Homo sapien
ggaaggatcatactcagctgaaatt

SEQ ID NO: 2647093 - DNA, 25 bp, Homo sapien
tcagctgaaatttggatcaataatt

SEQ ID NO: 2647094 - DNA, 25 bp, Homo sapien
agtttggaaggatcatactcagctg

SEQ ID NO: 2647095 - DNA, 25 bp, Homo sapien
aagtatattaaagtgccatccttac

SEQ ID NO: 2647096 - DNA, 25 bp, Homo sapien
caagtatattaaagtgccatcctta

SEQ ID NO: 2647097 - DNA, 25 bp, Homo sapien
aacaagtatattaaagtgccatcct

SEQ ID NO: 2647098 - DNA, 25 bp, Homo sapien
aaaacaagtatattaaagtgccatc

SEQ ID NO: 2647099 - DNA, 25 bp, Homo sapien
caatgaagcttttgcatgcaagtct

SEQ ID NO: 2647100 - DNA, 25 bp, Homo sapien
tggccaacaatgaagcttttgcatg

SEQ ID NO: 2647101 - DNA, 25 bp, Homo sapien
cttattgcaagcttgaacttctgga

SEQ ID NO: 2647102 - DNA, 25 bp, Homo sapien
tgctgaactcctgctctcaggcgat

SEQ ID NO: 2647103 - DNA, 25 bp, Homo sapien
caaatgggacggcttgaaaaaatga

SEQ ID NO: 2647104 - DNA, 25 bp, Homo sapien
aaaagaagttacacttcagatggaa

SEQ ID NO: 2647105 - DNA, 25 bp, Homo sapien
tgtgagtttcttacaggaaacaagc

SEQ ID NO: 2647106 - DNA, 25 bp, Homo sapien
aacaagcatagtcatgagagaccca

SEQ ID NO: 2647107 - DNA, 25 bp, Homo sapien
ggccttcaagatttaatatcttcag

SEQ ID NO: 2647108 - DNA, 25 bp, Homo sapien
tgtttcctcatcaggaaattgctgg

SEQ ID NO: 2647109 - DNA, 25 bp, Homo sapien
gagaaataaaatttggcaaactggc

SEQ ID NO: 2647110 - DNA, 25 bp, Homo sapien
caggaaattgctggccttcaagatt

SEQ ID NO: 2647111 - DNA, 25 bp, Homo sapien
ccccagtaggaaggatcaattcttc

SEQ ID NO: 2647112 - DNA, 25 bp, Homo sapien
cagtttggccactcgataaattcca

SEQ ID NO: 2647113 - DNA, 25 bp, Homo sapien
accacgctgtcatcattcaaagtct

SEQ ID NO: 2647114 - DNA, 25 bp, Homo sapien
tgagaggactcggagacaatgaagc

SEQ ID NO: 2647115 - DNA, 25 bp, Homo sapien
tgttgtccagtgcttgaaagaaatt

SEQ ID NO: 2647116 - DNA, 25 bp, Homo sapien
attgattgaaagctttaggttctca

SEQ ID NO: 2647117 - DNA, 25 bp, Homo sapien
tgattgattgaaagctttaggttct

SEQ ID NO: 2647118 - DNA, 25 bp, Homo sapien
gattgattgaaagctttaggttctc

SEQ ID NO: 2647119 - DNA, 25 bp, Homo sapien
attgactcaaagacttgactgttgt

SEQ ID NO: 2647120 - DNA, 25 bp, Homo sapien
ttgactcaaagacttgactgttgtg

SEQ ID NO: 2647121 - DNA, 25 bp, Homo sapien
tctggagaatagttaagtacttaga

SEQ ID NO: 2647122 - DNA, 25 bp, Homo sapien
agtacttagattgaggatgtctttc

SEQ ID NO: 2647123 - DNA, 25 bp, Homo sapien
atgagccttggtagtcgtaacacac

SEQ ID NO: 2647124 - DNA, 25 bp, Homo sapien
tccaagagccaacttaacatgttca

SEQ ID NO: 2647125 - DNA, 25 bp, Homo sapien
tttacatcctcaatatgccccaaga

SEQ ID NO: 2647126 - DNA, 25 bp, Homo sapien
ttacatcctcaatatgccccaagac

SEQ ID NO: 2647127 - DNA, 25 bp, Homo sapien
tccaggcccacttcctagaggtacg

SEQ ID NO: 2647128 - DNA, 25 bp, Homo sapien
taatgcaggcacgaaagtaaaacaa

SEQ ID NO: 2647129 - DNA, 25 bp, Homo sapien
agtgattcaaccgttaagttagcca

SEQ ID NO: 2647130 - DNA, 25 bp, Homo sapien
gttaaacccgtttcatccatgtatg

SEQ ID NO: 2647131 - DNA, 25 bp, Homo sapien
agccactgcgtcaggccgagcatct

SEQ ID NO: 2647132 - DNA, 25 bp, Homo sapien
taggtcaggttaagcgatgatgttt

SEQ ID NO: 2647133 - DNA, 25 bp, Homo sapien
tataaccctgttgtaagttgaggag

SEQ ID NO: 2647134 - DNA, 25 bp, Homo sapien
tttttcaggatataaccctgttgta

SEQ ID NO: 2647135 - DNA, 25 bp, Homo sapien
gtataaaagggtatgcaggagaaaa

SEQ ID NO: 2647136 - DNA, 25 bp, Homo sapien
ctgcacctggtcaagtattatggtt

SEQ ID NO: 2647137 - DNA, 25 bp, Homo sapien
catgggacaaaactcaactggtata

SEQ ID NO: 2647138 - DNA, 25 bp, Homo sapien
ttttaatagtatgcacacatgggac

SEQ ID NO: 2647139 - DNA, 25 bp, Homo sapien
gtcccagctacttgggaggctgagg

SEQ ID NO: 2647140 - DNA, 25 bp, Homo sapien
gcccggcatggtggcacgccctgta

SEQ ID NO: 2647141 - DNA, 25 bp, Homo sapien
agcccggcatggtggcacgccctgt

SEQ ID NO: 2647142 - DNA, 25 bp, Homo sapien
ttagcccggcatggtggcacgccct

SEQ ID NO: 2647143 - DNA, 25 bp, Homo sapien
tgggataacctaggcatactgcact

SEQ ID NO: 2647144 - DNA, 25 bp, Homo sapien
taactggaattcgtcaagcctctgg

SEQ ID NO: 2647145 - DNA, 25 bp, Homo sapien
tagagcagcactaaatgacaccact

SEQ ID NO: 2647146 - DNA, 25 bp, Homo sapien
tagtaggcagaccagcagacttttt

SEQ ID NO: 2647147 - DNA, 25 bp, Homo sapien
ggcaccttttgtcccagctgctcgg

SEQ ID NO: 2647148 - DNA, 25 bp, Homo sapien
tggttttggttttcagttatgcaac

SEQ ID NO: 2647149 - DNA, 25 bp, Homo sapien
aaagaaagtatacaagtcagtggtt

SEQ ID NO: 2647150 - DNA, 25 bp, Homo sapien
ccatcactacaatttaagaacattt

SEQ ID NO: 2647151 - DNA, 25 bp, Homo sapien
tgcagtttacctttgaaagtataca

SEQ ID NO: 2647152 - DNA, 25 bp, Homo sapien
tgaaagtatacaagttggctgggca

SEQ ID NO: 2647153 - DNA, 25 bp, Homo sapien
tttgaaagtatacaagttggctggg

SEQ ID NO: 2647154 - DNA, 25 bp, Homo sapien
aattcacatggtgtgcagtttacct

SEQ ID NO: 2647155 - DNA, 25 bp, Homo sapien
tcagggaccccatttatacatacgt

SEQ ID NO: 2647156 - DNA, 25 bp, Homo sapien
cctggtctggcaataacagttgaga

SEQ ID NO: 2647157 - DNA, 25 bp, Homo sapien
gtccttgggtaccttgtaatcagta

SEQ ID NO: 2647158 - DNA, 25 bp, Homo sapien
ggtgctccttagattttcagtcaga

SEQ ID NO: 2647159 - DNA, 25 bp, Homo sapien
caagcttcacatacgtaaggtgggt

SEQ ID NO: 2647160 - DNA, 25 bp, Homo sapien
acatgtataaggaagcagctctggc

SEQ ID NO: 2647161 - DNA, 25 bp, Homo sapien
taagccgatagttagacagagtcct

SEQ ID NO: 2647162 - DNA, 25 bp, Homo sapien
tagctgaaattacgagcacacgcca

SEQ ID NO: 2647163 - DNA, 25 bp, Homo sapien
tgagccactgcactaagataggagc

SEQ ID NO: 2647164 - DNA, 25 bp, Homo sapien
taaatggagggtagagaaattgggc

SEQ ID NO: 2647165 - DNA, 25 bp, Homo sapien
ggcatgatcctagcccatggcagcg

SEQ ID NO: 2647166 - DNA, 25 bp, Homo sapien
ctcctttggagtcgctgggcctaaa

SEQ ID NO: 2647167 - DNA, 25 bp, Homo sapien
cattcaattgtactctctaaaacga

SEQ ID NO: 2647168 - DNA, 25 bp, Homo sapien
tgtgaatatattaaggtttccgctc

SEQ ID NO: 2647169 - DNA, 25 bp, Homo sapien
gcagcgcactgctaaaggaaacaga

SEQ ID NO: 2647170 - DNA, 25 bp, Homo sapien
ggtttccgctctatctaccattcaa

SEQ ID NO: 2647171 - DNA, 25 bp, Homo sapien
tgcctgtgacagttggcctctgtga

SEQ ID NO: 2647172 - DNA, 25 bp, Homo sapien
tcctggccctggtgtgcccttaatg

SEQ ID NO: 2647173 - DNA, 25 bp, Homo sapien
gcctctgtgaatattggtataattg

SEQ ID NO: 2647174 - DNA, 25 bp, Homo sapien
gtctgaaatgaggtctcctggccct

SEQ ID NO: 2647175 - DNA, 25 bp, Homo sapien
gaagatgcacgaggatatgatctcc

SEQ ID NO: 2647176 - DNA, 25 bp, Homo sapien
ggccctgctgcgagtcactccattt

SEQ ID NO: 2647177 - DNA, 25 bp, Homo sapien
gaactttctcatctacgtggccctg

SEQ ID NO: 2647178 - DNA, 25 bp, Homo sapien
ggagatgaaacggaagatgcacgag

SEQ ID NO: 2647179 - DNA, 25 bp, Homo sapien
gcacgcgctgccacacccaggtaat

SEQ ID NO: 2647180 - DNA, 25 bp, Homo sapien
ttcctgagtagatgggattacaggc

SEQ ID NO: 2647181 - DNA, 25 bp, Homo sapien
caggcacgcgctgccacacccaggt

SEQ ID NO: 2647182 - DNA, 25 bp, Homo sapien
cttcctgagtagatgggattacagg

SEQ ID NO: 2647183 - DNA, 25 bp, Homo sapien
atgctgagcagactaaaataatata

SEQ ID NO: 2647184 - DNA, 25 bp, Homo sapien
tctttgccaaaaggaagggagaatg

SEQ ID NO: 2647185 - DNA, 25 bp, Homo sapien
atttgccaggtattgtgatgggtgc

SEQ ID NO: 2647186 - DNA, 25 bp, Homo sapien
taatccctcttattgaaaagctaag

SEQ ID NO: 2647187 - DNA, 25 bp, Homo sapien
accccatctcctcaaaaagcacaaa

SEQ ID NO: 2647188 - DNA, 25 bp, Homo sapien
ggcctaatgaggaccgggaactcca

SEQ ID NO: 2647189 - DNA, 25 bp, Homo sapien
aaacaatgaagcctaccttgcaggg

SEQ ID NO: 2647190 - DNA, 25 bp, Homo sapien
gatgttcgtttgtaccagtcctagg

SEQ ID NO: 2647191 - DNA, 25 bp, Homo sapien
tgtgcggtaaagaacacaccccgga

SEQ ID NO: 2647192 - DNA, 25 bp, Homo sapien
cagagtgccagagaaccgttgcttt

SEQ ID NO: 2647193 - DNA, 25 bp, Homo sapien
tcagccttcccggtcagcggtggtg

SEQ ID NO: 2647194 - DNA, 25 bp, Homo sapien
cagttctacatcgttgcaaaaagga

SEQ ID NO: 2647195 - DNA, 25 bp, Homo sapien
tgtaattcaacaagctcggagcccc

SEQ ID NO: 2647196 - DNA, 25 bp, Homo sapien
tttgttggctgtgtcgtgaaatgac

SEQ ID NO: 2647197 - DNA, 25 bp, Homo sapien
tatatttgttggctgtgtcgtgaaa

SEQ ID NO: 2647198 - DNA, 25 bp, Homo sapien
tgttggctgtgtcgtgaaatgacat

SEQ ID NO: 2647199 - DNA, 25 bp, Homo sapien
tatttgttggctgtgtcgtgaaatg

SEQ ID NO: 2647200 - DNA, 25 bp, Homo sapien
atttgaaatgctttctcgggtaatt

SEQ ID NO: 2647201 - DNA, 25 bp, Homo sapien
tgaaatgctttctcgggtaatttca

SEQ ID NO: 2647202 - DNA, 25 bp, Homo sapien
aatgctttctcgggtaatttcattc

SEQ ID NO: 2647203 - DNA, 25 bp, Homo sapien
atgctttctcgggtaatttcattca

SEQ ID NO: 2647204 - DNA, 25 bp, Homo sapien
taagctttacctacaagcaaaacaa

SEQ ID NO: 2647205 - DNA, 25 bp, Homo sapien
ccaatatctgtatgtgaaggagaca

SEQ ID NO: 2647206 - DNA, 25 bp, Homo sapien
tccttggctctatgtatttaattat

SEQ ID NO: 2647207 - DNA, 25 bp, Homo sapien
aaaactacttttggtcatgtagcag

SEQ ID NO: 2647208 - DNA, 25 bp, Homo sapien
ttccccaaccatgagtcctcaggtt

SEQ ID NO: 2647209 - DNA, 25 bp, Homo sapien
gatgcaatgcaatgttttgaccaga

SEQ ID NO: 2647210 - DNA, 25 bp, Homo sapien
caggttgttacagaggctgccttcc

SEQ ID NO: 2647211 - DNA, 25 bp, Homo sapien
cattgcctctccgagtttaaaaagg

SEQ ID NO: 2647212 - DNA, 25 bp, Homo sapien
aaatagattgccttccctaatgtgg

SEQ ID NO: 2647213 - DNA, 25 bp, Homo sapien
caatttgactgagccataagttgcc

SEQ ID NO: 2647214 - DNA, 25 bp, Homo sapien
caaacccctccgtgagtgacagaga

SEQ ID NO: 2647215 - DNA, 25 bp, Homo sapien
tgaatagatcaaaagggcaaacccc

SEQ ID NO: 2647216 - DNA, 25 bp, Homo sapien
gatggtgcgtgaaaatgagatgcca

SEQ ID NO: 2647217 - DNA, 25 bp, Homo sapien
aaataggcactgtccaggcagttgt

SEQ ID NO: 2647218 - DNA, 25 bp, Homo sapien
tttactgattgaagcagccaactcc

SEQ ID NO: 2647219 - DNA, 25 bp, Homo sapien
gtgttttccaagtcatctcagatgg

SEQ ID NO: 2647220 - DNA, 25 bp, Homo sapien
aactgtgtggtgaatgtgcgtgtgt

SEQ ID NO: 2647221 - DNA, 25 bp, Homo sapien
tgtatatgcacgtgtttatgtgttt

SEQ ID NO: 2647222 - DNA, 25 bp, Homo sapien
gttgaatgatccagtgggcactctg

SEQ ID NO: 2647223 - DNA, 25 bp, Homo sapien
ctctgtattccttcataaactgtgt

SEQ ID NO: 2647224 - DNA, 25 bp, Homo sapien
gaattatggtaatattgtgggaact

SEQ ID NO: 2647225 - DNA, 25 bp, Homo sapien
tgccaacagctcaaagaattatggt

SEQ ID NO: 2647226 - DNA, 25 bp, Homo sapien
aatatatgagacaggcaaaagctca

SEQ ID NO: 2647227 - DNA, 25 bp, Homo sapien
gcaaaaggcatgactttataaaatg

SEQ ID NO: 2647228 - DNA, 25 bp, Homo sapien
cccctgtggtttcatcaatggtaaa

SEQ ID NO: 2647229 - DNA, 25 bp, Homo sapien
cagcgccatctcctgagagggtgta

SEQ ID NO: 2647230 - DNA, 25 bp, Homo sapien
tgtccacagcctgagcacgaagagt

SEQ ID NO: 2647231 - DNA, 25 bp, Homo sapien
taggctccttattgcatgaatgtcc

SEQ ID NO: 2647232 - DNA, 25 bp, Homo sapien
gccctcacggtaacgtgcacaatct

SEQ ID NO: 2647233 - DNA, 25 bp, Homo sapien
taacgtgcacaatcttcatcgcatg

SEQ ID NO: 2647234 - DNA, 25 bp, Homo sapien
tcacggtaacgtgcacaatcttcat

SEQ ID NO: 2647235 - DNA, 25 bp, Homo sapien
ctgcttctgccctcacggtaacgtg

SEQ ID NO: 2647236 - DNA, 25 bp, Homo sapien
ttccaatactgtagaggcatgtgtg

SEQ ID NO: 2647237 - DNA, 25 bp, Homo sapien
tccaatactgtagaggcatgtgtgt

SEQ ID NO: 2647238 - DNA, 25 bp, Homo sapien
tttccaatactgtagaggcatgtgt

SEQ ID NO: 2647239 - DNA, 25 bp, Homo sapien
gctgcaaactccttatataaaggct

SEQ ID NO: 2647240 - DNA, 25 bp, Homo sapien
tctcttcggatatgagctgcaaact

SEQ ID NO: 2647241 - DNA, 25 bp, Homo sapien
tctagttggcccaagaaaaatccta

SEQ ID NO: 2647242 - DNA, 25 bp, Homo sapien
cctaattattctagttggcccaaga

SEQ ID NO: 2647243 - DNA, 25 bp, Homo sapien
ccatttagactttctctggctagct

SEQ ID NO: 2647244 - DNA, 25 bp, Homo sapien
taaatttgtagaaagggcaatggta

SEQ ID NO: 2647245 - DNA, 25 bp, Homo sapien
gagctggaacctttaccatttagac

SEQ ID NO: 2647246 - DNA, 25 bp, Homo sapien
caatggtaaatactgagctcacatg

SEQ ID NO: 2647247 - DNA, 25 bp, Homo sapien
tctctcaaggctacacaaaaagtgt

SEQ ID NO: 2647248 - DNA, 25 bp, Homo sapien
tagcattacctttgcaattgcacca

SEQ ID NO: 2647249 - DNA, 25 bp, Homo sapien
agtggacacttcacggctggcacag

SEQ ID NO: 2647250 - DNA, 25 bp, Homo sapien
ttctgccaagctgcgtgcagtggac

SEQ ID NO: 2647251 - DNA, 25 bp, Homo sapien
tcacggtacagttcattctcacaaa

SEQ ID NO: 2647252 - DNA, 25 bp, Homo sapien
caggtgagcttcacggtacagttca

SEQ ID NO: 2647253 - DNA, 25 bp, Homo sapien
gtgagcttcacggtacagttcattc

SEQ ID NO: 2647254 - DNA, 25 bp, Homo sapien
agcttcacggtacagttcattctca

SEQ ID NO: 2647255 - DNA, 25 bp, Homo sapien
tcctgaaggtcccactactaatacc

SEQ ID NO: 2647256 - DNA, 25 bp, Homo sapien
cctcaagtccagtctaaagtccaag

SEQ ID NO: 2647257 - DNA, 25 bp, Homo sapien
taaaaattcagtccgtaacattctg

SEQ ID NO: 2647258 - DNA, 25 bp, Homo sapien
tcatgaggcctctactatgacaacc

SEQ ID NO: 2647259 - DNA, 25 bp, Homo sapien
tcttgaaactaatgtccagggtgta

SEQ ID NO: 2647260 - DNA, 25 bp, Homo sapien
gcttagataactccacactgtgatg

SEQ ID NO: 2647261 - DNA, 25 bp, Homo sapien
taatgacctacacagggctttctag

SEQ ID NO: 2647262 - DNA, 25 bp, Homo sapien
tatagaagcatagccatgcctgccc

SEQ ID NO: 2647263 - DNA, 25 bp, Homo sapien
aagcacagtggcatcttcttctgga

SEQ ID NO: 2647264 - DNA, 25 bp, Homo sapien
cagtggcatcttcttctggagaggc

SEQ ID NO: 2647265 - DNA, 25 bp, Homo sapien
cacagtggcatcttcttctggagag

SEQ ID NO: 2647266 - DNA, 25 bp, Homo sapien
tacaggaagcacagtggcatcttct

SEQ ID NO: 2647267 - DNA, 25 bp, Homo sapien
cagagaaggacaatgagatatttaa

SEQ ID NO: 2647268 - DNA, 25 bp, Homo sapien
caggtgagtgttcagatcattattc

SEQ ID NO: 2647269 - DNA, 25 bp, Homo sapien
tatttaatttgccacggcaaagcca

SEQ ID NO: 2647270 - DNA, 25 bp, Homo sapien
gagagctataaaagtctgctcagaa

SEQ ID NO: 2647271 - DNA, 25 bp, Homo sapien
tgaattgagatcatgccgcagcact

SEQ ID NO: 2647272 - DNA, 25 bp, Homo sapien
cggtgaattgagatcatgccgcagc

SEQ ID NO: 2647273 - DNA, 25 bp, Homo sapien
gcaggggccgcggtgaattgagatc

SEQ ID NO: 2647274 - DNA, 25 bp, Homo sapien
caggggccgcggtgaattgagatca

SEQ ID NO: 2647275 - DNA, 25 bp, Homo sapien
cttaataataaccatactgactggt

SEQ ID NO: 2647276 - DNA, 25 bp, Homo sapien
tgacttcttaataataaccatactg

SEQ ID NO: 2647277 - DNA, 25 bp, Homo sapien
catgcccggcgttgacttcttaata

SEQ ID NO: 2647278 - DNA, 25 bp, Homo sapien
ttcttaataataaccatactgactg

SEQ ID NO: 2647279 - DNA, 25 bp, Homo sapien
aagcgaaagagctacaggccccatg

SEQ ID NO: 2647280 - DNA, 25 bp, Homo sapien
cacatctaggtgatgcaagaagtgg

SEQ ID NO: 2647281 - DNA, 25 bp, Homo sapien
ttggccaaagcgaaagagctacagg

SEQ ID NO: 2647282 - DNA, 25 bp, Homo sapien
gaaattggccaaagcgaaagagcta

SEQ ID NO: 2647283 - DNA, 25 bp, Homo sapien
tttagtcagacatggtgggcaggag

SEQ ID NO: 2647284 - DNA, 25 bp, Homo sapien
ggagggagagacgtgggcacaaagg

SEQ ID NO: 2647285 - DNA, 25 bp, Homo sapien
gagggagagacgtgggcacaaaggt

SEQ ID NO: 2647286 - DNA, 25 bp, Homo sapien
agggagagacgtgggcacaaaggtc

SEQ ID NO: 2647287 - DNA, 25 bp, Homo sapien
tggagggagagacgtgggcacaaag

SEQ ID NO: 2647288 - DNA, 25 bp, Homo sapien
ggaggcggacgtggggggtcgtgca

SEQ ID NO: 2647289 - DNA, 25 bp, Homo sapien
ccgcgcaaggcacctgctggcaatg

SEQ ID NO: 2647290 - DNA, 25 bp, Homo sapien
cgcaaggcacctgctggcaatggca

SEQ ID NO: 2647291 - DNA, 25 bp, Homo sapien
ggcaatggcaggaggcggacgtggg

SEQ ID NO: 2647292 - DNA, 25 bp, Homo sapien
gtgagcacataatggcaccagtgac

SEQ ID NO: 2647293 - DNA, 25 bp, Homo sapien
tgagcacataatggcaccagtgaca

SEQ ID NO: 2647294 - DNA, 25 bp, Homo sapien
aggctaagccagcagattgttctgt

SEQ ID NO: 2647295 - DNA, 25 bp, Homo sapien
agctgccaacttggccaaaggctaa

SEQ ID NO: 2647296 - DNA, 25 bp, Homo sapien
ttgccgggcaacgcgacttctaaac

SEQ ID NO: 2647297 - DNA, 25 bp, Homo sapien
tgccaacttggccaaaggctaagcc

SEQ ID NO: 2647298 - DNA, 25 bp, Homo sapien
tggcccaaacaggaatgaggggcac

SEQ ID NO: 2647299 - DNA, 25 bp, Homo sapien
agtgatgtcgagtgtgcgggtgttt

SEQ ID NO: 2647300 - DNA, 25 bp, Homo sapien
cagtgatgtcgagtgtgcgggtgtt

SEQ ID NO: 2647301 - DNA, 25 bp, Homo sapien
gtgatgtcgagtgtgcgggtgtttg

SEQ ID NO: 2647302 - DNA, 25 bp, Homo sapien
ccagtgatgtcgagtgtgcgggtgt

SEQ ID NO: 2647303 - DNA, 25 bp, Homo sapien
ctgtacctgccttgttttcacagcg

SEQ ID NO: 2647304 - DNA, 25 bp, Homo sapien
ctgcaggaggcgaccttgttcttct

SEQ ID NO: 2647305 - DNA, 25 bp, Homo sapien
gcaggaggcgaccttgttcttctca

SEQ ID NO: 2647306 - DNA, 25 bp, Homo sapien
acctgccttgttttcacagcggtga

SEQ ID NO: 2647307 - DNA, 25 bp, Homo sapien
cacgaaacattcttctgatgccggc

SEQ ID NO: 2647308 - DNA, 25 bp, Homo sapien
ctgtacctgccttgttttcacagcg

SEQ ID NO: 2647309 - DNA, 25 bp, Homo sapien
tgtacctgccttgttttcacagcgg

SEQ ID NO: 2647310 - DNA, 25 bp, Homo sapien
cattcttctgatgccggcatccctg

SEQ ID NO: 2647311 - DNA, 25 bp, Homo sapien
tacacattgacaatgggtaaataga

SEQ ID NO: 2647312 - DNA, 25 bp, Homo sapien
tatacacattgacaatgggtaaata

SEQ ID NO: 2647313 - DNA, 25 bp, Homo sapien
atttatacacattgacaatgggtaa

SEQ ID NO: 2647314 - DNA, 25 bp, Homo sapien
tttatacacattgacaatgggtaaa

SEQ ID NO: 2647315 - DNA, 25 bp, Homo sapien
tgaacattcttcttccggtacattt

SEQ ID NO: 2647316 - DNA, 25 bp, Homo sapien
gttaaattattgtttgatggataaa

SEQ ID NO: 2647317 - DNA, 25 bp, Homo sapien
aatgaacattcttcttccggtacat

SEQ ID NO: 2647318 - DNA, 25 bp, Homo sapien
taaattattgtttgatggataaaag

SEQ ID NO: 2647319 - DNA, 25 bp, Homo sapien
caaagatgtacagaggaaacaatgc

SEQ ID NO: 2647320 - DNA, 25 bp, Homo sapien
gcaaagatgtacagaggaaacaatg

SEQ ID NO: 2647321 - DNA, 25 bp, Homo sapien
tggaactttgaatatacaacacttt

SEQ ID NO: 2647322 - DNA, 25 bp, Homo sapien
tgattggtgatgtcttggatattct

SEQ ID NO: 2647323 - DNA, 25 bp, Homo sapien
tgttttggatgattggtgatgtctt

SEQ ID NO: 2647324 - DNA, 25 bp, Homo sapien
ttaactgtggcctcctacactgtgt

SEQ ID NO: 2647325 - DNA, 25 bp, Homo sapien
ctacccgatagtagggtggcagtag

SEQ ID NO: 2647326 - DNA, 25 bp, Homo sapien
tccgttaaggcaaccaaggattgga

SEQ ID NO: 2647327 - DNA, 25 bp, Homo sapien
ccagaacttattcctgggttctaca

SEQ ID NO: 2647328 - DNA, 25 bp, Homo sapien
gttttaatacatgtactcaatgtgt

SEQ ID NO: 2647329 - DNA, 25 bp, Homo sapien
tactcatcctactatgcaataggac

SEQ ID NO: 2647330 - DNA, 25 bp, Homo sapien
catgcggtcttgtggttgctgaacg

SEQ ID NO: 2647331 - DNA, 25 bp, Homo sapien
tactcttggtatcgcaactacgggc

SEQ ID NO: 2647332 - DNA, 25 bp, Homo sapien
gctggccgcccagtttgagaattgg

SEQ ID NO: 2647333 - DNA, 25 bp, Homo sapien
tacgggcacctggagttgattcagc

SEQ ID NO: 2647334 - DNA, 25 bp, Homo sapien
tcagttccagtggcgggggccctgg

SEQ ID NO: 2647335 - DNA, 25 bp, Homo sapien
ttggctgaggactgcgtgttggcag

SEQ ID NO: 2647336 - DNA, 25 bp, Homo sapien
tggctgaggactgcgtgttggcagc

SEQ ID NO: 2647337 - DNA, 25 bp, Homo sapien
tctgttgggagcctcttcccttcat

SEQ ID NO: 2647338 - DNA, 25 bp, Homo sapien
caacagtctgttctgtggaggcctt

SEQ ID NO: 2647339 - DNA, 25 bp, Homo sapien
agcacggactggtccctctgttggg

SEQ ID NO: 2647340 - DNA, 25 bp, Homo sapien
ctggtcaacaggtagtgaatcctgt

SEQ ID NO: 2647341 - DNA, 25 bp, Homo sapien
ccacagccttcggatgggcagagca

SEQ ID NO: 2647342 - DNA, 25 bp, Homo sapien
aaccagcttcaacaacggtctaggc

SEQ ID NO: 2647343 - DNA, 25 bp, Homo sapien
aacaacggtctaggccggatgcggt

SEQ ID NO: 2647344 - DNA, 25 bp, Homo sapien
cacagccttcggatgggcagagcaa

SEQ ID NO: 2647345 - DNA, 25 bp, Homo sapien
gtgcagtaaccagttcaagttggaa

SEQ ID NO: 2647346 - DNA, 25 bp, Homo sapien
ggtgaattaccagatctccgtcaag

SEQ ID NO: 2647347 - DNA, 25 bp, Homo sapien
ggtggccgtacctgatgcacgaaca

SEQ ID NO: 2647348 - DNA, 25 bp, Homo sapien
tgtgtgacccaggtcatgtccctcc

SEQ ID NO: 2647349 - DNA, 25 bp, Homo sapien
cacatctaggtgatgcaagaagtgg

SEQ ID NO: 2647350 - DNA, 25 bp, Homo sapien
aagcgaaagagctacaggccccatg

SEQ ID NO: 2647351 - DNA, 25 bp, Homo sapien
ttggccaaagcgaaagagctacagg

SEQ ID NO: 2647352 - DNA, 25 bp, Homo sapien
gaaattggccaaagcgaaagagcta

SEQ ID NO: 2647353 - DNA, 25 bp, Homo sapien
tttagtcagacatggtgggcaggag

SEQ ID NO: 2647354 - DNA, 25 bp, Homo sapien
gagggagagacgtgggcacaaaggt

SEQ ID NO: 2647355 - DNA, 25 bp, Homo sapien
ggagggagagacgtgggcacaaagg

SEQ ID NO: 2647356 - DNA, 25 bp, Homo sapien
tggagggagagacgtgggcacaaag

SEQ ID NO: 2647357 - DNA, 25 bp, Homo sapien
agggagagacgtgggcacaaaggtc

SEQ ID NO: 2647358 - DNA, 25 bp, Homo sapien
cgcaaggcacctgctggcaatggca

SEQ ID NO: 2647359 - DNA, 25 bp, Homo sapien
ccgcgcaaggcacctgctggcaatg

SEQ ID NO: 2647360 - DNA, 25 bp, Homo sapien
ggaggcggacgtggggggtcgtgca

SEQ ID NO: 2647361 - DNA, 25 bp, Homo sapien
ggcaatggcaggaggcggacgtggg

SEQ ID NO: 2647362 - DNA, 25 bp, Homo sapien
tgacagagcgaccataatggatgaa

SEQ ID NO: 2647363 - DNA, 25 bp, Homo sapien
cataatggatgaataagcgcagcca

SEQ ID NO: 2647364 - DNA, 25 bp, Homo sapien
agcgaccataatggatgaataagcg

SEQ ID NO: 2647365 - DNA, 25 bp, Homo sapien
accataatggatgaataagcgcagc

SEQ ID NO: 2647366 - DNA, 25 bp, Homo sapien
tggcccaaacaggaatgaggggcac

SEQ ID NO: 2647367 - DNA, 25 bp, Homo sapien
cagtgatgtcgagtgtgcgggtgtt

SEQ ID NO: 2647368 - DNA, 25 bp, Homo sapien
agtgatgtcgagtgtgcgggtgttt

SEQ ID NO: 2647369 - DNA, 25 bp, Homo sapien
gtgatgtcgagtgtgcgggtgtttg

SEQ ID NO: 2647370 - DNA, 25 bp, Homo sapien
ccagtgatgtcgagtgtgcgggtgt

SEQ ID NO: 2647371 - DNA, 25 bp, Homo sapien
gtacctgccttgttttcacagcggt

SEQ ID NO: 2647372 - DNA, 25 bp, Homo sapien
tgtacctgccttgttttcacagcgg

SEQ ID NO: 2647373 - DNA, 25 bp, Homo sapien
gcaggaggcgaccttgttcttctca

SEQ ID NO: 2647374 - DNA, 25 bp, Homo sapien
acctgccttgttttcacagcggtga

SEQ ID NO: 2647375 - DNA, 25 bp, Homo sapien
tatacacattgacaatgggtaaata

SEQ ID NO: 2647376 - DNA, 25 bp, Homo sapien
tacacattgacaatgggtaaataga

SEQ ID NO: 2647377 - DNA, 25 bp, Homo sapien
atttatacacattgacaatgggtaa

SEQ ID NO: 2647378 - DNA, 25 bp, Homo sapien
tttatacacattgacaatgggtaaa

SEQ ID NO: 2647379 - DNA, 25 bp, Homo sapien
aatgaacattcttcttccggtacat

SEQ ID NO: 2647380 - DNA, 25 bp, Homo sapien
tgaacattcttcttccggtacattt

SEQ ID NO: 2647381 - DNA, 25 bp, Homo sapien
gttaaattattgtttgatggataaa

SEQ ID NO: 2647382 - DNA, 25 bp, Homo sapien
taaattattgtttgatggataaaag

SEQ ID NO: 2647383 - DNA, 25 bp, Homo sapien
caaagatgtacagaggaaacaatgc

SEQ ID NO: 2647384 - DNA, 25 bp, Homo sapien
gcaaagatgtacagaggaaacaatg

SEQ ID NO: 2647385 - DNA, 25 bp, Homo sapien
tgattggtgatgtcttggatattct

SEQ ID NO: 2647386 - DNA, 25 bp, Homo sapien
tgttttggatgattggtgatgtctt

SEQ ID NO: 2647387 - DNA, 25 bp, Homo sapien
tggaactttgaatatacaacacttt

SEQ ID NO: 2647388 - DNA, 25 bp, Homo sapien
ttaactgtggcctcctacactgtgt

SEQ ID NO: 2647389 - DNA, 25 bp, Homo sapien
tgtcttgctattgttgattctggca

SEQ ID NO: 2647390 - DNA, 25 bp, Homo sapien
tgttgattctggcaagtgaaatcat

SEQ ID NO: 2647391 - DNA, 25 bp, Homo sapien
gaagagatcaaagcctgtcttgcta

SEQ ID NO: 2647392 - DNA, 25 bp, Homo sapien
cgattgtttgcatatgaatcagact

SEQ ID NO: 2647393 - DNA, 25 bp, Homo sapien
cactcatgttacctgatggaaaatc

SEQ ID NO: 2647394 - DNA, 25 bp, Homo sapien
ctcactcatgttacctgatggaaaa

SEQ ID NO: 2647395 - DNA, 25 bp, Homo sapien
tcactcatgttacctgatggaaaat

SEQ ID NO: 2647396 - DNA, 25 bp, Homo sapien
tctcactcatgttacctgatggaaa

SEQ ID NO: 2647397 - DNA, 25 bp, Homo sapien
caaattttcaagtcgcatgccaaga

SEQ ID NO: 2647398 - DNA, 25 bp, Homo sapien
tattaccatccccaaagtgtttgct

SEQ ID NO: 2647399 - DNA, 25 bp, Homo sapien
gaatattgtgctgtactgtccttag

SEQ ID NO: 2647400 - DNA, 25 bp, Homo sapien
ctctagagattaggttgagaaccac

SEQ ID NO: 2647401 - DNA, 25 bp, Homo sapien
tcctggagtacagacatggtggcta

SEQ ID NO: 2647402 - DNA, 25 bp, Homo sapien
gaagcatgaaatcaccttgaaggta

SEQ ID NO: 2647403 - DNA, 25 bp, Homo sapien
cacaagtctagtggcaatgcattac

SEQ ID NO: 2647404 - DNA, 25 bp, Homo sapien
tgggaagcttatgtactagcaacag

SEQ ID NO: 2647405 - DNA, 25 bp, Homo sapien
tcagtatgcttgactggaacggcca

SEQ ID NO: 2647406 - DNA, 25 bp, Homo sapien
tacaggcacgtgagcaagagaagct

SEQ ID NO: 2647407 - DNA, 25 bp, Homo sapien
tgcggacataaaggagcaatgcttt

SEQ ID NO: 2647408 - DNA, 25 bp, Homo sapien
tagcctatgttcttgaatgcggaca

SEQ ID NO: 2647409 - DNA, 25 bp, Homo sapien
taacatgacccctcaaggtggtgac

SEQ ID NO: 2647410 - DNA, 25 bp, Homo sapien
tagtctattggatgcagtgtcagag

SEQ ID NO: 2647411 - DNA, 25 bp, Homo sapien
tgggcgcttccctgataattatagt

SEQ ID NO: 2647412 - DNA, 25 bp, Homo sapien
ggcaaccatttgagcccagacttca

SEQ ID NO: 2647413 - DNA, 25 bp, Homo sapien
ggaatatgctgccagagtacacaca

SEQ ID NO: 2647414 - DNA, 25 bp, Homo sapien
ggaaattaccacagctataatgatt

SEQ ID NO: 2647415 - DNA, 25 bp, Homo sapien
gctttgccgtaataatacagagtaa

SEQ ID NO: 2647416 - DNA, 25 bp, Homo sapien
tacagagtaatcgactaaagtaata

SEQ ID NO: 2647417 - DNA, 25 bp, Homo sapien
caccaacaatatgtgatttgtggga

SEQ ID NO: 2647418 - DNA, 25 bp, Homo sapien
ttgcaattaaagagccctaagactt

SEQ ID NO: 2647419 - DNA, 25 bp, Homo sapien
attagaatatcaaaattgcctagca

SEQ ID NO: 2647420 - DNA, 25 bp, Homo sapien
cctaagactttgtattgtttgggct

SEQ ID NO: 2647421 - DNA, 25 bp, Homo sapien
tgaagtctttgcccaccctgcctat

SEQ ID NO: 2647422 - DNA, 25 bp, Homo sapien
ttgcccaccctgcctatgtcctgaa

SEQ ID NO: 2647423 - DNA, 25 bp, Homo sapien
gtctttgcccaccctgcctatgtcc

SEQ ID NO: 2647424 - DNA, 25 bp, Homo sapien
gtggctctcgggaaaaacaccaagc

SEQ ID NO: 2647425 - DNA, 25 bp, Homo sapien
tggtcaccttatgaaaatgtgtggc

SEQ ID NO: 2647426 - DNA, 25 bp, Homo sapien
gaagtagcctggatgtgcatagtca

SEQ ID NO: 2647427 - DNA, 25 bp, Homo sapien
aaacaccaagcctggatcatctgtg

SEQ ID NO: 2647428 - DNA, 25 bp, Homo sapien
ttgtgatcttcacttgtacaagttg

SEQ ID NO: 2647429 - DNA, 25 bp, Homo sapien
tacaagttgtctttatgctgcgaga

SEQ ID NO: 2647430 - DNA, 25 bp, Homo sapien
tttatgctgcgagataagtcctctc

SEQ ID NO: 2647431 - DNA, 25 bp, Homo sapien
tgagctcccaccttttcagtgaact

SEQ ID NO: 2647432 - DNA, 25 bp, Homo sapien
acaagcacacttgaagcacaataca

SEQ ID NO: 2647433 - DNA, 25 bp, Homo sapien
caagcacacttgaagcacaatacat

SEQ ID NO: 2647434 - DNA, 25 bp, Homo sapien
tacaagcacacttgaagcacaatac

SEQ ID NO: 2647435 - DNA, 25 bp, Homo sapien
gtacaagcacacttgaagcacaata

SEQ ID NO: 2647436 - DNA, 25 bp, Homo sapien
tagtttaccaacatcactgccttta

SEQ ID NO: 2647437 - DNA, 25 bp, Homo sapien
tcatttggatcactagtttaccaac

SEQ ID NO: 2647438 - DNA, 25 bp, Homo sapien
tggatcactagtttaccaacatcac

SEQ ID NO: 2647439 - DNA, 25 bp, Homo sapien
cgtgcccagccgactttcttttcat

SEQ ID NO: 2647440 - DNA, 25 bp, Homo sapien
tatcaaggatcacatgggtcagcac

SEQ ID NO: 2647441 - DNA, 25 bp, Homo sapien
tgaaactgccattagaggactatgc

SEQ ID NO: 2647442 - DNA, 25 bp, Homo sapien
tcattgtttatggatgggcccaaaa

SEQ ID NO: 2647443 - DNA, 25 bp, Homo sapien
ggagttgtctcactatcaaaggaac

SEQ ID NO: 2647444 - DNA, 25 bp, Homo sapien
tcacccgtatctctatgatgcaaag

SEQ ID NO: 2647445 - DNA, 25 bp, Homo sapien
acaagtggtcgccaagctggactgc

SEQ ID NO: 2647446 - DNA, 25 bp, Homo sapien
gccaagagtatactccaagtaacaa

SEQ ID NO: 2647447 - DNA, 25 bp, Homo sapien
catttctaatagcatggccaagagt

SEQ ID NO: 2647448 - DNA, 25 bp, Homo sapien
ttagacttaccccatgcaagaaatt

SEQ ID NO: 2647449 - DNA, 25 bp, Homo sapien
ttaccccatgcaagaaattacaaat

SEQ ID NO: 2647450 - DNA, 25 bp, Homo sapien
gacttaccccatgcaagaaattaca

SEQ ID NO: 2647451 - DNA, 25 bp, Homo sapien
tggataataggaactgatatgttat

SEQ ID NO: 2647452 - DNA, 25 bp, Homo sapien
ggatttacgatttgattgccttcac

SEQ ID NO: 2647453 - DNA, 25 bp, Homo sapien
tcagctcttggatgccatgttctgc

SEQ ID NO: 2647454 - DNA, 25 bp, Homo sapien
ttcaagttaggcatccagagctgtc

SEQ ID NO: 2647455 - DNA, 25 bp, Homo sapien
cccactatcgcataaaacttgtgaa

SEQ ID NO: 2647456 - DNA, 25 bp, Homo sapien
taaggccaagaacaatatagaaaaa

SEQ ID NO: 2647457 - DNA, 25 bp, Homo sapien
acaaaggcccttatatattcataca

SEQ ID NO: 2647458 - DNA, 25 bp, Homo sapien
ccgatgtctccttgaaattagctga

SEQ ID NO: 2647459 - DNA, 25 bp, Homo sapien
gccagaaaactaatgcttaatgtat

SEQ ID NO: 2647460 - DNA, 25 bp, Homo sapien
cgccagatacttgaaagccttccaa

SEQ ID NO: 2647461 - DNA, 25 bp, Homo sapien
gttctagcacaaagaactacctgag

SEQ ID NO: 2647462 - DNA, 25 bp, Homo sapien
ttaggcaccaaagaagctgagggac

SEQ ID NO: 2647463 - DNA, 25 bp, Homo sapien
tacacatgctatggtggaccttagg

SEQ ID NO: 2647464 - DNA, 25 bp, Homo sapien
caattaaactgtgttgtctctgcag

SEQ ID NO: 2647465 - DNA, 25 bp, Homo sapien
gacctttaagcacaagaacaccttg

SEQ ID NO: 2647466 - DNA, 25 bp, Homo sapien
tgcctcagccaattaaactgtgttg

SEQ ID NO: 2647467 - DNA, 25 bp, Homo sapien
tgcagtgcgttttatcacaagaaca

SEQ ID NO: 2647468 - DNA, 25 bp, Homo sapien
gattcacagtatgcaacaatgatca

SEQ ID NO: 2647469 - DNA, 25 bp, Homo sapien
cagtatgcaacaatgatcatattac

SEQ ID NO: 2647470 - DNA, 25 bp, Homo sapien
tcagttcggataattaagctgtgta

SEQ ID NO: 2647471 - DNA, 25 bp, Homo sapien
aatatagaaagtcgaaggtttctgg

SEQ ID NO: 2647472 - DNA, 25 bp, Homo sapien
cagcgaaaattcgagcgcggcgccg

SEQ ID NO: 2647473 - DNA, 25 bp, Homo sapien
ccagccgaccgctcaagagtgcggg

SEQ ID NO: 2647474 - DNA, 25 bp, Homo sapien
tggctgaggcccagcgaaaattcga

SEQ ID NO: 2647475 - DNA, 25 bp, Homo sapien
tcactgttggaggacccagtgcacc

SEQ ID NO: 2647476 - DNA, 25 bp, Homo sapien
ggtgccgcgtagcaggaggtggcgc

SEQ ID NO: 2647477 - DNA, 25 bp, Homo sapien
tgacgggaccgggtgccgcgtagca

SEQ ID NO: 2647478 - DNA, 25 bp, Homo sapien
acgggaccgggtgccgcgtagcagg

SEQ ID NO: 2647479 - DNA, 25 bp, Homo sapien
accgggtgccgcgtagcaggaggtg

SEQ ID NO: 2647480 - DNA, 25 bp, Homo sapien
cactgtacaaaagtaacaaatctgc

SEQ ID NO: 2647481 - DNA, 25 bp, Homo sapien
gagcatgggctgaataactacctac

SEQ ID NO: 2647482 - DNA, 25 bp, Homo sapien
caaatctgcatatgcactatctgtg

SEQ ID NO: 2647483 - DNA, 25 bp, Homo sapien
gactttatttgatggactggattag

SEQ ID NO: 2647484 - DNA, 25 bp, Homo sapien
ataaagccagagaggcgtcatacta

SEQ ID NO: 2647485 - DNA, 25 bp, Homo sapien
cattccatgtttacagattaaaaga

SEQ ID NO: 2647486 - DNA, 25 bp, Homo sapien
ggctatctccatgaaactaccaaca

SEQ ID NO: 2647487 - DNA, 25 bp, Homo sapien
cagagaggcgtcatactacccaatt

SEQ ID NO: 2647488 - DNA, 25 bp, Homo sapien
tcctaactaccctgacggcttgagg

SEQ ID NO: 2647489 - DNA, 25 bp, Homo sapien
tgtagtcctaactaccctgacggct

SEQ ID NO: 2647490 - DNA, 25 bp, Homo sapien
taactaccctgacggcttgaggcca

SEQ ID NO: 2647491 - DNA, 25 bp, Homo sapien
ctaccctgacggcttgaggccagga

SEQ ID NO: 2647492 - DNA, 25 bp, Homo sapien
ctggcccaaaataaggggatggaga

SEQ ID NO: 2647493 - DNA, 25 bp, Homo sapien
actggcccaaaataaggggatggag

SEQ ID NO: 2647494 - DNA, 25 bp, Homo sapien
cctaattaagattgaggcagaagaa

SEQ ID NO: 2647495 - DNA, 25 bp, Homo sapien
tagtcatggtgtcagatatagagaa

SEQ ID NO: 2647496 - DNA, 25 bp, Homo sapien
cagaagaaatgggtccttgggattt

SEQ ID NO: 2647497 - DNA, 25 bp, Homo sapien
cacacaccagatgagtaaattgttg

SEQ ID NO: 2647498 - DNA, 25 bp, Homo sapien
aaagcattgctcctttatgtccgca

SEQ ID NO: 2647499 - DNA, 25 bp, Homo sapien
tagaattggccgttccagtcaagca

SEQ ID NO: 2647500 - DNA, 25 bp, Homo sapien
gcttctcttgctcacgtgcctgtag

SEQ ID NO: 2647501 - DNA, 25 bp, Homo sapien
taggtgctgttatggcagacccaac

SEQ ID NO: 2647502 - DNA, 25 bp, Homo sapien
acaacttccctgatgagttctttgc

SEQ ID NO: 2647503 - DNA, 25 bp, Homo sapien
taatgattaggtggtgatgctactg

SEQ ID NO: 2647504 - DNA, 25 bp, Homo sapien
tgtggtggtatagcctaaagatact

SEQ ID NO: 2647505 - DNA, 25 bp, Homo sapien
atgcaaagaataacctcccacagaa

SEQ ID NO: 2647506 - DNA, 25 bp, Homo sapien
taaagttttgcccagttactgccta

SEQ ID NO: 2647507 - DNA, 25 bp, Homo sapien
ggctaaagacgcatctttcctgcaa

SEQ ID NO: 2647508 - DNA, 25 bp, Homo sapien
tgaatagcttaaaccaagtagaagg

SEQ ID NO: 2647509 - DNA, 25 bp, Homo sapien
tatctagagagtacactgaatagct

SEQ ID NO: 2647510 - DNA, 25 bp, Homo sapien
ggatgtaactcattataagtcgagg

SEQ ID NO: 2647511 - DNA, 25 bp, Homo sapien
cataacacatcttggcctgtggtta

SEQ ID NO: 2647512 - DNA, 25 bp, Homo sapien
caacttatgagtatatccagatcca

SEQ ID NO: 2647513 - DNA, 25 bp, Homo sapien
tattatacaccaaaactagccatct

SEQ ID NO: 2647514 - DNA, 25 bp, Homo sapien
ttacagctttatcatggtacaaaag

SEQ ID NO: 2647515 - DNA, 25 bp, Homo sapien
tctgtgtggtgaagcagcaagcaac

SEQ ID NO: 2647516 - DNA, 25 bp, Homo sapien
gatttacaatggtacaactttacag

SEQ ID NO: 2647517 - DNA, 25 bp, Homo sapien
tcttgaatgtaacacagatggtccc

SEQ ID NO: 2647518 - DNA, 25 bp, Homo sapien
caatcagctactcactttgaaagac

SEQ ID NO: 2647519 - DNA, 25 bp, Homo sapien
tatatttcagggagttccactggta

SEQ ID NO: 2647520 - DNA, 25 bp, Homo sapien
gtactttcttggcacagggtttcaa

SEQ ID NO: 2647521 - DNA, 25 bp, Homo sapien
taaaatcatgttagttcaggtcatc

SEQ ID NO: 2647522 - DNA, 25 bp, Homo sapien
ccaagtgtctaggaatattagctct

SEQ ID NO: 2647523 - DNA, 25 bp, Homo sapien
catgagttagtaacagctaaaccaa

SEQ ID NO: 2647524 - DNA, 25 bp, Homo sapien
attagtatcctaaacaatgtctgca

SEQ ID NO: 2647525 - DNA, 25 bp, Homo sapien
tcgtcaaacttgcatggtctaaggt

SEQ ID NO: 2647526 - DNA, 25 bp, Homo sapien
tcttgagagaatactgagtaaccaa

SEQ ID NO: 2647527 - DNA, 25 bp, Homo sapien
ttttcttgagagaatactgagtaac

SEQ ID NO: 2647528 - DNA, 25 bp, Homo sapien
tgagagaatactgagtaaccaaaag

SEQ ID NO: 2647529 - DNA, 25 bp, Homo sapien
aattttcttgagagaatactgagta

SEQ ID NO: 2647530 - DNA, 25 bp, Homo sapien
taaagcatgtgagccctgggtttct

SEQ ID NO: 2647531 - DNA, 25 bp, Homo sapien
cctctcaggtgggtcaaaatggcca

SEQ ID NO: 2647532 - DNA, 25 bp, Homo sapien
caggatgccctaacattgagccaga

SEQ ID NO: 2647533 - DNA, 25 bp, Homo sapien
taatattgctcctagcagccaaggg

SEQ ID NO: 2647534 - DNA, 25 bp, Homo sapien
acaatgaaacatctcctcatggagc

SEQ ID NO: 2647535 - DNA, 25 bp, Homo sapien
cgacaatgaaacatctcctcatgga

SEQ ID NO: 2647536 - DNA, 25 bp, Homo sapien
aacatctcctcatggagcttgagtt

SEQ ID NO: 2647537 - DNA, 25 bp, Homo sapien
gaaacatctcctcatggagcttgag

SEQ ID NO: 2647538 - DNA, 25 bp, Homo sapien
gattattctagggaaagccttctga

SEQ ID NO: 2647539 - DNA, 25 bp, Homo sapien
tgtgtgaccttcatgtcccatctgc

SEQ ID NO: 2647540 - DNA, 25 bp, Homo sapien
tattatgcaggatcaagtaacactc

SEQ ID NO: 2647541 - DNA, 25 bp, Homo sapien
cctgtccccatgcagtgaatgagta

SEQ ID NO: 2647542 - DNA, 25 bp, Homo sapien
cattgtgtggagtgcaggccatcat

SEQ ID NO: 2647543 - DNA, 25 bp, Homo sapien
ttcttaggaagcttcaggactacac

SEQ ID NO: 2647544 - DNA, 25 bp, Homo sapien
taggaagcttcaggactacaccaaa

SEQ ID NO: 2647545 - DNA, 25 bp, Homo sapien
gaagcttcaggactacaccaaagaa

SEQ ID NO: 2647546 - DNA, 25 bp, Homo sapien
aaatagtctaaggctggttttacag

SEQ ID NO: 2647547 - DNA, 25 bp, Homo sapien
aatagtctaaggctggttttacagg

SEQ ID NO: 2647548 - DNA, 25 bp, Homo sapien
atagtctaaggctggttttacaggg

SEQ ID NO: 2647549 - DNA, 25 bp, Homo sapien
tagcctatgacctcaacatgttcag

SEQ ID NO: 2647550 - DNA, 25 bp, Homo sapien
taaacctatggaatgttaacaggca

SEQ ID NO: 2647551 - DNA, 25 bp, Homo sapien
taagtctctatggttagcatcagaa

SEQ ID NO: 2647552 - DNA, 25 bp, Homo sapien
gcagataaagatcaaaacgtcacct

SEQ ID NO: 2647553 - DNA, 25 bp, Homo sapien
caaggtgatttcatgcttctagcca

SEQ ID NO: 2647554 - DNA, 25 bp, Homo sapien
tataggaagcctgcataataagcat

SEQ ID NO: 2647555 - DNA, 25 bp, Homo sapien
tgttagtgaaaatgagaccacgaac

SEQ ID NO: 2647556 - DNA, 25 bp, Homo sapien
tattgtgcgcagctaaagttgggat

SEQ ID NO: 2647557 - DNA, 25 bp, Homo sapien
ccatttttgagacccacttgcttag

SEQ ID NO: 2647558 - DNA, 25 bp, Homo sapien
ttgacaaatgtccaccggatgggaa

SEQ ID NO: 2647559 - DNA, 25 bp, Homo sapien
taatgtgccactaattcccaatcgt

SEQ ID NO: 2647560 - DNA, 25 bp, Homo sapien
cccaatcgtcactgctttcatgtag

SEQ ID NO: 2647561 - DNA, 25 bp, Homo sapien
aaaactcttctaggtggtgatgcta

SEQ ID NO: 2647562 - DNA, 25 bp, Homo sapien
taccacagtacctgctacatagatg

SEQ ID NO: 2647563 - DNA, 25 bp, Homo sapien
aatgttgggcttgttacctgtctca

SEQ ID NO: 2647564 - DNA, 25 bp, Homo sapien
tgatgctaagctccgtaatgttggg

SEQ ID NO: 2647565 - DNA, 25 bp, Homo sapien
ccttgggatgacttataaacacttc

SEQ ID NO: 2647566 - DNA, 25 bp, Homo sapien
acccacgttttagcatttagccttg

SEQ ID NO: 2647567 - DNA, 25 bp, Homo sapien
aaattagcctcctgtttcgcattgg

SEQ ID NO: 2647568 - DNA, 25 bp, Homo sapien
tattatgaacagcagtttgagccat

SEQ ID NO: 2647569 - DNA, 25 bp, Homo sapien
aaaacagaagactcttactgcctca

SEQ ID NO: 2647570 - DNA, 25 bp, Homo sapien
tgtattgaacactacagctgtagac

SEQ ID NO: 2647571 - DNA, 25 bp, Homo sapien
gtccattggataataatgctaccag

SEQ ID NO: 2647572 - DNA, 25 bp, Homo sapien
gctagtggctaatgtattgaacact

SEQ ID NO: 2647573 - DNA, 25 bp, Homo sapien
aaatatggctagtgcaactaaagaa

SEQ ID NO: 2647574 - DNA, 25 bp, Homo sapien
catgtatccatcaagtatttgaaat

SEQ ID NO: 2647575 - DNA, 25 bp, Homo sapien
tatggctagtgcaactaaagaactt

SEQ ID NO: 2647576 - DNA, 25 bp, Homo sapien
acatgtatccatcaagtatttgaaa

SEQ ID NO: 2647577 - DNA, 25 bp, Homo sapien
ccttggttgccttaacggatgtaga

SEQ ID NO: 2647578 - DNA, 25 bp, Homo sapien
taatatgtcagcctattaccatctg

SEQ ID NO: 2647579 - DNA, 25 bp, Homo sapien
catctgctacagactgcatgtttgt

SEQ ID NO: 2647580 - DNA, 25 bp, Homo sapien
gcctattaccatctgctacagactg

SEQ ID NO: 2647581 - DNA, 25 bp, Homo sapien
ccaccctactatcgggtagatccta

SEQ ID NO: 2647582 - DNA, 25 bp, Homo sapien
tactgccaccctactatcgggtaga

SEQ ID NO: 2647583 - DNA, 25 bp, Homo sapien
ctactgccaccctactatcgggtag

SEQ ID NO: 2647584 - DNA, 25 bp, Homo sapien
tgccaccctactatcgggtagatcc

SEQ ID NO: 2647585 - DNA, 25 bp, Homo sapien
tcatgacttcaattccatcagagtt

SEQ ID NO: 2647586 - DNA, 25 bp, Homo sapien
catgacttcaattccatcagagtta

SEQ ID NO: 2647587 - DNA, 25 bp, Homo sapien
tagacgcaagattcccctgctgcca

SEQ ID NO: 2647588 - DNA, 25 bp, Homo sapien
ccgtagacgcaagattcccctgctg

SEQ ID NO: 2647589 - DNA, 25 bp, Homo sapien
ctaggccccgtagacgcaagattcc

SEQ ID NO: 2647590 - DNA, 25 bp, Homo sapien
tcgggtcacacacggtgtgaaaagg

SEQ ID NO: 2647591 - DNA, 25 bp, Homo sapien
gtcactggtgccattatgtgctcac

SEQ ID NO: 2647592 - DNA, 25 bp, Homo sapien
gtgcccctcattcctgtttgggcca

SEQ ID NO: 2647593 - DNA, 25 bp, Homo sapien
aaggccgaggacctgcgagtagggc

SEQ ID NO: 2647594 - DNA, 25 bp, Homo sapien
tctgtcactggtgccattatgtgct

SEQ ID NO: 2647595 - DNA, 25 bp, Homo sapien
tacctactgcacgaccccccacgtc

SEQ ID NO: 2647596 - DNA, 25 bp, Homo sapien
tgttcctcccgcgacctttgtgccc

SEQ ID NO: 2647597 - DNA, 25 bp, Homo sapien
gatccacgggcaaatatgcagccat

SEQ ID NO: 2647598 - DNA, 25 bp, Homo sapien
tggagactgagttttgcactcgttg

SEQ ID NO: 2647599 - DNA, 25 bp, Homo sapien
gttaatgctgaaataagagtttggg

SEQ ID NO: 2647600 - DNA, 25 bp, Homo sapien
gacttaggggaaggcatgattgctt

SEQ ID NO: 2647601 - DNA, 25 bp, Homo sapien
aggggaaggcatgattgcttttgaa

SEQ ID NO: 2647602 - DNA, 25 bp, Homo sapien
tctctcctgcccaccatgtctgact

SEQ ID NO: 2647603 - DNA, 25 bp, Homo sapien
acttcttgcatcacctagatgtgac

SEQ ID NO: 2647604 - DNA, 25 bp, Homo sapien
ttcttgcatcacctagatgtgacac

SEQ ID NO: 2647605 - DNA, 25 bp, Homo sapien
cacttcttgcatcacctagatgtga

SEQ ID NO: 2647606 - DNA, 25 bp, Homo sapien
ccacttcttgcatcacctagatgtg

SEQ ID NO: 2647607 - DNA, 25 bp, Homo sapien
ggagactgggttgtagaaatttgca

SEQ ID NO: 2647608 - DNA, 25 bp, Homo sapien
ttttctcaggagactgggttgtaga

SEQ ID NO: 2647609 - DNA, 25 bp, Homo sapien
ggaaatggagtaaagtcactcttac

SEQ ID NO: 2647610 - DNA, 25 bp, Homo sapien
ttagaaacgggcataagataggcgg

SEQ ID NO: 2647611 - DNA, 25 bp, Homo sapien
tcctctatgcaacctagcaatcaag

SEQ ID NO: 2647612 - DNA, 25 bp, Homo sapien
tctgatcctgtctaagatctgaagc

SEQ ID NO: 2647613 - DNA, 25 bp, Homo sapien
ggctattcacaagaacgatcatcgc

SEQ ID NO: 2647614 - DNA, 25 bp, Homo sapien
tctgaagccagatattaaggtactt

SEQ ID NO: 2647615 - DNA, 25 bp, Homo sapien
gcagcaatcatatccagttacactt

SEQ ID NO: 2647616 - DNA, 25 bp, Homo sapien
aaagctgaaaacaaggaggatcgac

SEQ ID NO: 2647617 - DNA, 25 bp, Homo sapien
tgtttgcggcagactacattattgt

SEQ ID NO: 2647618 - DNA, 25 bp, Homo sapien
tgacactctgcgcaaacacatgact

SEQ ID NO: 2647619 - DNA, 25 bp, Homo sapien
caaaacccgtcactcaagccaatga

SEQ ID NO: 2647620 - DNA, 25 bp, Homo sapien
taagatatgagtaacatttcctaga

SEQ ID NO: 2647621 - DNA, 25 bp, Homo sapien
tgtagtgctgcgatcctgactcgct

SEQ ID NO: 2647622 - DNA, 25 bp, Homo sapien
agagagagaatatttgccaaggagg

SEQ ID NO: 2647623 - DNA, 25 bp, Homo sapien
gtgcccggccctgaaccaatgcgcc

SEQ ID NO: 2647624 - DNA, 25 bp, Homo sapien
aaccaatgcgcccagcccgctttta

SEQ ID NO: 2647625 - DNA, 25 bp, Homo sapien
cggccctgaaccaatgcgcccagcc

SEQ ID NO: 2647626 - DNA, 25 bp, Homo sapien
caatgcgcccagcccgcttttaatt

SEQ ID NO: 2647627 - DNA, 25 bp, Homo sapien
gtcacacaaacgggaaggccccaca

SEQ ID NO: 2647628 - DNA, 25 bp, Homo sapien
acacaaacgggaaggccccacaatg

SEQ ID NO: 2647629 - DNA, 25 bp, Homo sapien
cacaaacgggaaggccccacaatga

SEQ ID NO: 2647630 - DNA, 25 bp, Homo sapien
acgggaaggccccacaatgaccact

SEQ ID NO: 2647631 - DNA, 25 bp, Homo sapien
ggaggcaagagagaccagggcttag

SEQ ID NO: 2647632 - DNA, 25 bp, Homo sapien
caagagagaccagggcttagggagg

SEQ ID NO: 2647633 - DNA, 25 bp, Homo sapien
ggcaagagagaccagggcttaggga

SEQ ID NO: 2647634 - DNA, 25 bp, Homo sapien
gagagaccagggcttagggagggac

SEQ ID NO: 2647635 - DNA, 25 bp, Homo sapien
gtcccagcctggttgtccacgactt

SEQ ID NO: 2647636 - DNA, 25 bp, Homo sapien
tacggccaccagaggttggcaccca

SEQ ID NO: 2647637 - DNA, 25 bp, Homo sapien
gtccacgactttgttttctgcattc

SEQ ID NO: 2647638 - DNA, 25 bp, Homo sapien
aactggttactgcacttgacggaga

SEQ ID NO: 2647639 - DNA, 25 bp, Homo sapien
ctgctgaagccagggctaccagatg

SEQ ID NO: 2647640 - DNA, 25 bp, Homo sapien
ttacgcaagtcccaaaccaccatta

SEQ ID NO: 2647641 - DNA, 25 bp, Homo sapien
gcaaaagacctcccttacgcaagtc

SEQ ID NO: 2647642 - DNA, 25 bp, Homo sapien
tgcccgttcacctgtcctgggctcc

SEQ ID NO: 2647643 - DNA, 25 bp, Homo sapien
acgacagccaaagcgccaggtgtga

SEQ ID NO: 2647644 - DNA, 25 bp, Homo sapien
actggctctcggtgacgggcacagt

SEQ ID NO: 2647645 - DNA, 25 bp, Homo sapien
gggcacagtgcggagccccacaggg

SEQ ID NO: 2647646 - DNA, 25 bp, Homo sapien
agccgcacctacgacagccaaagcg

SEQ ID NO: 2647647 - DNA, 25 bp, Homo sapien
ggaagcttcaaagccttgtgacagc

SEQ ID NO: 2647648 - DNA, 25 bp, Homo sapien
gacagaatagaacctcctagcctca

SEQ ID NO: 2647649 - DNA, 25 bp, Homo sapien
tagcctcaagttccaaacccacact

SEQ ID NO: 2647650 - DNA, 25 bp, Homo sapien
tctccaatagccaggctctcagatg

SEQ ID NO: 2647651 - DNA, 25 bp, Homo sapien
caagactctgactcgtggggaaaaa

SEQ ID NO: 2647652 - DNA, 25 bp, Homo sapien
tttagcctggcaaggcagcgcacgt

SEQ ID NO: 2647653 - DNA, 25 bp, Homo sapien
cctggcaaggcagcgcacgtctgtg

SEQ ID NO: 2647654 - DNA, 25 bp, Homo sapien
atattaaaatttagcctggcaaggc

SEQ ID NO: 2647655 - DNA, 25 bp, Homo sapien
catcaagcaaacaggtagtgcgagg

SEQ ID NO: 2647656 - DNA, 25 bp, Homo sapien
tgggaggtaggcatgaggctgggtg

SEQ ID NO: 2647657 - DNA, 25 bp, Homo sapien
catgcacagaaaaacggtgcaagtg

SEQ ID NO: 2647658 - DNA, 25 bp, Homo sapien
aaaaacggtgcaagtgccaggcgag

SEQ ID NO: 2647659 - DNA, 25 bp, Homo sapien
gccgggtacacagagctgaggtcac

SEQ ID NO: 2647660 - DNA, 25 bp, Homo sapien
aggtcactggactgaacactgccag

SEQ ID NO: 2647661 - DNA, 25 bp, Homo sapien
gaacactgccagaaatgaggttcac

SEQ ID NO: 2647662 - DNA, 25 bp, Homo sapien
actgccagaaatgaggttcacttcc

SEQ ID NO: 2647663 - DNA, 25 bp, Homo sapien
ccaactcccccagaggcgtagccac

SEQ ID NO: 2647664 - DNA, 25 bp, Homo sapien
caactcccccagaggcgtagccacc

SEQ ID NO: 2647665 - DNA, 25 bp, Homo sapien
gaatccaactcccccagaggcgtag

SEQ ID NO: 2647666 - DNA, 25 bp, Homo sapien
ccctgaatccaactcccccagaggc

SEQ ID NO: 2647667 - DNA, 25 bp, Homo sapien
ctagaccgagctctctaacaacact

SEQ ID NO: 2647668 - DNA, 25 bp, Homo sapien
cccttgtctgctgcgtaggtggagt

SEQ ID NO: 2647669 - DNA, 25 bp, Homo sapien
ccccttgtctgctgcgtaggtggag

SEQ ID NO: 2647670 - DNA, 25 bp, Homo sapien
aaaatgctgagtccaaaccgggcaa

SEQ ID NO: 2647671 - DNA, 25 bp, Homo sapien
tctttgaaaacagactggctgcggc

SEQ ID NO: 2647672 - DNA, 25 bp, Homo sapien
tcaagaaaatcagcacggcacagtg

SEQ ID NO: 2647673 - DNA, 25 bp, Homo sapien
gaatgctagtatcagccaggcacgg

SEQ ID NO: 2647674 - DNA, 25 bp, Homo sapien
gaatcaactccaggtgcccgtagtt

SEQ ID NO: 2647675 - DNA, 25 bp, Homo sapien
tagttgcgataccaagagtagtagc

SEQ ID NO: 2647676 - DNA, 25 bp, Homo sapien
cacggatcacatccacatacagagc

SEQ ID NO: 2647677 - DNA, 25 bp, Homo sapien
agtagtagctgttcacacggatcac

SEQ ID NO: 2647678 - DNA, 25 bp, Homo sapien
gaataatgggattgtgatgtcttac

SEQ ID NO: 2647679 - DNA, 25 bp, Homo sapien
aataatgggattgtgatgtcttaca

SEQ ID NO: 2647680 - DNA, 25 bp, Homo sapien
tgaaaccctacaagcgtttccactc

SEQ ID NO: 2647681 - DNA, 25 bp, Homo sapien
aaccctacaagcgtttccactccat

SEQ ID NO: 2647682 - DNA, 25 bp, Homo sapien
tggtgaaaccctacaagcgtttcca

SEQ ID NO: 2647683 - DNA, 25 bp, Homo sapien
ccctacaagcgtttccactccatac

SEQ ID NO: 2647684 - DNA, 25 bp, Homo sapien
cccagagagaatacacaagcagaaa

SEQ ID NO: 2647685 - DNA, 25 bp, Homo sapien
ctgcccagagagaatacacaagcag

SEQ ID NO: 2647686 - DNA, 25 bp, Homo sapien
tgcccagagagaatacacaagcaga

SEQ ID NO: 2647687 - DNA, 25 bp, Homo sapien
cagagagaatacacaagcagaaagt

SEQ ID NO: 2647688 - DNA, 25 bp, Homo sapien
gtaatattcttcagagatggcatgg

SEQ ID NO: 2647689 - DNA, 25 bp, Homo sapien
taatattcttcagagatggcatggt

SEQ ID NO: 2647690 - DNA, 25 bp, Homo sapien
tgtaatattcttcagagatggcatg

SEQ ID NO: 2647691 - DNA, 25 bp, Homo sapien
tctgtaatattcttcagagatggca

SEQ ID NO: 2647692 - DNA, 25 bp, Homo sapien
aaaacagaagactcttactgcctca

SEQ ID NO: 2647693 - DNA, 25 bp, Homo sapien
tgtattgaacactacagctgtagac

SEQ ID NO: 2647694 - DNA, 25 bp, Homo sapien
gtccattggataataatgctaccag

SEQ ID NO: 2647695 - DNA, 25 bp, Homo sapien
taccagtactaaggaagtacagccc

SEQ ID NO: 2647696 - DNA, 25 bp, Homo sapien
tgctatcccttatgttagccactag

SEQ ID NO: 2647697 - DNA, 25 bp, Homo sapien
atatctgtgctatcccttatgttag

SEQ ID NO: 2647698 - DNA, 25 bp, Homo sapien
tgttttatatctgtgctatccctta

SEQ ID NO: 2647699 - DNA, 25 bp, Homo sapien
tcccttatgttagccactagccaca

SEQ ID NO: 2647700 - DNA, 25 bp, Homo sapien
gtcagcctattaccatctgctacag

SEQ ID NO: 2647701 - DNA, 25 bp, Homo sapien
caaaattcatatgataggcccggcg

SEQ ID NO: 2647702 - DNA, 25 bp, Homo sapien
ctcaaaattcatatgataggcccgg

SEQ ID NO: 2647703 - DNA, 25 bp, Homo sapien
aaattcatatgataggcccggcgcg

SEQ ID NO: 2647704 - DNA, 25 bp, Homo sapien
tggtgtcctattgcatagtaggatg

SEQ ID NO: 2647705 - DNA, 25 bp, Homo sapien
cctattgcatagtaggatgagtata

SEQ ID NO: 2647706 - DNA, 25 bp, Homo sapien
agttctggtgtcctattgcatagta

SEQ ID NO: 2647707 - DNA, 25 bp, Homo sapien
catagtaggatgagtatagttaaca

SEQ ID NO: 2647708 - DNA, 25 bp, Homo sapien
ccaccctactatcgggtagatccta

SEQ ID NO: 2647709 - DNA, 25 bp, Homo sapien
ctactgccaccctactatcgggtag

SEQ ID NO: 2647710 - DNA, 25 bp, Homo sapien
tactgccaccctactatcgggtaga

SEQ ID NO: 2647711 - DNA, 25 bp, Homo sapien
tgccaccctactatcgggtagatcc

SEQ ID NO: 2647712 - DNA, 25 bp, Homo sapien
tcatgacttcaattccatcagagtt

SEQ ID NO: 2647713 - DNA, 25 bp, Homo sapien
catgacttcaattccatcagagtta

SEQ ID NO: 2647714 - DNA, 25 bp, Homo sapien
cacattgaaccccacgtcggggtca

SEQ ID NO: 2647715 - DNA, 25 bp, Homo sapien
tcactactcaatgcagtggatggag

SEQ ID NO: 2647716 - DNA, 25 bp, Homo sapien
gggtcactactcaatgcagtggatg

SEQ ID NO: 2647717 - DNA, 25 bp, Homo sapien
cacgtcggggtcactactcaatgca

SEQ ID NO: 2647718 - DNA, 25 bp, Homo sapien
agggatgccggcatgagaagaacaa

SEQ ID NO: 2647719 - DNA, 25 bp, Homo sapien
cagggatgccggcatgagaagaaca

SEQ ID NO: 2647720 - DNA, 25 bp, Homo sapien
cagggatgccggcatgagaagaaca

SEQ ID NO: 2647721 - DNA, 25 bp, Homo sapien
agggatgccggcatgagaagaacaa

SEQ ID NO: 2647722 - DNA, 25 bp, Homo sapien
ctcgatgattcctgtccccttgaca

SEQ ID NO: 2647723 - DNA, 25 bp, Homo sapien
tcgatgattcctgtccccttgacag

SEQ ID NO: 2647724 - DNA, 25 bp, Homo sapien
gcatctgcagcagaggtccccgcta

SEQ ID NO: 2647725 - DNA, 25 bp, Homo sapien
tgcagcagaggtccccgctacagct

SEQ ID NO: 2647726 - DNA, 25 bp, Homo sapien
ctagcatctgcagcagaggtccccg

SEQ ID NO: 2647727 - DNA, 25 bp, Homo sapien
atctgcagcagaggtccccgctaca

SEQ ID NO: 2647728 - DNA, 25 bp, Homo sapien
tagacgcaagattcccctgctgcca

SEQ ID NO: 2647729 - DNA, 25 bp, Homo sapien
ccgtagacgcaagattcccctgctg

SEQ ID NO: 2647730 - DNA, 25 bp, Homo sapien
ctaggccccgtagacgcaagattcc

SEQ ID NO: 2647731 - DNA, 25 bp, Homo sapien
tcgggtcacacacggtgtgaaaagg

SEQ ID NO: 2647732 - DNA, 25 bp, Homo sapien
ccaagcctttcaggttctaggtggt

SEQ ID NO: 2647733 - DNA, 25 bp, Homo sapien
tagctctttcgctttggccaatttc

SEQ ID NO: 2647734 - DNA, 25 bp, Homo sapien
aagaattaacgttcatgaacctccg

SEQ ID NO: 2647735 - DNA, 25 bp, Homo sapien
gaattaacgttcatgaacctccgcc

SEQ ID NO: 2647736 - DNA, 25 bp, Homo sapien
cctgctcatttgtatagtggtaaaa

SEQ ID NO: 2647737 - DNA, 25 bp, Homo sapien
tactctggaatcgatcaactccctt

SEQ ID NO: 2647738 - DNA, 25 bp, Homo sapien
tggaaggataagctaggatgcagtc

SEQ ID NO: 2647739 - DNA, 25 bp, Homo sapien
gggacattctacttaattcttggaa

SEQ ID NO: 2647740 - DNA, 25 bp, Homo sapien
tccatcattttcacctccttgaatg

SEQ ID NO: 2647741 - DNA, 25 bp, Homo sapien
catcattttcacctccttgaatgag

SEQ ID NO: 2647742 - DNA, 25 bp, Homo sapien
agtcatccatcattttcacctcctt

SEQ ID NO: 2647743 - DNA, 25 bp, Homo sapien
catccatcattttcacctccttgaa

SEQ ID NO: 2647744 - DNA, 25 bp, Homo sapien
ataaatgaagacgaacaccagctca

SEQ ID NO: 2647745 - DNA, 25 bp, Homo sapien
tcagacctaccagatatctcatcat

SEQ ID NO: 2647746 - DNA, 25 bp, Homo sapien
tcttcaacttatcccaaatgtttaa

SEQ ID NO: 2647747 - DNA, 25 bp, Homo sapien
tcattcagacctaccagatatctca

SEQ ID NO: 2647748 - DNA, 25 bp, Homo sapien
tatccactaagcaggccctccttct

SEQ ID NO: 2647749 - DNA, 25 bp, Homo sapien
ctctgtatccactaagcaggccctc

SEQ ID NO: 2647750 - DNA, 25 bp, Homo sapien
tgtatccactaagcaggccctcctt

SEQ ID NO: 2647751 - DNA, 25 bp, Homo sapien
tctgtatccactaagcaggccctcc

SEQ ID NO: 2647752 - DNA, 25 bp, Homo sapien
tgttgtagcttgcataagtacttcc

SEQ ID NO: 2647753 - DNA, 25 bp, Homo sapien
ttttggctaccatgagtaataccga

SEQ ID NO: 2647754 - DNA, 25 bp, Homo sapien
ccctgggatacaccaacctaattgg

SEQ ID NO: 2647755 - DNA, 25 bp, Homo sapien
taaatggaagcataccgtttgacct

SEQ ID NO: 2647756 - DNA, 25 bp, Homo sapien
gccaccatgcacagcaattaaacca

SEQ ID NO: 2647757 - DNA, 25 bp, Homo sapien
gctgctctcagacttctaggctcaa

SEQ ID NO: 2647758 - DNA, 25 bp, Homo sapien
aagcagtcttcccatcctggcttcc

SEQ ID NO: 2647759 - DNA, 25 bp, Homo sapien
ggctgctctcagacttctaggctca

SEQ ID NO: 2647760 - DNA, 25 bp, Homo sapien
tacaaatgctatgtggagctgaagc

SEQ ID NO: 2647761 - DNA, 25 bp, Homo sapien
tgttaatggacagatgcccatgcca

SEQ ID NO: 2647762 - DNA, 25 bp, Homo sapien
actcctcggattcaggctatgaagg

SEQ ID NO: 2647763 - DNA, 25 bp, Homo sapien
tacaggtctggtggttattatctgc

SEQ ID NO: 2647764 - DNA, 25 bp, Homo sapien
cagttttctattcctcccttaggtg

SEQ ID NO: 2647765 - DNA, 25 bp, Homo sapien
ggtctggactaacaatgaatacaag

SEQ ID NO: 2647766 - DNA, 25 bp, Homo sapien
caaagtgctcctagaaactgtcaca

SEQ ID NO: 2647767 - DNA, 25 bp, Homo sapien
tgcatcataaatcctctcccagttt

SEQ ID NO: 2647768 - DNA, 25 bp, Homo sapien
caggtgagtcagtaggttgtgccca

SEQ ID NO: 2647769 - DNA, 25 bp, Homo sapien
gctggactcttttaaggactggccc

SEQ ID NO: 2647770 - DNA, 25 bp, Homo sapien
catagactttatgctcctgggctta

SEQ ID NO: 2647771 - DNA, 25 bp, Homo sapien
tgcttacgaagaactacggctggac

SEQ ID NO: 2647772 - DNA, 25 bp, Homo sapien
cctcattcgtcaaagtacatctgtg

SEQ ID NO: 2647773 - DNA, 25 bp, Homo sapien
ccagaagaatcagttgctcaatata

SEQ ID NO: 2647774 - DNA, 25 bp, Homo sapien
gctcaatatataataccctgatgaa

SEQ ID NO: 2647775 - DNA, 25 bp, Homo sapien
agtttccggaaacagtgaccctgag

SEQ ID NO: 2647776 - DNA, 25 bp, Homo sapien
ggtcttaattagctgaattcgttga

SEQ ID NO: 2647777 - DNA, 25 bp, Homo sapien
cttcaaatgaaagggtgtgtttggt

SEQ ID NO: 2647778 - DNA, 25 bp, Homo sapien
caaatcggttgagctgcacaaaggt

SEQ ID NO: 2647779 - DNA, 25 bp, Homo sapien
gaagatcttcaattagctgcagctt

SEQ ID NO: 2647780 - DNA, 25 bp, Homo sapien
ggacgttgccctgtgtacctcttcg

SEQ ID NO: 2647781 - DNA, 25 bp, Homo sapien
cccttctggacgttgccctgtgtac

SEQ ID NO: 2647782 - DNA, 25 bp, Homo sapien
ggacccttctggacgttgccctgtg

SEQ ID NO: 2647783 - DNA, 25 bp, Homo sapien
cttctggacgttgccctgtgtacct

SEQ ID NO: 2647784 - DNA, 25 bp, Homo sapien
agcatttggtgaggccgaagtgggc

SEQ ID NO: 2647785 - DNA, 25 bp, Homo sapien
gacatctggattgccttttcttaaa

SEQ ID NO: 2647786 - DNA, 25 bp, Homo sapien
cttaaaaatctagtcttggctgggt

SEQ ID NO: 2647787 - DNA, 25 bp, Homo sapien
cttctaggacatctggattgccttt

SEQ ID NO: 2647788 - DNA, 25 bp, Homo sapien
gttgcatatatcaatactttgcttc

SEQ ID NO: 2647789 - DNA, 25 bp, Homo sapien
tgtgtttatccccaatggacattgg

SEQ ID NO: 2647790 - DNA, 25 bp, Homo sapien
ttaccacctgtacttcatttatgga

SEQ ID NO: 2647791 - DNA, 25 bp, Homo sapien
catttatggatacgttgtttatcca

SEQ ID NO: 2647792 - DNA, 25 bp, Homo sapien
tgacaagtgttctgtacccatgcca

SEQ ID NO: 2647793 - DNA, 25 bp, Homo sapien
agaagggctcctttgcagtgagtac

SEQ ID NO: 2647794 - DNA, 25 bp, Homo sapien
taaaaatgctcccatcttgagtaat

SEQ ID NO: 2647795 - DNA, 25 bp, Homo sapien
gaccaccacaatcgagagagaacat

SEQ ID NO: 2647796 - DNA, 25 bp, Homo sapien
gtagtgacgtggtttcacaccatgt

SEQ ID NO: 2647797 - DNA, 25 bp, Homo sapien
tagtagtgacgtggtttcacaccat

SEQ ID NO: 2647798 - DNA, 25 bp, Homo sapien
tgctgtccaggctcgtgtcaactcc

SEQ ID NO: 2647799 - DNA, 25 bp, Homo sapien
ccgtggccagccttaggggataatt

SEQ ID NO: 2647800 - DNA, 25 bp, Homo sapien
gacccagtggttctttatgtggaaa

SEQ ID NO: 2647801 - DNA, 25 bp, Homo sapien
agacaacgtaatcccaccctggaga

SEQ ID NO: 2647802 - DNA, 25 bp, Homo sapien
ggagatgcctttaatactcagagca

SEQ ID NO: 2647803 - DNA, 25 bp, Homo sapien
tgcccggccgaaatttgtgatttta

SEQ ID NO: 2647804 - DNA, 25 bp, Homo sapien
caacaggttgttaaagaccaggctc

SEQ ID NO: 2647805 - DNA, 25 bp, Homo sapien
gaccaggctcatatcagtttatttc

SEQ ID NO: 2647806 - DNA, 25 bp, Homo sapien
tcagattttgttatggatgtcaggg

SEQ ID NO: 2647807 - DNA, 25 bp, Homo sapien
aatggtactataagttttcaacagg

SEQ ID NO: 2647808 - DNA, 25 bp, Homo sapien
tgggcctgaattagtgtcaattata

SEQ ID NO: 2647809 - DNA, 25 bp, Homo sapien
tattccggagaagattgggcctgaa

SEQ ID NO: 2647810 - DNA, 25 bp, Homo sapien
aactgcagaactcctgatgtatttg

SEQ ID NO: 2647811 - DNA, 25 bp, Homo sapien
tatttgaacatatcgagaggacagt

SEQ ID NO: 2647812 - DNA, 25 bp, Homo sapien
cattgcttctttatctgaccaggat

SEQ ID NO: 2647813 - DNA, 25 bp, Homo sapien
ctgaccaggatgcaaaaccctcttt

SEQ ID NO: 2647814 - DNA, 25 bp, Homo sapien
atctgaccaggatgcaaaaccctct

SEQ ID NO: 2647815 - DNA, 25 bp, Homo sapien
caggatgcaaaaccctctttcagca

SEQ ID NO: 2647816 - DNA, 25 bp, Homo sapien
gtaattatagttattcctagagaag

SEQ ID NO: 2647817 - DNA, 25 bp, Homo sapien
ttatagttattcctagagaagttga

SEQ ID NO: 2647818 - DNA, 25 bp, Homo sapien
tagttattcctagagaagttgattt

SEQ ID NO: 2647819 - DNA, 25 bp, Homo sapien
ttattcctagagaagttgatttaga

SEQ ID NO: 2647820 - DNA, 25 bp, Homo sapien
tacaccaataataaccctccagtgg

SEQ ID NO: 2647821 - DNA, 25 bp, Homo sapien
tgcgcccatataagacaacagactt

SEQ ID NO: 2647822 - DNA, 25 bp, Homo sapien
caagactggctgaaggctaggtctc

SEQ ID NO: 2647823 - DNA, 25 bp, Homo sapien
cagtttatggcaactctgttgagca

SEQ ID NO: 2647824 - DNA, 25 bp, Homo sapien
taatgacctcaaagtgcaggagtag

SEQ ID NO: 2647825 - DNA, 25 bp, Homo sapien
ccggcacgttgttataaatgttcca

SEQ ID NO: 2647826 - DNA, 25 bp, Homo sapien
cattattgatcataggtgtgtatgt

SEQ ID NO: 2647827 - DNA, 25 bp, Homo sapien
taggtgtgtatgtaaggcacacctc

SEQ ID NO: 2647828 - DNA, 25 bp, Homo sapien
agaatgtatccctgtcagtaagcga

SEQ ID NO: 2647829 - DNA, 25 bp, Homo sapien
caggtttgtaacctaggcgtgggat

SEQ ID NO: 2647830 - DNA, 25 bp, Homo sapien
taggcgtgggataggctataccatc

SEQ ID NO: 2647831 - DNA, 25 bp, Homo sapien
tgtatccctgtcagtaagcgatgca

SEQ ID NO: 2647832 - DNA, 25 bp, Homo sapien
ccttccgagagcgaatggcgatcac

SEQ ID NO: 2647833 - DNA, 25 bp, Homo sapien
ctgcagagccttcgaccttccgaga

SEQ ID NO: 2647834 - DNA, 25 bp, Homo sapien
tgcagcatccggaacgtttcggcgt

SEQ ID NO: 2647835 - DNA, 25 bp, Homo sapien
gagctcctcagaacccaggtcgatg

SEQ ID NO: 2647836 - DNA, 25 bp, Homo sapien
cagaggtttagattagatttccgac

SEQ ID NO: 2647837 - DNA, 25 bp, Homo sapien
taaaatataagtaccatccgcccag

SEQ ID NO: 2647838 - DNA, 25 bp, Homo sapien
tcaagcagcttcctagtctagaaag

SEQ ID NO: 2647839 - DNA, 25 bp, Homo sapien
gattccctgcgtataaagtgatgcc

SEQ ID NO: 2647840 - DNA, 25 bp, Homo sapien
aattcttaattttctgcatgcacat

SEQ ID NO: 2647841 - DNA, 25 bp, Homo sapien
tgtttccattatatcactgatttat

SEQ ID NO: 2647842 - DNA, 25 bp, Homo sapien
cggcctataatttttgatagatgat

SEQ ID NO: 2647843 - DNA, 25 bp, Homo sapien
tgatttatttctgcaaattgaataa

SEQ ID NO: 2647844 - DNA, 25 bp, Homo sapien
tgctgagagtcagagggtacgtacc

SEQ ID NO: 2647845 - DNA, 25 bp, Homo sapien
tccagagagactgcaccaactgtgt

SEQ ID NO: 2647846 - DNA, 25 bp, Homo sapien
ggtacgtacctttgcaaagttgcaa

SEQ ID NO: 2647847 - DNA, 25 bp, Homo sapien
agttgcaaaattgccctccagagag

SEQ ID NO: 2647848 - DNA, 25 bp, Homo sapien
gggtgggacatttcacacatgcgtg

SEQ ID NO: 2647849 - DNA, 25 bp, Homo sapien
tcatgctcatcaactataaaaggac

SEQ ID NO: 2647850 - DNA, 25 bp, Homo sapien
tgtgccaatattgtaacaagatttg

SEQ ID NO: 2647851 - DNA, 25 bp, Homo sapien
aagatttgagggtgggacatttcac

SEQ ID NO: 2647852 - DNA, 25 bp, Homo sapien
tactgtgcgctgctgaccattgggt

SEQ ID NO: 2647853 - DNA, 25 bp, Homo sapien
gatccagacttcgtgtgagaggaca

SEQ ID NO: 2647854 - DNA, 25 bp, Homo sapien
tcatgggagaggtatttacagggcc

SEQ ID NO: 2647855 - DNA, 25 bp, Homo sapien
tgaagttaggcaccgcccaagaagt

SEQ ID NO: 2647856 - DNA, 25 bp, Homo sapien
tcctgtgcctgaaagaactgtctgt

SEQ ID NO: 2647857 - DNA, 25 bp, Homo sapien
gtagcacagggcttcccatacagtg

SEQ ID NO: 2647858 - DNA, 25 bp, Homo sapien
catgtgaaaatagctggatgaatca

SEQ ID NO: 2647859 - DNA, 25 bp, Homo sapien
tgcgcctagccgagatgctgtattt

SEQ ID NO: 2647860 - DNA, 25 bp, Homo sapien
cgtttgttgaagagatgctatattt

SEQ ID NO: 2647861 - DNA, 25 bp, Homo sapien
gcatgtgcaaatccagttgtcccca

SEQ ID NO: 2647862 - DNA, 25 bp, Homo sapien
tatttataatgtcctttgtgcacga

SEQ ID NO: 2647863 - DNA, 25 bp, Homo sapien
gctggtccttttggtgtcctatcta

SEQ ID NO: 2647864 - DNA, 25 bp, Homo sapien
ttataccagcgccagtttccgccac

SEQ ID NO: 2647865 - DNA, 25 bp, Homo sapien
atctggccacggaccacttgctggg

SEQ ID NO: 2647866 - DNA, 25 bp, Homo sapien
gcgccagtttccgccacatgtcttt

SEQ ID NO: 2647867 - DNA, 25 bp, Homo sapien
gatatctcttccgatctggccacgg

SEQ ID NO: 2647868 - DNA, 25 bp, Homo sapien
gaggagcagcattgcaacagtgtcg

SEQ ID NO: 2647869 - DNA, 25 bp, Homo sapien
taggcaacgtgtctcaggtacaagc

SEQ ID NO: 2647870 - DNA, 25 bp, Homo sapien
tccaaagagcttccaaagaggagca

SEQ ID NO: 2647871 - DNA, 25 bp, Homo sapien
cagttggtcctatagtgccaggtaa

SEQ ID NO: 2647872 - DNA, 25 bp, Homo sapien
ggtcaggttggtctcaaactcctga

SEQ ID NO: 2647873 - DNA, 25 bp, Homo sapien
tcggcttacttcaacttctgcctct

SEQ ID NO: 2647874 - DNA, 25 bp, Homo sapien
cttgggttcaagcaattctcctgcc

SEQ ID NO: 2647875 - DNA, 25 bp, Homo sapien
ttacttcaacttctgcctcttgggt

SEQ ID NO: 2647876 - DNA, 25 bp, Homo sapien
taaaaagcaacctatgaacctccta

SEQ ID NO: 2647877 - DNA, 25 bp, Homo sapien
tcaatgccttaaaagacccctgcgg

SEQ ID NO: 2647878 - DNA, 25 bp, Homo sapien
tatcaatgccttaaaagacccctgc

SEQ ID NO: 2647879 - DNA, 25 bp, Homo sapien
taaagtcaagaaattggacattatc

SEQ ID NO: 2647880 - DNA, 25 bp, Homo sapien
cactcgctcattttgttggaacact

SEQ ID NO: 2647881 - DNA, 25 bp, Homo sapien
caacttgtcctataatcatcctggg

SEQ ID NO: 2647882 - DNA, 25 bp, Homo sapien
cacttcatcggagttccctgggaaa

SEQ ID NO: 2647883 - DNA, 25 bp, Homo sapien
cctgctggattatgaacaacttgtc

SEQ ID NO: 2647884 - DNA, 25 bp, Homo sapien
taaatggaagcataccgtttgacct

SEQ ID NO: 2647885 - DNA, 25 bp, Homo sapien
tgttgtagcttgcataagtacttcc

SEQ ID NO: 2647886 - DNA, 25 bp, Homo sapien
ttttggctaccatgagtaataccga

SEQ ID NO: 2647887 - DNA, 25 bp, Homo sapien
ccctgggatacaccaacctaattgg

SEQ ID NO: 2647888 - DNA, 25 bp, Homo sapien
gccaccatgcacagcaattaaacca

SEQ ID NO: 2647889 - DNA, 25 bp, Homo sapien
gctgctctcagacttctaggctcaa

SEQ ID NO: 2647890 - DNA, 25 bp, Homo sapien
ggctgctctcagacttctaggctca

SEQ ID NO: 2647891 - DNA, 25 bp, Homo sapien
aagcagtcttcccatcctggcttcc

SEQ ID NO: 2647892 - DNA, 25 bp, Homo sapien
tgttaatggacagatgcccatgcca

SEQ ID NO: 2647893 - DNA, 25 bp, Homo sapien
tacaaatgctatgtggagctgaagc

SEQ ID NO: 2647894 - DNA, 25 bp, Homo sapien
actcctcggattcaggctatgaagg

SEQ ID NO: 2647895 - DNA, 25 bp, Homo sapien
tacaggtctggtggttattatctgc

SEQ ID NO: 2647896 - DNA, 25 bp, Homo sapien
gcacctggcatacatctcttttctt

SEQ ID NO: 2647897 - DNA, 25 bp, Homo sapien
caccatgctagtcagaatgctcttg

SEQ ID NO: 2647898 - DNA, 25 bp, Homo sapien
atcgcgccaggcctctcttcagcat

SEQ ID NO: 2647899 - DNA, 25 bp, Homo sapien
cagcatttcttatagattcgttttc

SEQ ID NO: 2647900 - DNA, 25 bp, Homo sapien
caggtgagtcagtaggttgtgccca

SEQ ID NO: 2647901 - DNA, 25 bp, Homo sapien
tgcttacgaagaactacggctggac

SEQ ID NO: 2647902 - DNA, 25 bp, Homo sapien
catagactttatgctcctgggctta

SEQ ID NO: 2647903 - DNA, 25 bp, Homo sapien
gctggactcttttaaggactggccc

SEQ ID NO: 2647904 - DNA, 25 bp, Homo sapien
tcaaggtcagtttccggaaacagtg

SEQ ID NO: 2647905 - DNA, 25 bp, Homo sapien
ttcctcattcgtcaaagtacatctg

SEQ ID NO: 2647906 - DNA, 25 bp, Homo sapien
gtttccggaaacagtgaccctgaga

SEQ ID NO: 2647907 - DNA, 25 bp, Homo sapien
cattcgtcaaagtacatctgtgata

SEQ ID NO: 2647908 - DNA, 25 bp, Homo sapien
gggaaatcgaatccaaactggctta

SEQ ID NO: 2647909 - DNA, 25 bp, Homo sapien
tgattaacatgactcaggagaccag

SEQ ID NO: 2647910 - DNA, 25 bp, Homo sapien
tttatgaatgaagccacttgcccca

SEQ ID NO: 2647911 - DNA, 25 bp, Homo sapien
gagctggctcttcctagctggctaa

SEQ ID NO: 2647912 - DNA, 25 bp, Homo sapien
tgccaacagctcaaagaattatggt

SEQ ID NO: 2647913 - DNA, 25 bp, Homo sapien
gaattatggtaatattgtgggaact

SEQ ID NO: 2647914 - DNA, 25 bp, Homo sapien
gcaaaaggcatgactttataaaatg

SEQ ID NO: 2647915 - DNA, 25 bp, Homo sapien
aatatatgagacaggcaaaagctca

SEQ ID NO: 2647916 - DNA, 25 bp, Homo sapien
cccctgtggtttcatcaatggtaaa

SEQ ID NO: 2647917 - DNA, 25 bp, Homo sapien
cagcgccatctcctgagagggtgta

SEQ ID NO: 2647918 - DNA, 25 bp, Homo sapien
taggctccttattgcatgaatgtcc

SEQ ID NO: 2647919 - DNA, 25 bp, Homo sapien
tgtccacagcctgagcacgaagagt

SEQ ID NO: 2647920 - DNA, 25 bp, Homo sapien
cacggtagcgtgcacaatcttcatc

SEQ ID NO: 2647921 - DNA, 25 bp, Homo sapien
ctgcttctgccctcacggtagcgtg

SEQ ID NO: 2647922 - DNA, 25 bp, Homo sapien
gccctcacggtagcgtgcacaatct

SEQ ID NO: 2647923 - DNA, 25 bp, Homo sapien
gcgtgcacaatcttcatcgcatgtc

SEQ ID NO: 2647924 - DNA, 25 bp, Homo sapien
catgttaacacatccagtgtacatg

SEQ ID NO: 2647925 - DNA, 25 bp, Homo sapien
tttgtctactatatagcatgtcatc

SEQ ID NO: 2647926 - DNA, 25 bp, Homo sapien
gcaccgagttaaactatttgtctac

SEQ ID NO: 2647927 - DNA, 25 bp, Homo sapien
cacagttaaaatgtagccttcctca

SEQ ID NO: 2647928 - DNA, 25 bp, Homo sapien
tctagttggcccaagaaaaatccta

SEQ ID NO: 2647929 - DNA, 25 bp, Homo sapien
tctcttcggatatgagctgcaaact

SEQ ID NO: 2647930 - DNA, 25 bp, Homo sapien
gctgcaaactccttatataaaggct

SEQ ID NO: 2647931 - DNA, 25 bp, Homo sapien
cctaattattctagttggcccaaga

SEQ ID NO: 2647932 - DNA, 25 bp, Homo sapien
ccatttagactttctctggctagct

SEQ ID NO: 2647933 - DNA, 25 bp, Homo sapien
caatggtaaatactgagctcacatg

SEQ ID NO: 2647934 - DNA, 25 bp, Homo sapien
gagctggaacctttaccatttagac

SEQ ID NO: 2647935 - DNA, 25 bp, Homo sapien
taaatttgtagaaagggcaatggta

SEQ ID NO: 2647936 - DNA, 25 bp, Homo sapien
tctctcaaggctacacaaaaagtgt

SEQ ID NO: 2647937 - DNA, 25 bp, Homo sapien
agtggacacttcacggctggcacag

SEQ ID NO: 2647938 - DNA, 25 bp, Homo sapien
ttctgccaagctgcgtgcagtggac

SEQ ID NO: 2647939 - DNA, 25 bp, Homo sapien
tagcattacctttgcaattgcacca

SEQ ID NO: 2647940 - DNA, 25 bp, Homo sapien
taaaaattcagtccgtaacattctg

SEQ ID NO: 2647941 - DNA, 25 bp, Homo sapien
tcctgaaggtcccactactaatacc

SEQ ID NO: 2647942 - DNA, 25 bp, Homo sapien
cctcaagtccagtctaaagtccaag

SEQ ID NO: 2647943 - DNA, 25 bp, Homo sapien
tcatgaggcctctactatgacaacc

SEQ ID NO: 2647944 - DNA, 25 bp, Homo sapien
caatatatactccaaacattgatgt

SEQ ID NO: 2647945 - DNA, 25 bp, Homo sapien
tattggcctcgtgttgtagccttaa

SEQ ID NO: 2647946 - DNA, 25 bp, Homo sapien
tgtctccttcacatacagatattgg

SEQ ID NO: 2647947 - DNA, 25 bp, Homo sapien
tgtttctgctacatgaccaaaagta

SEQ ID NO: 2647948 - DNA, 25 bp, Homo sapien
tcggaaaagcaacggttctctggca

SEQ ID NO: 2647949 - DNA, 25 bp, Homo sapien
gtcaccaccgctgaccgggaaggct

SEQ ID NO: 2647950 - DNA, 25 bp, Homo sapien
aagagcaactcggaaaagcaacggt

SEQ ID NO: 2647951 - DNA, 25 bp, Homo sapien
accaccaacggagcctggaagaaga

SEQ ID NO: 2647952 - DNA, 25 bp, Homo sapien
ttaccgcacaaactcgcacctgagg

SEQ ID NO: 2647953 - DNA, 25 bp, Homo sapien
gggcggccgtgtccacatctccggg

SEQ ID NO: 2647954 - DNA, 25 bp, Homo sapien
gcaggcacccgtccggcctgaaaag

SEQ ID NO: 2647955 - DNA, 25 bp, Homo sapien
tctctctgccgactgaagcggggat

SEQ ID NO: 2647956 - DNA, 25 bp, Homo sapien
ctacaaagtcaaacagtcatgctct

SEQ ID NO: 2647957 - DNA, 25 bp, Homo sapien
tcatagataaactagcagagtaaca

SEQ ID NO: 2647958 - DNA, 25 bp, Homo sapien
taataattccaataaacaggcctta

SEQ ID NO: 2647959 - DNA, 25 bp, Homo sapien
gcatctttagtttgtgttttcatag

SEQ ID NO: 2647960 - DNA, 25 bp, Homo sapien
ttttctggcgggcaagttctcgttg

SEQ ID NO: 2647961 - DNA, 25 bp, Homo sapien
tcatgtttttctggcgggcaagttc

SEQ ID NO: 2647962 - DNA, 25 bp, Homo sapien
ggcgggcaagttctcgttgatttcc

SEQ ID NO: 2647963 - DNA, 25 bp, Homo sapien
ggcagtcaagctatcctctttcctc

SEQ ID NO: 2647964 - DNA, 25 bp, Homo sapien
cagttctcccgactctcccaaactg

SEQ ID NO: 2647965 - DNA, 25 bp, Homo sapien
cccagcccaaaatgttgcttcaatc

SEQ ID NO: 2647966 - DNA, 25 bp, Homo sapien
gttgcttcaatcacaacgtcagtga

SEQ ID NO: 2647967 - DNA, 25 bp, Homo sapien
cacaacgtcagtgactttagaatta

SEQ ID NO: 2647968 - DNA, 25 bp, Homo sapien
gctgttctgcctataaagtagccaa

SEQ ID NO: 2647969 - DNA, 25 bp, Homo sapien
tgtgcttgctgtgtaactttagtaa

SEQ ID NO: 2647970 - DNA, 25 bp, Homo sapien
gaaaccaagctctgttgtgcttgct

SEQ ID NO: 2647971 - DNA, 25 bp, Homo sapien
gaagtacagtggaaaaagaaccatg

SEQ ID NO: 2647972 - DNA, 25 bp, Homo sapien
tccgggcaatatgtatcaaggttgt

SEQ ID NO: 2647973 - DNA, 25 bp, Homo sapien
gtgtgtgacattaggcagctacatg

SEQ ID NO: 2647974 - DNA, 25 bp, Homo sapien
gctattactcttggttgttaactag

SEQ ID NO: 2647975 - DNA, 25 bp, Homo sapien
gttgttacaaggaatcactatgaat

SEQ ID NO: 2647976 - DNA, 25 bp, Homo sapien
tctgcatagacttcttctcattagc

SEQ ID NO: 2647977 - DNA, 25 bp, Homo sapien
cttttcttgcatgatctcagagtcc

SEQ ID NO: 2647978 - DNA, 25 bp, Homo sapien
ctgcttttcttgcatgatctcagag

SEQ ID NO: 2647979 - DNA, 25 bp, Homo sapien
ttctcttgtctgcatagacttcttc

SEQ ID NO: 2647980 - DNA, 25 bp, Homo sapien
gaagactgcttctaaaacatcgcac

SEQ ID NO: 2647981 - DNA, 25 bp, Homo sapien
gactgtccactctacaaaatcttga

SEQ ID NO: 2647982 - DNA, 25 bp, Homo sapien
acatcgcactaagtaaagctgaaag

SEQ ID NO: 2647983 - DNA, 25 bp, Homo sapien
tataacatatgtaatgactgtccac

SEQ ID NO: 2647984 - DNA, 25 bp, Homo sapien
aagagatcctattatctgatcatat

SEQ ID NO: 2647985 - DNA, 25 bp, Homo sapien
tatataagagatcctattatctgat

SEQ ID NO: 2647986 - DNA, 25 bp, Homo sapien
ttatctgatcatattacctaataaa

SEQ ID NO: 2647987 - DNA, 25 bp, Homo sapien
gacaaagattctttattatataaga

SEQ ID NO: 2647988 - DNA, 25 bp, Homo sapien
tggaccctaacttctattatatatt

SEQ ID NO: 2647989 - DNA, 25 bp, Homo sapien
tatacaaatggaccctaacttctat

SEQ ID NO: 2647990 - DNA, 25 bp, Homo sapien
attatacaaatggaccctaacttct

SEQ ID NO: 2647991 - DNA, 25 bp, Homo sapien
caaatggaccctaacttctattata

SEQ ID NO: 2647992 - DNA, 25 bp, Homo sapien
tgagacctcagtttacatccactta

SEQ ID NO: 2647993 - DNA, 25 bp, Homo sapien
tctgttgtaaattgttcaagcaagc

SEQ ID NO: 2647994 - DNA, 25 bp, Homo sapien
ttgttcaagcaagctttgtaagttg

SEQ ID NO: 2647995 - DNA, 25 bp, Homo sapien
catccacttagtttctattccagtg

SEQ ID NO: 2647996 - DNA, 25 bp, Homo sapien
tgaagactaaagttaaccaaagatc

SEQ ID NO: 2647997 - DNA, 25 bp, Homo sapien
tatgaagatagaaactcaggctaaa

SEQ ID NO: 2647998 - DNA, 25 bp, Homo sapien
tttgcctttgtgactaccatcatag

SEQ ID NO: 2647999 - DNA, 25 bp, Homo sapien
aaaacttcagccgggtgggatggct

SEQ ID NO: 2648000 - DNA, 25 bp, Homo sapien
acctttgcctcccagagtcaagaaa

SEQ ID NO: 2648001 - DNA, 25 bp, Homo sapien
atttatttctttgagatgaagtctt

SEQ ID NO: 2648002 - DNA, 25 bp, Homo sapien
gaaattctcttgcctcagcctccca

SEQ ID NO: 2648003 - DNA, 25 bp, Homo sapien
tttgcctcccagagtcaagaaattc

SEQ ID NO: 2648004 - DNA, 25 bp, Homo sapien
gaggaaagcaaggattctcccttgg

SEQ ID NO: 2648005 - DNA, 25 bp, Homo sapien
cttcagagggaggtgtggcccagct

SEQ ID NO: 2648006 - DNA, 25 bp, Homo sapien
tcagagggaggtgtggcccagctga

SEQ ID NO: 2648007 - DNA, 25 bp, Homo sapien
aagaggaaagcaaggattctccctt

SEQ ID NO: 2648008 - DNA, 25 bp, Homo sapien
gagttatgctgccataagccaagta

SEQ ID NO: 2648009 - DNA, 25 bp, Homo sapien
ctaaatccaacagcaaaagtcctca

SEQ ID NO: 2648010 - DNA, 25 bp, Homo sapien
aatccaacagcaaaagtcctcataa

SEQ ID NO: 2648011 - DNA, 25 bp, Homo sapien
tatgctgccataagccaagtaatac

SEQ ID NO: 2648012 - DNA, 25 bp, Homo sapien
ggcccaacatggctattatttttta

SEQ ID NO: 2648013 - DNA, 25 bp, Homo sapien
aagtgctaaattatggccgggggct

SEQ ID NO: 2648014 - DNA, 25 bp, Homo sapien
ttctacgagtggttatcgccctccc

SEQ ID NO: 2648015 - DNA, 25 bp, Homo sapien
tctgggagcggaacagtacggtggc

SEQ ID NO: 2648016 - DNA, 25 bp, Homo sapien
tcttaagagtgacgacttccgccgc

SEQ ID NO: 2648017 - DNA, 25 bp, Homo sapien
ggaccgcttgtagtaacttctcacg

SEQ ID NO: 2648018 - DNA, 25 bp, Homo sapien
gcgccggaacagcacggaatcctcc

SEQ ID NO: 2648019 - DNA, 25 bp, Homo sapien
ggaacagcacggaatcctcctgctc

SEQ ID NO: 2648020 - DNA, 25 bp, Homo sapien
ccgcgccggaacagcacggaatcct

SEQ ID NO: 2648021 - DNA, 25 bp, Homo sapien
gccggaacagcacggaatcctcctg

SEQ ID NO: 2648022 - DNA, 25 bp, Homo sapien
ctgcggaaggagagttgggccggaa

SEQ ID NO: 2648023 - DNA, 25 bp, Homo sapien
tgctgagagcgctaatagggagact

SEQ ID NO: 2648024 - DNA, 25 bp, Homo sapien
agagcgctaatagggagactgcact

SEQ ID NO: 2648025 - DNA, 25 bp, Homo sapien
aagggtgctgagagcgctaataggg

SEQ ID NO: 2648026 - DNA, 25 bp, Homo sapien
acaactccagtgagcggatcgactt

SEQ ID NO: 2648027 - DNA, 25 bp, Homo sapien
aaggagcccaaactgctcgaggaag

SEQ ID NO: 2648028 - DNA, 25 bp, Homo sapien
ctactgccaagtcgcggcagggcct

SEQ ID NO: 2648029 - DNA, 25 bp, Homo sapien
ggatcgacttgatgctgtcccgagg

SEQ ID NO: 2648030 - DNA, 25 bp, Homo sapien
gctgtcaccaaaagaaccgctaatg

SEQ ID NO: 2648031 - DNA, 25 bp, Homo sapien
gcccattcacgtatcatagatgtgt

SEQ ID NO: 2648032 - DNA, 25 bp, Homo sapien
atcctatctgcccattcacgtatca

SEQ ID NO: 2648033 - DNA, 25 bp, Homo sapien
tgtgttaactatatagctgtcacca

SEQ ID NO: 2648034 - DNA, 25 bp, Homo sapien
tccatttactctgtgggtgccctca

SEQ ID NO: 2648035 - DNA, 25 bp, Homo sapien
ggtcaatcattaagagaactccttt

SEQ ID NO: 2648036 - DNA, 25 bp, Homo sapien
tcatgaccacgaatctcaagtaggc

SEQ ID NO: 2648037 - DNA, 25 bp, Homo sapien
cacttcttcatatccacgtggtaaa

SEQ ID NO: 2648038 - DNA, 25 bp, Homo sapien
tctgatgtggtgcagctctgtgttc

SEQ ID NO: 2648039 - DNA, 25 bp, Homo sapien
cacaagagaagcctgtacaggcagc

SEQ ID NO: 2648040 - DNA, 25 bp, Homo sapien
attgcagtcacctacagcctaccga

SEQ ID NO: 2648041 - DNA, 25 bp, Homo sapien
gtttcctgataagcgttctcacaag

SEQ ID NO: 2648042 - DNA, 25 bp, Homo sapien
aaatagccctgtgatatatgtgact

SEQ ID NO: 2648043 - DNA, 25 bp, Homo sapien
tacactaatagacaatgtaacagaa

SEQ ID NO: 2648044 - DNA, 25 bp, Homo sapien
aaagcatagtagtttcaagaaatgg

SEQ ID NO: 2648045 - DNA, 25 bp, Homo sapien
tcacaaatgtggtttaatagagaaa

SEQ ID NO: 2648046 - DNA, 25 bp, Homo sapien
catcccaaatgtcagaatcatcact

SEQ ID NO: 2648047 - DNA, 25 bp, Homo sapien
tgaagccacagctttatcatatgct

SEQ ID NO: 2648048 - DNA, 25 bp, Homo sapien
tatcatatgcttttatcagtgctgt

SEQ ID NO: 2648049 - DNA, 25 bp, Homo sapien
cagtgctgtatcatcccaaatgtca

SEQ ID NO: 2648050 - DNA, 25 bp, Homo sapien
ctttactcagattacttctccctgc

SEQ ID NO: 2648051 - DNA, 25 bp, Homo sapien
cctcctttactcagattacttctcc

SEQ ID NO: 2648052 - DNA, 25 bp, Homo sapien
ttactcagattacttctccctgcaa

SEQ ID NO: 2648053 - DNA, 25 bp, Homo sapien
tcctttactcagattacttctccct

SEQ ID NO: 2648054 - DNA, 25 bp, Homo sapien
tacccgaagtttcacaaatgtcacc

SEQ ID NO: 2648055 - DNA, 25 bp, Homo sapien
gtaaggaagctgcagtattcttctt

SEQ ID NO: 2648056 - DNA, 25 bp, Homo sapien
cgaagtttcacaaatgtcaccattc

SEQ ID NO: 2648057 - DNA, 25 bp, Homo sapien
ggaagctgcagtattcttcttttgg

SEQ ID NO: 2648058 - DNA, 25 bp, Homo sapien
atgcaaccgtcttctgaccaaatgg

SEQ ID NO: 2648059 - DNA, 25 bp, Homo sapien
cagattggggaaagtagatcggaca

SEQ ID NO: 2648060 - DNA, 25 bp, Homo sapien
gtagatcggacagattttgctcctc

SEQ ID NO: 2648061 - DNA, 25 bp, Homo sapien
attattagctacttcacagattggg

SEQ ID NO: 2648062 - DNA, 25 bp, Homo sapien
atttccatatccagtgtaaaccaca

SEQ ID NO: 2648063 - DNA, 25 bp, Homo sapien
agaaaagagttccatggagcagatt

SEQ ID NO: 2648064 - DNA, 25 bp, Homo sapien
caggagacctggagttctcactttc

SEQ ID NO: 2648065 - DNA, 25 bp, Homo sapien
tggagcagatttgggcttgatgtta

SEQ ID NO: 2648066 - DNA, 25 bp, Homo sapien
tgttatctgatttatttccaggaga

SEQ ID NO: 2648067 - DNA, 25 bp, Homo sapien
gtggcggtggtgggccattgaattt

SEQ ID NO: 2648068 - DNA, 25 bp, Homo sapien
aggcagccagcatgatagtaagtgg

SEQ ID NO: 2648069 - DNA, 25 bp, Homo sapien
gtggtgggccattgaattttagacc

SEQ ID NO: 2648070 - DNA, 25 bp, Homo sapien
gcggtggtgggccattgaattttag

SEQ ID NO: 2648071 - DNA, 25 bp, Homo sapien
catagcatttcgagggcgattttaa

SEQ ID NO: 2648072 - DNA, 25 bp, Homo sapien
catcccaatacacagtatgccaaaa

SEQ ID NO: 2648073 - DNA, 25 bp, Homo sapien
tccaactatacctagaagggcaaac

SEQ ID NO: 2648074 - DNA, 25 bp, Homo sapien
agtaaatgtcttgggtagaacacct

SEQ ID NO: 2648075 - DNA, 25 bp, Homo sapien
tttgcttatataatctcctacttaa

SEQ ID NO: 2648076 - DNA, 25 bp, Homo sapien
aagtctggagatttatattatatag

SEQ ID NO: 2648077 - DNA, 25 bp, Homo sapien
gtgaatgctggaaattaattgtatt

SEQ ID NO: 2648078 - DNA, 25 bp, Homo sapien
aaagtctggagatttatattatata

SEQ ID NO: 2648079 - DNA, 25 bp, Homo sapien
catataatagccagtatgatagcca

SEQ ID NO: 2648080 - DNA, 25 bp, Homo sapien
cagtatgatagccactcatgtacca

SEQ ID NO: 2648081 - DNA, 25 bp, Homo sapien
tcatcaagagaatctggacatatgg

SEQ ID NO: 2648082 - DNA, 25 bp, Homo sapien
caagagaatctggacatatgggagg

SEQ ID NO: 2648083 - DNA, 25 bp, Homo sapien
taaagagagaagcaagtagtatttt

SEQ ID NO: 2648084 - DNA, 25 bp, Homo sapien
ccagatctttgtgcattaaaaaaat

SEQ ID NO: 2648085 - DNA, 25 bp, Homo sapien
aaatttcatttctcttggaaggccg

SEQ ID NO: 2648086 - DNA, 25 bp, Homo sapien
ttcatttctcttggaaggccgaggc

SEQ ID NO: 2648087 - DNA, 25 bp, Homo sapien
cccagatctttgtgcattaaaaaaa

SEQ ID NO: 2648088 - DNA, 25 bp, Homo sapien
agtcatttgcattctgcttagattt

SEQ ID NO: 2648089 - DNA, 25 bp, Homo sapien
ttagtcatttgcattctgcttagat

SEQ ID NO: 2648090 - DNA, 25 bp, Homo sapien
tagtcatttgcattctgcttagatt

SEQ ID NO: 2648091 - DNA, 25 bp, Homo sapien
taaaaatacaagactaggccgggca

SEQ ID NO: 2648092 - DNA, 25 bp, Homo sapien
aatacaagactaggccgggcacagt

SEQ ID NO: 2648093 - DNA, 25 bp, Homo sapien
tctactaaaaatacaagactaggcc

SEQ ID NO: 2648094 - DNA, 25 bp, Homo sapien
ctactaaaaatacaagactaggccg

SEQ ID NO: 2648095 - DNA, 25 bp, Homo sapien
cccagctacttgggaggttgaggca

SEQ ID NO: 2648096 - DNA, 25 bp, Homo sapien
aggcatggtggtggggacctctaat

SEQ ID NO: 2648097 - DNA, 25 bp, Homo sapien
ggaggctgcagtgagctgagattta

SEQ ID NO: 2648098 - DNA, 25 bp, Homo sapien
ggagaatcacttgaacccaggaggc

SEQ ID NO: 2648099 - DNA, 25 bp, Homo sapien
tgagacctggagcttgacaccaccc

SEQ ID NO: 2648100 - DNA, 25 bp, Homo sapien
tgatcagaaattaagttgatagtct

SEQ ID NO: 2648101 - DNA, 25 bp, Homo sapien
tggtggctcatgctaggcacagtgg

SEQ ID NO: 2648102 - DNA, 25 bp, Homo sapien
ggctgcagttaaggttttcttgcag

SEQ ID NO: 2648103 - DNA, 25 bp, Homo sapien
agcaccttccttctttttgattttg

SEQ ID NO: 2648104 - DNA, 25 bp, Homo sapien
atttaaggaatgtgagcaccttcct

SEQ ID NO: 2648105 - DNA, 25 bp, Homo sapien
ttaaggaatgtgagcaccttccttc

SEQ ID NO: 2648106 - DNA, 25 bp, Homo sapien
gtgagcaccttccttctttttgatt

SEQ ID NO: 2648107 - DNA, 25 bp, Homo sapien
aaccagaggcttgacgaattccagt

SEQ ID NO: 2648108 - DNA, 25 bp, Homo sapien
agtgcagtatgcctaggttatccca

SEQ ID NO: 2648109 - DNA, 25 bp, Homo sapien
aaagtctgctggtctgcctactagt

SEQ ID NO: 2648110 - DNA, 25 bp, Homo sapien
tcatatgtcagagtgtacagtgcag

SEQ ID NO: 2648111 - DNA, 25 bp, Homo sapien
gccagttatcttctataacgcttca

SEQ ID NO: 2648112 - DNA, 25 bp, Homo sapien
tatcttctataacgcttcacattcc

SEQ ID NO: 2648113 - DNA, 25 bp, Homo sapien
tttctttagtggtgtcatttagtgc

SEQ ID NO: 2648114 - DNA, 25 bp, Homo sapien
ctttagtggtgtcatttagtgctgc

SEQ ID NO: 2648115 - DNA, 25 bp, Homo sapien
cataacttttaatcaagaagagtta

SEQ ID NO: 2648116 - DNA, 25 bp, Homo sapien
cttaagtatgcaaattaagacagtc

SEQ ID NO: 2648117 - DNA, 25 bp, Homo sapien
aacagtacaatgaacagccatgtcc

SEQ ID NO: 2648118 - DNA, 25 bp, Homo sapien
cattttaagacactctaacacttca

SEQ ID NO: 2648119 - DNA, 25 bp, Homo sapien
aacattttgccacatacgcctcaca

SEQ ID NO: 2648120 - DNA, 25 bp, Homo sapien
caattattacaatgaaagccagaga

SEQ ID NO: 2648121 - DNA, 25 bp, Homo sapien
tctgaatgtaggtacagctgtggct

SEQ ID NO: 2648122 - DNA, 25 bp, Homo sapien
tgtctgatcccttaatgaaggatct

SEQ ID NO: 2648123 - DNA, 25 bp, Homo sapien
gctgtggctgtagaacagaccatgt

SEQ ID NO: 2648124 - DNA, 25 bp, Homo sapien
tcgctttttagcccaggcttgagta

SEQ ID NO: 2648125 - DNA, 25 bp, Homo sapien
gtctcgctttttagcccaggcttga

SEQ ID NO: 2648126 - DNA, 25 bp, Homo sapien
tctcgctttttagcccaggcttgag

SEQ ID NO: 2648127 - DNA, 25 bp, Homo sapien
gagtctcgctttttagcccaggctt

SEQ ID NO: 2648128 - DNA, 25 bp, Homo sapien
cactttagttgacccattagcagca

SEQ ID NO: 2648129 - DNA, 25 bp, Homo sapien
cagctcttatgagggtcaccaatga

SEQ ID NO: 2648130 - DNA, 25 bp, Homo sapien
tgagctccacattgctaaattggtg

SEQ ID NO: 2648131 - DNA, 25 bp, Homo sapien
taaattggtgaatacttctcagtcc

SEQ ID NO: 2648132 - DNA, 25 bp, Homo sapien
tatcagcaagtggttgctccacagc

SEQ ID NO: 2648133 - DNA, 25 bp, Homo sapien
gatccctaggacacaagcagaatgc

SEQ ID NO: 2648134 - DNA, 25 bp, Homo sapien
ttctgccacatacgctaggtcatag

SEQ ID NO: 2648135 - DNA, 25 bp, Homo sapien
cacaggctgttagtagcagaaggcc

SEQ ID NO: 2648136 - DNA, 25 bp, Homo sapien
tcatgggagaggtatttacagggcc

SEQ ID NO: 2648137 - DNA, 25 bp, Homo sapien
tgaagttaggcaccgcccaagaagt

SEQ ID NO: 2648138 - DNA, 25 bp, Homo sapien
gatccagacttcgtgtgagaggaca

SEQ ID NO: 2648139 - DNA, 25 bp, Homo sapien
tactgtgcgctgctgaccattgggt

SEQ ID NO: 2648140 - DNA, 25 bp, Homo sapien
caggtctgccaatctatctaaaagc

SEQ ID NO: 2648141 - DNA, 25 bp, Homo sapien
catacatggatgaaacgggtttaac

SEQ ID NO: 2648142 - DNA, 25 bp, Homo sapien
tttgaggtccctgagtaatccaccc

SEQ ID NO: 2648143 - DNA, 25 bp, Homo sapien
tccattgtccatggtcaacagggaa

SEQ ID NO: 2648144 - DNA, 25 bp, Homo sapien
aatagggcatagcagtggacagtcg

SEQ ID NO: 2648145 - DNA, 25 bp, Homo sapien
cattccaaagtctagtcagcctgtg

SEQ ID NO: 2648146 - DNA, 25 bp, Homo sapien
gacatggctttaggaatgtcacacc

SEQ ID NO: 2648147 - DNA, 25 bp, Homo sapien
tcattgagaacacagggtgtgcccg

SEQ ID NO: 2648148 - DNA, 25 bp, Homo sapien
aagtaaaagcccaattggagaggct

SEQ ID NO: 2648149 - DNA, 25 bp, Homo sapien
catttcaaacagaggtaatcacttg

SEQ ID NO: 2648150 - DNA, 25 bp, Homo sapien
tcatagcctggagttaaagagaacc

SEQ ID NO: 2648151 - DNA, 25 bp, Homo sapien
gaactgagatttctgtcgagacctg

SEQ ID NO: 2648152 - DNA, 25 bp, Homo sapien
gaacgaagtgatagtcatgctcaac

SEQ ID NO: 2648153 - DNA, 25 bp, Homo sapien
taagcgtacataaagattgccagga

SEQ ID NO: 2648154 - DNA, 25 bp, Homo sapien
tgaaggccagcaatttcctgatgag

SEQ ID NO: 2648155 - DNA, 25 bp, Homo sapien
tacccttgcttaccagaacgaagtg

SEQ ID NO: 2648156 - DNA, 25 bp, Homo sapien
gccacccacgcctggcaaatgtttg

SEQ ID NO: 2648157 - DNA, 25 bp, Homo sapien
gtttggtggcgcaatatccactcac

SEQ ID NO: 2648158 - DNA, 25 bp, Homo sapien
tattgtgtaaatgtcatgtacaaac

SEQ ID NO: 2648159 - DNA, 25 bp, Homo sapien
ggcctctttgtattcttattgtgta

SEQ ID NO: 2648160 - DNA, 25 bp, Homo sapien
caaactaggtaaggatggcacttta

SEQ ID NO: 2648161 - DNA, 25 bp, Homo sapien
tctaagggtgtagcctgtatccatg

SEQ ID NO: 2648162 - DNA, 25 bp, Homo sapien
tctgaagagtagcacagggcttccc

SEQ ID NO: 2648163 - DNA, 25 bp, Homo sapien
tcctgtgcctgaaagaactgtctgt

SEQ ID NO: 2648164 - DNA, 25 bp, Homo sapien
tccttaaggaacaaagcgacagctg

SEQ ID NO: 2648165 - DNA, 25 bp, Homo sapien
agctggaagtggaaagacggtcctc

SEQ ID NO: 2648166 - DNA, 25 bp, Homo sapien
aaactcctctctttgtggcggcgat

SEQ ID NO: 2648167 - DNA, 25 bp, Homo sapien
gattgctgtccgtacaaacagggcc

SEQ ID NO: 2648168 - DNA, 25 bp, Homo sapien
taggcaacgtgtctcaggtacaagc

SEQ ID NO: 2648169 - DNA, 25 bp, Homo sapien
cagttggtcctatagtgccaggtaa

SEQ ID NO: 2648170 - DNA, 25 bp, Homo sapien
tccaaagagcttccaaagaggagca

SEQ ID NO: 2648171 - DNA, 25 bp, Homo sapien
gaggagcagcattgcaacagtgtcg

SEQ ID NO: 2648172 - DNA, 25 bp, Homo sapien
aatgcatacaactatttttataact

SEQ ID NO: 2648173 - DNA, 25 bp, Homo sapien
caacctaagtgccttacctgatgac

SEQ ID NO: 2648174 - DNA, 25 bp, Homo sapien
gtcatatacgcactcattccaccaa

SEQ ID NO: 2648175 - DNA, 25 bp, Homo sapien
tcatatacgcactcattccaccaaa

SEQ ID NO: 2648176 - DNA, 25 bp, Homo sapien
ggtcaggttggtctcaaactcctga

SEQ ID NO: 2648177 - DNA, 25 bp, Homo sapien
cttgggttcaagcaattctcctgcc

SEQ ID NO: 2648178 - DNA, 25 bp, Homo sapien
ttacttcaacttctgcctcttgggt

SEQ ID NO: 2648179 - DNA, 25 bp, Homo sapien
tcggcttacttcaacttctgcctct

SEQ ID NO: 2648180 - DNA, 25 bp, Homo sapien
tcacggtacagttcattctcacaaa

SEQ ID NO: 2648181 - DNA, 25 bp, Homo sapien
agcttcacggtacagttcattctca

SEQ ID NO: 2648182 - DNA, 25 bp, Homo sapien
gtgagcttcacggtacagttcattc

SEQ ID NO: 2648183 - DNA, 25 bp, Homo sapien
caggtgagcttcacggtacagttca

SEQ ID NO: 2648184 - DNA, 25 bp, Homo sapien
cacagtggcatcttcttctggagag

SEQ ID NO: 2648185 - DNA, 25 bp, Homo sapien
aagcacagtggcatcttcttctgga

SEQ ID NO: 2648186 - DNA, 25 bp, Homo sapien
tacaggaagcacagtggcatcttct

SEQ ID NO: 2648187 - DNA, 25 bp, Homo sapien
cagtggcatcttcttctggagaggc

SEQ ID NO: 2648188 - DNA, 25 bp, Homo sapien
cagagaaggacaatgagatatttaa

SEQ ID NO: 2648189 - DNA, 25 bp, Homo sapien
caggtgagtgttcagatcattattc

SEQ ID NO: 2648190 - DNA, 25 bp, Homo sapien
gagagctataaaagtctgctcagaa

SEQ ID NO: 2648191 - DNA, 25 bp, Homo sapien
tatttaatttgccacggcaaagcca

SEQ ID NO: 2648192 - DNA, 25 bp, Homo sapien
ctacctcctgggtacaaacagttct

SEQ ID NO: 2648193 - DNA, 25 bp, Homo sapien
agagtcttgctctgtctcccaggct

SEQ ID NO: 2648194 - DNA, 25 bp, Homo sapien
ctctacctcctgggtacaaacagtt

SEQ ID NO: 2648195 - DNA, 25 bp, Homo sapien
tttttccccacgagtcagagtcttg

SEQ ID NO: 2648196 - DNA, 25 bp, Homo sapien
tgctaggttgcatagaggacaaaca

SEQ ID NO: 2648197 - DNA, 25 bp, Homo sapien
cgatgatcgttcttgtgaatagcca

SEQ ID NO: 2648198 - DNA, 25 bp, Homo sapien
ggaggtagatcccaccattttatgg

SEQ ID NO: 2648199 - DNA, 25 bp, Homo sapien
tatgctaggctttaggtcaagaagg

SEQ ID NO: 2648200 - DNA, 25 bp, Homo sapien
ggcttaacaccacctagaacctgaa

SEQ ID NO: 2648201 - DNA, 25 bp, Homo sapien
tggccccttttacctatggcaggag

SEQ ID NO: 2648202 - DNA, 25 bp, Homo sapien
ctctgcttggcagtaccccagtggg

SEQ ID NO: 2648203 - DNA, 25 bp, Homo sapien
gacttcggtgcatctgcaggcttaa

SEQ ID NO: 2648204 - DNA, 25 bp, Homo sapien
tttagtcagacatggtgggcaggag

SEQ ID NO: 2648205 - DNA, 25 bp, Homo sapien
agggagagacgtgggcacaaaggtc

SEQ ID NO: 2648206 - DNA, 25 bp, Homo sapien
ggagggagagacgtgggcacaaagg

SEQ ID NO: 2648207 - DNA, 25 bp, Homo sapien
gagggagagacgtgggcacaaaggt

SEQ ID NO: 2648208 - DNA, 25 bp, Homo sapien
tggagggagagacgtgggcacaaag

SEQ ID NO: 2648209 - DNA, 25 bp, Homo sapien
agcgaccataatggatgaataagcg

SEQ ID NO: 2648210 - DNA, 25 bp, Homo sapien
cataatggatgaataagcgcagcca

SEQ ID NO: 2648211 - DNA, 25 bp, Homo sapien
accataatggatgaataagcgcagc

SEQ ID NO: 2648212 - DNA, 25 bp, Homo sapien
tgacagagcgaccataatggatgaa

SEQ ID NO: 2648213 - DNA, 25 bp, Homo sapien
tgagggagtgggcatgtgagcacat

SEQ ID NO: 2648214 - DNA, 25 bp, Homo sapien
agggagtgggcatgtgagcacataa

SEQ ID NO: 2648215 - DNA, 25 bp, Homo sapien
gagtgggcatgtgagcacataatgg

SEQ ID NO: 2648216 - DNA, 25 bp, Homo sapien
tgggcatgtgagcacataatggcac

SEQ ID NO: 2648217 - DNA, 25 bp, Homo sapien
tggcccaaacaggaatgaggggcac

SEQ ID NO: 2648218 - DNA, 25 bp, Homo sapien
tggaacacaggtcttgcaggatcac

SEQ ID NO: 2648219 - DNA, 25 bp, Homo sapien
ccagtgatgtcgagtgtccgggtgt

SEQ ID NO: 2648220 - DNA, 25 bp, Homo sapien
acagaatcaccaggatggaacacag

SEQ ID NO: 2648221 - DNA, 25 bp, Homo sapien
ctgtgcagtgaaattgaagacagaa

SEQ ID NO: 2648222 - DNA, 25 bp, Homo sapien
tgtacctgccttgttttcacagcgg

SEQ ID NO: 2648223 - DNA, 25 bp, Homo sapien
acacgaaacattcttctgatgccgg

SEQ ID NO: 2648224 - DNA, 25 bp, Homo sapien
acctgccttgttttcacagcggtga

SEQ ID NO: 2648225 - DNA, 25 bp, Homo sapien
ctgtacctgccttgttttcacagcg

SEQ ID NO: 2648226 - DNA, 25 bp, Homo sapien
tatacacattgacaatgggtaaata

SEQ ID NO: 2648227 - DNA, 25 bp, Homo sapien
tacacattgacaatgggtaaataga

SEQ ID NO: 2648228 - DNA, 25 bp, Homo sapien
atttatacacattgacaatgggtaa

SEQ ID NO: 2648229 - DNA, 25 bp, Homo sapien
tttatacacattgacaatgggtaaa

SEQ ID NO: 2648230 - DNA, 25 bp, Homo sapien
aatgaacattcttcttccggtacat

SEQ ID NO: 2648231 - DNA, 25 bp, Homo sapien
taaattattgtttgatggataaaag

SEQ ID NO: 2648232 - DNA, 25 bp, Homo sapien
gttaaattattgtttgatggataaa

SEQ ID NO: 2648233 - DNA, 25 bp, Homo sapien
tgaacattcttcttccggtacattt

SEQ ID NO: 2648234 - DNA, 25 bp, Homo sapien
caaagatgtacagaggaaacaatgc

SEQ ID NO: 2648235 - DNA, 25 bp, Homo sapien
gcaaagatgtacagaggaaacaatg

SEQ ID NO: 2648236 - DNA, 25 bp, Homo sapien
tgattggtgatgtcttggatattct

SEQ ID NO: 2648237 - DNA, 25 bp, Homo sapien
tgttttggatgattggtgatgtctt

SEQ ID NO: 2648238 - DNA, 25 bp, Homo sapien
ttaactgtggcctcctacactgtgt

SEQ ID NO: 2648239 - DNA, 25 bp, Homo sapien
tggaactttgaatatacaacacttt

SEQ ID NO: 2648240 - DNA, 25 bp, Homo sapien
tactcatcctactatgcaataggac

SEQ ID NO: 2648241 - DNA, 25 bp, Homo sapien
ccagaacttattcctgggttctaca

SEQ ID NO: 2648242 - DNA, 25 bp, Homo sapien
gttttaatacatgtactcaatgtgt

SEQ ID NO: 2648243 - DNA, 25 bp, Homo sapien
tccgttaaggcaaccaaggattgga

SEQ ID NO: 2648244 - DNA, 25 bp, Homo sapien
gaagagatcaaagcctgtcttgcta

SEQ ID NO: 2648245 - DNA, 25 bp, Homo sapien
tgttgattctggcaagtgaaatcat

SEQ ID NO: 2648246 - DNA, 25 bp, Homo sapien
tgtcttgctattgttgattctggca

SEQ ID NO: 2648247 - DNA, 25 bp, Homo sapien
cgattgtttgcatatgaatcagact

SEQ ID NO: 2648248 - DNA, 25 bp, Homo sapien
cactcatgttacctgatggaaaatc

SEQ ID NO: 2648249 - DNA, 25 bp, Homo sapien
tcactcatgttacctgatggaaaat

SEQ ID NO: 2648250 - DNA, 25 bp, Homo sapien
ctcactcatgttacctgatggaaaa

SEQ ID NO: 2648251 - DNA, 25 bp, Homo sapien
tctcactcatgttacctgatggaaa

SEQ ID NO: 2648252 - DNA, 25 bp, Homo sapien
gaatattgtgctgtactgtccttag

SEQ ID NO: 2648253 - DNA, 25 bp, Homo sapien
ctctagagattaggttgagaaccac

SEQ ID NO: 2648254 - DNA, 25 bp, Homo sapien
tattaccatccccaaagtgtttgct

SEQ ID NO: 2648255 - DNA, 25 bp, Homo sapien
caaattttcaagtcgcatgccaaga

SEQ ID NO: 2648256 - DNA, 25 bp, Homo sapien
catttctaatagcatggccaagagt

SEQ ID NO: 2648257 - DNA, 25 bp, Homo sapien
gccaagagtatactccaagtaacaa

SEQ ID NO: 2648258 - DNA, 25 bp, Homo sapien
tcacccgtatctctatgatgcaaag

SEQ ID NO: 2648259 - DNA, 25 bp, Homo sapien
acaagtggtcgccaagctggactgc

SEQ ID NO: 2648260 - DNA, 25 bp, Homo sapien
ggataataggaactgatatgttact

SEQ ID NO: 2648261 - DNA, 25 bp, Homo sapien
tggataataggaactgatatgttac

SEQ ID NO: 2648262 - DNA, 25 bp, Homo sapien
ttaccccatgcaagaaatgacaaat

SEQ ID NO: 2648263 - DNA, 25 bp, Homo sapien
cttaccccatgcaagaaatgacaaa

SEQ ID NO: 2648264 - DNA, 25 bp, Homo sapien
gggacatacagagacctgaaaggac

SEQ ID NO: 2648265 - DNA, 25 bp, Homo sapien
gactatcagggacatacagagacct

SEQ ID NO: 2648266 - DNA, 25 bp, Homo sapien
tcagagactatcagggacatacaga

SEQ ID NO: 2648267 - DNA, 25 bp, Homo sapien
tacagagacctgaaaggacctggag

SEQ ID NO: 2648268 - DNA, 25 bp, Homo sapien
gtttataaatccagtgctagacagt

SEQ ID NO: 2648269 - DNA, 25 bp, Homo sapien
gcatggttaatgcagatcatgtgaa

SEQ ID NO: 2648270 - DNA, 25 bp, Homo sapien
caattcgatattgactactggatag

SEQ ID NO: 2648271 - DNA, 25 bp, Homo sapien
caaaacatgaactcttggtagaaaa

SEQ ID NO: 2648272 - DNA, 25 bp, Homo sapien
tcagctcttggatgccatgttctgc

SEQ ID NO: 2648273 - DNA, 25 bp, Homo sapien
ggatttacgatttgattgccttcac

SEQ ID NO: 2648274 - DNA, 25 bp, Homo sapien
cccactatcgcataaaacttgtgaa

SEQ ID NO: 2648275 - DNA, 25 bp, Homo sapien
ttcaagttaggcatccagagctgtc

SEQ ID NO: 2648276 - DNA, 25 bp, Homo sapien
taaggccaagaacaatatagaaaaa

SEQ ID NO: 2648277 - DNA, 25 bp, Homo sapien
ccgatgtctccttgaaattagctga

SEQ ID NO: 2648278 - DNA, 25 bp, Homo sapien
gccagaaaactaatgcttaatgtat

SEQ ID NO: 2648279 - DNA, 25 bp, Homo sapien
acaaaggcccttatatattcataca

SEQ ID NO: 2648280 - DNA, 25 bp, Homo sapien
cgccagatacttgaaagccttccaa

SEQ ID NO: 2648281 - DNA, 25 bp, Homo sapien
gttctagcacaaagaactacctgag

SEQ ID NO: 2648282 - DNA, 25 bp, Homo sapien
ttaggcaccaaagaagctgagggac

SEQ ID NO: 2648283 - DNA, 25 bp, Homo sapien
tacacatgctatggtggaccttagg

SEQ ID NO: 2648284 - DNA, 25 bp, Homo sapien
tgcagtgcgttttatcacaagaaca

SEQ ID NO: 2648285 - DNA, 25 bp, Homo sapien
caattaaactgtgttgtctctgcag

SEQ ID NO: 2648286 - DNA, 25 bp, Homo sapien
gacctttaagcacaagaacaccttg

SEQ ID NO: 2648287 - DNA, 25 bp, Homo sapien
tgcctcagccaattaaactgtgttg

SEQ ID NO: 2648288 - DNA, 25 bp, Homo sapien
tcagttcggataattaagctgtgta

SEQ ID NO: 2648289 - DNA, 25 bp, Homo sapien
gattcacagtatgcaacaatgatca

SEQ ID NO: 2648290 - DNA, 25 bp, Homo sapien
aatatagaaagtcgaaggtttctgg

SEQ ID NO: 2648291 - DNA, 25 bp, Homo sapien
cagtatgcaacaatgatcatattac

SEQ ID NO: 2648292 - DNA, 25 bp, Homo sapien
gcgcgctgccgcactcctcagccgt

SEQ ID NO: 2648293 - DNA, 25 bp, Homo sapien
tcagccgttgggcggttgacgggac

SEQ ID NO: 2648294 - DNA, 25 bp, Homo sapien
cagctagacgtagtaagttctccaa

SEQ ID NO: 2648295 - DNA, 25 bp, Homo sapien
ggctttgcctagtgcatcccggccg

SEQ ID NO: 2648296 - DNA, 25 bp, Homo sapien
caaatctgcatatgcactatctgtg

SEQ ID NO: 2648297 - DNA, 25 bp, Homo sapien
gagcatgggctgaataactacctac

SEQ ID NO: 2648298 - DNA, 25 bp, Homo sapien
cactgtacaaaagtaacaaatctgc

SEQ ID NO: 2648299 - DNA, 25 bp, Homo sapien
gactttatttgatggactggattag

SEQ ID NO: 2648300 - DNA, 25 bp, Homo sapien
taaaaagggcaaagctaatacagga

SEQ ID NO: 2648301 - DNA, 25 bp, Homo sapien
acacacactataattttctgtaggg

SEQ ID NO: 2648302 - DNA, 25 bp, Homo sapien
tatttttctcgacattggccttggc

SEQ ID NO: 2648303 - DNA, 25 bp, Homo sapien
atgtaacaaaactgcgcttcctgca

SEQ ID NO: 2648304 - DNA, 25 bp, Homo sapien
cagagaggcgtcatactacccaatt

SEQ ID NO: 2648305 - DNA, 25 bp, Homo sapien
cattccatgtttacagattaaaaga

SEQ ID NO: 2648306 - DNA, 25 bp, Homo sapien
ggctatctccatgaaactaccaaca

SEQ ID NO: 2648307 - DNA, 25 bp, Homo sapien
ataaagccagagaggcgtcatacta

SEQ ID NO: 2648308 - DNA, 25 bp, Homo sapien
ctaccctgacggcttgaggccagga

SEQ ID NO: 2648309 - DNA, 25 bp, Homo sapien
tcctaactaccctgacggcttgagg

SEQ ID NO: 2648310 - DNA, 25 bp, Homo sapien
taactaccctgacggcttgaggcca

SEQ ID NO: 2648311 - DNA, 25 bp, Homo sapien
tgtagtcctaactaccctgacggct

SEQ ID NO: 2648312 - DNA, 25 bp, Homo sapien
ctggcccaaaataaggggatggaga

SEQ ID NO: 2648313 - DNA, 25 bp, Homo sapien
actggcccaaaataaggggatggag

SEQ ID NO: 2648314 - DNA, 25 bp, Homo sapien
catctgcagtcttcaagagactcac

SEQ ID NO: 2648315 - DNA, 25 bp, Homo sapien
taattttcacatgtaacaccctcct

SEQ ID NO: 2648316 - DNA, 25 bp, Homo sapien
aagctattaatctattttggtctca

SEQ ID NO: 2648317 - DNA, 25 bp, Homo sapien
agaggttacataaaggtaagcggag

SEQ ID NO: 2648318 - DNA, 25 bp, Homo sapien
tgttgttttcaaggaagaggttaca

SEQ ID NO: 2648319 - DNA, 25 bp, Homo sapien
aaagcattgctcctttatgtccgca

SEQ ID NO: 2648320 - DNA, 25 bp, Homo sapien
taggtgctgttatggcagacccaac

SEQ ID NO: 2648321 - DNA, 25 bp, Homo sapien
gcttctcttgctcacgtgcctgtag

SEQ ID NO: 2648322 - DNA, 25 bp, Homo sapien
tagaattggccgttccagtcaagca

SEQ ID NO: 2648323 - DNA, 25 bp, Homo sapien
tgaatagcttaaaccaagtagaagg

SEQ ID NO: 2648324 - DNA, 25 bp, Homo sapien
ggctaaagacgcatctttcctgcaa

SEQ ID NO: 2648325 - DNA, 25 bp, Homo sapien
taaagttttgcccagttactgccta

SEQ ID NO: 2648326 - DNA, 25 bp, Homo sapien
tatctagagagtacactgaatagct

SEQ ID NO: 2648327 - DNA, 25 bp, Homo sapien
taaaatcatgttagttcaggtcatc

SEQ ID NO: 2648328 - DNA, 25 bp, Homo sapien
tatatttcagggagttccactggta

SEQ ID NO: 2648329 - DNA, 25 bp, Homo sapien
caatcagctactcactttgaaagac

SEQ ID NO: 2648330 - DNA, 25 bp, Homo sapien
gtactttcttggcacagggtttcaa

SEQ ID NO: 2648331 - DNA, 25 bp, Homo sapien
tcttgagagaatactgagtaaccaa

SEQ ID NO: 2648332 - DNA, 25 bp, Homo sapien
aattttcttgagagaatactgagta

SEQ ID NO: 2648333 - DNA, 25 bp, Homo sapien
ttttcttgagagaatactgagtaac

SEQ ID NO: 2648334 - DNA, 25 bp, Homo sapien
tgagagaatactgagtaaccaaaag

SEQ ID NO: 2648335 - DNA, 25 bp, Homo sapien
catgaaaagattgctagtagaatta

SEQ ID NO: 2648336 - DNA, 25 bp, Homo sapien
taaagagaatctgcactaacattgt

SEQ ID NO: 2648337 - DNA, 25 bp, Homo sapien
ttactataggtaaaacaatcaggga

SEQ ID NO: 2648338 - DNA, 25 bp, Homo sapien
caaagatgtgcttccaaatgccaaa

SEQ ID NO: 2648339 - DNA, 25 bp, Homo sapien
gaaacatctcctcatggagcttgag

SEQ ID NO: 2648340 - DNA, 25 bp, Homo sapien
acaatgaaacatctcctcatggagc

SEQ ID NO: 2648341 - DNA, 25 bp, Homo sapien
cgacaatgaaacatctcctcatgga

SEQ ID NO: 2648342 - DNA, 25 bp, Homo sapien
aacatctcctcatggagcttgagtt

SEQ ID NO: 2648343 - DNA, 25 bp, Homo sapien
gattattctagggaaagccttctga

SEQ ID NO: 2648344 - DNA, 25 bp, Homo sapien
cctgtccccatgcagtgaatgagta

SEQ ID NO: 2648345 - DNA, 25 bp, Homo sapien
tgtgtgaccttcatgtcccatctgc

SEQ ID NO: 2648346 - DNA, 25 bp, Homo sapien
tattatgcaggatcaagtaacactc

SEQ ID NO: 2648347 - DNA, 25 bp, Homo sapien
aatagtctaaggctggttttacagg

SEQ ID NO: 2648348 - DNA, 25 bp, Homo sapien
cattgtgtggagtgcaggccatcat

SEQ ID NO: 2648349 - DNA, 25 bp, Homo sapien
ttcttaggaagcttcaggactacac

SEQ ID NO: 2648350 - DNA, 25 bp, Homo sapien
gaagcttcaggactacaccaaagaa

SEQ ID NO: 2648351 - DNA, 25 bp, Homo sapien
taaacctatggaatgttaacaggca

SEQ ID NO: 2648352 - DNA, 25 bp, Homo sapien
gcagataaagatcaaaacgtcacct

SEQ ID NO: 2648353 - DNA, 25 bp, Homo sapien
tagcctatgacctcaacatgttcag

SEQ ID NO: 2648354 - DNA, 25 bp, Homo sapien
taagtctctatggttagcatcagaa

SEQ ID NO: 2648355 - DNA, 25 bp, Homo sapien
tgttagtgaaaatgagaccacgaac

SEQ ID NO: 2648356 - DNA, 25 bp, Homo sapien
tattgtgcgcagctaaagttgggat

SEQ ID NO: 2648357 - DNA, 25 bp, Homo sapien
caaggtgatttcatgcttctagcca

SEQ ID NO: 2648358 - DNA, 25 bp, Homo sapien
tataggaagcctgcataataagcat

SEQ ID NO: 2648359 - DNA, 25 bp, Homo sapien
tccaagtctttgctgcccaaggtaa

SEQ ID NO: 2648360 - DNA, 25 bp, Homo sapien
aatgaactgctaggatcttagatga

SEQ ID NO: 2648361 - DNA, 25 bp, Homo sapien
gaactgctaggatcttagatgagtt

SEQ ID NO: 2648362 - DNA, 25 bp, Homo sapien
tgaactgctaggatcttagatgagt

SEQ ID NO: 2648363 - DNA, 25 bp, Homo sapien
actgctaggatcttagatgagttta

SEQ ID NO: 2648364 - DNA, 25 bp, Homo sapien
tgagtgtgaactatatagctgtccc

SEQ ID NO: 2648365 - DNA, 25 bp, Homo sapien
aaggagacaggcctacttatatgcc

SEQ ID NO: 2648366 - DNA, 25 bp, Homo sapien
tagctgtccctaaaacataattgag

SEQ ID NO: 2648367 - DNA, 25 bp, Homo sapien
tattgccgttggatagaagacagac

SEQ ID NO: 2648368 - DNA, 25 bp, Homo sapien
gtgggcctgatcagataaaaccttt

SEQ ID NO: 2648369 - DNA, 25 bp, Homo sapien
tgatgggcacctaaatgtcaccttt

SEQ ID NO: 2648370 - DNA, 25 bp, Homo sapien
gatacagtacttaaagccctgacct

SEQ ID NO: 2648371 - DNA, 25 bp, Homo sapien
tccagaagccacctagggagtgtgc

SEQ ID NO: 2648372 - DNA, 25 bp, Homo sapien
cagagacttggaaatttcaggaggg

SEQ ID NO: 2648373 - DNA, 25 bp, Homo sapien
cttacttcaacactacgtactttat

SEQ ID NO: 2648374 - DNA, 25 bp, Homo sapien
ggtgatgtatattctaaaaccctta

SEQ ID NO: 2648375 - DNA, 25 bp, Homo sapien
tggaatgatagacaacagagacttg

SEQ ID NO: 2648376 - DNA, 25 bp, Homo sapien
aaaactcttctaggtggtgatgcta

SEQ ID NO: 2648377 - DNA, 25 bp, Homo sapien
aatgttgggcttgttacctgtctca

SEQ ID NO: 2648378 - DNA, 25 bp, Homo sapien
taccacagtacctgctacatagatg

SEQ ID NO: 2648379 - DNA, 25 bp, Homo sapien
tgatgctaagctccgtaatgttggg

SEQ ID NO: 2648380 - DNA, 25 bp, Homo sapien
tattatgaacagcagtttgagccat

SEQ ID NO: 2648381 - DNA, 25 bp, Homo sapien
acccacgttttagcatttagccttg

SEQ ID NO: 2648382 - DNA, 25 bp, Homo sapien
aaattagcctcctgtttcgcattgg

SEQ ID NO: 2648383 - DNA, 25 bp, Homo sapien
ccttgggatgacttataaacacttc

SEQ ID NO: 2648384 - DNA, 25 bp, Homo sapien
taacagtatgctgtcacaggtgcca

SEQ ID NO: 2648385 - DNA, 25 bp, Homo sapien
cagagatggcatggtaaagtacgat

SEQ ID NO: 2648386 - DNA, 25 bp, Homo sapien
taaaaatgactattcaagtgaactc

SEQ ID NO: 2648387 - DNA, 25 bp, Homo sapien
ttaatggagttttgacggtcaatca

SEQ ID NO: 2648388 - DNA, 25 bp, Homo sapien
gctagtggctaatgtattgaacact

SEQ ID NO: 2648389 - DNA, 25 bp, Homo sapien
atgtattgaacactacagctgtaga

SEQ ID NO: 2648390 - DNA, 25 bp, Homo sapien
tgtattgaacactacagctgtagac

SEQ ID NO: 2648391 - DNA, 25 bp, Homo sapien
tactgccaccctactatcgggtaga

SEQ ID NO: 2648392 - DNA, 25 bp, Homo sapien
ccttggttgccttaacggatgtaga

SEQ ID NO: 2648393 - DNA, 25 bp, Homo sapien
taatatgtcagcctattaccatctg

SEQ ID NO: 2648394 - DNA, 25 bp, Homo sapien
catctgctacagactgcatgtttgt

SEQ ID NO: 2648395 - DNA, 25 bp, Homo sapien
gcatccttcagcttttaataatctg

SEQ ID NO: 2648396 - DNA, 25 bp, Homo sapien
gaaaaattctatttacccattgtca

SEQ ID NO: 2648397 - DNA, 25 bp, Homo sapien
ttacgtgggcatccttcagctttta

SEQ ID NO: 2648398 - DNA, 25 bp, Homo sapien
aaaattctatttacccattgtcaat

SEQ ID NO: 2648399 - DNA, 25 bp, Homo sapien
cccgtgtctgggaagaagcacagac

SEQ ID NO: 2648400 - DNA, 25 bp, Homo sapien
agcccaggacacctcgctgattcct

SEQ ID NO: 2648401 - DNA, 25 bp, Homo sapien
tcctctacagctcccgtgtctggga

SEQ ID NO: 2648402 - DNA, 25 bp, Homo sapien
tgctgcagaggtctcctctacagct

SEQ ID NO: 2648403 - DNA, 25 bp, Homo sapien
gctcccacagctctacggaaggcct

SEQ ID NO: 2648404 - DNA, 25 bp, Homo sapien
tccagctcccacagctctacggaag

SEQ ID NO: 2648405 - DNA, 25 bp, Homo sapien
agctcccacagctctacggaaggcc

SEQ ID NO: 2648406 - DNA, 25 bp, Homo sapien
cagctcccacagctctacggaaggc

SEQ ID NO: 2648407 - DNA, 25 bp, Homo sapien
agggatgccggcatgagaagaacaa

SEQ ID NO: 2648408 - DNA, 25 bp, Homo sapien
cagggatgccggcatgagaagaaca

SEQ ID NO: 2648409 - DNA, 25 bp, Homo sapien
tccacgggaggcttgccggggctaa

SEQ ID NO: 2648410 - DNA, 25 bp, Homo sapien
tagacgcaagattcccctgctgcca

SEQ ID NO: 2648411 - DNA, 25 bp, Homo sapien
ctaggccccgtagacgcaagattcc

SEQ ID NO: 2648412 - DNA, 25 bp, Homo sapien
tcgggtcacacacggtgtgaaaagg

SEQ ID NO: 2648413 - DNA, 25 bp, Homo sapien
tgtcactggtgccattatgtgctca

SEQ ID NO: 2648414 - DNA, 25 bp, Homo sapien
gcccctcattcctgtttgggccaag

SEQ ID NO: 2648415 - DNA, 25 bp, Homo sapien
ctgtttgggccaaggccgaggacct

SEQ ID NO: 2648416 - DNA, 25 bp, Homo sapien
ccttgcgcgggtacctggctgcgct

SEQ ID NO: 2648417 - DNA, 25 bp, Homo sapien
tagctctttcgctttggccaatttc

SEQ ID NO: 2648418 - DNA, 25 bp, Homo sapien
tccaagcctttcaggttctaggtgg

SEQ ID NO: 2648419 - DNA, 25 bp, Homo sapien
aagaattaacgttcatgaacctccg

SEQ ID NO: 2648420 - DNA, 25 bp, Homo sapien
gaattaacgttcatgaacctccgcc

SEQ ID NO: 2648421 - DNA, 25 bp, Homo sapien
tctgatcctgtctaagatctgaagc

SEQ ID NO: 2648422 - DNA, 25 bp, Homo sapien
tcctctatgcaacctagcaatcaag

SEQ ID NO: 2648423 - DNA, 25 bp, Homo sapien
ggctattcacaagaacgatcatcgc

SEQ ID NO: 2648424 - DNA, 25 bp, Homo sapien
tctgaagccagatattaaggtactt

SEQ ID NO: 2648425 - DNA, 25 bp, Homo sapien
tttgtatgctggtaactaattttaa

SEQ ID NO: 2648426 - DNA, 25 bp, Homo sapien
tttatgtagatttctgctattcttg

SEQ ID NO: 2648427 - DNA, 25 bp, Homo sapien
aattaattatatttgcatctgggaa

SEQ ID NO: 2648428 - DNA, 25 bp, Homo sapien
ggaaatagagaaagtacatataagc

SEQ ID NO: 2648429 - DNA, 25 bp, Homo sapien
aaagattttataacagtatcctatg

SEQ ID NO: 2648430 - DNA, 25 bp, Homo sapien
aattactaattactcctgaaatcag

SEQ ID NO: 2648431 - DNA, 25 bp, Homo sapien
tactttcaagtaatagtagttgaat

SEQ ID NO: 2648432 - DNA, 25 bp, Homo sapien
acaccctattcattgaattttccag

SEQ ID NO: 2648433 - DNA, 25 bp, Homo sapien
tgctgcgatcctgactcgctgcaac

SEQ ID NO: 2648434 - DNA, 25 bp, Homo sapien
tgtagtgctgcgatcctgactcgct

SEQ ID NO: 2648435 - DNA, 25 bp, Homo sapien
tagtgctgcgatcctgactcgctgc

SEQ ID NO: 2648436 - DNA, 25 bp, Homo sapien
agtctcccaatagattagatatatt

SEQ ID NO: 2648437 - DNA, 25 bp, Homo sapien
ctgcctcagcctctggaatagctgg

SEQ ID NO: 2648438 - DNA, 25 bp, Homo sapien
atgatctggactcactgaaacctct

SEQ ID NO: 2648439 - DNA, 25 bp, Homo sapien
tgcctcccaggttcaagtgattctc

SEQ ID NO: 2648440 - DNA, 25 bp, Homo sapien
gccaccgtgcccggccctgaaccaa

SEQ ID NO: 2648441 - DNA, 25 bp, Homo sapien
ggaggcaagagagaccagggcttag

SEQ ID NO: 2648442 - DNA, 25 bp, Homo sapien
caagagagaccagggcttagggagg

SEQ ID NO: 2648443 - DNA, 25 bp, Homo sapien
gagagaccagggcttagggagggac

SEQ ID NO: 2648444 - DNA, 25 bp, Homo sapien
ggcaagagagaccagggcttaggga

SEQ ID NO: 2648445 - DNA, 25 bp, Homo sapien
aactggttactgcacttgacggaga

SEQ ID NO: 2648446 - DNA, 25 bp, Homo sapien
gtcccagcctggttgtccacgactt

SEQ ID NO: 2648447 - DNA, 25 bp, Homo sapien
tggttactgcacttgacggagatct

SEQ ID NO: 2648448 - DNA, 25 bp, Homo sapien
gtccacgactttgttttctgcattc

SEQ ID NO: 2648449 - DNA, 25 bp, Homo sapien
ggaggcggggtgttcgtgcatcagg

SEQ ID NO: 2648450 - DNA, 25 bp, Homo sapien
ctcccacgagtacagggaggcgggg

SEQ ID NO: 2648451 - DNA, 25 bp, Homo sapien
acggccaccagaggttggcacccag

SEQ ID NO: 2648452 - DNA, 25 bp, Homo sapien
tcaggtacggccaccagaggttggc

SEQ ID NO: 2648453 - DNA, 25 bp, Homo sapien
tgcccgttcacctgtcctgggctcc

SEQ ID NO: 2648454 - DNA, 25 bp, Homo sapien
gcaaaagacctcccttacgcaagtc

SEQ ID NO: 2648455 - DNA, 25 bp, Homo sapien
ttacgcaagtcccaaaccaccatta

SEQ ID NO: 2648456 - DNA, 25 bp, Homo sapien
ctgctgaagccagggctaccagatg

SEQ ID NO: 2648457 - DNA, 25 bp, Homo sapien
gggcacagtgcggagccccacaggg

SEQ ID NO: 2648458 - DNA, 25 bp, Homo sapien
acgacagccaaagcgccaggtgtga

SEQ ID NO: 2648459 - DNA, 25 bp, Homo sapien
agccgcacctacgacagccaaagcg

SEQ ID NO: 2648460 - DNA, 25 bp, Homo sapien
tggctctcggtgacgggcacagtgc

SEQ ID NO: 2648461 - DNA, 25 bp, Homo sapien
aggtcactggactgaacactgccag

SEQ ID NO: 2648462 - DNA, 25 bp, Homo sapien
gaggcgtagccaccctgccgggtac

SEQ ID NO: 2648463 - DNA, 25 bp, Homo sapien
accctgccgggtacacagagctgag

SEQ ID NO: 2648464 - DNA, 25 bp, Homo sapien
actgccagaaatgaggttcacttcc

SEQ ID NO: 2648465 - DNA, 25 bp, Homo sapien
cccttgtctgctgcgtaggtggagt

SEQ ID NO: 2648466 - DNA, 25 bp, Homo sapien
ccccttgtctgctgcgtaggtggag

SEQ ID NO: 2648467 - DNA, 25 bp, Homo sapien
cagctgttcccatgagcaggcttca

SEQ ID NO: 2648468 - DNA, 25 bp, Homo sapien
ccatgagcaggcttcaggacaagcc

SEQ ID NO: 2648469 - DNA, 25 bp, Homo sapien
cagactggcagcacatggttctttc

SEQ ID NO: 2648470 - DNA, 25 bp, Homo sapien
gaccctgtctctatctttctaagta

SEQ ID NO: 2648471 - DNA, 25 bp, Homo sapien
gagtagtagctgttcacacggatca

SEQ ID NO: 2648472 - DNA, 25 bp, Homo sapien
tagttgcgataccaagagtagtagc

SEQ ID NO: 2648473 - DNA, 25 bp, Homo sapien
gaatcaactccaggtgcccgtagtt

SEQ ID NO: 2648474 - DNA, 25 bp, Homo sapien
ccaattctcaaactgggcggccagc

SEQ ID NO: 2648475 - DNA, 25 bp, Homo sapien
gaataatgggattgtgatgtcttac

SEQ ID NO: 2648476 - DNA, 25 bp, Homo sapien
aataatgggattgtgatgtcttaca

SEQ ID NO: 2648477 - DNA, 25 bp, Homo sapien
ctggtgaagccttacaagcgtttcc

SEQ ID NO: 2648478 - DNA, 25 bp, Homo sapien
tgaagccttacaagcgtttccactc

SEQ ID NO: 2648479 - DNA, 25 bp, Homo sapien
gaagccttacaagcgtttccactcc

SEQ ID NO: 2648480 - DNA, 25 bp, Homo sapien
ggtgaagccttacaagcgtttccac

SEQ ID NO: 2648481 - DNA, 25 bp, Homo sapien
acagggtagcgggaggtgagcccaa

SEQ ID NO: 2648482 - DNA, 25 bp, Homo sapien
aacgtggacagggtagcgggaggtg

SEQ ID NO: 2648483 - DNA, 25 bp, Homo sapien
gtggacagggtagcgggaggtgagc

SEQ ID NO: 2648484 - DNA, 25 bp, Homo sapien
agggtagcgggaggtgagcccaaag

SEQ ID NO: 2648485 - DNA, 25 bp, Homo sapien
ctgtctggaaacaaggccagtaagg

SEQ ID NO: 2648486 - DNA, 25 bp, Homo sapien
aggctgtctggaaacaaggccagta

SEQ ID NO: 2648487 - DNA, 25 bp, Homo sapien
ggctgtctggaaacaaggccagtaa

SEQ ID NO: 2648488 - DNA, 25 bp, Homo sapien
cagtggaaacagatcagtggccagg

SEQ ID NO: 2648489 - DNA, 25 bp, Homo sapien
ggcagaaagaatagctcaagcaaga

SEQ ID NO: 2648490 - DNA, 25 bp, Homo sapien
taggactttgtcctatgggcctggg

SEQ ID NO: 2648491 - DNA, 25 bp, Homo sapien
tcttttagttggtgattatggtgcc

SEQ ID NO: 2648492 - DNA, 25 bp, Homo sapien
tctgtaagcacgataaatttaaggg

SEQ ID NO: 2648493 - DNA, 25 bp, Homo sapien
cagaacagtgcagtccattgtgggt

SEQ ID NO: 2648494 - DNA, 25 bp, Homo sapien
tggctgttccctgtgtgtcaacggg

SEQ ID NO: 2648495 - DNA, 25 bp, Homo sapien
gcaacatatctttggtgagaaggac

SEQ ID NO: 2648496 - DNA, 25 bp, Homo sapien
ataaagatccacttgatggtgacca

SEQ ID NO: 2648497 - DNA, 25 bp, Homo sapien
ttgatggtgaccaaaatatctgtcc

SEQ ID NO: 2648498 - DNA, 25 bp, Homo sapien
aataaagatccacttgatggtgacc

SEQ ID NO: 2648499 - DNA, 25 bp, Homo sapien
agcagacttttccggtcctcttcac

SEQ ID NO: 2648500 - DNA, 25 bp, Homo sapien
tctagcagacttttccggtcctctt

SEQ ID NO: 2648501 - DNA, 25 bp, Homo sapien
gacttttccggtcctcttcactgaa

SEQ ID NO: 2648502 - DNA, 25 bp, Homo sapien
tttccggtcctcttcactgaacatc

SEQ ID NO: 2648503 - DNA, 25 bp, Homo sapien
cgggtacattatcccatgcgctaaa

SEQ ID NO: 2648504 - DNA, 25 bp, Homo sapien
ggtacattatcccatgcgctaaact

SEQ ID NO: 2648505 - DNA, 25 bp, Homo sapien
acgggtacattatcccatgcgctaa

SEQ ID NO: 2648506 - DNA, 25 bp, Homo sapien
tacattatcccatgcgctaaactgc

SEQ ID NO: 2648507 - DNA, 25 bp, Homo sapien
caatattcttacagccaaaatgtcc

SEQ ID NO: 2648508 - DNA, 25 bp, Homo sapien
tccaatattcttacagccaaaatgt

SEQ ID NO: 2648509 - DNA, 25 bp, Homo sapien
tcttacagccaaaatgtccagaatg

SEQ ID NO: 2648510 - DNA, 25 bp, Homo sapien
tattcttacagccaaaatgtccaga

SEQ ID NO: 2648511 - DNA, 25 bp, Homo sapien
cctaggaaattctcaacacaaccta

SEQ ID NO: 2648512 - DNA, 25 bp, Homo sapien
aaattctcaacacaacctacatgga

SEQ ID NO: 2648513 - DNA, 25 bp, Homo sapien
ggaaattctcaacacaacctacatg

SEQ ID NO: 2648514 - DNA, 25 bp, Homo sapien
cttttcctaggaaattctcaacaca

SEQ ID NO: 2648515 - DNA, 25 bp, Homo sapien
tccataatgaggtccagtttttcct

SEQ ID NO: 2648516 - DNA, 25 bp, Homo sapien
cttaagcttctcagccttttaccct

SEQ ID NO: 2648517 - DNA, 25 bp, Homo sapien
gtgtatcccaaaagtaaatccataa

SEQ ID NO: 2648518 - DNA, 25 bp, Homo sapien
tttaccctcctctggaataatgagt

SEQ ID NO: 2648519 - DNA, 25 bp, Homo sapien
gcgttgaaactcacctgtattcgat

SEQ ID NO: 2648520 - DNA, 25 bp, Homo sapien
ctgccatattcaagacgcgttgaaa

SEQ ID NO: 2648521 - DNA, 25 bp, Homo sapien
ccatgcctggtctgaagacttttaa

SEQ ID NO: 2648522 - DNA, 25 bp, Homo sapien
gatgggggtcctgctatgctgaaca

SEQ ID NO: 2648523 - DNA, 25 bp, Homo sapien
tgctcaccaccatacagggatgttt

SEQ ID NO: 2648524 - DNA, 25 bp, Homo sapien
caggtgccacgcagagaagagttgc

SEQ ID NO: 2648525 - DNA, 25 bp, Homo sapien
cataaagctttgcacctctccacaa

SEQ ID NO: 2648526 - DNA, 25 bp, Homo sapien
ccatcctgagtttatggaaagtcca

SEQ ID NO: 2648527 - DNA, 25 bp, Homo sapien
gctctctcacagaattatagcaagt

SEQ ID NO: 2648528 - DNA, 25 bp, Homo sapien
atttcttcatatattaccattgaca

SEQ ID NO: 2648529 - DNA, 25 bp, Homo sapien
tggctttgccgtggcaaattaaata

SEQ ID NO: 2648530 - DNA, 25 bp, Homo sapien
catatattatccattcttcacagca

SEQ ID NO: 2648531 - DNA, 25 bp, Homo sapien
tgtaagacaagtcctgtggtaaaaa

SEQ ID NO: 2648532 - DNA, 25 bp, Homo sapien
aaagtgtaagacaagtcctgtggta

SEQ ID NO: 2648533 - DNA, 25 bp, Homo sapien
ctaagagaaaagtgtaagacaagtc

SEQ ID NO: 2648534 - DNA, 25 bp, Homo sapien
taagagaaaagtgtaagacaagtcc

SEQ ID NO: 2648535 - DNA, 25 bp, Homo sapien
taaccgatatgtactgccataaaca

SEQ ID NO: 2648536 - DNA, 25 bp, Homo sapien
cataaccgatatgtactgccataaa

SEQ ID NO: 2648537 - DNA, 25 bp, Homo sapien
aatcataaccgatatgtactgccat

SEQ ID NO: 2648538 - DNA, 25 bp, Homo sapien
ccgatatgtactgccataaacaaga

SEQ ID NO: 2648539 - DNA, 25 bp, Homo sapien
gaaagactcagtgctaatctctaca

SEQ ID NO: 2648540 - DNA, 25 bp, Homo sapien
gaagaagcaagaataggctcaggga

SEQ ID NO: 2648541 - DNA, 25 bp, Homo sapien
gctacagacgctattttttggttca

SEQ ID NO: 2648542 - DNA, 25 bp, Homo sapien
tttggttcaacatgacctgagcagt

SEQ ID NO: 2648543 - DNA, 25 bp, Homo sapien
caatatgagctatgtaggaagtcca

SEQ ID NO: 2648544 - DNA, 25 bp, Homo sapien
taatcctatcgcctcaataatgcat

SEQ ID NO: 2648545 - DNA, 25 bp, Homo sapien
tgtatgacttacctatagaaaaccc

SEQ ID NO: 2648546 - DNA, 25 bp, Homo sapien
taattttaagccatatgcagcccta

SEQ ID NO: 2648547 - DNA, 25 bp, Homo sapien
ctcttaagagtccagtcctaaatca

SEQ ID NO: 2648548 - DNA, 25 bp, Homo sapien
gaataggtagcgataaaacactggc

SEQ ID NO: 2648549 - DNA, 25 bp, Homo sapien
gatatctgttatatggctgaactga

SEQ ID NO: 2648550 - DNA, 25 bp, Homo sapien
tcatattcattctaacagaggacat

SEQ ID NO: 2648551 - DNA, 25 bp, Homo sapien
ctagacaaaagtgagctacggatca

SEQ ID NO: 2648552 - DNA, 25 bp, Homo sapien
gtgcacctaccccaacacactctct

SEQ ID NO: 2648553 - DNA, 25 bp, Homo sapien
tgttgctagacaaaagtgagctacg

SEQ ID NO: 2648554 - DNA, 25 bp, Homo sapien
ttgctagacaaaagtgagctacgga

SEQ ID NO: 2648555 - DNA, 25 bp, Homo sapien
aaaggactattaactcacaaacagg

SEQ ID NO: 2648556 - DNA, 25 bp, Homo sapien
tagttggttgaaggcagaatgccca

SEQ ID NO: 2648557 - DNA, 25 bp, Homo sapien
gacttcgaggatgaagagtcactca

SEQ ID NO: 2648558 - DNA, 25 bp, Homo sapien
gaaacagccatctgcaaagacctca

SEQ ID NO: 2648559 - DNA, 25 bp, Homo sapien
caggttatgttgtcacccgggtatt

SEQ ID NO: 2648560 - DNA, 25 bp, Homo sapien
gtttaagttcagcagtacacgtgca

SEQ ID NO: 2648561 - DNA, 25 bp, Homo sapien
gttgtacaggttatgttgtcacccg

SEQ ID NO: 2648562 - DNA, 25 bp, Homo sapien
attacgtgtgtgaaacactgcacct

SEQ ID NO: 2648563 - DNA, 25 bp, Homo sapien
ggcttccagtagattgagactttta

SEQ ID NO: 2648564 - DNA, 25 bp, Homo sapien
cacgccctgatgatagacacgtttt

SEQ ID NO: 2648565 - DNA, 25 bp, Homo sapien
gacttttatttctagctgagctgct

SEQ ID NO: 2648566 - DNA, 25 bp, Homo sapien
tgatcatgattgtgtctgtggagac

SEQ ID NO: 2648567 - DNA, 25 bp, Homo sapien
tccttgcctacagaactatcagaaa

SEQ ID NO: 2648568 - DNA, 25 bp, Homo sapien
taaactaatgctatctgagagtgca

SEQ ID NO: 2648569 - DNA, 25 bp, Homo sapien
tgtaaggttgcaacagccctctcaa

SEQ ID NO: 2648570 - DNA, 25 bp, Homo sapien
agaaggccctcattacatgctggta

SEQ ID NO: 2648571 - DNA, 25 bp, Homo sapien
tgtgctcgcaagatttacgcttctg

SEQ ID NO: 2648572 - DNA, 25 bp, Homo sapien
cacactgactgaaaataagatcaag

SEQ ID NO: 2648573 - DNA, 25 bp, Homo sapien
tgagattactgctcttggtataata

SEQ ID NO: 2648574 - DNA, 25 bp, Homo sapien
tgttcatcttccatacagaacacac

SEQ ID NO: 2648575 - DNA, 25 bp, Homo sapien
tccatagagcccagatcgagttcct

SEQ ID NO: 2648576 - DNA, 25 bp, Homo sapien
gagttcctaagttctcactaaggca

SEQ ID NO: 2648577 - DNA, 25 bp, Homo sapien
gacattttcagcatggaacattcta

SEQ ID NO: 2648578 - DNA, 25 bp, Homo sapien
cactaaggcacatgggtctaattcc

SEQ ID NO: 2648579 - DNA, 25 bp, Homo sapien
gaaattttgtgagaatgaactgtac

SEQ ID NO: 2648580 - DNA, 25 bp, Homo sapien
tgagaatgaactgtaccgtgaagct

SEQ ID NO: 2648581 - DNA, 25 bp, Homo sapien
caccattgtattttgagagttcatg

SEQ ID NO: 2648582 - DNA, 25 bp, Homo sapien
ccgtgaagctcacctgcatctgatt

SEQ ID NO: 2648583 - DNA, 25 bp, Homo sapien
ggagttgtctcactatcaaaggaac

SEQ ID NO: 2648584 - DNA, 25 bp, Homo sapien
tgaaactgccattagaggactatgc

SEQ ID NO: 2648585 - DNA, 25 bp, Homo sapien
tcattgtttatggatgggcccaaaa

SEQ ID NO: 2648586 - DNA, 25 bp, Homo sapien
tatcaaggatcacatgggtcagcac

SEQ ID NO: 2648587 - DNA, 25 bp, Homo sapien
tgttactgtttatcatgagtacgca

SEQ ID NO: 2648588 - DNA, 25 bp, Homo sapien
tcatgagtacgcacaaaaaaccact

SEQ ID NO: 2648589 - DNA, 25 bp, Homo sapien
taaaaactgcgaaagcatgtccaaa

SEQ ID NO: 2648590 - DNA, 25 bp, Homo sapien
tgaataggtattcaggttttcagag

SEQ ID NO: 2648591 - DNA, 25 bp, Homo sapien
cattgtccaaatgtacacgtaagat

SEQ ID NO: 2648592 - DNA, 25 bp, Homo sapien
gaaacagagatagagacattgtcca

SEQ ID NO: 2648593 - DNA, 25 bp, Homo sapien
tcagatttatactacatgaagcaac

SEQ ID NO: 2648594 - DNA, 25 bp, Homo sapien
tgagtttttggaacaagcttaactg

SEQ ID NO: 2648595 - DNA, 25 bp, Homo sapien
cacataggtgaaaatcaagagcttc

SEQ ID NO: 2648596 - DNA, 25 bp, Homo sapien
taggacgtcgacattttagtaagcc

SEQ ID NO: 2648597 - DNA, 25 bp, Homo sapien
tctgagttaaaatggagagtcttcc

SEQ ID NO: 2648598 - DNA, 25 bp, Homo sapien
ccacagtggccttgaatagaaatcc

SEQ ID NO: 2648599 - DNA, 25 bp, Homo sapien
gatgtcctatatgttaattttgcac

SEQ ID NO: 2648600 - DNA, 25 bp, Homo sapien
taatttttgagtaagatgtcctata

SEQ ID NO: 2648601 - DNA, 25 bp, Homo sapien
gatagatttatgtgatctgctcatt

SEQ ID NO: 2648602 - DNA, 25 bp, Homo sapien
aattctttggtgtcattcgtgtcaa

SEQ ID NO: 2648603 - DNA, 25 bp, Homo sapien
gagtaggggccaactcataccactt

SEQ ID NO: 2648604 - DNA, 25 bp, Homo sapien
actcataccacttggttgcttccaa

SEQ ID NO: 2648605 - DNA, 25 bp, Homo sapien
caactcataccacttggttgcttcc

SEQ ID NO: 2648606 - DNA, 25 bp, Homo sapien
gggccaactcataccacttggttgc

SEQ ID NO: 2648607 - DNA, 25 bp, Homo sapien
atatctttgtttcctccaagtgaaa

SEQ ID NO: 2648608 - DNA, 25 bp, Homo sapien
ttacatatctttgtttcctccaagt

SEQ ID NO: 2648609 - DNA, 25 bp, Homo sapien
catatctttgtttcctccaagtgaa

SEQ ID NO: 2648610 - DNA, 25 bp, Homo sapien
tacatatctttgtttcctccaagtg

SEQ ID NO: 2648611 - DNA, 25 bp, Homo sapien
tatgatttcctagttcttttgtctt

SEQ ID NO: 2648612 - DNA, 25 bp, Homo sapien
gttggtgtctgttgtctttctctca

SEQ ID NO: 2648613 - DNA, 25 bp, Homo sapien
tctctcattcaggttatgatttcct

SEQ ID NO: 2648614 - DNA, 25 bp, Homo sapien
ccccttttttatgtctgtgttggtg

SEQ ID NO: 2648615 - DNA, 25 bp, Homo sapien
ttagtcccacattctatctcctcgt

SEQ ID NO: 2648616 - DNA, 25 bp, Homo sapien
tcctgtgattatgaatgttagctct

SEQ ID NO: 2648617 - DNA, 25 bp, Homo sapien
tatgtcttccatctaatttgggaag

SEQ ID NO: 2648618 - DNA, 25 bp, Homo sapien
cagtaaattctgttggcatgttttc

SEQ ID NO: 2648619 - DNA, 25 bp, Homo sapien
gaagggctgccatggaagtctctga

SEQ ID NO: 2648620 - DNA, 25 bp, Homo sapien
tctctttgctaaggcagagtaacag

SEQ ID NO: 2648621 - DNA, 25 bp, Homo sapien
gtaacagtgatctttgggctctagt

SEQ ID NO: 2648622 - DNA, 25 bp, Homo sapien
tcaggcccaacaccatatggaatcc

SEQ ID NO: 2648623 - DNA, 25 bp, Homo sapien
tgggaatataggcgcccccaaccag

SEQ ID NO: 2648624 - DNA, 25 bp, Homo sapien
taagtagaaggtgtacactacaata

SEQ ID NO: 2648625 - DNA, 25 bp, Homo sapien
ttaataagtagaaggtgtacactac

SEQ ID NO: 2648626 - DNA, 25 bp, Homo sapien
gaaggtgtacactacaataacaata

SEQ ID NO: 2648627 - DNA, 25 bp, Homo sapien
cctgattagggcacttactataaat

SEQ ID NO: 2648628 - DNA, 25 bp, Homo sapien
aagtttgcagggctaggagttgctc

SEQ ID NO: 2648629 - DNA, 25 bp, Homo sapien
gcctagggcatcattgtacaaaact

SEQ ID NO: 2648630 - DNA, 25 bp, Homo sapien
caaatgcacatactagcgtaggcct

SEQ ID NO: 2648631 - DNA, 25 bp, Homo sapien
tgtaaatagagatagcataacctac

SEQ ID NO: 2648632 - DNA, 25 bp, Homo sapien
cactgtgtaacatcatatagtgtat

SEQ ID NO: 2648633 - DNA, 25 bp, Homo sapien
caatttgtatgttgtggttgatgtc

SEQ ID NO: 2648634 - DNA, 25 bp, Homo sapien
ggttgatgtctaccactttgttatt

SEQ ID NO: 2648635 - DNA, 25 bp, Homo sapien
gctgagactgcaccactgcactcca

SEQ ID NO: 2648636 - DNA, 25 bp, Homo sapien
tgcactccagcttggtgaacagagt

SEQ ID NO: 2648637 - DNA, 25 bp, Homo sapien
ctccagcttggtgaacagagtgaga

SEQ ID NO: 2648638 - DNA, 25 bp, Homo sapien
gagggtgaggcagaaattgcagtga

SEQ ID NO: 2648639 - DNA, 25 bp, Homo sapien
catctcacagcatgttttctcctag

SEQ ID NO: 2648640 - DNA, 25 bp, Homo sapien
tcctagtacaccctgattgtccaag

SEQ ID NO: 2648641 - DNA, 25 bp, Homo sapien
tattcattcaaacgcttattcaaac

SEQ ID NO: 2648642 - DNA, 25 bp, Homo sapien
tcaaactaccgaatcctccaataac

SEQ ID NO: 2648643 - DNA, 25 bp, Homo sapien
tattcagagccagtataagtgacca

SEQ ID NO: 2648644 - DNA, 25 bp, Homo sapien
tatcagactctcaatcactcctagg

SEQ ID NO: 2648645 - DNA, 25 bp, Homo sapien
caagaggttctgaaagcgtgcccaa

SEQ ID NO: 2648646 - DNA, 25 bp, Homo sapien
ttccaaggagacaaccaactgcagg

SEQ ID NO: 2648647 - DNA, 25 bp, Homo sapien
taactgagcttaatgtggatcaaag

SEQ ID NO: 2648648 - DNA, 25 bp, Homo sapien
gcagcactaacttggtaacttggaa

SEQ ID NO: 2648649 - DNA, 25 bp, Homo sapien
tgataggaagtcaattattcagcct

SEQ ID NO: 2648650 - DNA, 25 bp, Homo sapien
taaacatctattgtgcacccacaca

SEQ ID NO: 2648651 - DNA, 25 bp, Homo sapien
cactgctttaggtctgtctggttca

SEQ ID NO: 2648652 - DNA, 25 bp, Homo sapien
taacacctgggcatacgagtaggac

SEQ ID NO: 2648653 - DNA, 25 bp, Homo sapien
ttttgagattacctgagtcacgcag

SEQ ID NO: 2648654 - DNA, 25 bp, Homo sapien
tgtagagatcggcaaattgcaactg

SEQ ID NO: 2648655 - DNA, 25 bp, Homo sapien
attcataaatgggaacttcattagt

SEQ ID NO: 2648656 - DNA, 25 bp, Homo sapien
gacttagaacaggcaaggatttcat

SEQ ID NO: 2648657 - DNA, 25 bp, Homo sapien
caaaaattcataaatgggaacttca

SEQ ID NO: 2648658 - DNA, 25 bp, Homo sapien
agcaaaaattcataaatgggaactt

SEQ ID NO: 2648659 - DNA, 25 bp, Homo sapien
cagtcaaatcaggaaggcaatccca

SEQ ID NO: 2648660 - DNA, 25 bp, Homo sapien
catggtgctggcacaaaaacaggga

SEQ ID NO: 2648661 - DNA, 25 bp, Homo sapien
tgtgtagatttgatgccctccctca

SEQ ID NO: 2648662 - DNA, 25 bp, Homo sapien
caacagtaaccaagctggcagtcaa

SEQ ID NO: 2648663 - DNA, 25 bp, Homo sapien
gaagtaaaactgatgtagctggcta

SEQ ID NO: 2648664 - DNA, 25 bp, Homo sapien
tgcatgaagtaaaaacagacagaac

SEQ ID NO: 2648665 - DNA, 25 bp, Homo sapien
gctaataccagagaaagtaggattc

SEQ ID NO: 2648666 - DNA, 25 bp, Homo sapien
taaaaggttaagctcattagcaatg

SEQ ID NO: 2648667 - DNA, 25 bp, Homo sapien
tttggcaccaatttcgtcaaaagct

SEQ ID NO: 2648668 - DNA, 25 bp, Homo sapien
tacctgagcagggttaacatctgca

SEQ ID NO: 2648669 - DNA, 25 bp, Homo sapien
cgtcaaaagctgctctatacctgag

SEQ ID NO: 2648670 - DNA, 25 bp, Homo sapien
acatctgcaagacctgctgaaagca

SEQ ID NO: 2648671 - DNA, 25 bp, Homo sapien
tagaagcaattcactcatatgagta

SEQ ID NO: 2648672 - DNA, 25 bp, Homo sapien
gcttatttagctaaaagccagaatt

SEQ ID NO: 2648673 - DNA, 25 bp, Homo sapien
tctcatcactgcctgttagtcagaa

SEQ ID NO: 2648674 - DNA, 25 bp, Homo sapien
ttagagtatacacttctattttccc

SEQ ID NO: 2648675 - DNA, 25 bp, Homo sapien
gaaatatgtcaattaaactgtcaac

SEQ ID NO: 2648676 - DNA, 25 bp, Homo sapien
tgaacatcaaaatagggtgcaattt

SEQ ID NO: 2648677 - DNA, 25 bp, Homo sapien
tgtcaattaaactgtcaaccatgtt

SEQ ID NO: 2648678 - DNA, 25 bp, Homo sapien
aaaaatcagagtctacagttttaca

SEQ ID NO: 2648679 - DNA, 25 bp, Homo sapien
attatcaccaaataactattacaga

SEQ ID NO: 2648680 - DNA, 25 bp, Homo sapien
ggcactattttcattcccgaccaag

SEQ ID NO: 2648681 - DNA, 25 bp, Homo sapien
tgaaggtatcacaggttggcactat

SEQ ID NO: 2648682 - DNA, 25 bp, Homo sapien
acttcctcagaaagtaaaattagag

SEQ ID NO: 2648683 - DNA, 25 bp, Homo sapien
ttgaaagaacaactcgatattggat

SEQ ID NO: 2648684 - DNA, 25 bp, Homo sapien
atttggttgcctcattgcgatataa

SEQ ID NO: 2648685 - DNA, 25 bp, Homo sapien
catcttcattctcaggattcatatt

SEQ ID NO: 2648686 - DNA, 25 bp, Homo sapien
gcctcattgcgatataagtatgttg

SEQ ID NO: 2648687 - DNA, 25 bp, Homo sapien
tcaggcacagtaattcatcatcagg

SEQ ID NO: 2648688 - DNA, 25 bp, Homo sapien
gaaaataacgtgtgtcccctgagtg

SEQ ID NO: 2648689 - DNA, 25 bp, Homo sapien
caggcaagaggctacattggcccaa

SEQ ID NO: 2648690 - DNA, 25 bp, Homo sapien
tgatcgtgggagagcagttgcacct

SEQ ID NO: 2648691 - DNA, 25 bp, Homo sapien
cggagttgcttctcggccacagagt

SEQ ID NO: 2648692 - DNA, 25 bp, Homo sapien
tcgaaaccaccaaatgactctaagc

SEQ ID NO: 2648693 - DNA, 25 bp, Homo sapien
tgttttagtagcagcacagcgtgtc

SEQ ID NO: 2648694 - DNA, 25 bp, Homo sapien
gccacagagtggttcacaacattaa

SEQ ID NO: 2648695 - DNA, 25 bp, Homo sapien
tgatgtgtggagacaagccgttgat

SEQ ID NO: 2648696 - DNA, 25 bp, Homo sapien
cacaatctgctgagtcgctttaaca

SEQ ID NO: 2648697 - DNA, 25 bp, Homo sapien
aagtgtccactgcacgcagcttggc

SEQ ID NO: 2648698 - DNA, 25 bp, Homo sapien
cctgtgccagccgtgaagtgtccac

SEQ ID NO: 2648699 - DNA, 25 bp, Homo sapien
ttctttggtgtagaggacgccttta

SEQ ID NO: 2648700 - DNA, 25 bp, Homo sapien
acataatgaccttctatcccaattt

SEQ ID NO: 2648701 - DNA, 25 bp, Homo sapien
tctttggtgtagaggacgcctttac

SEQ ID NO: 2648702 - DNA, 25 bp, Homo sapien
gaaagctagccagagaaagtctaaa

SEQ ID NO: 2648703 - DNA, 25 bp, Homo sapien
gacatgtgagctcagtatttaccat

SEQ ID NO: 2648704 - DNA, 25 bp, Homo sapien
cattggaaagggtcctcataagagt

SEQ ID NO: 2648705 - DNA, 25 bp, Homo sapien
cactttatgagcagggttattgcaa

SEQ ID NO: 2648706 - DNA, 25 bp, Homo sapien
actaaaagaatgattggtccaccac

SEQ ID NO: 2648707 - DNA, 25 bp, Homo sapien
gaaatacagctggtacttgcaatag

SEQ ID NO: 2648708 - DNA, 25 bp, Homo sapien
tgacctctaggctcttcgttctgcc

SEQ ID NO: 2648709 - DNA, 25 bp, Homo sapien
cccagtggtaaatgttgcaagtcat

SEQ ID NO: 2648710 - DNA, 25 bp, Homo sapien
cctccaccccccatcaagccccagt

SEQ ID NO: 2648711 - DNA, 25 bp, Homo sapien
tttttctaatgctccccatccctcc

SEQ ID NO: 2648712 - DNA, 25 bp, Homo sapien
ttttttctaatgctccccatccctc

SEQ ID NO: 2648713 - DNA, 25 bp, Homo sapien
cgggatcattgagggctctcctaca

SEQ ID NO: 2648714 - DNA, 25 bp, Homo sapien
tacatcataacgtggcagctggctt

SEQ ID NO: 2648715 - DNA, 25 bp, Homo sapien
tgcaacgcgaatacaagaaagccgg

SEQ ID NO: 2648716 - DNA, 25 bp, Homo sapien
gagagctagacagagagaaaaccct

SEQ ID NO: 2648717 - DNA, 25 bp, Homo sapien
ttggtgttaaggacatgagccacag

SEQ ID NO: 2648718 - DNA, 25 bp, Homo sapien
gagagcagctcaattagtagcagag

SEQ ID NO: 2648719 - DNA, 25 bp, Homo sapien
cagagactacttgtttcgtggccat

SEQ ID NO: 2648720 - DNA, 25 bp, Homo sapien
cagaggaacaggtgaattatcatcc

SEQ ID NO: 2648721 - DNA, 25 bp, Homo sapien
ccggtgtgcaccaccgcactcaact

SEQ ID NO: 2648722 - DNA, 25 bp, Homo sapien
attaccggtgtgcaccaccgcactc

SEQ ID NO: 2648723 - DNA, 25 bp, Homo sapien
taccggtgtgcaccaccgcactcaa

SEQ ID NO: 2648724 - DNA, 25 bp, Homo sapien
cggtgtgcaccaccgcactcaacta

SEQ ID NO: 2648725 - DNA, 25 bp, Homo sapien
caggtgccatgtgatctaactaaag

SEQ ID NO: 2648726 - DNA, 25 bp, Homo sapien
taagagaaaggtcactccgttactg

SEQ ID NO: 2648727 - DNA, 25 bp, Homo sapien
ctgttctcaagtagtcctggcctca

SEQ ID NO: 2648728 - DNA, 25 bp, Homo sapien
tgttgtgacgaatcttactgcctgt

SEQ ID NO: 2648729 - DNA, 25 bp, Homo sapien
tgtggatacccaaggctgcaaatct

SEQ ID NO: 2648730 - DNA, 25 bp, Homo sapien
tagacaaatagtttaactcggtgcc

SEQ ID NO: 2648731 - DNA, 25 bp, Homo sapien
gatgaagattgtgcacgctaccgtg

SEQ ID NO: 2648732 - DNA, 25 bp, Homo sapien
ttaaaattcgtgtatgagccattgc

SEQ ID NO: 2648733 - DNA, 25 bp, Homo sapien
gaaatgccagacagtaattcctaga

SEQ ID NO: 2648734 - DNA, 25 bp, Homo sapien
catagaatccttgcgtgctttaagc

SEQ ID NO: 2648735 - DNA, 25 bp, Homo sapien
gccaagcagcaaatgaataatgtca

SEQ ID NO: 2648736 - DNA, 25 bp, Homo sapien
gatctaaagcatgcatcacatctga

SEQ ID NO: 2648737 - DNA, 25 bp, Homo sapien
gcaagcagattaatagacgaatgga

SEQ ID NO: 2648738 - DNA, 25 bp, Homo sapien
gagacctatctgataaggcaagcag

SEQ ID NO: 2648739 - DNA, 25 bp, Homo sapien
cagaagaatggatatgagacctatc

SEQ ID NO: 2648740 - DNA, 25 bp, Homo sapien
tgggttaagagaaggatgaacagaa

SEQ ID NO: 2648741 - DNA, 25 bp, Homo sapien
tattgaaggaaatgcagggtcacaa

SEQ ID NO: 2648742 - DNA, 25 bp, Homo sapien
ttacaatatccaacaagagccgatg

SEQ ID NO: 2648743 - DNA, 25 bp, Homo sapien
tgtctatactttaggctaccaccca

SEQ ID NO: 2648744 - DNA, 25 bp, Homo sapien
tattacctgtcaacgcaggtcactg

SEQ ID NO: 2648745 - DNA, 25 bp, Homo sapien
tatatatttacataaccgaaacata

SEQ ID NO: 2648746 - DNA, 25 bp, Homo sapien
gtttatgaaggaatacagagtgccc

SEQ ID NO: 2648747 - DNA, 25 bp, Homo sapien
cacgcacattcaccacacagtttat

SEQ ID NO: 2648748 - DNA, 25 bp, Homo sapien
tcaacttcactgaatgaatatgcag

SEQ ID NO: 2648749 - DNA, 25 bp, Homo sapien
catctgagatgacttggaaaacacc

SEQ ID NO: 2648750 - DNA, 25 bp, Homo sapien
tagtcagcaccgactcagaaacagc

SEQ ID NO: 2648751 - DNA, 25 bp, Homo sapien
caaaacttttaagcgctggaatgaa

SEQ ID NO: 2648752 - DNA, 25 bp, Homo sapien
tccctgctggaaatagtggtataaa

SEQ ID NO: 2648753 - DNA, 25 bp, Homo sapien
tgcctctcgccaggaaatacactga

SEQ ID NO: 2648754 - DNA, 25 bp, Homo sapien
taagagccatatgtggtaactgtcc

SEQ ID NO: 2648755 - DNA, 25 bp, Homo sapien
taactgtccagggttgttcatctct

SEQ ID NO: 2648756 - DNA, 25 bp, Homo sapien
aatacactgaattgcaagaattagg

SEQ ID NO: 2648757 - DNA, 25 bp, Homo sapien
ccccagaggctaagtcagtgggaaa

SEQ ID NO: 2648758 - DNA, 25 bp, Homo sapien
cacagagaataaacgatggtacagt

SEQ ID NO: 2648759 - DNA, 25 bp, Homo sapien
tgtacagtgtaccatagtacctatg

SEQ ID NO: 2648760 - DNA, 25 bp, Homo sapien
ggtacagttttacttggacaaggca

SEQ ID NO: 2648761 - DNA, 25 bp, Homo sapien
cagatgttcttgtttggattagcaa

SEQ ID NO: 2648762 - DNA, 25 bp, Homo sapien
ccaggttgacaattgtgcagatgtt

SEQ ID NO: 2648763 - DNA, 25 bp, Homo sapien
gattagcaagaaagaaacctcccaa

SEQ ID NO: 2648764 - DNA, 25 bp, Homo sapien
aaagatgtgatgtctgacctcagaa

SEQ ID NO: 2648765 - DNA, 25 bp, Homo sapien
cacacataaactcgcacctggaggc

SEQ ID NO: 2648766 - DNA, 25 bp, Homo sapien
taatcagacggataccaagtccact

SEQ ID NO: 2648767 - DNA, 25 bp, Homo sapien
acctggaggcaatgttcaaaacaca

SEQ ID NO: 2648768 - DNA, 25 bp, Homo sapien
caaataaacacatactcggagacag

SEQ ID NO: 2648769 - DNA, 25 bp, Homo sapien
caggaaactcagagttatctggtat

SEQ ID NO: 2648770 - DNA, 25 bp, Homo sapien
caagaaatcccacagttcacaaaat

SEQ ID NO: 2648771 - DNA, 25 bp, Homo sapien
gaaagcccgccttatgaatggcaaa

SEQ ID NO: 2648772 - DNA, 25 bp, Homo sapien
caaacacagactaatgagagttttc

SEQ ID NO: 2648773 - DNA, 25 bp, Homo sapien
aacaaaatgcttgattcgtaggtca

SEQ ID NO: 2648774 - DNA, 25 bp, Homo sapien
tcatagcaaccaaatttgcacttcc

SEQ ID NO: 2648775 - DNA, 25 bp, Homo sapien
catacagctaacagtagagaccgtg

SEQ ID NO: 2648776 - DNA, 25 bp, Homo sapien
gcacttccctcagtatcagtcagaa

SEQ ID NO: 2648777 - DNA, 25 bp, Homo sapien
ttaaaatggctataacgtccgatcc

SEQ ID NO: 2648778 - DNA, 25 bp, Homo sapien
tacgcagatgtataggattcttacg

SEQ ID NO: 2648779 - DNA, 25 bp, Homo sapien
taaagactcctcaaatatacgcaga

SEQ ID NO: 2648780 - DNA, 25 bp, Homo sapien
tattaacccaagcatgaagcacagc

SEQ ID NO: 2648781 - DNA, 25 bp, Homo sapien
caactttgtggctacacttttgtct

SEQ ID NO: 2648782 - DNA, 25 bp, Homo sapien
ccttggtactgcaaaactcaatcgc

SEQ ID NO: 2648783 - DNA, 25 bp, Homo sapien
cctttttaaactcggagaggcaatg

SEQ ID NO: 2648784 - DNA, 25 bp, Homo sapien
taaatagataaactgctttgtggga

SEQ ID NO: 2648785 - DNA, 25 bp, Homo sapien
tgaacatagattcagcttttttggt

SEQ ID NO: 2648786 - DNA, 25 bp, Homo sapien
gttagacaacctggtttaatctctg

SEQ ID NO: 2648787 - DNA, 25 bp, Homo sapien
tgattcagtttaaatgctagtccca

SEQ ID NO: 2648788 - DNA, 25 bp, Homo sapien
tagtacaattactaatgggcagtcg

SEQ ID NO: 2648789 - DNA, 25 bp, Homo sapien
taggtagttcaactcctgcaggtgg

SEQ ID NO: 2648790 - DNA, 25 bp, Homo sapien
tcagcccagtgtgaatgagttcttt

SEQ ID NO: 2648791 - DNA, 25 bp, Homo sapien
gtttcctttgttactgccagctgtg

SEQ ID NO: 2648792 - DNA, 25 bp, Homo sapien
cacaagattgaaaccaaggtgtcag

SEQ ID NO: 2648793 - DNA, 25 bp, Homo sapien
tattggccagacctaagactcttgc

SEQ ID NO: 2648794 - DNA, 25 bp, Homo sapien
ctcagcctgtgggtaagggacaaaa

SEQ ID NO: 2648795 - DNA, 25 bp, Homo sapien
cagagaactatagcacataaccgag

SEQ ID NO: 2648796 - DNA, 25 bp, Homo sapien
taaaaagctgcccatgattattggc

SEQ ID NO: 2648797 - DNA, 25 bp, Homo sapien
ggcttcgcctctcaatttcactttg

SEQ ID NO: 2648798 - DNA, 25 bp, Homo sapien
tccaagtctcaccagaccagaagcc

SEQ ID NO: 2648799 - DNA, 25 bp, Homo sapien
tacaatcgtttagctggacagagaa

SEQ ID NO: 2648800 - DNA, 25 bp, Homo sapien
ggaccccactcggttgccgttgctg

SEQ ID NO: 2648801 - DNA, 25 bp, Homo sapien
gaatggccagctcaagaatcgtagt

SEQ ID NO: 2648802 - DNA, 25 bp, Homo sapien
ggtctacacttcaagcaggcattgg

SEQ ID NO: 2648803 - DNA, 25 bp, Homo sapien
gaacttataagtacctgagccgact

SEQ ID NO: 2648804 - DNA, 25 bp, Homo sapien
tgttatgccgactactcagggaagg

SEQ ID NO: 2648805 - DNA, 25 bp, Homo sapien
cttagcttggaaatttgcagatcga

SEQ ID NO: 2648806 - DNA, 25 bp, Homo sapien
tcattgtagattttgcaggcaatcc

SEQ ID NO: 2648807 - DNA, 25 bp, Homo sapien
caggcaatcctaaataatcaggtga

SEQ ID NO: 2648808 - DNA, 25 bp, Homo sapien
tcagcaagttttcccgctaaggaaa

SEQ ID NO: 2648809 - DNA, 25 bp, Homo sapien
accaccaacggagcctggaagaaga

SEQ ID NO: 2648810 - DNA, 25 bp, Homo sapien
tcggaaaagcaacggttctctggca

SEQ ID NO: 2648811 - DNA, 25 bp, Homo sapien
gtcaccaccgctgaccgggaaggct

SEQ ID NO: 2648812 - DNA, 25 bp, Homo sapien
aagagcaactcggaaaagcaacggt

SEQ ID NO: 2648813 - DNA, 25 bp, Homo sapien
ttaccgcacaaactcgcacctgagg

SEQ ID NO: 2648814 - DNA, 25 bp, Homo sapien
tctctctgccgactgaagcggggat

SEQ ID NO: 2648815 - DNA, 25 bp, Homo sapien
gggcggccgtgtccacatctccggg

SEQ ID NO: 2648816 - DNA, 25 bp, Homo sapien
gcaggcacccgtccggcctgaaaag

SEQ ID NO: 2648817 - DNA, 25 bp, Homo sapien
tcatagataaactagcagagtaaca

SEQ ID NO: 2648818 - DNA, 25 bp, Homo sapien
gcatctttagtttgtgttttcatag

SEQ ID NO: 2648819 - DNA, 25 bp, Homo sapien
ctacaaagtcaaacagtcatgctct

SEQ ID NO: 2648820 - DNA, 25 bp, Homo sapien
taataattccaataaacaggcctta

SEQ ID NO: 2648821 - DNA, 25 bp, Homo sapien
ggcagtcaagctatcctctttcctc

SEQ ID NO: 2648822 - DNA, 25 bp, Homo sapien
tcatgtttttctggcgggcaagttc

SEQ ID NO: 2648823 - DNA, 25 bp, Homo sapien
ggcgggcaagttctcgttgatttcc

SEQ ID NO: 2648824 - DNA, 25 bp, Homo sapien
ttttctggcgggcaagttctcgttg

SEQ ID NO: 2648825 - DNA, 25 bp, Homo sapien
cagttctcccgactctcccaaactg

SEQ ID NO: 2648826 - DNA, 25 bp, Homo sapien
cacaacgtcagtgactttagaatta

SEQ ID NO: 2648827 - DNA, 25 bp, Homo sapien
gttgcttcaatcacaacgtcagtga

SEQ ID NO: 2648828 - DNA, 25 bp, Homo sapien
cccagcccaaaatgttgcttcaatc

SEQ ID NO: 2648829 - DNA, 25 bp, Homo sapien
ttcagagtagtttgggtaggctgtc

SEQ ID NO: 2648830 - DNA, 25 bp, Homo sapien
tcagcacagctagctattatgcata

SEQ ID NO: 2648831 - DNA, 25 bp, Homo sapien
gttgtaactctagcacctcacagtg

SEQ ID NO: 2648832 - DNA, 25 bp, Homo sapien
taattgagtcccttgtcattcagag

SEQ ID NO: 2648833 - DNA, 25 bp, Homo sapien
tgtgcttgctgtgtaactttagtaa

SEQ ID NO: 2648834 - DNA, 25 bp, Homo sapien
gaaaccaagctctgttgtgcttgct

SEQ ID NO: 2648835 - DNA, 25 bp, Homo sapien
gctgttctgcctataaagtagccaa

SEQ ID NO: 2648836 - DNA, 25 bp, Homo sapien
gaagtacagtggaaaaagaaccatg

SEQ ID NO: 2648837 - DNA, 25 bp, Homo sapien
attgcgccattgtactccgcctggg

SEQ ID NO: 2648838 - DNA, 25 bp, Homo sapien
gattgcgccattgtactccgcctgg

SEQ ID NO: 2648839 - DNA, 25 bp, Homo sapien
ctgagattgcgccattgtactccgc

SEQ ID NO: 2648840 - DNA, 25 bp, Homo sapien
gagattgcgccattgtactccgcct

SEQ ID NO: 2648841 - DNA, 25 bp, Homo sapien
gacttattaacctcatgtttcaaac

SEQ ID NO: 2648842 - DNA, 25 bp, Homo sapien
caactctgacttattaacctcatgt

SEQ ID NO: 2648843 - DNA, 25 bp, Homo sapien
tctgacttattaacctcatgtttca

SEQ ID NO: 2648844 - DNA, 25 bp, Homo sapien
ccacaactctgacttattaacctca

SEQ ID NO: 2648845 - DNA, 25 bp, Homo sapien
gtgtgtgacattaggcagctacatg

SEQ ID NO: 2648846 - DNA, 25 bp, Homo sapien
tccgggcaatatgtatcaaggttgt

SEQ ID NO: 2648847 - DNA, 25 bp, Homo sapien
gttgttacaaggaatcactatgaat

SEQ ID NO: 2648848 - DNA, 25 bp, Homo sapien
gctattactcttggttgttaactag

SEQ ID NO: 2648849 - DNA, 25 bp, Homo sapien
atgagggaaaagtctataagttgtt

SEQ ID NO: 2648850 - DNA, 25 bp, Homo sapien
ggaaaagtctataagttgttacaga

SEQ ID NO: 2648851 - DNA, 25 bp, Homo sapien
gaaaagtctataagttgttacagaa

SEQ ID NO: 2648852 - DNA, 25 bp, Homo sapien
tctataagttgttacagaaaaacca

SEQ ID NO: 2648853 - DNA, 25 bp, Homo sapien
cttttcttgcatgatctcagagtcc

SEQ ID NO: 2648854 - DNA, 25 bp, Homo sapien
tctgcatagacttcttctcattagc

SEQ ID NO: 2648855 - DNA, 25 bp, Homo sapien
ttctcttgtctgcatagacttcttc

SEQ ID NO: 2648856 - DNA, 25 bp, Homo sapien
ctgcttttcttgcatgatctcagag

SEQ ID NO: 2648857 - DNA, 25 bp, Homo sapien
gaagactgcttctaaaacatcgcac

SEQ ID NO: 2648858 - DNA, 25 bp, Homo sapien
gactgtccactctacaaaatcttga

SEQ ID NO: 2648859 - DNA, 25 bp, Homo sapien
acatcgcactaagtaaagctgaaag

SEQ ID NO: 2648860 - DNA, 25 bp, Homo sapien
tataacatatgtaatgactgtccac

SEQ ID NO: 2648861 - DNA, 25 bp, Homo sapien
ttatctgatcatattacctaataaa

SEQ ID NO: 2648862 - DNA, 25 bp, Homo sapien
tatataagagatcctattatctgat

SEQ ID NO: 2648863 - DNA, 25 bp, Homo sapien
gacaaagattctttattatataaga

SEQ ID NO: 2648864 - DNA, 25 bp, Homo sapien
aagagatcctattatctgatcatat

SEQ ID NO: 2648865 - DNA, 25 bp, Homo sapien
tggaccctaacttctattatatatt

SEQ ID NO: 2648866 - DNA, 25 bp, Homo sapien
tatacaaatggaccctaacttctat

SEQ ID NO: 2648867 - DNA, 25 bp, Homo sapien
caaatggaccctaacttctattata

SEQ ID NO: 2648868 - DNA, 25 bp, Homo sapien
attatacaaatggaccctaacttct

SEQ ID NO: 2648869 - DNA, 25 bp, Homo sapien
tgaagactaaagttaaccaaagatc

SEQ ID NO: 2648870 - DNA, 25 bp, Homo sapien
tatgaagatagaaactcaggctaaa

SEQ ID NO: 2648871 - DNA, 25 bp, Homo sapien
tttgcctttgtgactaccatcatag

SEQ ID NO: 2648872 - DNA, 25 bp, Homo sapien
aaaacttcagccgggtgggatggct

SEQ ID NO: 2648873 - DNA, 25 bp, Homo sapien
gagttatgctgccataagccaagta

SEQ ID NO: 2648874 - DNA, 25 bp, Homo sapien
gaggaaagcaaggattctcccttgg

SEQ ID NO: 2648875 - DNA, 25 bp, Homo sapien
tctgatatgcgtgaatgtgacctat

SEQ ID NO: 2648876 - DNA, 25 bp, Homo sapien
taaatccaacagcaaaagtcctcat

SEQ ID NO: 2648877 - DNA, 25 bp, Homo sapien
taaattacctgggtgtggcagcgcg

SEQ ID NO: 2648878 - DNA, 25 bp, Homo sapien
ataaattacctgggtgtggcagcgc

SEQ ID NO: 2648879 - DNA, 25 bp, Homo sapien
aattacctgggtgtggcagcgcgtg

SEQ ID NO: 2648880 - DNA, 25 bp, Homo sapien
ttacctgggtgtggcagcgcgtgcc

SEQ ID NO: 2648881 - DNA, 25 bp, Homo sapien
gtcacaggcattaagggcacaccag

SEQ ID NO: 2648882 - DNA, 25 bp, Homo sapien
aattataccaatattcacagaggcc

SEQ ID NO: 2648883 - DNA, 25 bp, Homo sapien
tccgtttcatctccgtgaggtccag

SEQ ID NO: 2648884 - DNA, 25 bp, Homo sapien
tattaagatcagttaccagagctca

SEQ ID NO: 2648885 - DNA, 25 bp, Homo sapien
taatcacccaccaaagaaactctgt

SEQ ID NO: 2648886 - DNA, 25 bp, Homo sapien
tttaacagtgcgctgccatgctcag

SEQ ID NO: 2648887 - DNA, 25 bp, Homo sapien
tttagagagtacaattgaatggtag

SEQ ID NO: 2648888 - DNA, 25 bp, Homo sapien
gattgagcggaaaccttaatatatt

SEQ ID NO: 2648889 - DNA, 25 bp, Homo sapien
ggttatcgccctcccacatttgtgg

SEQ ID NO: 2648890 - DNA, 25 bp, Homo sapien
gcgccggaacagcacggaatcctcc

SEQ ID NO: 2648891 - DNA, 25 bp, Homo sapien
ggaacagcacggaatcctcctgctc

SEQ ID NO: 2648892 - DNA, 25 bp, Homo sapien
ccgcgccggaacagcacggaatcct

SEQ ID NO: 2648893 - DNA, 25 bp, Homo sapien
gccggaacagcacggaatcctcctg

SEQ ID NO: 2648894 - DNA, 25 bp, Homo sapien
agagcgctaatagggagactgcact

SEQ ID NO: 2648895 - DNA, 25 bp, Homo sapien
aagggtgctgagagcgctaataggg

SEQ ID NO: 2648896 - DNA, 25 bp, Homo sapien
ctgcggaaggagagttgggccggaa

SEQ ID NO: 2648897 - DNA, 25 bp, Homo sapien
tgctgagagcgctaatagggagact

SEQ ID NO: 2648898 - DNA, 25 bp, Homo sapien
acaactccagtgagcggatcgactt

SEQ ID NO: 2648899 - DNA, 25 bp, Homo sapien
ggatcgacttgatgctgtcccgagg

SEQ ID NO: 2648900 - DNA, 25 bp, Homo sapien
aaggagcccaaactgctcgaggaag

SEQ ID NO: 2648901 - DNA, 25 bp, Homo sapien
ctactgccaagtcgcggcagggcct

SEQ ID NO: 2648902 - DNA, 25 bp, Homo sapien
gaaatatgcctaccgatgtttttat

SEQ ID NO: 2648903 - DNA, 25 bp, Homo sapien
agagatcaacgctgccatgggctag

SEQ ID NO: 2648904 - DNA, 25 bp, Homo sapien
taaatagaattccttgaaatatgcc

SEQ ID NO: 2648905 - DNA, 25 bp, Homo sapien
gagatcaacgctgccatgggctagg

SEQ ID NO: 2648906 - DNA, 25 bp, Homo sapien
tgtgttaactatatagctgtcacca

SEQ ID NO: 2648907 - DNA, 25 bp, Homo sapien
gctgtcaccaaaagaaccgctaatg

SEQ ID NO: 2648908 - DNA, 25 bp, Homo sapien
gcccattcacgtatcatagatgtgt

SEQ ID NO: 2648909 - DNA, 25 bp, Homo sapien
atcctatctgcccattcacgtatca

SEQ ID NO: 2648910 - DNA, 25 bp, Homo sapien
cacttcttcatatccacgtggtaaa

SEQ ID NO: 2648911 - DNA, 25 bp, Homo sapien
tccatttactctgtgggtgccctca

SEQ ID NO: 2648912 - DNA, 25 bp, Homo sapien
ggtcaatcattaagagaactccttt

SEQ ID NO: 2648913 - DNA, 25 bp, Homo sapien
tcatgaccacgaatctcaagtaggc

SEQ ID NO: 2648914 - DNA, 25 bp, Homo sapien
tgaagccacagctttatcatatgct

SEQ ID NO: 2648915 - DNA, 25 bp, Homo sapien
tatcatatgcttttatcagtgctgt

SEQ ID NO: 2648916 - DNA, 25 bp, Homo sapien
cagtgctgtatcatcccaaatgtca

SEQ ID NO: 2648917 - DNA, 25 bp, Homo sapien
catcccaaatgtcagaatcatcgct

SEQ ID NO: 2648918 - DNA, 25 bp, Homo sapien
tacccgaagtttcacaaatgtcacc

SEQ ID NO: 2648919 - DNA, 25 bp, Homo sapien
ggaagctgcagtattcttcttttgg

SEQ ID NO: 2648920 - DNA, 25 bp, Homo sapien
gtaaggaagctgcagtattcttctt

SEQ ID NO: 2648921 - DNA, 25 bp, Homo sapien
cgaagtttcacaaatgtcaccattc

SEQ ID NO: 2648922 - DNA, 25 bp, Homo sapien
caattgaagcaatggtagctgggta

SEQ ID NO: 2648923 - DNA, 25 bp, Homo sapien
attattagctacttcacagattggg

SEQ ID NO: 2648924 - DNA, 25 bp, Homo sapien
aagtagatcggacagattttgctcc

SEQ ID NO: 2648925 - DNA, 25 bp, Homo sapien
atgcaaccgtcttctgaccaaatgg

SEQ ID NO: 2648926 - DNA, 25 bp, Homo sapien
tggagcagatttgggcttgatgtta

SEQ ID NO: 2648927 - DNA, 25 bp, Homo sapien
agaaaagagttccatggagcagatt

SEQ ID NO: 2648928 - DNA, 25 bp, Homo sapien
caggagacctggagttctcactttc

SEQ ID NO: 2648929 - DNA, 25 bp, Homo sapien
tgttatctgatttatttccaggaga

SEQ ID NO: 2648930 - DNA, 25 bp, Homo sapien
ctgaagtcaaacagactcataagtc

SEQ ID NO: 2648931 - DNA, 25 bp, Homo sapien
gactcataagtcaaatgacaacctc

SEQ ID NO: 2648932 - DNA, 25 bp, Homo sapien
gtgaaatttcatgtaccaaatcctg

SEQ ID NO: 2648933 - DNA, 25 bp, Homo sapien
ttcatgtaccaaatcctgaagtcaa

SEQ ID NO: 2648934 - DNA, 25 bp, Homo sapien
gtggtgggccattgaattttagacc

SEQ ID NO: 2648935 - DNA, 25 bp, Homo sapien
gcggtggtgggccattgaattttag

SEQ ID NO: 2648936 - DNA, 25 bp, Homo sapien
gtggcggtggtgggccattgaattt

SEQ ID NO: 2648937 - DNA, 25 bp, Homo sapien
aggcagccagcatgatagtaagtgg

SEQ ID NO: 2648938 - DNA, 25 bp, Homo sapien
catagcatttcgagggcgattttaa

SEQ ID NO: 2648939 - DNA, 25 bp, Homo sapien
catcccaatacacagtatgccaaaa

SEQ ID NO: 2648940 - DNA, 25 bp, Homo sapien
tccaactatacctagaagggcaaac

SEQ ID NO: 2648941 - DNA, 25 bp, Homo sapien
agtaaatgtcttgggtagaacacct

SEQ ID NO: 2648942 - DNA, 25 bp, Homo sapien
gtgaatgctggaaattaattgtatt

SEQ ID NO: 2648943 - DNA, 25 bp, Homo sapien
aagtctggagatttatattatatag

SEQ ID NO: 2648944 - DNA, 25 bp, Homo sapien
aaagtctggagatttatattatata

SEQ ID NO: 2648945 - DNA, 25 bp, Homo sapien
tttgcttatataatctcctacttaa

SEQ ID NO: 2648946 - DNA, 25 bp, Homo sapien
catataatagccagtatgatagcca

SEQ ID NO: 2648947 - DNA, 25 bp, Homo sapien
tcatcaagagaatctggacatatgg

SEQ ID NO: 2648948 - DNA, 25 bp, Homo sapien
caagagaatctggacatatgggagg

SEQ ID NO: 2648949 - DNA, 25 bp, Homo sapien
cagtatgatagccactcatgtacca

SEQ ID NO: 2648950 - DNA, 25 bp, Homo sapien
taaagagagaagcaagtagtatttt

SEQ ID NO: 2648951 - DNA, 25 bp, Homo sapien
agtcatttgcattctgcttagattt

SEQ ID NO: 2648952 - DNA, 25 bp, Homo sapien
tagtcatttgcattctgcttagatt

SEQ ID NO: 2648953 - DNA, 25 bp, Homo sapien
ttagtcatttgcattctgcttagat

SEQ ID NO: 2648954 - DNA, 25 bp, Homo sapien
ctttatatggatgttaaaaagcatt

SEQ ID NO: 2648955 - DNA, 25 bp, Homo sapien
tgagacctggagcttgacaccaccc

SEQ ID NO: 2648956 - DNA, 25 bp, Homo sapien
ggctgcagttaaggttttcttgcag

SEQ ID NO: 2648957 - DNA, 25 bp, Homo sapien
tgatcagaaattaagttgatagtct

SEQ ID NO: 2648958 - DNA, 25 bp, Homo sapien
tccttctttttgattttgtctgaaa

SEQ ID NO: 2648959 - DNA, 25 bp, Homo sapien
ttaatttaaggaatgtgagcacctt

SEQ ID NO: 2648960 - DNA, 25 bp, Homo sapien
aatttaaggaatgtgagcaccttcc

SEQ ID NO: 2648961 - DNA, 25 bp, Homo sapien
agcaccttccttctttttgattttg

SEQ ID NO: 2648962 - DNA, 25 bp, Homo sapien
aagtaagattcactttcataatgct

SEQ ID NO: 2648963 - DNA, 25 bp, Homo sapien
catttgttttccacaaaccataaag

SEQ ID NO: 2648964 - DNA, 25 bp, Homo sapien
agattcactttcataatgctggcag

SEQ ID NO: 2648965 - DNA, 25 bp, Homo sapien
tgattgttttacattaacctttcaa

SEQ ID NO: 2648966 - DNA, 25 bp, Homo sapien
agtgcagtatgcctaggttatccca

SEQ ID NO: 2648967 - DNA, 25 bp, Homo sapien
tcatatgtcagagtgtacagtgcag

SEQ ID NO: 2648968 - DNA, 25 bp, Homo sapien
aaccagaggcttgacgaattccagt

SEQ ID NO: 2648969 - DNA, 25 bp, Homo sapien
aaagtctgctggtctgcctactagt

SEQ ID NO: 2648970 - DNA, 25 bp, Homo sapien
gccagttatcttctataacgcttca

SEQ ID NO: 2648971 - DNA, 25 bp, Homo sapien
tttctttagtggtgtcatttagtgc

SEQ ID NO: 2648972 - DNA, 25 bp, Homo sapien
ctttagtggtgtcatttagtgctgc

SEQ ID NO: 2648973 - DNA, 25 bp, Homo sapien
tatcttctataacgcttcacattcc

SEQ ID NO: 2648974 - DNA, 25 bp, Homo sapien
aacagtacaatgaacagccatgtcc

SEQ ID NO: 2648975 - DNA, 25 bp, Homo sapien
cttaagtatgcaaattaagacagtc

SEQ ID NO: 2648976 - DNA, 25 bp, Homo sapien
aacattttgccacatacgcctcaca

SEQ ID NO: 2648977 - DNA, 25 bp, Homo sapien
cattttaagacactctaacacttca

SEQ ID NO: 2648978 - DNA, 25 bp, Homo sapien
tagtcctaggtcaaacaccattatg

SEQ ID NO: 2648979 - DNA, 25 bp, Homo sapien
agtctatgctctaagctcacgcttg

SEQ ID NO: 2648980 - DNA, 25 bp, Homo sapien
cccgtcatgatgaattaaagactga

SEQ ID NO: 2648981 - DNA, 25 bp, Homo sapien
tacaactaatgcctaacccgtcatg

SEQ ID NO: 2648982 - DNA, 25 bp, Homo sapien
taactattcaattgacaaagattca

SEQ ID NO: 2648983 - DNA, 25 bp, Homo sapien
caaactctccatgttggtataaata

SEQ ID NO: 2648984 - DNA, 25 bp, Homo sapien
caatttaaatgtaggtcgggcacgg

SEQ ID NO: 2648985 - DNA, 25 bp, Homo sapien
taatgggaagacgatataaacaaca

SEQ ID NO: 2648986 - DNA, 25 bp, Homo sapien
cagctcttatgagggtcaccaatga

SEQ ID NO: 2648987 - DNA, 25 bp, Homo sapien
tgagctccacattgctaaattggtg

SEQ ID NO: 2648988 - DNA, 25 bp, Homo sapien
cactttagttgacccattagcagca

SEQ ID NO: 2648989 - DNA, 25 bp, Homo sapien
taaattggtgaatacttctcagtcc

SEQ ID NO: 2648990 - DNA, 25 bp, Homo sapien
cacaggctgttagtagcagaaggcc

SEQ ID NO: 2648991 - DNA, 25 bp, Homo sapien
tatcagcaagtggttgctccacagc

SEQ ID NO: 2648992 - DNA, 25 bp, Homo sapien
gatccctaggacacaagcagaatgc

SEQ ID NO: 2648993 - DNA, 25 bp, Homo sapien
ttctgccacatacgctaggtcatag

SEQ ID NO: 2648994 - DNA, 25 bp, Homo sapien
gatccagacttcgtgtgagaggaca

SEQ ID NO: 2648995 - DNA, 25 bp, Homo sapien
tgaagttaggcaccgcccaagaagt

SEQ ID NO: 2648996 - DNA, 25 bp, Homo sapien
tcatgggagaggtatttacagggcc

SEQ ID NO: 2648997 - DNA, 25 bp, Homo sapien
tactgtgcgctgctgaccattgggt

SEQ ID NO: 2648998 - DNA, 25 bp, Homo sapien
tttgaggtccctgagtaatccaccc

SEQ ID NO: 2648999 - DNA, 25 bp, Homo sapien
tccattgtccatggtcaacagggaa

SEQ ID NO: 2649000 - DNA, 25 bp, Homo sapien
catacatggatgaaacgggtttaac

SEQ ID NO: 2649001 - DNA, 25 bp, Homo sapien
caggtctgccaatctatctaaaagc

SEQ ID NO: 2649002 - DNA, 25 bp, Homo sapien
catttcaaacagaggtaatcacttg

SEQ ID NO: 2649003 - DNA, 25 bp, Homo sapien
aagtaaaagcccaattggagaggct

SEQ ID NO: 2649004 - DNA, 25 bp, Homo sapien
tcatagcctggagttaaagagaacc

SEQ ID NO: 2649005 - DNA, 25 bp, Homo sapien
gaactgagatttctgtcgagacctg

SEQ ID NO: 2649006 - DNA, 25 bp, Homo sapien
tggagatttaattggcagcctggac

SEQ ID NO: 2649007 - DNA, 25 bp, Homo sapien
gagtggccaaactgatcatccagca

SEQ ID NO: 2649008 - DNA, 25 bp, Homo sapien
tatatttccatgtgtgaggcctcag

SEQ ID NO: 2649009 - DNA, 25 bp, Homo sapien
ccagggtccttgcaaaattggctga

SEQ ID NO: 2649010 - DNA, 25 bp, Homo sapien
taagcgtacataaagattgccagga

SEQ ID NO: 2649011 - DNA, 25 bp, Homo sapien
tgaaggccagcaatttcctgatgag

SEQ ID NO: 2649012 - DNA, 25 bp, Homo sapien
tacccttgcttaccagaacgaagtg

SEQ ID NO: 2649013 - DNA, 25 bp, Homo sapien
gaacgaagtgatagtcatgctcaac

SEQ ID NO: 2649014 - DNA, 25 bp, Homo sapien
tattgtgtaaatgtcatgtacaaac

SEQ ID NO: 2649015 - DNA, 25 bp, Homo sapien
ggcctctttgtattcttattgtgta

SEQ ID NO: 2649016 - DNA, 25 bp, Homo sapien
gccacccacgcctggcaaatgtttg

SEQ ID NO: 2649017 - DNA, 25 bp, Homo sapien
gtttggtggcgcaatatccactcac

SEQ ID NO: 2649018 - DNA, 25 bp, Homo sapien
tctgaagagtagcacagggcttccc

SEQ ID NO: 2649019 - DNA, 25 bp, Homo sapien
caaactaggtaaggatggcacttta

SEQ ID NO: 2649020 - DNA, 25 bp, Homo sapien
tctaagggtgtagcctgtatccatg

SEQ ID NO: 2649021 - DNA, 25 bp, Homo sapien
tcctgtgcctgaaagaactgtctgt

SEQ ID NO: 2649022 - DNA, 25 bp, Homo sapien
gcatgtgcaaatccagttgtcccca

SEQ ID NO: 2649023 - DNA, 25 bp, Homo sapien
gctggtccttttggtgtcctatcta

SEQ ID NO: 2649024 - DNA, 25 bp, Homo sapien
cgtttgttgaagagatgctatattt

SEQ ID NO: 2649025 - DNA, 25 bp, Homo sapien
tatttataatgtcctttgtgcacga

SEQ ID NO: 2649026 - DNA, 25 bp, Homo sapien
cacccatgatgactgtaagcgccta

SEQ ID NO: 2649027 - DNA, 25 bp, Homo sapien
gaacactgactttgggtgcgcttaa

SEQ ID NO: 2649028 - DNA, 25 bp, Homo sapien
tcattgttgaggagcatccacttcc

SEQ ID NO: 2649029 - DNA, 25 bp, Homo sapien
tacagtactttttcgaccacccaga

SEQ ID NO: 2649030 - DNA, 25 bp, Homo sapien
taggcaacgtgtctcaggtacaagc

SEQ ID NO: 2649031 - DNA, 25 bp, Homo sapien
tccaaagagcttccaaagaggagca

SEQ ID NO: 2649032 - DNA, 25 bp, Homo sapien
cagttggtcctatagtgccaggtaa

SEQ ID NO: 2649033 - DNA, 25 bp, Homo sapien
gaggagcagcattgcaacagtgtcg

SEQ ID NO: 2649034 - DNA, 25 bp, Homo sapien
cccttcaatcagcataaatatttga

SEQ ID NO: 2649035 - DNA, 25 bp, Homo sapien
catgatgcaccactctcctatacaa

SEQ ID NO: 2649036 - DNA, 25 bp, Homo sapien
caatcagcataaatatttgagggtg

SEQ ID NO: 2649037 - DNA, 25 bp, Homo sapien
ttagtctccaatgattacaacatga

SEQ ID NO: 2649038 - DNA, 25 bp, Homo sapien
ttacttcaacttctgcctcttgggt

SEQ ID NO: 2649039 - DNA, 25 bp, Homo sapien
ggtcaggttggtctcaaactcctga

SEQ ID NO: 2649040 - DNA, 25 bp, Homo sapien
tcggcttacttcaacttctgcctct

SEQ ID NO: 2649041 - DNA, 25 bp, Homo sapien
cttgggttcaagcaattctcctgcc

SEQ ID NO: 2649042 - DNA, 25 bp, Homo sapien
tcaatgccttaaaagacccctgcgg

SEQ ID NO: 2649043 - DNA, 25 bp, Homo sapien
tatcaatgccttaaaagacccctgc

SEQ ID NO: 2649044 - DNA, 25 bp, Homo sapien
taaagtcaagaaattggacattatc

SEQ ID NO: 2649045 - DNA, 25 bp, Homo sapien
taaaaagcaacctatgaacctccta

SEQ ID NO: 2649046 - DNA, 25 bp, Homo sapien
cctgctcatttgtatagtggtaaaa

SEQ ID NO: 2649047 - DNA, 25 bp, Homo sapien
tggaaggataagctaggatgcagtc

SEQ ID NO: 2649048 - DNA, 25 bp, Homo sapien
tactctggaatcgatcaactccctt

SEQ ID NO: 2649049 - DNA, 25 bp, Homo sapien
gggacattctacttaattcttggaa

SEQ ID NO: 2649050 - DNA, 25 bp, Homo sapien
caacttgtcctataatcatcctggg

SEQ ID NO: 2649051 - DNA, 25 bp, Homo sapien
cctgctggattatgaacaacttgtc

SEQ ID NO: 2649052 - DNA, 25 bp, Homo sapien
cacttcatcggagttccctgggaaa

SEQ ID NO: 2649053 - DNA, 25 bp, Homo sapien
cactcgctcattttgttggaacact

SEQ ID NO: 2649054 - DNA, 25 bp, Homo sapien
tgttgtagcttgcataagtacttcc

SEQ ID NO: 2649055 - DNA, 25 bp, Homo sapien
ttttggctaccatgagtaataccga

SEQ ID NO: 2649056 - DNA, 25 bp, Homo sapien
taaatggaagcataccgtttgacct

SEQ ID NO: 2649057 - DNA, 25 bp, Homo sapien
ccctgggatacaccaacctaattgg

SEQ ID NO: 2649058 - DNA, 25 bp, Homo sapien
gccaccatgcacagcaattaaacca

SEQ ID NO: 2649059 - DNA, 25 bp, Homo sapien
ggctgctctcagacttctaggctca

SEQ ID NO: 2649060 - DNA, 25 bp, Homo sapien
aagcagtcttcccatcctggcttcc

SEQ ID NO: 2649061 - DNA, 25 bp, Homo sapien
gctgctctcagacttctaggctcaa

SEQ ID NO: 2649062 - DNA, 25 bp, Homo sapien
actcctcggattcaggctatgaagg

SEQ ID NO: 2649063 - DNA, 25 bp, Homo sapien
tacaggtctggtggttattatctgc

SEQ ID NO: 2649064 - DNA, 25 bp, Homo sapien
tgttaatggacagatgcccatgcca

SEQ ID NO: 2649065 - DNA, 25 bp, Homo sapien
tacaaatgctatgtggagctgaagc

SEQ ID NO: 2649066 - DNA, 25 bp, Homo sapien
gcacctggcatacatctcttttctt

SEQ ID NO: 2649067 - DNA, 25 bp, Homo sapien
caccatgctagtcagaatgctcttg

SEQ ID NO: 2649068 - DNA, 25 bp, Homo sapien
atcgcgccaggcctctcttcagcat

SEQ ID NO: 2649069 - DNA, 25 bp, Homo sapien
cagcatttcttatagattcgttttc

SEQ ID NO: 2649070 - DNA, 25 bp, Homo sapien
catagactttatgctcctgggctta

SEQ ID NO: 2649071 - DNA, 25 bp, Homo sapien
gctggactcttttaaggactggccc

SEQ ID NO: 2649072 - DNA, 25 bp, Homo sapien
tgcttacgaagaactacggctggac

SEQ ID NO: 2649073 - DNA, 25 bp, Homo sapien
caggtgagtcagtaggttgtgccca

SEQ ID NO: 2649074 - DNA, 25 bp, Homo sapien
cctcattcgtcaaagtacatctgtg

SEQ ID NO: 2649075 - DNA, 25 bp, Homo sapien
ccagaagaatcagttgctcaatata

SEQ ID NO: 2649076 - DNA, 25 bp, Homo sapien
gctcaatatataataccctgatgaa

SEQ ID NO: 2649077 - DNA, 25 bp, Homo sapien
agtttccggaaacagtgaccctgag

SEQ ID NO: 2649078 - DNA, 25 bp, Homo sapien
ggtcttaattagctgaattcgttga

SEQ ID NO: 2649079 - DNA, 25 bp, Homo sapien
cttcaaatgaaagggtgtgtttggt

SEQ ID NO: 2649080 - DNA, 25 bp, Homo sapien
caaatcggttgagctgcacaaaggt

SEQ ID NO: 2649081 - DNA, 25 bp, Homo sapien
gaagatcttcaattagctgcagctt

SEQ ID NO: 2649082 - DNA, 25 bp, Homo sapien
gaagggctcctttgcagtgagtact

SEQ ID NO: 2649083 - DNA, 25 bp, Homo sapien
gaacatcttcatcactccagaaggg

SEQ ID NO: 2649084 - DNA, 25 bp, Homo sapien
gaccaccacaatcgagagagaacat

SEQ ID NO: 2649085 - DNA, 25 bp, Homo sapien
tgacaagtgttctgtacccatgcca

SEQ ID NO: 2649086 - DNA, 25 bp, Homo sapien
gtagtgacgtggtttcacaccatgt

SEQ ID NO: 2649087 - DNA, 25 bp, Homo sapien
tgctgtccaggctcgtgtcaactcc

SEQ ID NO: 2649088 - DNA, 25 bp, Homo sapien
ccgtggccagccttaggggataatt

SEQ ID NO: 2649089 - DNA, 25 bp, Homo sapien
tagtagtgacgtggtttcacaccat

SEQ ID NO: 2649090 - DNA, 25 bp, Homo sapien
ctgagcttaagtaatctgcacacct

SEQ ID NO: 2649091 - DNA, 25 bp, Homo sapien
gagcttaagtaatctgcacacctca

SEQ ID NO: 2649092 - DNA, 25 bp, Homo sapien
ctcctgagcttaagtaatctgcaca

SEQ ID NO: 2649093 - DNA, 25 bp, Homo sapien
cctgagcttaagtaatctgcacacc

SEQ ID NO: 2649094 - DNA, 25 bp, Homo sapien
tcagattttgttatggatgtcaggg

SEQ ID NO: 2649095 - DNA, 25 bp, Homo sapien
caacaggttgttaaagaccaggctc

SEQ ID NO: 2649096 - DNA, 25 bp, Homo sapien
gaccaggctcatatcagtttatttc

SEQ ID NO: 2649097 - DNA, 25 bp, Homo sapien
aatggtactataagttttcaacagg

SEQ ID NO: 2649098 - DNA, 25 bp, Homo sapien
tattccggagaagattgggcctgaa

SEQ ID NO: 2649099 - DNA, 25 bp, Homo sapien
tgggcctgaattagtgtcaattata

SEQ ID NO: 2649100 - DNA, 25 bp, Homo sapien
tatttgaacatatcgagaggacagt

SEQ ID NO: 2649101 - DNA, 25 bp, Homo sapien
aactgcagaactcctgatgtatttg

SEQ ID NO: 2649102 - DNA, 25 bp, Homo sapien
cattgcttctttatctgaccaggat

SEQ ID NO: 2649103 - DNA, 25 bp, Homo sapien
atctgaccaggatgcaaaaccctct

SEQ ID NO: 2649104 - DNA, 25 bp, Homo sapien
ctgaccaggatgcaaaaccctcttt

SEQ ID NO: 2649105 - DNA, 25 bp, Homo sapien
caggatgcaaaaccctctttcagca

SEQ ID NO: 2649106 - DNA, 25 bp, Homo sapien
ttattcctagagaagttgatttaga

SEQ ID NO: 2649107 - DNA, 25 bp, Homo sapien
ttatagttattcctagagaagttga

SEQ ID NO: 2649108 - DNA, 25 bp, Homo sapien
tagttattcctagagaagttgattt

SEQ ID NO: 2649109 - DNA, 25 bp, Homo sapien
gtaattatagttattcctagagaag

SEQ ID NO: 2649110 - DNA, 25 bp, Homo sapien
ccattctgggtagcgtgatgagatc

SEQ ID NO: 2649111 - DNA, 25 bp, Homo sapien
catcccttggtcctgtagatcctca

SEQ ID NO: 2649112 - DNA, 25 bp, Homo sapien
catgtaatggcctaagtcatcagat

SEQ ID NO: 2649113 - DNA, 25 bp, Homo sapien
tatatgctgcccacccatgtaatgg

SEQ ID NO: 2649114 - DNA, 25 bp, Homo sapien
tgcagcatccggaacgtttcggcgt

SEQ ID NO: 2649115 - DNA, 25 bp, Homo sapien
ccttccgagagcgaatggcgatcac

SEQ ID NO: 2649116 - DNA, 25 bp, Homo sapien
ctgcagagccttcgaccttccgaga

SEQ ID NO: 2649117 - DNA, 25 bp, Homo sapien
gagctcctcagaacccaggtcgatg

SEQ ID NO: 2649118 - DNA, 25 bp, Homo sapien
cagaggtttagattagatttccgac

SEQ ID NO: 2649119 - DNA, 25 bp, Homo sapien
tcaagcagcttcctagtctagaaag

SEQ ID NO: 2649120 - DNA, 25 bp, Homo sapien
taaaatataagtaccatccgcccag

SEQ ID NO: 2649121 - DNA, 25 bp, Homo sapien
gattccctgcgtataaagtgatgcc

SEQ ID NO: 2649122 - DNA, 25 bp, Homo sapien
ggtacgtacctttgcaaagttgcaa

SEQ ID NO: 2649123 - DNA, 25 bp, Homo sapien
tccagagagactgcaccaactgtgt

SEQ ID NO: 2649124 - DNA, 25 bp, Homo sapien
agttgcaaaattgccctccagagag

SEQ ID NO: 2649125 - DNA, 25 bp, Homo sapien
tgctgagagtcagagggtacgtacc

SEQ ID NO: 2649126 - DNA, 25 bp, Homo sapien
tcatgctcatcaactataaaaggac

SEQ ID NO: 2649127 - DNA, 25 bp, Homo sapien
gggtgggacatttcacacatgcgtg

SEQ ID NO: 2649128 - DNA, 25 bp, Homo sapien
tgtgccaatattgtaacaagatttg

SEQ ID NO: 2649129 - DNA, 25 bp, Homo sapien
aagatttgagggtgggacatttcac

SEQ ID NO: 2649130 - DNA, 25 bp, Homo sapien
tttatgctgcgagataagtcctctc

SEQ ID NO: 2649131 - DNA, 25 bp, Homo sapien
ttgtgatcttcacttgtacaagttg

SEQ ID NO: 2649132 - DNA, 25 bp, Homo sapien
tgagctcccaccttttcagtgaact

SEQ ID NO: 2649133 - DNA, 25 bp, Homo sapien
tacaagttgtctttatgctgcgaga

SEQ ID NO: 2649134 - DNA, 25 bp, Homo sapien
acaagcacacttgaagcacaataca

SEQ ID NO: 2649135 - DNA, 25 bp, Homo sapien
tacaagcacacttgaagcacaatac

SEQ ID NO: 2649136 - DNA, 25 bp, Homo sapien
gtacaagcacacttgaagcacaata

SEQ ID NO: 2649137 - DNA, 25 bp, Homo sapien
caagcacacttgaagcacaatacat

SEQ ID NO: 2649138 - DNA, 25 bp, Homo sapien
tctgccttagaacctataacagtgt

SEQ ID NO: 2649139 - DNA, 25 bp, Homo sapien
cctctgccttagaacctataacagt

SEQ ID NO: 2649140 - DNA, 25 bp, Homo sapien
gccttagaacctataacagtgtcat

SEQ ID NO: 2649141 - DNA, 25 bp, Homo sapien
tagaacctataacagtgtcattcat

SEQ ID NO: 2649142 - DNA, 25 bp, Homo sapien
ccaaatgtccgtcaaggatagcctg

SEQ ID NO: 2649143 - DNA, 25 bp, Homo sapien
tgtccgtcaaggatagcctggatta

SEQ ID NO: 2649144 - DNA, 25 bp, Homo sapien
acacaggggcctgtcgtagggtgga

SEQ ID NO: 2649145 - DNA, 25 bp, Homo sapien
aatgtccgtcaaggatagcctggat

SEQ ID NO: 2649146 - DNA, 25 bp, Homo sapien
aatggatgatgtaaaaatggcgccc

SEQ ID NO: 2649147 - DNA, 25 bp, Homo sapien
tccgttgatacttagcatattgccc

SEQ ID NO: 2649148 - DNA, 25 bp, Homo sapien
gcagtcttgcatggatgtcccacta

SEQ ID NO: 2649149 - DNA, 25 bp, Homo sapien
gagtatactcttggccatgctatta

SEQ ID NO: 2649150 - DNA, 25 bp, Homo sapien
tccttaccaggggagactcacactg

SEQ ID NO: 2649151 - DNA, 25 bp, Homo sapien
agaacatgtttcaaggagctggaca

SEQ ID NO: 2649152 - DNA, 25 bp, Homo sapien
gagactcacactgcagatcataatt

SEQ ID NO: 2649153 - DNA, 25 bp, Homo sapien
ctctagaacatgtttcaaggagctg

SEQ ID NO: 2649154 - DNA, 25 bp, Homo sapien
ggagtgagccaccaagcccagccag

SEQ ID NO: 2649155 - DNA, 25 bp, Homo sapien
gagtgagccaccaagcccagccagt

SEQ ID NO: 2649156 - DNA, 25 bp, Homo sapien
cacccaccatcacggccaactaatt

SEQ ID NO: 2649157 - DNA, 25 bp, Homo sapien
aggcacccaccatcacggccaacta

SEQ ID NO: 2649158 - DNA, 25 bp, Homo sapien
cagctaaatatgtggttgtccttca

SEQ ID NO: 2649159 - DNA, 25 bp, Homo sapien
gctaaatatgtggttgtccttcatc

SEQ ID NO: 2649160 - DNA, 25 bp, Homo sapien
agctaaatatgtggttgtccttcat

SEQ ID NO: 2649161 - DNA, 25 bp, Homo sapien
tcagctaaatatgtggttgtccttc

SEQ ID NO: 2649162 - DNA, 25 bp, Homo sapien
caaaactcaacaaaaaatatggttg

SEQ ID NO: 2649163 - DNA, 25 bp, Homo sapien
gctatctttgcctattagaagtgat

SEQ ID NO: 2649164 - DNA, 25 bp, Homo sapien
tcagtgcatgtaggcatgtgctatc

SEQ ID NO: 2649165 - DNA, 25 bp, Homo sapien
catctaccattcgtggaatctgaag

SEQ ID NO: 2649166 - DNA, 25 bp, Homo sapien
gaagtgatgggtagaactcttcatc

SEQ ID NO: 2649167 - DNA, 25 bp, Homo sapien
aatttgccaatggagcaatggcttt

SEQ ID NO: 2649168 - DNA, 25 bp, Homo sapien
aatggctttcttcgctaaacactca

SEQ ID NO: 2649169 - DNA, 25 bp, Homo sapien
atggctttcttcgctaaacactcac

SEQ ID NO: 2649170 - DNA, 25 bp, Homo sapien
ctaatttgccaatggagcaatggct

SEQ ID NO: 2649171 - DNA, 25 bp, Homo sapien
gcaggaaagtgccaagatagtttta

SEQ ID NO: 2649172 - DNA, 25 bp, Homo sapien
tagttttattgcttagcaacttggc

SEQ ID NO: 2649173 - DNA, 25 bp, Homo sapien
tgatggctctccagctcgaacgtga

SEQ ID NO: 2649174 - DNA, 25 bp, Homo sapien
tgagacaggctttcaactgatggct

SEQ ID NO: 2649175 - DNA, 25 bp, Homo sapien
tcggtatcctgaaccccattctcag

SEQ ID NO: 2649176 - DNA, 25 bp, Homo sapien
gattcggtatcctgaaccccattct

SEQ ID NO: 2649177 - DNA, 25 bp, Homo sapien
gtgttgattcggtatcctgaacccc

SEQ ID NO: 2649178 - DNA, 25 bp, Homo sapien
gttgattcggtatcctgaaccccat

SEQ ID NO: 2649179 - DNA, 25 bp, Homo sapien
gacttgccagcaacgttggtagact

SEQ ID NO: 2649180 - DNA, 25 bp, Homo sapien
tagactcttcccagcatacatctga

SEQ ID NO: 2649181 - DNA, 25 bp, Homo sapien
tgccagcaacgttggtagactcttc

SEQ ID NO: 2649182 - DNA, 25 bp, Homo sapien
tcagacttgccagcaacgttggtag

SEQ ID NO: 2649183 - DNA, 25 bp, Homo sapien
cagtttactggttgactgcactctc

SEQ ID NO: 2649184 - DNA, 25 bp, Homo sapien
gccaagtcgttcttccattctggag

SEQ ID NO: 2649185 - DNA, 25 bp, Homo sapien
taaacaagaatataggctggactca

SEQ ID NO: 2649186 - DNA, 25 bp, Homo sapien
cagacagttaacataatacccaagt

SEQ ID NO: 2649187 - DNA, 25 bp, Homo sapien
caaatggccgtagctattttctcac

SEQ ID NO: 2649188 - DNA, 25 bp, Homo sapien
tttctcacacaatgcaactgtcttg

SEQ ID NO: 2649189 - DNA, 25 bp, Homo sapien
tgctagcagctatacggactttgat

SEQ ID NO: 2649190 - DNA, 25 bp, Homo sapien
tcatgtgatagaatcctagatcccc

SEQ ID NO: 2649191 - DNA, 25 bp, Homo sapien
gtccctactgtatgtctgtctcgaa

SEQ ID NO: 2649192 - DNA, 25 bp, Homo sapien
acctatcaggatcaatgtggcaacc

SEQ ID NO: 2649193 - DNA, 25 bp, Homo sapien
tgtggcaacctagctcaccatcact

SEQ ID NO: 2649194 - DNA, 25 bp, Homo sapien
tcaacaaagtactttctgccacagt

SEQ ID NO: 2649195 - DNA, 25 bp, Homo sapien
gtgccatttctcaacatgtgaaggg

SEQ ID NO: 2649196 - DNA, 25 bp, Homo sapien
tgtgaagggcgtctctttacattct

SEQ ID NO: 2649197 - DNA, 25 bp, Homo sapien
catttctcaacatgtgaagggcgtc

SEQ ID NO: 2649198 - DNA, 25 bp, Homo sapien
tctcaacatgtgaagggcgtctctt

SEQ ID NO: 2649199 - DNA, 25 bp, Homo sapien
agtgtctactttgcggatccagtct

SEQ ID NO: 2649200 - DNA, 25 bp, Homo sapien
aagtgtctactttgcggatccagtc

SEQ ID NO: 2649201 - DNA, 25 bp, Homo sapien
cagtggcttcatgagaccaagtgtc

SEQ ID NO: 2649202 - DNA, 25 bp, Homo sapien
ccagcagtggcttcatgagaccaag

SEQ ID NO: 2649203 - DNA, 25 bp, Homo sapien
tttcatgttgtacgtggtaaataca

SEQ ID NO: 2649204 - DNA, 25 bp, Homo sapien
ttccagaaaggtgaatatgaatttc

SEQ ID NO: 2649205 - DNA, 25 bp, Homo sapien
gaacacatgtaatcattatcctaag

SEQ ID NO: 2649206 - DNA, 25 bp, Homo sapien
tgtttgatgatacggcctcaggcaa

SEQ ID NO: 2649207 - DNA, 25 bp, Homo sapien
taggctgcataacagtttgactgaa

SEQ ID NO: 2649208 - DNA, 25 bp, Homo sapien
cagtttgactgaaaaggcactatgc

SEQ ID NO: 2649209 - DNA, 25 bp, Homo sapien
catttttagacgcatagaaggtttc

SEQ ID NO: 2649210 - DNA, 25 bp, Homo sapien
gcatgctgtcactgttatggatacg

SEQ ID NO: 2649211 - DNA, 25 bp, Homo sapien
tctgttgtaggttgacctacataga

SEQ ID NO: 2649212 - DNA, 25 bp, Homo sapien
tacatagataccacctatacagatt

SEQ ID NO: 2649213 - DNA, 25 bp, Homo sapien
ggttgacctacatagataccaccta

SEQ ID NO: 2649214 - DNA, 25 bp, Homo sapien
tgtaggttgacctacatagatacca

SEQ ID NO: 2649215 - DNA, 25 bp, Homo sapien
ttaagtcactgtagacttaggtgag

SEQ ID NO: 2649216 - DNA, 25 bp, Homo sapien
cttaggtgagtttgttgtaggttgc

SEQ ID NO: 2649217 - DNA, 25 bp, Homo sapien
tgtaggttgcgggaagaaaagatta

SEQ ID NO: 2649218 - DNA, 25 bp, Homo sapien
taattggttctctatcaataggtcc

SEQ ID NO: 2649219 - DNA, 25 bp, Homo sapien
tccagaacgcaaggctaatgttagg

SEQ ID NO: 2649220 - DNA, 25 bp, Homo sapien
cagcatctgtgcctaactgagaggc

SEQ ID NO: 2649221 - DNA, 25 bp, Homo sapien
tgttggcccaattagtccagaacgc

SEQ ID NO: 2649222 - DNA, 25 bp, Homo sapien
tctgttgccaagaggtgaagtgatg

SEQ ID NO: 2649223 - DNA, 25 bp, Homo sapien
taccagatgacattctaggagtcac

SEQ ID NO: 2649224 - DNA, 25 bp, Homo sapien
tttcgcaacacactcctaccagatg

SEQ ID NO: 2649225 - DNA, 25 bp, Homo sapien
gcaggtctgcttggcactgttggct

SEQ ID NO: 2649226 - DNA, 25 bp, Homo sapien
taggagtcacagatatggacagtat

SEQ ID NO: 2649227 - DNA, 25 bp, Homo sapien
gttttaacaaagttatgtcattaca

SEQ ID NO: 2649228 - DNA, 25 bp, Homo sapien
ttatgctcttggttagaattctgaa

SEQ ID NO: 2649229 - DNA, 25 bp, Homo sapien
tttaacaaagttatgtcattacatt

SEQ ID NO: 2649230 - DNA, 25 bp, Homo sapien
cttatgctcttggttagaattctga

SEQ ID NO: 2649231 - DNA, 25 bp, Homo sapien
catcgtctaacattcatagcttcaa

SEQ ID NO: 2649232 - DNA, 25 bp, Homo sapien
tccccatcgtctaacattcatagct

SEQ ID NO: 2649233 - DNA, 25 bp, Homo sapien
gtttccccatcgtctaacattcata

SEQ ID NO: 2649234 - DNA, 25 bp, Homo sapien
tcgtctaacattcatagcttcaaaa

SEQ ID NO: 2649235 - DNA, 25 bp, Homo sapien
acaattgtgcaaacatggatctccc

SEQ ID NO: 2649236 - DNA, 25 bp, Homo sapien
tgtgcaaacatggatctccccaaga

SEQ ID NO: 2649237 - DNA, 25 bp, Homo sapien
aattgtgcaaacatggatctcccca

SEQ ID NO: 2649238 - DNA, 25 bp, Homo sapien
gcaaacatggatctccccaagaatt

SEQ ID NO: 2649239 - DNA, 25 bp, Homo sapien
acaactgctgatgtctcttgggaga

SEQ ID NO: 2649240 - DNA, 25 bp, Homo sapien
ggcaagaccacaactgctgatgtct

SEQ ID NO: 2649241 - DNA, 25 bp, Homo sapien
gtccccattactcacaaaattgtag

SEQ ID NO: 2649242 - DNA, 25 bp, Homo sapien
tgggtgaaactgtcccatgcccgtg

SEQ ID NO: 2649243 - DNA, 25 bp, Homo sapien
tctctgtagttttagtcctgttaat

SEQ ID NO: 2649244 - DNA, 25 bp, Homo sapien
gttttagtcctgttaatccattcaa

SEQ ID NO: 2649245 - DNA, 25 bp, Homo sapien
tagttttagtcctgttaatccattc

SEQ ID NO: 2649246 - DNA, 25 bp, Homo sapien
tctgtagttttagtcctgttaatcc

SEQ ID NO: 2649247 - DNA, 25 bp, Homo sapien
tcctgggttgatatcccgtatcgta

SEQ ID NO: 2649248 - DNA, 25 bp, Homo sapien
ggttgatatcccgtatcgtattcca

SEQ ID NO: 2649249 - DNA, 25 bp, Homo sapien
ttgatatcccgtatcgtattccagg

SEQ ID NO: 2649250 - DNA, 25 bp, Homo sapien
cctaatagctaagcgcaagaagaaa

SEQ ID NO: 2649251 - DNA, 25 bp, Homo sapien
ttttctaccttactaagcgcataca

SEQ ID NO: 2649252 - DNA, 25 bp, Homo sapien
tttctaccttactaagcgcatacat

SEQ ID NO: 2649253 - DNA, 25 bp, Homo sapien
cctcggaggatttcagctgatgttt

SEQ ID NO: 2649254 - DNA, 25 bp, Homo sapien
gggaacctcggaggatttcagctga

SEQ ID NO: 2649255 - DNA, 25 bp, Homo sapien
aacctcggaggatttcagctgatgt

SEQ ID NO: 2649256 - DNA, 25 bp, Homo sapien
gaacctcggaggatttcagctgatg

SEQ ID NO: 2649257 - DNA, 25 bp, Homo sapien
ttgaagtatgtagcaggcgagcgtc

SEQ ID NO: 2649258 - DNA, 25 bp, Homo sapien
taagtcctgcgatggctagcacggc

SEQ ID NO: 2649259 - DNA, 25 bp, Homo sapien
gcgtcagggacaagtgcagctatct

SEQ ID NO: 2649260 - DNA, 25 bp, Homo sapien
taatatcttacacgaaggcaccttg

SEQ ID NO: 2649261 - DNA, 25 bp, Homo sapien
tttcagagtaggatgagtacctgcc

SEQ ID NO: 2649262 - DNA, 25 bp, Homo sapien
tgcagggccgtctccgttttcagag

SEQ ID NO: 2649263 - DNA, 25 bp, Homo sapien
ccagctgagggagcaagagacctct

SEQ ID NO: 2649264 - DNA, 25 bp, Homo sapien
gggtttcttcacattcggctgtcac

SEQ ID NO: 2649265 - DNA, 25 bp, Homo sapien
gacgccgcaactgattgcgccatca

SEQ ID NO: 2649266 - DNA, 25 bp, Homo sapien
gcgctcacaggacgccgcaactgat

SEQ ID NO: 2649267 - DNA, 25 bp, Homo sapien
gcagaatgacgtcagacgcacagca

SEQ ID NO: 2649268 - DNA, 25 bp, Homo sapien
cagccagcgccgcagaatgacgtca

SEQ ID NO: 2649269 - DNA, 25 bp, Homo sapien
ccgccgccgccgctttttcatgacc

SEQ ID NO: 2649270 - DNA, 25 bp, Homo sapien
ctcctcctctctcccgccgccgccg

SEQ ID NO: 2649271 - DNA, 25 bp, Homo sapien
ctcccgccgccgccgctttttcatg

SEQ ID NO: 2649272 - DNA, 25 bp, Homo sapien
cgtagtttcactgccccgccgccgc

SEQ ID NO: 2649273 - DNA, 25 bp, Homo sapien
gcagcctcacggccgctcacagccc

SEQ ID NO: 2649274 - DNA, 25 bp, Homo sapien
cagcctcacggccgctcacagcccc

SEQ ID NO: 2649275 - DNA, 25 bp, Homo sapien
ggcagcctcacggccgctcacagcc

SEQ ID NO: 2649276 - DNA, 25 bp, Homo sapien
gattaggaactacgccctccccaca

SEQ ID NO: 2649277 - DNA, 25 bp, Homo sapien
gacattcggcttcacgctaaggcgt

SEQ ID NO: 2649278 - DNA, 25 bp, Homo sapien
agcccctggcgcctacaccaggcct

SEQ ID NO: 2649279 - DNA, 25 bp, Homo sapien
cattcggcttcacgctaaggcgtgc

SEQ ID NO: 2649280 - DNA, 25 bp, Homo sapien
cctggcgcctacaccaggcctgaca

SEQ ID NO: 2649281 - DNA, 25 bp, Homo sapien
tcccgtccacgctggggattggaag

SEQ ID NO: 2649282 - DNA, 25 bp, Homo sapien
cagagtccgtggcaggatccggcgg

SEQ ID NO: 2649283 - DNA, 25 bp, Homo sapien
gcctgggagactcccgtccacgctg

SEQ ID NO: 2649284 - DNA, 25 bp, Homo sapien
ggagactcccgtccacgctggggat

SEQ ID NO: 2649285 - DNA, 25 bp, Homo sapien
ccgaaatcgactgtgggcacatctg

SEQ ID NO: 2649286 - DNA, 25 bp, Homo sapien
tccaccgaaatcgactgtgggcaca

SEQ ID NO: 2649287 - DNA, 25 bp, Homo sapien
ccgctccaccgaaatcgactgtggg

SEQ ID NO: 2649288 - DNA, 25 bp, Homo sapien
caccgaaatcgactgtgggcacatc

SEQ ID NO: 2649289 - DNA, 25 bp, Homo sapien
agaggaagatctactggattcttca

SEQ ID NO: 2649290 - DNA, 25 bp, Homo sapien
acatcattgtcaccaccagtctttt

SEQ ID NO: 2649291 - DNA, 25 bp, Homo sapien
caacatcattgtcaccaccagtctt

SEQ ID NO: 2649292 - DNA, 25 bp, Homo sapien
tctactggattcttcaacatcattg

SEQ ID NO: 2649293 - DNA, 25 bp, Homo sapien
ccaggctagaagtacttgatattcg

SEQ ID NO: 2649294 - DNA, 25 bp, Homo sapien
tatattcggtatctgtctgagcatg

SEQ ID NO: 2649295 - DNA, 25 bp, Homo sapien
tgagattctgaaggaacactgacac

SEQ ID NO: 2649296 - DNA, 25 bp, Homo sapien
cactgacactagacttaaccaggct

SEQ ID NO: 2649297 - DNA, 25 bp, Homo sapien
tagtcatttttgaacgatctggtgg

SEQ ID NO: 2649298 - DNA, 25 bp, Homo sapien
tcatagtcatttttgaacgatctgg

SEQ ID NO: 2649299 - DNA, 25 bp, Homo sapien
catttttgaacgatctggtggcctc

SEQ ID NO: 2649300 - DNA, 25 bp, Homo sapien
tttgaacgatctggtggcctctgac

SEQ ID NO: 2649301 - DNA, 25 bp, Homo sapien
tcttgtctggactggagtcgatggc

SEQ ID NO: 2649302 - DNA, 25 bp, Homo sapien
tgtctggactggagtcgatggcttt

SEQ ID NO: 2649303 - DNA, 25 bp, Homo sapien
gactggagtcgatggcttttcagtt

SEQ ID NO: 2649304 - DNA, 25 bp, Homo sapien
tctggactggagtcgatggcttttc

SEQ ID NO: 2649305 - DNA, 25 bp, Homo sapien
tctgccacttttactcgaggaacca

SEQ ID NO: 2649306 - DNA, 25 bp, Homo sapien
attaggagtactcttaccttcttgc

SEQ ID NO: 2649307 - DNA, 25 bp, Homo sapien
tcattatcttcagcattaggagtac

SEQ ID NO: 2649308 - DNA, 25 bp, Homo sapien
agtaatggcccatcatctgtctctt

SEQ ID NO: 2649309 - DNA, 25 bp, Homo sapien
cttcaacaacacaagggccttttgt

SEQ ID NO: 2649310 - DNA, 25 bp, Homo sapien
ctaaagctggagtatgtagttgtag

SEQ ID NO: 2649311 - DNA, 25 bp, Homo sapien
tgtagttgtagaaccgcgctcaaat

SEQ ID NO: 2649312 - DNA, 25 bp, Homo sapien
attttcttcaacaacacaagggcct

SEQ ID NO: 2649313 - DNA, 25 bp, Homo sapien
ccgatcatagaaaagtcagttccta

SEQ ID NO: 2649314 - DNA, 25 bp, Homo sapien
tcctaccatgctgatggctaaaaaa

SEQ ID NO: 2649315 - DNA, 25 bp, Homo sapien
agttgtccgatcatagaaaagtcag

SEQ ID NO: 2649316 - DNA, 25 bp, Homo sapien
gtgaggaaaaagttgtccgatcata

SEQ ID NO: 2649317 - DNA, 25 bp, Homo sapien
gaaatctgtaatcagttgtgatcat

SEQ ID NO: 2649318 - DNA, 25 bp, Homo sapien
aaaaagaaatctgtaatcagttgtg

SEQ ID NO: 2649319 - DNA, 25 bp, Homo sapien
tctgtaatcagttgtgatcatttag

SEQ ID NO: 2649320 - DNA, 25 bp, Homo sapien
aatctgtaatcagttgtgatcattt

SEQ ID NO: 2649321 - DNA, 25 bp, Homo sapien
ggaatgctttgtctattctccatcc

SEQ ID NO: 2649322 - DNA, 25 bp, Homo sapien
gctttgtctattctccatccatttg

SEQ ID NO: 2649323 - DNA, 25 bp, Homo sapien
tgctttgtctattctccatccattt

SEQ ID NO: 2649324 - DNA, 25 bp, Homo sapien
aatgctttgtctattctccatccat

SEQ ID NO: 2649325 - DNA, 25 bp, Homo sapien
agactgcttcctcttaatgccaata

SEQ ID NO: 2649326 - DNA, 25 bp, Homo sapien
tcctcttaatgccaatacaggaaca

SEQ ID NO: 2649327 - DNA, 25 bp, Homo sapien
gactgcttcctcttaatgccaatac

SEQ ID NO: 2649328 - DNA, 25 bp, Homo sapien
cctgccaatatatttgtagcaagtg

SEQ ID NO: 2649329 - DNA, 25 bp, Homo sapien
taatctcctgccaatatatttgtag

SEQ ID NO: 2649330 - DNA, 25 bp, Homo sapien
gccaatatatttgtagcaagtgcca

SEQ ID NO: 2649331 - DNA, 25 bp, Homo sapien
tatttgtagcaagtgccagacccat

SEQ ID NO: 2649332 - DNA, 25 bp, Homo sapien
tgaagcaaatgagcaaaaaaatcga

SEQ ID NO: 2649333 - DNA, 25 bp, Homo sapien
gaagcaaatgagcaaaaaaatcgaa

SEQ ID NO: 2649334 - DNA, 25 bp, Homo sapien
agcaaatgagcaaaaaaatcgaagt

SEQ ID NO: 2649335 - DNA, 25 bp, Homo sapien
aagcaaatgagcaaaaaaatcgaag

SEQ ID NO: 2649336 - DNA, 25 bp, Homo sapien
agaaggacccgcctgaacagtggca

SEQ ID NO: 2649337 - DNA, 25 bp, Homo sapien
catcctcccttgataaggtcagaga

SEQ ID NO: 2649338 - DNA, 25 bp, Homo sapien
gatcattattcactccttcacaggc

SEQ ID NO: 2649339 - DNA, 25 bp, Homo sapien
tagaactcatagactcatctggatc

SEQ ID NO: 2649340 - DNA, 25 bp, Homo sapien
gaacccttaagtccatcagatgcat

SEQ ID NO: 2649341 - DNA, 25 bp, Homo sapien
taaacagcgttagcacagtaccatt

SEQ ID NO: 2649342 - DNA, 25 bp, Homo sapien
gaatgcacaggaggtgatacatctt

SEQ ID NO: 2649343 - DNA, 25 bp, Homo sapien
tatacgtaatgactccaataagcca

SEQ ID NO: 2649344 - DNA, 25 bp, Homo sapien
tttttcagtggaggcaaaacccaca

SEQ ID NO: 2649345 - DNA, 25 bp, Homo sapien
aagcatctgctccttactgcattca

SEQ ID NO: 2649346 - DNA, 25 bp, Homo sapien
tctatgttttgtgtgcaggaaagca

SEQ ID NO: 2649347 - DNA, 25 bp, Homo sapien
tgcattcaccttcctttagctcagg

SEQ ID NO: 2649348 - DNA, 25 bp, Homo sapien
gagaaaagaattcctaatgatatat

SEQ ID NO: 2649349 - DNA, 25 bp, Homo sapien
gaaaagaattcctaatgatatatat

SEQ ID NO: 2649350 - DNA, 25 bp, Homo sapien
cagagagaaaagaattcctaatgat

SEQ ID NO: 2649351 - DNA, 25 bp, Homo sapien
gagagaaaagaattcctaatgatat

SEQ ID NO: 2649352 - DNA, 25 bp, Homo sapien
caacttcgaatgaaggcaaatctga

SEQ ID NO: 2649353 - DNA, 25 bp, Homo sapien
cacaatgctctaattccaacttcga

SEQ ID NO: 2649354 - DNA, 25 bp, Homo sapien
gaagtgcttgattctgaagactcag

SEQ ID NO: 2649355 - DNA, 25 bp, Homo sapien
gaagactcagttgctactgatgtgg

SEQ ID NO: 2649356 - DNA, 25 bp, Homo sapien
tacaactaccctcagcattattcac

SEQ ID NO: 2649357 - DNA, 25 bp, Homo sapien
tatacaactaccctcagcattattc

SEQ ID NO: 2649358 - DNA, 25 bp, Homo sapien
atacaactaccctcagcattattca

SEQ ID NO: 2649359 - DNA, 25 bp, Homo sapien
aggtctttggaagcgacctctcaac

SEQ ID NO: 2649360 - DNA, 25 bp, Homo sapien
ctccattctcaaaatgtccaatgta

SEQ ID NO: 2649361 - DNA, 25 bp, Homo sapien
cattctcaaaatgtccaatgtattc

SEQ ID NO: 2649362 - DNA, 25 bp, Homo sapien
ttctcaaaatgtccaatgtattcat

SEQ ID NO: 2649363 - DNA, 25 bp, Homo sapien
tctctctgtagtctccattctcaaa

SEQ ID NO: 2649364 - DNA, 25 bp, Homo sapien
ctgcagacaatttttttcacccaaa

SEQ ID NO: 2649365 - DNA, 25 bp, Homo sapien
caatcggcccctcacttgtacaggt

SEQ ID NO: 2649366 - DNA, 25 bp, Homo sapien
tacaggtcttaaagcctttagttga

SEQ ID NO: 2649367 - DNA, 25 bp, Homo sapien
tctctatcagcacaggattcatttt

SEQ ID NO: 2649368 - DNA, 25 bp, Homo sapien
tggctttggcttttgcaatcggccc

SEQ ID NO: 2649369 - DNA, 25 bp, Homo sapien
gcataattatagatagctcactgga

SEQ ID NO: 2649370 - DNA, 25 bp, Homo sapien
gtgcaacggcataattatagatagc

SEQ ID NO: 2649371 - DNA, 25 bp, Homo sapien
taattatagatagctcactggaggc

SEQ ID NO: 2649372 - DNA, 25 bp, Homo sapien
aacggcataattatagatagctcac

SEQ ID NO: 2649373 - DNA, 25 bp, Homo sapien
tagacattcattaagaaccttgggc

SEQ ID NO: 2649374 - DNA, 25 bp, Homo sapien
cttcaaaatctttacgcgattgatc

SEQ ID NO: 2649375 - DNA, 25 bp, Homo sapien
aggctgtaatatgacatcttcctct

SEQ ID NO: 2649376 - DNA, 25 bp, Homo sapien
gcgattgatcttccatgtgttgagg

SEQ ID NO: 2649377 - DNA, 25 bp, Homo sapien
tagtgaaggcacagcactgaagtca

SEQ ID NO: 2649378 - DNA, 25 bp, Homo sapien
actgaagtcattgctaccgctctgc

SEQ ID NO: 2649379 - DNA, 25 bp, Homo sapien
tgaggtactggtctcctctagctcg

SEQ ID NO: 2649380 - DNA, 25 bp, Homo sapien
tacagtttctctcaatgctgccgcc

SEQ ID NO: 2649381 - DNA, 25 bp, Homo sapien
ctctgaaaaaagcattcaaaaaact

SEQ ID NO: 2649382 - DNA, 25 bp, Homo sapien
tttatttcctctgaaaaaagcattc

SEQ ID NO: 2649383 - DNA, 25 bp, Homo sapien
tcctctgaaaaaagcattcaaaaaa

SEQ ID NO: 2649384 - DNA, 25 bp, Homo sapien
atttcctctgaaaaaagcattcaaa

SEQ ID NO: 2649385 - DNA, 25 bp, Homo sapien
tgttggacttaaggacaaaataatc

SEQ ID NO: 2649386 - DNA, 25 bp, Homo sapien
gacttaaggacaaaataatcatgga

SEQ ID NO: 2649387 - DNA, 25 bp, Homo sapien
tagagatttttaagtgttgttggac

SEQ ID NO: 2649388 - DNA, 25 bp, Homo sapien
ttaagtgttgttggacttaaggaca

SEQ ID NO: 2649389 - DNA, 25 bp, Homo sapien
tctgttttatcagattcatgagtct

SEQ ID NO: 2649390 - DNA, 25 bp, Homo sapien
tgactgaagtgacttgatacttctt

SEQ ID NO: 2649391 - DNA, 25 bp, Homo sapien
tcttctacaggtgtatgcatcatcg

SEQ ID NO: 2649392 - DNA, 25 bp, Homo sapien
tcgacagtacttcactgctaatgtt

SEQ ID NO: 2649393 - DNA, 25 bp, Homo sapien
gagcctaggaattacaccatctctg

SEQ ID NO: 2649394 - DNA, 25 bp, Homo sapien
gtacaatccaggtatgagcctagga

SEQ ID NO: 2649395 - DNA, 25 bp, Homo sapien
agtaactttcacaattgactgtcag

SEQ ID NO: 2649396 - DNA, 25 bp, Homo sapien
ggaaaacaaatcgaactatctggca

SEQ ID NO: 2649397 - DNA, 25 bp, Homo sapien
aacaaggattatcaagctttagaat

SEQ ID NO: 2649398 - DNA, 25 bp, Homo sapien
caaggattatcaagctttagaatga

SEQ ID NO: 2649399 - DNA, 25 bp, Homo sapien
aaggattatcaagctttagaatgaa

SEQ ID NO: 2649400 - DNA, 25 bp, Homo sapien
acaaggattatcaagctttagaatg

SEQ ID NO: 2649401 - DNA, 25 bp, Homo sapien
ttttgaatcggctcctcacaaaagg

SEQ ID NO: 2649402 - DNA, 25 bp, Homo sapien
gagaagggagagtatcagtttgttc

SEQ ID NO: 2649403 - DNA, 25 bp, Homo sapien
tcaaagctgctcttgctaagtttgg

SEQ ID NO: 2649404 - DNA, 25 bp, Homo sapien
caaaaggtgctggtttaatttcaag

SEQ ID NO: 2649405 - DNA, 25 bp, Homo sapien
tcagtctgtgtacatggcaatatca

SEQ ID NO: 2649406 - DNA, 25 bp, Homo sapien
ctggtgctgactgagactcctcttt

SEQ ID NO: 2649407 - DNA, 25 bp, Homo sapien
ggcaatatcacagcctcctcattcc

SEQ ID NO: 2649408 - DNA, 25 bp, Homo sapien
ctttaggttcacaagaatttgaagg

SEQ ID NO: 2649409 - DNA, 25 bp, Homo sapien
tatttggtctcggtctctgaagtcg

SEQ ID NO: 2649410 - DNA, 25 bp, Homo sapien
catcttttggtaatatcgttcttcc

SEQ ID NO: 2649411 - DNA, 25 bp, Homo sapien
gaagtcggccccttacttgtcgagc

SEQ ID NO: 2649412 - DNA, 25 bp, Homo sapien
cttgtcgagcagtttggataacact

SEQ ID NO: 2649413 - DNA, 25 bp, Homo sapien
tttcaaagattattgcagtaatatg

SEQ ID NO: 2649414 - DNA, 25 bp, Homo sapien
ttctgttgccaaaaacaaggatgcc

SEQ ID NO: 2649415 - DNA, 25 bp, Homo sapien
tcaaactggatatgtaatgttcaca

SEQ ID NO: 2649416 - DNA, 25 bp, Homo sapien
taaatctagactttgcattgtttaa

SEQ ID NO: 2649417 - DNA, 25 bp, Homo sapien
tgttctggaactgcggacgatggaa

SEQ ID NO: 2649418 - DNA, 25 bp, Homo sapien
actgcggacgatggaacttcaattt

SEQ ID NO: 2649419 - DNA, 25 bp, Homo sapien
taacatgaaggttttctacaagaac

SEQ ID NO: 2649420 - DNA, 25 bp, Homo sapien
accacctgactttgattttcataca

SEQ ID NO: 2649421 - DNA, 25 bp, Homo sapien
ccaaaaagtaggatgcttgtcaaac

SEQ ID NO: 2649422 - DNA, 25 bp, Homo sapien
tacttaagagaatatcagccatgca

SEQ ID NO: 2649423 - DNA, 25 bp, Homo sapien
tcatacagtattcgagaagcagatt

SEQ ID NO: 2649424 - DNA, 25 bp, Homo sapien
taaaagactctagtatcacaagtat

SEQ ID NO: 2649425 - DNA, 25 bp, Homo sapien
gcaaactgcttcaagcatctaaaat

SEQ ID NO: 2649426 - DNA, 25 bp, Homo sapien
ctaaaattaacagaggtcgggcacg

SEQ ID NO: 2649427 - DNA, 25 bp, Homo sapien
cacattagaaactcgtctaaatgaa

SEQ ID NO: 2649428 - DNA, 25 bp, Homo sapien
aaattaacagaggtcgggcacggtg

SEQ ID NO: 2649429 - DNA, 25 bp, Homo sapien
gggtgttggaagctcctttctgcag

SEQ ID NO: 2649430 - DNA, 25 bp, Homo sapien
tgctcttcccaaatttggcttagcc

SEQ ID NO: 2649431 - DNA, 25 bp, Homo sapien
tgtgctgaactaggaacatacggtt

SEQ ID NO: 2649432 - DNA, 25 bp, Homo sapien
gcagcaaatgatcttctggcttgcc

SEQ ID NO: 2649433 - DNA, 25 bp, Homo sapien
aaagcagactctttggaacctacac

SEQ ID NO: 2649434 - DNA, 25 bp, Homo sapien
aattccgcatctatttttgccaaag

SEQ ID NO: 2649435 - DNA, 25 bp, Homo sapien
gaagatggtgaattatctcctacag

SEQ ID NO: 2649436 - DNA, 25 bp, Homo sapien
gaaacctccagagatgtcagaagct

SEQ ID NO: 2649437 - DNA, 25 bp, Homo sapien
tgtagaagagatagttgttttccca

SEQ ID NO: 2649438 - DNA, 25 bp, Homo sapien
tctctcatactcagatgtagaagag

SEQ ID NO: 2649439 - DNA, 25 bp, Homo sapien
tccagggcaattttagagtaacttg

SEQ ID NO: 2649440 - DNA, 25 bp, Homo sapien
cccatccagggcaattttagagtaa

SEQ ID NO: 2649441 - DNA, 25 bp, Homo sapien
caatctgagcagaaacaggttcagg

SEQ ID NO: 2649442 - DNA, 25 bp, Homo sapien
catagtcagactcaaaatcgtcagc

SEQ ID NO: 2649443 - DNA, 25 bp, Homo sapien
acttcttcgggagcaagatgatagc

SEQ ID NO: 2649444 - DNA, 25 bp, Homo sapien
ttcaggagatctgagaccaacaggt

SEQ ID NO: 2649445 - DNA, 25 bp, Homo sapien
tcatgttcaacaacagctatgcatc

SEQ ID NO: 2649446 - DNA, 25 bp, Homo sapien
acagctatgcatcctacatctggga

SEQ ID NO: 2649447 - DNA, 25 bp, Homo sapien
ctgtgtttggtagctcatgttcaac

SEQ ID NO: 2649448 - DNA, 25 bp, Homo sapien
tacatctgggacattcacagttatt

SEQ ID NO: 2649449 - DNA, 25 bp, Homo sapien
tcttggatatgttcacttgtggtca

SEQ ID NO: 2649450 - DNA, 25 bp, Homo sapien
gttcatcttggatatgttcacttgt

SEQ ID NO: 2649451 - DNA, 25 bp, Homo sapien
ggatatgttcacttgtggtcatttc

SEQ ID NO: 2649452 - DNA, 25 bp, Homo sapien
tcatcttggatatgttcacttgtgg

SEQ ID NO: 2649453 - DNA, 25 bp, Homo sapien
gaatccggaaatctgttcacttaaa

SEQ ID NO: 2649454 - DNA, 25 bp, Homo sapien
tgagccattaatcccttactaaggt

SEQ ID NO: 2649455 - DNA, 25 bp, Homo sapien
gctctcccatttgtgaagatccaga

SEQ ID NO: 2649456 - DNA, 25 bp, Homo sapien
gtttatctcctaggagcagattcca

SEQ ID NO: 2649457 - DNA, 25 bp, Homo sapien
aagtaaagttattgcagcttcggtg

SEQ ID NO: 2649458 - DNA, 25 bp, Homo sapien
gcttcggtgcttccatcattggtac

SEQ ID NO: 2649459 - DNA, 25 bp, Homo sapien
tctctgactgcaatactagatctcc

SEQ ID NO: 2649460 - DNA, 25 bp, Homo sapien
gcaatactagatctcccattgtaag

SEQ ID NO: 2649461 - DNA, 25 bp, Homo sapien
ttctatttttgataggacttagctt

SEQ ID NO: 2649462 - DNA, 25 bp, Homo sapien
ttttgataggacttagctttcattc

SEQ ID NO: 2649463 - DNA, 25 bp, Homo sapien
tatttttgataggacttagctttca

SEQ ID NO: 2649464 - DNA, 25 bp, Homo sapien
gataggacttagctttcattcttac

SEQ ID NO: 2649465 - DNA, 25 bp, Homo sapien
cctgataaatacatggttccaagcc

SEQ ID NO: 2649466 - DNA, 25 bp, Homo sapien
agatggatttcaagacagcactgtc

SEQ ID NO: 2649467 - DNA, 25 bp, Homo sapien
tgacaggctgtactgcaatactctg

SEQ ID NO: 2649468 - DNA, 25 bp, Homo sapien
gaaaggagccctatacagaacacaa

SEQ ID NO: 2649469 - DNA, 25 bp, Homo sapien
ggctagaaggaatatggcttttatc

SEQ ID NO: 2649470 - DNA, 25 bp, Homo sapien
gatttacattatctaggctagaagg

SEQ ID NO: 2649471 - DNA, 25 bp, Homo sapien
tgcaggagatgtagtaatgacaggt

SEQ ID NO: 2649472 - DNA, 25 bp, Homo sapien
ttgtgatttacattatctaggctag

SEQ ID NO: 2649473 - DNA, 25 bp, Homo sapien
tttggtttaggcttagcaagcctac

SEQ ID NO: 2649474 - DNA, 25 bp, Homo sapien
tgcccctttggttacacacaaactg

SEQ ID NO: 2649475 - DNA, 25 bp, Homo sapien
tctgcccctttggttacacacaaac

SEQ ID NO: 2649476 - DNA, 25 bp, Homo sapien
gcttagcaagcctacttcttattct

SEQ ID NO: 2649477 - DNA, 25 bp, Homo sapien
acttctctacggctcaaggacatga

SEQ ID NO: 2649478 - DNA, 25 bp, Homo sapien
ccagtctgactttcttagtaacatt

SEQ ID NO: 2649479 - DNA, 25 bp, Homo sapien
tctctatggctcataacattttcat

SEQ ID NO: 2649480 - DNA, 25 bp, Homo sapien
acattttcacttctctacggctcaa

SEQ ID NO: 2649481 - DNA, 25 bp, Homo sapien
tgtacacatgccaatttgctctgat

SEQ ID NO: 2649482 - DNA, 25 bp, Homo sapien
tctgaagaaatactggtccctttga

SEQ ID NO: 2649483 - DNA, 25 bp, Homo sapien
gtccctttgataccatgtacacatg

SEQ ID NO: 2649484 - DNA, 25 bp, Homo sapien
tctgctgttgtaactggtccgaggt

SEQ ID NO: 2649485 - DNA, 25 bp, Homo sapien
catgtgaacctcctgagagctctct

SEQ ID NO: 2649486 - DNA, 25 bp, Homo sapien
aagcacactgtctcctttagagtcc

SEQ ID NO: 2649487 - DNA, 25 bp, Homo sapien
ggaagcaactggagcaactgacaac

SEQ ID NO: 2649488 - DNA, 25 bp, Homo sapien
aagacccctatccaaaccaagtgtg

SEQ ID NO: 2649489 - DNA, 25 bp, Homo sapien
gaggaaaacaccttgctatccctta

SEQ ID NO: 2649490 - DNA, 25 bp, Homo sapien
aaaatattgacaattaatgaatcaa

SEQ ID NO: 2649491 - DNA, 25 bp, Homo sapien
tatttatctatacagatggagagca

SEQ ID NO: 2649492 - DNA, 25 bp, Homo sapien
ttatctatacagatggagagcaaga

SEQ ID NO: 2649493 - DNA, 25 bp, Homo sapien
aaatattgacaattaatgaatcaaa

SEQ ID NO: 2649494 - DNA, 25 bp, Homo sapien
tgaggattgattatattctcttgtt

SEQ ID NO: 2649495 - DNA, 25 bp, Homo sapien
gttaggtcttgaggattgattatat

SEQ ID NO: 2649496 - DNA, 25 bp, Homo sapien
ctcttgttggacttctggaatactt

SEQ ID NO: 2649497 - DNA, 25 bp, Homo sapien
ggtcttgaggattgattatattctc

SEQ ID NO: 2649498 - DNA, 25 bp, Homo sapien
taaagggtttggcatgaactgtgca

SEQ ID NO: 2649499 - DNA, 25 bp, Homo sapien
attcttctactgcattggctgggat

SEQ ID NO: 2649500 - DNA, 25 bp, Homo sapien
gatttgaccaatatgggagctggca

SEQ ID NO: 2649501 - DNA, 25 bp, Homo sapien
ctcatgtcacccctttcttcggtat

SEQ ID NO: 2649502 - DNA, 25 bp, Homo sapien
ggtgaatggtttgttcaatcaatgc

SEQ ID NO: 2649503 - DNA, 25 bp, Homo sapien
gctacttagttcataaatcactttt

SEQ ID NO: 2649504 - DNA, 25 bp, Homo sapien
cagatataaaatctaccacattaca

SEQ ID NO: 2649505 - DNA, 25 bp, Homo sapien
taagatctccacaacaataacaact

SEQ ID NO: 2649506 - DNA, 25 bp, Homo sapien
catggcatcttgaccaactgaagtt

SEQ ID NO: 2649507 - DNA, 25 bp, Homo sapien
gacagtcatctcttaaagtgagtga

SEQ ID NO: 2649508 - DNA, 25 bp, Homo sapien
tcttccagaaatagataaacccatg

SEQ ID NO: 2649509 - DNA, 25 bp, Homo sapien
tgtggtcatttttatcaagcctgca

SEQ ID NO: 2649510 - DNA, 25 bp, Homo sapien
tgataaatgtcagaactatctttat

SEQ ID NO: 2649511 - DNA, 25 bp, Homo sapien
taaatgtcagaactatctttatata

SEQ ID NO: 2649512 - DNA, 25 bp, Homo sapien
cattggttaaaagtgataatccaaa

SEQ ID NO: 2649513 - DNA, 25 bp, Homo sapien
gataaatgtcagaactatctttata

SEQ ID NO: 2649514 - DNA, 25 bp, Homo sapien
aaatactcaagtttagctaaagaat

SEQ ID NO: 2649515 - DNA, 25 bp, Homo sapien
atatcttgtcccttgtgagactccc

SEQ ID NO: 2649516 - DNA, 25 bp, Homo sapien
catgcatcaggagatctagatcctc

SEQ ID NO: 2649517 - DNA, 25 bp, Homo sapien
agatcctctactctgaaaagctgct

SEQ ID NO: 2649518 - DNA, 25 bp, Homo sapien
catcaggagatctagatcctctact

SEQ ID NO: 2649519 - DNA, 25 bp, Homo sapien
gatcctctactctgaaaagctgctt

SEQ ID NO: 2649520 - DNA, 25 bp, Homo sapien
gctttagaagacgatgttctgctat

SEQ ID NO: 2649521 - DNA, 25 bp, Homo sapien
ggctttagaagacgatgttctgcta

SEQ ID NO: 2649522 - DNA, 25 bp, Homo sapien
gaggctttagaagacgatgttctgc

SEQ ID NO: 2649523 - DNA, 25 bp, Homo sapien
tttagaagacgatgttctgctatcc

SEQ ID NO: 2649524 - DNA, 25 bp, Homo sapien
aaatcccaggggtcttctgccaggt

SEQ ID NO: 2649525 - DNA, 25 bp, Homo sapien
ctttgagcatattaaagataaaaat

SEQ ID NO: 2649526 - DNA, 25 bp, Homo sapien
tgagcatattaaagataaaaatccc

SEQ ID NO: 2649527 - DNA, 25 bp, Homo sapien
agataaaaatcccaggggtcttctg

SEQ ID NO: 2649528 - DNA, 25 bp, Homo sapien
gacttgcataggttcatcagactcc

SEQ ID NO: 2649529 - DNA, 25 bp, Homo sapien
tctcagattgagtagtaataacact

SEQ ID NO: 2649530 - DNA, 25 bp, Homo sapien
tggaagcagatcagaggactctcga

SEQ ID NO: 2649531 - DNA, 25 bp, Homo sapien
aggcgtttcttactatggacttgca

SEQ ID NO: 2649532 - DNA, 25 bp, Homo sapien
ttgaatctcatatccaacccatctc

SEQ ID NO: 2649533 - DNA, 25 bp, Homo sapien
tcatatccaacccatctcatacaaa

SEQ ID NO: 2649534 - DNA, 25 bp, Homo sapien
caaattactatgttttccctagttg

SEQ ID NO: 2649535 - DNA, 25 bp, Homo sapien
ataaaatacagtagttatcacatac

SEQ ID NO: 2649536 - DNA, 25 bp, Homo sapien
taaaggaatggctattaagtgtcca

SEQ ID NO: 2649537 - DNA, 25 bp, Homo sapien
tcaatggctctgtactaatctaact

SEQ ID NO: 2649538 - DNA, 25 bp, Homo sapien
taagtgtccatttatggttagttca

SEQ ID NO: 2649539 - DNA, 25 bp, Homo sapien
gtactaatctaactgtaacttcctg

SEQ ID NO: 2649540 - DNA, 25 bp, Homo sapien
tggacagcttcaggagacatagaaa

SEQ ID NO: 2649541 - DNA, 25 bp, Homo sapien
cttaaattcttgtgggtgtcagcac

SEQ ID NO: 2649542 - DNA, 25 bp, Homo sapien
ccttaaattcttgtgggtgtcagca

SEQ ID NO: 2649543 - DNA, 25 bp, Homo sapien
aacaaaacccacgactttggcaatg

SEQ ID NO: 2649544 - DNA, 25 bp, Homo sapien
ctttggcaatgataagctagactga

SEQ ID NO: 2649545 - DNA, 25 bp, Homo sapien
tctgtaagctcagctaatcgagaag

SEQ ID NO: 2649546 - DNA, 25 bp, Homo sapien
atgcatctgtaagctcagctaatcg

SEQ ID NO: 2649547 - DNA, 25 bp, Homo sapien
acaccaccgtgcctgattaaatttt

SEQ ID NO: 2649548 - DNA, 25 bp, Homo sapien
acacaccaccgtgcctgattaaatt

SEQ ID NO: 2649549 - DNA, 25 bp, Homo sapien
ggcacacaccaccgtgcctgattaa

SEQ ID NO: 2649550 - DNA, 25 bp, Homo sapien
cacacaccaccgtgcctgattaaat

SEQ ID NO: 2649551 - DNA, 25 bp, Homo sapien
ttatatccttctttcagtaagggct

SEQ ID NO: 2649552 - DNA, 25 bp, Homo sapien
tccttctttcagtaagggctgatca

SEQ ID NO: 2649553 - DNA, 25 bp, Homo sapien
tcagtaagggctgatcacaagaaac

SEQ ID NO: 2649554 - DNA, 25 bp, Homo sapien
ttctttcagtaagggctgatcacaa

SEQ ID NO: 2649555 - DNA, 25 bp, Homo sapien
tcaatgaagatatcattgaagaaat

SEQ ID NO: 2649556 - DNA, 25 bp, Homo sapien
tgaagatatcattgaagaaatattc

SEQ ID NO: 2649557 - DNA, 25 bp, Homo sapien
catccacttcaatgaagatatcatt

SEQ ID NO: 2649558 - DNA, 25 bp, Homo sapien
tccacttcaatgaagatatcattga

SEQ ID NO: 2649559 - DNA, 25 bp, Homo sapien
tgttccgtgcttaaagatccaagtg

SEQ ID NO: 2649560 - DNA, 25 bp, Homo sapien
tacacaccgtacagactgaggctat

SEQ ID NO: 2649561 - DNA, 25 bp, Homo sapien
ttgtgtgaaacaacgcagagtgtac

SEQ ID NO: 2649562 - DNA, 25 bp, Homo sapien
gatggtacaggctgctacacaccgt

SEQ ID NO: 2649563 - DNA, 25 bp, Homo sapien
cagattctgttgctgttcgaggcac

SEQ ID NO: 2649564 - DNA, 25 bp, Homo sapien
cacttgtaaagcaccagattctgtt

SEQ ID NO: 2649565 - DNA, 25 bp, Homo sapien
cctgtgtttggacgccacttgtaaa

SEQ ID NO: 2649566 - DNA, 25 bp, Homo sapien
tgttcgaggcaccacttgcagcctg

SEQ ID NO: 2649567 - DNA, 25 bp, Homo sapien
catgaggctgttttaatcgttctcc

SEQ ID NO: 2649568 - DNA, 25 bp, Homo sapien
atgaatgtctgagaacccgagcacc

SEQ ID NO: 2649569 - DNA, 25 bp, Homo sapien
gaccttttttcatgaggctgtttta

SEQ ID NO: 2649570 - DNA, 25 bp, Homo sapien
aacctcctgtagcatcttaatgaat

SEQ ID NO: 2649571 - DNA, 25 bp, Homo sapien
tttttagactcagcctgctgtccca

SEQ ID NO: 2649572 - DNA, 25 bp, Homo sapien
atttttagactcagcctgctgtccc

SEQ ID NO: 2649573 - DNA, 25 bp, Homo sapien
tccatgccaagcaatctgggcggcc

SEQ ID NO: 2649574 - DNA, 25 bp, Homo sapien
tcagcacaatgaaggcgattgggcc

SEQ ID NO: 2649575 - DNA, 25 bp, Homo sapien
gcaattgtggcagcccatggctcag

SEQ ID NO: 2649576 - DNA, 25 bp, Homo sapien
caaccatgtgtgagcttgaactgta

SEQ ID NO: 2649577 - DNA, 25 bp, Homo sapien
tgcccagggcatctttccacgacca

SEQ ID NO: 2649578 - DNA, 25 bp, Homo sapien
tttccacgaccagacttgtccgttc

SEQ ID NO: 2649579 - DNA, 25 bp, Homo sapien
cattggctgccatcttccacttgct

SEQ ID NO: 2649580 - DNA, 25 bp, Homo sapien
tcctttatccgcaccgttccctctg

SEQ ID NO: 2649581 - DNA, 25 bp, Homo sapien
gcagccccagagaaggtttctctga

SEQ ID NO: 2649582 - DNA, 25 bp, Homo sapien
gcggcgggcaccgagcgagagagcg

SEQ ID NO: 2649583 - DNA, 25 bp, Homo sapien
ggcctggagccggtgctttcccctg

SEQ ID NO: 2649584 - DNA, 25 bp, Homo sapien
gggcaccgagcgagagagcggccca

SEQ ID NO: 2649585 - DNA, 25 bp, Homo sapien
agaggcgcgggcacacggccgcagg

SEQ ID NO: 2649586 - DNA, 25 bp, Homo sapien
gaggccaccgagtccccgtgatagg

SEQ ID NO: 2649587 - DNA, 25 bp, Homo sapien
gggctaacctcaggacggcccacat

SEQ ID NO: 2649588 - DNA, 25 bp, Homo sapien
cagagcccaagtccggctgggtgcc

SEQ ID NO: 2649589 - DNA, 25 bp, Homo sapien
cacgtgcgtcacagaatcaactggg

SEQ ID NO: 2649590 - DNA, 25 bp, Homo sapien
cttcaaacttcacgtgcgtcacaga

SEQ ID NO: 2649591 - DNA, 25 bp, Homo sapien
acttcacgtgcgtcacagaatcaac

SEQ ID NO: 2649592 - DNA, 25 bp, Homo sapien
gttgttgaagcgtgcccctcctcca

SEQ ID NO: 2649593 - DNA, 25 bp, Homo sapien
gagaagggcatgtttaattcagggc

SEQ ID NO: 2649594 - DNA, 25 bp, Homo sapien
gacctgaacctaccctgcagtggaa

SEQ ID NO: 2649595 - DNA, 25 bp, Homo sapien
caaaggccaccaacacgagtgagag

SEQ ID NO: 2649596 - DNA, 25 bp, Homo sapien
tttgttacacaaagcgcaacctagc

SEQ ID NO: 2649597 - DNA, 25 bp, Homo sapien
taaaacagaaatagaggagacaggg

SEQ ID NO: 2649598 - DNA, 25 bp, Homo sapien
aaacagaaatagaggagacagggga

SEQ ID NO: 2649599 - DNA, 25 bp, Homo sapien
aacagaaatagaggagacaggggag

SEQ ID NO: 2649600 - DNA, 25 bp, Homo sapien
cagaaatagaggagacaggggagag

SEQ ID NO: 2649601 - DNA, 25 bp, Homo sapien
tagttttatatgctccactcgttca

SEQ ID NO: 2649602 - DNA, 25 bp, Homo sapien
catggagctgatttactagtgcttt

SEQ ID NO: 2649603 - DNA, 25 bp, Homo sapien
gctgatttactagtgctttcatctg

SEQ ID NO: 2649604 - DNA, 25 bp, Homo sapien
ccactcgttcatggagctgatttac

SEQ ID NO: 2649605 - DNA, 25 bp, Homo sapien
ttttcctcttgatatgtgaagtgct

SEQ ID NO: 2649606 - DNA, 25 bp, Homo sapien
tcttgatatgtgaagtgctcgggct

SEQ ID NO: 2649607 - DNA, 25 bp, Homo sapien
aagtgctcgggctttctcaccacct

SEQ ID NO: 2649608 - DNA, 25 bp, Homo sapien
cctgggtctatgagattgtcaattc

SEQ ID NO: 2649609 - DNA, 25 bp, Homo sapien
cctgcaaactgggataattccagaa

SEQ ID NO: 2649610 - DNA, 25 bp, Homo sapien
tgcctgtaataatgccacctcctgg

SEQ ID NO: 2649611 - DNA, 25 bp, Homo sapien
tggcacctcctcattgtcatataac

SEQ ID NO: 2649612 - DNA, 25 bp, Homo sapien
cattgtcatataactggtaacctgc

SEQ ID NO: 2649613 - DNA, 25 bp, Homo sapien
ctttgacggtggcatcattggcaat

SEQ ID NO: 2649614 - DNA, 25 bp, Homo sapien
gcccgtaattgttttttcacagtca

SEQ ID NO: 2649615 - DNA, 25 bp, Homo sapien
cattggcaataatcatgcattctac

SEQ ID NO: 2649616 - DNA, 25 bp, Homo sapien
acagtcactgggtagtaggcacctc

SEQ ID NO: 2649617 - DNA, 25 bp, Homo sapien
aactggcatgcgtcaaaatgtatga

SEQ ID NO: 2649618 - DNA, 25 bp, Homo sapien
tatgcactagtactatgaacagttc

SEQ ID NO: 2649619 - DNA, 25 bp, Homo sapien
tacccatcccaaatgtaatacatac

SEQ ID NO: 2649620 - DNA, 25 bp, Homo sapien
tacagccttccaaactatcttgcat

SEQ ID NO: 2649621 - DNA, 25 bp, Homo sapien
ctatgaactaaatgtgctacgcaga

SEQ ID NO: 2649622 - DNA, 25 bp, Homo sapien
tatgaactaaatgtgctacgcagag

SEQ ID NO: 2649623 - DNA, 25 bp, Homo sapien
atgaactaaatgtgctacgcagagg

SEQ ID NO: 2649624 - DNA, 25 bp, Homo sapien
aagacaagaaatgagaaacataagc

SEQ ID NO: 2649625 - DNA, 25 bp, Homo sapien
ctgaagacaagaaatgagaaacata

SEQ ID NO: 2649626 - DNA, 25 bp, Homo sapien
acaagaaatgagaaacataagcatc

SEQ ID NO: 2649627 - DNA, 25 bp, Homo sapien
gacaagaaatgagaaacataagcat

SEQ ID NO: 2649628 - DNA, 25 bp, Homo sapien
ctgattatagaatgtacggccaaag

SEQ ID NO: 2649629 - DNA, 25 bp, Homo sapien
ggtaagtatgctcctcccgaatcaa

SEQ ID NO: 2649630 - DNA, 25 bp, Homo sapien
caaagtggtctcgatctggaaacac

SEQ ID NO: 2649631 - DNA, 25 bp, Homo sapien
aaacacatctgcttgtcgaggtaag

SEQ ID NO: 2649632 - DNA, 25 bp, Homo sapien
catgtgtccactgtatgggaaagga

SEQ ID NO: 2649633 - DNA, 25 bp, Homo sapien
aagaataaccttgcagcatgtgtcc

SEQ ID NO: 2649634 - DNA, 25 bp, Homo sapien
tagcaaatagtaacaggagggccac

SEQ ID NO: 2649635 - DNA, 25 bp, Homo sapien
ttaggttgaaatccgatcacacggg

SEQ ID NO: 2649636 - DNA, 25 bp, Homo sapien
tttttcctgcccctacctgaagagc

SEQ ID NO: 2649637 - DNA, 25 bp, Homo sapien
aattacatattgtaggtcaacagcc

SEQ ID NO: 2649638 - DNA, 25 bp, Homo sapien
gaaaagctaggtgaactctagacct

SEQ ID NO: 2649639 - DNA, 25 bp, Homo sapien
ccatggaaagggtctctgacagaga

SEQ ID NO: 2649640 - DNA, 25 bp, Homo sapien
tgctacaaaacagaggtaatcatcc

SEQ ID NO: 2649641 - DNA, 25 bp, Homo sapien
gacagtaacaatacttgtcatcccc

SEQ ID NO: 2649642 - DNA, 25 bp, Homo sapien
tccagaaaagctttagattgaattt

SEQ ID NO: 2649643 - DNA, 25 bp, Homo sapien
agattgaatttcattaccctctagg

SEQ ID NO: 2649644 - DNA, 25 bp, Homo sapien
gattctaagacttgaatcaagagta

SEQ ID NO: 2649645 - DNA, 25 bp, Homo sapien
taagacttgaatcaagagtaagaac

SEQ ID NO: 2649646 - DNA, 25 bp, Homo sapien
agtaagaacgtgcaagaaggatgag

SEQ ID NO: 2649647 - DNA, 25 bp, Homo sapien
tcaagagtaagaacgtgcaagaagg

SEQ ID NO: 2649648 - DNA, 25 bp, Homo sapien
cacaaagacgttacctaaggacact

SEQ ID NO: 2649649 - DNA, 25 bp, Homo sapien
gatcccagggccaaacagcattaac

SEQ ID NO: 2649650 - DNA, 25 bp, Homo sapien
acagggatcccagggccaaacagca

SEQ ID NO: 2649651 - DNA, 25 bp, Homo sapien
gcctcccaatattgcccaggtagca

SEQ ID NO: 2649652 - DNA, 25 bp, Homo sapien
gcagtgacttctatagtgtttgatc

SEQ ID NO: 2649653 - DNA, 25 bp, Homo sapien
gtgacttctatagtgtttgatccag

SEQ ID NO: 2649654 - DNA, 25 bp, Homo sapien
tgacttctatagtgtttgatccaga

SEQ ID NO: 2649655 - DNA, 25 bp, Homo sapien
cagtgacttctatagtgtttgatcc

SEQ ID NO: 2649656 - DNA, 25 bp, Homo sapien
tccaagcacacgacaaacacatgag

SEQ ID NO: 2649657 - DNA, 25 bp, Homo sapien
agcacacgacaaacacatgagatgc

SEQ ID NO: 2649658 - DNA, 25 bp, Homo sapien
caagcacacgacaaacacatgagat

SEQ ID NO: 2649659 - DNA, 25 bp, Homo sapien
atccaagcacacgacaaacacatga

SEQ ID NO: 2649660 - DNA, 25 bp, Homo sapien
taggctcctcctgcggtgcaggagc

SEQ ID NO: 2649661 - DNA, 25 bp, Homo sapien
ggcaggcacataggctcctcctgcg

SEQ ID NO: 2649662 - DNA, 25 bp, Homo sapien
cataggctcctcctgcggtgcagga

SEQ ID NO: 2649663 - DNA, 25 bp, Homo sapien
cacataggctcctcctgcggtgcag

SEQ ID NO: 2649664 - DNA, 25 bp, Homo sapien
ctgccaagaaaatggtaccctgctt

SEQ ID NO: 2649665 - DNA, 25 bp, Homo sapien
ctgcttgcgtacaatgatgttttca

SEQ ID NO: 2649666 - DNA, 25 bp, Homo sapien
ggtaccctgcttgcgtacaatgatg

SEQ ID NO: 2649667 - DNA, 25 bp, Homo sapien
gaaaatggtaccctgcttgcgtaca

SEQ ID NO: 2649668 - DNA, 25 bp, Homo sapien
catgtgtcagaatgtagttcagtaa

SEQ ID NO: 2649669 - DNA, 25 bp, Homo sapien
acctccaacacggcatgtgtcagaa

SEQ ID NO: 2649670 - DNA, 25 bp, Homo sapien
cctccaacacggcatgtgtcagaat

SEQ ID NO: 2649671 - DNA, 25 bp, Homo sapien
ctccaacacggcatgtgtcagaatg

SEQ ID NO: 2649672 - DNA, 25 bp, Homo sapien
caatgaagatcagcacctccaagat

SEQ ID NO: 2649673 - DNA, 25 bp, Homo sapien
agatcagcacctccaagatcctcag

SEQ ID NO: 2649674 - DNA, 25 bp, Homo sapien
gaagatcagcacctccaagatcctc

SEQ ID NO: 2649675 - DNA, 25 bp, Homo sapien
tgaagatcagcacctccaagatcct

SEQ ID NO: 2649676 - DNA, 25 bp, Homo sapien
ccagtggtcacttactccagacttt

SEQ ID NO: 2649677 - DNA, 25 bp, Homo sapien
gcccagtggtcacttactccagact

SEQ ID NO: 2649678 - DNA, 25 bp, Homo sapien
gcatgatgatcatccaaagcccagt

SEQ ID NO: 2649679 - DNA, 25 bp, Homo sapien
ctagttaagtgaagggcatgatgat

SEQ ID NO: 2649680 - DNA, 25 bp, Homo sapien
tgataatttagattcctcacaacct

SEQ ID NO: 2649681 - DNA, 25 bp, Homo sapien
ttctgataatttagattcctcacaa

SEQ ID NO: 2649682 - DNA, 25 bp, Homo sapien
tcttctgataatttagattcctcac

SEQ ID NO: 2649683 - DNA, 25 bp, Homo sapien
tttcttctgataatttagattcctc

SEQ ID NO: 2649684 - DNA, 25 bp, Homo sapien
atcaaagctcctcttaaggttagca

SEQ ID NO: 2649685 - DNA, 25 bp, Homo sapien
atacaattcatcagcaggaaataaa

SEQ ID NO: 2649686 - DNA, 25 bp, Homo sapien
gctcttcagaaggttcaatggtgac

SEQ ID NO: 2649687 - DNA, 25 bp, Homo sapien
ggttagcaccaactattccatacaa

SEQ ID NO: 2649688 - DNA, 25 bp, Homo sapien
tacagaacactatgtcgacaatgtg

SEQ ID NO: 2649689 - DNA, 25 bp, Homo sapien
gccacatatgtcactccttactgag

SEQ ID NO: 2649690 - DNA, 25 bp, Homo sapien
ttaaaaactactctgccaactatgg

SEQ ID NO: 2649691 - DNA, 25 bp, Homo sapien
gactatatgctctaaaccctaaaag

SEQ ID NO: 2649692 - DNA, 25 bp, Homo sapien
gatctagccgtagaaaatatttcat

SEQ ID NO: 2649693 - DNA, 25 bp, Homo sapien
tattataggaattaagatctagccg

SEQ ID NO: 2649694 - DNA, 25 bp, Homo sapien
taggaattaagatctagccgtagaa

SEQ ID NO: 2649695 - DNA, 25 bp, Homo sapien
gtactattataggaattaagatcta

SEQ ID NO: 2649696 - DNA, 25 bp, Homo sapien
taactaagtcacgtttgctaaagtg

SEQ ID NO: 2649697 - DNA, 25 bp, Homo sapien
tgttagccagctgatctcctagact

SEQ ID NO: 2649698 - DNA, 25 bp, Homo sapien
tttaagacccactagcaatgctggg

SEQ ID NO: 2649699 - DNA, 25 bp, Homo sapien
gaagtatcacttgaagctcaataaa

SEQ ID NO: 2649700 - DNA, 25 bp, Homo sapien
aatggccttgagaaattatattgca

SEQ ID NO: 2649701 - DNA, 25 bp, Homo sapien
atggccttgagaaattatattgcaa

SEQ ID NO: 2649702 - DNA, 25 bp, Homo sapien
tggccttgagaaattatattgcaaa

SEQ ID NO: 2649703 - DNA, 25 bp, Homo sapien
ctgtaactaatgtgtctccataaaa

SEQ ID NO: 2649704 - DNA, 25 bp, Homo sapien
tgtctccataaaaggctttgaactc

SEQ ID NO: 2649705 - DNA, 25 bp, Homo sapien
agtgaatctgcttccatccacgatt

SEQ ID NO: 2649706 - DNA, 25 bp, Homo sapien
gaatctgcttccatccacgattcta

SEQ ID NO: 2649707 - DNA, 25 bp, Homo sapien
tgtagtgctctcaacaacaaagccc

SEQ ID NO: 2649708 - DNA, 25 bp, Homo sapien
tggatccatgaagccattaagctac

SEQ ID NO: 2649709 - DNA, 25 bp, Homo sapien
aagtcacagatagggacccacacca

SEQ ID NO: 2649710 - DNA, 25 bp, Homo sapien
caccacagcatctagctattaacat

SEQ ID NO: 2649711 - DNA, 25 bp, Homo sapien
gcaatttggatttctgcagctagtt

SEQ ID NO: 2649712 - DNA, 25 bp, Homo sapien
attatgggtctagcatctatctcaa

SEQ ID NO: 2649713 - DNA, 25 bp, Homo sapien
aatcaaactaggacaaagtactgtg

SEQ ID NO: 2649714 - DNA, 25 bp, Homo sapien
aaattctactcccagtgtgaaccct

SEQ ID NO: 2649715 - DNA, 25 bp, Homo sapien
gagttacaaacgggaaagcacagtg

SEQ ID NO: 2649716 - DNA, 25 bp, Homo sapien
ctgagttacaaacgggaaagcacag

SEQ ID NO: 2649717 - DNA, 25 bp, Homo sapien
tgagttacaaacgggaaagcacagt

SEQ ID NO: 2649718 - DNA, 25 bp, Homo sapien
agttacaaacgggaaagcacagtgt

SEQ ID NO: 2649719 - DNA, 25 bp, Homo sapien
tagagggacggtcttcaccaactgc

SEQ ID NO: 2649720 - DNA, 25 bp, Homo sapien
taggccccacttagggatctccagg

SEQ ID NO: 2649721 - DNA, 25 bp, Homo sapien
caggcacagacaggatgcgctgagt

SEQ ID NO: 2649722 - DNA, 25 bp, Homo sapien
ggaacatgtccccacactactaggg

SEQ ID NO: 2649723 - DNA, 25 bp, Homo sapien
tcagaaaagagaactccgttgtttc

SEQ ID NO: 2649724 - DNA, 25 bp, Homo sapien
gagaactccgttgtttccaacgata

SEQ ID NO: 2649725 - DNA, 25 bp, Homo sapien
tccaacgatacctactgggtaccca

SEQ ID NO: 2649726 - DNA, 25 bp, Homo sapien
gggtacccaaatattcgagcaaatc

SEQ ID NO: 2649727 - DNA, 25 bp, Homo sapien
gcactttcaggacaagtattctcta

SEQ ID NO: 2649728 - DNA, 25 bp, Homo sapien
cagatcatgtctcagaaccacctga

SEQ ID NO: 2649729 - DNA, 25 bp, Homo sapien
tcacgggtccagtaacaaagaccca

SEQ ID NO: 2649730 - DNA, 25 bp, Homo sapien
gaatctttgaaccatgagacctctg

SEQ ID NO: 2649731 - DNA, 25 bp, Homo sapien
gaactgatgcgaatgagaattgctg

SEQ ID NO: 2649732 - DNA, 25 bp, Homo sapien
tataaaccctcctgggatatgaaga

SEQ ID NO: 2649733 - DNA, 25 bp, Homo sapien
tattgttgcgtcaaggatgaggtca

SEQ ID NO: 2649734 - DNA, 25 bp, Homo sapien
gatgaggtcaatcactaacactgta

SEQ ID NO: 2649735 - DNA, 25 bp, Homo sapien
agcataactggacaaagtgagtacc

SEQ ID NO: 2649736 - DNA, 25 bp, Homo sapien
cagtaatgttttgaaggaacagcag

SEQ ID NO: 2649737 - DNA, 25 bp, Homo sapien
gaggaatatttctttggcagcataa

SEQ ID NO: 2649738 - DNA, 25 bp, Homo sapien
ggcagcataactggacaaagtgagt

SEQ ID NO: 2649739 - DNA, 25 bp, Homo sapien
agtggtctacatgtgtgctgtccaa

SEQ ID NO: 2649740 - DNA, 25 bp, Homo sapien
gctgtccaatacatgagccacactg

SEQ ID NO: 2649741 - DNA, 25 bp, Homo sapien
tcaatacaaccaaactgattaagct

SEQ ID NO: 2649742 - DNA, 25 bp, Homo sapien
agccacactgatggtacagctctgg

SEQ ID NO: 2649743 - DNA, 25 bp, Homo sapien
aatatggataatctcctcagaatat

SEQ ID NO: 2649744 - DNA, 25 bp, Homo sapien
tcagaatatttaacatgcatgaaga

SEQ ID NO: 2649745 - DNA, 25 bp, Homo sapien
cagaatatttaacatgcatgaagaa

SEQ ID NO: 2649746 - DNA, 25 bp, Homo sapien
aagaaaatatggataatctcctcag

SEQ ID NO: 2649747 - DNA, 25 bp, Homo sapien
ggccatgtgaatgctgatcaggtac

SEQ ID NO: 2649748 - DNA, 25 bp, Homo sapien
taaaagggaagaccgtagcacgtgc

SEQ ID NO: 2649749 - DNA, 25 bp, Homo sapien
agtgatcagatcatgctcctgctgc

SEQ ID NO: 2649750 - DNA, 25 bp, Homo sapien
tgctgatcaggtacataactcagaa

SEQ ID NO: 2649751 - DNA, 25 bp, Homo sapien
tatctggtcatccaattcaacccaa

SEQ ID NO: 2649752 - DNA, 25 bp, Homo sapien
tcattgactgccactatccctggtt

SEQ ID NO: 2649753 - DNA, 25 bp, Homo sapien
agcacagccctttacttggcaccat

SEQ ID NO: 2649754 - DNA, 25 bp, Homo sapien
cagagcacgtgtgccttctgcagtc

SEQ ID NO: 2649755 - DNA, 25 bp, Homo sapien
ctgagagaaagatcagaaagagagc

SEQ ID NO: 2649756 - DNA, 25 bp, Homo sapien
atcccatagtttccggctccatagg

SEQ ID NO: 2649757 - DNA, 25 bp, Homo sapien
tatgctctgccacacatcccatagt

SEQ ID NO: 2649758 - DNA, 25 bp, Homo sapien
agggttatcttaggcacttgggcac

SEQ ID NO: 2649759 - DNA, 25 bp, Homo sapien
cataggagcccccaatgatgagggt

SEQ ID NO: 2649760 - DNA, 25 bp, Homo sapien
ctcccatcactgagatacgagcatt

SEQ ID NO: 2649761 - DNA, 25 bp, Homo sapien
gtcctttgttatcgtggccaacaca

SEQ ID NO: 2649762 - DNA, 25 bp, Homo sapien
cactgagatacgagcatttggccaa

SEQ ID NO: 2649763 - DNA, 25 bp, Homo sapien
tggccaaatgtagagaaatcttggg

SEQ ID NO: 2649764 - DNA, 25 bp, Homo sapien
cttaatgatgggctcttttaaagcc

SEQ ID NO: 2649765 - DNA, 25 bp, Homo sapien
gatgggctcttttaaagccgcttca

SEQ ID NO: 2649766 - DNA, 25 bp, Homo sapien
ttttaaagccgcttcatcagcactg

SEQ ID NO: 2649767 - DNA, 25 bp, Homo sapien
ggctcttttaaagccgcttcatcag

SEQ ID NO: 2649768 - DNA, 25 bp, Homo sapien
tggtgtctgctggatcaatgatccc

SEQ ID NO: 2649769 - DNA, 25 bp, Homo sapien
gacccaagaccagtctggtgtctgc

SEQ ID NO: 2649770 - DNA, 25 bp, Homo sapien
gaagtcagtcttctctattggtgcg

SEQ ID NO: 2649771 - DNA, 25 bp, Homo sapien
tgagggctgcactaaaactgagacc

SEQ ID NO: 2649772 - DNA, 25 bp, Homo sapien
aggaggatccttgctctcacggagc

SEQ ID NO: 2649773 - DNA, 25 bp, Homo sapien
gacctactggatatgcaggcctgca

SEQ ID NO: 2649774 - DNA, 25 bp, Homo sapien
taaggcctgcgatagtgaaagacaa

SEQ ID NO: 2649775 - DNA, 25 bp, Homo sapien
tagggaagctaatccagcacaggga

SEQ ID NO: 2649776 - DNA, 25 bp, Homo sapien
ccaccttttatagtgagcccgagcc

SEQ ID NO: 2649777 - DNA, 25 bp, Homo sapien
cgttctgaaactcgtcgttgctggg

SEQ ID NO: 2649778 - DNA, 25 bp, Homo sapien
caccttttatagtgagcccgagccc

SEQ ID NO: 2649779 - DNA, 25 bp, Homo sapien
ctcccaccttttatagtgagcccga

SEQ ID NO: 2649780 - DNA, 25 bp, Homo sapien
cacggcagagtagatgtccagggct

SEQ ID NO: 2649781 - DNA, 25 bp, Homo sapien
gggaggcatcatccacggcagagta

SEQ ID NO: 2649782 - DNA, 25 bp, Homo sapien
ggcagcagcctcacgcgggagctct

SEQ ID NO: 2649783 - DNA, 25 bp, Homo sapien
tacccaacagaggtagcatcagcag

SEQ ID NO: 2649784 - DNA, 25 bp, Homo sapien
aagagacaaggcgacagctcaaggg

SEQ ID NO: 2649785 - DNA, 25 bp, Homo sapien
agctcaagggggtcgagagcgaggg

SEQ ID NO: 2649786 - DNA, 25 bp, Homo sapien
agagaagagacaaggcgacagctca

SEQ ID NO: 2649787 - DNA, 25 bp, Homo sapien
caagggggtcgagagcgaggggaat

SEQ ID NO: 2649788 - DNA, 25 bp, Homo sapien
tcgagacgctcttcggatggcagtg

SEQ ID NO: 2649789 - DNA, 25 bp, Homo sapien
gagcccgtgagctcgagacgctctt

SEQ ID NO: 2649790 - DNA, 25 bp, Homo sapien
gccgggatgagggattcgctcaaca

SEQ ID NO: 2649791 - DNA, 25 bp, Homo sapien
gattcgctcaacagactgccaggag

SEQ ID NO: 2649792 - DNA, 25 bp, Homo sapien
ggtggaaacttagcggacgctgtcc

SEQ ID NO: 2649793 - DNA, 25 bp, Homo sapien
ttagcggacgctgtcccaggtactg

SEQ ID NO: 2649794 - DNA, 25 bp, Homo sapien
ggactccgcggacacagggaatggt

SEQ ID NO: 2649795 - DNA, 25 bp, Homo sapien
gacccacacgcactctgcggtggga

SEQ ID NO: 2649796 - DNA, 25 bp, Homo sapien
tgcaacacaccgcttcggagcctga

SEQ ID NO: 2649797 - DNA, 25 bp, Homo sapien
ccgcttcggagcctgaagttgccgc

SEQ ID NO: 2649798 - DNA, 25 bp, Homo sapien
tgaagttgccgccttggctgcgagc

SEQ ID NO: 2649799 - DNA, 25 bp, Homo sapien
aacacaccgcttcggagcctgaagt

SEQ ID NO: 2649800 - DNA, 25 bp, Homo sapien
agatgggaacacgtttactcttgag

SEQ ID NO: 2649801 - DNA, 25 bp, Homo sapien
gaacacgtttactcttgagcttctt

SEQ ID NO: 2649802 - DNA, 25 bp, Homo sapien
gatgggaacacgtttactcttgagc

SEQ ID NO: 2649803 - DNA, 25 bp, Homo sapien
tgggaacacgtttactcttgagctt

SEQ ID NO: 2649804 - DNA, 25 bp, Homo sapien
actgcacactgctcaccggcgtcac

SEQ ID NO: 2649805 - DNA, 25 bp, Homo sapien
caggaggttcctcggggacagtcac

SEQ ID NO: 2649806 - DNA, 25 bp, Homo sapien
tcataagcacttcaggaggaaggaa

SEQ ID NO: 2649807 - DNA, 25 bp, Homo sapien
ggaaggaattgcaggaggttcctcg

SEQ ID NO: 2649808 - DNA, 25 bp, Homo sapien
gcttaagccaaactccagggaggaa

SEQ ID NO: 2649809 - DNA, 25 bp, Homo sapien
tgtatggaggagaatggacgcccct

SEQ ID NO: 2649810 - DNA, 25 bp, Homo sapien
ggatgtatggaggagaatggacgcc

SEQ ID NO: 2649811 - DNA, 25 bp, Homo sapien
gttgcttaagccaaactccagggag

SEQ ID NO: 2649812 - DNA, 25 bp, Homo sapien
caaaggtacacaagagtttgtcaga

SEQ ID NO: 2649813 - DNA, 25 bp, Homo sapien
caggttgtaatgacatctaccgaga

SEQ ID NO: 2649814 - DNA, 25 bp, Homo sapien
tacttcacacacgtatcaacaccat

SEQ ID NO: 2649815 - DNA, 25 bp, Homo sapien
ccatacaaggcattattcttcacac

SEQ ID NO: 2649816 - DNA, 25 bp, Homo sapien
aatacaccagatgtaagtcaagcga

SEQ ID NO: 2649817 - DNA, 25 bp, Homo sapien
ctgcagaatacaccagatgtaagtc

SEQ ID NO: 2649818 - DNA, 25 bp, Homo sapien
agaatacaccagatgtaagtcaagc

SEQ ID NO: 2649819 - DNA, 25 bp, Homo sapien
tgcagaatacaccagatgtaagtca

SEQ ID NO: 2649820 - DNA, 25 bp, Homo sapien
cttccaatgcaggagccccgctctt

SEQ ID NO: 2649821 - DNA, 25 bp, Homo sapien
aaaactcaaatatgaccagctccgt

SEQ ID NO: 2649822 - DNA, 25 bp, Homo sapien
gctgcaggcatggtttgaagtgtcc

SEQ ID NO: 2649823 - DNA, 25 bp, Homo sapien
gggctttccctgaggatatacccag

SEQ ID NO: 2649824 - DNA, 25 bp, Homo sapien
ttttctgagttacttgggccagagg

SEQ ID NO: 2649825 - DNA, 25 bp, Homo sapien
gaggaagtagatgtgataccatcca

SEQ ID NO: 2649826 - DNA, 25 bp, Homo sapien
ctgaggaagtagatgtgataccatc

SEQ ID NO: 2649827 - DNA, 25 bp, Homo sapien
attctgaggaagtagatgtgatacc

SEQ ID NO: 2649828 - DNA, 25 bp, Homo sapien
tgaggaagtagatgtgataccatcc

SEQ ID NO: 2649829 - DNA, 25 bp, Homo sapien
ccgcaatatgaaagcgaattttccc

SEQ ID NO: 2649830 - DNA, 25 bp, Homo sapien
caatatgaaagcgaattttccccct

SEQ ID NO: 2649831 - DNA, 25 bp, Homo sapien
cgcaatatgaaagcgaattttcccc

SEQ ID NO: 2649832 - DNA, 25 bp, Homo sapien
gcaatatgaaagcgaattttccccc

SEQ ID NO: 2649833 - DNA, 25 bp, Homo sapien
cacataatcacaggctttctggctc

SEQ ID NO: 2649834 - DNA, 25 bp, Homo sapien
taatgcacataatcacaggctttct

SEQ ID NO: 2649835 - DNA, 25 bp, Homo sapien
tgcacataatcacaggctttctggc

SEQ ID NO: 2649836 - DNA, 25 bp, Homo sapien
tcttccatcacataatgcacataat

SEQ ID NO: 2649837 - DNA, 25 bp, Homo sapien
ccatttgaaacttattcctccttgt

SEQ ID NO: 2649838 - DNA, 25 bp, Homo sapien
gccatttgaaacttattcctccttg

SEQ ID NO: 2649839 - DNA, 25 bp, Homo sapien
catttgaaacttattcctccttgtt

SEQ ID NO: 2649840 - DNA, 25 bp, Homo sapien
tagacacagagcctgaaatgactag

SEQ ID NO: 2649841 - DNA, 25 bp, Homo sapien
tgctgaccaaggagtgaaccaaaat

SEQ ID NO: 2649842 - DNA, 25 bp, Homo sapien
ggtaacttggcatcattagacacag

SEQ ID NO: 2649843 - DNA, 25 bp, Homo sapien
ctgaccaaggagtgaaccaaaatcc

SEQ ID NO: 2649844 - DNA, 25 bp, Homo sapien
ggagtttccgcagttagcgttcagc

SEQ ID NO: 2649845 - DNA, 25 bp, Homo sapien
gtttccgcagttagcgttcagcttc

SEQ ID NO: 2649846 - DNA, 25 bp, Homo sapien
gagtttccgcagttagcgttcagct

SEQ ID NO: 2649847 - DNA, 25 bp, Homo sapien
ggggagtttccgcagttagcgttca

SEQ ID NO: 2649848 - DNA, 25 bp, Homo sapien
gctgcaagcccaagttcacctcagt

SEQ ID NO: 2649849 - DNA, 25 bp, Homo sapien
actcccacaagtgcacccagcatta

SEQ ID NO: 2649850 - DNA, 25 bp, Homo sapien
gaggatagtcctctgcccaaattaa

SEQ ID NO: 2649851 - DNA, 25 bp, Homo sapien
tcactcaacagaggtaccagagatc

SEQ ID NO: 2649852 - DNA, 25 bp, Homo sapien
ggctaagagcaacagatcagtgaaa

SEQ ID NO: 2649853 - DNA, 25 bp, Homo sapien
tctgggctaagagcaacagatcagt

SEQ ID NO: 2649854 - DNA, 25 bp, Homo sapien
gggctaagagcaacagatcagtgaa

SEQ ID NO: 2649855 - DNA, 25 bp, Homo sapien
tgggctaagagcaacagatcagtga

SEQ ID NO: 2649856 - DNA, 25 bp, Homo sapien
tcactctgcgacatgaagtcccgtc

SEQ ID NO: 2649857 - DNA, 25 bp, Homo sapien
tctgcgacatgaagtcccgtcttgg

SEQ ID NO: 2649858 - DNA, 25 bp, Homo sapien
gcgacatgaagtcccgtcttgggcc

SEQ ID NO: 2649859 - DNA, 25 bp, Homo sapien
tttcactctgcgacatgaagtcccg

SEQ ID NO: 2649860 - DNA, 25 bp, Homo sapien
tgtgagctctctgaccaaatccaag

SEQ ID NO: 2649861 - DNA, 25 bp, Homo sapien
gctctctgaccaaatccaagtgaca

SEQ ID NO: 2649862 - DNA, 25 bp, Homo sapien
tcttctgggccatgagggtctcctt

SEQ ID NO: 2649863 - DNA, 25 bp, Homo sapien
ctgaggttgtgagctctctgaccaa

SEQ ID NO: 2649864 - DNA, 25 bp, Homo sapien
aacagcctcaactggcccttctaag

SEQ ID NO: 2649865 - DNA, 25 bp, Homo sapien
tggcccttctaaggttcctgaacaa

SEQ ID NO: 2649866 - DNA, 25 bp, Homo sapien
tcaactattaaaacaaggagaggaa

SEQ ID NO: 2649867 - DNA, 25 bp, Homo sapien
cttcaactattaaaacaaggagagg

SEQ ID NO: 2649868 - DNA, 25 bp, Homo sapien
tggttaatcccataagggttctctc

SEQ ID NO: 2649869 - DNA, 25 bp, Homo sapien
ggtccaacagctatcctgataccaa

SEQ ID NO: 2649870 - DNA, 25 bp, Homo sapien
gcagcactagccacaaatgttctct

SEQ ID NO: 2649871 - DNA, 25 bp, Homo sapien
catttttgcaaatccacaattaggt

SEQ ID NO: 2649872 - DNA, 25 bp, Homo sapien
acaacagaaatcctgcctgggtcct

SEQ ID NO: 2649873 - DNA, 25 bp, Homo sapien
acaagaacaacagaaatcctgcctg

SEQ ID NO: 2649874 - DNA, 25 bp, Homo sapien
actgcctgatcattcgcgtggcagc

SEQ ID NO: 2649875 - DNA, 25 bp, Homo sapien
agcggggaggagatcggcagcacct

SEQ ID NO: 2649876 - DNA, 25 bp, Homo sapien
aatggcagtgtccggctgagggagg

SEQ ID NO: 2649877 - DNA, 25 bp, Homo sapien
ctgatcattcgcgtggcagcagcgg

SEQ ID NO: 2649878 - DNA, 25 bp, Homo sapien
cagctgacaatgcaccagaagttac

SEQ ID NO: 2649879 - DNA, 25 bp, Homo sapien
gaagttacaggcctaggagtatgca

SEQ ID NO: 2649880 - DNA, 25 bp, Homo sapien
ctggacagctgacaatgcaccagaa

SEQ ID NO: 2649881 - DNA, 25 bp, Homo sapien
tgacaatgcaccagaagttacaggc

SEQ ID NO: 2649882 - DNA, 25 bp, Homo sapien
tattttttcccaagctgagtgaaca

SEQ ID NO: 2649883 - DNA, 25 bp, Homo sapien
ttttcccaagctgagtgaacaccat

SEQ ID NO: 2649884 - DNA, 25 bp, Homo sapien
tcccaagctgagtgaacaccattac

SEQ ID NO: 2649885 - DNA, 25 bp, Homo sapien
ttgtgtatcatggtattttttccca

SEQ ID NO: 2649886 - DNA, 25 bp, Homo sapien
caaggacacacttgtcttgtgaata

SEQ ID NO: 2649887 - DNA, 25 bp, Homo sapien
cccagttaatcctcttttgagattc

SEQ ID NO: 2649888 - DNA, 25 bp, Homo sapien
gttccttgcggcctacaatccatgg

SEQ ID NO: 2649889 - DNA, 25 bp, Homo sapien
tgagattcatgaagtaccaaggaca

SEQ ID NO: 2649890 - DNA, 25 bp, Homo sapien
gtttatctaggtttaaatatccaca

SEQ ID NO: 2649891 - DNA, 25 bp, Homo sapien
ccaaactctcagatactatggcttc

SEQ ID NO: 2649892 - DNA, 25 bp, Homo sapien
aagccaaactctcagatactatggc

SEQ ID NO: 2649893 - DNA, 25 bp, Homo sapien
tcatctttgcatgacgtttatctag

SEQ ID NO: 2649894 - DNA, 25 bp, Homo sapien
agacaggaaaagagccggagcctgc

SEQ ID NO: 2649895 - DNA, 25 bp, Homo sapien
tggagtggcggtagcagagtaaaac

SEQ ID NO: 2649896 - DNA, 25 bp, Homo sapien
gacaggaaaagagccggagcctgcc

SEQ ID NO: 2649897 - DNA, 25 bp, Homo sapien
gacagctggagtggcggtagcagag

SEQ ID NO: 2649898 - DNA, 25 bp, Homo sapien
ttctaatgacatatgctgagcagca

SEQ ID NO: 2649899 - DNA, 25 bp, Homo sapien
ctaatgacatatgctgagcagcagg

SEQ ID NO: 2649900 - DNA, 25 bp, Homo sapien
cctgggggagcaggatgttacagac

SEQ ID NO: 2649901 - DNA, 25 bp, Homo sapien
ggagcaggatgttacagacagaagt

SEQ ID NO: 2649902 - DNA, 25 bp, Homo sapien
ggcttctccgggatcggtcacgtta

SEQ ID NO: 2649903 - DNA, 25 bp, Homo sapien
gccagcgagagctcaccggatgccg

SEQ ID NO: 2649904 - DNA, 25 bp, Homo sapien
gagagctcaccggatgccgccagaa

SEQ ID NO: 2649905 - DNA, 25 bp, Homo sapien
tcggtcacgttaccgcactggaaga

SEQ ID NO: 2649906 - DNA, 25 bp, Homo sapien
taagcaagactccagaaacaccatg

SEQ ID NO: 2649907 - DNA, 25 bp, Homo sapien
tcagccaagacactgagggcaaagt

SEQ ID NO: 2649908 - DNA, 25 bp, Homo sapien
caacagcactccatggttcagtaga

SEQ ID NO: 2649909 - DNA, 25 bp, Homo sapien
gcaactggttatccatcagccaaga

SEQ ID NO: 2649910 - DNA, 25 bp, Homo sapien
cggtaattacttcaatgtccctggt

SEQ ID NO: 2649911 - DNA, 25 bp, Homo sapien
tattatggaaatgacggtaattact

SEQ ID NO: 2649912 - DNA, 25 bp, Homo sapien
aatgacggtaattacttcaatgtcc

SEQ ID NO: 2649913 - DNA, 25 bp, Homo sapien
ggaaatgacggtaattacttcaatg

SEQ ID NO: 2649914 - DNA, 25 bp, Homo sapien
ctccccaaccctgactgtgagtgat

SEQ ID NO: 2649915 - DNA, 25 bp, Homo sapien
ctctccccaaccctgactgtgagtg

SEQ ID NO: 2649916 - DNA, 25 bp, Homo sapien
cccaaccctgactgtgagtgatcat

SEQ ID NO: 2649917 - DNA, 25 bp, Homo sapien
tgtctcctctccccaaccctgactg

SEQ ID NO: 2649918 - DNA, 25 bp, Homo sapien
ggaagaccagcctcactgcccatct

SEQ ID NO: 2649919 - DNA, 25 bp, Homo sapien
tgcacatttgccactggcttcctgc

SEQ ID NO: 2649920 - DNA, 25 bp, Homo sapien
tgaccacccactctggaagaccagc

SEQ ID NO: 2649921 - DNA, 25 bp, Homo sapien
cctggtcttgcacatttgccactgg

SEQ ID NO: 2649922 - DNA, 25 bp, Homo sapien
ggacagtggtcctaatccatggcca

SEQ ID NO: 2649923 - DNA, 25 bp, Homo sapien
cagcttgtgatgcttgtgagctctg

SEQ ID NO: 2649924 - DNA, 25 bp, Homo sapien
atggccatttgcccgcctgctgaca

SEQ ID NO: 2649925 - DNA, 25 bp, Homo sapien
ttcaacatgtcatcatggacagtgg

SEQ ID NO: 2649926 - DNA, 25 bp, Homo sapien
tagccaggcaggaagtaagtccagc

SEQ ID NO: 2649927 - DNA, 25 bp, Homo sapien
tgatacttgcaaggagccactctgc

SEQ ID NO: 2649928 - DNA, 25 bp, Homo sapien
cagcaacccatgtgattccgtgata

SEQ ID NO: 2649929 - DNA, 25 bp, Homo sapien
aacattagctgactctgaacctgca

SEQ ID NO: 2649930 - DNA, 25 bp, Homo sapien
aattctcatggactaattcaaacat

SEQ ID NO: 2649931 - DNA, 25 bp, Homo sapien
gagcgaatgtgttggatcactgcca

SEQ ID NO: 2649932 - DNA, 25 bp, Homo sapien
tctgaacgctgacgtatcccatgag

SEQ ID NO: 2649933 - DNA, 25 bp, Homo sapien
tgcaggctattacgttctgaacgct

SEQ ID NO: 2649934 - DNA, 25 bp, Homo sapien
tactaaggctgataaacaacgaaaa

SEQ ID NO: 2649935 - DNA, 25 bp, Homo sapien
taataatacagagattgccaattca

SEQ ID NO: 2649936 - DNA, 25 bp, Homo sapien
catcacattgtacctcataagtaca

SEQ ID NO: 2649937 - DNA, 25 bp, Homo sapien
ccacaaattgtgacaagatatttgc

SEQ ID NO: 2649938 - DNA, 25 bp, Homo sapien
ctcgtgatccacgtgggtgggcatg

SEQ ID NO: 2649939 - DNA, 25 bp, Homo sapien
cgtgatccacgtgggtgggcatggt

SEQ ID NO: 2649940 - DNA, 25 bp, Homo sapien
actttgggaggcctgccttgccttc

SEQ ID NO: 2649941 - DNA, 25 bp, Homo sapien
gacctcgtgatccacgtgggtgggc

SEQ ID NO: 2649942 - DNA, 25 bp, Homo sapien
tcacgagcgtgatcatttagactaa

SEQ ID NO: 2649943 - DNA, 25 bp, Homo sapien
tagactaatgtatttgacagctcgg

SEQ ID NO: 2649944 - DNA, 25 bp, Homo sapien
ctcttctgactgtagctcacgagcg

SEQ ID NO: 2649945 - DNA, 25 bp, Homo sapien
ttgacagctcggaggcttttcctgg

SEQ ID NO: 2649946 - DNA, 25 bp, Homo sapien
gtgttgtcattagcctgcaaaaatc

SEQ ID NO: 2649947 - DNA, 25 bp, Homo sapien
gtccacacttctttggcacttcctg

SEQ ID NO: 2649948 - DNA, 25 bp, Homo sapien
tgatgtctaacagcagttgtccaga

SEQ ID NO: 2649949 - DNA, 25 bp, Homo sapien
gcaaaaatcctatacagtccacact

SEQ ID NO: 2649950 - DNA, 25 bp, Homo sapien
tgggcaccagatgaatcaatagaga

SEQ ID NO: 2649951 - DNA, 25 bp, Homo sapien
gctttaacagttgcaatattctcgt

SEQ ID NO: 2649952 - DNA, 25 bp, Homo sapien
tccacaagatacagcagctcagatc

SEQ ID NO: 2649953 - DNA, 25 bp, Homo sapien
gatctctcctctgttatacaacttg

SEQ ID NO: 2649954 - DNA, 25 bp, Homo sapien
tcgtatctgcctttttcaaccacca

SEQ ID NO: 2649955 - DNA, 25 bp, Homo sapien
tcacagatggcctgggcttgggaag

SEQ ID NO: 2649956 - DNA, 25 bp, Homo sapien
tgggcaggtcacagatggcctgggc

SEQ ID NO: 2649957 - DNA, 25 bp, Homo sapien
caggtcacagatggcctgggcttgg

SEQ ID NO: 2649958 - DNA, 25 bp, Homo sapien
ggctggatgggcaggtcacagatgg

SEQ ID NO: 2649959 - DNA, 25 bp, Homo sapien
acgcaagcttcagggtgcctctcgc

SEQ ID NO: 2649960 - DNA, 25 bp, Homo sapien
cttaagatagagagacgcaagcttc

SEQ ID NO: 2649961 - DNA, 25 bp, Homo sapien
ggtgcctctcgccattcccctggtg

SEQ ID NO: 2649962 - DNA, 25 bp, Homo sapien
gatagagagacgcaagcttcagggt

SEQ ID NO: 2649963 - DNA, 25 bp, Homo sapien
tcctcgtaaggaggtcaccctggag

SEQ ID NO: 2649964 - DNA, 25 bp, Homo sapien
cagacaacaagtgagtgctttgagg

SEQ ID NO: 2649965 - DNA, 25 bp, Homo sapien
gacagacaacaagtgagtgctttga

SEQ ID NO: 2649966 - DNA, 25 bp, Homo sapien
gaggacatcctcgtaaggaggtcac

SEQ ID NO: 2649967 - DNA, 25 bp, Homo sapien
gcagattgctgcattccctcgtgga

SEQ ID NO: 2649968 - DNA, 25 bp, Homo sapien
tccctcgtggatgtccatggctctc

SEQ ID NO: 2649969 - DNA, 25 bp, Homo sapien
tgcattccctcgtggatgtccatgg

SEQ ID NO: 2649970 - DNA, 25 bp, Homo sapien
aatacagcagattgctgcattccct

SEQ ID NO: 2649971 - DNA, 25 bp, Homo sapien
tactttccatccatagggatgattg

SEQ ID NO: 2649972 - DNA, 25 bp, Homo sapien
gcagcaggagagaattggtgggtta

SEQ ID NO: 2649973 - DNA, 25 bp, Homo sapien
caccgtctgttagttaggcattgga

SEQ ID NO: 2649974 - DNA, 25 bp, Homo sapien
tggtgggttatagccctccaccgtc

SEQ ID NO: 2649975 - DNA, 25 bp, Homo sapien
aacctagtccattctctatggtcca

SEQ ID NO: 2649976 - DNA, 25 bp, Homo sapien
taaccagtggtatgaagcagggccc

SEQ ID NO: 2649977 - DNA, 25 bp, Homo sapien
agatgccttgtttcataaccagtgg

SEQ ID NO: 2649978 - DNA, 25 bp, Homo sapien
caggcacatacagtcaggtcgaagc

SEQ ID NO: 2649979 - DNA, 25 bp, Homo sapien
atccaaaagctagagcccgggaggc

SEQ ID NO: 2649980 - DNA, 25 bp, Homo sapien
tccaaaagctagagcccgggaggct

SEQ ID NO: 2649981 - DNA, 25 bp, Homo sapien
caaaagctagagcccgggaggctaa

SEQ ID NO: 2649982 - DNA, 25 bp, Homo sapien
ccaaaagctagagcccgggaggcta

SEQ ID NO: 2649983 - DNA, 25 bp, Homo sapien
ttaatatgcattagtggctgggcac

SEQ ID NO: 2649984 - DNA, 25 bp, Homo sapien
gaaagaaacgctcccgtgtcctgct

SEQ ID NO: 2649985 - DNA, 25 bp, Homo sapien
ccagtgctagaaaggtgaagctcag

SEQ ID NO: 2649986 - DNA, 25 bp, Homo sapien
aaagcacgtagatattgcatggcac

SEQ ID NO: 2649987 - DNA, 25 bp, Homo sapien
tttctttgatcactctgagtcacca

SEQ ID NO: 2649988 - DNA, 25 bp, Homo sapien
ctttctttgatcactctgagtcacc

SEQ ID NO: 2649989 - DNA, 25 bp, Homo sapien
ttctttgatcactctgagtcaccat

SEQ ID NO: 2649990 - DNA, 25 bp, Homo sapien
gagaaaggattatctccgaaggtac

SEQ ID NO: 2649991 - DNA, 25 bp, Homo sapien
gattatctccgaaggtactgtctcc

SEQ ID NO: 2649992 - DNA, 25 bp, Homo sapien
ccagcgccgcggagagtgcgcggcg

SEQ ID NO: 2649993 - DNA, 25 bp, Homo sapien
tatctccgaaggtactgtctccgct

SEQ ID NO: 2649994 - DNA, 25 bp, Homo sapien
tgcctcggcgaagtgtctcgctccg

SEQ ID NO: 2649995 - DNA, 25 bp, Homo sapien
ctgtgcctcggcgaagtgtctcgct

SEQ ID NO: 2649996 - DNA, 25 bp, Homo sapien
ctgctgtgcctcggcgaagtgtctc

SEQ ID NO: 2649997 - DNA, 25 bp, Homo sapien
ggcgaagtgtctcgctccggccgct

SEQ ID NO: 2649998 - DNA, 25 bp, Homo sapien
cttgctgtcaaggaagcggtgcgac

SEQ ID NO: 2649999 - DNA, 25 bp, Homo sapien
aggtgctcctcggtcacgatctcgc

SEQ ID NO: 2650000 - DNA, 25 bp, Homo sapien
tgcgacaggctaggcgaggtggacg

SEQ ID NO: 2650001 - DNA, 25 bp, Homo sapien
ctcgatgttgccgatggcacgccgc

SEQ ID NO: 2650002 - DNA, 25 bp, Homo sapien
aggccccaagggcggtagcgaggcg

SEQ ID NO: 2650003 - DNA, 25 bp, Homo sapien
caaggccccaagggcggtagcgagg

SEQ ID NO: 2650004 - DNA, 25 bp, Homo sapien
agggcggtagcgaggcgggctctgt

SEQ ID NO: 2650005 - DNA, 25 bp, Homo sapien
cccaagggcggtagcgaggcgggct

SEQ ID NO: 2650006 - DNA, 25 bp, Homo sapien
accaccccaggagaatagagcgcgg

SEQ ID NO: 2650007 - DNA, 25 bp, Homo sapien
tagagaccgcagtgcggactgcacc

SEQ ID NO: 2650008 - DNA, 25 bp, Homo sapien
aacgagggctgcgtgaacgcccttt

SEQ ID NO: 2650009 - DNA, 25 bp, Homo sapien
ctcgggctgccgtagagaccgcagt

SEQ ID NO: 2650010 - DNA, 25 bp, Homo sapien
acaaaagaaccaggtctgcaactcc

SEQ ID NO: 2650011 - DNA, 25 bp, Homo sapien
tgggatcaatacagtcatttcggag

SEQ ID NO: 2650012 - DNA, 25 bp, Homo sapien
ggttgattcttaatgggatcaatac

SEQ ID NO: 2650013 - DNA, 25 bp, Homo sapien
tcaatacagtcatttcggagttcca

SEQ ID NO: 2650014 - DNA, 25 bp, Homo sapien
tcatttcggagttccatgcaaaaac

SEQ ID NO: 2650015 - DNA, 25 bp, Homo sapien
tgagctccttgggaccagggagcaa

SEQ ID NO: 2650016 - DNA, 25 bp, Homo sapien
tgtctggagccaaaaggcatccgtc

SEQ ID NO: 2650017 - DNA, 25 bp, Homo sapien
aggcatccgtcatctctgagaacaa

SEQ ID NO: 2650018 - DNA, 25 bp, Homo sapien
ccaggtgggggcagaataactccag

SEQ ID NO: 2650019 - DNA, 25 bp, Homo sapien
tcaggtttgtgtcccatgatcggat

SEQ ID NO: 2650020 - DNA, 25 bp, Homo sapien
ttcttggtccaagttgcattcaatc

SEQ ID NO: 2650021 - DNA, 25 bp, Homo sapien
tcaggagagaatcttgcagagtgtc

SEQ ID NO: 2650022 - DNA, 25 bp, Homo sapien
gcagagtgtcgagatacaaaaagtt

SEQ ID NO: 2650023 - DNA, 25 bp, Homo sapien
tattctttgatattctttttcatct

SEQ ID NO: 2650024 - DNA, 25 bp, Homo sapien
ggtggaactgatcatccttgtttac

SEQ ID NO: 2650025 - DNA, 25 bp, Homo sapien
gaactgatcatccttgtttacaaac

SEQ ID NO: 2650026 - DNA, 25 bp, Homo sapien
tgtttacaaacaagaagactgaaaa

SEQ ID NO: 2650027 - DNA, 25 bp, Homo sapien
gaggtggaactgatcatccttgttt

SEQ ID NO: 2650028 - DNA, 25 bp, Homo sapien
gagtcagccccttgaatgccgctag

SEQ ID NO: 2650029 - DNA, 25 bp, Homo sapien
aatcggctgtccctctgaaattgca

SEQ ID NO: 2650030 - DNA, 25 bp, Homo sapien
ggacaagtacctagacctgtgcgtg

SEQ ID NO: 2650031 - DNA, 25 bp, Homo sapien
ccaaaggaccttagaagctcagcca

SEQ ID NO: 2650032 - DNA, 25 bp, Homo sapien
cttgggcggcaaagtctcaatggga

SEQ ID NO: 2650033 - DNA, 25 bp, Homo sapien
gcactggggtgagagcggacagcat

SEQ ID NO: 2650034 - DNA, 25 bp, Homo sapien
tgtctgctgcttgggcggcaaagtc

SEQ ID NO: 2650035 - DNA, 25 bp, Homo sapien
gggtgactgggctgtctgctgcttg

SEQ ID NO: 2650036 - DNA, 25 bp, Homo sapien
attctaatcttctccttggaaggtc

SEQ ID NO: 2650037 - DNA, 25 bp, Homo sapien
ctataaaattctaatcttctccttg

SEQ ID NO: 2650038 - DNA, 25 bp, Homo sapien
taaaattctaatcttctccttggaa

SEQ ID NO: 2650039 - DNA, 25 bp, Homo sapien
cttggaaggtctggctctttcaccg

SEQ ID NO: 2650040 - DNA, 25 bp, Homo sapien
gaggatctggatataaagaatcctg

SEQ ID NO: 2650041 - DNA, 25 bp, Homo sapien
ttgaccaagatgtaaagcttgcagg

SEQ ID NO: 2650042 - DNA, 25 bp, Homo sapien
caggaattatgccttatgctgcgta

SEQ ID NO: 2650043 - DNA, 25 bp, Homo sapien
cttgtatgtgaggatctggatataa

SEQ ID NO: 2650044 - DNA, 25 bp, Homo sapien
tctgaaagagcccattattaactac

SEQ ID NO: 2650045 - DNA, 25 bp, Homo sapien
tctagggtggtctgaaagagcccat

SEQ ID NO: 2650046 - DNA, 25 bp, Homo sapien
tgaataggtatttctagggtggtct

SEQ ID NO: 2650047 - DNA, 25 bp, Homo sapien
ttattaactaccctgaggaatgagg

SEQ ID NO: 2650048 - DNA, 25 bp, Homo sapien
gagtggttccacagtgcccattagg

SEQ ID NO: 2650049 - DNA, 25 bp, Homo sapien
cccattaggaactgcgtgagagcca

SEQ ID NO: 2650050 - DNA, 25 bp, Homo sapien
cctgcctatgcctgtctatgctgag

SEQ ID NO: 2650051 - DNA, 25 bp, Homo sapien
tgagagccattacagtcagcagagt

SEQ ID NO: 2650052 - DNA, 25 bp, Homo sapien
gcctgcagagctaggaactgaactg

SEQ ID NO: 2650053 - DNA, 25 bp, Homo sapien
tggcctgcagagctaggaactgaac

SEQ ID NO: 2650054 - DNA, 25 bp, Homo sapien
ctgcagagctaggaactgaactgtg

SEQ ID NO: 2650055 - DNA, 25 bp, Homo sapien
atggcctgcagagctaggaactgaa

SEQ ID NO: 2650056 - DNA, 25 bp, Homo sapien
cacttattatagactggcttgtttc

SEQ ID NO: 2650057 - DNA, 25 bp, Homo sapien
ttggcacttattatagactggcttg

SEQ ID NO: 2650058 - DNA, 25 bp, Homo sapien
tcatttggcacttattatagactgg

SEQ ID NO: 2650059 - DNA, 25 bp, Homo sapien
catttggcacttattatagactggc

SEQ ID NO: 2650060 - DNA, 25 bp, Homo sapien
atagtctctatgcaagtgtttgaca

SEQ ID NO: 2650061 - DNA, 25 bp, Homo sapien
ctgactttggggatagtctctatgc

SEQ ID NO: 2650062 - DNA, 25 bp, Homo sapien
tgcaagtgtttgacattgtgcaaac

SEQ ID NO: 2650063 - DNA, 25 bp, Homo sapien
tgacattgtgcaaacatgattaaat

SEQ ID NO: 2650064 - DNA, 25 bp, Homo sapien
gataagaaatcgctactaatccgca

SEQ ID NO: 2650065 - DNA, 25 bp, Homo sapien
ttcagaaggactataacatccaggg

SEQ ID NO: 2650066 - DNA, 25 bp, Homo sapien
tccaagtaggtagcacggtgtgcac

SEQ ID NO: 2650067 - DNA, 25 bp, Homo sapien
taccaataggttcatcatgaggacc

SEQ ID NO: 2650068 - DNA, 25 bp, Homo sapien
gctgttctgcgttacagcctgagct

SEQ ID NO: 2650069 - DNA, 25 bp, Homo sapien
gagctggacagttgtctcaggaaaa

SEQ ID NO: 2650070 - DNA, 25 bp, Homo sapien
gagagagctgttctgcgttacagcc

SEQ ID NO: 2650071 - DNA, 25 bp, Homo sapien
cctgagctggacagttgtctcagga

SEQ ID NO: 2650072 - DNA, 25 bp, Homo sapien
caggtgtacaggataaagatctgct

SEQ ID NO: 2650073 - DNA, 25 bp, Homo sapien
aaactaaagtcctctgaactgggct

SEQ ID NO: 2650074 - DNA, 25 bp, Homo sapien
gatctgctgcctctaaagtctcaat

SEQ ID NO: 2650075 - DNA, 25 bp, Homo sapien
gaactgggcttttcttatgtatcag

SEQ ID NO: 2650076 - DNA, 25 bp, Homo sapien
tatgcgcacctcttcaaaaacctct

SEQ ID NO: 2650077 - DNA, 25 bp, Homo sapien
caaatgaaggctgcaatactttact

SEQ ID NO: 2650078 - DNA, 25 bp, Homo sapien
aagccagtgtttcttaatagtatag

SEQ ID NO: 2650079 - DNA, 25 bp, Homo sapien
cattgcagataataaggataggcat

SEQ ID NO: 2650080 - DNA, 25 bp, Homo sapien
tcttgctggaaaacactggatatgt

SEQ ID NO: 2650081 - DNA, 25 bp, Homo sapien
ctctttcagatgcattcttcttgct

SEQ ID NO: 2650082 - DNA, 25 bp, Homo sapien
ggaaaacactggatatgtgtaaatc

SEQ ID NO: 2650083 - DNA, 25 bp, Homo sapien
cactggatatgtgtaaatctcctct

SEQ ID NO: 2650084 - DNA, 25 bp, Homo sapien
cattcatctgcataggtgtaatagg

SEQ ID NO: 2650085 - DNA, 25 bp, Homo sapien
aataggattgcttcgataatcacag

SEQ ID NO: 2650086 - DNA, 25 bp, Homo sapien
gaaaaatccaagatggacgctagaa

SEQ ID NO: 2650087 - DNA, 25 bp, Homo sapien
accaggtccactttgatcttggccc

SEQ ID NO: 2650088 - DNA, 25 bp, Homo sapien
agtctgcacaataagcgaccgccca

SEQ ID NO: 2650089 - DNA, 25 bp, Homo sapien
gaggtggatgtagaaacacagtccc

SEQ ID NO: 2650090 - DNA, 25 bp, Homo sapien
ttgaatgtgctccaattcgccttcc

SEQ ID NO: 2650091 - DNA, 25 bp, Homo sapien
gagcagatcccatagcacaatccag

SEQ ID NO: 2650092 - DNA, 25 bp, Homo sapien
gctggacagagcgtgattttcacca

SEQ ID NO: 2650093 - DNA, 25 bp, Homo sapien
ggttgaagccagagatcccaaattc

SEQ ID NO: 2650094 - DNA, 25 bp, Homo sapien
tgtctttaaagactagtgccctccc

SEQ ID NO: 2650095 - DNA, 25 bp, Homo sapien
caacagtccagggaacaaatctgca

SEQ ID NO: 2650096 - DNA, 25 bp, Homo sapien
gatgaggcacaggtaaccttcaaga

SEQ ID NO: 2650097 - DNA, 25 bp, Homo sapien
tagttacagagcaagtgatgaggca

SEQ ID NO: 2650098 - DNA, 25 bp, Homo sapien
ccttcaagatattgccccagcaaca

SEQ ID NO: 2650099 - DNA, 25 bp, Homo sapien
caaagatgggcctttctgattcagc

SEQ ID NO: 2650100 - DNA, 25 bp, Homo sapien
cagggaccaagcatctatgccaggg

SEQ ID NO: 2650101 - DNA, 25 bp, Homo sapien
cttccagggaccaagcatctatgcc

SEQ ID NO: 2650102 - DNA, 25 bp, Homo sapien
tactggccaattgatcacccagcag

SEQ ID NO: 2650103 - DNA, 25 bp, Homo sapien
ggagggcacaggaatactggccaat

SEQ ID NO: 2650104 - DNA, 25 bp, Homo sapien
ttctgtctgtactggaggagaggat

SEQ ID NO: 2650105 - DNA, 25 bp, Homo sapien
cttctgtctgtactggaggagagga

SEQ ID NO: 2650106 - DNA, 25 bp, Homo sapien
ctgtactggaggagaggatgggtag

SEQ ID NO: 2650107 - DNA, 25 bp, Homo sapien
tactggaggagaggatgggtagtcc

SEQ ID NO: 2650108 - DNA, 25 bp, Homo sapien
catctcctcggtgcgtggcaagtgg

SEQ ID NO: 2650109 - DNA, 25 bp, Homo sapien
aacatctcctcggtgcgtggcaagt

SEQ ID NO: 2650110 - DNA, 25 bp, Homo sapien
tctcctcggtgcgtggcaagtggat

SEQ ID NO: 2650111 - DNA, 25 bp, Homo sapien
ctcaacatctcctcggtgcgtggca

SEQ ID NO: 2650112 - DNA, 25 bp, Homo sapien
tcctccctcctggatatagggtgta

SEQ ID NO: 2650113 - DNA, 25 bp, Homo sapien
cctccctcctggatatagggtgtat

SEQ ID NO: 2650114 - DNA, 25 bp, Homo sapien
tacttgactatagtcgggtcggaat

SEQ ID NO: 2650115 - DNA, 25 bp, Homo sapien
gaggtggctcggcaaatacttgact

SEQ ID NO: 2650116 - DNA, 25 bp, Homo sapien
gatctgaagcaaacacgaggtggct

SEQ ID NO: 2650117 - DNA, 25 bp, Homo sapien
tgtgtaacccagcacagctaacccg

SEQ ID NO: 2650118 - DNA, 25 bp, Homo sapien
gacaggctccaaatatggttgtatg

SEQ ID NO: 2650119 - DNA, 25 bp, Homo sapien
tattgtcacaatgaaggaccttacc

SEQ ID NO: 2650120 - DNA, 25 bp, Homo sapien
tttgtgtagacttaaacatcctgct

SEQ ID NO: 2650121 - DNA, 25 bp, Homo sapien
tctacagaaaggctactcaagacta

SEQ ID NO: 2650122 - DNA, 25 bp, Homo sapien
ttacagacgcccactactatgcctg

SEQ ID NO: 2650123 - DNA, 25 bp, Homo sapien
ggattacagacgcccactactatgc

SEQ ID NO: 2650124 - DNA, 25 bp, Homo sapien
tgggattacagacgcccactactat

SEQ ID NO: 2650125 - DNA, 25 bp, Homo sapien
attacagacgcccactactatgcct

SEQ ID NO: 2650126 - DNA, 25 bp, Homo sapien
tctcagagggaatgaaaaggtcttt

SEQ ID NO: 2650127 - DNA, 25 bp, Homo sapien
catggcgtgatgtgtctgcagtgct

SEQ ID NO: 2650128 - DNA, 25 bp, Homo sapien
gctagtggcatgacttaatccttca

SEQ ID NO: 2650129 - DNA, 25 bp, Homo sapien
cacagaatgttaggttgcacgcagc

SEQ ID NO: 2650130 - DNA, 25 bp, Homo sapien
ctgtacaagccacagaagctattac

SEQ ID NO: 2650131 - DNA, 25 bp, Homo sapien
tgtacaagccacagaagctattact

SEQ ID NO: 2650132 - DNA, 25 bp, Homo sapien
ctccctggattctgttgacgatcat

SEQ ID NO: 2650133 - DNA, 25 bp, Homo sapien
ttgacgatcatgaaatcagtgctgc

SEQ ID NO: 2650134 - DNA, 25 bp, Homo sapien
attctgttgacgatcatgaaatcag

SEQ ID NO: 2650135 - DNA, 25 bp, Homo sapien
cctggattctgttgacgatcatgaa

SEQ ID NO: 2650136 - DNA, 25 bp, Homo sapien
tctccaccaaggttccagtggccac

SEQ ID NO: 2650137 - DNA, 25 bp, Homo sapien
ctctccaccaaggttccagtggcca

SEQ ID NO: 2650138 - DNA, 25 bp, Homo sapien
cctctccaccaaggttccagtggcc

SEQ ID NO: 2650139 - DNA, 25 bp, Homo sapien
tcctctccaccaaggttccagtggc

SEQ ID NO: 2650140 - DNA, 25 bp, Homo sapien
gacctgaagggtgattctcggcaca

SEQ ID NO: 2650141 - DNA, 25 bp, Homo sapien
gaatcagcacctacgcatttcctct

SEQ ID NO: 2650142 - DNA, 25 bp, Homo sapien
ggctggatgcctagctgcccagaac

SEQ ID NO: 2650143 - DNA, 25 bp, Homo sapien
tcgtaagtgacgacagaatcagcac

SEQ ID NO: 2650144 - DNA, 25 bp, Homo sapien
catcagccagtgcagtgtccgggta

SEQ ID NO: 2650145 - DNA, 25 bp, Homo sapien
tattgagaggaatggcacagacgtg

SEQ ID NO: 2650146 - DNA, 25 bp, Homo sapien
cagacgtgcaccaagatgccatggc

SEQ ID NO: 2650147 - DNA, 25 bp, Homo sapien
gaagtgatcctacacaacgccctga

SEQ ID NO: 2650148 - DNA, 25 bp, Homo sapien
agccactagtaggttcctccccagg

SEQ ID NO: 2650149 - DNA, 25 bp, Homo sapien
gggaaacacaattggtgctattaaa

SEQ ID NO: 2650150 - DNA, 25 bp, Homo sapien
agaggaatttctgcctccgacgtgg

SEQ ID NO: 2650151 - DNA, 25 bp, Homo sapien
tgctattaaaaaagagggtgcagcc

SEQ ID NO: 2650152 - DNA, 25 bp, Homo sapien
cagaagggttgatcaggaccactgt

SEQ ID NO: 2650153 - DNA, 25 bp, Homo sapien
gcttcatcagaagggttgatcagga

SEQ ID NO: 2650154 - DNA, 25 bp, Homo sapien
tctaaaacgtcacttcggtgatgaa

SEQ ID NO: 2650155 - DNA, 25 bp, Homo sapien
cactgtttctaaaacgtcacttcgg

SEQ ID NO: 2650156 - DNA, 25 bp, Homo sapien
gaattggcaaatcaggacaggcagg

SEQ ID NO: 2650157 - DNA, 25 bp, Homo sapien
ttttacagaggtgcaaacggagaca

SEQ ID NO: 2650158 - DNA, 25 bp, Homo sapien
gaatggagaccgactgctgatgagc

SEQ ID NO: 2650159 - DNA, 25 bp, Homo sapien
ttgaggctcccacctagtaagaggc

SEQ ID NO: 2650160 - DNA, 25 bp, Homo sapien
tcagcacgagcagcttgtgtcgggc

SEQ ID NO: 2650161 - DNA, 25 bp, Homo sapien
attttcaaagcactgcccggtcagc

SEQ ID NO: 2650162 - DNA, 25 bp, Homo sapien
tgtgtcgggcagcatcagtgatcat

SEQ ID NO: 2650163 - DNA, 25 bp, Homo sapien
aaagagccggactggagaatgagct

SEQ ID NO: 2650164 - DNA, 25 bp, Homo sapien
ccattttcctacgtggctccttttg

SEQ ID NO: 2650165 - DNA, 25 bp, Homo sapien
ttcttgggtcacagacgtgccccat

SEQ ID NO: 2650166 - DNA, 25 bp, Homo sapien
ctcttttgtgggctgttcaaacagc

SEQ ID NO: 2650167 - DNA, 25 bp, Homo sapien
tcctacgtggctccttttgtaaagc

SEQ ID NO: 2650168 - DNA, 25 bp, Homo sapien
gagctactagacaaatgcccacctg

SEQ ID NO: 2650169 - DNA, 25 bp, Homo sapien
tcttccctgaggcaagatgctaata

SEQ ID NO: 2650170 - DNA, 25 bp, Homo sapien
cctccgggtacaacatgcacatggg

SEQ ID NO: 2650171 - DNA, 25 bp, Homo sapien
taatgtgtgtgaccccagagctact

SEQ ID NO: 2650172 - DNA, 25 bp, Homo sapien
ttcagattaacagggcacttgttgt

SEQ ID NO: 2650173 - DNA, 25 bp, Homo sapien
agattaacagggcacttgttgtggc

SEQ ID NO: 2650174 - DNA, 25 bp, Homo sapien
aagaaattcagattaacagggcact

SEQ ID NO: 2650175 - DNA, 25 bp, Homo sapien
taacagggcacttgttgtggcctcc

SEQ ID NO: 2650176 - DNA, 25 bp, Homo sapien
tgggtggtgcttagtaactccccga

SEQ ID NO: 2650177 - DNA, 25 bp, Homo sapien
tctgtcaagattggagttcttccag

SEQ ID NO: 2650178 - DNA, 25 bp, Homo sapien
tcaggacagaacagggttaagctgg

SEQ ID NO: 2650179 - DNA, 25 bp, Homo sapien
tctggcaagatagaagctgaattga

SEQ ID NO: 2650180 - DNA, 25 bp, Homo sapien
tccgcagggtttgctggatgccaca

SEQ ID NO: 2650181 - DNA, 25 bp, Homo sapien
gagaaatacaactcctaagtcaggg

SEQ ID NO: 2650182 - DNA, 25 bp, Homo sapien
ccagtgagatccttttgggtggcca

SEQ ID NO: 2650183 - DNA, 25 bp, Homo sapien
tcagccttgtctttgttggtaccag

SEQ ID NO: 2650184 - DNA, 25 bp, Homo sapien
ttcctccttcttgataggtgttttg

SEQ ID NO: 2650185 - DNA, 25 bp, Homo sapien
tcttgacttcctttggcggtgtttc

SEQ ID NO: 2650186 - DNA, 25 bp, Homo sapien
ccttcttgacttcctttggcggtgt

SEQ ID NO: 2650187 - DNA, 25 bp, Homo sapien
tcttgataggtgttttgtcctcctt

SEQ ID NO: 2650188 - DNA, 25 bp, Homo sapien
ctttccggcagcaacagaatctttc

SEQ ID NO: 2650189 - DNA, 25 bp, Homo sapien
ttcagacagaggagtagatgatttc

SEQ ID NO: 2650190 - DNA, 25 bp, Homo sapien
cattatcttgggtgtaggacggctc

SEQ ID NO: 2650191 - DNA, 25 bp, Homo sapien
cattgggcgtcagagagaagttcac

SEQ ID NO: 2650192 - DNA, 25 bp, Homo sapien
tagtaatagccacccacatctgagg

SEQ ID NO: 2650193 - DNA, 25 bp, Homo sapien
cataaatcgacatcctgacgggctt

SEQ ID NO: 2650194 - DNA, 25 bp, Homo sapien
ggactgagatatatacctttgggca

SEQ ID NO: 2650195 - DNA, 25 bp, Homo sapien
tcaggaatcccagtgatgaatcaca

SEQ ID NO: 2650196 - DNA, 25 bp, Homo sapien
tagttgctgtgttcgaaaacggcac

SEQ ID NO: 2650197 - DNA, 25 bp, Homo sapien
tggcctgtgttaccctgctggattc

SEQ ID NO: 2650198 - DNA, 25 bp, Homo sapien
ttggtcgtcttggtagttcctggtc

SEQ ID NO: 2650199 - DNA, 25 bp, Homo sapien
gcacagcagatgacttggtcgtctt

SEQ ID NO: 2650200 - DNA, 25 bp, Homo sapien
gacttggtcgtcttggtagttcctg

SEQ ID NO: 2650201 - DNA, 25 bp, Homo sapien
cagatgacttggtcgtcttggtagt

SEQ ID NO: 2650202 - DNA, 25 bp, Homo sapien
caccacgtagtaggaagaccgcact

SEQ ID NO: 2650203 - DNA, 25 bp, Homo sapien
ttccaacaaagcgtccaggacagcc

SEQ ID NO: 2650204 - DNA, 25 bp, Homo sapien
ggaatgtagcacaggtccaaataca

SEQ ID NO: 2650205 - DNA, 25 bp, Homo sapien
gaccgcactctcttgaaaaattcca

SEQ ID NO: 2650206 - DNA, 25 bp, Homo sapien
aggtgcctctttaaacatggttcct

SEQ ID NO: 2650207 - DNA, 25 bp, Homo sapien
gcagacactgtcgaggagttctcac

SEQ ID NO: 2650208 - DNA, 25 bp, Homo sapien
tctggacacagctcaatcggcagtg

SEQ ID NO: 2650209 - DNA, 25 bp, Homo sapien
ttaaacatggttccttcccattgcc

SEQ ID NO: 2650210 - DNA, 25 bp, Homo sapien
gagtcatgagttgggatcagtgtca

SEQ ID NO: 2650211 - DNA, 25 bp, Homo sapien
tgagtcatgagttgggatcagtgtc

SEQ ID NO: 2650212 - DNA, 25 bp, Homo sapien
ttctgagtcatgagttgggatcagt

SEQ ID NO: 2650213 - DNA, 25 bp, Homo sapien
tctgagtcatgagttgggatcagtg

SEQ ID NO: 2650214 - DNA, 25 bp, Homo sapien
gggtctcctggtaccattccctcat

SEQ ID NO: 2650215 - DNA, 25 bp, Homo sapien
tacagttcaatcttgcatgcaggga

SEQ ID NO: 2650216 - DNA, 25 bp, Homo sapien
tcttgcataaccactgtgctgctgc

SEQ ID NO: 2650217 - DNA, 25 bp, Homo sapien
taaaaccatgatgttgagatcttgc

SEQ ID NO: 2650218 - DNA, 25 bp, Homo sapien
tgctgggagcatgccttagatcaat

SEQ ID NO: 2650219 - DNA, 25 bp, Homo sapien
cattatgtcagtgtgcagccttcaa

SEQ ID NO: 2650220 - DNA, 25 bp, Homo sapien
tgctgcatgcaggttaatcgactca

SEQ ID NO: 2650221 - DNA, 25 bp, Homo sapien
gacacagtatagcatttggcaggta

SEQ ID NO: 2650222 - DNA, 25 bp, Homo sapien
caacttgtttgactgagaggccaca

SEQ ID NO: 2650223 - DNA, 25 bp, Homo sapien
cacaggtgcactgaagtgggattca

SEQ ID NO: 2650224 - DNA, 25 bp, Homo sapien
tgttggaccaatcagatcagcttct

SEQ ID NO: 2650225 - DNA, 25 bp, Homo sapien
tgggattcaacacgcatgactcagc

SEQ ID NO: 2650226 - DNA, 25 bp, Homo sapien
taaaccctcatcatagttagcagtg

SEQ ID NO: 2650227 - DNA, 25 bp, Homo sapien
acagttgtcacggagaagtttgcct

SEQ ID NO: 2650228 - DNA, 25 bp, Homo sapien
ggttttcttcccacgcattatgtag

SEQ ID NO: 2650229 - DNA, 25 bp, Homo sapien
taagtagactgcataggtcctcagt

SEQ ID NO: 2650230 - DNA, 25 bp, Homo sapien
aaattaggttagtcacacaggcagg

SEQ ID NO: 2650231 - DNA, 25 bp, Homo sapien
aaattcagaattgtagagcagctcc

SEQ ID NO: 2650232 - DNA, 25 bp, Homo sapien
gactgcataagctattggagacact

SEQ ID NO: 2650233 - DNA, 25 bp, Homo sapien
tgaacaaagctcctagaagtctgtg

SEQ ID NO: 2650234 - DNA, 25 bp, Homo sapien
attatcctaactcacaatatcatta

SEQ ID NO: 2650235 - DNA, 25 bp, Homo sapien
aagttattatcctaactcacaatat

SEQ ID NO: 2650236 - DNA, 25 bp, Homo sapien
gttattatcctaactcacaatatca

SEQ ID NO: 2650237 - DNA, 25 bp, Homo sapien
tattatcctaactcacaatatcatt

SEQ ID NO: 2650238 - DNA, 25 bp, Homo sapien
taagacataataccatacacagctg

SEQ ID NO: 2650239 - DNA, 25 bp, Homo sapien
aaagaaatgctcatccctaggctgc

SEQ ID NO: 2650240 - DNA, 25 bp, Homo sapien
tacacagctgcagactgacacaaac

SEQ ID NO: 2650241 - DNA, 25 bp, Homo sapien
gggagctccaaacaagtgcagagaa

SEQ ID NO: 2650242 - DNA, 25 bp, Homo sapien
actgtcaggagatgtaaaattcctt

SEQ ID NO: 2650243 - DNA, 25 bp, Homo sapien
gcatcagaggtatgaatgttgtaaa

SEQ ID NO: 2650244 - DNA, 25 bp, Homo sapien
gaagttagaaaatgagagatgggtt

SEQ ID NO: 2650245 - DNA, 25 bp, Homo sapien
tgggttggggcttgaagtgcatcag

SEQ ID NO: 2650246 - DNA, 25 bp, Homo sapien
gcatcctgagaccttgtgtccctga

SEQ ID NO: 2650247 - DNA, 25 bp, Homo sapien
tgtgcatcctgagaccttgtgtccc

SEQ ID NO: 2650248 - DNA, 25 bp, Homo sapien
ccaaggtgaactgtgcatcctgaga

SEQ ID NO: 2650249 - DNA, 25 bp, Homo sapien
ggtacatgaggccaaggtgaactgt

SEQ ID NO: 2650250 - DNA, 25 bp, Homo sapien
ggattatggatgaacgtagcagcca

SEQ ID NO: 2650251 - DNA, 25 bp, Homo sapien
tcttcatgggagcagtggaaccacc

SEQ ID NO: 2650252 - DNA, 25 bp, Homo sapien
gattcaactgatggaggattatgga

SEQ ID NO: 2650253 - DNA, 25 bp, Homo sapien
cagccatagcagtcaatttttcact

SEQ ID NO: 2650254 - DNA, 25 bp, Homo sapien
tccttgtgttttacgagttatatta

SEQ ID NO: 2650255 - DNA, 25 bp, Homo sapien
agagccaggcttctttttcaattaa

SEQ ID NO: 2650256 - DNA, 25 bp, Homo sapien
tgttttacgagttatattaatggct

SEQ ID NO: 2650257 - DNA, 25 bp, Homo sapien
cagagccaggcttctttttcaatta

SEQ ID NO: 2650258 - DNA, 25 bp, Homo sapien
gatagcaggtcaggaacagctgggc

SEQ ID NO: 2650259 - DNA, 25 bp, Homo sapien
tggcagatcccaggtatccctggtt

SEQ ID NO: 2650260 - DNA, 25 bp, Homo sapien
aggcagatggcagcctgcatgtctc

SEQ ID NO: 2650261 - DNA, 25 bp, Homo sapien
ccaggtatccctggttggagatgga

SEQ ID NO: 2650262 - DNA, 25 bp, Homo sapien
ggtgctagacaggagcatttccgct

SEQ ID NO: 2650263 - DNA, 25 bp, Homo sapien
cccagtccttggtgaggtaagaagt

SEQ ID NO: 2650264 - DNA, 25 bp, Homo sapien
ctgtcaggagaccagcgctggcagg

SEQ ID NO: 2650265 - DNA, 25 bp, Homo sapien
gcatttccgctttattttgatatca

SEQ ID NO: 2650266 - DNA, 25 bp, Homo sapien
ttagatacagccagtctcccaagtt

SEQ ID NO: 2650267 - DNA, 25 bp, Homo sapien
tagatacagccagtctcccaagttt

SEQ ID NO: 2650268 - DNA, 25 bp, Homo sapien
agatacagccagtctcccaagtttc

SEQ ID NO: 2650269 - DNA, 25 bp, Homo sapien
gatacagccagtctcccaagtttcc

SEQ ID NO: 2650270 - DNA, 25 bp, Homo sapien
caatagttttttagccatcagagtc

SEQ ID NO: 2650271 - DNA, 25 bp, Homo sapien
tataatcagtggaacactctccttg

SEQ ID NO: 2650272 - DNA, 25 bp, Homo sapien
aatcgttgcaagactgagttctcta

SEQ ID NO: 2650273 - DNA, 25 bp, Homo sapien
cataggtttactgttgcatagcaga

SEQ ID NO: 2650274 - DNA, 25 bp, Homo sapien
cagaagcctgtggcgctggccctct

SEQ ID NO: 2650275 - DNA, 25 bp, Homo sapien
ccagaagcctgtggcgctggccctc

SEQ ID NO: 2650276 - DNA, 25 bp, Homo sapien
aacatgaggtgggattttgactgtg

SEQ ID NO: 2650277 - DNA, 25 bp, Homo sapien
gaggtgggattttgactgtggaagc

SEQ ID NO: 2650278 - DNA, 25 bp, Homo sapien
atgaggtgggattttgactgtggaa

SEQ ID NO: 2650279 - DNA, 25 bp, Homo sapien
tgaaacatgaggtgggattttgact

SEQ ID NO: 2650280 - DNA, 25 bp, Homo sapien
gaacgccgccccgttccgcgctctc

SEQ ID NO: 2650281 - DNA, 25 bp, Homo sapien
cccgttccgcgctctcagcagccag

SEQ ID NO: 2650282 - DNA, 25 bp, Homo sapien
ctgcgcccgcggtgcgtccagaggg

SEQ ID NO: 2650283 - DNA, 25 bp, Homo sapien
ggccccggcgcgaacgtcagaacgc

SEQ ID NO: 2650284 - DNA, 25 bp, Homo sapien
ggacgccaatgcagctgtctaggac

SEQ ID NO: 2650285 - DNA, 25 bp, Homo sapien
cgcggtggacgccaatgcagctgtc

SEQ ID NO: 2650286 - DNA, 25 bp, Homo sapien
ggtggacgccaatgcagctgtctag

SEQ ID NO: 2650287 - DNA, 25 bp, Homo sapien
ctagcgtgagggcagtttcccagcg

SEQ ID NO: 2650288 - DNA, 25 bp, Homo sapien
cgtcctcgtggctgattgtgccaga

SEQ ID NO: 2650289 - DNA, 25 bp, Homo sapien
cacttagcagggaggccgcatggta

SEQ ID NO: 2650290 - DNA, 25 bp, Homo sapien
gatatgaggctttcgccgctcccat

SEQ ID NO: 2650291 - DNA, 25 bp, Homo sapien
tccccattggagatcgaggcagcaa

SEQ ID NO: 2650292 - DNA, 25 bp, Homo sapien
tgtctcggaccataccaactactgg

SEQ ID NO: 2650293 - DNA, 25 bp, Homo sapien
ttcgagggccgaaatgcagcagcca

SEQ ID NO: 2650294 - DNA, 25 bp, Homo sapien
gcagcgcctgcaggagaactcgatt

SEQ ID NO: 2650295 - DNA, 25 bp, Homo sapien
aaagggattcgtccaattctgggcg

SEQ ID NO: 2650296 - DNA, 25 bp, Homo sapien
cggcagctgacagagccggagcctc

SEQ ID NO: 2650297 - DNA, 25 bp, Homo sapien
gcagctgacagagccggagcctccc

SEQ ID NO: 2650298 - DNA, 25 bp, Homo sapien
ggcagcggcagctgacagagccgga

SEQ ID NO: 2650299 - DNA, 25 bp, Homo sapien
cagcggcagctgacagagccggagc

SEQ ID NO: 2650300 - DNA, 25 bp, Homo sapien
tccttccctaggctaaagccgcgga

SEQ ID NO: 2650301 - DNA, 25 bp, Homo sapien
tgcacccacgtgcaactagagggcg

SEQ ID NO: 2650302 - DNA, 25 bp, Homo sapien
tgttcctgaagacgaacgtcgcccc

SEQ ID NO: 2650303 - DNA, 25 bp, Homo sapien
gattgttagcagaactgagactcca

SEQ ID NO: 2650304 - DNA, 25 bp, Homo sapien
catcttcagatttaactctcttcat

SEQ ID NO: 2650305 - DNA, 25 bp, Homo sapien
gcatcttcagatttaactctcttca

SEQ ID NO: 2650306 - DNA, 25 bp, Homo sapien
agcatcttcagatttaactctcttc

SEQ ID NO: 2650307 - DNA, 25 bp, Homo sapien
tagcatcttcagatttaactctctt

SEQ ID NO: 2650308 - DNA, 25 bp, Homo sapien
tggtacttctcttgctgggtgttgt

SEQ ID NO: 2650309 - DNA, 25 bp, Homo sapien
taaatggagaaaagaatggtacttc

SEQ ID NO: 2650310 - DNA, 25 bp, Homo sapien
aaagaatggtacttctcttgctggg

SEQ ID NO: 2650311 - DNA, 25 bp, Homo sapien
gaatggtacttctcttgctgggtgt

SEQ ID NO: 2650312 - DNA, 25 bp, Homo sapien
cattatctgtaagtaggtatctttt

SEQ ID NO: 2650313 - DNA, 25 bp, Homo sapien
ttagtgccagaaagattacatgcaa

SEQ ID NO: 2650314 - DNA, 25 bp, Homo sapien
caccacattatctgtaagtaggtat

SEQ ID NO: 2650315 - DNA, 25 bp, Homo sapien
ccacattatctgtaagtaggtatct

SEQ ID NO: 2650316 - DNA, 25 bp, Homo sapien
ctggaagaaagcacagtatggtgac

SEQ ID NO: 2650317 - DNA, 25 bp, Homo sapien
ggaagaaagcacagtatggtgacca

SEQ ID NO: 2650318 - DNA, 25 bp, Homo sapien
tggaagaaagcacagtatggtgacc

SEQ ID NO: 2650319 - DNA, 25 bp, Homo sapien
gaagaaagcacagtatggtgaccat

SEQ ID NO: 2650320 - DNA, 25 bp, Homo sapien
cacatggtcccgagactcacacaaa

SEQ ID NO: 2650321 - DNA, 25 bp, Homo sapien
ccacatggtcccgagactcacacaa

SEQ ID NO: 2650322 - DNA, 25 bp, Homo sapien
acatggtcccgagactcacacaaat

SEQ ID NO: 2650323 - DNA, 25 bp, Homo sapien
cataattcctagagaaccagttaac

SEQ ID NO: 2650324 - DNA, 25 bp, Homo sapien
tggtagagaatcttccagtattctt

SEQ ID NO: 2650325 - DNA, 25 bp, Homo sapien
catataaatacaggttcatatatag

SEQ ID NO: 2650326 - DNA, 25 bp, Homo sapien
aatgtccactgtagacaagtttgag

SEQ ID NO: 2650327 - DNA, 25 bp, Homo sapien
gattcctcgagatccaactcgtaac

SEQ ID NO: 2650328 - DNA, 25 bp, Homo sapien
tcacaaaaagcggtccaaatttata

SEQ ID NO: 2650329 - DNA, 25 bp, Homo sapien
agatccaactcgtaacacaacctca

SEQ ID NO: 2650330 - DNA, 25 bp, Homo sapien
cactgcagattcctcgagatccaac

SEQ ID NO: 2650331 - DNA, 25 bp, Homo sapien
tctttaaggaaccgtcatttgtcat

SEQ ID NO: 2650332 - DNA, 25 bp, Homo sapien
gtctttaaggaaccgtcatttgtca

SEQ ID NO: 2650333 - DNA, 25 bp, Homo sapien
catgaaggacgtctttaaggaaccg

SEQ ID NO: 2650334 - DNA, 25 bp, Homo sapien
ttgcctttgataaataacatatcca

SEQ ID NO: 2650335 - DNA, 25 bp, Homo sapien
agtctgagaagaaacctcgtaaatg

SEQ ID NO: 2650336 - DNA, 25 bp, Homo sapien
tattgaatgatgtggagtctgagaa

SEQ ID NO: 2650337 - DNA, 25 bp, Homo sapien
tcaaaatattgaatgatgtggagtc

SEQ ID NO: 2650338 - DNA, 25 bp, Homo sapien
gccaaaagtgaagagtggatcgcag

SEQ ID NO: 2650339 - DNA, 25 bp, Homo sapien
gttcagcaccatctacagaaaagtg

SEQ ID NO: 2650340 - DNA, 25 bp, Homo sapien
taaaagctgcttcacaattttagca

SEQ ID NO: 2650341 - DNA, 25 bp, Homo sapien
ttagagttcctctactgttggcccc

SEQ ID NO: 2650342 - DNA, 25 bp, Homo sapien
ctttggtgaacttcacatcttggtt

SEQ ID NO: 2650343 - DNA, 25 bp, Homo sapien
cagtttgtagcaaattgcaaaagca

SEQ ID NO: 2650344 - DNA, 25 bp, Homo sapien
caaattgcaaaagcaagaacatagg

SEQ ID NO: 2650345 - DNA, 25 bp, Homo sapien
gaacataggtatctttggtgaactt

SEQ ID NO: 2650346 - DNA, 25 bp, Homo sapien
ctgattcagagctaatgccacagcg

SEQ ID NO: 2650347 - DNA, 25 bp, Homo sapien
cagagctaatgccacagcgaaacag

SEQ ID NO: 2650348 - DNA, 25 bp, Homo sapien
gcttcttctcttaatgtagtacaga

SEQ ID NO: 2650349 - DNA, 25 bp, Homo sapien
gctaatgccacagcgaaacaggatg

SEQ ID NO: 2650350 - DNA, 25 bp, Homo sapien
ctcatgactgactaagaagacaaaa

SEQ ID NO: 2650351 - DNA, 25 bp, Homo sapien
tgactgactaagaagacaaaataat

SEQ ID NO: 2650352 - DNA, 25 bp, Homo sapien
tgactaagaagacaaaataattccc

SEQ ID NO: 2650353 - DNA, 25 bp, Homo sapien
ctgactaagaagacaaaataattcc

SEQ ID NO: 2650354 - DNA, 25 bp, Homo sapien
atttaaattaatgcaggctatgctt

SEQ ID NO: 2650355 - DNA, 25 bp, Homo sapien
tttaaattaatgcaggctatgcttt

SEQ ID NO: 2650356 - DNA, 25 bp, Homo sapien
cacttcctccgagaacacatgtctt

SEQ ID NO: 2650357 - DNA, 25 bp, Homo sapien
tgtttaatagcaacgtgtgagattt

SEQ ID NO: 2650358 - DNA, 25 bp, Homo sapien
gcatccaaagaatcagtggtgacct

SEQ ID NO: 2650359 - DNA, 25 bp, Homo sapien
tgcagtgtcccatagatctcatcaa

SEQ ID NO: 2650360 - DNA, 25 bp, Homo sapien
gcaacgtgtgagatttcctgtccct

SEQ ID NO: 2650361 - DNA, 25 bp, Homo sapien
gtggctggaaggtgcgacggctgac

SEQ ID NO: 2650362 - DNA, 25 bp, Homo sapien
gctgaagtgcgatacctggcttctt

SEQ ID NO: 2650363 - DNA, 25 bp, Homo sapien
tcttaggaaaggtaataactcacta

SEQ ID NO: 2650364 - DNA, 25 bp, Homo sapien
gaagaccaagtgtcagcacactgtc

SEQ ID NO: 2650365 - DNA, 25 bp, Homo sapien
gaatttgggaatttcaggagaagac

SEQ ID NO: 2650366 - DNA, 25 bp, Homo sapien
tccactctggtgtcggaagctgaac

SEQ ID NO: 2650367 - DNA, 25 bp, Homo sapien
ggaagcgcctttctgagggagccaa

SEQ ID NO: 2650368 - DNA, 25 bp, Homo sapien
tcctgatggtgcttactgggttcca

SEQ ID NO: 2650369 - DNA, 25 bp, Homo sapien
gagactgaccaggttccttcaagga

SEQ ID NO: 2650370 - DNA, 25 bp, Homo sapien
aaatcctgggctgttttctaacatg

SEQ ID NO: 2650371 - DNA, 25 bp, Homo sapien
catagacatatatgatggcagagca

SEQ ID NO: 2650372 - DNA, 25 bp, Homo sapien
aaaataagggctcaagtcatagaca

SEQ ID NO: 2650373 - DNA, 25 bp, Homo sapien
taaatttggcttactcagcagtcct

SEQ ID NO: 2650374 - DNA, 25 bp, Homo sapien
ttgccttagaacaacaaccaagtga

SEQ ID NO: 2650375 - DNA, 25 bp, Homo sapien
tctgcagcaatcttggcagacagct

SEQ ID NO: 2650376 - DNA, 25 bp, Homo sapien
tcctgaggtctgagcaaccctctgg

SEQ ID NO: 2650377 - DNA, 25 bp, Homo sapien
ggtggcaatgaagagtctgcagcaa

SEQ ID NO: 2650378 - DNA, 25 bp, Homo sapien
taagaggtcggtaccattatcccca

SEQ ID NO: 2650379 - DNA, 25 bp, Homo sapien
gaagctgtgactctcttactgggac

SEQ ID NO: 2650380 - DNA, 25 bp, Homo sapien
caatgtgcgactctcatatgcggat

SEQ ID NO: 2650381 - DNA, 25 bp, Homo sapien
cacagtctacagttgagattgggcc

SEQ ID NO: 2650382 - DNA, 25 bp, Homo sapien
tgagagttggagaagatgaaaagta

SEQ ID NO: 2650383 - DNA, 25 bp, Homo sapien
tgtgagagttggagaagatgaaaag

SEQ ID NO: 2650384 - DNA, 25 bp, Homo sapien
ctgtgagagttggagaagatgaaaa

SEQ ID NO: 2650385 - DNA, 25 bp, Homo sapien
agagttggagaagatgaaaagtaag

SEQ ID NO: 2650386 - DNA, 25 bp, Homo sapien
tgaggtcctagcatcaactgccaga

SEQ ID NO: 2650387 - DNA, 25 bp, Homo sapien
tgccagaaatactaaggaagccttt

SEQ ID NO: 2650388 - DNA, 25 bp, Homo sapien
tttgaaattcctaccactgagatgg

SEQ ID NO: 2650389 - DNA, 25 bp, Homo sapien
ttgagattatgccagtcgcggccac

SEQ ID NO: 2650390 - DNA, 25 bp, Homo sapien
ggtgagactagaccagaaagccttc

SEQ ID NO: 2650391 - DNA, 25 bp, Homo sapien
gaaatccaagaacaagacaccagca

SEQ ID NO: 2650392 - DNA, 25 bp, Homo sapien
tggtattagagacgaaaagctgtcc

SEQ ID NO: 2650393 - DNA, 25 bp, Homo sapien
gaaaggacagacatggcacctgagt

SEQ ID NO: 2650394 - DNA, 25 bp, Homo sapien
cttgggccctgactcatatgtatgg

SEQ ID NO: 2650395 - DNA, 25 bp, Homo sapien
ggtagagactacagacctcagcagt

SEQ ID NO: 2650396 - DNA, 25 bp, Homo sapien
ggtgctggcatgaccctctaaaagg

SEQ ID NO: 2650397 - DNA, 25 bp, Homo sapien
taagatgagagcctgttcagctgtc

SEQ ID NO: 2650398 - DNA, 25 bp, Homo sapien
tgccacagggtgatatgaagattac

SEQ ID NO: 2650399 - DNA, 25 bp, Homo sapien
tgaagattaccctagacttagcact

SEQ ID NO: 2650400 - DNA, 25 bp, Homo sapien
ggttcctcacggtttcttatgcata

SEQ ID NO: 2650401 - DNA, 25 bp, Homo sapien
tattactgatgatagcttttgccgc

SEQ ID NO: 2650402 - DNA, 25 bp, Homo sapien
gattagcaggtaagcatgtggttcc

SEQ ID NO: 2650403 - DNA, 25 bp, Homo sapien
tctccctgggatgcggtagaataca

SEQ ID NO: 2650404 - DNA, 25 bp, Homo sapien
caggaatgagacttgcacttgcgga

SEQ ID NO: 2650405 - DNA, 25 bp, Homo sapien
tcaaattgagttgtagggcagtcac

SEQ ID NO: 2650406 - DNA, 25 bp, Homo sapien
ctgacatcaacccagtaatttgcag

SEQ ID NO: 2650407 - DNA, 25 bp, Homo sapien
cacttgggcaggcaatacagagata

SEQ ID NO: 2650408 - DNA, 25 bp, Homo sapien
tctagcctgctatgtggacctctgt

SEQ ID NO: 2650409 - DNA, 25 bp, Homo sapien
ttgagaatacatgcacacagccagc

SEQ ID NO: 2650410 - DNA, 25 bp, Homo sapien
aaatagtgactctggacgccctctg

SEQ ID NO: 2650411 - DNA, 25 bp, Homo sapien
gaagagacagtaaggttgactatca

SEQ ID NO: 2650412 - DNA, 25 bp, Homo sapien
gacagtaaggttgactatcatttga

SEQ ID NO: 2650413 - DNA, 25 bp, Homo sapien
ttaaatggagaacgctccaagattt

SEQ ID NO: 2650414 - DNA, 25 bp, Homo sapien
caagatttagtcattcctgatgatg

SEQ ID NO: 2650415 - DNA, 25 bp, Homo sapien
tgaacaagggcatctgtcctttctt

SEQ ID NO: 2650416 - DNA, 25 bp, Homo sapien
cttgaacaagggcatctgtcctttc

SEQ ID NO: 2650417 - DNA, 25 bp, Homo sapien
ttgaacaagggcatctgtcctttct

SEQ ID NO: 2650418 - DNA, 25 bp, Homo sapien
gttgtacaatgcacagttgcactag

SEQ ID NO: 2650419 - DNA, 25 bp, Homo sapien
tcaagaatgtatctatcgatgccca

SEQ ID NO: 2650420 - DNA, 25 bp, Homo sapien
aatgcacagttgcactagggtctcc

SEQ ID NO: 2650421 - DNA, 25 bp, Homo sapien
caagaatgtatctatcgatgcccat

SEQ ID NO: 2650422 - DNA, 25 bp, Homo sapien
tatacttttgggcaagactcatggc

SEQ ID NO: 2650423 - DNA, 25 bp, Homo sapien
tcaggaaatttgctacttgggctta

SEQ ID NO: 2650424 - DNA, 25 bp, Homo sapien
cacctgaatgagataaaagcctgct

SEQ ID NO: 2650425 - DNA, 25 bp, Homo sapien
gactctaagggtgtatcacaggctg

SEQ ID NO: 2650426 - DNA, 25 bp, Homo sapien
gagggactttactcatgtcaaaggc

SEQ ID NO: 2650427 - DNA, 25 bp, Homo sapien
catttggggagcaaatggacagctc

SEQ ID NO: 2650428 - DNA, 25 bp, Homo sapien
agctccaagtgtccttgtcaccttt

SEQ ID NO: 2650429 - DNA, 25 bp, Homo sapien
caaaggctgcataagatgctgggca

SEQ ID NO: 2650430 - DNA, 25 bp, Homo sapien
aaatctgagcccctacagcgagtga

SEQ ID NO: 2650431 - DNA, 25 bp, Homo sapien
tgaaagaaaggctcaagattcgctg

SEQ ID NO: 2650432 - DNA, 25 bp, Homo sapien
tttgcatgcaggttaaatttctcaa

SEQ ID NO: 2650433 - DNA, 25 bp, Homo sapien
tcaatgggtaaatttctttagcaac

SEQ ID NO: 2650434 - DNA, 25 bp, Homo sapien
tggtaatcctggattgagaagtgaa

SEQ ID NO: 2650435 - DNA, 25 bp, Homo sapien
atttggtaatcctggattgagaagt

SEQ ID NO: 2650436 - DNA, 25 bp, Homo sapien
ttggtaatcctggattgagaagtga

SEQ ID NO: 2650437 - DNA, 25 bp, Homo sapien
tttggtaatcctggattgagaagtg

SEQ ID NO: 2650438 - DNA, 25 bp, Homo sapien
agtcctgatttggttaaaccagtca

SEQ ID NO: 2650439 - DNA, 25 bp, Homo sapien
tcctgatttggttaaaccagtcatc

SEQ ID NO: 2650440 - DNA, 25 bp, Homo sapien
gtcctgatttggttaaaccagtcat

SEQ ID NO: 2650441 - DNA, 25 bp, Homo sapien
ctttagttttgacaggaacagagca

SEQ ID NO: 2650442 - DNA, 25 bp, Homo sapien
atacctttagttttgacaggaacag

SEQ ID NO: 2650443 - DNA, 25 bp, Homo sapien
ctgaaggaattgtatttgcttgggg

SEQ ID NO: 2650444 - DNA, 25 bp, Homo sapien
tggggctgagatccaatacctttag

SEQ ID NO: 2650445 - DNA, 25 bp, Homo sapien
ggcggagagtggactaaagtttgca

SEQ ID NO: 2650446 - DNA, 25 bp, Homo sapien
ccacagccttggctttatcaaagtg

SEQ ID NO: 2650447 - DNA, 25 bp, Homo sapien
tttatcaaagtgttgttggtcccca

SEQ ID NO: 2650448 - DNA, 25 bp, Homo sapien
actaaagtttgcagggggagcactt

SEQ ID NO: 2650449 - DNA, 25 bp, Homo sapien
ctgaggatgtgtttgatcagagtca

SEQ ID NO: 2650450 - DNA, 25 bp, Homo sapien
ggatgtgtttgatcagagtcatcat

SEQ ID NO: 2650451 - DNA, 25 bp, Homo sapien
gaggatgtgtttgatcagagtcatc

SEQ ID NO: 2650452 - DNA, 25 bp, Homo sapien
tgaggatgtgtttgatcagagtcat

SEQ ID NO: 2650453 - DNA, 25 bp, Homo sapien
gaagggaatttgccagctttattca

SEQ ID NO: 2650454 - DNA, 25 bp, Homo sapien
ggaagggaatttgccagctttattc

SEQ ID NO: 2650455 - DNA, 25 bp, Homo sapien
aagggaatttgccagctttattcag

SEQ ID NO: 2650456 - DNA, 25 bp, Homo sapien
agggaatttgccagctttattcagg

SEQ ID NO: 2650457 - DNA, 25 bp, Homo sapien
agcacctccgtcaggaagttgattg

SEQ ID NO: 2650458 - DNA, 25 bp, Homo sapien
cacagcacctccgtcaggaagttga

SEQ ID NO: 2650459 - DNA, 25 bp, Homo sapien
agacacagcacctccgtcaggaagt

SEQ ID NO: 2650460 - DNA, 25 bp, Homo sapien
gacacagcacctccgtcaggaagtt

SEQ ID NO: 2650461 - DNA, 25 bp, Homo sapien
tgacaccaggaagctaacatccaga

SEQ ID NO: 2650462 - DNA, 25 bp, Homo sapien
caattcaccttgagcagtgacacca

SEQ ID NO: 2650463 - DNA, 25 bp, Homo sapien
ggcattctgccaattcaccttgagc

SEQ ID NO: 2650464 - DNA, 25 bp, Homo sapien
catgtataaagcctgggcattctgc

SEQ ID NO: 2650465 - DNA, 25 bp, Homo sapien
taaaatctgggagagctgactgaac

SEQ ID NO: 2650466 - DNA, 25 bp, Homo sapien
ccccatgagtgtgacaggactatct

SEQ ID NO: 2650467 - DNA, 25 bp, Homo sapien
cacccaggagatcaaccaaggagaa

SEQ ID NO: 2650468 - DNA, 25 bp, Homo sapien
aactgatcttcacccacaaagaggg

SEQ ID NO: 2650469 - DNA, 25 bp, Homo sapien
tgaacttcatgagggctagaccatg

SEQ ID NO: 2650470 - DNA, 25 bp, Homo sapien
tctctcttgcacccatagtatctga

SEQ ID NO: 2650471 - DNA, 25 bp, Homo sapien
ttctctcttgcacccatagtatctg

SEQ ID NO: 2650472 - DNA, 25 bp, Homo sapien
ctctcttgcacccatagtatctgac

SEQ ID NO: 2650473 - DNA, 25 bp, Homo sapien
tatttagtgaccctgctgacagaca

SEQ ID NO: 2650474 - DNA, 25 bp, Homo sapien
gatccaggtgtcttgcggcctttca

SEQ ID NO: 2650475 - DNA, 25 bp, Homo sapien
acagacaagcttccaccttttccat

SEQ ID NO: 2650476 - DNA, 25 bp, Homo sapien
gctgaccaagtgccagttggctttc

SEQ ID NO: 2650477 - DNA, 25 bp, Homo sapien
tgagtagttccaatgtttagcagat

SEQ ID NO: 2650478 - DNA, 25 bp, Homo sapien
ttactgggaccatgccattccttgg

SEQ ID NO: 2650479 - DNA, 25 bp, Homo sapien
catggtatagaggactctttactgg

SEQ ID NO: 2650480 - DNA, 25 bp, Homo sapien
tagcagattcttcatggtatagagg

SEQ ID NO: 2650481 - DNA, 25 bp, Homo sapien
aattttgtttcttctacagacttat

SEQ ID NO: 2650482 - DNA, 25 bp, Homo sapien
cttctggatagtaattttgtttctt

SEQ ID NO: 2650483 - DNA, 25 bp, Homo sapien
agtaattttgtttcttctacagact

SEQ ID NO: 2650484 - DNA, 25 bp, Homo sapien
atagtaattttgtttcttctacaga

SEQ ID NO: 2650485 - DNA, 25 bp, Homo sapien
tatggctaaccacaaaacatggctt

SEQ ID NO: 2650486 - DNA, 25 bp, Homo sapien
cagtgatgggtcgtgttgagtcacc

SEQ ID NO: 2650487 - DNA, 25 bp, Homo sapien
tattgcaaaaggaagatcaacctgg

SEQ ID NO: 2650488 - DNA, 25 bp, Homo sapien
cttttcccagcggaaaggatggctg

SEQ ID NO: 2650489 - DNA, 25 bp, Homo sapien
ccatgaacagggggccagctctcca

SEQ ID NO: 2650490 - DNA, 25 bp, Homo sapien
gttggagaacagacacatcttgcag

SEQ ID NO: 2650491 - DNA, 25 bp, Homo sapien
gacacatcttgcagatgacaatagg

SEQ ID NO: 2650492 - DNA, 25 bp, Homo sapien
acatcttgcagatgacaataggtaa

SEQ ID NO: 2650493 - DNA, 25 bp, Homo sapien
gcagagagtggggacccagcaatgt

SEQ ID NO: 2650494 - DNA, 25 bp, Homo sapien
ggacaggacacagtataatccacag

SEQ ID NO: 2650495 - DNA, 25 bp, Homo sapien
tctgtcatcgctacaactcagtttg

SEQ ID NO: 2650496 - DNA, 25 bp, Homo sapien
ccccgacgaagtggctatgatggag

SEQ ID NO: 2650497 - DNA, 25 bp, Homo sapien
caggccagattaacccccgacgaag

SEQ ID NO: 2650498 - DNA, 25 bp, Homo sapien
gctgctttatggcagtctgctgtac

SEQ ID NO: 2650499 - DNA, 25 bp, Homo sapien
gtcattcccgctgatgaaaccccat

SEQ ID NO: 2650500 - DNA, 25 bp, Homo sapien
ctgctgctttatggcagtctgctgt

SEQ ID NO: 2650501 - DNA, 25 bp, Homo sapien
ggtgtcattcccgctgatgaaaccc

SEQ ID NO: 2650502 - DNA, 25 bp, Homo sapien
aagggttgcggtcgctgcatgtact

SEQ ID NO: 2650503 - DNA, 25 bp, Homo sapien
tgtactgcctcgtactggaccgcca

SEQ ID NO: 2650504 - DNA, 25 bp, Homo sapien
gttgatcctactgctaagtgcacga

SEQ ID NO: 2650505 - DNA, 25 bp, Homo sapien
tgcggatggcgtctcaaagggttgc

SEQ ID NO: 2650506 - DNA, 25 bp, Homo sapien
tctagttgtctggtcaacggacaaa

SEQ ID NO: 2650507 - DNA, 25 bp, Homo sapien
tatcgtcttggtcggtgtccactgc

SEQ ID NO: 2650508 - DNA, 25 bp, Homo sapien
gtaagcccgcatttactcagccttg

SEQ ID NO: 2650509 - DNA, 25 bp, Homo sapien
tcagccttgggagccggattctcag

SEQ ID NO: 2650510 - DNA, 25 bp, Homo sapien
gcatctggagggaaagtacctctcc

SEQ ID NO: 2650511 - DNA, 25 bp, Homo sapien
caaagggcatctggagggaaagtac

SEQ ID NO: 2650512 - DNA, 25 bp, Homo sapien
atctggagggaaagtacctctccag

SEQ ID NO: 2650513 - DNA, 25 bp, Homo sapien
agggcatctggagggaaagtacctc

SEQ ID NO: 2650514 - DNA, 25 bp, Homo sapien
tctcttgatccttcaaacaaatgga

SEQ ID NO: 2650515 - DNA, 25 bp, Homo sapien
aatggaacagtgttctcttgatcct

SEQ ID NO: 2650516 - DNA, 25 bp, Homo sapien
agtttctcttacgttccccagagag

SEQ ID NO: 2650517 - DNA, 25 bp, Homo sapien
gaaaatggaacagtgttctcttgat

SEQ ID NO: 2650518 - DNA, 25 bp, Homo sapien
catcttatttagcaacggtgtagaa

SEQ ID NO: 2650519 - DNA, 25 bp, Homo sapien
tcccaaagttaattggcccatggca

SEQ ID NO: 2650520 - DNA, 25 bp, Homo sapien
aaaggatgacagtccagttacctgg

SEQ ID NO: 2650521 - DNA, 25 bp, Homo sapien
cactgttcttagctggcctgctgag

SEQ ID NO: 2650522 - DNA, 25 bp, Homo sapien
taagccctgaacgcatttaataaaa

SEQ ID NO: 2650523 - DNA, 25 bp, Homo sapien
aagccctgaacgcatttaataaaat

SEQ ID NO: 2650524 - DNA, 25 bp, Homo sapien
ttaagccctgaacgcatttaataaa

SEQ ID NO: 2650525 - DNA, 25 bp, Homo sapien
aaccaacatccactcctattttcat

SEQ ID NO: 2650526 - DNA, 25 bp, Homo sapien
ttcctgaaccaacatccactcctat

SEQ ID NO: 2650527 - DNA, 25 bp, Homo sapien
gagtcctcaccactccagcggcttc

SEQ ID NO: 2650528 - DNA, 25 bp, Homo sapien
agtcctcaccactccagcggcttcc

SEQ ID NO: 2650529 - DNA, 25 bp, Homo sapien
gcaagtgcctgaggtgcctccaggc

SEQ ID NO: 2650530 - DNA, 25 bp, Homo sapien
ggcaagtgcctgaggtgcctccagg

SEQ ID NO: 2650531 - DNA, 25 bp, Homo sapien
cccagtggctgcccactgctatcac

SEQ ID NO: 2650532 - DNA, 25 bp, Homo sapien
ggggaccgcctgcaaatagatttca

SEQ ID NO: 2650533 - DNA, 25 bp, Homo sapien
tgtccccaggggaccgcctgcaaat

SEQ ID NO: 2650534 - DNA, 25 bp, Homo sapien
gcaaatagatttcatcttgctttct

SEQ ID NO: 2650535 - DNA, 25 bp, Homo sapien
caaatagatttcatcttgctttctc

SEQ ID NO: 2650536 - DNA, 25 bp, Homo sapien
gaaccagctgccgtcttcgggaaac

SEQ ID NO: 2650537 - DNA, 25 bp, Homo sapien
gacttttggactcgtgcttcttgga

SEQ ID NO: 2650538 - DNA, 25 bp, Homo sapien
gatctgcgcctgtagacttaagcca

SEQ ID NO: 2650539 - DNA, 25 bp, Homo sapien
ctcttttgagatgggtgaagccggc

SEQ ID NO: 2650540 - DNA, 25 bp, Homo sapien
acaatcatgttttcttaagatcagc

SEQ ID NO: 2650541 - DNA, 25 bp, Homo sapien
acacttaatgtagacgcttggatca

SEQ ID NO: 2650542 - DNA, 25 bp, Homo sapien
ttgtcacaatcatgttttcttaaga

SEQ ID NO: 2650543 - DNA, 25 bp, Homo sapien
agacgcttggatcagtgccactgga

SEQ ID NO: 2650544 - DNA, 25 bp, Homo sapien
tgtaagattgggcagccaatctgag

SEQ ID NO: 2650545 - DNA, 25 bp, Homo sapien
gtagagctgagttggtcccactgac

SEQ ID NO: 2650546 - DNA, 25 bp, Homo sapien
cactgacagcacaggccaattctgc

SEQ ID NO: 2650547 - DNA, 25 bp, Homo sapien
tcagaactgagctgtaagattgggc

SEQ ID NO: 2650548 - DNA, 25 bp, Homo sapien
tccaaactgtttccttgggcctcac

SEQ ID NO: 2650549 - DNA, 25 bp, Homo sapien
atccaaactgtttccttgggcctca

SEQ ID NO: 2650550 - DNA, 25 bp, Homo sapien
cctgaatccaaactgtttccttggg

SEQ ID NO: 2650551 - DNA, 25 bp, Homo sapien
cctccctgaatccaaactgtttcct

SEQ ID NO: 2650552 - DNA, 25 bp, Homo sapien
ttatctgaaagtgggtccctgaggg

SEQ ID NO: 2650553 - DNA, 25 bp, Homo sapien
gaagaaatcctaagcagtctgccac

SEQ ID NO: 2650554 - DNA, 25 bp, Homo sapien
tatttgtccactactacataggcca

SEQ ID NO: 2650555 - DNA, 25 bp, Homo sapien
ccacacctaggaacttgagcttaag

SEQ ID NO: 2650556 - DNA, 25 bp, Homo sapien
ccttcttcttctcccaaataatcac

SEQ ID NO: 2650557 - DNA, 25 bp, Homo sapien
tcttcttctcccaaataatcacatg

SEQ ID NO: 2650558 - DNA, 25 bp, Homo sapien
cttctcccaaataatcacatgcaac

SEQ ID NO: 2650559 - DNA, 25 bp, Homo sapien
ttcttctcccaaataatcacatgca

SEQ ID NO: 2650560 - DNA, 25 bp, Homo sapien
ggcaagcaggcgtttcctccaacat

SEQ ID NO: 2650561 - DNA, 25 bp, Homo sapien
ctcctagcacccagtgatttcatgg

SEQ ID NO: 2650562 - DNA, 25 bp, Homo sapien
tattcaggaaacaatcagtgatgca

SEQ ID NO: 2650563 - DNA, 25 bp, Homo sapien
ggagggactattcccagcatcgtct

SEQ ID NO: 2650564 - DNA, 25 bp, Homo sapien
tccatagtgtccaccacttgtttct

SEQ ID NO: 2650565 - DNA, 25 bp, Homo sapien
tgtccaccacttgtttcttgctgtt

SEQ ID NO: 2650566 - DNA, 25 bp, Homo sapien
ctccatagtgtccaccacttgtttc

SEQ ID NO: 2650567 - DNA, 25 bp, Homo sapien
agagcgagggagaggaccggaatcg

SEQ ID NO: 2650568 - DNA, 25 bp, Homo sapien
catggcatctctcccgtgactgagg

SEQ ID NO: 2650569 - DNA, 25 bp, Homo sapien
gctgaagcctggacaaaatggggcc

SEQ ID NO: 2650570 - DNA, 25 bp, Homo sapien
cggaatcgcctctggtttgctgaag

SEQ ID NO: 2650571 - DNA, 25 bp, Homo sapien
agaggagacgccagtccacacgcct

SEQ ID NO: 2650572 - DNA, 25 bp, Homo sapien
aaaactctgtggaaagaatccttag

SEQ ID NO: 2650573 - DNA, 25 bp, Homo sapien
ttagagtttcctttgcactggggac

SEQ ID NO: 2650574 - DNA, 25 bp, Homo sapien
acagccaaagaggagacgccagtcc

SEQ ID NO: 2650575 - DNA, 25 bp, Homo sapien
tccagccttgtaggaagtgttcagc

SEQ ID NO: 2650576 - DNA, 25 bp, Homo sapien
tttggcgagacagagaacggtcatt

SEQ ID NO: 2650577 - DNA, 25 bp, Homo sapien
tgtgaatccaagctaaaggaatgcc

SEQ ID NO: 2650578 - DNA, 25 bp, Homo sapien
tccttgactaaaagagctgtgagcc

SEQ ID NO: 2650579 - DNA, 25 bp, Homo sapien
cactgagtgaagatattctaaattc

SEQ ID NO: 2650580 - DNA, 25 bp, Homo sapien
tcatcttcacgaatggcagaaatgg

SEQ ID NO: 2650581 - DNA, 25 bp, Homo sapien
cacgaatggcagaaatggcagattt

SEQ ID NO: 2650582 - DNA, 25 bp, Homo sapien
tcacagctttagagttgggcacaca

SEQ ID NO: 2650583 - DNA, 25 bp, Homo sapien
aagctggattgggtccactgtataa

SEQ ID NO: 2650584 - DNA, 25 bp, Homo sapien
cagatctgagataaccatggccggc

SEQ ID NO: 2650585 - DNA, 25 bp, Homo sapien
tccaagacgccttaggaatgtagag

SEQ ID NO: 2650586 - DNA, 25 bp, Homo sapien
cactgtataaagttcggtgggcata

SEQ ID NO: 2650587 - DNA, 25 bp, Homo sapien
ggcaaggcgaatgccccatggacag

SEQ ID NO: 2650588 - DNA, 25 bp, Homo sapien
cagtgacccagcaaagtctgattcc

SEQ ID NO: 2650589 - DNA, 25 bp, Homo sapien
ttccagacaccggaatacagcagtg

SEQ ID NO: 2650590 - DNA, 25 bp, Homo sapien
gatgatgatattttgagagcgaggt

SEQ ID NO: 2650591 - DNA, 25 bp, Homo sapien
ttcactggagacacaaatcctgggt

SEQ ID NO: 2650592 - DNA, 25 bp, Homo sapien
caggaaattttcagtgtaggataaa

SEQ ID NO: 2650593 - DNA, 25 bp, Homo sapien
gagactaccagtctttcacttccat

SEQ ID NO: 2650594 - DNA, 25 bp, Homo sapien
tggttgaggaggagactaccagtct

SEQ ID NO: 2650595 - DNA, 25 bp, Homo sapien
aatttgtccaagaaaatcttggcgc

SEQ ID NO: 2650596 - DNA, 25 bp, Homo sapien
aaaatcttggcgcttactgagtacc

SEQ ID NO: 2650597 - DNA, 25 bp, Homo sapien
aagaaatgtgggatgtgttcactcc

SEQ ID NO: 2650598 - DNA, 25 bp, Homo sapien
caagtgccggtcctgattctaatca

SEQ ID NO: 2650599 - DNA, 25 bp, Homo sapien
cagtcaaagccgtgcagcctgaaat

SEQ ID NO: 2650600 - DNA, 25 bp, Homo sapien
ctgcagacttaaaagggaaatccct

SEQ ID NO: 2650601 - DNA, 25 bp, Homo sapien
tgaaatggcacatgtccccgcgggt

SEQ ID NO: 2650602 - DNA, 25 bp, Homo sapien
gaaaacatggcctcaatgtgacagt

SEQ ID NO: 2650603 - DNA, 25 bp, Homo sapien
cctgtggagcactattaccctgagc

SEQ ID NO: 2650604 - DNA, 25 bp, Homo sapien
agccatgtctatatgaaagtaagcc

SEQ ID NO: 2650605 - DNA, 25 bp, Homo sapien
gctgaggaatgtgtactaacatgtg

SEQ ID NO: 2650606 - DNA, 25 bp, Homo sapien
aagtcatggtgagtttctttgcctc

SEQ ID NO: 2650607 - DNA, 25 bp, Homo sapien
tggaatacctatgctctgtctagct

SEQ ID NO: 2650608 - DNA, 25 bp, Homo sapien
aaaggcttgcctttcaagtcccttg

SEQ ID NO: 2650609 - DNA, 25 bp, Homo sapien
taaatgccaggtgagcaaacatact

SEQ ID NO: 2650610 - DNA, 25 bp, Homo sapien
taatctggagatgaaactaagggtc

SEQ ID NO: 2650611 - DNA, 25 bp, Homo sapien
tgttgactgctctatagatactcca

SEQ ID NO: 2650612 - DNA, 25 bp, Homo sapien
ttgttattgttgactgctctataga

SEQ ID NO: 2650613 - DNA, 25 bp, Homo sapien
aacacatacctgtttcttgttattg

SEQ ID NO: 2650614 - DNA, 25 bp, Homo sapien
gactgctctatagatactccaggca

SEQ ID NO: 2650615 - DNA, 25 bp, Homo sapien
aaatggtgccgatttccgaaaacag

SEQ ID NO: 2650616 - DNA, 25 bp, Homo sapien
gcatccccggattgactcctgagaa

SEQ ID NO: 2650617 - DNA, 25 bp, Homo sapien
ccctaaaatgaggagttgtgtgctt

SEQ ID NO: 2650618 - DNA, 25 bp, Homo sapien
ctctggagagctgcgaaatggtgcc

SEQ ID NO: 2650619 - DNA, 25 bp, Homo sapien
gcaaaaatgggaaaaagcgaccaga

SEQ ID NO: 2650620 - DNA, 25 bp, Homo sapien
ggcgacggcgaggaaaggagcagag

SEQ ID NO: 2650621 - DNA, 25 bp, Homo sapien
ttctctcagagagtgttaagcaagc

SEQ ID NO: 2650622 - DNA, 25 bp, Homo sapien
tgggaaaaagcgaccagacagcact

SEQ ID NO: 2650623 - DNA, 25 bp, Homo sapien
gaactgtaaacgtcctacaggaaca

SEQ ID NO: 2650624 - DNA, 25 bp, Homo sapien
ctgggagacatataccgagagatga

SEQ ID NO: 2650625 - DNA, 25 bp, Homo sapien
tgagacatcgtgtgaactgtaaacg

SEQ ID NO: 2650626 - DNA, 25 bp, Homo sapien
cgcagcggttagaaaaggcttcagg

SEQ ID NO: 2650627 - DNA, 25 bp, Homo sapien
ctagttcatcactgaaggcctgttt

SEQ ID NO: 2650628 - DNA, 25 bp, Homo sapien
tagttcatcactgaaggcctgtttt

SEQ ID NO: 2650629 - DNA, 25 bp, Homo sapien
tggcctcaaaacagacagggtatcg

SEQ ID NO: 2650630 - DNA, 25 bp, Homo sapien
aaaggaagactcacttggtgctgcc

SEQ ID NO: 2650631 - DNA, 25 bp, Homo sapien
gaccaggccctggtaaatcagaagg

SEQ ID NO: 2650632 - DNA, 25 bp, Homo sapien
ttctggctggattgctgactggaca

SEQ ID NO: 2650633 - DNA, 25 bp, Homo sapien
gcagcaaatccagtactactagatt

SEQ ID NO: 2650634 - DNA, 25 bp, Homo sapien
cagcaaatccagtactactagattg

SEQ ID NO: 2650635 - DNA, 25 bp, Homo sapien
gcaaatccagtactactagattggc

SEQ ID NO: 2650636 - DNA, 25 bp, Homo sapien
caaatccagtactactagattggcc

SEQ ID NO: 2650637 - DNA, 25 bp, Homo sapien
gagtggctggcttctaggtcagctc

SEQ ID NO: 2650638 - DNA, 25 bp, Homo sapien
gacatatggccgtccattttcgttt

SEQ ID NO: 2650639 - DNA, 25 bp, Homo sapien
agatttcattctcttgtgacatatg

SEQ ID NO: 2650640 - DNA, 25 bp, Homo sapien
ggattgggagcaaagatttcattct

SEQ ID NO: 2650641 - DNA, 25 bp, Homo sapien
agatttccactctgaattcccattt

SEQ ID NO: 2650642 - DNA, 25 bp, Homo sapien
cagcatagtaatttcttagacttca

SEQ ID NO: 2650643 - DNA, 25 bp, Homo sapien
tattagccactaaacttggaatgat

SEQ ID NO: 2650644 - DNA, 25 bp, Homo sapien
catgtgatcatatgccttgttgtga

SEQ ID NO: 2650645 - DNA, 25 bp, Homo sapien
tgttaaagtcctcacgaacatagtg

SEQ ID NO: 2650646 - DNA, 25 bp, Homo sapien
gatgctgttaaagtcctcacgaaca

SEQ ID NO: 2650647 - DNA, 25 bp, Homo sapien
tcacgaacatagtgatccgaattgg

SEQ ID NO: 2650648 - DNA, 25 bp, Homo sapien
gtcctcacgaacatagtgatccgaa

SEQ ID NO: 2650649 - DNA, 25 bp, Homo sapien
acataaaagatagccacagtaaagc

SEQ ID NO: 2650650 - DNA, 25 bp, Homo sapien
ataaaagatagccacagtaaagcca

SEQ ID NO: 2650651 - DNA, 25 bp, Homo sapien
ttgacataaaagatagccacagtaa

SEQ ID NO: 2650652 - DNA, 25 bp, Homo sapien
gacataaaagatagccacagtaaag

SEQ ID NO: 2650653 - DNA, 25 bp, Homo sapien
cacacgtgaggtgctccagtcggtg

SEQ ID NO: 2650654 - DNA, 25 bp, Homo sapien
tacagagattcttctacactcggtg

SEQ ID NO: 2650655 - DNA, 25 bp, Homo sapien
tcacccctaagtggtatatggagag

SEQ ID NO: 2650656 - DNA, 25 bp, Homo sapien
tctggtacatgaagcctgcactgaa

SEQ ID NO: 2650657 - DNA, 25 bp, Homo sapien
caaccaagagctagctacaggtcta

SEQ ID NO: 2650658 - DNA, 25 bp, Homo sapien
gcagatgatctctcaaacagatggg

SEQ ID NO: 2650659 - DNA, 25 bp, Homo sapien
gacagagtcaacagcaggtcaaacg

SEQ ID NO: 2650660 - DNA, 25 bp, Homo sapien
acagatgggacctccacaaccaaga

SEQ ID NO: 2650661 - DNA, 25 bp, Homo sapien
tgctcccttctatacaagtgatgga

SEQ ID NO: 2650662 - DNA, 25 bp, Homo sapien
gtactctgacctgactgtgctctgc

SEQ ID NO: 2650663 - DNA, 25 bp, Homo sapien
catgtgccgatgcatcacttctcag

SEQ ID NO: 2650664 - DNA, 25 bp, Homo sapien
tagaagctgaccgaaaggcaccgga

SEQ ID NO: 2650665 - DNA, 25 bp, Homo sapien
gcttggggcccccacgagtcacaga

SEQ ID NO: 2650666 - DNA, 25 bp, Homo sapien
gtggaaaggcagagcaccatccctc

SEQ ID NO: 2650667 - DNA, 25 bp, Homo sapien
cttgaggaccagtgctccttctacc

SEQ ID NO: 2650668 - DNA, 25 bp, Homo sapien
catccctcatgaaccctgtcactct

SEQ ID NO: 2650669 - DNA, 25 bp, Homo sapien
cctgagggtattgtattggaacacc

SEQ ID NO: 2650670 - DNA, 25 bp, Homo sapien
gtctgtgctctcagttaaatgaggg

SEQ ID NO: 2650671 - DNA, 25 bp, Homo sapien
agtcccctcatcgttgtctgtgctc

SEQ ID NO: 2650672 - DNA, 25 bp, Homo sapien
cgtccagtgagccaccaagtgggtg

SEQ ID NO: 2650673 - DNA, 25 bp, Homo sapien
ccaatgccacgtgatgtggagtcct

SEQ ID NO: 2650674 - DNA, 25 bp, Homo sapien
aaagataagaggcttcattaaggag

SEQ ID NO: 2650675 - DNA, 25 bp, Homo sapien
gagtccttttgtgaggaccaggaag

SEQ ID NO: 2650676 - DNA, 25 bp, Homo sapien
aatgtctctccccataactgaggac

SEQ ID NO: 2650677 - DNA, 25 bp, Homo sapien
tcggaaggatatggactcacttgcc

SEQ ID NO: 2650678 - DNA, 25 bp, Homo sapien
ggttactcagcgtccatcggaagga

SEQ ID NO: 2650679 - DNA, 25 bp, Homo sapien
gattggctctttgctcggttactca

SEQ ID NO: 2650680 - DNA, 25 bp, Homo sapien
gaaaagctgattggctctttgctcg

SEQ ID NO: 2650681 - DNA, 25 bp, Homo sapien
ttttgcaatcttcgcagccagcaga

SEQ ID NO: 2650682 - DNA, 25 bp, Homo sapien
cctctccaggaaaaacgtcatttgc

SEQ ID NO: 2650683 - DNA, 25 bp, Homo sapien
gtcatttgcaaagctaagcccgttg

SEQ ID NO: 2650684 - DNA, 25 bp, Homo sapien
tcatcctgcttttgcaatcttcgca

SEQ ID NO: 2650685 - DNA, 25 bp, Homo sapien
ttaattcctgcctgccctctttcct

SEQ ID NO: 2650686 - DNA, 25 bp, Homo sapien
aattcctgcctgccctctttccttg

SEQ ID NO: 2650687 - DNA, 25 bp, Homo sapien
tcctgcctgccctctttccttgtat

SEQ ID NO: 2650688 - DNA, 25 bp, Homo sapien
ttcctgcctgccctctttccttgta

SEQ ID NO: 2650689 - DNA, 25 bp, Homo sapien
gaagatgcccttgcctttcatgctc

SEQ ID NO: 2650690 - DNA, 25 bp, Homo sapien
tgtgaccatgtgttttgacctctac

SEQ ID NO: 2650691 - DNA, 25 bp, Homo sapien
caggaactgggttagctcctgagta

SEQ ID NO: 2650692 - DNA, 25 bp, Homo sapien
tcctggaatcccacgtgggaactga

SEQ ID NO: 2650693 - DNA, 25 bp, Homo sapien
ctatgaggtcagcttgtccacccca

SEQ ID NO: 2650694 - DNA, 25 bp, Homo sapien
aggtcagcttgtccaccccagtgac

SEQ ID NO: 2650695 - DNA, 25 bp, Homo sapien
tgaggtcagcttgtccaccccagtg

SEQ ID NO: 2650696 - DNA, 25 bp, Homo sapien
atgaggtcagcttgtccaccccagt

SEQ ID NO: 2650697 - DNA, 25 bp, Homo sapien
gttattttggcttgcatatgctccc

SEQ ID NO: 2650698 - DNA, 25 bp, Homo sapien
tagtggcctccacagttgctgtttt

SEQ ID NO: 2650699 - DNA, 25 bp, Homo sapien
gtttctgggtgctgtagtggcctcc

SEQ ID NO: 2650700 - DNA, 25 bp, Homo sapien
ctgttattttggcttgcatatgctc

SEQ ID NO: 2650701 - DNA, 25 bp, Homo sapien
tgaattttgtaaccagcctgtgaaa

SEQ ID NO: 2650702 - DNA, 25 bp, Homo sapien
gaggatgatcaccatgctgcatgaa

SEQ ID NO: 2650703 - DNA, 25 bp, Homo sapien
tgccccacggccaaatttgagagtg

SEQ ID NO: 2650704 - DNA, 25 bp, Homo sapien
ctgtggttgtaaatcactgggaggt

SEQ ID NO: 2650705 - DNA, 25 bp, Homo sapien
ttccttaagctcttcagcatacagc

SEQ ID NO: 2650706 - DNA, 25 bp, Homo sapien
cttcagcatacagcagagttgcttc

SEQ ID NO: 2650707 - DNA, 25 bp, Homo sapien
taagctcttcagcatacagcagagt

SEQ ID NO: 2650708 - DNA, 25 bp, Homo sapien
gctcttcagcatacagcagagttgc

SEQ ID NO: 2650709 - DNA, 25 bp, Homo sapien
tgaagacgataaccagagtcaagac

SEQ ID NO: 2650710 - DNA, 25 bp, Homo sapien
ccagagtcaagacgctctccaacaa

SEQ ID NO: 2650711 - DNA, 25 bp, Homo sapien
gataaccagagtcaagacgctctcc

SEQ ID NO: 2650712 - DNA, 25 bp, Homo sapien
gagtcaagacgctctccaacaaaaa

SEQ ID NO: 2650713 - DNA, 25 bp, Homo sapien
tctgcagcagttttcagcagcgtct

SEQ ID NO: 2650714 - DNA, 25 bp, Homo sapien
cagcagttttcagcagcgtctgcat

SEQ ID NO: 2650715 - DNA, 25 bp, Homo sapien
gttttcagcagcgtctgcataaaca

SEQ ID NO: 2650716 - DNA, 25 bp, Homo sapien
cagttttcagcagcgtctgcataaa

SEQ ID NO: 2650717 - DNA, 25 bp, Homo sapien
gcatttagagctcaggtcagagctc

SEQ ID NO: 2650718 - DNA, 25 bp, Homo sapien
tccatcgaaggacaggagtgtgaag

SEQ ID NO: 2650719 - DNA, 25 bp, Homo sapien
gggcatttagagctcaggtcagagc

SEQ ID NO: 2650720 - DNA, 25 bp, Homo sapien
gagatcttctccatcgaaggacagg

SEQ ID NO: 2650721 - DNA, 25 bp, Homo sapien
agttactaagtgcaacccatgagcc

SEQ ID NO: 2650722 - DNA, 25 bp, Homo sapien
gatgggagagttcgtactaagctgt

SEQ ID NO: 2650723 - DNA, 25 bp, Homo sapien
gctgaagcatgcaaatggcttgtgt

SEQ ID NO: 2650724 - DNA, 25 bp, Homo sapien
gcctgatccctgatgagttgccaca

SEQ ID NO: 2650725 - DNA, 25 bp, Homo sapien
tctctgggtgcgtcctgcaggggca

SEQ ID NO: 2650726 - DNA, 25 bp, Homo sapien
gggtgcgtcctgcaggggcagttcc

SEQ ID NO: 2650727 - DNA, 25 bp, Homo sapien
ctctctgggtgcgtcctgcaggggc

SEQ ID NO: 2650728 - DNA, 25 bp, Homo sapien
tctgggtgcgtcctgcaggggcagt

SEQ ID NO: 2650729 - DNA, 25 bp, Homo sapien
ggctgctagcagaacacagcccaag

SEQ ID NO: 2650730 - DNA, 25 bp, Homo sapien
gctctcggagtggtttttggttcac

SEQ ID NO: 2650731 - DNA, 25 bp, Homo sapien
ccagctcgggggctgctagcagaac

SEQ ID NO: 2650732 - DNA, 25 bp, Homo sapien
tctgtgttgcgttgtggagctctcg

SEQ ID NO: 2650733 - DNA, 25 bp, Homo sapien
agaggagtagggctgcgatatgcag

SEQ ID NO: 2650734 - DNA, 25 bp, Homo sapien
gagtagggctgcgatatgcagctga

SEQ ID NO: 2650735 - DNA, 25 bp, Homo sapien
tagggctgcgatatgcagctgatga

SEQ ID NO: 2650736 - DNA, 25 bp, Homo sapien
ggctgcgatatgcagctgatgatgt

SEQ ID NO: 2650737 - DNA, 25 bp, Homo sapien
tttgtagctttgcacactcagcaat

SEQ ID NO: 2650738 - DNA, 25 bp, Homo sapien
gcacactcagcaatcataatgaaca

SEQ ID NO: 2650739 - DNA, 25 bp, Homo sapien
ctcagcaatcataatgaacaataag

SEQ ID NO: 2650740 - DNA, 25 bp, Homo sapien
gctttgcacactcagcaatcataat

SEQ ID NO: 2650741 - DNA, 25 bp, Homo sapien
tgggattttggtctgttcttcaagt

SEQ ID NO: 2650742 - DNA, 25 bp, Homo sapien
tcttcaagttcttcaggcccctctc

SEQ ID NO: 2650743 - DNA, 25 bp, Homo sapien
ctgggattttggtctgttcttcaag

SEQ ID NO: 2650744 - DNA, 25 bp, Homo sapien
tcaagttcttcaggcccctctctct

SEQ ID NO: 2650745 - DNA, 25 bp, Homo sapien
cctttcccgtgtgtggcacattggg

SEQ ID NO: 2650746 - DNA, 25 bp, Homo sapien
tcagtgaaggaggacccagtgtaaa

SEQ ID NO: 2650747 - DNA, 25 bp, Homo sapien
tccctgttaaagtggcagtagtcac

SEQ ID NO: 2650748 - DNA, 25 bp, Homo sapien
ggcacattgggtctgctctgactct

SEQ ID NO: 2650749 - DNA, 25 bp, Homo sapien
tgtctggcagtactctggtatggga

SEQ ID NO: 2650750 - DNA, 25 bp, Homo sapien
gacccacggtctggaagaggcaatg

SEQ ID NO: 2650751 - DNA, 25 bp, Homo sapien
ttgtgcatgcggatgggagacccac

SEQ ID NO: 2650752 - DNA, 25 bp, Homo sapien
gggcctgagattgacggtcccatct

SEQ ID NO: 2650753 - DNA, 25 bp, Homo sapien
cctcctttccatgattgagtaggta

SEQ ID NO: 2650754 - DNA, 25 bp, Homo sapien
ggtcatcaacaagactacccgtgat

SEQ ID NO: 2650755 - DNA, 25 bp, Homo sapien
tcattgatgactcaggatcttgtaa

SEQ ID NO: 2650756 - DNA, 25 bp, Homo sapien
gtaaaggattggagttatagcggct

SEQ ID NO: 2650757 - DNA, 25 bp, Homo sapien
tctttgccaaaagtgcctgctttga

SEQ ID NO: 2650758 - DNA, 25 bp, Homo sapien
gcgttgagggcttgataagccttcc

SEQ ID NO: 2650759 - DNA, 25 bp, Homo sapien
gtgcctgctttgactgggtggcgtt

SEQ ID NO: 2650760 - DNA, 25 bp, Homo sapien
tgccaaaagtgcctgctttgactgg

SEQ ID NO: 2650761 - DNA, 25 bp, Homo sapien
gtaggaatgattccagtcgcttaaa

SEQ ID NO: 2650762 - DNA, 25 bp, Homo sapien
tgccgccaggaatcatgtaggaatg

SEQ ID NO: 2650763 - DNA, 25 bp, Homo sapien
ttctgccgccaggaatcatgtagga

SEQ ID NO: 2650764 - DNA, 25 bp, Homo sapien
gtttctgccgccaggaatcatgtag

SEQ ID NO: 2650765 - DNA, 25 bp, Homo sapien
tcacttctagtcttctgaaacgtca

SEQ ID NO: 2650766 - DNA, 25 bp, Homo sapien
ggtttcacttctagtcttctgaaac

SEQ ID NO: 2650767 - DNA, 25 bp, Homo sapien
tttcacttctagtcttctgaaacgt

SEQ ID NO: 2650768 - DNA, 25 bp, Homo sapien
cacttctagtcttctgaaacgtcac

SEQ ID NO: 2650769 - DNA, 25 bp, Homo sapien
cgaagtcttgcaatgattctttgca

SEQ ID NO: 2650770 - DNA, 25 bp, Homo sapien
gcaatgattctttgcaccagtaaac

SEQ ID NO: 2650771 - DNA, 25 bp, Homo sapien
ttgcaatgattctttgcaccagtaa

SEQ ID NO: 2650772 - DNA, 25 bp, Homo sapien
ttcaggcgaagtcttgcaatgattc

SEQ ID NO: 2650773 - DNA, 25 bp, Homo sapien
caaatgatgccaaacttccccaggt

SEQ ID NO: 2650774 - DNA, 25 bp, Homo sapien
tggaaagggcgcaagaaccacgaga

SEQ ID NO: 2650775 - DNA, 25 bp, Homo sapien
cgcaagaaccacgagatctcctgta

SEQ ID NO: 2650776 - DNA, 25 bp, Homo sapien
aaagggcgcaagaaccacgagatct

SEQ ID NO: 2650777 - DNA, 25 bp, Homo sapien
tgattgatgcgttcaccccaatagc

SEQ ID NO: 2650778 - DNA, 25 bp, Homo sapien
ctagttcagctggcggatgagctga

SEQ ID NO: 2650779 - DNA, 25 bp, Homo sapien
gctgattgatgcgttcaccccaata

SEQ ID NO: 2650780 - DNA, 25 bp, Homo sapien
tgagctgattgatgcgttcacccca

SEQ ID NO: 2650781 - DNA, 25 bp, Homo sapien
aaaatttaccacagtttggcacgtg

SEQ ID NO: 2650782 - DNA, 25 bp, Homo sapien
caaaagccgctgcatagttagctgt

SEQ ID NO: 2650783 - DNA, 25 bp, Homo sapien
gcgttcatgaggtctaaagtgcgag

SEQ ID NO: 2650784 - DNA, 25 bp, Homo sapien
ttaggagtggacatatctgtggacc

SEQ ID NO: 2650785 - DNA, 25 bp, Homo sapien
gatgatatgcctctacagggcacca

SEQ ID NO: 2650786 - DNA, 25 bp, Homo sapien
tggtgttacatgaagatcggtgtgt

SEQ ID NO: 2650787 - DNA, 25 bp, Homo sapien
tgaagatcggtgtgttggagcaaac

SEQ ID NO: 2650788 - DNA, 25 bp, Homo sapien
tcagtattataggtgactgagaatc

SEQ ID NO: 2650789 - DNA, 25 bp, Homo sapien
gaatcttccagaagtggtgttacat

SEQ ID NO: 2650790 - DNA, 25 bp, Homo sapien
gaaaagccttagcattgccagggga

SEQ ID NO: 2650791 - DNA, 25 bp, Homo sapien
gagccacagatgctcaggaaaagcc

SEQ ID NO: 2650792 - DNA, 25 bp, Homo sapien
tggcaccagtaagtctaaaatcagg

SEQ ID NO: 2650793 - DNA, 25 bp, Homo sapien
acaattgtttccgagatgttcaaca

SEQ ID NO: 2650794 - DNA, 25 bp, Homo sapien
taagtatagtagtgagaaggcggaa

SEQ ID NO: 2650795 - DNA, 25 bp, Homo sapien
ttaagtatagtagtgagaaggcgga

SEQ ID NO: 2650796 - DNA, 25 bp, Homo sapien
agataactcactactctcaggtcag

SEQ ID NO: 2650797 - DNA, 25 bp, Homo sapien
cctgcagctttgattgaacaagcac

SEQ ID NO: 2650798 - DNA, 25 bp, Homo sapien
aggaaaatcgccaacagtggtaaag

SEQ ID NO: 2650799 - DNA, 25 bp, Homo sapien
tgcagctttgattgaacaagcacca

SEQ ID NO: 2650800 - DNA, 25 bp, Homo sapien
taaagagctgcacaacacttgaagt

SEQ ID NO: 2650801 - DNA, 25 bp, Homo sapien
acctgttcctgagtggtaaggtgta

SEQ ID NO: 2650802 - DNA, 25 bp, Homo sapien
gttcctgagtggtaaggtgtaccat

SEQ ID NO: 2650803 - DNA, 25 bp, Homo sapien
cctgttcctgagtggtaaggtgtac

SEQ ID NO: 2650804 - DNA, 25 bp, Homo sapien
ctgttcctgagtggtaaggtgtacc

SEQ ID NO: 2650805 - DNA, 25 bp, Homo sapien
gagatgcctggcgattttctgttgg

SEQ ID NO: 2650806 - DNA, 25 bp, Homo sapien
caccacagcggttcttagggccagt

SEQ ID NO: 2650807 - DNA, 25 bp, Homo sapien
tagggccagtgtttcagtgtgtgga

SEQ ID NO: 2650808 - DNA, 25 bp, Homo sapien
actccttccagtagttgttggaatc

SEQ ID NO: 2650809 - DNA, 25 bp, Homo sapien
ttagctcagaaactgaggaacgtga

SEQ ID NO: 2650810 - DNA, 25 bp, Homo sapien
gaggaacgtgaattctatgtagtac

SEQ ID NO: 2650811 - DNA, 25 bp, Homo sapien
gtgaattctatgtagtactctgtgc

SEQ ID NO: 2650812 - DNA, 25 bp, Homo sapien
gaaactgaggaacgtgaattctatg

SEQ ID NO: 2650813 - DNA, 25 bp, Homo sapien
taacagacaactgtactactctgtg

SEQ ID NO: 2650814 - DNA, 25 bp, Homo sapien
cagacaactgtactactctgtgcaa

SEQ ID NO: 2650815 - DNA, 25 bp, Homo sapien
actgtactactctgtgcaatggaat

SEQ ID NO: 2650816 - DNA, 25 bp, Homo sapien
ttctttaacagacaactgtactact

SEQ ID NO: 2650817 - DNA, 25 bp, Homo sapien
gcctgaaatggctgcggaacaaaga

SEQ ID NO: 2650818 - DNA, 25 bp, Homo sapien
gggcttcaccgagcgccggtccgat

SEQ ID NO: 2650819 - DNA, 25 bp, Homo sapien
ttcggccgaagcggcactgcctcct

SEQ ID NO: 2650820 - DNA, 25 bp, Homo sapien
agagaatctgggcttcaccgagcgc

SEQ ID NO: 2650821 - DNA, 25 bp, Homo sapien
caccatcccagacgcctcgggcgct

SEQ ID NO: 2650822 - DNA, 25 bp, Homo sapien
tcccagacgcctcgggcgctcgggc

SEQ ID NO: 2650823 - DNA, 25 bp, Homo sapien
cacaccatcccagacgcctcgggcg

SEQ ID NO: 2650824 - DNA, 25 bp, Homo sapien
catcccagacgcctcgggcgctcgg

SEQ ID NO: 2650825 - DNA, 25 bp, Homo sapien
tctcggcttcaaacggccgggcagg

SEQ ID NO: 2650826 - DNA, 25 bp, Homo sapien
cctaacgggatcctcggacgcttga

SEQ ID NO: 2650827 - DNA, 25 bp, Homo sapien
ctcggacgcttgaggagccgccgtc

SEQ ID NO: 2650828 - DNA, 25 bp, Homo sapien
ggcgtctctcccgtaggcgcgtcag

SEQ ID NO: 2650829 - DNA, 25 bp, Homo sapien
agcttaacaggcgaggcaaacgctc

SEQ ID NO: 2650830 - DNA, 25 bp, Homo sapien
gactgcagcactcaagggccctcaa

SEQ ID NO: 2650831 - DNA, 25 bp, Homo sapien
agggccctcaaacgccacagcttaa

SEQ ID NO: 2650832 - DNA, 25 bp, Homo sapien
caaacgccacagcttaacaggcgag

SEQ ID NO: 2650833 - DNA, 25 bp, Homo sapien
ggcccagggcgggacaaagactggc

SEQ ID NO: 2650834 - DNA, 25 bp, Homo sapien
tactgatagaccatcctgattagcg

SEQ ID NO: 2650835 - DNA, 25 bp, Homo sapien
aagtgagtagtacgtcaggacagcc

SEQ ID NO: 2650836 - DNA, 25 bp, Homo sapien
tgtaaacatgtcgtgaggccaagag

SEQ ID NO: 2650837 - DNA, 25 bp, Homo sapien
tctaggaacaactacggtgccaggt

SEQ ID NO: 2650838 - DNA, 25 bp, Homo sapien
tacagtgcccagatcatgctaagtt

SEQ ID NO: 2650839 - DNA, 25 bp, Homo sapien
tctttcagattgactgctggccaaa

SEQ ID NO: 2650840 - DNA, 25 bp, Homo sapien
caaagctgtacctaacatgggtgcc

SEQ ID NO: 2650841 - DNA, 25 bp, Homo sapien
taagggcctttacttttgcatgctc

SEQ ID NO: 2650842 - DNA, 25 bp, Homo sapien
tcagccctgcccagtaaatgacaag

SEQ ID NO: 2650843 - DNA, 25 bp, Homo sapien
cctcagtggagaatgactatggtaa

SEQ ID NO: 2650844 - DNA, 25 bp, Homo sapien
gctaggacaattcttcatggtgaac

SEQ ID NO: 2650845 - DNA, 25 bp, Homo sapien
aaagaattaatcctcctagacatgg

SEQ ID NO: 2650846 - DNA, 25 bp, Homo sapien
taagtagaactaccatgtgctcagt

SEQ ID NO: 2650847 - DNA, 25 bp, Homo sapien
gaaaagcaaatacattccaccagga

SEQ ID NO: 2650848 - DNA, 25 bp, Homo sapien
taggtctgtcctggcaatagatcac

SEQ ID NO: 2650849 - DNA, 25 bp, Homo sapien
tttgcctggcagagtccgattcaac

SEQ ID NO: 2650850 - DNA, 25 bp, Homo sapien
tatgacatggccataattccgggcc

SEQ ID NO: 2650851 - DNA, 25 bp, Homo sapien
tttgttcaaccatctcctgattggc

SEQ ID NO: 2650852 - DNA, 25 bp, Homo sapien
tccctacataatagtggcaacctgg

SEQ ID NO: 2650853 - DNA, 25 bp, Homo sapien
tccgggccaatacataccaatttaa

SEQ ID NO: 2650854 - DNA, 25 bp, Homo sapien
ggtgccccgaaggaagtcacggaca

SEQ ID NO: 2650855 - DNA, 25 bp, Homo sapien
cgccgagcgcaaggagccgaccaga

SEQ ID NO: 2650856 - DNA, 25 bp, Homo sapien
aaggagccgaccagactgagtcacc

SEQ ID NO: 2650857 - DNA, 25 bp, Homo sapien
tcacggacagtgaaacccggcggaa

SEQ ID NO: 2650858 - DNA, 25 bp, Homo sapien
ctgaagcccttgctcgtcaggtttc

SEQ ID NO: 2650859 - DNA, 25 bp, Homo sapien
tgaagcccttgctcgtcaggtttcc

SEQ ID NO: 2650860 - DNA, 25 bp, Homo sapien
gctgaagcccttgctcgtcaggttt

SEQ ID NO: 2650861 - DNA, 25 bp, Homo sapien
taaagtctggatactgattaagttg

SEQ ID NO: 2650862 - DNA, 25 bp, Homo sapien
aaatcaagtagttgttaaagtctgg

SEQ ID NO: 2650863 - DNA, 25 bp, Homo sapien
ggatactgattaagttgttccagtt

SEQ ID NO: 2650864 - DNA, 25 bp, Homo sapien
tagttgttaaagtctggatactgat

SEQ ID NO: 2650865 - DNA, 25 bp, Homo sapien
ttgctgctttaatatgaacagccat

SEQ ID NO: 2650866 - DNA, 25 bp, Homo sapien
ataaagtctgttacaccatttggga

SEQ ID NO: 2650867 - DNA, 25 bp, Homo sapien
gatggcactgtttaatacaagaata

SEQ ID NO: 2650868 - DNA, 25 bp, Homo sapien
tagagccaatgctttgtaagtaaga

SEQ ID NO: 2650869 - DNA, 25 bp, Homo sapien
taaaatcagtgtcaatgatggcact

SEQ ID NO: 2650870 - DNA, 25 bp, Homo sapien
tacattagagtaatctagggagttc

SEQ ID NO: 2650871 - DNA, 25 bp, Homo sapien
aaatggaaaaggctggcacacgctc

SEQ ID NO: 2650872 - DNA, 25 bp, Homo sapien
ttctctcctggatccgaaatggaaa

SEQ ID NO: 2650873 - DNA, 25 bp, Homo sapien
aaaaggctggcacacgctcaccatt

SEQ ID NO: 2650874 - DNA, 25 bp, Homo sapien
taacagtgtcaagagtaggtaaagc

SEQ ID NO: 2650875 - DNA, 25 bp, Homo sapien
ttccttctaaattccattccactta

SEQ ID NO: 2650876 - DNA, 25 bp, Homo sapien
tccttctaaattccattccacttac

SEQ ID NO: 2650877 - DNA, 25 bp, Homo sapien
cttccttctaaattccattccactt

SEQ ID NO: 2650878 - DNA, 25 bp, Homo sapien
gaaatcagtgtgcttggcaacacct

SEQ ID NO: 2650879 - DNA, 25 bp, Homo sapien
tccaaaagcagcaagatctgatcgt

SEQ ID NO: 2650880 - DNA, 25 bp, Homo sapien
gagtataagctctgacaataggcaa

SEQ ID NO: 2650881 - DNA, 25 bp, Homo sapien
agaatctagaaagtaaagctcccgg

SEQ ID NO: 2650882 - DNA, 25 bp, Homo sapien
ttctttaggaaatccaacagcatta

SEQ ID NO: 2650883 - DNA, 25 bp, Homo sapien
ccttggaggctatagttgtgatcaa

SEQ ID NO: 2650884 - DNA, 25 bp, Homo sapien
ctcacaggtattataatcttcagaa

SEQ ID NO: 2650885 - DNA, 25 bp, Homo sapien
cccttggaggctatagttgtgatca

SEQ ID NO: 2650886 - DNA, 25 bp, Homo sapien
caggtattataatcttcagaatcca

SEQ ID NO: 2650887 - DNA, 25 bp, Homo sapien
ttggactactatgcttgaagaactg

SEQ ID NO: 2650888 - DNA, 25 bp, Homo sapien
cactgtctaaaatctcagcagaatc

SEQ ID NO: 2650889 - DNA, 25 bp, Homo sapien
gagaggacgatctaaaacatcactg

SEQ ID NO: 2650890 - DNA, 25 bp, Homo sapien
tcttctgaagggcaccaaatgctcc

SEQ ID NO: 2650891 - DNA, 25 bp, Homo sapien
ttgacccttcaagtagctcggacca

SEQ ID NO: 2650892 - DNA, 25 bp, Homo sapien
caaagcgctgtgattttaggtgaaa

SEQ ID NO: 2650893 - DNA, 25 bp, Homo sapien
ccagcaatggtgtatcgattaccag

SEQ ID NO: 2650894 - DNA, 25 bp, Homo sapien
tggtacacctcgacataaagatggg

SEQ ID NO: 2650895 - DNA, 25 bp, Homo sapien
tcttaccagggttaatgaaataggc

SEQ ID NO: 2650896 - DNA, 25 bp, Homo sapien
agtttgctgactacttgcctagaca

SEQ ID NO: 2650897 - DNA, 25 bp, Homo sapien
aaaaggctgattcctaattccagag

SEQ ID NO: 2650898 - DNA, 25 bp, Homo sapien
tatgctgctacaacccaaagtttct

SEQ ID NO: 2650899 - DNA, 25 bp, Homo sapien
tcctactgatgataaactgattgac

SEQ ID NO: 2650900 - DNA, 25 bp, Homo sapien
acattagagcttgagtcctactgat

SEQ ID NO: 2650901 - DNA, 25 bp, Homo sapien
gcaacattagagcttgagtcctact

SEQ ID NO: 2650902 - DNA, 25 bp, Homo sapien
tgattgacacatgcaacagcgtgag

SEQ ID NO: 2650903 - DNA, 25 bp, Homo sapien
ggctttcatggaatcagagttcaca

SEQ ID NO: 2650904 - DNA, 25 bp, Homo sapien
aataagtaatctgcaagttggtgac

SEQ ID NO: 2650905 - DNA, 25 bp, Homo sapien
tatgctgttccctacgtctgcaagt

SEQ ID NO: 2650906 - DNA, 25 bp, Homo sapien
acttgataaccagcagaagatctga

SEQ ID NO: 2650907 - DNA, 25 bp, Homo sapien
attcgaacttcgagcaacatcacaa

SEQ ID NO: 2650908 - DNA, 25 bp, Homo sapien
gatccattcgaacttcgagcaacat

SEQ ID NO: 2650909 - DNA, 25 bp, Homo sapien
ggcgatccattcgaacttcgagcaa

SEQ ID NO: 2650910 - DNA, 25 bp, Homo sapien
caggcgatccattcgaacttcgagc

SEQ ID NO: 2650911 - DNA, 25 bp, Homo sapien
ccgcacccggccagaatttgaattt

SEQ ID NO: 2650912 - DNA, 25 bp, Homo sapien
cgcacccggccagaatttgaatttt

SEQ ID NO: 2650913 - DNA, 25 bp, Homo sapien
accgcacccggccagaatttgaatt

SEQ ID NO: 2650914 - DNA, 25 bp, Homo sapien
caccattagtatcaattcagtccta

SEQ ID NO: 2650915 - DNA, 25 bp, Homo sapien
accattagtatcaattcagtcctat

SEQ ID NO: 2650916 - DNA, 25 bp, Homo sapien
gctaaagttagccaaaattcacagg

SEQ ID NO: 2650917 - DNA, 25 bp, Homo sapien
taaagttagccaaaattcacaggct

SEQ ID NO: 2650918 - DNA, 25 bp, Homo sapien
gttcagctaaagttagccaaaattc

SEQ ID NO: 2650919 - DNA, 25 bp, Homo sapien
cagctaaagttagccaaaattcaca

SEQ ID NO: 2650920 - DNA, 25 bp, Homo sapien
gaaaatgaagaatcacttaagaaat

SEQ ID NO: 2650921 - DNA, 25 bp, Homo sapien
atgaaaatgaagaatcacttaagaa

SEQ ID NO: 2650922 - DNA, 25 bp, Homo sapien
gaaaaaactcagttgaccatatgaa

SEQ ID NO: 2650923 - DNA, 25 bp, Homo sapien
gaatcgttgctttcttgatggaaag

SEQ ID NO: 2650924 - DNA, 25 bp, Homo sapien
taggaacattcaagtaccataaaca

SEQ ID NO: 2650925 - DNA, 25 bp, Homo sapien
ccaaatacactgactggaatcgttg

SEQ ID NO: 2650926 - DNA, 25 bp, Homo sapien
gcagtaatagagttagagtacctag

SEQ ID NO: 2650927 - DNA, 25 bp, Homo sapien
cagcctgctgggaataggacttcta

SEQ ID NO: 2650928 - DNA, 25 bp, Homo sapien
cctgcttggtttacgaatatttgga

SEQ ID NO: 2650929 - DNA, 25 bp, Homo sapien
tagcctaggttttcattagcatagg

SEQ ID NO: 2650930 - DNA, 25 bp, Homo sapien
ttaatgcaacatcacataaagtaat

SEQ ID NO: 2650931 - DNA, 25 bp, Homo sapien
tttaatgcaacatcacataaagtaa

SEQ ID NO: 2650932 - DNA, 25 bp, Homo sapien
gataaaagctgatctggaacatgaa

SEQ ID NO: 2650933 - DNA, 25 bp, Homo sapien
gaccacttgcggttgaagaccacag

SEQ ID NO: 2650934 - DNA, 25 bp, Homo sapien
cgagcctaagtgctcaaagtgaatt

SEQ ID NO: 2650935 - DNA, 25 bp, Homo sapien
atttatctggtacggtgagggtctc

SEQ ID NO: 2650936 - DNA, 25 bp, Homo sapien
taatcaatggtaatattgtctttga

SEQ ID NO: 2650937 - DNA, 25 bp, Homo sapien
tcaatggtaatattgtctttgaact

SEQ ID NO: 2650938 - DNA, 25 bp, Homo sapien
tgagataatcaatggtaatattgtc

SEQ ID NO: 2650939 - DNA, 25 bp, Homo sapien
aatggtaatattgtctttgaactta

SEQ ID NO: 2650940 - DNA, 25 bp, Homo sapien
tacttcatgccattcactaacacag

SEQ ID NO: 2650941 - DNA, 25 bp, Homo sapien
tctgagtacttcatgccattcacta

SEQ ID NO: 2650942 - DNA, 25 bp, Homo sapien
gccattcactaacacaggaatcaac

SEQ ID NO: 2650943 - DNA, 25 bp, Homo sapien
catgccattcactaacacaggaatc

SEQ ID NO: 2650944 - DNA, 25 bp, Homo sapien
tatatcctgttcactatcaggaatc

SEQ ID NO: 2650945 - DNA, 25 bp, Homo sapien
tgctgagccaccgtcctcgatcggt

SEQ ID NO: 2650946 - DNA, 25 bp, Homo sapien
gccaccgtcctcgatcggtgaaaac

SEQ ID NO: 2650947 - DNA, 25 bp, Homo sapien
tcatgctgctgagccaccgtcctcg

SEQ ID NO: 2650948 - DNA, 25 bp, Homo sapien
attccagtcagaaattgtatcatca

SEQ ID NO: 2650949 - DNA, 25 bp, Homo sapien
agaatgaggcatacgatacacagaa

SEQ ID NO: 2650950 - DNA, 25 bp, Homo sapien
aaaaagatgcctgtatgttttccca

SEQ ID NO: 2650951 - DNA, 25 bp, Homo sapien
ggatcttagttataccacatggtag

SEQ ID NO: 2650952 - DNA, 25 bp, Homo sapien
gagccatacaactaaacagtacact

SEQ ID NO: 2650953 - DNA, 25 bp, Homo sapien
gtgattctcccgctttagccccctg

SEQ ID NO: 2650954 - DNA, 25 bp, Homo sapien
cgcacagctgatttttaggagagac

SEQ ID NO: 2650955 - DNA, 25 bp, Homo sapien
aggtgtgtgccagtacgcacagctg

SEQ ID NO: 2650956 - DNA, 25 bp, Homo sapien
tgtgtgccagtacgcacagctgatt

SEQ ID NO: 2650957 - DNA, 25 bp, Homo sapien
agcagttcatcacgatacacatttg

SEQ ID NO: 2650958 - DNA, 25 bp, Homo sapien
gttcatcacgatacacatttgcaag

SEQ ID NO: 2650959 - DNA, 25 bp, Homo sapien
ggcagcagttcatcacgatacacat

SEQ ID NO: 2650960 - DNA, 25 bp, Homo sapien
tcacgatacacatttgcaagaacat

SEQ ID NO: 2650961 - DNA, 25 bp, Homo sapien
gtagcctagccttattagtacctaa

SEQ ID NO: 2650962 - DNA, 25 bp, Homo sapien
acggcctatggctgtttaatactag

SEQ ID NO: 2650963 - DNA, 25 bp, Homo sapien
taattcaaactggacttaggcttac

SEQ ID NO: 2650964 - DNA, 25 bp, Homo sapien
cctaatagtagtaagaagccaactt

SEQ ID NO: 2650965 - DNA, 25 bp, Homo sapien
ctgaataaggtgaggaataagctca

SEQ ID NO: 2650966 - DNA, 25 bp, Homo sapien
acccagtgtgcatagcggctaagag

SEQ ID NO: 2650967 - DNA, 25 bp, Homo sapien
tgcatagcggctaagagtccagcat

SEQ ID NO: 2650968 - DNA, 25 bp, Homo sapien
agtgtgcatagcggctaagagtcca

SEQ ID NO: 2650969 - DNA, 25 bp, Homo sapien
tgtgcatagcggctaagagtccagc

SEQ ID NO: 2650970 - DNA, 25 bp, Homo sapien
tactatcaaggtcaatggtaaaagc

SEQ ID NO: 2650971 - DNA, 25 bp, Homo sapien
ccaatagaatggctactagagcaga

SEQ ID NO: 2650972 - DNA, 25 bp, Homo sapien
tataaagagacagccaccaaaccaa

SEQ ID NO: 2650973 - DNA, 25 bp, Homo sapien
actataaacataagcagaaggccct

SEQ ID NO: 2650974 - DNA, 25 bp, Homo sapien
ttcctatggcatcgtaaagaatgag

SEQ ID NO: 2650975 - DNA, 25 bp, Homo sapien
tgttcctatggcatcgtaaagaatg

SEQ ID NO: 2650976 - DNA, 25 bp, Homo sapien
taatgttcctatggcatcgtaaaga

SEQ ID NO: 2650977 - DNA, 25 bp, Homo sapien
tcctatggcatcgtaaagaatgagc

SEQ ID NO: 2650978 - DNA, 25 bp, Homo sapien
agtatactccccgtacctgctgaaa

SEQ ID NO: 2650979 - DNA, 25 bp, Homo sapien
gtctattcagcagggtatgtggagc

SEQ ID NO: 2650980 - DNA, 25 bp, Homo sapien
gatatggtactctaaagctacagtg

SEQ ID NO: 2650981 - DNA, 25 bp, Homo sapien
taaaaagtatcagagcattcatgtg

SEQ ID NO: 2650982 - DNA, 25 bp, Homo sapien
ggtaaacttacacagatgcttttgt

SEQ ID NO: 2650983 - DNA, 25 bp, Homo sapien
gaactgtaacgtgtaatatggctgt

SEQ ID NO: 2650984 - DNA, 25 bp, Homo sapien
tgatccataaaacgactaaacatag

SEQ ID NO: 2650985 - DNA, 25 bp, Homo sapien
taagtgtcaaactaaagaatgatcc

SEQ ID NO: 2650986 - DNA, 25 bp, Homo sapien
catttctggatcagtggaggcatta

SEQ ID NO: 2650987 - DNA, 25 bp, Homo sapien
ctttatcttcatcctttaacatgtt

SEQ ID NO: 2650988 - DNA, 25 bp, Homo sapien
agtaaagggaagagatctttatctt

SEQ ID NO: 2650989 - DNA, 25 bp, Homo sapien
gaggcattagcatctgaatatattc

SEQ ID NO: 2650990 - DNA, 25 bp, Homo sapien
taggtttacacaacgctgatacaca

SEQ ID NO: 2650991 - DNA, 25 bp, Homo sapien
tacacaacgctgatacacaggttca

SEQ ID NO: 2650992 - DNA, 25 bp, Homo sapien
acaacgctgatacacaggttcacag

SEQ ID NO: 2650993 - DNA, 25 bp, Homo sapien
gtttacacaacgctgatacacaggt

SEQ ID NO: 2650994 - DNA, 25 bp, Homo sapien
atggcttgtgcaagagtcttctgta

SEQ ID NO: 2650995 - DNA, 25 bp, Homo sapien
catggcttgtgcaagagtcttctgt

SEQ ID NO: 2650996 - DNA, 25 bp, Homo sapien
tggcttgtgcaagagtcttctgtac

SEQ ID NO: 2650997 - DNA, 25 bp, Homo sapien
gcatgcactgatacattagtgtcag

SEQ ID NO: 2650998 - DNA, 25 bp, Homo sapien
gcactgatacattagtgtcaggatg

SEQ ID NO: 2650999 - DNA, 25 bp, Homo sapien
catgcactgatacattagtgtcagg

SEQ ID NO: 2651000 - DNA, 25 bp, Homo sapien
ctgcatgcactgatacattagtgtc

SEQ ID NO: 2651001 - DNA, 25 bp, Homo sapien
tgaggtcacctaacagggcaaaaga

SEQ ID NO: 2651002 - DNA, 25 bp, Homo sapien
ggcaaaagaactctgtcgaacttct

SEQ ID NO: 2651003 - DNA, 25 bp, Homo sapien
gaactctgtcgaacttctggcattt

SEQ ID NO: 2651004 - DNA, 25 bp, Homo sapien
agcttttgtgaggtcacctaacagg

SEQ ID NO: 2651005 - DNA, 25 bp, Homo sapien
tgagaatgataagcttcccataaga

SEQ ID NO: 2651006 - DNA, 25 bp, Homo sapien
aacaggactggacagttgaagctgg

SEQ ID NO: 2651007 - DNA, 25 bp, Homo sapien
gtgtctcaccactgacaacagtata

SEQ ID NO: 2651008 - DNA, 25 bp, Homo sapien
aatattaagacttcaaatgctgtgt

SEQ ID NO: 2651009 - DNA, 25 bp, Homo sapien
aggttggttcccaatattggcatga

SEQ ID NO: 2651010 - DNA, 25 bp, Homo sapien
taggttggttcccaatattggcatg

SEQ ID NO: 2651011 - DNA, 25 bp, Homo sapien
ttctacaagctggtgcaacaccata

SEQ ID NO: 2651012 - DNA, 25 bp, Homo sapien
caacaccataggaatataaggctgc

SEQ ID NO: 2651013 - DNA, 25 bp, Homo sapien
ctgtattctctaacaacgtctttgg

SEQ ID NO: 2651014 - DNA, 25 bp, Homo sapien
cgtctttggtgtgttgggtctgtta

SEQ ID NO: 2651015 - DNA, 25 bp, Homo sapien
gcattctgcaattcaaaggtacgta

SEQ ID NO: 2651016 - DNA, 25 bp, Homo sapien
attaacggcagactaaggaattggc

SEQ ID NO: 2651017 - DNA, 25 bp, Homo sapien
gcaacattctcattaaacaggcaag

SEQ ID NO: 2651018 - DNA, 25 bp, Homo sapien
taaaataagtgcaactcggaactgc

SEQ ID NO: 2651019 - DNA, 25 bp, Homo sapien
ggtcttataaactgctgtagcatgg

SEQ ID NO: 2651020 - DNA, 25 bp, Homo sapien
cgtaaccaagacgaccaattgttat

SEQ ID NO: 2651021 - DNA, 25 bp, Homo sapien
gggccacctcttgaggacaaacgta

SEQ ID NO: 2651022 - DNA, 25 bp, Homo sapien
tgaggacaaacgtaaccaagacgac

SEQ ID NO: 2651023 - DNA, 25 bp, Homo sapien
gatcatggtacaaattccacggaat

SEQ ID NO: 2651024 - DNA, 25 bp, Homo sapien
atcatggtacaaattccacggaatg

SEQ ID NO: 2651025 - DNA, 25 bp, Homo sapien
tcatggtacaaattccacggaatgc

SEQ ID NO: 2651026 - DNA, 25 bp, Homo sapien
catggtacaaattccacggaatgct

SEQ ID NO: 2651027 - DNA, 25 bp, Homo sapien
tgcctcggcctcaactacgtttttc

SEQ ID NO: 2651028 - DNA, 25 bp, Homo sapien
tatcttgggtctcttgtctacagga

SEQ ID NO: 2651029 - DNA, 25 bp, Homo sapien
caggtatttaacctagagtcccaca

SEQ ID NO: 2651030 - DNA, 25 bp, Homo sapien
cttaaacgtgtctgctgaagaatcc

SEQ ID NO: 2651031 - DNA, 25 bp, Homo sapien
gctgtccctattagcccacagtcaa

SEQ ID NO: 2651032 - DNA, 25 bp, Homo sapien
gtcaaggaacctcaactcattcagt

SEQ ID NO: 2651033 - DNA, 25 bp, Homo sapien
tattagcccacagtcaaggaacctc

SEQ ID NO: 2651034 - DNA, 25 bp, Homo sapien
tccctattagcccacagtcaaggaa

SEQ ID NO: 2651035 - DNA, 25 bp, Homo sapien
atcttttgggttaatccatgatgca

SEQ ID NO: 2651036 - DNA, 25 bp, Homo sapien
cacctaaactagtggtacacttggg

SEQ ID NO: 2651037 - DNA, 25 bp, Homo sapien
tcaaagtgcatcctctacagataag

SEQ ID NO: 2651038 - DNA, 25 bp, Homo sapien
taaatggaataatgggaccacctaa

SEQ ID NO: 2651039 - DNA, 25 bp, Homo sapien
gatcaagccaactttgttaccaaga

SEQ ID NO: 2651040 - DNA, 25 bp, Homo sapien
aacgcctccaattttcatcgccaac

SEQ ID NO: 2651041 - DNA, 25 bp, Homo sapien
aaacgcctccaattttcatcgccaa

SEQ ID NO: 2651042 - DNA, 25 bp, Homo sapien
gaaacgcctccaattttcatcgcca

SEQ ID NO: 2651043 - DNA, 25 bp, Homo sapien
cgcctccaattttcatcgccaactt

SEQ ID NO: 2651044 - DNA, 25 bp, Homo sapien
attttgggactgcagcttaagtgta

SEQ ID NO: 2651045 - DNA, 25 bp, Homo sapien
taattttgggactgcagcttaagtg

SEQ ID NO: 2651046 - DNA, 25 bp, Homo sapien
ttgggactgcagcttaagtgtatta

SEQ ID NO: 2651047 - DNA, 25 bp, Homo sapien
ccctaattttgggactgcagcttaa

SEQ ID NO: 2651048 - DNA, 25 bp, Homo sapien
tttgaaatgacagccctaacaaaat

SEQ ID NO: 2651049 - DNA, 25 bp, Homo sapien
gtttgaaatgacagccctaacaaaa

SEQ ID NO: 2651050 - DNA, 25 bp, Homo sapien
atgaggctatgttttattcaacctc

SEQ ID NO: 2651051 - DNA, 25 bp, Homo sapien
tgaggctatgttttattcaacctct

SEQ ID NO: 2651052 - DNA, 25 bp, Homo sapien
gaggctatgttttattcaacctcta

SEQ ID NO: 2651053 - DNA, 25 bp, Homo sapien
tatgaggctatgttttattcaacct

SEQ ID NO: 2651054 - DNA, 25 bp, Homo sapien
gagtcaacttagtgtgccaggcaac

SEQ ID NO: 2651055 - DNA, 25 bp, Homo sapien
gactcaagactgaagtaggacaaca

SEQ ID NO: 2651056 - DNA, 25 bp, Homo sapien
taccttctaggttagacagcttgga

SEQ ID NO: 2651057 - DNA, 25 bp, Homo sapien
taaggtgaatccagcacttttccaa

SEQ ID NO: 2651058 - DNA, 25 bp, Homo sapien
tctggtattttaagcctagaaggca

SEQ ID NO: 2651059 - DNA, 25 bp, Homo sapien
tgaattcacagagggcagttaatcc

SEQ ID NO: 2651060 - DNA, 25 bp, Homo sapien
taaactgttacctgatagtggtcct

SEQ ID NO: 2651061 - DNA, 25 bp, Homo sapien
gcactagaagtgttcattaccacag

SEQ ID NO: 2651062 - DNA, 25 bp, Homo sapien
tatctttaacaatcgtttgtctttc

SEQ ID NO: 2651063 - DNA, 25 bp, Homo sapien
aatttggacaaattgcctaatatcg

SEQ ID NO: 2651064 - DNA, 25 bp, Homo sapien
aacaatcgtttgtctttcaaagcca

SEQ ID NO: 2651065 - DNA, 25 bp, Homo sapien
gacaaattgcctaatatcgtgttag

SEQ ID NO: 2651066 - DNA, 25 bp, Homo sapien
attgtgcgctatagaattgttcctc

SEQ ID NO: 2651067 - DNA, 25 bp, Homo sapien
tctttcttgtccctaggcatcattt

SEQ ID NO: 2651068 - DNA, 25 bp, Homo sapien
ggtacaattccccataatattccac

SEQ ID NO: 2651069 - DNA, 25 bp, Homo sapien
catccactgcggagttgtaactgga

SEQ ID NO: 2651070 - DNA, 25 bp, Homo sapien
cctgcttctactacgggaaggcaag

SEQ ID NO: 2651071 - DNA, 25 bp, Homo sapien
cttctactacgggaaggcaagctga

SEQ ID NO: 2651072 - DNA, 25 bp, Homo sapien
caagaacctgcttctactacgggaa

SEQ ID NO: 2651073 - DNA, 25 bp, Homo sapien
tctactacgggaaggcaagctgact

SEQ ID NO: 2651074 - DNA, 25 bp, Homo sapien
tagcttttaacttgcaccctgtgtg

SEQ ID NO: 2651075 - DNA, 25 bp, Homo sapien
caacatgcgccaaaatacagtgtag

SEQ ID NO: 2651076 - DNA, 25 bp, Homo sapien
cactatgagccagaatgcatgcctg

SEQ ID NO: 2651077 - DNA, 25 bp, Homo sapien
cacaaactggcgcaacataggtaaa

SEQ ID NO: 2651078 - DNA, 25 bp, Homo sapien
catgggatacactgttcaggcaatc

SEQ ID NO: 2651079 - DNA, 25 bp, Homo sapien
caagtgtaccagttaggttttcaca

SEQ ID NO: 2651080 - DNA, 25 bp, Homo sapien
aatggaaaggcgtggcttcatctct

SEQ ID NO: 2651081 - DNA, 25 bp, Homo sapien
tctctgaccagcagagttaaaaaga

SEQ ID NO: 2651082 - DNA, 25 bp, Homo sapien
aatgcaaaggtgacaaactaaaata

SEQ ID NO: 2651083 - DNA, 25 bp, Homo sapien
caatgcaaaggtgacaaactaaaat

SEQ ID NO: 2651084 - DNA, 25 bp, Homo sapien
tatgcggaaagtacagtggaacccc

SEQ ID NO: 2651085 - DNA, 25 bp, Homo sapien
gcatgatacactcttcccctgggaa

SEQ ID NO: 2651086 - DNA, 25 bp, Homo sapien
tcaggagggctttataccaccccag

SEQ ID NO: 2651087 - DNA, 25 bp, Homo sapien
gaaaatctacatcacttagcagcgg

SEQ ID NO: 2651088 - DNA, 25 bp, Homo sapien
ggcgtaccactcgaggtgttcactc

SEQ ID NO: 2651089 - DNA, 25 bp, Homo sapien
cctaaagggtctcagtataacaact

SEQ ID NO: 2651090 - DNA, 25 bp, Homo sapien
cagtaagacagttgcataaattgct

SEQ ID NO: 2651091 - DNA, 25 bp, Homo sapien
tttaaatcatcagagtgagactgcc

SEQ ID NO: 2651092 - DNA, 25 bp, Homo sapien
ggagcttgtactagggcctgctgtt

SEQ ID NO: 2651093 - DNA, 25 bp, Homo sapien
ctgtgacgtataaagataagttttg

SEQ ID NO: 2651094 - DNA, 25 bp, Homo sapien
cctctgggcctagatatttgacctg

SEQ ID NO: 2651095 - DNA, 25 bp, Homo sapien
tctactagatgtgtatttgtcctct

SEQ ID NO: 2651096 - DNA, 25 bp, Homo sapien
gaccaccacgctgtaaagaagactg

SEQ ID NO: 2651097 - DNA, 25 bp, Homo sapien
ccccaaggtgccgtcatgtgaatga

SEQ ID NO: 2651098 - DNA, 25 bp, Homo sapien
tcagtctaataggtgggacttcccc

SEQ ID NO: 2651099 - DNA, 25 bp, Homo sapien
tatgtgccatagatacattcctgca

SEQ ID NO: 2651100 - DNA, 25 bp, Homo sapien
accactctgttcatggaggccatgc

SEQ ID NO: 2651101 - DNA, 25 bp, Homo sapien
gaggccatgcacactggccagagaa

SEQ ID NO: 2651102 - DNA, 25 bp, Homo sapien
tgattcgcctcccataaccagtgat

SEQ ID NO: 2651103 - DNA, 25 bp, Homo sapien
aatggcaaagcggaagtccttctcc

SEQ ID NO: 2651104 - DNA, 25 bp, Homo sapien
tgagtgatacatccttcaaattgag

SEQ ID NO: 2651105 - DNA, 25 bp, Homo sapien
ttttctcttttttgcaggtgcatgt

SEQ ID NO: 2651106 - DNA, 25 bp, Homo sapien
tttccgacatatttcctgagtgata

SEQ ID NO: 2651107 - DNA, 25 bp, Homo sapien
tgtccaaagagctttgtactgttct

SEQ ID NO: 2651108 - DNA, 25 bp, Homo sapien
ctgcctgctcctcatgtggtgccat

SEQ ID NO: 2651109 - DNA, 25 bp, Homo sapien
aagtgcacctgggattgactccctg

SEQ ID NO: 2651110 - DNA, 25 bp, Homo sapien
gcacctgggattgactccctgcctg

SEQ ID NO: 2651111 - DNA, 25 bp, Homo sapien
ctcctaagtgcacctgggattgact

SEQ ID NO: 2651112 - DNA, 25 bp, Homo sapien
catccccggtcaggtgcagtattct

SEQ ID NO: 2651113 - DNA, 25 bp, Homo sapien
gaaactaggtccatgtcagaagggt

SEQ ID NO: 2651114 - DNA, 25 bp, Homo sapien
tttcttcaaggcgtggcatccatcc

SEQ ID NO: 2651115 - DNA, 25 bp, Homo sapien
gaatcaacatttagtcataagggcc

SEQ ID NO: 2651116 - DNA, 25 bp, Homo sapien
cgaggatctcgaacggactatagtc

SEQ ID NO: 2651117 - DNA, 25 bp, Homo sapien
cactgtttgtggtgcgacgggcact

SEQ ID NO: 2651118 - DNA, 25 bp, Homo sapien
gcctttggtcaacagggcgcctttc

SEQ ID NO: 2651119 - DNA, 25 bp, Homo sapien
cattctcgggtgttggtagatctct

SEQ ID NO: 2651120 - DNA, 25 bp, Homo sapien
cgccgctgtgtaaacacggcccggc

SEQ ID NO: 2651121 - DNA, 25 bp, Homo sapien
cccgcccgccgctgtgtaaacacgg

SEQ ID NO: 2651122 - DNA, 25 bp, Homo sapien
gcccgccgctgtgtaaacacggccc

SEQ ID NO: 2651123 - DNA, 25 bp, Homo sapien
gccgctgtgtaaacacggcccggcc

SEQ ID NO: 2651124 - DNA, 25 bp, Homo sapien
aaaaattctcgacgaaatacgccat

SEQ ID NO: 2651125 - DNA, 25 bp, Homo sapien
caaaaattctcgacgaaatacgcca

SEQ ID NO: 2651126 - DNA, 25 bp, Homo sapien
tttgttgatatctgtccatgtttca

SEQ ID NO: 2651127 - DNA, 25 bp, Homo sapien
gaggacatcaaagccactatttttt

SEQ ID NO: 2651128 - DNA, 25 bp, Homo sapien
cttttgttgatatctgtccatgttt

SEQ ID NO: 2651129 - DNA, 25 bp, Homo sapien
ttttgttgatatctgtccatgtttc

SEQ ID NO: 2651130 - DNA, 25 bp, Homo sapien
gagcagtgaccactttgctgagctc

SEQ ID NO: 2651131 - DNA, 25 bp, Homo sapien
gctagccactgggatacaaacaaat

SEQ ID NO: 2651132 - DNA, 25 bp, Homo sapien
gctgagctctaaagaataagtaggc

SEQ ID NO: 2651133 - DNA, 25 bp, Homo sapien
tatcctattgttccaggctttgtgc

SEQ ID NO: 2651134 - DNA, 25 bp, Homo sapien
gcacaaggggtcaggaactctctcc

SEQ ID NO: 2651135 - DNA, 25 bp, Homo sapien
atcaccctatccaggaagcacaagg

SEQ ID NO: 2651136 - DNA, 25 bp, Homo sapien
caggaactctctcccctagccaagg

SEQ ID NO: 2651137 - DNA, 25 bp, Homo sapien
aaatgacacatctgataaaagacca

SEQ ID NO: 2651138 - DNA, 25 bp, Homo sapien
ggagtatgcctcctctatggtagct

SEQ ID NO: 2651139 - DNA, 25 bp, Homo sapien
tgacctggagtatgcctcctctatg

SEQ ID NO: 2651140 - DNA, 25 bp, Homo sapien
cctggagtatgcctcctctatggta

SEQ ID NO: 2651141 - DNA, 25 bp, Homo sapien
tggagtatgcctcctctatggtagc

SEQ ID NO: 2651142 - DNA, 25 bp, Homo sapien
agttgtgaataattgcttgcagatt

SEQ ID NO: 2651143 - DNA, 25 bp, Homo sapien
tgtgaataattgcttgcagattttg

SEQ ID NO: 2651144 - DNA, 25 bp, Homo sapien
tgaataattgcttgcagattttgct

SEQ ID NO: 2651145 - DNA, 25 bp, Homo sapien
ccaagttgtgaataattgcttgcag

SEQ ID NO: 2651146 - DNA, 25 bp, Homo sapien
tacattatcacaagtcttaaccctc

SEQ ID NO: 2651147 - DNA, 25 bp, Homo sapien
cataattgttatggcaatgagcaca

SEQ ID NO: 2651148 - DNA, 25 bp, Homo sapien
tacttgtatcagaagcctttctatc

SEQ ID NO: 2651149 - DNA, 25 bp, Homo sapien
aaacatgcaaaagcccaatttttag

SEQ ID NO: 2651150 - DNA, 25 bp, Homo sapien
tttctctgtagatgttttgaataca

SEQ ID NO: 2651151 - DNA, 25 bp, Homo sapien
gatgttttgaatacatcccatactg

SEQ ID NO: 2651152 - DNA, 25 bp, Homo sapien
gaatacatcccatactggtgcaaat

SEQ ID NO: 2651153 - DNA, 25 bp, Homo sapien
atacttctgaacttcctttattaat

SEQ ID NO: 2651154 - DNA, 25 bp, Homo sapien
gaaatgatccatcaaaatgactgaa

SEQ ID NO: 2651155 - DNA, 25 bp, Homo sapien
gtttagtatgaaatgatccatcaaa

SEQ ID NO: 2651156 - DNA, 25 bp, Homo sapien
atgaaatgatccatcaaaatgactg

SEQ ID NO: 2651157 - DNA, 25 bp, Homo sapien
tagtatgaaatgatccatcaaaatg

SEQ ID NO: 2651158 - DNA, 25 bp, Homo sapien
agttatgctctgaatggtttggaca

SEQ ID NO: 2651159 - DNA, 25 bp, Homo sapien
ttggacagcttccagagttcctgca

SEQ ID NO: 2651160 - DNA, 25 bp, Homo sapien
ttcaaacgctcctgttctacacact

SEQ ID NO: 2651161 - DNA, 25 bp, Homo sapien
cacacttggcattgtaattttcctt

SEQ ID NO: 2651162 - DNA, 25 bp, Homo sapien
aaaggttgtggtttaccacaatgct

SEQ ID NO: 2651163 - DNA, 25 bp, Homo sapien
taaatgtgctcaaagtcagcaataa

SEQ ID NO: 2651164 - DNA, 25 bp, Homo sapien
ggttgtggtttaccacaatgctaca

SEQ ID NO: 2651165 - DNA, 25 bp, Homo sapien
tcaaagtcagcaataaatcaccaca

SEQ ID NO: 2651166 - DNA, 25 bp, Homo sapien
tcaaaattatcactccacatggctc

SEQ ID NO: 2651167 - DNA, 25 bp, Homo sapien
tcattcttaagtgagatataccaca

SEQ ID NO: 2651168 - DNA, 25 bp, Homo sapien
actccacatggctcattcttaagtg

SEQ ID NO: 2651169 - DNA, 25 bp, Homo sapien
aagtatctgtgcatttaaacatgta

SEQ ID NO: 2651170 - DNA, 25 bp, Homo sapien
agatatggccaaaatagtcatgaaa

SEQ ID NO: 2651171 - DNA, 25 bp, Homo sapien
aatagtcatgaaatgattccttggc

SEQ ID NO: 2651172 - DNA, 25 bp, Homo sapien
ctgcaagaatattgtagatatggcc

SEQ ID NO: 2651173 - DNA, 25 bp, Homo sapien
catgaaatgattccttggcttgatt

SEQ ID NO: 2651174 - DNA, 25 bp, Homo sapien
tcagtactgctggacattcatagaa

SEQ ID NO: 2651175 - DNA, 25 bp, Homo sapien
gtactgctggacattcatagaataa

SEQ ID NO: 2651176 - DNA, 25 bp, Homo sapien
acataaatggtacctcctagaattg

SEQ ID NO: 2651177 - DNA, 25 bp, Homo sapien
cctagaattgtgttatgctttatac

SEQ ID NO: 2651178 - DNA, 25 bp, Homo sapien
gccaccgcaaaagggcggagaagct

SEQ ID NO: 2651179 - DNA, 25 bp, Homo sapien
taccatgcagatctgccaccgcaaa

SEQ ID NO: 2651180 - DNA, 25 bp, Homo sapien
agtttggtgctgaattaccatgcag

SEQ ID NO: 2651181 - DNA, 25 bp, Homo sapien
tggtgctgaattaccatgcagatct

SEQ ID NO: 2651182 - DNA, 25 bp, Homo sapien
ggaccccatcatggtgggagtgaat

SEQ ID NO: 2651183 - DNA, 25 bp, Homo sapien
ccccatcatggtgggagtgaataag

SEQ ID NO: 2651184 - DNA, 25 bp, Homo sapien
gaccccatcatggtgggagtgaata

SEQ ID NO: 2651185 - DNA, 25 bp, Homo sapien
caggaccccatcatggtgggagtga

SEQ ID NO: 2651186 - DNA, 25 bp, Homo sapien
tgaggatgaagtcaggaggcgttcc

SEQ ID NO: 2651187 - DNA, 25 bp, Homo sapien
aggatgaagtcaggaggcgttccag

SEQ ID NO: 2651188 - DNA, 25 bp, Homo sapien
atgaagtcaggaggcgttccaggcc

SEQ ID NO: 2651189 - DNA, 25 bp, Homo sapien
gatgaagtcaggaggcgttccaggc

SEQ ID NO: 2651190 - DNA, 25 bp, Homo sapien
cgtagtatctcgtcttaagaatgct

SEQ ID NO: 2651191 - DNA, 25 bp, Homo sapien
cactcgctcacgacttccaaaaaga

SEQ ID NO: 2651192 - DNA, 25 bp, Homo sapien
actcgctcacgacttccaaaaagaa

SEQ ID NO: 2651193 - DNA, 25 bp, Homo sapien
ctgtccgtagtatctcgtcttaaga

SEQ ID NO: 2651194 - DNA, 25 bp, Homo sapien
acccctggagagttagccaggatca

SEQ ID NO: 2651195 - DNA, 25 bp, Homo sapien
aacccctggagagttagccaggatc

SEQ ID NO: 2651196 - DNA, 25 bp, Homo sapien
aacctatactggtgaaggttgcggc

SEQ ID NO: 2651197 - DNA, 25 bp, Homo sapien
actggtgaaggttgcggctcagcac

SEQ ID NO: 2651198 - DNA, 25 bp, Homo sapien
tatactggtgaaggttgcggctcag

SEQ ID NO: 2651199 - DNA, 25 bp, Homo sapien
cagaacctatactggtgaaggttgc

SEQ ID NO: 2651200 - DNA, 25 bp, Homo sapien
cagggcatcaaacggtatcccaagg

SEQ ID NO: 2651201 - DNA, 25 bp, Homo sapien
tcacattggacagggcatcaaacgg

SEQ ID NO: 2651202 - DNA, 25 bp, Homo sapien
catcaaacggtatcccaagggctcg

SEQ ID NO: 2651203 - DNA, 25 bp, Homo sapien
ttggacagggcatcaaacggtatcc

SEQ ID NO: 2651204 - DNA, 25 bp, Homo sapien
tcccaggcccatgcgtccatccaga

SEQ ID NO: 2651205 - DNA, 25 bp, Homo sapien
atggagtgtgaacacgaagttagag

SEQ ID NO: 2651206 - DNA, 25 bp, Homo sapien
aacacgaagttagagtgaggctgct

SEQ ID NO: 2651207 - DNA, 25 bp, Homo sapien
gtcccaggcccatgcgtccatccag

SEQ ID NO: 2651208 - DNA, 25 bp, Homo sapien
ctcctggatcaccatatatctgtgg

SEQ ID NO: 2651209 - DNA, 25 bp, Homo sapien
atatctgtggctctggcgggtcctg

SEQ ID NO: 2651210 - DNA, 25 bp, Homo sapien
tatatctgtggctctggcgggtcct

SEQ ID NO: 2651211 - DNA, 25 bp, Homo sapien
tatctgtggctctggcgggtcctgc

SEQ ID NO: 2651212 - DNA, 25 bp, Homo sapien
atctttaatacaagatgatagggag

SEQ ID NO: 2651213 - DNA, 25 bp, Homo sapien
aaaggtaaaattgatatgccacagt

SEQ ID NO: 2651214 - DNA, 25 bp, Homo sapien
aaggtaaaattgatatgccacagtc

SEQ ID NO: 2651215 - DNA, 25 bp, Homo sapien
aaattgatatgccacagtcagaatc

SEQ ID NO: 2651216 - DNA, 25 bp, Homo sapien
gaaaggtaaaattgatatgccacag

SEQ ID NO: 2651217 - DNA, 25 bp, Homo sapien
attaccagcataagccaccaccatg

SEQ ID NO: 2651218 - DNA, 25 bp, Homo sapien
ctactgggctcaagtactttagcct

SEQ ID NO: 2651219 - DNA, 25 bp, Homo sapien
ggctagagtgtagcctcaaactact

SEQ ID NO: 2651220 - DNA, 25 bp, Homo sapien
tgggctcaagtactttagcctccca

SEQ ID NO: 2651221 - DNA, 25 bp, Homo sapien
catagagtttataggtatctgtagc

SEQ ID NO: 2651222 - DNA, 25 bp, Homo sapien
tagctttcttagatttaacagctgc

SEQ ID NO: 2651223 - DNA, 25 bp, Homo sapien
tttctgttcgaaatcagcttttgct

SEQ ID NO: 2651224 - DNA, 25 bp, Homo sapien
gcttttgctaatgcatatttttcca

SEQ ID NO: 2651225 - DNA, 25 bp, Homo sapien
tgttgttaagcgacacagggctaca

SEQ ID NO: 2651226 - DNA, 25 bp, Homo sapien
gcctggccaggcataagtacattct

SEQ ID NO: 2651227 - DNA, 25 bp, Homo sapien
taatctttaatctgagggtactgct

SEQ ID NO: 2651228 - DNA, 25 bp, Homo sapien
tgagactggtcaacccagctggcct

SEQ ID NO: 2651229 - DNA, 25 bp, Homo sapien
tagcatttgacaaggatcctataat

SEQ ID NO: 2651230 - DNA, 25 bp, Homo sapien
tttgacaaggatcctataatttcct

SEQ ID NO: 2651231 - DNA, 25 bp, Homo sapien
tttatagcatttgacaaggatccta

SEQ ID NO: 2651232 - DNA, 25 bp, Homo sapien
catttgacaaggatcctataatttc

SEQ ID NO: 2651233 - DNA, 25 bp, Homo sapien
cagtgccttttgactcagcaaattt

SEQ ID NO: 2651234 - DNA, 25 bp, Homo sapien
caaactttcaactgtagtattagcc

SEQ ID NO: 2651235 - DNA, 25 bp, Homo sapien
caactgtagtattagccatgttatt

SEQ ID NO: 2651236 - DNA, 25 bp, Homo sapien
gcaaatttttgtatcaaactttcaa

SEQ ID NO: 2651237 - DNA, 25 bp, Homo sapien
aagatgataagctctcccgtggtga

SEQ ID NO: 2651238 - DNA, 25 bp, Homo sapien
taaatatctcagatgagcagctcgg

SEQ ID NO: 2651239 - DNA, 25 bp, Homo sapien
gcaaagatgtgaatggacccgaacc

SEQ ID NO: 2651240 - DNA, 25 bp, Homo sapien
tgagagacggaatcatgccaagaac

SEQ ID NO: 2651241 - DNA, 25 bp, Homo sapien
tccccatactcataaggttgagtca

SEQ ID NO: 2651242 - DNA, 25 bp, Homo sapien
ccccatactcataaggttgagtcat

SEQ ID NO: 2651243 - DNA, 25 bp, Homo sapien
tgtccccatactcataaggttgagt

SEQ ID NO: 2651244 - DNA, 25 bp, Homo sapien
gtgtccccatactcataaggttgag

SEQ ID NO: 2651245 - DNA, 25 bp, Homo sapien
aatatagtggtatccaccctggacc

SEQ ID NO: 2651246 - DNA, 25 bp, Homo sapien
tactgtgcatacaaagcccagagca

SEQ ID NO: 2651247 - DNA, 25 bp, Homo sapien
gaaggtctagggtggagctcaaata

SEQ ID NO: 2651248 - DNA, 25 bp, Homo sapien
tttgagaaatacagccctagtagac

SEQ ID NO: 2651249 - DNA, 25 bp, Homo sapien
cggtaatctttgatcaccacaaatg

SEQ ID NO: 2651250 - DNA, 25 bp, Homo sapien
ggtaatctttgatcaccacaaatgt

SEQ ID NO: 2651251 - DNA, 25 bp, Homo sapien
tgaacggtaatctttgatcaccaca

SEQ ID NO: 2651252 - DNA, 25 bp, Homo sapien
aacggtaatctttgatcaccacaaa

SEQ ID NO: 2651253 - DNA, 25 bp, Homo sapien
tcaaatgcagtccactgcccatcat

SEQ ID NO: 2651254 - DNA, 25 bp, Homo sapien
tctgaaatggttctagttgttacct

SEQ ID NO: 2651255 - DNA, 25 bp, Homo sapien
tgttctgaaatggttctagttgtta

SEQ ID NO: 2651256 - DNA, 25 bp, Homo sapien
acttttaattgacaacgcatctttt

SEQ ID NO: 2651257 - DNA, 25 bp, Homo sapien
aattgacaacgcatctttttaattg

SEQ ID NO: 2651258 - DNA, 25 bp, Homo sapien
cttcaactgcactagcagtgtcaca

SEQ ID NO: 2651259 - DNA, 25 bp, Homo sapien
tcaactgcactagcagtgtcacatt

SEQ ID NO: 2651260 - DNA, 25 bp, Homo sapien
ttcaactgcactagcagtgtcacat

SEQ ID NO: 2651261 - DNA, 25 bp, Homo sapien
attcctggcaaagcaaaggtctttc

SEQ ID NO: 2651262 - DNA, 25 bp, Homo sapien
cctggcaaagcaaaggtctttcttt

SEQ ID NO: 2651263 - DNA, 25 bp, Homo sapien
tttaatgattcctggcaaagcaaag

SEQ ID NO: 2651264 - DNA, 25 bp, Homo sapien
aatgattcctggcaaagcaaaggtc

SEQ ID NO: 2651265 - DNA, 25 bp, Homo sapien
tgggaggctgaggtaggaggagaat

SEQ ID NO: 2651266 - DNA, 25 bp, Homo sapien
ggtgggcgccgtaattccagctact

SEQ ID NO: 2651267 - DNA, 25 bp, Homo sapien
gtggtggtgggcgccgtaattccag

SEQ ID NO: 2651268 - DNA, 25 bp, Homo sapien
tgggaggtggagaatgcagtaagcc

SEQ ID NO: 2651269 - DNA, 25 bp, Homo sapien
gaaggtaaatcaggccgggcgcgtg

SEQ ID NO: 2651270 - DNA, 25 bp, Homo sapien
cactttgggaagctgaggcgggtgg

SEQ ID NO: 2651271 - DNA, 25 bp, Homo sapien
aagaaggtaaatcaggccgggcgcg

SEQ ID NO: 2651272 - DNA, 25 bp, Homo sapien
gctcaggcctgtaatcccagcactt

SEQ ID NO: 2651273 - DNA, 25 bp, Homo sapien
tgggctgtatgacacctgcagatga

SEQ ID NO: 2651274 - DNA, 25 bp, Homo sapien
ggcctgtctcccacaattactagca

SEQ ID NO: 2651275 - DNA, 25 bp, Homo sapien
caaaagccttcaggctatgaagagg

SEQ ID NO: 2651276 - DNA, 25 bp, Homo sapien
tatgaagaggcatgccaagagcctc

SEQ ID NO: 2651277 - DNA, 25 bp, Homo sapien
caatgaatctgcatcaggacattcc

SEQ ID NO: 2651278 - DNA, 25 bp, Homo sapien
gaatgatatggcaccactccaattt

SEQ ID NO: 2651279 - DNA, 25 bp, Homo sapien
acagaatgatatggcaccactccaa

SEQ ID NO: 2651280 - DNA, 25 bp, Homo sapien
tctggcaatgtaaatccaaaaatgc

SEQ ID NO: 2651281 - DNA, 25 bp, Homo sapien
tctatttaataggaaagcatctggc

SEQ ID NO: 2651282 - DNA, 25 bp, Homo sapien
tccctaccatgatagcctattgatg

SEQ ID NO: 2651283 - DNA, 25 bp, Homo sapien
cgtctgttctcacatcgctatcaag

SEQ ID NO: 2651284 - DNA, 25 bp, Homo sapien
gaggaagccatgaataggccgtaag

SEQ ID NO: 2651285 - DNA, 25 bp, Homo sapien
aagaaaataacaagcctggataaca

SEQ ID NO: 2651286 - DNA, 25 bp, Homo sapien
aaacacagaaagcgggcccggtgca

SEQ ID NO: 2651287 - DNA, 25 bp, Homo sapien
caaaccacttagtcttgccaataaa

SEQ ID NO: 2651288 - DNA, 25 bp, Homo sapien
aatacagtatggcaatataatcggc

SEQ ID NO: 2651289 - DNA, 25 bp, Homo sapien
gcaaaatccagactaaaggaaacta

SEQ ID NO: 2651290 - DNA, 25 bp, Homo sapien
tacttaggaaccaaaccgcttctca

SEQ ID NO: 2651291 - DNA, 25 bp, Homo sapien
gattatcaaagtagcctcaggtatt

SEQ ID NO: 2651292 - DNA, 25 bp, Homo sapien
ccgcttctcagatatcaacaggtta

SEQ ID NO: 2651293 - DNA, 25 bp, Homo sapien
tgctctggctacctgaaagaggaaa

SEQ ID NO: 2651294 - DNA, 25 bp, Homo sapien
atttgtttctggtttaatactgtag

SEQ ID NO: 2651295 - DNA, 25 bp, Homo sapien
ttgtttctggtttaatactgtagcc

SEQ ID NO: 2651296 - DNA, 25 bp, Homo sapien
tgtttctggtttaatactgtagcct

SEQ ID NO: 2651297 - DNA, 25 bp, Homo sapien
tttctggtttaatactgtagccttc

SEQ ID NO: 2651298 - DNA, 25 bp, Homo sapien
tatgccaacataatccttaagaata

SEQ ID NO: 2651299 - DNA, 25 bp, Homo sapien
atgccaacataatccttaagaatac

SEQ ID NO: 2651300 - DNA, 25 bp, Homo sapien
cattgtgtgatgtgagttatttgga

SEQ ID NO: 2651301 - DNA, 25 bp, Homo sapien
ggagagtgttatattccctatagat

SEQ ID NO: 2651302 - DNA, 25 bp, Homo sapien
ggcttaatttctatccgatacttct

SEQ ID NO: 2651303 - DNA, 25 bp, Homo sapien
ttcatccaaagaagccattgtgtga

SEQ ID NO: 2651304 - DNA, 25 bp, Homo sapien
caatatgaaacggtgagaaccttta

SEQ ID NO: 2651305 - DNA, 25 bp, Homo sapien
taaattctgaagtacatgactggga

SEQ ID NO: 2651306 - DNA, 25 bp, Homo sapien
gacttaatgtcaatcatgatgatca

SEQ ID NO: 2651307 - DNA, 25 bp, Homo sapien
gaggaattaactattaccactaaga

SEQ ID NO: 2651308 - DNA, 25 bp, Homo sapien
tagacaaattccgattcatctgtac

SEQ ID NO: 2651309 - DNA, 25 bp, Homo sapien
tcattgggtggagcagatggctttg

SEQ ID NO: 2651310 - DNA, 25 bp, Homo sapien
aaaaggacatattaccaagcgagaa

SEQ ID NO: 2651311 - DNA, 25 bp, Homo sapien
tcccatgagaataaccagctgaaat

SEQ ID NO: 2651312 - DNA, 25 bp, Homo sapien
tactataatgacgaatacatgtcct

SEQ ID NO: 2651313 - DNA, 25 bp, Homo sapien
gaagtagtgaggctaccaaggccaa

SEQ ID NO: 2651314 - DNA, 25 bp, Homo sapien
tgaagaagatgaatcaagagatggt

SEQ ID NO: 2651315 - DNA, 25 bp, Homo sapien
gagatggtccaaatagggggtccca

SEQ ID NO: 2651316 - DNA, 25 bp, Homo sapien
tagggggtcccaagcaagtaaatca

SEQ ID NO: 2651317 - DNA, 25 bp, Homo sapien
gatgaagttagtgaagatgaagaag

SEQ ID NO: 2651318 - DNA, 25 bp, Homo sapien
gctcaatgagaaaggctataaagcc

SEQ ID NO: 2651319 - DNA, 25 bp, Homo sapien
tcaaaaggtcaaatagcgtttagtg

SEQ ID NO: 2651320 - DNA, 25 bp, Homo sapien
taagtacagattaccttcccttcaa

SEQ ID NO: 2651321 - DNA, 25 bp, Homo sapien
ggcaacaacatcagattttcctgta

SEQ ID NO: 2651322 - DNA, 25 bp, Homo sapien
tctacatggtataagatgcaactga

SEQ ID NO: 2651323 - DNA, 25 bp, Homo sapien
atctacattggcacttaacaaaggg

SEQ ID NO: 2651324 - DNA, 25 bp, Homo sapien
gcactgaatgatctcacaacctgga

SEQ ID NO: 2651325 - DNA, 25 bp, Homo sapien
caacctggaccttgctaaaatgtta

SEQ ID NO: 2651326 - DNA, 25 bp, Homo sapien
taagctttggtctggaagcaggcct

SEQ ID NO: 2651327 - DNA, 25 bp, Homo sapien
caatggtgcctacagaaagaggagt

SEQ ID NO: 2651328 - DNA, 25 bp, Homo sapien
cctcggaggtgggacaatggtgcct

SEQ ID NO: 2651329 - DNA, 25 bp, Homo sapien
ttgcctgaagtaagctttggtctgg

SEQ ID NO: 2651330 - DNA, 25 bp, Homo sapien
ggaagttacaggtgggctgaatggc

SEQ ID NO: 2651331 - DNA, 25 bp, Homo sapien
tctgcccgggctaatggtgcagcag

SEQ ID NO: 2651332 - DNA, 25 bp, Homo sapien
ctggtgttggaagttacaggtgggc

SEQ ID NO: 2651333 - DNA, 25 bp, Homo sapien
aagaactttctgcccgggctaatgg

SEQ ID NO: 2651334 - DNA, 25 bp, Homo sapien
ttggcagcactcaatgaagcagatg

SEQ ID NO: 2651335 - DNA, 25 bp, Homo sapien
tgttggagtattggcagcactcaat

SEQ ID NO: 2651336 - DNA, 25 bp, Homo sapien
tattggcagcactcaatgaagcaga

SEQ ID NO: 2651337 - DNA, 25 bp, Homo sapien
gagtattggcagcactcaatgaagc

SEQ ID NO: 2651338 - DNA, 25 bp, Homo sapien
cactgcgtgccttactgctactgct

SEQ ID NO: 2651339 - DNA, 25 bp, Homo sapien
aggtatcctgatttccaaggctgac

SEQ ID NO: 2651340 - DNA, 25 bp, Homo sapien
ggtgggatctgctcctttaaagtag

SEQ ID NO: 2651341 - DNA, 25 bp, Homo sapien
gggcaactgccacaggtaaggtatc

SEQ ID NO: 2651342 - DNA, 25 bp, Homo sapien
cacaggtaaggtatcctgatttcca

SEQ ID NO: 2651343 - DNA, 25 bp, Homo sapien
ggaagaatctgctctagtctgctga

SEQ ID NO: 2651344 - DNA, 25 bp, Homo sapien
gttggattgctggtgaagactttaa

SEQ ID NO: 2651345 - DNA, 25 bp, Homo sapien
aatgacattgtcatatcaccagtga

SEQ ID NO: 2651346 - DNA, 25 bp, Homo sapien
tgaagcacaacacagctggagttgg

SEQ ID NO: 2651347 - DNA, 25 bp, Homo sapien
tttgtgttggaatcacattgtgatg

SEQ ID NO: 2651348 - DNA, 25 bp, Homo sapien
tccaaaaatcttttgtgttggaatc

SEQ ID NO: 2651349 - DNA, 25 bp, Homo sapien
tgtgttggaatcacattgtgatgga

SEQ ID NO: 2651350 - DNA, 25 bp, Homo sapien
aatcttttgtgttggaatcacattg

SEQ ID NO: 2651351 - DNA, 25 bp, Homo sapien
tctacattataataagaagcagctg

SEQ ID NO: 2651352 - DNA, 25 bp, Homo sapien
cttcttgaggtagactgtaacagct

SEQ ID NO: 2651353 - DNA, 25 bp, Homo sapien
cattataataagaagcagctggatt

SEQ ID NO: 2651354 - DNA, 25 bp, Homo sapien
cagctggattttgctctgacagctt

SEQ ID NO: 2651355 - DNA, 25 bp, Homo sapien
gaaagcacactaggtgccaccatag

SEQ ID NO: 2651356 - DNA, 25 bp, Homo sapien
cactctaagatctgtggtgctagca

SEQ ID NO: 2651357 - DNA, 25 bp, Homo sapien
tccagtatgttgcaagattcagagg

SEQ ID NO: 2651358 - DNA, 25 bp, Homo sapien
actggtaccaccacctgtatgttgg

SEQ ID NO: 2651359 - DNA, 25 bp, Homo sapien
tgaaatactagacaatttccaaaag

SEQ ID NO: 2651360 - DNA, 25 bp, Homo sapien
ctgaaatactagacaatttccaaaa

SEQ ID NO: 2651361 - DNA, 25 bp, Homo sapien
taaggaaagcctatagccagtgccc

SEQ ID NO: 2651362 - DNA, 25 bp, Homo sapien
gatcaaattttgctcggagggaccc

SEQ ID NO: 2651363 - DNA, 25 bp, Homo sapien
gccagtgcccacaagttcgaaatct

SEQ ID NO: 2651364 - DNA, 25 bp, Homo sapien
gaaagggtacttccctcgctgagga

SEQ ID NO: 2651365 - DNA, 25 bp, Homo sapien
tgtaatccctgaagccacatcactt

SEQ ID NO: 2651366 - DNA, 25 bp, Homo sapien
gacatcatacaagttaaaatagtgt

SEQ ID NO: 2651367 - DNA, 25 bp, Homo sapien
aaagacatcatacaagttaaaatag

SEQ ID NO: 2651368 - DNA, 25 bp, Homo sapien
ggtttgtaatccctgaagccacatc

SEQ ID NO: 2651369 - DNA, 25 bp, Homo sapien
caccaaagaagtgagccaggattct

SEQ ID NO: 2651370 - DNA, 25 bp, Homo sapien
tacttggtatgaagactgtggtaac

SEQ ID NO: 2651371 - DNA, 25 bp, Homo sapien
tctggtctgattaccttatggcaca

SEQ ID NO: 2651372 - DNA, 25 bp, Homo sapien
tctactaggcaaataaaggacactc

SEQ ID NO: 2651373 - DNA, 25 bp, Homo sapien
tctgttacttgaggctaaaaacatt

SEQ ID NO: 2651374 - DNA, 25 bp, Homo sapien
tggtactgctggtttaaaccattct

SEQ ID NO: 2651375 - DNA, 25 bp, Homo sapien
cgatcattaggaggcgtatggaaat

SEQ ID NO: 2651376 - DNA, 25 bp, Homo sapien
gataaaacactcatgctaaaaagat

SEQ ID NO: 2651377 - DNA, 25 bp, Homo sapien
tggaaacatgcctgtaccagcagaa

SEQ ID NO: 2651378 - DNA, 25 bp, Homo sapien
tgattgggataggtgcagacttgct

SEQ ID NO: 2651379 - DNA, 25 bp, Homo sapien
taaacagatacgagctgggagcttc

SEQ ID NO: 2651380 - DNA, 25 bp, Homo sapien
tggctgccatactccaaccgtaaag

SEQ ID NO: 2651381 - DNA, 25 bp, Homo sapien
tggaatagaactaggagaactttta

SEQ ID NO: 2651382 - DNA, 25 bp, Homo sapien
atggaatagaactaggagaactttt

SEQ ID NO: 2651383 - DNA, 25 bp, Homo sapien
aataactgaccacctttggactagc

SEQ ID NO: 2651384 - DNA, 25 bp, Homo sapien
attgaaataactgaccacctttgga

SEQ ID NO: 2651385 - DNA, 25 bp, Homo sapien
acaaccaattgaaataactgaccac

SEQ ID NO: 2651386 - DNA, 25 bp, Homo sapien
gggaaagagtataacaagagtttga

SEQ ID NO: 2651387 - DNA, 25 bp, Homo sapien
tcttgtgccagataatagcccacca

SEQ ID NO: 2651388 - DNA, 25 bp, Homo sapien
tttcttgtgccagataatagcccac

SEQ ID NO: 2651389 - DNA, 25 bp, Homo sapien
aatatttcttgtgccagataatagc

SEQ ID NO: 2651390 - DNA, 25 bp, Homo sapien
attaatatttcttgtgccagataat

SEQ ID NO: 2651391 - DNA, 25 bp, Homo sapien
tgacattgacttgagtcagacacag

SEQ ID NO: 2651392 - DNA, 25 bp, Homo sapien
cattcacagtgcatcgggccttagg

SEQ ID NO: 2651393 - DNA, 25 bp, Homo sapien
gtattaataaacaggcacaaagcag

SEQ ID NO: 2651394 - DNA, 25 bp, Homo sapien
caaagcagtttatagggctgccttg

SEQ ID NO: 2651395 - DNA, 25 bp, Homo sapien
cagggactacctgaaacagcccctt

SEQ ID NO: 2651396 - DNA, 25 bp, Homo sapien
gaccagggactacctgaaacagccc

SEQ ID NO: 2651397 - DNA, 25 bp, Homo sapien
tggaccagggactacctgaaacagc

SEQ ID NO: 2651398 - DNA, 25 bp, Homo sapien
cctggaccagggactacctgaaaca

SEQ ID NO: 2651399 - DNA, 25 bp, Homo sapien
gcagtttggcagtaagccacctcct

SEQ ID NO: 2651400 - DNA, 25 bp, Homo sapien
gccctttgtggaagccacagaatgc

SEQ ID NO: 2651401 - DNA, 25 bp, Homo sapien
tcataaaaggccctttgtggaagcc

SEQ ID NO: 2651402 - DNA, 25 bp, Homo sapien
taaaaggccctttgtggaagccaca

SEQ ID NO: 2651403 - DNA, 25 bp, Homo sapien
tggcccctccactacctggttgcca

SEQ ID NO: 2651404 - DNA, 25 bp, Homo sapien
ccatctgcatgtcttggcccaatct

SEQ ID NO: 2651405 - DNA, 25 bp, Homo sapien
ttctggcccctccactacctggttg

SEQ ID NO: 2651406 - DNA, 25 bp, Homo sapien
catgtcttggcccaatctccatatc

SEQ ID NO: 2651407 - DNA, 25 bp, Homo sapien
catcttccacctgtggctcaggaag

SEQ ID NO: 2651408 - DNA, 25 bp, Homo sapien
gaagcttgagctgatgaatccatgg

SEQ ID NO: 2651409 - DNA, 25 bp, Homo sapien
taactactactcgtctagctacact

SEQ ID NO: 2651410 - DNA, 25 bp, Homo sapien
caataaatggatttctccttaacta

SEQ ID NO: 2651411 - DNA, 25 bp, Homo sapien
ctgcaccctacccaccgcgcgtcct

SEQ ID NO: 2651412 - DNA, 25 bp, Homo sapien
cgcggcgtccgcctccgcacgcggc

SEQ ID NO: 2651413 - DNA, 25 bp, Homo sapien
ccctgcaccctacccaccgcgcgtc

SEQ ID NO: 2651414 - DNA, 25 bp, Homo sapien
cgtccgcctccgcacgcggcctcgg

SEQ ID NO: 2651415 - DNA, 25 bp, Homo sapien
tcttccctccaagatttcagcagct

SEQ ID NO: 2651416 - DNA, 25 bp, Homo sapien
cagtgtctgtctcgtttagcggttc

SEQ ID NO: 2651417 - DNA, 25 bp, Homo sapien
tgcctggaacccaaagatggagagc

SEQ ID NO: 2651418 - DNA, 25 bp, Homo sapien
ccaggacgctgatgagcatgccgct

SEQ ID NO: 2651419 - DNA, 25 bp, Homo sapien
ttagcggttcctgcgcccagttgga

SEQ ID NO: 2651420 - DNA, 25 bp, Homo sapien
gaatccagacgagaaccaagagcag

SEQ ID NO: 2651421 - DNA, 25 bp, Homo sapien
ccactgtgatagaagcaagaacgca

SEQ ID NO: 2651422 - DNA, 25 bp, Homo sapien
aagatgtatacaaggttcctacggg

SEQ ID NO: 2651423 - DNA, 25 bp, Homo sapien
caagaacgcaaataacagcaaccca

SEQ ID NO: 2651424 - DNA, 25 bp, Homo sapien
acaacatatacacccctccaaggag

SEQ ID NO: 2651425 - DNA, 25 bp, Homo sapien
agacaacatatacacccctccaagg

SEQ ID NO: 2651426 - DNA, 25 bp, Homo sapien
agcactgagtgtacccacaacaagg

SEQ ID NO: 2651427 - DNA, 25 bp, Homo sapien
tacccacaacaaggagagcatgctt

SEQ ID NO: 2651428 - DNA, 25 bp, Homo sapien
caggtgggtaataaatggaagcaaa

SEQ ID NO: 2651429 - DNA, 25 bp, Homo sapien
atttggcccatctatataaaaggtc

SEQ ID NO: 2651430 - DNA, 25 bp, Homo sapien
gactgtattcaatgccactaaacca

SEQ ID NO: 2651431 - DNA, 25 bp, Homo sapien
aaaggtcaacacacctgctgctaac

SEQ ID NO: 2651432 - DNA, 25 bp, Homo sapien
gattcaggaaagtaaggtggtggag

SEQ ID NO: 2651433 - DNA, 25 bp, Homo sapien
gggtggaaatattattaccgagtca

SEQ ID NO: 2651434 - DNA, 25 bp, Homo sapien
ggtggaaatattattaccgagtcac

SEQ ID NO: 2651435 - DNA, 25 bp, Homo sapien
tgaagattcaggaaagtaaggtggt

SEQ ID NO: 2651436 - DNA, 25 bp, Homo sapien
cattcggaagcagactgttagttcc

SEQ ID NO: 2651437 - DNA, 25 bp, Homo sapien
agactgttagttccaggactctcag

SEQ ID NO: 2651438 - DNA, 25 bp, Homo sapien
gaagcagactgttagttccaggact

SEQ ID NO: 2651439 - DNA, 25 bp, Homo sapien
ggttttcattcggaagcagactgtt

SEQ ID NO: 2651440 - DNA, 25 bp, Homo sapien
tctcagttggggacctctgagcttc

SEQ ID NO: 2651441 - DNA, 25 bp, Homo sapien
ttctcagttggggacctctgagctt

SEQ ID NO: 2651442 - DNA, 25 bp, Homo sapien
accctggaactcatcatcttcgcct

SEQ ID NO: 2651443 - DNA, 25 bp, Homo sapien
cttctcagttggggacctctgagct

SEQ ID NO: 2651444 - DNA, 25 bp, Homo sapien
ccttttcctagagctgagtgtaaca

SEQ ID NO: 2651445 - DNA, 25 bp, Homo sapien
cagtgacacccctttagtactaggt

SEQ ID NO: 2651446 - DNA, 25 bp, Homo sapien
gccacaaacctgaaggacggcagga

SEQ ID NO: 2651447 - DNA, 25 bp, Homo sapien
catattggctaatggagtgggctct

SEQ ID NO: 2651448 - DNA, 25 bp, Homo sapien
tctaggaggcaattcagatggaaga

SEQ ID NO: 2651449 - DNA, 25 bp, Homo sapien
agtctctttcagaggctgcaccctc

SEQ ID NO: 2651450 - DNA, 25 bp, Homo sapien
ggcctcagaagatgaattcgtccca

SEQ ID NO: 2651451 - DNA, 25 bp, Homo sapien
agatgaattcgtcccagaaatggta

SEQ ID NO: 2651452 - DNA, 25 bp, Homo sapien
aataaaatagtgatccattgcatat

SEQ ID NO: 2651453 - DNA, 25 bp, Homo sapien
taaaatagtgatccattgcatataa

SEQ ID NO: 2651454 - DNA, 25 bp, Homo sapien
ataaaactgaactagagtccatagt

SEQ ID NO: 2651455 - DNA, 25 bp, Homo sapien
taaataaaatagtgatccattgcat

SEQ ID NO: 2651456 - DNA, 25 bp, Homo sapien
tgcatatgctctcaggaaagatcct

SEQ ID NO: 2651457 - DNA, 25 bp, Homo sapien
ctctgcatatgctctcaggaaagat

SEQ ID NO: 2651458 - DNA, 25 bp, Homo sapien
aaagatcctggctgatcggccgaac

SEQ ID NO: 2651459 - DNA, 25 bp, Homo sapien
gatcggccgaactgccaggtatctc

SEQ ID NO: 2651460 - DNA, 25 bp, Homo sapien
tcccacggagcacagtcttggcctc

SEQ ID NO: 2651461 - DNA, 25 bp, Homo sapien
ctgcctgttgtgataaacatcatct

SEQ ID NO: 2651462 - DNA, 25 bp, Homo sapien
tgctcccacggagcacagtcttggc

SEQ ID NO: 2651463 - DNA, 25 bp, Homo sapien
taaacatcatctggtgctcccacgg

SEQ ID NO: 2651464 - DNA, 25 bp, Homo sapien
gcatgcatgagactccaggaatccc

SEQ ID NO: 2651465 - DNA, 25 bp, Homo sapien
agtatgcaagatcccgggagggctt

SEQ ID NO: 2651466 - DNA, 25 bp, Homo sapien
tcccaagtatgcaagatcccgggag

SEQ ID NO: 2651467 - DNA, 25 bp, Homo sapien
cctcttggggtgctcgtgctggcgg

SEQ ID NO: 2651468 - DNA, 25 bp, Homo sapien
atatctttcacattgatgtagtggc

SEQ ID NO: 2651469 - DNA, 25 bp, Homo sapien
cttgtgggctcaccctgcttcttag

SEQ ID NO: 2651470 - DNA, 25 bp, Homo sapien
tccttgtgggctcaccctgcttctt

SEQ ID NO: 2651471 - DNA, 25 bp, Homo sapien
tgctccttgtgggctcaccctgctt

SEQ ID NO: 2651472 - DNA, 25 bp, Homo sapien
gctccttgtgggctcaccctgcttc

SEQ ID NO: 2651473 - DNA, 25 bp, Homo sapien
gcaatcaggatgaatgtcaccccaa

SEQ ID NO: 2651474 - DNA, 25 bp, Homo sapien
tgacggagaacacattgacagggaa

SEQ ID NO: 2651475 - DNA, 25 bp, Homo sapien
ggtatttatccccataggctctgga

SEQ ID NO: 2651476 - DNA, 25 bp, Homo sapien
taaggaggagggatgtactgcacca

SEQ ID NO: 2651477 - DNA, 25 bp, Homo sapien
cctccagaggttatgaggccgcagg

SEQ ID NO: 2651478 - DNA, 25 bp, Homo sapien
tgtagtattgaggaggacttgacat

SEQ ID NO: 2651479 - DNA, 25 bp, Homo sapien
caaatgcagagttatcttgagggta

SEQ ID NO: 2651480 - DNA, 25 bp, Homo sapien
tgatttccaccgtccgtgaaagaaa

SEQ ID NO: 2651481 - DNA, 25 bp, Homo sapien
tagaaggagtgcattcccccagtag

SEQ ID NO: 2651482 - DNA, 25 bp, Homo sapien
ctagaaggagtgcattcccccagta

SEQ ID NO: 2651483 - DNA, 25 bp, Homo sapien
agaaggagtgcattcccccagtaga

SEQ ID NO: 2651484 - DNA, 25 bp, Homo sapien
ttctagctggtcaacatcaggattg

SEQ ID NO: 2651485 - DNA, 25 bp, Homo sapien
tatttcttcataagggggaggagag

SEQ ID NO: 2651486 - DNA, 25 bp, Homo sapien
agtatatttcttcataagggggagg

SEQ ID NO: 2651487 - DNA, 25 bp, Homo sapien
ctcttctagctggtcaacatcagga

SEQ ID NO: 2651488 - DNA, 25 bp, Homo sapien
taacaatgacggaaacacttgctcc

SEQ ID NO: 2651489 - DNA, 25 bp, Homo sapien
gaacaccacggttgtcaggtaacaa

SEQ ID NO: 2651490 - DNA, 25 bp, Homo sapien
caccaatgccttcctacagagaagg

SEQ ID NO: 2651491 - DNA, 25 bp, Homo sapien
tacaggagatttcttacccgaggga

SEQ ID NO: 2651492 - DNA, 25 bp, Homo sapien
cagctagttcatgcttggcgcaggc

SEQ ID NO: 2651493 - DNA, 25 bp, Homo sapien
ggtggaccaagagcccacccatgtt

SEQ ID NO: 2651494 - DNA, 25 bp, Homo sapien
cacagcgctatcctattatggtcta

SEQ ID NO: 2651495 - DNA, 25 bp, Homo sapien
tcgggaaggatgtattcacagcgct

SEQ ID NO: 2651496 - DNA, 25 bp, Homo sapien
cattccccatgtgttgacatggcaa

SEQ ID NO: 2651497 - DNA, 25 bp, Homo sapien
tgttgacatggcaactctgctctgt

SEQ ID NO: 2651498 - DNA, 25 bp, Homo sapien
catgtgttgacatggcaactctgct

SEQ ID NO: 2651499 - DNA, 25 bp, Homo sapien
ttctatcatatcattccccatgtgt

SEQ ID NO: 2651500 - DNA, 25 bp, Homo sapien
cagttgtttattacacagccaaatt

SEQ ID NO: 2651501 - DNA, 25 bp, Homo sapien
tcagttccagttgtttattacacag

SEQ ID NO: 2651502 - DNA, 25 bp, Homo sapien
gttccagttgtttattacacagcca

SEQ ID NO: 2651503 - DNA, 25 bp, Homo sapien
tgtttattacacagccaaattcaga

SEQ ID NO: 2651504 - DNA, 25 bp, Homo sapien
aaatggctcccgatattctggtcac

SEQ ID NO: 2651505 - DNA, 25 bp, Homo sapien
taatctaagggagaagagcatagcc

SEQ ID NO: 2651506 - DNA, 25 bp, Homo sapien
tggctggacaccaaaccttcaggta

SEQ ID NO: 2651507 - DNA, 25 bp, Homo sapien
tgtgcaaaatgtgatcgcagctccc

SEQ ID NO: 2651508 - DNA, 25 bp, Homo sapien
tacccgttggttactgtgaagagct

SEQ ID NO: 2651509 - DNA, 25 bp, Homo sapien
caagcattggttgcgtaaagggctc

SEQ ID NO: 2651510 - DNA, 25 bp, Homo sapien
tgcagtcactccaaacagtgcaggt

SEQ ID NO: 2651511 - DNA, 25 bp, Homo sapien
tcatctaacaggaccggagaagccc

SEQ ID NO: 2651512 - DNA, 25 bp, Homo sapien
ggctggcaaagagccttcaccacgg

SEQ ID NO: 2651513 - DNA, 25 bp, Homo sapien
catgcttccgtgagtcctgttcagg

SEQ ID NO: 2651514 - DNA, 25 bp, Homo sapien
cctgttcaggctgttgagagatcag

SEQ ID NO: 2651515 - DNA, 25 bp, Homo sapien
catgagagcaacttgggctggcaaa

SEQ ID NO: 2651516 - DNA, 25 bp, Homo sapien
agggattggaagactcaggagccat

SEQ ID NO: 2651517 - DNA, 25 bp, Homo sapien
gcaaagggtgaaagggattggaaga

SEQ ID NO: 2651518 - DNA, 25 bp, Homo sapien
aaagggattggaagactcaggagcc

SEQ ID NO: 2651519 - DNA, 25 bp, Homo sapien
ggatgcaaagggtgaaagggattgg

SEQ ID NO: 2651520 - DNA, 25 bp, Homo sapien
tctaccacagtataattagctcccc

SEQ ID NO: 2651521 - DNA, 25 bp, Homo sapien
gaaagggccgtgtgcttctgacagc

SEQ ID NO: 2651522 - DNA, 25 bp, Homo sapien
ttcctgcctggataaatctagtctc

SEQ ID NO: 2651523 - DNA, 25 bp, Homo sapien
tctagtctccaacgatattgttgca

SEQ ID NO: 2651524 - DNA, 25 bp, Homo sapien
ggaaggttcagagcccttacctgtc

SEQ ID NO: 2651525 - DNA, 25 bp, Homo sapien
ggcctcctggtagccctaggcactc

SEQ ID NO: 2651526 - DNA, 25 bp, Homo sapien
agccctaggcactccttgggtagca

SEQ ID NO: 2651527 - DNA, 25 bp, Homo sapien
ccttgggtagcacgcaggaaggttc

SEQ ID NO: 2651528 - DNA, 25 bp, Homo sapien
ttagagcatggctggacgcccactt

SEQ ID NO: 2651529 - DNA, 25 bp, Homo sapien
gacttagagcatggctggacgccca

SEQ ID NO: 2651530 - DNA, 25 bp, Homo sapien
ggacttagagcatggctggacgccc

SEQ ID NO: 2651531 - DNA, 25 bp, Homo sapien
gagcatggctggacgcccacttttt

SEQ ID NO: 2651532 - DNA, 25 bp, Homo sapien
tggagtgactttccggctgattcac

SEQ ID NO: 2651533 - DNA, 25 bp, Homo sapien
cagggagaagctcgccacctttctt

SEQ ID NO: 2651534 - DNA, 25 bp, Homo sapien
aattcttgggcactccactcgctgg

SEQ ID NO: 2651535 - DNA, 25 bp, Homo sapien
aacatctcaagtctcagtagctgca

SEQ ID NO: 2651536 - DNA, 25 bp, Homo sapien
actgagctttgccttacgcaagaac

SEQ ID NO: 2651537 - DNA, 25 bp, Homo sapien
cccatcacagtgtagagctctctga

SEQ ID NO: 2651538 - DNA, 25 bp, Homo sapien
cacagtgtagagctctctgaggtag

SEQ ID NO: 2651539 - DNA, 25 bp, Homo sapien
cttacgcaagaacccatcacagtgt

SEQ ID NO: 2651540 - DNA, 25 bp, Homo sapien
cccaaacagactggtaaccccagag

SEQ ID NO: 2651541 - DNA, 25 bp, Homo sapien
ggtaaccccagagtacattgcagga

SEQ ID NO: 2651542 - DNA, 25 bp, Homo sapien
gcgtttggcggacgccgaagttgca

SEQ ID NO: 2651543 - DNA, 25 bp, Homo sapien
tgcacctgcggcaaggccggcgttt

SEQ ID NO: 2651544 - DNA, 25 bp, Homo sapien
gggaggagggcagagaagggaggaa

SEQ ID NO: 2651545 - DNA, 25 bp, Homo sapien
gaggagggcagagaagggaggaaac

SEQ ID NO: 2651546 - DNA, 25 bp, Homo sapien
ctaagcggggatggggaggagggca

SEQ ID NO: 2651547 - DNA, 25 bp, Homo sapien
tggggaggagggcagagaagggagg

SEQ ID NO: 2651548 - DNA, 25 bp, Homo sapien
tgccctgtgtcatgcgaactccagg

SEQ ID NO: 2651549 - DNA, 25 bp, Homo sapien
gctttccggaaaggagcctgcacag

SEQ ID NO: 2651550 - DNA, 25 bp, Homo sapien
aagtcacagtgcctgaggtggccaa

SEQ ID NO: 2651551 - DNA, 25 bp, Homo sapien
ccccgcaatcctgagagtggcttga

SEQ ID NO: 2651552 - DNA, 25 bp, Homo sapien
gcggcctgagccacatttggagaca

SEQ ID NO: 2651553 - DNA, 25 bp, Homo sapien
gcgcgagtaggaggcctcccttagt

SEQ ID NO: 2651554 - DNA, 25 bp, Homo sapien
cgcccttgaagctgaggcgcgagta

SEQ ID NO: 2651555 - DNA, 25 bp, Homo sapien
gccacatccgcccttgaagctgagg

SEQ ID NO: 2651556 - DNA, 25 bp, Homo sapien
ttctcctcgttatcccaccctgtca

SEQ ID NO: 2651557 - DNA, 25 bp, Homo sapien
tcaccggacatctgaactctgccca

SEQ ID NO: 2651558 - DNA, 25 bp, Homo sapien
cctctgactccgatgacctttcggg

SEQ ID NO: 2651559 - DNA, 25 bp, Homo sapien
tgaactctgcccacaatacttttta

SEQ ID NO: 2651560 - DNA, 25 bp, Homo sapien
tatggactgactccaaccctgactc

SEQ ID NO: 2651561 - DNA, 25 bp, Homo sapien
gactctgtatgacctttatttggtc

SEQ ID NO: 2651562 - DNA, 25 bp, Homo sapien
cctttatttggtccatcaccatcca

SEQ ID NO: 2651563 - DNA, 25 bp, Homo sapien
tgactccaaccctgactctgtatga

SEQ ID NO: 2651564 - DNA, 25 bp, Homo sapien
gcagtttctcctgcttcccgtggtc

SEQ ID NO: 2651565 - DNA, 25 bp, Homo sapien
aaagccagtgacatctggctacagg

SEQ ID NO: 2651566 - DNA, 25 bp, Homo sapien
gtttctcctgcttcccgtggtctac

SEQ ID NO: 2651567 - DNA, 25 bp, Homo sapien
tctggctacagggacctgaactggg

SEQ ID NO: 2651568 - DNA, 25 bp, Homo sapien
aactatttggtagcctgtatttgcc

SEQ ID NO: 2651569 - DNA, 25 bp, Homo sapien
tggagttgtcttagtctggaatcac

SEQ ID NO: 2651570 - DNA, 25 bp, Homo sapien
tctgggtgacttggtagtgataccg

SEQ ID NO: 2651571 - DNA, 25 bp, Homo sapien
gaatacaatggataacaagcaatct

SEQ ID NO: 2651572 - DNA, 25 bp, Homo sapien
ccataacagcttcacaatcgcctct

SEQ ID NO: 2651573 - DNA, 25 bp, Homo sapien
gtgagagtaagccactccataacag

SEQ ID NO: 2651574 - DNA, 25 bp, Homo sapien
gagtaagccactccataacagcttc

SEQ ID NO: 2651575 - DNA, 25 bp, Homo sapien
aggaggatcattcttgtgagagtaa

SEQ ID NO: 2651576 - DNA, 25 bp, Homo sapien
attatctagatagaacgagatctga

SEQ ID NO: 2651577 - DNA, 25 bp, Homo sapien
tagatagaacgagatctgagagcaa

SEQ ID NO: 2651578 - DNA, 25 bp, Homo sapien
gatagaacgagatctgagagcaaag

SEQ ID NO: 2651579 - DNA, 25 bp, Homo sapien
tctagatagaacgagatctgagagc

SEQ ID NO: 2651580 - DNA, 25 bp, Homo sapien
ttcttcagggaagagctgccgccag

SEQ ID NO: 2651581 - DNA, 25 bp, Homo sapien
tcctgatgacagatgcgcctgaaac

SEQ ID NO: 2651582 - DNA, 25 bp, Homo sapien
tgttcggtctccaaagttggttgga

SEQ ID NO: 2651583 - DNA, 25 bp, Homo sapien
cgcctgaaacctgttcggtctccaa

SEQ ID NO: 2651584 - DNA, 25 bp, Homo sapien
cagccaagcagtgacaagccaggcc

SEQ ID NO: 2651585 - DNA, 25 bp, Homo sapien
tcttccaacaaccgaggtcccagcc

SEQ ID NO: 2651586 - DNA, 25 bp, Homo sapien
ttcttccaacaaccgaggtcccagc

SEQ ID NO: 2651587 - DNA, 25 bp, Homo sapien
gggtggcagccccatattcatgggt

SEQ ID NO: 2651588 - DNA, 25 bp, Homo sapien
gcacatgggtaagagccaggaatca

SEQ ID NO: 2651589 - DNA, 25 bp, Homo sapien
gatccaatagcacatgggtaagagc

SEQ ID NO: 2651590 - DNA, 25 bp, Homo sapien
cctgaggtcctccttaggggtggca

SEQ ID NO: 2651591 - DNA, 25 bp, Homo sapien
tcattaggaggcctgtggccagccc

SEQ ID NO: 2651592 - DNA, 25 bp, Homo sapien
gcccagtctggagctggctcattag

SEQ ID NO: 2651593 - DNA, 25 bp, Homo sapien
tggccagcccagcacagatgctcat

SEQ ID NO: 2651594 - DNA, 25 bp, Homo sapien
tcctgcctggagagtcttcaccacc

SEQ ID NO: 2651595 - DNA, 25 bp, Homo sapien
ggctaagaagttctgcgatctgctc

SEQ ID NO: 2651596 - DNA, 25 bp, Homo sapien
ctaagaagttctgcgatctgctctc

SEQ ID NO: 2651597 - DNA, 25 bp, Homo sapien
gaggctaagaagttctgcgatctgc

SEQ ID NO: 2651598 - DNA, 25 bp, Homo sapien
tggaggctaagaagttctgcgatct

SEQ ID NO: 2651599 - DNA, 25 bp, Homo sapien
gttctgcaggactggggaggcctca

SEQ ID NO: 2651600 - DNA, 25 bp, Homo sapien
ttctgcaggactggggaggcctcag

SEQ ID NO: 2651601 - DNA, 25 bp, Homo sapien
agttctgcaggactggggaggcctc

SEQ ID NO: 2651602 - DNA, 25 bp, Homo sapien
cacaaataccgacgcagtggtcttc

SEQ ID NO: 2651603 - DNA, 25 bp, Homo sapien
aataccgacgcagtggtcttcttca

SEQ ID NO: 2651604 - DNA, 25 bp, Homo sapien
ccgacgcagtggtcttcttcaaagc

SEQ ID NO: 2651605 - DNA, 25 bp, Homo sapien
atttcacaaataccgacgcagtggt

SEQ ID NO: 2651606 - DNA, 25 bp, Homo sapien
ccatttggccagaggattttgtgat

SEQ ID NO: 2651607 - DNA, 25 bp, Homo sapien
cgtgcccagtagtgaaaaggatcct

SEQ ID NO: 2651608 - DNA, 25 bp, Homo sapien
tcagggtcagattccccatttggcc

SEQ ID NO: 2651609 - DNA, 25 bp, Homo sapien
gaagacatgcagttaggcgtgccca

SEQ ID NO: 2651610 - DNA, 25 bp, Homo sapien
tgccataggaattcagaggaggaaa

SEQ ID NO: 2651611 - DNA, 25 bp, Homo sapien
gctggtggagggttggacttgtgcc

SEQ ID NO: 2651612 - DNA, 25 bp, Homo sapien
cagaggtgagcgtgtgggtggtaag

SEQ ID NO: 2651613 - DNA, 25 bp, Homo sapien
cctggatctgcaggagaggcataaa

SEQ ID NO: 2651614 - DNA, 25 bp, Homo sapien
tttggcaccaagttcgggatgcagg

SEQ ID NO: 2651615 - DNA, 25 bp, Homo sapien
caagttcgggatgcaggcttttatc

SEQ ID NO: 2651616 - DNA, 25 bp, Homo sapien
ttctggacagccctttgtgagtatt

SEQ ID NO: 2651617 - DNA, 25 bp, Homo sapien
cctctcaagtctaaaagtacaaatt

SEQ ID NO: 2651618 - DNA, 25 bp, Homo sapien
ttcagccctgtcgggtagacaaagg

SEQ ID NO: 2651619 - DNA, 25 bp, Homo sapien
ggcttcagccctgtcgggtagacaa

SEQ ID NO: 2651620 - DNA, 25 bp, Homo sapien
cttcagccctgtcgggtagacaaag

SEQ ID NO: 2651621 - DNA, 25 bp, Homo sapien
gcttcagccctgtcgggtagacaaa

SEQ ID NO: 2651622 - DNA, 25 bp, Homo sapien
ttttccggttttacatgtgtatgca

SEQ ID NO: 2651623 - DNA, 25 bp, Homo sapien
tgtgggactctgacttggttgaccc

SEQ ID NO: 2651624 - DNA, 25 bp, Homo sapien
cctgggaaacatatctttggctaaa

SEQ ID NO: 2651625 - DNA, 25 bp, Homo sapien
tggttgaccctctcccagattgttg

SEQ ID NO: 2651626 - DNA, 25 bp, Homo sapien
cctgagtctggaacggatattggtc

SEQ ID NO: 2651627 - DNA, 25 bp, Homo sapien
gctgtggacaagatgtacaaaggcc

SEQ ID NO: 2651628 - DNA, 25 bp, Homo sapien
tacaacatcaaacaccaagcaggtg

SEQ ID NO: 2651629 - DNA, 25 bp, Homo sapien
caactacaacatcaaacaccaagca

SEQ ID NO: 2651630 - DNA, 25 bp, Homo sapien
acatcaaacaccaagcaggtgctgg

SEQ ID NO: 2651631 - DNA, 25 bp, Homo sapien
aacatatttcccgtcagccacattg

SEQ ID NO: 2651632 - DNA, 25 bp, Homo sapien
tgtgttggctgtgccagtgcatcca

SEQ ID NO: 2651633 - DNA, 25 bp, Homo sapien
ccttaagcccctttgagagctgcca

SEQ ID NO: 2651634 - DNA, 25 bp, Homo sapien
tggtctgaccaggttttaaatgcct

SEQ ID NO: 2651635 - DNA, 25 bp, Homo sapien
tttgcaaaacgcttccgtcccctga

SEQ ID NO: 2651636 - DNA, 25 bp, Homo sapien
aatcctccaaggctttgcaaaacgc

SEQ ID NO: 2651637 - DNA, 25 bp, Homo sapien
tccaaggctttgcaaaacgcttccg

SEQ ID NO: 2651638 - DNA, 25 bp, Homo sapien
caaggctttgcaaaacgcttccgtc

SEQ ID NO: 2651639 - DNA, 25 bp, Homo sapien
cagaccttctcttgaaccttctcat

SEQ ID NO: 2651640 - DNA, 25 bp, Homo sapien
cagcagtctgattcctctggctcgc

SEQ ID NO: 2651641 - DNA, 25 bp, Homo sapien
gcagtctgattcctctggctcgcct

SEQ ID NO: 2651642 - DNA, 25 bp, Homo sapien
tgcccccagaccttctcttgaacct

SEQ ID NO: 2651643 - DNA, 25 bp, Homo sapien
cagatccactgcagaagtttggtca

SEQ ID NO: 2651644 - DNA, 25 bp, Homo sapien
agatccactgcagaagtttggtcat

SEQ ID NO: 2651645 - DNA, 25 bp, Homo sapien
ccagctgagagaggacctagccaaa

SEQ ID NO: 2651646 - DNA, 25 bp, Homo sapien
tagccaaaacgtccttgacctgtag

SEQ ID NO: 2651647 - DNA, 25 bp, Homo sapien
tctgggatgaaaccgagaactttgt

SEQ ID NO: 2651648 - DNA, 25 bp, Homo sapien
taggtaatgaagtggaatcccaaac

SEQ ID NO: 2651649 - DNA, 25 bp, Homo sapien
cccatcgcctgcttggcctaagtga

SEQ ID NO: 2651650 - DNA, 25 bp, Homo sapien
tccaatgacgatgctgcttcccagg

SEQ ID NO: 2651651 - DNA, 25 bp, Homo sapien
tgagcgggaacgaccgagataatcc

SEQ ID NO: 2651652 - DNA, 25 bp, Homo sapien
ttggcctaagtgagcgggaacgacc

SEQ ID NO: 2651653 - DNA, 25 bp, Homo sapien
ctttgtcccaagcccaaggaacatc

SEQ ID NO: 2651654 - DNA, 25 bp, Homo sapien
ggctttgtcccaagcccaaggaaca

SEQ ID NO: 2651655 - DNA, 25 bp, Homo sapien
gctttgtcccaagcccaaggaacat

SEQ ID NO: 2651656 - DNA, 25 bp, Homo sapien
catttgggctgaatactttggggtc

SEQ ID NO: 2651657 - DNA, 25 bp, Homo sapien
ttcattgctccggttttgcatgggt

SEQ ID NO: 2651658 - DNA, 25 bp, Homo sapien
tgtaaactgagccccgctcacatgc

SEQ ID NO: 2651659 - DNA, 25 bp, Homo sapien
tcacattaaacctccgtgcccggtg

SEQ ID NO: 2651660 - DNA, 25 bp, Homo sapien
caggctgctcgcctcgtccgggtag

SEQ ID NO: 2651661 - DNA, 25 bp, Homo sapien
ccgaaatcctcgaggccgcttgaca

SEQ ID NO: 2651662 - DNA, 25 bp, Homo sapien
gcttgacagcgctcttcgccatcgg

SEQ ID NO: 2651663 - DNA, 25 bp, Homo sapien
ctgctcgcctcgtccgggtagggtt

SEQ ID NO: 2651664 - DNA, 25 bp, Homo sapien
ctgcgccattgtccggcggcctgaa

SEQ ID NO: 2651665 - DNA, 25 bp, Homo sapien
gcctgaaggttcatttaacatcgaa

SEQ ID NO: 2651666 - DNA, 25 bp, Homo sapien
taacatcgaacctgtatcgcctctg

SEQ ID NO: 2651667 - DNA, 25 bp, Homo sapien
cccgtgtgaggtctgcgccattgtc

SEQ ID NO: 2651668 - DNA, 25 bp, Homo sapien
tctgcccattggttcggcggctgta

SEQ ID NO: 2651669 - DNA, 25 bp, Homo sapien
cacgtgaaataaagaagcggcggga

SEQ ID NO: 2651670 - DNA, 25 bp, Homo sapien
gagacgcggaggattccaccacgtg

SEQ ID NO: 2651671 - DNA, 25 bp, Homo sapien
cgctctccccggtctgcccattggt

SEQ ID NO: 2651672 - DNA, 25 bp, Homo sapien
tgaatttagtaaacgccaaggcaac

SEQ ID NO: 2651673 - DNA, 25 bp, Homo sapien
aacctctctgtgtcatacatgtggt

SEQ ID NO: 2651674 - DNA, 25 bp, Homo sapien
tccgtgtagaaaggttagctaacga

SEQ ID NO: 2651675 - DNA, 25 bp, Homo sapien
caaacaaagcagtccttggcaacgc

SEQ ID NO: 2651676 - DNA, 25 bp, Homo sapien
ttatttataaactcattgtgggcat

SEQ ID NO: 2651677 - DNA, 25 bp, Homo sapien
gttatttataaactcattgtgggca

SEQ ID NO: 2651678 - DNA, 25 bp, Homo sapien
tatttataaactcattgtgggcatc

SEQ ID NO: 2651679 - DNA, 25 bp, Homo sapien
aactcttcatccacggggctccagt

SEQ ID NO: 2651680 - DNA, 25 bp, Homo sapien
cagcgtccaggacccggtttctgcg

SEQ ID NO: 2651681 - DNA, 25 bp, Homo sapien
gggctccagtgcaaccccctccaac

SEQ ID NO: 2651682 - DNA, 25 bp, Homo sapien
agaactcttcatccacggggctcca

SEQ ID NO: 2651683 - DNA, 25 bp, Homo sapien
atctttcgggactctgtgttcagga

SEQ ID NO: 2651684 - DNA, 25 bp, Homo sapien
aaaatctttcgggactctgtgttca

SEQ ID NO: 2651685 - DNA, 25 bp, Homo sapien
aatctttcgggactctgtgttcagg

SEQ ID NO: 2651686 - DNA, 25 bp, Homo sapien
aaatctttcgggactctgtgttcag

SEQ ID NO: 2651687 - DNA, 25 bp, Homo sapien
aaactcgccgcgcaagggaagcgtg

SEQ ID NO: 2651688 - DNA, 25 bp, Homo sapien
cctgagttgaaactcgccgcgcaag

SEQ ID NO: 2651689 - DNA, 25 bp, Homo sapien
ctcgccgcgcaagggaagcgtgtac

SEQ ID NO: 2651690 - DNA, 25 bp, Homo sapien
caccgctcagctccgttctgacctg

SEQ ID NO: 2651691 - DNA, 25 bp, Homo sapien
cgagtcgtggctggtattgctcagt

SEQ ID NO: 2651692 - DNA, 25 bp, Homo sapien
gcctcgaaggcttggcagcttcgac

SEQ ID NO: 2651693 - DNA, 25 bp, Homo sapien
gctggtattgctcagtttgccacct

SEQ ID NO: 2651694 - DNA, 25 bp, Homo sapien
ggcaacaaagtcaggcctcgaaggc

SEQ ID NO: 2651695 - DNA, 25 bp, Homo sapien
tgtgggttttctctcattgtaggct

SEQ ID NO: 2651696 - DNA, 25 bp, Homo sapien
gagtttccttatagtggtcaaccat

SEQ ID NO: 2651697 - DNA, 25 bp, Homo sapien
taggttgttttgctccatgggtttc

SEQ ID NO: 2651698 - DNA, 25 bp, Homo sapien
gggctgttcacatagggttcttctg

SEQ ID NO: 2651699 - DNA, 25 bp, Homo sapien
ccagctgagatggtctgacaccttc

SEQ ID NO: 2651700 - DNA, 25 bp, Homo sapien
agcaggccaggaagcaacaccccac

SEQ ID NO: 2651701 - DNA, 25 bp, Homo sapien
gacccgtggggccaagcttggctgg

SEQ ID NO: 2651702 - DNA, 25 bp, Homo sapien
ggggccaagcttggctgggacttac

SEQ ID NO: 2651703 - DNA, 25 bp, Homo sapien
tgtggtcccgccattctcaatggca

SEQ ID NO: 2651704 - DNA, 25 bp, Homo sapien
tgcagcctgggaactagatgacatt

SEQ ID NO: 2651705 - DNA, 25 bp, Homo sapien
tagatgacattagtgccttcctggc

SEQ ID NO: 2651706 - DNA, 25 bp, Homo sapien
cccgcctttagggaacctgctctgt

SEQ ID NO: 2651707 - DNA, 25 bp, Homo sapien
catcagacttgggatcagaaactcc

SEQ ID NO: 2651708 - DNA, 25 bp, Homo sapien
ccaacaagctggaaatgttagcacc

SEQ ID NO: 2651709 - DNA, 25 bp, Homo sapien
taattgagaatttgtgacgcacagc

SEQ ID NO: 2651710 - DNA, 25 bp, Homo sapien
gaaactcctagaaagtactcacatg

SEQ ID NO: 2651711 - DNA, 25 bp, Homo sapien
gaattccaggatcagtcactggggt

SEQ ID NO: 2651712 - DNA, 25 bp, Homo sapien
ccaggatcagtcactggggtctgca

SEQ ID NO: 2651713 - DNA, 25 bp, Homo sapien
ttccaggatcagtcactggggtctg

SEQ ID NO: 2651714 - DNA, 25 bp, Homo sapien
caggatcagtcactggggtctgcat

SEQ ID NO: 2651715 - DNA, 25 bp, Homo sapien
gagcattctccaggtgttgggctct

SEQ ID NO: 2651716 - DNA, 25 bp, Homo sapien
attctccaggtgttgggctctgtgc

SEQ ID NO: 2651717 - DNA, 25 bp, Homo sapien
gcattctccaggtgttgggctctgt

SEQ ID NO: 2651718 - DNA, 25 bp, Homo sapien
cattgatgagcattctccaggtgtt

SEQ ID NO: 2651719 - DNA, 25 bp, Homo sapien
tgcagttagaggtgtcaacaaaaac

SEQ ID NO: 2651720 - DNA, 25 bp, Homo sapien
cagttagaggtgtcaacaaaaactc

SEQ ID NO: 2651721 - DNA, 25 bp, Homo sapien
ctgcagttagaggtgtcaacaaaaa

SEQ ID NO: 2651722 - DNA, 25 bp, Homo sapien
gttagaggtgtcaacaaaaactcaa

SEQ ID NO: 2651723 - DNA, 25 bp, Homo sapien
tgaccttttgttcacgaatcccgga

SEQ ID NO: 2651724 - DNA, 25 bp, Homo sapien
cagccgcttttgtggcgagcagaca

SEQ ID NO: 2651725 - DNA, 25 bp, Homo sapien
cagaaatctggacgaagctgcgttt

SEQ ID NO: 2651726 - DNA, 25 bp, Homo sapien
gcatgttattgctccctgatcagaa

SEQ ID NO: 2651727 - DNA, 25 bp, Homo sapien
aaatggatgacaagggattcctccg

SEQ ID NO: 2651728 - DNA, 25 bp, Homo sapien
tagcaaatacttgagccagagacgg

SEQ ID NO: 2651729 - DNA, 25 bp, Homo sapien
tcaataacattggagcggacagcgg

SEQ ID NO: 2651730 - DNA, 25 bp, Homo sapien
tgatgtgtctcccacgatgtcagcg

SEQ ID NO: 2651731 - DNA, 25 bp, Homo sapien
tccacacagacattgggtgccaagc

SEQ ID NO: 2651732 - DNA, 25 bp, Homo sapien
caagctccagttttaggccacggca

SEQ ID NO: 2651733 - DNA, 25 bp, Homo sapien
gagaacagctccctcccagtatgtg

SEQ ID NO: 2651734 - DNA, 25 bp, Homo sapien
tgccaacaggtacccaggaggctct

SEQ ID NO: 2651735 - DNA, 25 bp, Homo sapien
aaagtggagttgtcttctgatggcc

SEQ ID NO: 2651736 - DNA, 25 bp, Homo sapien
taggaaacgctgaagggttactgcc

SEQ ID NO: 2651737 - DNA, 25 bp, Homo sapien
gaaattcaacaggattgccaggcag

SEQ ID NO: 2651738 - DNA, 25 bp, Homo sapien
tctggctatgggaacatgctctgca

SEQ ID NO: 2651739 - DNA, 25 bp, Homo sapien
tctcctggtgggtgacgttctttcc

SEQ ID NO: 2651740 - DNA, 25 bp, Homo sapien
caatctaggtagtcccaatccgagg

SEQ ID NO: 2651741 - DNA, 25 bp, Homo sapien
ggttagctgtcactcttttcgcatc

SEQ ID NO: 2651742 - DNA, 25 bp, Homo sapien
tttcgcatcagcacaaccaggagca

SEQ ID NO: 2651743 - DNA, 25 bp, Homo sapien
tcatttctgcggtcacaggacaagg

SEQ ID NO: 2651744 - DNA, 25 bp, Homo sapien
aatgtcagcttggacactctgttcc

SEQ ID NO: 2651745 - DNA, 25 bp, Homo sapien
aataaggcttggcaaaatgtcagct

SEQ ID NO: 2651746 - DNA, 25 bp, Homo sapien
aggctcgtttaggagactggccgct

SEQ ID NO: 2651747 - DNA, 25 bp, Homo sapien
cacttagttgatggcagagccagaa

SEQ ID NO: 2651748 - DNA, 25 bp, Homo sapien
gccagaagaaaaaccacagactcat

SEQ ID NO: 2651749 - DNA, 25 bp, Homo sapien
gaagaaaaaccacagactcatcatc

SEQ ID NO: 2651750 - DNA, 25 bp, Homo sapien
gaaaaaccacagactcatcatccat

SEQ ID NO: 2651751 - DNA, 25 bp, Homo sapien
ggtggagtatggagactgctctcat

SEQ ID NO: 2651752 - DNA, 25 bp, Homo sapien
ccaaaaagagctatctttcattatg

SEQ ID NO: 2651753 - DNA, 25 bp, Homo sapien
cagctccccagacatgcactagagg

SEQ ID NO: 2651754 - DNA, 25 bp, Homo sapien
gaaagagacgttgaaggaataaagc

SEQ ID NO: 2651755 - DNA, 25 bp, Homo sapien
taaactagctggtttatgagctaaa

SEQ ID NO: 2651756 - DNA, 25 bp, Homo sapien
ggacaaacactgcccaacaaggctg

SEQ ID NO: 2651757 - DNA, 25 bp, Homo sapien
taatgtatcctcgagaaaataaact

SEQ ID NO: 2651758 - DNA, 25 bp, Homo sapien
tgctaggatctcaacagctgtttta

SEQ ID NO: 2651759 - DNA, 25 bp, Homo sapien
ttttgtctctcagcgtttgtgggcg

SEQ ID NO: 2651760 - DNA, 25 bp, Homo sapien
aaggtcaggtcagcggagtgaagag

SEQ ID NO: 2651761 - DNA, 25 bp, Homo sapien
ctaggggcgtggaaggtcaggtcag

SEQ ID NO: 2651762 - DNA, 25 bp, Homo sapien
tttttgtctctcagcgtttgtgggc

SEQ ID NO: 2651763 - DNA, 25 bp, Homo sapien
gtactcccccacaggtcaagtccgc

SEQ ID NO: 2651764 - DNA, 25 bp, Homo sapien
cccacaggtcaagtccgctcgagga

SEQ ID NO: 2651765 - DNA, 25 bp, Homo sapien
ctggccgcttggagggcctcatggg

SEQ ID NO: 2651766 - DNA, 25 bp, Homo sapien
gcctcatggggacggttcggtactc

SEQ ID NO: 2651767 - DNA, 25 bp, Homo sapien
ccggcgtgttttgcagatcgaagat

SEQ ID NO: 2651768 - DNA, 25 bp, Homo sapien
tgttttgcagatcgaagatggaccg

SEQ ID NO: 2651769 - DNA, 25 bp, Homo sapien
gcgtgttttgcagatcgaagatgga

SEQ ID NO: 2651770 - DNA, 25 bp, Homo sapien
ttgcagatcgaagatggaccgatgg

SEQ ID NO: 2651771 - DNA, 25 bp, Homo sapien
cccaggagtattcgggtcgcagaga

SEQ ID NO: 2651772 - DNA, 25 bp, Homo sapien
tctcccgtgatgaccggagacgcgg

SEQ ID NO: 2651773 - DNA, 25 bp, Homo sapien
caaggtcggtcccaggtttatcatc

SEQ ID NO: 2651774 - DNA, 25 bp, Homo sapien
ttgtaaaccaattggtctcccgtga

SEQ ID NO: 2651775 - DNA, 25 bp, Homo sapien
tcttgtcgttttctcggccggcgga

SEQ ID NO: 2651776 - DNA, 25 bp, Homo sapien
ggcgcgcctcgtcatcgtctatctt

SEQ ID NO: 2651777 - DNA, 25 bp, Homo sapien
gcggccgggcttgcgcaatttttgc

SEQ ID NO: 2651778 - DNA, 25 bp, Homo sapien
gacttcgaagcaccagtgcccgggt

SEQ ID NO: 2651779 - DNA, 25 bp, Homo sapien
ttttccctgaggatttcggccgcgc

SEQ ID NO: 2651780 - DNA, 25 bp, Homo sapien
ttccctgaggatttcggccgcgcac

SEQ ID NO: 2651781 - DNA, 25 bp, Homo sapien
gattttccctgaggatttcggccgc

SEQ ID NO: 2651782 - DNA, 25 bp, Homo sapien
ctcgggattttccctgaggatttcg

SEQ ID NO: 2651783 - DNA, 25 bp, Homo sapien
gtcagagggcaactgaaacacggct

SEQ ID NO: 2651784 - DNA, 25 bp, Homo sapien
tgtgcgcccggggtcaggtcagagg

SEQ ID NO: 2651785 - DNA, 25 bp, Homo sapien
cgcacccgggaggcctttgtgcgcc

SEQ ID NO: 2651786 - DNA, 25 bp, Homo sapien
agggcaactgaaacacggctgaacc

SEQ ID NO: 2651787 - DNA, 25 bp, Homo sapien
gctcattaatttggcagcgactgga

SEQ ID NO: 2651788 - DNA, 25 bp, Homo sapien
gtgggctcattaatttggcagcgac

SEQ ID NO: 2651789 - DNA, 25 bp, Homo sapien
tcattaatttggcagcgactggaag

SEQ ID NO: 2651790 - DNA, 25 bp, Homo sapien
ggctcattaatttggcagcgactgg

SEQ ID NO: 2651791 - DNA, 25 bp, Homo sapien
ggagcggccccgagctcattttcca

SEQ ID NO: 2651792 - DNA, 25 bp, Homo sapien
cctctgcagttgtgcgggagcctct

SEQ ID NO: 2651793 - DNA, 25 bp, Homo sapien
tctggaggcagctaaagtcgaagcc

SEQ ID NO: 2651794 - DNA, 25 bp, Homo sapien
aggtttcgctacaccaggcctgttc

SEQ ID NO: 2651795 - DNA, 25 bp, Homo sapien
ttcccaggaacacgaacttgagccc

SEQ ID NO: 2651796 - DNA, 25 bp, Homo sapien
gaacacgaacttgagcccccaaagc

SEQ ID NO: 2651797 - DNA, 25 bp, Homo sapien
caggaacacgaacttgagcccccaa

SEQ ID NO: 2651798 - DNA, 25 bp, Homo sapien
ggattcccaggaacacgaacttgag

SEQ ID NO: 2651799 - DNA, 25 bp, Homo sapien
aatctttggcttccaacttggcacc

SEQ ID NO: 2651800 - DNA, 25 bp, Homo sapien
tgggtgttgaccttccagacagacc

SEQ ID NO: 2651801 - DNA, 25 bp, Homo sapien
caaatcctatttcaagtaatctttg

SEQ ID NO: 2651802 - DNA, 25 bp, Homo sapien
ccagcagctgattgaaaatgtctcc

SEQ ID NO: 2651803 - DNA, 25 bp, Homo sapien
ttcaagagcattgctcttccgacct

SEQ ID NO: 2651804 - DNA, 25 bp, Homo sapien
gagagggctttttcaagagcattgc

SEQ ID NO: 2651805 - DNA, 25 bp, Homo sapien
ggctttttcaagagcattgctcttc

SEQ ID NO: 2651806 - DNA, 25 bp, Homo sapien
ggagagggctttttcaagagcattg

SEQ ID NO: 2651807 - DNA, 25 bp, Homo sapien
gaagaacaggggtcaatacccaagc

SEQ ID NO: 2651808 - DNA, 25 bp, Homo sapien
catgattcagactcaacagtcacac

SEQ ID NO: 2651809 - DNA, 25 bp, Homo sapien
catgcaggagtgacacatgattcag

SEQ ID NO: 2651810 - DNA, 25 bp, Homo sapien
tctccttgcttagatccccagaaga

SEQ ID NO: 2651811 - DNA, 25 bp, Homo sapien
accttctaagaacatcgagatttca

SEQ ID NO: 2651812 - DNA, 25 bp, Homo sapien
taagaacatcgagatttcagaggaa

SEQ ID NO: 2651813 - DNA, 25 bp, Homo sapien
caagagttggaagtgcccacaggac

SEQ ID NO: 2651814 - DNA, 25 bp, Homo sapien
aacttcaccctgtaagaacactgag

SEQ ID NO: 2651815 - DNA, 25 bp, Homo sapien
cacatgggcctctctatatggcttc

SEQ ID NO: 2651816 - DNA, 25 bp, Homo sapien
gacatgacaactctcttttcccaaa

SEQ ID NO: 2651817 - DNA, 25 bp, Homo sapien
gtttcagtttcttgacacatgggcc

SEQ ID NO: 2651818 - DNA, 25 bp, Homo sapien
cacatggatattggcaggaggtttc

SEQ ID NO: 2651819 - DNA, 25 bp, Homo sapien
gacactttccctattaattccacag

SEQ ID NO: 2651820 - DNA, 25 bp, Homo sapien
tcaggaattcagtagtgacttagct

SEQ ID NO: 2651821 - DNA, 25 bp, Homo sapien
gacttagctggttggttatggctca

SEQ ID NO: 2651822 - DNA, 25 bp, Homo sapien
caatttatccccaaactgagcagct

SEQ ID NO: 2651823 - DNA, 25 bp, Homo sapien
tagcttgagtaagtctgtctgatga

SEQ ID NO: 2651824 - DNA, 25 bp, Homo sapien
acttcttaacagagatactggcaag

SEQ ID NO: 2651825 - DNA, 25 bp, Homo sapien
taattttggccctccggtagcttga

SEQ ID NO: 2651826 - DNA, 25 bp, Homo sapien
ccaacttcttaacagagatactggc

SEQ ID NO: 2651827 - DNA, 25 bp, Homo sapien
tttgaacccaagctataaacaccat

SEQ ID NO: 2651828 - DNA, 25 bp, Homo sapien
cagcagcagaagtgtgataggatgc

SEQ ID NO: 2651829 - DNA, 25 bp, Homo sapien
taggatgctgactgcctctgaggaa

SEQ ID NO: 2651830 - DNA, 25 bp, Homo sapien
taaagtcatgtgcactgtgagaacc

SEQ ID NO: 2651831 - DNA, 25 bp, Homo sapien
taacccaggatagaagaggaggacc

SEQ ID NO: 2651832 - DNA, 25 bp, Homo sapien
tattcacctgcagccgattgctggg

SEQ ID NO: 2651833 - DNA, 25 bp, Homo sapien
taagaagtcctaagtgcttgggcct

SEQ ID NO: 2651834 - DNA, 25 bp, Homo sapien
tgggcctatgctcacactctaagag

SEQ ID NO: 2651835 - DNA, 25 bp, Homo sapien
tctgaacaccataggccccagttct

SEQ ID NO: 2651836 - DNA, 25 bp, Homo sapien
tttgctattatcacccttcctatca

SEQ ID NO: 2651837 - DNA, 25 bp, Homo sapien
gcccctgtagcaatttgaatttgta

SEQ ID NO: 2651838 - DNA, 25 bp, Homo sapien
cttgtcctgcccctgtagcaatttg

SEQ ID NO: 2651839 - DNA, 25 bp, Homo sapien
caatagggtgaattggaaggtgaac

SEQ ID NO: 2651840 - DNA, 25 bp, Homo sapien
cagttgaaggagagtataggagaag

SEQ ID NO: 2651841 - DNA, 25 bp, Homo sapien
gctgccgtatcacaccaatagggtg

SEQ ID NO: 2651842 - DNA, 25 bp, Homo sapien
gaaggtgaacaatgaaggttgctgc

SEQ ID NO: 2651843 - DNA, 25 bp, Homo sapien
ttcgcattattgcaacttgatcttg

SEQ ID NO: 2651844 - DNA, 25 bp, Homo sapien
gccatcctttagacagccggacact

SEQ ID NO: 2651845 - DNA, 25 bp, Homo sapien
tggatcttaagtgtttttcctgact

SEQ ID NO: 2651846 - DNA, 25 bp, Homo sapien
tagacagccggacacttggatctta

SEQ ID NO: 2651847 - DNA, 25 bp, Homo sapien
cctaaatcaaagaacgggactgctt

SEQ ID NO: 2651848 - DNA, 25 bp, Homo sapien
gacttgctgggtgaaaggtttattc

SEQ ID NO: 2651849 - DNA, 25 bp, Homo sapien
tggcaaaacagtagataaatcaggg

SEQ ID NO: 2651850 - DNA, 25 bp, Homo sapien
gcactacccagagtggacttgctgg

SEQ ID NO: 2651851 - DNA, 25 bp, Homo sapien
gtgtggcggcacgtgggctttggtc

SEQ ID NO: 2651852 - DNA, 25 bp, Homo sapien
agcgacagtggcgggacgtcggcgc

SEQ ID NO: 2651853 - DNA, 25 bp, Homo sapien
gcgacagtggcgggacgtcggcgcg

SEQ ID NO: 2651854 - DNA, 25 bp, Homo sapien
ttgcaggggccttttaggcgtgggc

SEQ ID NO: 2651855 - DNA, 25 bp, Homo sapien
tgcaggggccttttaggcgtgggct

SEQ ID NO: 2651856 - DNA, 25 bp, Homo sapien
aggggccttttaggcgtgggctctg

SEQ ID NO: 2651857 - DNA, 25 bp, Homo sapien
gcaggggccttttaggcgtgggctc

SEQ ID NO: 2651858 - DNA, 25 bp, Homo sapien
tgttgggtgtagttcgccctcccta

SEQ ID NO: 2651859 - DNA, 25 bp, Homo sapien
cctcttctctgtcaatgccactctc

SEQ ID NO: 2651860 - DNA, 25 bp, Homo sapien
tgtagttcgccctccctagtaagtc

SEQ ID NO: 2651861 - DNA, 25 bp, Homo sapien
tcttctctgtcaatgccactctcca

SEQ ID NO: 2651862 - DNA, 25 bp, Homo sapien
cagggctgacctggcactgatcaaa

SEQ ID NO: 2651863 - DNA, 25 bp, Homo sapien
ccctttgctgtcttggtatcagtga

SEQ ID NO: 2651864 - DNA, 25 bp, Homo sapien
gatcaaactgtgtgatggcagcctc

SEQ ID NO: 2651865 - DNA, 25 bp, Homo sapien
tatcagtgaactgtgtgagactcac

SEQ ID NO: 2651866 - DNA, 25 bp, Homo sapien
tctcaggtcagggacgtttcccgct

SEQ ID NO: 2651867 - DNA, 25 bp, Homo sapien
caaacataaaacacgaagcttcccg

SEQ ID NO: 2651868 - DNA, 25 bp, Homo sapien
gcaggaaagagcgtgcgttcctctt

SEQ ID NO: 2651869 - DNA, 25 bp, Homo sapien
gcgttcctcttttcattcagcccaa

SEQ ID NO: 2651870 - DNA, 25 bp, Homo sapien
tagatgatggactatgaagaaaaaa

SEQ ID NO: 2651871 - DNA, 25 bp, Homo sapien
ttctgttagatgatggactatgaag

SEQ ID NO: 2651872 - DNA, 25 bp, Homo sapien
gttagatgatggactatgaagaaaa

SEQ ID NO: 2651873 - DNA, 25 bp, Homo sapien
attttgttctgttagatgatggact

SEQ ID NO: 2651874 - DNA, 25 bp, Homo sapien
ttgttgtagcctagcctcctcaagc

SEQ ID NO: 2651875 - DNA, 25 bp, Homo sapien
gccacccagaagccttgttgtagcc

SEQ ID NO: 2651876 - DNA, 25 bp, Homo sapien
gttgtagcctagcctcctcaagcat

SEQ ID NO: 2651877 - DNA, 25 bp, Homo sapien
ccttgttgtagcctagcctcctcaa

SEQ ID NO: 2651878 - DNA, 25 bp, Homo sapien
gcagcgtgagcccagagctaaagga

SEQ ID NO: 2651879 - DNA, 25 bp, Homo sapien
acgtgtaaacccaagccgcctcgat

SEQ ID NO: 2651880 - DNA, 25 bp, Homo sapien
tgtcagtgcatttaagagaatggca

SEQ ID NO: 2651881 - DNA, 25 bp, Homo sapien
caagaaggcatagggcgatccaggc

SEQ ID NO: 2651882 - DNA, 25 bp, Homo sapien
tcaaaagtgccaggaccggtcccac

SEQ ID NO: 2651883 - DNA, 25 bp, Homo sapien
ttttgtatcataacagacgtgtgga

SEQ ID NO: 2651884 - DNA, 25 bp, Homo sapien
ttgaagaatgccagcgaagcaattc

SEQ ID NO: 2651885 - DNA, 25 bp, Homo sapien
tacttactgcgtattctttacaagg

SEQ ID NO: 2651886 - DNA, 25 bp, Homo sapien
agtccgccctgtccaggcactagag

SEQ ID NO: 2651887 - DNA, 25 bp, Homo sapien
ctatgctacagccccccaacccccg

SEQ ID NO: 2651888 - DNA, 25 bp, Homo sapien
tatgctacagccccccaacccccga

SEQ ID NO: 2651889 - DNA, 25 bp, Homo sapien
tttcgccgctgcgaattctcggaca

SEQ ID NO: 2651890 - DNA, 25 bp, Homo sapien
ggtccctctatttatgcaaagccga

SEQ ID NO: 2651891 - DNA, 25 bp, Homo sapien
ttggctctgcgggtccctctattta

SEQ ID NO: 2651892 - DNA, 25 bp, Homo sapien
aattctcggacaaaactgtcaacag

SEQ ID NO: 2651893 - DNA, 25 bp, Homo sapien
tggtggttcggtgttttgttcgctc

SEQ ID NO: 2651894 - DNA, 25 bp, Homo sapien
ctccaggcgcggcccctctcgacct

SEQ ID NO: 2651895 - DNA, 25 bp, Homo sapien
gcccctctcgacctcgcgcgcccat

SEQ ID NO: 2651896 - DNA, 25 bp, Homo sapien
tatgttagcgcgctcgaggaagaag

SEQ ID NO: 2651897 - DNA, 25 bp, Homo sapien
ctaggatttccaattgttaataacg

SEQ ID NO: 2651898 - DNA, 25 bp, Homo sapien
ctgtccagtgtcgagaactttactg

SEQ ID NO: 2651899 - DNA, 25 bp, Homo sapien
gccctgtccagtgtcgagaacttta

SEQ ID NO: 2651900 - DNA, 25 bp, Homo sapien
cctgtccagtgtcgagaactttact

SEQ ID NO: 2651901 - DNA, 25 bp, Homo sapien
ccctgtccagtgtcgagaactttac

SEQ ID NO: 2651902 - DNA, 25 bp, Homo sapien
ctcgtccgccgccttggggactctg

SEQ ID NO: 2651903 - DNA, 25 bp, Homo sapien
tcagtctcctcgtccgccgccttgg

SEQ ID NO: 2651904 - DNA, 25 bp, Homo sapien
cagtctcctcgtccgccgccttggg

SEQ ID NO: 2651905 - DNA, 25 bp, Homo sapien
ctcctcgtccgccgccttggggact

SEQ ID NO: 2651906 - DNA, 25 bp, Homo sapien
ggcccgggcgcctcagcgctggcgc

SEQ ID NO: 2651907 - DNA, 25 bp, Homo sapien
cggcccgggcgcctcagcgctggcg

SEQ ID NO: 2651908 - DNA, 25 bp, Homo sapien
ctgctgctgcgcggcgcgggagccg

SEQ ID NO: 2651909 - DNA, 25 bp, Homo sapien
ctgctgcgcggcgcgggagccgcag

SEQ ID NO: 2651910 - DNA, 25 bp, Homo sapien
ccgctgctcccacccaacgccgcgg

SEQ ID NO: 2651911 - DNA, 25 bp, Homo sapien
ctgcgccggaggaagcgcttcaagc

SEQ ID NO: 2651912 - DNA, 25 bp, Homo sapien
gcagagccccaagaagcggctgacg

SEQ ID NO: 2651913 - DNA, 25 bp, Homo sapien
ctgcggagctaaaggttgcatacaa

SEQ ID NO: 2651914 - DNA, 25 bp, Homo sapien
tgcggagctaaaggttgcatacaaa

SEQ ID NO: 2651915 - DNA, 25 bp, Homo sapien
caagacgtgaatcgcttgagtttcc

SEQ ID NO: 2651916 - DNA, 25 bp, Homo sapien
gggtcgcgcaagacgtgaatcgctt

SEQ ID NO: 2651917 - DNA, 25 bp, Homo sapien
cgtgaatcgcttgagtttccgcgct

SEQ ID NO: 2651918 - DNA, 25 bp, Homo sapien
aatcgcttgagtttccgcgctcggg

SEQ ID NO: 2651919 - DNA, 25 bp, Homo sapien
tgcccacactcgagaaacacaggct

SEQ ID NO: 2651920 - DNA, 25 bp, Homo sapien
tttccgcgtccacgcgagcgggttg

SEQ ID NO: 2651921 - DNA, 25 bp, Homo sapien
cacaggctgctgggcgagttccccg

SEQ ID NO: 2651922 - DNA, 25 bp, Homo sapien
gagctcccagggagttgccggcccg

SEQ ID NO: 2651923 - DNA, 25 bp, Homo sapien
ccagctggtccagcatgagctctgg

SEQ ID NO: 2651924 - DNA, 25 bp, Homo sapien
tcctctggattttcacatcctccag

SEQ ID NO: 2651925 - DNA, 25 bp, Homo sapien
tggattttcacatcctccagctggt

SEQ ID NO: 2651926 - DNA, 25 bp, Homo sapien
cagctggtccagcatgagctctgga

SEQ ID NO: 2651927 - DNA, 25 bp, Homo sapien
cagagtccactatgggaacctccct

SEQ ID NO: 2651928 - DNA, 25 bp, Homo sapien
gtgtgagagcccaaatgcccaaccc

SEQ ID NO: 2651929 - DNA, 25 bp, Homo sapien
gtgagagcccaaatgcccaaccctt

SEQ ID NO: 2651930 - DNA, 25 bp, Homo sapien
ttgcttgacttgagatctcccttct

SEQ ID NO: 2651931 - DNA, 25 bp, Homo sapien
tgaccaaggcaatagccatcaaaat

SEQ ID NO: 2651932 - DNA, 25 bp, Homo sapien
gaccaaggcaatagccatcaaaatc

SEQ ID NO: 2651933 - DNA, 25 bp, Homo sapien
accaaggcaatagccatcaaaatca

SEQ ID NO: 2651934 - DNA, 25 bp, Homo sapien
ctgaccaaggcaatagccatcaaaa

SEQ ID NO: 2651935 - DNA, 25 bp, Homo sapien
aagttctgtgccctccgaagaaagg

SEQ ID NO: 2651936 - DNA, 25 bp, Homo sapien
tccattgggccctgatcctgaagtt

SEQ ID NO: 2651937 - DNA, 25 bp, Homo sapien
cctccgaagaaagggcctattcacg

SEQ ID NO: 2651938 - DNA, 25 bp, Homo sapien
gagagcgcggtcctgtgcacagtta

SEQ ID NO: 2651939 - DNA, 25 bp, Homo sapien
taggccctacgagagactgctggct

SEQ ID NO: 2651940 - DNA, 25 bp, Homo sapien
gctgtaggccctacgagagactgct

SEQ ID NO: 2651941 - DNA, 25 bp, Homo sapien
tgcgcacgcgcgacagcgtttgtga

SEQ ID NO: 2651942 - DNA, 25 bp, Homo sapien
tggtccagcgagtccctattctcct

SEQ ID NO: 2651943 - DNA, 25 bp, Homo sapien
gccggaagtgacacaaggccacttc

SEQ ID NO: 2651944 - DNA, 25 bp, Homo sapien
ggccggaagtgacacaaggccactt

SEQ ID NO: 2651945 - DNA, 25 bp, Homo sapien
tggtgctcaaggggtctcgggtgga

SEQ ID NO: 2651946 - DNA, 25 bp, Homo sapien
tcggagcgaataaggggccgcgcgg

SEQ ID NO: 2651947 - DNA, 25 bp, Homo sapien
cgcacacacgcggggacgcaagatg

SEQ ID NO: 2651948 - DNA, 25 bp, Homo sapien
acacacgcggggacgcaagatggca

SEQ ID NO: 2651949 - DNA, 25 bp, Homo sapien
gccgccgtccagagcctttttgtac

SEQ ID NO: 2651950 - DNA, 25 bp, Homo sapien
ctgtctcgctccttcagggaacttc

SEQ ID NO: 2651951 - DNA, 25 bp, Homo sapien
cctccctgtctcgctccttcaggga

SEQ ID NO: 2651952 - DNA, 25 bp, Homo sapien
cctgtctcgctccttcagggaactt

SEQ ID NO: 2651953 - DNA, 25 bp, Homo sapien
tccctgtctcgctccttcagggaac

SEQ ID NO: 2651954 - DNA, 25 bp, Homo sapien
ctggctcgacctcgcccccgagagt

SEQ ID NO: 2651955 - DNA, 25 bp, Homo sapien
gaggttgagacagcgtcgcctcgcc

SEQ ID NO: 2651956 - DNA, 25 bp, Homo sapien
agccgcccctggctcgacctcgccc

SEQ ID NO: 2651957 - DNA, 25 bp, Homo sapien
gagcgggtgcgcctgtccgtcgcat

SEQ ID NO: 2651958 - DNA, 25 bp, Homo sapien
gccactctccgcaagcctcgcggta

SEQ ID NO: 2651959 - DNA, 25 bp, Homo sapien
gcccggccactctccgcaagcctcg

SEQ ID NO: 2651960 - DNA, 25 bp, Homo sapien
cggccactctccgcaagcctcgcgg

SEQ ID NO: 2651961 - DNA, 25 bp, Homo sapien
ccactctccgcaagcctcgcggtac

SEQ ID NO: 2651962 - DNA, 25 bp, Homo sapien
tttcccaccaatgcgcacttgtgcc

SEQ ID NO: 2651963 - DNA, 25 bp, Homo sapien
gcgcacttgtgcctgcagtttggcg

SEQ ID NO: 2651964 - DNA, 25 bp, Homo sapien
tgcagtttggcgagtttttcctggt

SEQ ID NO: 2651965 - DNA, 25 bp, Homo sapien
gtgcctgcagtttggcgagtttttc

SEQ ID NO: 2651966 - DNA, 25 bp, Homo sapien
cctcgagatttgctagctccgtgaa

SEQ ID NO: 2651967 - DNA, 25 bp, Homo sapien
ttgtcaccgataatataagaagcgc

SEQ ID NO: 2651968 - DNA, 25 bp, Homo sapien
cgtgaatttccctcgataggcaaag

SEQ ID NO: 2651969 - DNA, 25 bp, Homo sapien
tgtgcacaacgatctaactgaaatg

SEQ ID NO: 2651970 - DNA, 25 bp, Homo sapien
agacagtgtatggaacaatcaaatg

SEQ ID NO: 2651971 - DNA, 25 bp, Homo sapien
gcaagacagtgtatggaacaatcaa

SEQ ID NO: 2651972 - DNA, 25 bp, Homo sapien
caccgcgcctgaccccttttctgtt

SEQ ID NO: 2651973 - DNA, 25 bp, Homo sapien
aggcaagacagtgtatggaacaatc

SEQ ID NO: 2651974 - DNA, 25 bp, Homo sapien
aaagtgatcaaagaggtagcatgtg

SEQ ID NO: 2651975 - DNA, 25 bp, Homo sapien
aatcataaacttatgcagtgagcag

SEQ ID NO: 2651976 - DNA, 25 bp, Homo sapien
tagcatgtgtcaatctaaattaagc

SEQ ID NO: 2651977 - DNA, 25 bp, Homo sapien
caggctaaggcgaagatagaagcaa

SEQ ID NO: 2651978 - DNA, 25 bp, Homo sapien
agaactgaagttttttgtcatctgc

SEQ ID NO: 2651979 - DNA, 25 bp, Homo sapien
aaggagaactgaagttttttgtcat

SEQ ID NO: 2651980 - DNA, 25 bp, Homo sapien
ccttcttctttctgcgagcagttcc

SEQ ID NO: 2651981 - DNA, 25 bp, Homo sapien
caccttcttctttctgcgagcagtt

SEQ ID NO: 2651982 - DNA, 25 bp, Homo sapien
agcattcagacttaatgagctccct

SEQ ID NO: 2651983 - DNA, 25 bp, Homo sapien
tgtgaagcacaggtgaaattttgcc

SEQ ID NO: 2651984 - DNA, 25 bp, Homo sapien
gcaatgctgaccagtctctttaaaa

SEQ ID NO: 2651985 - DNA, 25 bp, Homo sapien
tctggctaactagtatttcactgtg

SEQ ID NO: 2651986 - DNA, 25 bp, Homo sapien
ctagtcagactatccgcaccaagct

SEQ ID NO: 2651987 - DNA, 25 bp, Homo sapien
cagactatccgcaccaagctggttt

SEQ ID NO: 2651988 - DNA, 25 bp, Homo sapien
tagtcagactatccgcaccaagctg

SEQ ID NO: 2651989 - DNA, 25 bp, Homo sapien
taaactagtcagactatccgcacca

SEQ ID NO: 2651990 - DNA, 25 bp, Homo sapien
caactactctgtgtgtggcataagg

SEQ ID NO: 2651991 - DNA, 25 bp, Homo sapien
catcagtgggatacttcaaaagcct

SEQ ID NO: 2651992 - DNA, 25 bp, Homo sapien
ctcttagagtgcaggtaaaacccac

SEQ ID NO: 2651993 - DNA, 25 bp, Homo sapien
cacaggagagttatgtactaggccc

SEQ ID NO: 2651994 - DNA, 25 bp, Homo sapien
cagtagcaagtggtgcttttccatc

SEQ ID NO: 2651995 - DNA, 25 bp, Homo sapien
agcaagtggtgcttttccatccaca

SEQ ID NO: 2651996 - DNA, 25 bp, Homo sapien
gtagcaagtggtgcttttccatcca

SEQ ID NO: 2651997 - DNA, 25 bp, Homo sapien
atcatcctctccagtagcaagtggt

SEQ ID NO: 2651998 - DNA, 25 bp, Homo sapien
gatacctgtctatgcaaagtgggaa

SEQ ID NO: 2651999 - DNA, 25 bp, Homo sapien
gggtcattagtgctctgcaggtaat

SEQ ID NO: 2652000 - DNA, 25 bp, Homo sapien
taaatactgtgtcatagccccaaga

SEQ ID NO: 2652001 - DNA, 25 bp, Homo sapien
taagattctctaggttaaccacaag

SEQ ID NO: 2652002 - DNA, 25 bp, Homo sapien
agcctcatcaaaattctccacaaga

SEQ ID NO: 2652003 - DNA, 25 bp, Homo sapien
ggaagcctcatcaaaattctccaca

SEQ ID NO: 2652004 - DNA, 25 bp, Homo sapien
tcagtttgcctcattcttggaagcc

SEQ ID NO: 2652005 - DNA, 25 bp, Homo sapien
gtttgcctcattcttggaagcctca

SEQ ID NO: 2652006 - DNA, 25 bp, Homo sapien
aaaatagcagctcccagtaacttct

SEQ ID NO: 2652007 - DNA, 25 bp, Homo sapien
caggttttatcttcagaagttgact

SEQ ID NO: 2652008 - DNA, 25 bp, Homo sapien
agctcccagtaacttcttcaggttt

SEQ ID NO: 2652009 - DNA, 25 bp, Homo sapien
tagcagctcccagtaacttcttcag

SEQ ID NO: 2652010 - DNA, 25 bp, Homo sapien
tctttgtttcaaacttgattcccag

SEQ ID NO: 2652011 - DNA, 25 bp, Homo sapien
aggcttcttcggcttaattagctgc

SEQ ID NO: 2652012 - DNA, 25 bp, Homo sapien
aaacttgattcccaggcttcttcgg

SEQ ID NO: 2652013 - DNA, 25 bp, Homo sapien
gcttcttcggcttaattagctgcaa

SEQ ID NO: 2652014 - DNA, 25 bp, Homo sapien
tacactacaccgtgattttaaatct

SEQ ID NO: 2652015 - DNA, 25 bp, Homo sapien
ccaaaggttatcagccatattacat

SEQ ID NO: 2652016 - DNA, 25 bp, Homo sapien
tacagatcggtgtcaatgaaataaa

SEQ ID NO: 2652017 - DNA, 25 bp, Homo sapien
tttttactgtgtacagatcggtgtc

SEQ ID NO: 2652018 - DNA, 25 bp, Homo sapien
ttatttatgcaatatgtcagtaagt

SEQ ID NO: 2652019 - DNA, 25 bp, Homo sapien
tgaggggtagtacttgtcttggctt

SEQ ID NO: 2652020 - DNA, 25 bp, Homo sapien
tcccacggaagagggcgcgccgtgg

SEQ ID NO: 2652021 - DNA, 25 bp, Homo sapien
ctcagcgggcggtgtgagcaccctt

SEQ ID NO: 2652022 - DNA, 25 bp, Homo sapien
gagtggcgcgcagttgtcgccacca

SEQ ID NO: 2652023 - DNA, 25 bp, Homo sapien
ctgcgcggtaggccgcggagtggcg

SEQ ID NO: 2652024 - DNA, 25 bp, Homo sapien
gcagttgtcgccaccacttggcttc

SEQ ID NO: 2652025 - DNA, 25 bp, Homo sapien
gcgcgcagttgtcgccaccacttgg

SEQ ID NO: 2652026 - DNA, 25 bp, Homo sapien
ggtgagcttgtctcgcgaggacaca

SEQ ID NO: 2652027 - DNA, 25 bp, Homo sapien
tctcgcgaggacacacgtagaggat

SEQ ID NO: 2652028 - DNA, 25 bp, Homo sapien
ttcggtgagcttgtctcgcgaggac

SEQ ID NO: 2652029 - DNA, 25 bp, Homo sapien
gcttgtctcgcgaggacacacgtag

SEQ ID NO: 2652030 - DNA, 25 bp, Homo sapien
gcttcttagcaaattccgtaaggtc

SEQ ID NO: 2652031 - DNA, 25 bp, Homo sapien
tagcaaattccgtaaggtccagtga

SEQ ID NO: 2652032 - DNA, 25 bp, Homo sapien
tgcttcttagcaaattccgtaaggt

SEQ ID NO: 2652033 - DNA, 25 bp, Homo sapien
caaattccgtaaggtccagtgactc

SEQ ID NO: 2652034 - DNA, 25 bp, Homo sapien
ttaggatgccatgccaagcagaaag

SEQ ID NO: 2652035 - DNA, 25 bp, Homo sapien
gaaaaatcccccagtcactagaaca

SEQ ID NO: 2652036 - DNA, 25 bp, Homo sapien
ttcttcttcacaaatgacaccacct

SEQ ID NO: 2652037 - DNA, 25 bp, Homo sapien
caagcagaaagcctccgaaaaatcc

SEQ ID NO: 2652038 - DNA, 25 bp, Homo sapien
tttgtaccagcagaagcttatagaa

SEQ ID NO: 2652039 - DNA, 25 bp, Homo sapien
tttcaggatccactcatcctccacg

SEQ ID NO: 2652040 - DNA, 25 bp, Homo sapien
gatccactcatcctccacggtcagc

SEQ ID NO: 2652041 - DNA, 25 bp, Homo sapien
aggatccactcatcctccacggtca

SEQ ID NO: 2652042 - DNA, 25 bp, Homo sapien
tcaggatccactcatcctccacggt

SEQ ID NO: 2652043 - DNA, 25 bp, Homo sapien
tacttttatgtcaatgtcacaggtc

SEQ ID NO: 2652044 - DNA, 25 bp, Homo sapien
acaggtctattttgatgtctaatcc

SEQ ID NO: 2652045 - DNA, 25 bp, Homo sapien
tacccttgagggctatgatgctaaa

SEQ ID NO: 2652046 - DNA, 25 bp, Homo sapien
ggactaagacaacacgctttgttct

SEQ ID NO: 2652047 - DNA, 25 bp, Homo sapien
tatttatgtaagcatagttcttctt

SEQ ID NO: 2652048 - DNA, 25 bp, Homo sapien
ttccatatttatgtaagcatagttc

SEQ ID NO: 2652049 - DNA, 25 bp, Homo sapien
tccatatttatgtaagcatagttct

SEQ ID NO: 2652050 - DNA, 25 bp, Homo sapien
catatttatgtaagcatagttcttc

SEQ ID NO: 2652051 - DNA, 25 bp, Homo sapien
tcaaagaagcaaataggacatggcc

SEQ ID NO: 2652052 - DNA, 25 bp, Homo sapien
tgtgtcaccatagacagcagactga

SEQ ID NO: 2652053 - DNA, 25 bp, Homo sapien
caccaaggaggtctgtatgatacac

SEQ ID NO: 2652054 - DNA, 25 bp, Homo sapien
taatcagtcaggaaccctaggacat

SEQ ID NO: 2652055 - DNA, 25 bp, Homo sapien
cacaggactggggggtcagattttc

SEQ ID NO: 2652056 - DNA, 25 bp, Homo sapien
acatttttcaaggccacaggactgg

SEQ ID NO: 2652057 - DNA, 25 bp, Homo sapien
ttctgcatctccaggtgcctgggtc

SEQ ID NO: 2652058 - DNA, 25 bp, Homo sapien
ggggggtcagattttctgcatctcc

SEQ ID NO: 2652059 - DNA, 25 bp, Homo sapien
agaagagcctacaccccatacaaca

SEQ ID NO: 2652060 - DNA, 25 bp, Homo sapien
aaaccttccctgagaagagcctaca

SEQ ID NO: 2652061 - DNA, 25 bp, Homo sapien
ctgagaagagcctacaccccataca

SEQ ID NO: 2652062 - DNA, 25 bp, Homo sapien
aaccttccctgagaagagcctacac

SEQ ID NO: 2652063 - DNA, 25 bp, Homo sapien
gactcaattccagcaaatggaattc

SEQ ID NO: 2652064 - DNA, 25 bp, Homo sapien
tgcctgagcttttggactcaattcc

SEQ ID NO: 2652065 - DNA, 25 bp, Homo sapien
gagcttttggactcaattccagcaa

SEQ ID NO: 2652066 - DNA, 25 bp, Homo sapien
tttggactcaattccagcaaatgga

SEQ ID NO: 2652067 - DNA, 25 bp, Homo sapien
gcaagaagctattgctggggatttt

SEQ ID NO: 2652068 - DNA, 25 bp, Homo sapien
gaagcaagaagctattgctggggat

SEQ ID NO: 2652069 - DNA, 25 bp, Homo sapien
ctggaagcaagaagctattgctggg

SEQ ID NO: 2652070 - DNA, 25 bp, Homo sapien
caagaagctattgctggggatttta

SEQ ID NO: 2652071 - DNA, 25 bp, Homo sapien
aagagccttgtgataccaattgcgt

SEQ ID NO: 2652072 - DNA, 25 bp, Homo sapien
ttctgtctttcgtatacattttcct

SEQ ID NO: 2652073 - DNA, 25 bp, Homo sapien
gaatgcgatccacatgcattatgcc

SEQ ID NO: 2652074 - DNA, 25 bp, Homo sapien
caattgcgtgcacaggaatgcgatc

SEQ ID NO: 2652075 - DNA, 25 bp, Homo sapien
aaagacacaacgtccagtaacttgg

SEQ ID NO: 2652076 - DNA, 25 bp, Homo sapien
ttgccctcaggctatgtatgtatcc

SEQ ID NO: 2652077 - DNA, 25 bp, Homo sapien
tacctatctgttctagttcaacagg

SEQ ID NO: 2652078 - DNA, 25 bp, Homo sapien
caaaatatcaaggagtagacacagt

SEQ ID NO: 2652079 - DNA, 25 bp, Homo sapien
cactgatcaataaatgattttgtag

SEQ ID NO: 2652080 - DNA, 25 bp, Homo sapien
tacttataaaccagatcactgatca

SEQ ID NO: 2652081 - DNA, 25 bp, Homo sapien
catcttcttagagttcaaggcttca

SEQ ID NO: 2652082 - DNA, 25 bp, Homo sapien
agtcccacatactcaagaagctaag

SEQ ID NO: 2652083 - DNA, 25 bp, Homo sapien
gaacacactggatactgctcttaca

SEQ ID NO: 2652084 - DNA, 25 bp, Homo sapien
gagtgtcccagcacttatagcctaa

SEQ ID NO: 2652085 - DNA, 25 bp, Homo sapien
tatagcctaactggcatgccagaca

SEQ ID NO: 2652086 - DNA, 25 bp, Homo sapien
tattggagcccagcttatcgtggaa

SEQ ID NO: 2652087 - DNA, 25 bp, Homo sapien
gacacctgtcgcctgtgaggcatca

SEQ ID NO: 2652088 - DNA, 25 bp, Homo sapien
ccggtggcgacagaacggactttct

SEQ ID NO: 2652089 - DNA, 25 bp, Homo sapien
tcctgggacttttcgggcacagctg

SEQ ID NO: 2652090 - DNA, 25 bp, Homo sapien
agaaatcggaagtgacgtcgcggcc

SEQ ID NO: 2652091 - DNA, 25 bp, Homo sapien
ggcaggatgggcctcggagcgtaaa

SEQ ID NO: 2652092 - DNA, 25 bp, Homo sapien
tcaactgaaatgaccctgtctgtgt

SEQ ID NO: 2652093 - DNA, 25 bp, Homo sapien
tcggagcgtaaaggcggcaaaaaca

SEQ ID NO: 2652094 - DNA, 25 bp, Homo sapien
tctgtgtagtactccggcaggatgg

SEQ ID NO: 2652095 - DNA, 25 bp, Homo sapien
gagggcgaaattggggcttcctctg

SEQ ID NO: 2652096 - DNA, 25 bp, Homo sapien
tgtgaccggagggcgaaattggggc

SEQ ID NO: 2652097 - DNA, 25 bp, Homo sapien
ggcgaaattggggcttcctctgctc

SEQ ID NO: 2652098 - DNA, 25 bp, Homo sapien
agggcgaaattggggcttcctctgc

SEQ ID NO: 2652099 - DNA, 25 bp, Homo sapien
acacagcgaaccgaacgtcgcgcga

SEQ ID NO: 2652100 - DNA, 25 bp, Homo sapien
aggagccggcgacacacacagcgaa

SEQ ID NO: 2652101 - DNA, 25 bp, Homo sapien
gaagatgacgtaccagagcacgctc

SEQ ID NO: 2652102 - DNA, 25 bp, Homo sapien
acatggaccctcaaggagccggcga

SEQ ID NO: 2652103 - DNA, 25 bp, Homo sapien
ttaatcggactgtgccagctcccta

SEQ ID NO: 2652104 - DNA, 25 bp, Homo sapien
gagacacctcgacccaaggacaatt

SEQ ID NO: 2652105 - DNA, 25 bp, Homo sapien
caaggacaattaatcggactgtgcc

SEQ ID NO: 2652106 - DNA, 25 bp, Homo sapien
caaagggtccgacgagacacctcga

SEQ ID NO: 2652107 - DNA, 25 bp, Homo sapien
tagaaataattacagtgactctgcc

SEQ ID NO: 2652108 - DNA, 25 bp, Homo sapien
aaataattacagtgactctgcctta

SEQ ID NO: 2652109 - DNA, 25 bp, Homo sapien
ctattttggaattggtattagaaat

SEQ ID NO: 2652110 - DNA, 25 bp, Homo sapien
ttagaaataattacagtgactctgc

SEQ ID NO: 2652111 - DNA, 25 bp, Homo sapien
gattttttcaccaagtataggatat

SEQ ID NO: 2652112 - DNA, 25 bp, Homo sapien
tatgtctgaatagctacaggcttat

SEQ ID NO: 2652113 - DNA, 25 bp, Homo sapien
tgaatagctacaggcttataaccag

SEQ ID NO: 2652114 - DNA, 25 bp, Homo sapien
tagctacaggcttataaccagccat

SEQ ID NO: 2652115 - DNA, 25 bp, Homo sapien
ctttcataggagcaatagacttacc

SEQ ID NO: 2652116 - DNA, 25 bp, Homo sapien
agtccactactaatagacatgggtt

SEQ ID NO: 2652117 - DNA, 25 bp, Homo sapien
ttatctgcccaaactataagctgct

SEQ ID NO: 2652118 - DNA, 25 bp, Homo sapien
taccatccattataagggcacactg

SEQ ID NO: 2652119 - DNA, 25 bp, Homo sapien
accaaattccttaatctgaacaggg

SEQ ID NO: 2652120 - DNA, 25 bp, Homo sapien
gaggaagctgtgacagcataattat

SEQ ID NO: 2652121 - DNA, 25 bp, Homo sapien
tgcaccaaattccttaatctgaaca

SEQ ID NO: 2652122 - DNA, 25 bp, Homo sapien
ggaagctgtgacagcataattatat

SEQ ID NO: 2652123 - DNA, 25 bp, Homo sapien
ccatcttgtcgaaaagtagcacagt

SEQ ID NO: 2652124 - DNA, 25 bp, Homo sapien
ggttcttgggagtatcggccataaa

SEQ ID NO: 2652125 - DNA, 25 bp, Homo sapien
gggagccctcccacttatatcaaaa

SEQ ID NO: 2652126 - DNA, 25 bp, Homo sapien
cagtatgctgtgtctttaaatcgag

SEQ ID NO: 2652127 - DNA, 25 bp, Homo sapien
ccacgtgatatttgtcagctgtaaa

SEQ ID NO: 2652128 - DNA, 25 bp, Homo sapien
ctttggagtttggaatatcccataa

SEQ ID NO: 2652129 - DNA, 25 bp, Homo sapien
ctcacataatcagagtgttctttaa

SEQ ID NO: 2652130 - DNA, 25 bp, Homo sapien
atttaactgtataatcatcagcccc

SEQ ID NO: 2652131 - DNA, 25 bp, Homo sapien
gattaagtttgctagcacatccaca

SEQ ID NO: 2652132 - DNA, 25 bp, Homo sapien
gagatccggattaagtttgctagca

SEQ ID NO: 2652133 - DNA, 25 bp, Homo sapien
ctgttataaagagatccggattaag

SEQ ID NO: 2652134 - DNA, 25 bp, Homo sapien
taaagagatccggattaagtttgct

SEQ ID NO: 2652135 - DNA, 25 bp, Homo sapien
gagagaacactctcactcgttcgtg

SEQ ID NO: 2652136 - DNA, 25 bp, Homo sapien
atcttcacagtatgatcatatgatc

SEQ ID NO: 2652137 - DNA, 25 bp, Homo sapien
actggctgcccatgctcaacggaga

SEQ ID NO: 2652138 - DNA, 25 bp, Homo sapien
ggaaaagtaggacactctccactgg

SEQ ID NO: 2652139 - DNA, 25 bp, Homo sapien
tcccagactttaacataacgacctc

SEQ ID NO: 2652140 - DNA, 25 bp, Homo sapien
caaagatactagcaattgtcctcct

SEQ ID NO: 2652141 - DNA, 25 bp, Homo sapien
ttcaaagatactagcaattgtcctc

SEQ ID NO: 2652142 - DNA, 25 bp, Homo sapien
ttttcaaagatactagcaattgtcc

SEQ ID NO: 2652143 - DNA, 25 bp, Homo sapien
gatttttcaaagatactagcaattg

SEQ ID NO: 2652144 - DNA, 25 bp, Homo sapien
ccagagctgcttagacataaacatg

SEQ ID NO: 2652145 - DNA, 25 bp, Homo sapien
tccagagctgcttagacataaacat

SEQ ID NO: 2652146 - DNA, 25 bp, Homo sapien
gactcaaaattgaagctgcataatc

SEQ ID NO: 2652147 - DNA, 25 bp, Homo sapien
ctttgtaggaagttgtgctgtatac

SEQ ID NO: 2652148 - DNA, 25 bp, Homo sapien
ggaagttgtgctgtatactttcacc

SEQ ID NO: 2652149 - DNA, 25 bp, Homo sapien
caaaactgtggactactttgtagga

SEQ ID NO: 2652150 - DNA, 25 bp, Homo sapien
tcctacaactattgtctcatcttca

SEQ ID NO: 2652151 - DNA, 25 bp, Homo sapien
cctacaactattgtctcatcttcat

SEQ ID NO: 2652152 - DNA, 25 bp, Homo sapien
aaggttcgatatgcaggccttcttc

SEQ ID NO: 2652153 - DNA, 25 bp, Homo sapien
cctttaataaaggttcgatatgcag

SEQ ID NO: 2652154 - DNA, 25 bp, Homo sapien
cagatttccgatgtttaacactcag

SEQ ID NO: 2652155 - DNA, 25 bp, Homo sapien
ctttgcttcagatttccgatgttta

SEQ ID NO: 2652156 - DNA, 25 bp, Homo sapien
gaactacgctttccagtaatgtgca

SEQ ID NO: 2652157 - DNA, 25 bp, Homo sapien
tagtctcaacaactctggataccag

SEQ ID NO: 2652158 - DNA, 25 bp, Homo sapien
cagggatgaagctggctactctaac

SEQ ID NO: 2652159 - DNA, 25 bp, Homo sapien
ttctcaggtgccaaacagggacatg

SEQ ID NO: 2652160 - DNA, 25 bp, Homo sapien
tggtatctctgaactatgtcacaaa

SEQ ID NO: 2652161 - DNA, 25 bp, Homo sapien
aaataatgttcatatgcccataatg

SEQ ID NO: 2652162 - DNA, 25 bp, Homo sapien
tgaagtggtatctctgaactatgtc

SEQ ID NO: 2652163 - DNA, 25 bp, Homo sapien
tcatatgcccataatgtagattaaa

SEQ ID NO: 2652164 - DNA, 25 bp, Homo sapien
catacaattctaggtgcttctttgc

SEQ ID NO: 2652165 - DNA, 25 bp, Homo sapien
tctttgctggcctgttaatcaaaat

SEQ ID NO: 2652166 - DNA, 25 bp, Homo sapien
gagtgccttagagatccgaaaatgt

SEQ ID NO: 2652167 - DNA, 25 bp, Homo sapien
ccgaaaatgtttcagatccctgtca

SEQ ID NO: 2652168 - DNA, 25 bp, Homo sapien
ttatgatggacaccgtaatctcggg

SEQ ID NO: 2652169 - DNA, 25 bp, Homo sapien
taatctcgggtgtctttattgtaca

SEQ ID NO: 2652170 - DNA, 25 bp, Homo sapien
tgcaagcgcatttgcaaggactcct

SEQ ID NO: 2652171 - DNA, 25 bp, Homo sapien
aaaattaagaacatgactgatttcc

SEQ ID NO: 2652172 - DNA, 25 bp, Homo sapien
caataattatttcagcagcattgat

SEQ ID NO: 2652173 - DNA, 25 bp, Homo sapien
ttcagcagcattgattaaaacaggg

SEQ ID NO: 2652174 - DNA, 25 bp, Homo sapien
acaggggcaaatcttggctgagaaa

SEQ ID NO: 2652175 - DNA, 25 bp, Homo sapien
taaaacaggggcaaatcttggctga

SEQ ID NO: 2652176 - DNA, 25 bp, Homo sapien
tgaccaattacaggcagatatatat

SEQ ID NO: 2652177 - DNA, 25 bp, Homo sapien
tttctacaagtccttgaagtagtaa

SEQ ID NO: 2652178 - DNA, 25 bp, Homo sapien
actacaggggactgaccaattacag

SEQ ID NO: 2652179 - DNA, 25 bp, Homo sapien
caattctctttggtaatcaatctct

SEQ ID NO: 2652180 - DNA, 25 bp, Homo sapien
ttctctggaaatccatcagatgtgt

SEQ ID NO: 2652181 - DNA, 25 bp, Homo sapien
ggaaatccatcagatgtgtgttcca

SEQ ID NO: 2652182 - DNA, 25 bp, Homo sapien
tcttattctctggaaatccatcaga

SEQ ID NO: 2652183 - DNA, 25 bp, Homo sapien
ctatgattctatcttcttattctct

SEQ ID NO: 2652184 - DNA, 25 bp, Homo sapien
gagtctctcgccaacatttaataca

SEQ ID NO: 2652185 - DNA, 25 bp, Homo sapien
tcaaagagagtctctcgccaacatt

SEQ ID NO: 2652186 - DNA, 25 bp, Homo sapien
aatgtatcaaagagagtctctcgcc

SEQ ID NO: 2652187 - DNA, 25 bp, Homo sapien
aagagagtctctcgccaacatttaa

SEQ ID NO: 2652188 - DNA, 25 bp, Homo sapien
gaagcaagctaagcaagggcctaga

SEQ ID NO: 2652189 - DNA, 25 bp, Homo sapien
gatgcagtcccattaccagctgaag

SEQ ID NO: 2652190 - DNA, 25 bp, Homo sapien
gccactgtgctgtacgaaatcaatt

SEQ ID NO: 2652191 - DNA, 25 bp, Homo sapien
gaaaacttacttgccacacttggaa

SEQ ID NO: 2652192 - DNA, 25 bp, Homo sapien
gaatcttaaggccagtgtcacatat

SEQ ID NO: 2652193 - DNA, 25 bp, Homo sapien
tgaaaccaggagattgcctcaggcc

SEQ ID NO: 2652194 - DNA, 25 bp, Homo sapien
tcagggacttcgagagtgaatcaac

SEQ ID NO: 2652195 - DNA, 25 bp, Homo sapien
aattgacggcaactacagctttagg

SEQ ID NO: 2652196 - DNA, 25 bp, Homo sapien
ccagttaactatagctgagggaaca

SEQ ID NO: 2652197 - DNA, 25 bp, Homo sapien
tctccgctgatgacctagacatagc

SEQ ID NO: 2652198 - DNA, 25 bp, Homo sapien
gagggaacaggcatgcggcttttta

SEQ ID NO: 2652199 - DNA, 25 bp, Homo sapien
ttgagtcagttgtaccaccatggtc

SEQ ID NO: 2652200 - DNA, 25 bp, Homo sapien
tcatcaggaactaagatggtttctc

SEQ ID NO: 2652201 - DNA, 25 bp, Homo sapien
gaagaggtacaaccagaatagggca

SEQ ID NO: 2652202 - DNA, 25 bp, Homo sapien
tagagggaatccaaaaatatcatgg

SEQ ID NO: 2652203 - DNA, 25 bp, Homo sapien
atagggcaataggaagtcatcagga

SEQ ID NO: 2652204 - DNA, 25 bp, Homo sapien
ttggcaagacaaacgagagcaagga

SEQ ID NO: 2652205 - DNA, 25 bp, Homo sapien
gacaaacgagagcaaggaagatctc

SEQ ID NO: 2652206 - DNA, 25 bp, Homo sapien
ggattattgggatgtaagaccaaaa

SEQ ID NO: 2652207 - DNA, 25 bp, Homo sapien
aaaatgtaggttggagcttggcaag

SEQ ID NO: 2652208 - DNA, 25 bp, Homo sapien
acacagacttgatacctatcacaaa

SEQ ID NO: 2652209 - DNA, 25 bp, Homo sapien
tgttgaaacaactgcactggacatc

SEQ ID NO: 2652210 - DNA, 25 bp, Homo sapien
aaaatggtgtaatggtgttgaaaca

SEQ ID NO: 2652211 - DNA, 25 bp, Homo sapien
cttgatacctatcacaaaattttac

SEQ ID NO: 2652212 - DNA, 25 bp, Homo sapien
tctgatagtctgtttctgcctccat

SEQ ID NO: 2652213 - DNA, 25 bp, Homo sapien
attctgatagtctgtttctgcctcc

SEQ ID NO: 2652214 - DNA, 25 bp, Homo sapien
tgtggcattctgatagtctgtttct

SEQ ID NO: 2652215 - DNA, 25 bp, Homo sapien
catgtggcattctgatagtctgttt

SEQ ID NO: 2652216 - DNA, 25 bp, Homo sapien
cctgccaaattgtgcggtatgttaa

SEQ ID NO: 2652217 - DNA, 25 bp, Homo sapien
cacacggagagccaatagtgaccag

SEQ ID NO: 2652218 - DNA, 25 bp, Homo sapien
ggtggtacggcttcctgccaaattg

SEQ ID NO: 2652219 - DNA, 25 bp, Homo sapien
caatagtgaccagcgctcggtggta

SEQ ID NO: 2652220 - DNA, 25 bp, Homo sapien
gtccggaaggctctccccggcgatg

SEQ ID NO: 2652221 - DNA, 25 bp, Homo sapien
gatgccaacgcctggcggcggccgg

SEQ ID NO: 2652222 - DNA, 25 bp, Homo sapien
cctgagggcgcctcggaacgcgccc

SEQ ID NO: 2652223 - DNA, 25 bp, Homo sapien
cagcctccagaacccaggcgaggct

SEQ ID NO: 2652224 - DNA, 25 bp, Homo sapien
accacgctgggttgatttttgcatt

SEQ ID NO: 2652225 - DNA, 25 bp, Homo sapien
ctgggtgcaagcgatcctcacatct

SEQ ID NO: 2652226 - DNA, 25 bp, Homo sapien
gcacaccaccacgctgggttgattt

SEQ ID NO: 2652227 - DNA, 25 bp, Homo sapien
gggtgcaagcgatcctcacatctca

SEQ ID NO: 2652228 - DNA, 25 bp, Homo sapien
ctgcacttgaggcccaacggaacca

SEQ ID NO: 2652229 - DNA, 25 bp, Homo sapien
cttgaggcccaacggaaccaaaatg

SEQ ID NO: 2652230 - DNA, 25 bp, Homo sapien
gcacttgaggcccaacggaaccaaa

SEQ ID NO: 2652231 - DNA, 25 bp, Homo sapien
tgaggcccaacggaaccaaaatgag

SEQ ID NO: 2652232 - DNA, 25 bp, Homo sapien
ctccacaaacctttaacaagcactt

SEQ ID NO: 2652233 - DNA, 25 bp, Homo sapien
tccacaaacctttaacaagcactta

SEQ ID NO: 2652234 - DNA, 25 bp, Homo sapien
ctctcatgtcccacactcattccca

SEQ ID NO: 2652235 - DNA, 25 bp, Homo sapien
tctcatgtcccacactcattcccac

SEQ ID NO: 2652236 - DNA, 25 bp, Homo sapien
cgtgccctctcatgtcccacactca

SEQ ID NO: 2652237 - DNA, 25 bp, Homo sapien
gccctctcatgtcccacactcattc

SEQ ID NO: 2652238 - DNA, 25 bp, Homo sapien
cttctggggaaatcccccattgtga

SEQ ID NO: 2652239 - DNA, 25 bp, Homo sapien
tggatctcccttctggggaaatccc

SEQ ID NO: 2652240 - DNA, 25 bp, Homo sapien
ccttttttctgctagcacctggatc

SEQ ID NO: 2652241 - DNA, 25 bp, Homo sapien
cccttttttctgctagcacctggat

SEQ ID NO: 2652242 - DNA, 25 bp, Homo sapien
tttatggggttctggttgtctggca

SEQ ID NO: 2652243 - DNA, 25 bp, Homo sapien
ctggtgttgagagcccctcgagtgc

SEQ ID NO: 2652244 - DNA, 25 bp, Homo sapien
ccagagcagacatttatggggttct

SEQ ID NO: 2652245 - DNA, 25 bp, Homo sapien
tcgagtgcctcaggccatgcttcct

SEQ ID NO: 2652246 - DNA, 25 bp, Homo sapien
gaggtgcttcgctgcagctcaactc

SEQ ID NO: 2652247 - DNA, 25 bp, Homo sapien
ggaggtcggtcagctacaaggcttc

SEQ ID NO: 2652248 - DNA, 25 bp, Homo sapien
ccaaatctggtcacaatctagtaag

SEQ ID NO: 2652249 - DNA, 25 bp, Homo sapien
tgggcaatgtgtattggtttttccc

SEQ ID NO: 2652250 - DNA, 25 bp, Homo sapien
caaaatagctacatgaggaggtcgg

SEQ ID NO: 2652251 - DNA, 25 bp, Homo sapien
tctgcaactgcaactcagggaactg

SEQ ID NO: 2652252 - DNA, 25 bp, Homo sapien
ttcaagcacgaatgcaggaagctgc

SEQ ID NO: 2652253 - DNA, 25 bp, Homo sapien
tccttggaataaacagactagcctt

SEQ ID NO: 2652254 - DNA, 25 bp, Homo sapien
tagactaaagctgaccatggtggca

SEQ ID NO: 2652255 - DNA, 25 bp, Homo sapien
ttactacctcaataagaagctgctt

SEQ ID NO: 2652256 - DNA, 25 bp, Homo sapien
ccctgctgggtgaccccagaacaaa

SEQ ID NO: 2652257 - DNA, 25 bp, Homo sapien
agggatccggaagaaggcccctgct

SEQ ID NO: 2652258 - DNA, 25 bp, Homo sapien
gaacaaagccaccaagtcacttact

SEQ ID NO: 2652259 - DNA, 25 bp, Homo sapien
atggaacgaaaacagcttgggtgat

SEQ ID NO: 2652260 - DNA, 25 bp, Homo sapien
tggaacgaaaacagcttgggtgatg

SEQ ID NO: 2652261 - DNA, 25 bp, Homo sapien
ggaacgaaaacagcttgggtgatgt

SEQ ID NO: 2652262 - DNA, 25 bp, Homo sapien
gaacgaaaacagcttgggtgatgtc

SEQ ID NO: 2652263 - DNA, 25 bp, Homo sapien
gattatgatgacagcaccttcctgc

SEQ ID NO: 2652264 - DNA, 25 bp, Homo sapien
ctgagacatgttccccaaacctcca

SEQ ID NO: 2652265 - DNA, 25 bp, Homo sapien
ggaccatctctctatctcttcgtgc

SEQ ID NO: 2652266 - DNA, 25 bp, Homo sapien
aaaatgttaagtttcaaactctgag

SEQ ID NO: 2652267 - DNA, 25 bp, Homo sapien
tagggtagagcatgtgatgctttac

SEQ ID NO: 2652268 - DNA, 25 bp, Homo sapien
ctagccagctgctcgcgtagggtag

SEQ ID NO: 2652269 - DNA, 25 bp, Homo sapien
cagctgctcgcgtagggtagagcat

SEQ ID NO: 2652270 - DNA, 25 bp, Homo sapien
cgtagggtagagcatgtgatgcttt

SEQ ID NO: 2652271 - DNA, 25 bp, Homo sapien
tacatacggacaccatcactatcgt

SEQ ID NO: 2652272 - DNA, 25 bp, Homo sapien
atttccttccacactttacatacgg

SEQ ID NO: 2652273 - DNA, 25 bp, Homo sapien
gtcacaaaacaaacgtgccttccaa

SEQ ID NO: 2652274 - DNA, 25 bp, Homo sapien
tcactatcgtcacaaaacaaacgtg

SEQ ID NO: 2652275 - DNA, 25 bp, Homo sapien
gcttcagttctagtgcggtgtggat

SEQ ID NO: 2652276 - DNA, 25 bp, Homo sapien
ctttccctagccagcttcagttcta

SEQ ID NO: 2652277 - DNA, 25 bp, Homo sapien
tgcggtgtggatgggaccagaagtc

SEQ ID NO: 2652278 - DNA, 25 bp, Homo sapien
cctagccagcttcagttctagtgcg

SEQ ID NO: 2652279 - DNA, 25 bp, Homo sapien
tccttgtataaaagctctgctttta

SEQ ID NO: 2652280 - DNA, 25 bp, Homo sapien
tattttcagacccagctttctatct

SEQ ID NO: 2652281 - DNA, 25 bp, Homo sapien
ttttattttcagacccagctttcta

SEQ ID NO: 2652282 - DNA, 25 bp, Homo sapien
gcttttattttcagacccagctttc

SEQ ID NO: 2652283 - DNA, 25 bp, Homo sapien
gaattcaggcctatctactatctac

SEQ ID NO: 2652284 - DNA, 25 bp, Homo sapien
ggttcataggtatttaaaggcgcca

SEQ ID NO: 2652285 - DNA, 25 bp, Homo sapien
tcacagctgggactcgaattcaggc

SEQ ID NO: 2652286 - DNA, 25 bp, Homo sapien
gatagtacaaattggaaggtcacag

SEQ ID NO: 2652287 - DNA, 25 bp, Homo sapien
tcaaaacagttccaacctgtgcaac

SEQ ID NO: 2652288 - DNA, 25 bp, Homo sapien
ccttatggtggacagtttgaaccta

SEQ ID NO: 2652289 - DNA, 25 bp, Homo sapien
cctatattgattataggttgcatac

SEQ ID NO: 2652290 - DNA, 25 bp, Homo sapien
tataggttgcatacatgatcaagtc

SEQ ID NO: 2652291 - DNA, 25 bp, Homo sapien
tctggagtcagttggcctggatccc

SEQ ID NO: 2652292 - DNA, 25 bp, Homo sapien
ggaataacacaggatatacaaaagc

SEQ ID NO: 2652293 - DNA, 25 bp, Homo sapien
ctggcatggagtaagaccctattat

SEQ ID NO: 2652294 - DNA, 25 bp, Homo sapien
caagcctgactctatcacttatcac

SEQ ID NO: 2652295 - DNA, 25 bp, Homo sapien
tatcctttatgtggccttccaagga

SEQ ID NO: 2652296 - DNA, 25 bp, Homo sapien
gctatatgctaactcctcactttgt

SEQ ID NO: 2652297 - DNA, 25 bp, Homo sapien
ctgtgctatatgctaactcctcact

SEQ ID NO: 2652298 - DNA, 25 bp, Homo sapien
actttgtctatcctttatgtggcct

SEQ ID NO: 2652299 - DNA, 25 bp, Homo sapien
atcctactaatggcacatccccatt

SEQ ID NO: 2652300 - DNA, 25 bp, Homo sapien
ctactaatggcacatccccattctg

SEQ ID NO: 2652301 - DNA, 25 bp, Homo sapien
ggggagcccatccttccatacaacc

SEQ ID NO: 2652302 - DNA, 25 bp, Homo sapien
tggggagcccatccttccatacaac

SEQ ID NO: 2652303 - DNA, 25 bp, Homo sapien
ccgtcacctttgttaaaccatagag

SEQ ID NO: 2652304 - DNA, 25 bp, Homo sapien
tgttaaaccatagagcgctttcagg

SEQ ID NO: 2652305 - DNA, 25 bp, Homo sapien
ccccagcctccattgtcttgtctct

SEQ ID NO: 2652306 - DNA, 25 bp, Homo sapien
gcgctttcaggtcctgtagctcttc

SEQ ID NO: 2652307 - DNA, 25 bp, Homo sapien
cttggaccagaaatccctggtggtc

SEQ ID NO: 2652308 - DNA, 25 bp, Homo sapien
gagcaacagtctgacccccagatga

SEQ ID NO: 2652309 - DNA, 25 bp, Homo sapien
agatgaatcctattcctcccccagg

SEQ ID NO: 2652310 - DNA, 25 bp, Homo sapien
tggtggtcaccttccatcgaatacc

SEQ ID NO: 2652311 - DNA, 25 bp, Homo sapien
aacgttatcctcgatgcgctctgca

SEQ ID NO: 2652312 - DNA, 25 bp, Homo sapien
gagatccgtcataagtaaagtaaaa

SEQ ID NO: 2652313 - DNA, 25 bp, Homo sapien
gacgctggactggagaacgttatcc

SEQ ID NO: 2652314 - DNA, 25 bp, Homo sapien
tctgcaatcatgacatgtcgctgat

SEQ ID NO: 2652315 - DNA, 25 bp, Homo sapien
tctagaggcaattccagatgggtca

SEQ ID NO: 2652316 - DNA, 25 bp, Homo sapien
tgtccacgtaggtcactgagccaga

SEQ ID NO: 2652317 - DNA, 25 bp, Homo sapien
ggagagtaaccttccgagcagaggc

SEQ ID NO: 2652318 - DNA, 25 bp, Homo sapien
cgagccagcctgcaagccatgttgt

SEQ ID NO: 2652319 - DNA, 25 bp, Homo sapien
catcagagcaaggttcaggtaaaaa

SEQ ID NO: 2652320 - DNA, 25 bp, Homo sapien
ccagagatgagtggctcaggacctc

SEQ ID NO: 2652321 - DNA, 25 bp, Homo sapien
tcacataaaccagcccagagatgag

SEQ ID NO: 2652322 - DNA, 25 bp, Homo sapien
cacatcagagcaaggttcaggtaaa

SEQ ID NO: 2652323 - DNA, 25 bp, Homo sapien
tgagaagctggatcctctaaataca

SEQ ID NO: 2652324 - DNA, 25 bp, Homo sapien
ggacagctctccaaccaaccatgga

SEQ ID NO: 2652325 - DNA, 25 bp, Homo sapien
ggggacagctctccaaccaaccatg

SEQ ID NO: 2652326 - DNA, 25 bp, Homo sapien
caaccaaccatggacccacagaatg

SEQ ID NO: 2652327 - DNA, 25 bp, Homo sapien
tagtacaaggacaactgccagcatt

SEQ ID NO: 2652328 - DNA, 25 bp, Homo sapien
ccaaggcttatatttgagagagtca

SEQ ID NO: 2652329 - DNA, 25 bp, Homo sapien
gagagagtcaagacaaggcctctta

SEQ ID NO: 2652330 - DNA, 25 bp, Homo sapien
gggactttggaacaggacgcacaat

SEQ ID NO: 2652331 - DNA, 25 bp, Homo sapien
tccactgtggtgtttgccgctctct

SEQ ID NO: 2652332 - DNA, 25 bp, Homo sapien
cagctccactgtggtgtttgccgct

SEQ ID NO: 2652333 - DNA, 25 bp, Homo sapien
tgcacagagggcccttggtcggtcc

SEQ ID NO: 2652334 - DNA, 25 bp, Homo sapien
cacagagggcccttggtcggtccgt

SEQ ID NO: 2652335 - DNA, 25 bp, Homo sapien
agctaagtctaatggtgtggcaccc

SEQ ID NO: 2652336 - DNA, 25 bp, Homo sapien
gaaagtttagccaggccccatctca

SEQ ID NO: 2652337 - DNA, 25 bp, Homo sapien
cttcgttgggtaaagccaaggcctg

SEQ ID NO: 2652338 - DNA, 25 bp, Homo sapien
ggagtgtccttcacgtaaagctaag

SEQ ID NO: 2652339 - DNA, 25 bp, Homo sapien
caagaaaggctctatcccaaaagta

SEQ ID NO: 2652340 - DNA, 25 bp, Homo sapien
atatctgcctccaacaaatgctcgg

SEQ ID NO: 2652341 - DNA, 25 bp, Homo sapien
cagggtcagcgtttccgatgagtga

SEQ ID NO: 2652342 - DNA, 25 bp, Homo sapien
tcactgagctgcactcgggagaagc

SEQ ID NO: 2652343 - DNA, 25 bp, Homo sapien
ctggagggcatagctgttctttcct

SEQ ID NO: 2652344 - DNA, 25 bp, Homo sapien
ttctgcaccgctggagggcatagct

SEQ ID NO: 2652345 - DNA, 25 bp, Homo sapien
ttcagtttctgcaccgctggagggc

SEQ ID NO: 2652346 - DNA, 25 bp, Homo sapien
tcttcagtttctgcaccgctggagg

SEQ ID NO: 2652347 - DNA, 25 bp, Homo sapien
cattaattatttggagtcagagggc

SEQ ID NO: 2652348 - DNA, 25 bp, Homo sapien
actggcagccacgtatattaacttg

SEQ ID NO: 2652349 - DNA, 25 bp, Homo sapien
gattcaagggctctaaagtataccc

SEQ ID NO: 2652350 - DNA, 25 bp, Homo sapien
ttagttgaatattgccctctgctgg

SEQ ID NO: 2652351 - DNA, 25 bp, Homo sapien
gcatttggaccaacagcctcttctg

SEQ ID NO: 2652352 - DNA, 25 bp, Homo sapien
gcctccaccctgaaggaaatgattt

SEQ ID NO: 2652353 - DNA, 25 bp, Homo sapien
taagacagttagcaaatgcagagcg

SEQ ID NO: 2652354 - DNA, 25 bp, Homo sapien
gaagccactttgagccggtgagagc

SEQ ID NO: 2652355 - DNA, 25 bp, Homo sapien
tcaaaccactcattgctatagcaac

SEQ ID NO: 2652356 - DNA, 25 bp, Homo sapien
tcattgctatagcaacctttagcag

SEQ ID NO: 2652357 - DNA, 25 bp, Homo sapien
gcaatcaaaccactcattgctatag

SEQ ID NO: 2652358 - DNA, 25 bp, Homo sapien
acagtgcaatcaaaccactcattgc

SEQ ID NO: 2652359 - DNA, 25 bp, Homo sapien
aactaaacagaaccatatcttagag

SEQ ID NO: 2652360 - DNA, 25 bp, Homo sapien
cattcattctaatggattaattaaa

SEQ ID NO: 2652361 - DNA, 25 bp, Homo sapien
gaaccatatcttagagctttcaaag

SEQ ID NO: 2652362 - DNA, 25 bp, Homo sapien
gctctaggagagtttctgttaaatt

SEQ ID NO: 2652363 - DNA, 25 bp, Homo sapien
gtttcctggaaacagtagtggtcag

SEQ ID NO: 2652364 - DNA, 25 bp, Homo sapien
ctctttctgaataaagggtttcctg

SEQ ID NO: 2652365 - DNA, 25 bp, Homo sapien
cgggtgtcctctttctgaataaagg

SEQ ID NO: 2652366 - DNA, 25 bp, Homo sapien
tggaaacagtagtggtcaggatgta

SEQ ID NO: 2652367 - DNA, 25 bp, Homo sapien
ctgcaaaagaaataattatcaggat

SEQ ID NO: 2652368 - DNA, 25 bp, Homo sapien
ccttttcagctgctgatctgctgga

SEQ ID NO: 2652369 - DNA, 25 bp, Homo sapien
ctgctgatctgctggacactgaatt

SEQ ID NO: 2652370 - DNA, 25 bp, Homo sapien
tttcagctgctgatctgctggacac

SEQ ID NO: 2652371 - DNA, 25 bp, Homo sapien
ctgctggacactgaattcttaatct

SEQ ID NO: 2652372 - DNA, 25 bp, Homo sapien
gtcttcatgttcattgtgttgaacc

SEQ ID NO: 2652373 - DNA, 25 bp, Homo sapien
gttgaaccaccaggcttttgacacg

SEQ ID NO: 2652374 - DNA, 25 bp, Homo sapien
atgttcattgtgttgaaccaccagg

SEQ ID NO: 2652375 - DNA, 25 bp, Homo sapien
caaatctaggctgtgctggtcttca

SEQ ID NO: 2652376 - DNA, 25 bp, Homo sapien
tctgggatgcccctacgagtatagg

SEQ ID NO: 2652377 - DNA, 25 bp, Homo sapien
ctacgagtataggtaaaagcgttat

SEQ ID NO: 2652378 - DNA, 25 bp, Homo sapien
tgtccactctaaacctggatctggg

SEQ ID NO: 2652379 - DNA, 25 bp, Homo sapien
taaaatttacttgcttcttgtccac

SEQ ID NO: 2652380 - DNA, 25 bp, Homo sapien
gatgtcagctccttgcggagctggt

SEQ ID NO: 2652381 - DNA, 25 bp, Homo sapien
gggccataagtcctgcattagacat

SEQ ID NO: 2652382 - DNA, 25 bp, Homo sapien
acatagatgtcagctccttgcggag

SEQ ID NO: 2652383 - DNA, 25 bp, Homo sapien
tgcattagacatagatgtcagctcc

SEQ ID NO: 2652384 - DNA, 25 bp, Homo sapien
tctgcactatgatagcaacagaagc

SEQ ID NO: 2652385 - DNA, 25 bp, Homo sapien
gatgattctccccttcgacaaaatg

SEQ ID NO: 2652386 - DNA, 25 bp, Homo sapien
gaatatgaaggagtcccactctgca

SEQ ID NO: 2652387 - DNA, 25 bp, Homo sapien
catcctacctgcctagaatatgaag

SEQ ID NO: 2652388 - DNA, 25 bp, Homo sapien
ttgaaatatcaaactaagggagtct

SEQ ID NO: 2652389 - DNA, 25 bp, Homo sapien
aggaatggaatacatgaaatctgct

SEQ ID NO: 2652390 - DNA, 25 bp, Homo sapien
tgcttagtcactaagctggtttatt

SEQ ID NO: 2652391 - DNA, 25 bp, Homo sapien
caaactttatagataccatttccag

SEQ ID NO: 2652392 - DNA, 25 bp, Homo sapien
ccttcttcgaatcttcattttggga

SEQ ID NO: 2652393 - DNA, 25 bp, Homo sapien
cttgtttggacgtccttcttcgaat

SEQ ID NO: 2652394 - DNA, 25 bp, Homo sapien
aggccacgagtagttaaaaggtgag

SEQ ID NO: 2652395 - DNA, 25 bp, Homo sapien
aaaggtgagtcggagtcagaatcca

SEQ ID NO: 2652396 - DNA, 25 bp, Homo sapien
attgaaaacataagcacacgcgtcc

SEQ ID NO: 2652397 - DNA, 25 bp, Homo sapien
tctgcttgtaagcttatgaaaatgt

SEQ ID NO: 2652398 - DNA, 25 bp, Homo sapien
ttctccttgaattgaaaacataagc

SEQ ID NO: 2652399 - DNA, 25 bp, Homo sapien
gcttgtaagcttatgaaaatgttcc

SEQ ID NO: 2652400 - DNA, 25 bp, Homo sapien
tgcagctcgtactggccatgcttca

SEQ ID NO: 2652401 - DNA, 25 bp, Homo sapien
ctttctgttgcagctcgtactggcc

SEQ ID NO: 2652402 - DNA, 25 bp, Homo sapien
tatacatagctatgctatgactttc

SEQ ID NO: 2652403 - DNA, 25 bp, Homo sapien
cacttgagtcatgtttaatttatac

SEQ ID NO: 2652404 - DNA, 25 bp, Homo sapien
tgaggacaaccattaccaagcacac

SEQ ID NO: 2652405 - DNA, 25 bp, Homo sapien
caccatagtgcgaaggaagagacca

SEQ ID NO: 2652406 - DNA, 25 bp, Homo sapien
cataaatcccgaagccctctgagaa

SEQ ID NO: 2652407 - DNA, 25 bp, Homo sapien
cacgaagtggcctgaattgagcacc

SEQ ID NO: 2652408 - DNA, 25 bp, Homo sapien
gcgtagacttcatcacctccattca

SEQ ID NO: 2652409 - DNA, 25 bp, Homo sapien
tgatcaatcaccatacagttagcgt

SEQ ID NO: 2652410 - DNA, 25 bp, Homo sapien
cagcaagcaatgtcgagggcggctt

SEQ ID NO: 2652411 - DNA, 25 bp, Homo sapien
ttttttaggatatcgaaggagcgat

SEQ ID NO: 2652412 - DNA, 25 bp, Homo sapien
gcttcagtgtgtgctgtcccttcga

SEQ ID NO: 2652413 - DNA, 25 bp, Homo sapien
tgggtacacactgggactggtttct

SEQ ID NO: 2652414 - DNA, 25 bp, Homo sapien
gaaagattcaagttggaagcacacg

SEQ ID NO: 2652415 - DNA, 25 bp, Homo sapien
gaagcacacgaacttgatggtgaca

SEQ ID NO: 2652416 - DNA, 25 bp, Homo sapien
tagcttatgcacatatgtaggtgcc

SEQ ID NO: 2652417 - DNA, 25 bp, Homo sapien
caacctgccaagtatcaggaccaca

SEQ ID NO: 2652418 - DNA, 25 bp, Homo sapien
gcacatatgtaggtgccctataata

SEQ ID NO: 2652419 - DNA, 25 bp, Homo sapien
tatcaggaccacatgtgcgtgccac

SEQ ID NO: 2652420 - DNA, 25 bp, Homo sapien
aagatccactagaatgcatttatca

SEQ ID NO: 2652421 - DNA, 25 bp, Homo sapien
tccactagaatgcatttatcacaca

SEQ ID NO: 2652422 - DNA, 25 bp, Homo sapien
ctagaatgcatttatcacacatagc

SEQ ID NO: 2652423 - DNA, 25 bp, Homo sapien
gatccactagaatgcatttatcaca

SEQ ID NO: 2652424 - DNA, 25 bp, Homo sapien
tatcgcaagtcccaaatggtaaccc

SEQ ID NO: 2652425 - DNA, 25 bp, Homo sapien
gtcccaaatggtaacccatcaaata

SEQ ID NO: 2652426 - DNA, 25 bp, Homo sapien
tataattattgatatcgcaagtccc

SEQ ID NO: 2652427 - DNA, 25 bp, Homo sapien
gaaacagagtcactgggctgtttgc

SEQ ID NO: 2652428 - DNA, 25 bp, Homo sapien
gggcaaaagacatttcaaatgcctg

SEQ ID NO: 2652429 - DNA, 25 bp, Homo sapien
catttcaaatgcctgaagaaacaaa

SEQ ID NO: 2652430 - DNA, 25 bp, Homo sapien
gccaccacgactggggcaaaagaca

SEQ ID NO: 2652431 - DNA, 25 bp, Homo sapien
agccaccacgactggggcaaaagac

SEQ ID NO: 2652432 - DNA, 25 bp, Homo sapien
aagagtccaattcatccccactagg

SEQ ID NO: 2652433 - DNA, 25 bp, Homo sapien
cttgatagaggaagggattcagccc

SEQ ID NO: 2652434 - DNA, 25 bp, Homo sapien
cagatgtgggatggctcagaatgcc

SEQ ID NO: 2652435 - DNA, 25 bp, Homo sapien
cagtgttagtctcaaaagagtccaa

SEQ ID NO: 2652436 - DNA, 25 bp, Homo sapien
cacttgaactgcatactgttaattc

SEQ ID NO: 2652437 - DNA, 25 bp, Homo sapien
tgttaattcacgcaccaaacgagtt

SEQ ID NO: 2652438 - DNA, 25 bp, Homo sapien
acgtgagcgaactccagaaagcagt

SEQ ID NO: 2652439 - DNA, 25 bp, Homo sapien
ggtgatgagcaagaataagaacgtg

SEQ ID NO: 2652440 - DNA, 25 bp, Homo sapien
taagttagcatcagcaagggacagc

SEQ ID NO: 2652441 - DNA, 25 bp, Homo sapien
gacttcatagatcaaggaccacaga

SEQ ID NO: 2652442 - DNA, 25 bp, Homo sapien
tgaagtaccaagagaataagccacc

SEQ ID NO: 2652443 - DNA, 25 bp, Homo sapien
ccctctgggacataaggagacttgg

SEQ ID NO: 2652444 - DNA, 25 bp, Homo sapien
tccgataagctgtaagctctttgct

SEQ ID NO: 2652445 - DNA, 25 bp, Homo sapien
gtggctccgataagctgtaagctct

SEQ ID NO: 2652446 - DNA, 25 bp, Homo sapien
tcttggtggctccgataagctgtaa

SEQ ID NO: 2652447 - DNA, 25 bp, Homo sapien
tggtggctccgataagctgtaagct

SEQ ID NO: 2652448 - DNA, 25 bp, Homo sapien
gcctgcaaggtatagagtgagctca

SEQ ID NO: 2652449 - DNA, 25 bp, Homo sapien
ggctttgaagatacccagacagaac

SEQ ID NO: 2652450 - DNA, 25 bp, Homo sapien
gctgaagggctactaggcaaaaatc

SEQ ID NO: 2652451 - DNA, 25 bp, Homo sapien
cagactaggatgctgtggcacgatc

SEQ ID NO: 2652452 - DNA, 25 bp, Homo sapien
tttggcaggtatgatgtatttatcc

SEQ ID NO: 2652453 - DNA, 25 bp, Homo sapien
gcaggtatgatgtatttatcccatt

SEQ ID NO: 2652454 - DNA, 25 bp, Homo sapien
ctgatttggcaggtatgatgtattt

SEQ ID NO: 2652455 - DNA, 25 bp, Homo sapien
ctctgatttggcaggtatgatgtat

SEQ ID NO: 2652456 - DNA, 25 bp, Homo sapien
tattccgagggctagtcatcctatt

SEQ ID NO: 2652457 - DNA, 25 bp, Homo sapien
gatttattccgagggctagtcatcc

SEQ ID NO: 2652458 - DNA, 25 bp, Homo sapien
ctttgatttattccgagggctagtc

SEQ ID NO: 2652459 - DNA, 25 bp, Homo sapien
agggctagtcatcctattcatgagg

SEQ ID NO: 2652460 - DNA, 25 bp, Homo sapien
gggcaaactgatgtcgattcagctt

SEQ ID NO: 2652461 - DNA, 25 bp, Homo sapien
gatgtcgattcagcttctctttatc

SEQ ID NO: 2652462 - DNA, 25 bp, Homo sapien
ccagagaatgttcctggggcaaact

SEQ ID NO: 2652463 - DNA, 25 bp, Homo sapien
tttccccaggagtgttttatcacaa

SEQ ID NO: 2652464 - DNA, 25 bp, Homo sapien
agctgcactatgtgggcactggttg

SEQ ID NO: 2652465 - DNA, 25 bp, Homo sapien
cacactgtagcatagaccgaggagc

SEQ ID NO: 2652466 - DNA, 25 bp, Homo sapien
tgcccatgaacacagacactgaggc

SEQ ID NO: 2652467 - DNA, 25 bp, Homo sapien
gaatgtaagggaatactttccctgc

SEQ ID NO: 2652468 - DNA, 25 bp, Homo sapien
tctgacacctggctggtagtaactc

SEQ ID NO: 2652469 - DNA, 25 bp, Homo sapien
tacattgcatgggatttctgacacc

SEQ ID NO: 2652470 - DNA, 25 bp, Homo sapien
tgacacctggctggtagtaactccc

SEQ ID NO: 2652471 - DNA, 25 bp, Homo sapien
ttcctattacatgcattacattgca

SEQ ID NO: 2652472 - DNA, 25 bp, Homo sapien
tgcaggcgcagcatctttacaacct

SEQ ID NO: 2652473 - DNA, 25 bp, Homo sapien
cttggtgcatgcaggcgcagcatct

SEQ ID NO: 2652474 - DNA, 25 bp, Homo sapien
gcgcagcatctttacaacctttgtg

SEQ ID NO: 2652475 - DNA, 25 bp, Homo sapien
tctttacaacctttgtgcacatttg

SEQ ID NO: 2652476 - DNA, 25 bp, Homo sapien
tcaactctgtgatctgacgcaatat

SEQ ID NO: 2652477 - DNA, 25 bp, Homo sapien
ctattgacacagaggtttgcaactg

SEQ ID NO: 2652478 - DNA, 25 bp, Homo sapien
tatgtgttcctattgacacagaggt

SEQ ID NO: 2652479 - DNA, 25 bp, Homo sapien
gatctgacgcaatatgtgttcctat

SEQ ID NO: 2652480 - DNA, 25 bp, Homo sapien
gccttgtgaacatgcgcctcctgaa

SEQ ID NO: 2652481 - DNA, 25 bp, Homo sapien
gaggtctccagctcatgtgtccaga

SEQ ID NO: 2652482 - DNA, 25 bp, Homo sapien
gctgaaagttcctatcaatgctgcc

SEQ ID NO: 2652483 - DNA, 25 bp, Homo sapien
tatccacatagttacacagaacaga

SEQ ID NO: 2652484 - DNA, 25 bp, Homo sapien
tccaaggatggtctgtggtttgttc

SEQ ID NO: 2652485 - DNA, 25 bp, Homo sapien
ttccaaggatggtctgtggtttgtt

SEQ ID NO: 2652486 - DNA, 25 bp, Homo sapien
ccaaggatggtctgtggtttgttct

SEQ ID NO: 2652487 - DNA, 25 bp, Homo sapien
aaagttcttgtcgttttctacatca

SEQ ID NO: 2652488 - DNA, 25 bp, Homo sapien
tcttgtcgttttctacatcacttac

SEQ ID NO: 2652489 - DNA, 25 bp, Homo sapien
gttcttgtcgttttctacatcactt

SEQ ID NO: 2652490 - DNA, 25 bp, Homo sapien
aagttcttgtcgttttctacatcac

SEQ ID NO: 2652491 - DNA, 25 bp, Homo sapien
aatccaacaggcacggaggaagaag

SEQ ID NO: 2652492 - DNA, 25 bp, Homo sapien
cttccagtcggcaatccaacaggca

SEQ ID NO: 2652493 - DNA, 25 bp, Homo sapien
cttctggacaatggatggacctgtc

SEQ ID NO: 2652494 - DNA, 25 bp, Homo sapien
tggatggacctgtcccacagtctcc

SEQ ID NO: 2652495 - DNA, 25 bp, Homo sapien
atgaaagactctgtagagggagaag

SEQ ID NO: 2652496 - DNA, 25 bp, Homo sapien
aagactctgtagagggagaagagcc

SEQ ID NO: 2652497 - DNA, 25 bp, Homo sapien
aaagactctgtagagggagaagagc

SEQ ID NO: 2652498 - DNA, 25 bp, Homo sapien
gcagctgttatggtcactctcagac

SEQ ID NO: 2652499 - DNA, 25 bp, Homo sapien
gggcatcactgctgaggtcactcca

SEQ ID NO: 2652500 - DNA, 25 bp, Homo sapien
ctattacaaaatgagggatccacca

SEQ ID NO: 2652501 - DNA, 25 bp, Homo sapien
gcctattacaaaatgagggatccac

SEQ ID NO: 2652502 - DNA, 25 bp, Homo sapien
ggcatcactgctgaggtcactccac

SEQ ID NO: 2652503 - DNA, 25 bp, Homo sapien
ggaaaattttatccacggtgctgtg

SEQ ID NO: 2652504 - DNA, 25 bp, Homo sapien
tgtcgctgccagcacaggattcctg

SEQ ID NO: 2652505 - DNA, 25 bp, Homo sapien
aattcggtcgatcacaaaattcctg

SEQ ID NO: 2652506 - DNA, 25 bp, Homo sapien
tgccttcgttccttcatactgtaga

SEQ ID NO: 2652507 - DNA, 25 bp, Homo sapien
tctttatgatggcaacagaattctc

SEQ ID NO: 2652508 - DNA, 25 bp, Homo sapien
tttatgatggcaacagaattctcca

SEQ ID NO: 2652509 - DNA, 25 bp, Homo sapien
gcttctttatgatggcaacagaatt

SEQ ID NO: 2652510 - DNA, 25 bp, Homo sapien
tatgatggcaacagaattctccata

SEQ ID NO: 2652511 - DNA, 25 bp, Homo sapien
tagtattcaagtcctcaacacacat

SEQ ID NO: 2652512 - DNA, 25 bp, Homo sapien
tagagttccctctaatcaggacaac

SEQ ID NO: 2652513 - DNA, 25 bp, Homo sapien
catcagtttgcagtttaccatttgt

SEQ ID NO: 2652514 - DNA, 25 bp, Homo sapien
taagtgcctcgatttatgaatagca

SEQ ID NO: 2652515 - DNA, 25 bp, Homo sapien
tcggcgtcgagccaaaagattacta

SEQ ID NO: 2652516 - DNA, 25 bp, Homo sapien
cctttgtgtactgcaatatcctttc

SEQ ID NO: 2652517 - DNA, 25 bp, Homo sapien
gagtgaccaacagaatgcattctgg

SEQ ID NO: 2652518 - DNA, 25 bp, Homo sapien
cagggtattttgtaatacgctgagt

SEQ ID NO: 2652519 - DNA, 25 bp, Homo sapien
gtctttaattaagcaaagcgctttg

SEQ ID NO: 2652520 - DNA, 25 bp, Homo sapien
gcaaagcgctttgcgtaagtcttta

SEQ ID NO: 2652521 - DNA, 25 bp, Homo sapien
cgctttgcgtaagtctttatgttcc

SEQ ID NO: 2652522 - DNA, 25 bp, Homo sapien
taagcaaagcgctttgcgtaagtct

SEQ ID NO: 2652523 - DNA, 25 bp, Homo sapien
caatcttatttaggatctcaagcca

SEQ ID NO: 2652524 - DNA, 25 bp, Homo sapien
ggccatcatataacagagtcctttc

SEQ ID NO: 2652525 - DNA, 25 bp, Homo sapien
gttttccagtaaacaaggccatcat

SEQ ID NO: 2652526 - DNA, 25 bp, Homo sapien
gaaacgacctgtagcagttttccag

SEQ ID NO: 2652527 - DNA, 25 bp, Homo sapien
agagcagcacatcagttagaagtag

SEQ ID NO: 2652528 - DNA, 25 bp, Homo sapien
gagcagcacatcagttagaagtaga

SEQ ID NO: 2652529 - DNA, 25 bp, Homo sapien
aacggctgcaaagatgtatttctgg

SEQ ID NO: 2652530 - DNA, 25 bp, Homo sapien
gcaaagatgtatttctggtcttttt

SEQ ID NO: 2652531 - DNA, 25 bp, Homo sapien
ctgcaaagatgtatttctggtcttt

SEQ ID NO: 2652532 - DNA, 25 bp, Homo sapien
ggctgcaaagatgtatttctggtct

SEQ ID NO: 2652533 - DNA, 25 bp, Homo sapien
ggatccgtctcatccagttattgcg

SEQ ID NO: 2652534 - DNA, 25 bp, Homo sapien
tctcaggaccagcagatgaagcact

SEQ ID NO: 2652535 - DNA, 25 bp, Homo sapien
cctccttggaattggtgtgaatttc

SEQ ID NO: 2652536 - DNA, 25 bp, Homo sapien
tttctacagcctgctggatccgtct

SEQ ID NO: 2652537 - DNA, 25 bp, Homo sapien
ttcatcagattcacttgtccttccc

SEQ ID NO: 2652538 - DNA, 25 bp, Homo sapien
tcctcttgtcttcatcagattcact

SEQ ID NO: 2652539 - DNA, 25 bp, Homo sapien
tttggccactctggcttcagctttc

SEQ ID NO: 2652540 - DNA, 25 bp, Homo sapien
attgctgaattttggccactctggc

SEQ ID NO: 2652541 - DNA, 25 bp, Homo sapien
tagtatttaccatagaagattatca

SEQ ID NO: 2652542 - DNA, 25 bp, Homo sapien
atagtatttaccatagaagattatc

SEQ ID NO: 2652543 - DNA, 25 bp, Homo sapien
tccaagttcagcatagatatgcagc

SEQ ID NO: 2652544 - DNA, 25 bp, Homo sapien
aatccgctcagttctccaagttcag

SEQ ID NO: 2652545 - DNA, 25 bp, Homo sapien
gggctctagatggacgtcctcaaat

SEQ ID NO: 2652546 - DNA, 25 bp, Homo sapien
gcttctcctccaaatacgcacaaat

SEQ ID NO: 2652547 - DNA, 25 bp, Homo sapien
gagtgtgtccgccaagacagagtct

SEQ ID NO: 2652548 - DNA, 25 bp, Homo sapien
atgattgactcacggcgcccatctg

SEQ ID NO: 2652549 - DNA, 25 bp, Homo sapien
caactgtcctcacatgattgactca

SEQ ID NO: 2652550 - DNA, 25 bp, Homo sapien
tcctggtacatcatgagaactgagt

SEQ ID NO: 2652551 - DNA, 25 bp, Homo sapien
gaccactgtaagctccagggactgt

SEQ ID NO: 2652552 - DNA, 25 bp, Homo sapien
cattgcctttactttacgtgaccac

SEQ ID NO: 2652553 - DNA, 25 bp, Homo sapien
gggactgtgctcaggctcattgcca

SEQ ID NO: 2652554 - DNA, 25 bp, Homo sapien
tcaagtccccttcaaccagagacag

SEQ ID NO: 2652555 - DNA, 25 bp, Homo sapien
tcagttgatgcacatgagattaggt

SEQ ID NO: 2652556 - DNA, 25 bp, Homo sapien
tgtaattgaccgcagggactccttt

SEQ ID NO: 2652557 - DNA, 25 bp, Homo sapien
taagggcttgttctgtaattgaccg

SEQ ID NO: 2652558 - DNA, 25 bp, Homo sapien
cacatgagattaggtttaagggctt

SEQ ID NO: 2652559 - DNA, 25 bp, Homo sapien
agagatgtggatacagacaaggaga

SEQ ID NO: 2652560 - DNA, 25 bp, Homo sapien
tccccagtcatgagagatgtggata

SEQ ID NO: 2652561 - DNA, 25 bp, Homo sapien
cctctcaatggttctggcaaatgcc

SEQ ID NO: 2652562 - DNA, 25 bp, Homo sapien
tggttctggcaaatgccacgggtgt

SEQ ID NO: 2652563 - DNA, 25 bp, Homo sapien
tggctaatacttcacggtctcatag

SEQ ID NO: 2652564 - DNA, 25 bp, Homo sapien
tagtcatacaaaccaagaacctgtc

SEQ ID NO: 2652565 - DNA, 25 bp, Homo sapien
gtagaacaaaagcaaggtctcttgg

SEQ ID NO: 2652566 - DNA, 25 bp, Homo sapien
gagcagcagacgataaacaaggttt

SEQ ID NO: 2652567 - DNA, 25 bp, Homo sapien
ctggatcccgggatccacatccgaa

SEQ ID NO: 2652568 - DNA, 25 bp, Homo sapien
caagtcggttaccacaccctggatc

SEQ ID NO: 2652569 - DNA, 25 bp, Homo sapien
tcccctgcatcagagacggccaagt

SEQ ID NO: 2652570 - DNA, 25 bp, Homo sapien
gatcccgggatccacatccgaacag

SEQ ID NO: 2652571 - DNA, 25 bp, Homo sapien
gaacctggaaaatttctacattcca

SEQ ID NO: 2652572 - DNA, 25 bp, Homo sapien
ctctgattgtgaagaacctggaaaa

SEQ ID NO: 2652573 - DNA, 25 bp, Homo sapien
gtgaagaacctggaaaatttctaca

SEQ ID NO: 2652574 - DNA, 25 bp, Homo sapien
gattgtgaagaacctggaaaatttc

SEQ ID NO: 2652575 - DNA, 25 bp, Homo sapien
ctgaaggctgtataagagacgggtt

SEQ ID NO: 2652576 - DNA, 25 bp, Homo sapien
aggctgtataagagacgggttaaat

SEQ ID NO: 2652577 - DNA, 25 bp, Homo sapien
ctgtataagagacgggttaaattct

SEQ ID NO: 2652578 - DNA, 25 bp, Homo sapien
gaaggctgtataagagacgggttaa

SEQ ID NO: 2652579 - DNA, 25 bp, Homo sapien
tgtgcagcccagacaggtaacactc

SEQ ID NO: 2652580 - DNA, 25 bp, Homo sapien
caggatgaaagcgtaccacctcaga

SEQ ID NO: 2652581 - DNA, 25 bp, Homo sapien
gatccctagattgcatgcacagttc

SEQ ID NO: 2652582 - DNA, 25 bp, Homo sapien
gagttcaggtggtactgctcgcttg

SEQ ID NO: 2652583 - DNA, 25 bp, Homo sapien
taatagatcgctaacaggaggctga

SEQ ID NO: 2652584 - DNA, 25 bp, Homo sapien
ggcgttccagagaggtgtgtctaca

SEQ ID NO: 2652585 - DNA, 25 bp, Homo sapien
taaagcccagaggacattaccaacc

SEQ ID NO: 2652586 - DNA, 25 bp, Homo sapien
tcttctgaatacgaactcggcacat

SEQ ID NO: 2652587 - DNA, 25 bp, Homo sapien
tggatctcaatgtggctgtcctgaa

SEQ ID NO: 2652588 - DNA, 25 bp, Homo sapien
tgaagctggtgcacattggccagct

SEQ ID NO: 2652589 - DNA, 25 bp, Homo sapien
tggagaaccagcctgtggatctcaa

SEQ ID NO: 2652590 - DNA, 25 bp, Homo sapien
tccgcgtcgcgagacttctggtcct

SEQ ID NO: 2652591 - DNA, 25 bp, Homo sapien
tccttagggtaagggcatctcaggc

SEQ ID NO: 2652592 - DNA, 25 bp, Homo sapien
cgcagtgagtgtgcctccaggacaa

SEQ ID NO: 2652593 - DNA, 25 bp, Homo sapien
ggcagagtgcagtgatcccatagga

SEQ ID NO: 2652594 - DNA, 25 bp, Homo sapien
tggaaaaagagcacgctcgcagtga

SEQ ID NO: 2652595 - DNA, 25 bp, Homo sapien
cagtttgtgactgacattcgaaggc

SEQ ID NO: 2652596 - DNA, 25 bp, Homo sapien
tgatgttcactagtcctcaccaagt

SEQ ID NO: 2652597 - DNA, 25 bp, Homo sapien
gaagtatctgatggccggaaccagc

SEQ ID NO: 2652598 - DNA, 25 bp, Homo sapien
gaaccagcggctgtccacagtttgt

SEQ ID NO: 2652599 - DNA, 25 bp, Homo sapien
tacacaagagccaaccattcagagg

SEQ ID NO: 2652600 - DNA, 25 bp, Homo sapien
cattcagagggacaacttcttgttc

SEQ ID NO: 2652601 - DNA, 25 bp, Homo sapien
ggactttgattcactctacacaaga

SEQ ID NO: 2652602 - DNA, 25 bp, Homo sapien
gtaccgatttattcccatgctaggg

SEQ ID NO: 2652603 - DNA, 25 bp, Homo sapien
ttcatgtggagctggtaacacgagc

SEQ ID NO: 2652604 - DNA, 25 bp, Homo sapien
tgaggtacttatggagagacaacac

SEQ ID NO: 2652605 - DNA, 25 bp, Homo sapien
ttctctaagccctatgaccatggtc

SEQ ID NO: 2652606 - DNA, 25 bp, Homo sapien
tcactaacgttacaggaaattgccc

SEQ ID NO: 2652607 - DNA, 25 bp, Homo sapien
cagcagcttgtccaaattaaactgg

SEQ ID NO: 2652608 - DNA, 25 bp, Homo sapien
ggtagagatgaacagacacccgcat

SEQ ID NO: 2652609 - DNA, 25 bp, Homo sapien
catgtggactcccacacttcagcag

SEQ ID NO: 2652610 - DNA, 25 bp, Homo sapien
tctggagcattcacaccatgtggac

SEQ ID NO: 2652611 - DNA, 25 bp, Homo sapien
cattccacattttaagcaaacctta

SEQ ID NO: 2652612 - DNA, 25 bp, Homo sapien
ggatcattaccccatcagtcactgt

SEQ ID NO: 2652613 - DNA, 25 bp, Homo sapien
ccagattctgatacatggagagagt

SEQ ID NO: 2652614 - DNA, 25 bp, Homo sapien
ttgctgaagccggatcattacccca

SEQ ID NO: 2652615 - DNA, 25 bp, Homo sapien
gtagatgtggttccagtccacagtc

SEQ ID NO: 2652616 - DNA, 25 bp, Homo sapien
ccgggggagatgtcaacgtacaact

SEQ ID NO: 2652617 - DNA, 25 bp, Homo sapien
aaagtagatgtggttccagtccaca

SEQ ID NO: 2652618 - DNA, 25 bp, Homo sapien
gtcaacgtacaactgcactttgtca

SEQ ID NO: 2652619 - DNA, 25 bp, Homo sapien
cacaggagcacagtagaagtttggg

SEQ ID NO: 2652620 - DNA, 25 bp, Homo sapien
tctttgaagggtatgccgcatgcag

SEQ ID NO: 2652621 - DNA, 25 bp, Homo sapien
gctctaagaggtctggataccaacc

SEQ ID NO: 2652622 - DNA, 25 bp, Homo sapien
gatcgagatgcaagcgtatcgcctc

SEQ ID NO: 2652623 - DNA, 25 bp, Homo sapien
ggtgagctcagctatactggtgatc

SEQ ID NO: 2652624 - DNA, 25 bp, Homo sapien
ggcctgtgtcaacttgcacacctga

SEQ ID NO: 2652625 - DNA, 25 bp, Homo sapien
gatcaggacccttctatggcctgtg

SEQ ID NO: 2652626 - DNA, 25 bp, Homo sapien
tgtcaacttgcacacctgattttac

SEQ ID NO: 2652627 - DNA, 25 bp, Homo sapien
ggtggacaccatctcaaagactctc

SEQ ID NO: 2652628 - DNA, 25 bp, Homo sapien
tagcatcagctacttagtggccagc

SEQ ID NO: 2652629 - DNA, 25 bp, Homo sapien
ccaccaggtgacatgaattcccaag

SEQ ID NO: 2652630 - DNA, 25 bp, Homo sapien
tggaatcggccatcaagagcaagga

SEQ ID NO: 2652631 - DNA, 25 bp, Homo sapien
gaaacagacattgtgtgccacgtga

SEQ ID NO: 2652632 - DNA, 25 bp, Homo sapien
ggtcaagatgccagaacaaatcagg

SEQ ID NO: 2652633 - DNA, 25 bp, Homo sapien
caagctgacaacatctggacccaag

SEQ ID NO: 2652634 - DNA, 25 bp, Homo sapien
caaatgacgcgatgggaatgcaatc

SEQ ID NO: 2652635 - DNA, 25 bp, Homo sapien
ggatctttggttgctagagaaggca

SEQ ID NO: 2652636 - DNA, 25 bp, Homo sapien
catcttccagtaggaggtgggtcaa

SEQ ID NO: 2652637 - DNA, 25 bp, Homo sapien
cagggccacaggagccgatgaaggt

SEQ ID NO: 2652638 - DNA, 25 bp, Homo sapien
tctttggggacatggtggccttgcc

SEQ ID NO: 2652639 - DNA, 25 bp, Homo sapien
gatgtacaaggcagatgtcttggcg

SEQ ID NO: 2652640 - DNA, 25 bp, Homo sapien
cacagaatggccaagcccaatgaga

SEQ ID NO: 2652641 - DNA, 25 bp, Homo sapien
cgttagagctctctaagattaggaa

SEQ ID NO: 2652642 - DNA, 25 bp, Homo sapien
aatgcagtgcccatatagtcagcca

SEQ ID NO: 2652643 - DNA, 25 bp, Homo sapien
gtgtgaatttgagtcatggggggtt

SEQ ID NO: 2652644 - DNA, 25 bp, Homo sapien
gactcagtgtgggaggtgtccaaat

SEQ ID NO: 2652645 - DNA, 25 bp, Homo sapien
ggggactcagtgtgggaggtgtcca

SEQ ID NO: 2652646 - DNA, 25 bp, Homo sapien
tgtgaatttgagtcatggggggttg

SEQ ID NO: 2652647 - DNA, 25 bp, Homo sapien
taggtactaagcaagtccggactgt

SEQ ID NO: 2652648 - DNA, 25 bp, Homo sapien
tactactcggaaggcaggatatgcc

SEQ ID NO: 2652649 - DNA, 25 bp, Homo sapien
gaggcaactgccctgactgtgaaag

SEQ ID NO: 2652650 - DNA, 25 bp, Homo sapien
tgctgaaccatgtcttgaaacccca

SEQ ID NO: 2652651 - DNA, 25 bp, Homo sapien
atgaatgttttactatggtcctaca

SEQ ID NO: 2652652 - DNA, 25 bp, Homo sapien
ggatgaatctaatagttttccttta

SEQ ID NO: 2652653 - DNA, 25 bp, Homo sapien
tggtcctacacataatgttaaaatt

SEQ ID NO: 2652654 - DNA, 25 bp, Homo sapien
cacttttcacgaggtgagattagat

SEQ ID NO: 2652655 - DNA, 25 bp, Homo sapien
gaaaaaactattgagatccgggtga

SEQ ID NO: 2652656 - DNA, 25 bp, Homo sapien
gattggacttgcctaagtaaaaaca

SEQ ID NO: 2652657 - DNA, 25 bp, Homo sapien
gtagatatccaacttaacaacttta

SEQ ID NO: 2652658 - DNA, 25 bp, Homo sapien
aaatagccagctaaagtcagaaaaa

SEQ ID NO: 2652659 - DNA, 25 bp, Homo sapien
aagtcatcaatccaccccttagcgg

SEQ ID NO: 2652660 - DNA, 25 bp, Homo sapien
ggttatcatgcaagtcatcaatcca

SEQ ID NO: 2652661 - DNA, 25 bp, Homo sapien
aatcttgccttgtgggttatcatgc

SEQ ID NO: 2652662 - DNA, 25 bp, Homo sapien
tagcggtacacttaggcatcctctt

SEQ ID NO: 2652663 - DNA, 25 bp, Homo sapien
gaatctacgcgtatgtgtgctccag

SEQ ID NO: 2652664 - DNA, 25 bp, Homo sapien
tgcctgtctcacattggtagaggga

SEQ ID NO: 2652665 - DNA, 25 bp, Homo sapien
gagcatgaatagtgccccctggtgg

SEQ ID NO: 2652666 - DNA, 25 bp, Homo sapien
gatccagtaagtagggcccaagtct

SEQ ID NO: 2652667 - DNA, 25 bp, Homo sapien
tgcccagtgggctacacaaggctgg

SEQ ID NO: 2652668 - DNA, 25 bp, Homo sapien
gtatcctcacatggcgtggagcaca

SEQ ID NO: 2652669 - DNA, 25 bp, Homo sapien
aaatccaggcggtcaggctctagaa

SEQ ID NO: 2652670 - DNA, 25 bp, Homo sapien
cattaatcctatcctgagggcccca

SEQ ID NO: 2652671 - DNA, 25 bp, Homo sapien
ggccacactcagattcctgtctttg

SEQ ID NO: 2652672 - DNA, 25 bp, Homo sapien
catggtgtcgggctcaagaaaaccc

SEQ ID NO: 2652673 - DNA, 25 bp, Homo sapien
cctatacctcccaatcaaaatgtct

SEQ ID NO: 2652674 - DNA, 25 bp, Homo sapien
caaaatgtctagtgtctcattatac

SEQ ID NO: 2652675 - DNA, 25 bp, Homo sapien
gagtccacactcaggtccaatgtct

SEQ ID NO: 2652676 - DNA, 25 bp, Homo sapien
aggaccacctgcaccggaagtggga

SEQ ID NO: 2652677 - DNA, 25 bp, Homo sapien
catcttgttcgcatgtatgagtcca

SEQ ID NO: 2652678 - DNA, 25 bp, Homo sapien
caccggaagtgggacagatagcaag

SEQ ID NO: 2652679 - DNA, 25 bp, Homo sapien
tgttttggagatagtgacacctcat

SEQ ID NO: 2652680 - DNA, 25 bp, Homo sapien
caaagatgcttcaccctgttttgga

SEQ ID NO: 2652681 - DNA, 25 bp, Homo sapien
tcttattggcaactctcgatcgggt

SEQ ID NO: 2652682 - DNA, 25 bp, Homo sapien
cacaattcctgtagagaggttcaaa

SEQ ID NO: 2652683 - DNA, 25 bp, Homo sapien
caggcccgttgacatatgtagagaa

SEQ ID NO: 2652684 - DNA, 25 bp, Homo sapien
tgccaaatcctcttgcaggcccgtt

SEQ ID NO: 2652685 - DNA, 25 bp, Homo sapien
aatctgtgccctaaacccctgagca

SEQ ID NO: 2652686 - DNA, 25 bp, Homo sapien
tagagaaaaggataccctccacctc

SEQ ID NO: 2652687 - DNA, 25 bp, Homo sapien
tttctggataagctctttatgaggt

SEQ ID NO: 2652688 - DNA, 25 bp, Homo sapien
atgtgaccacagagctcttgttgtt

SEQ ID NO: 2652689 - DNA, 25 bp, Homo sapien
ccagcaatcttcatagctcttaaaa

SEQ ID NO: 2652690 - DNA, 25 bp, Homo sapien
tcttgttgttgagaataccagcaat

SEQ ID NO: 2652691 - DNA, 25 bp, Homo sapien
tgagaataccagcaatcttcatagc

SEQ ID NO: 2652692 - DNA, 25 bp, Homo sapien
aggacacggccaaggtgaggagcag

SEQ ID NO: 2652693 - DNA, 25 bp, Homo sapien
gaggacacggccaaggtgaggagca

SEQ ID NO: 2652694 - DNA, 25 bp, Homo sapien
ggacacggccaaggtgaggagcagc

SEQ ID NO: 2652695 - DNA, 25 bp, Homo sapien
aggaggacacggccaaggtgaggag

SEQ ID NO: 2652696 - DNA, 25 bp, Homo sapien
tggtgacaggcagattggtgacttc

SEQ ID NO: 2652697 - DNA, 25 bp, Homo sapien
gggtccatggcggtagccgtggtga

SEQ ID NO: 2652698 - DNA, 25 bp, Homo sapien
tccatggcggtagccgtggtgacag

SEQ ID NO: 2652699 - DNA, 25 bp, Homo sapien
gcagattggtgacttcagatcccat

SEQ ID NO: 2652700 - DNA, 25 bp, Homo sapien
gccactccgagcttgaatcacacat

SEQ ID NO: 2652701 - DNA, 25 bp, Homo sapien
cctttttgccactccgagcttgaat

SEQ ID NO: 2652702 - DNA, 25 bp, Homo sapien
atcctttttgccactccgagcttga

SEQ ID NO: 2652703 - DNA, 25 bp, Homo sapien
ttttgccactccgagcttgaatcac

SEQ ID NO: 2652704 - DNA, 25 bp, Homo sapien
gtctaccagaatttctccatgagaa

SEQ ID NO: 2652705 - DNA, 25 bp, Homo sapien
tactattgtctaccagaatttctcc

SEQ ID NO: 2652706 - DNA, 25 bp, Homo sapien
tattgtctaccagaatttctccatg

SEQ ID NO: 2652707 - DNA, 25 bp, Homo sapien
ttttcttactattgtctaccagaat

SEQ ID NO: 2652708 - DNA, 25 bp, Homo sapien
tgcactccgaaaggacctaggaact

SEQ ID NO: 2652709 - DNA, 25 bp, Homo sapien
cttataccacccgtaaagggatgag

SEQ ID NO: 2652710 - DNA, 25 bp, Homo sapien
aaaacacccccaggtcatggcttat

SEQ ID NO: 2652711 - DNA, 25 bp, Homo sapien
ggcatggcttgcactccgaaaggac

SEQ ID NO: 2652712 - DNA, 25 bp, Homo sapien
ttctgctccttcctacccaccacag

SEQ ID NO: 2652713 - DNA, 25 bp, Homo sapien
gaacttctgctccttcctacccacc

SEQ ID NO: 2652714 - DNA, 25 bp, Homo sapien
cttctgctccttcctacccaccaca

SEQ ID NO: 2652715 - DNA, 25 bp, Homo sapien
ctggaacttctgctccttcctaccc

SEQ ID NO: 2652716 - DNA, 25 bp, Homo sapien
ggagggatggaaactccaggtctcc

SEQ ID NO: 2652717 - DNA, 25 bp, Homo sapien
tccaggatagaagggaccacagtga

SEQ ID NO: 2652718 - DNA, 25 bp, Homo sapien
acgtttacaacatactgatgccggg

SEQ ID NO: 2652719 - DNA, 25 bp, Homo sapien
ggcaactgtgcgtggtgaaatcatg

SEQ ID NO: 2652720 - DNA, 25 bp, Homo sapien
tcaaactgtatgctccttaggcccc

SEQ ID NO: 2652721 - DNA, 25 bp, Homo sapien
ctttgtaaacaaggagaatctgaat

SEQ ID NO: 2652722 - DNA, 25 bp, Homo sapien
atctgaatggatgttaagggtggca

SEQ ID NO: 2652723 - DNA, 25 bp, Homo sapien
tctgaatggatgttaagggtggcat

SEQ ID NO: 2652724 - DNA, 25 bp, Homo sapien
tgtaaacaaggagaatctgaatgga

SEQ ID NO: 2652725 - DNA, 25 bp, Homo sapien
aaaacggtggactccaggcagaaga

SEQ ID NO: 2652726 - DNA, 25 bp, Homo sapien
ccagattgagggaaaacggtggact

SEQ ID NO: 2652727 - DNA, 25 bp, Homo sapien
tctgagaggacgctcctctctctgc

SEQ ID NO: 2652728 - DNA, 25 bp, Homo sapien
cgggaatatgagagtgagagaagca

SEQ ID NO: 2652729 - DNA, 25 bp, Homo sapien
tgagactataggtcccacttggaac

SEQ ID NO: 2652730 - DNA, 25 bp, Homo sapien
tcttggctccctactgagtgcagag

SEQ ID NO: 2652731 - DNA, 25 bp, Homo sapien
tcagtagactcgagttcaaggcaat

SEQ ID NO: 2652732 - DNA, 25 bp, Homo sapien
taaaaactccctggctacaacagca

SEQ ID NO: 2652733 - DNA, 25 bp, Homo sapien
ggtctggaatgtagcccattaatgt

SEQ ID NO: 2652734 - DNA, 25 bp, Homo sapien
agaagatcgtcagccttgggtctgg

SEQ ID NO: 2652735 - DNA, 25 bp, Homo sapien
actcctttgaagaagatcgtcagcc

SEQ ID NO: 2652736 - DNA, 25 bp, Homo sapien
gaatgtagcccattaatgttcccct

SEQ ID NO: 2652737 - DNA, 25 bp, Homo sapien
ctgcagggttttgtggtcagtcaca

SEQ ID NO: 2652738 - DNA, 25 bp, Homo sapien
tcagtcacagtggagactgacaccc

SEQ ID NO: 2652739 - DNA, 25 bp, Homo sapien
gtcagtcacagtggagactgacacc

SEQ ID NO: 2652740 - DNA, 25 bp, Homo sapien
cagggttttgtggtcagtcacagtg

SEQ ID NO: 2652741 - DNA, 25 bp, Homo sapien
aaatagagatgtgtattaggcagcc

SEQ ID NO: 2652742 - DNA, 25 bp, Homo sapien
taggcagccacatgggcatattagg

SEQ ID NO: 2652743 - DNA, 25 bp, Homo sapien
ccacatgggcatattagggtctggg

SEQ ID NO: 2652744 - DNA, 25 bp, Homo sapien
tgtgtattaggcagccacatgggca

SEQ ID NO: 2652745 - DNA, 25 bp, Homo sapien
cctggttggcccgttcaatctattt

SEQ ID NO: 2652746 - DNA, 25 bp, Homo sapien
aagttctgcattcaggagttgtggc

SEQ ID NO: 2652747 - DNA, 25 bp, Homo sapien
gaggcacgctgctggattaagttct

SEQ ID NO: 2652748 - DNA, 25 bp, Homo sapien
tataaagttgacagcccaaatccta

SEQ ID NO: 2652749 - DNA, 25 bp, Homo sapien
gaagcaacagagtcagagtcctgac

SEQ ID NO: 2652750 - DNA, 25 bp, Homo sapien
ccatggtcccacagctaagaagcaa

SEQ ID NO: 2652751 - DNA, 25 bp, Homo sapien
aagcaacagagtcagagtcctgact

SEQ ID NO: 2652752 - DNA, 25 bp, Homo sapien
gcaacagagtcagagtcctgactca

SEQ ID NO: 2652753 - DNA, 25 bp, Homo sapien
tagaccaaggatgtagatcacttcc

SEQ ID NO: 2652754 - DNA, 25 bp, Homo sapien
catttgtagaccaaggatgtagatc

SEQ ID NO: 2652755 - DNA, 25 bp, Homo sapien
aacatttgtagaccaaggatgtaga

SEQ ID NO: 2652756 - DNA, 25 bp, Homo sapien
tttgtagaccaaggatgtagatcac

SEQ ID NO: 2652757 - DNA, 25 bp, Homo sapien
tcttggaacctaaacagcattttct

SEQ ID NO: 2652758 - DNA, 25 bp, Homo sapien
tagttctcaccttcttggaacctaa

SEQ ID NO: 2652759 - DNA, 25 bp, Homo sapien
ttcttggaacctaaacagcattttc

SEQ ID NO: 2652760 - DNA, 25 bp, Homo sapien
gggctgtagttctcaccttcttgga

SEQ ID NO: 2652761 - DNA, 25 bp, Homo sapien
cacttgagtaacttcaatgtcttct

SEQ ID NO: 2652762 - DNA, 25 bp, Homo sapien
gccaatttcaatctgtagagaacag

SEQ ID NO: 2652763 - DNA, 25 bp, Homo sapien
gctgagcccgaaaaacaacacactt

SEQ ID NO: 2652764 - DNA, 25 bp, Homo sapien
atgtcttctcataaatgcttcccat

SEQ ID NO: 2652765 - DNA, 25 bp, Homo sapien
cacaagtgaaccctcattggcaaga

SEQ ID NO: 2652766 - DNA, 25 bp, Homo sapien
tgtagcacaagtgaaccctcattgg

SEQ ID NO: 2652767 - DNA, 25 bp, Homo sapien
atcctttgtagcacaagtgaaccct

SEQ ID NO: 2652768 - DNA, 25 bp, Homo sapien
tgaaccctcattggcaagacagcca

SEQ ID NO: 2652769 - DNA, 25 bp, Homo sapien
cctgggcacaggaattctggtattc

SEQ ID NO: 2652770 - DNA, 25 bp, Homo sapien
tctcctggaaggtgttgattcgcac

SEQ ID NO: 2652771 - DNA, 25 bp, Homo sapien
cactgctataagttgcttcagggac

SEQ ID NO: 2652772 - DNA, 25 bp, Homo sapien
taagccacaaagaccaaggactctc

SEQ ID NO: 2652773 - DNA, 25 bp, Homo sapien
tcttccccagggcaaggaattcagg

SEQ ID NO: 2652774 - DNA, 25 bp, Homo sapien
tttgagtcactcaaagctatggcag

SEQ ID NO: 2652775 - DNA, 25 bp, Homo sapien
tcactcaaagctatggcagagctct

SEQ ID NO: 2652776 - DNA, 25 bp, Homo sapien
aaagctatggcagagctcttcccca

SEQ ID NO: 2652777 - DNA, 25 bp, Homo sapien
gaagacttctggttgtaatgtagac

SEQ ID NO: 2652778 - DNA, 25 bp, Homo sapien
catgaaatttgagtgatctaggcca

SEQ ID NO: 2652779 - DNA, 25 bp, Homo sapien
caagattcccgtcttccgactgtgt

SEQ ID NO: 2652780 - DNA, 25 bp, Homo sapien
tactgttcctaattgtctcgaagac

SEQ ID NO: 2652781 - DNA, 25 bp, Homo sapien
tagaaaatagatgccaggtcacaga

SEQ ID NO: 2652782 - DNA, 25 bp, Homo sapien
agaaaatagatgccaggtcacagag

SEQ ID NO: 2652783 - DNA, 25 bp, Homo sapien
aacaaaggattgtgtctgaaaccca

SEQ ID NO: 2652784 - DNA, 25 bp, Homo sapien
taagacccttttatgtcacgtgcca

SEQ ID NO: 2652785 - DNA, 25 bp, Homo sapien
agctgccaggctgttccccaaaatg

SEQ ID NO: 2652786 - DNA, 25 bp, Homo sapien
gggacattatgattccaccttggaa

SEQ ID NO: 2652787 - DNA, 25 bp, Homo sapien
tgttccaggcgccaaatatggaggg

SEQ ID NO: 2652788 - DNA, 25 bp, Homo sapien
tgctctccttgccctattttgggca

SEQ ID NO: 2652789 - DNA, 25 bp, Homo sapien
gctctccttgccctattttgggcat

SEQ ID NO: 2652790 - DNA, 25 bp, Homo sapien
ttcttttcccagagtgctctccttg

SEQ ID NO: 2652791 - DNA, 25 bp, Homo sapien
ccactttcttttcccagagtgctct

SEQ ID NO: 2652792 - DNA, 25 bp, Homo sapien
caggtatggaaaatctacagaggca

SEQ ID NO: 2652793 - DNA, 25 bp, Homo sapien
ccattctatctgtgagtagttcagg

SEQ ID NO: 2652794 - DNA, 25 bp, Homo sapien
tacagaggcatcatctttccgatca

SEQ ID NO: 2652795 - DNA, 25 bp, Homo sapien
gattcccaaggttttgcaagtgcct

SEQ ID NO: 2652796 - DNA, 25 bp, Homo sapien
gcatactgcttgagaggaatcacct

SEQ ID NO: 2652797 - DNA, 25 bp, Homo sapien
gagtgcaggtgtgctaaaagatccc

SEQ ID NO: 2652798 - DNA, 25 bp, Homo sapien
cttattagaagatggtgctactggc

SEQ ID NO: 2652799 - DNA, 25 bp, Homo sapien
gatccctgtaatgaagagttctgtc

SEQ ID NO: 2652800 - DNA, 25 bp, Homo sapien
tctggcagatactttcagcattctg

SEQ ID NO: 2652801 - DNA, 25 bp, Homo sapien
gtgtttcacgtttgtttactatctg

SEQ ID NO: 2652802 - DNA, 25 bp, Homo sapien
tgtttactatctggcagatactttc

SEQ ID NO: 2652803 - DNA, 25 bp, Homo sapien
tactatctggcagatactttcagca

SEQ ID NO: 2652804 - DNA, 25 bp, Homo sapien
cggagtctcgaaagactttctttgc

SEQ ID NO: 2652805 - DNA, 25 bp, Homo sapien
gatatactaaccattgagccccacc

SEQ ID NO: 2652806 - DNA, 25 bp, Homo sapien
ctttctttgccctgctaagtgcctg

SEQ ID NO: 2652807 - DNA, 25 bp, Homo sapien
tagacaagtcactgacctctctaag

SEQ ID NO: 2652808 - DNA, 25 bp, Homo sapien
cttctctctatattcctggtgtcta

SEQ ID NO: 2652809 - DNA, 25 bp, Homo sapien
aaggctcggtggttgccaggcactt

SEQ ID NO: 2652810 - DNA, 25 bp, Homo sapien
tatattcctggtgtctagatctgca

SEQ ID NO: 2652811 - DNA, 25 bp, Homo sapien
tagatctgcactaaaaacatgtggt

SEQ ID NO: 2652812 - DNA, 25 bp, Homo sapien
cctcatggcctttgaaaggagccat

SEQ ID NO: 2652813 - DNA, 25 bp, Homo sapien
cagccaggcctcatggcctttgaaa

SEQ ID NO: 2652814 - DNA, 25 bp, Homo sapien
gcctcatggcctttgaaaggagcca

SEQ ID NO: 2652815 - DNA, 25 bp, Homo sapien
caggcctcatggcctttgaaaggag

SEQ ID NO: 2652816 - DNA, 25 bp, Homo sapien
gattcaggctccctaacacccactt

SEQ ID NO: 2652817 - DNA, 25 bp, Homo sapien
caggttcgagggcagtgcctctctc

SEQ ID NO: 2652818 - DNA, 25 bp, Homo sapien
tggtgaggaccgcacgccctcttgc

SEQ ID NO: 2652819 - DNA, 25 bp, Homo sapien
gggcttgagggcaggttcgagggca

SEQ ID NO: 2652820 - DNA, 25 bp, Homo sapien
attgatgacccatactcacccacga

SEQ ID NO: 2652821 - DNA, 25 bp, Homo sapien
ccaaggcattggctagggctccatt

SEQ ID NO: 2652822 - DNA, 25 bp, Homo sapien
gaaagggctattggctgactctgag

SEQ ID NO: 2652823 - DNA, 25 bp, Homo sapien
cccacgagagagagatcagtgctct

SEQ ID NO: 2652824 - DNA, 25 bp, Homo sapien
tcctgtcccttctacttcacctccc

SEQ ID NO: 2652825 - DNA, 25 bp, Homo sapien
agcttggtgtcagtattcttccttc

SEQ ID NO: 2652826 - DNA, 25 bp, Homo sapien
gtcccttctacttcacctcccttca

SEQ ID NO: 2652827 - DNA, 25 bp, Homo sapien
tggtcgaaccagcttggtgtcagta

SEQ ID NO: 2652828 - DNA, 25 bp, Homo sapien
tttgggtacagtagaccccagcctc

SEQ ID NO: 2652829 - DNA, 25 bp, Homo sapien
actttgatccctttgggtacagtag

SEQ ID NO: 2652830 - DNA, 25 bp, Homo sapien
gaactcttctgtatcagtggtttta

SEQ ID NO: 2652831 - DNA, 25 bp, Homo sapien
agcctctcaattaagaactcttctg

SEQ ID NO: 2652832 - DNA, 25 bp, Homo sapien
ccacactgccaaagaactggtggcc

SEQ ID NO: 2652833 - DNA, 25 bp, Homo sapien
gaggtgggtgcagcttcattcttta

SEQ ID NO: 2652834 - DNA, 25 bp, Homo sapien
caagaatgaggaacagagtgggtta

SEQ ID NO: 2652835 - DNA, 25 bp, Homo sapien
gaaacagtttcgttttccacactgc

SEQ ID NO: 2652836 - DNA, 25 bp, Homo sapien
tgctcctccatagagtgtatccttc

SEQ ID NO: 2652837 - DNA, 25 bp, Homo sapien
catagagtgtatccttccgagctcc

SEQ ID NO: 2652838 - DNA, 25 bp, Homo sapien
aaattgtccacataacagccagctg

SEQ ID NO: 2652839 - DNA, 25 bp, Homo sapien
ggccactgccccttgatgatgatct

SEQ ID NO: 2652840 - DNA, 25 bp, Homo sapien
acaagtgttcccgtgcaagcagatg

SEQ ID NO: 2652841 - DNA, 25 bp, Homo sapien
tctttcccggaacaaagctccatgt

SEQ ID NO: 2652842 - DNA, 25 bp, Homo sapien
cattgtctgactgtcgccgtggaca

SEQ ID NO: 2652843 - DNA, 25 bp, Homo sapien
acaggctttgttgccttcagtgcca

SEQ ID NO: 2652844 - DNA, 25 bp, Homo sapien
aggaaggtgcctatgcccctgctgt

SEQ ID NO: 2652845 - DNA, 25 bp, Homo sapien
tccaggaaggtgcctatgcccctgc

SEQ ID NO: 2652846 - DNA, 25 bp, Homo sapien
caggaaggtgcctatgcccctgctg

SEQ ID NO: 2652847 - DNA, 25 bp, Homo sapien
ggaaggtgcctatgcccctgctgtg

SEQ ID NO: 2652848 - DNA, 25 bp, Homo sapien
tttcctggacgtatgttgccttcct

SEQ ID NO: 2652849 - DNA, 25 bp, Homo sapien
aacatttcctggacgtatgttgcct

SEQ ID NO: 2652850 - DNA, 25 bp, Homo sapien
cctggacgtatgttgccttcctgca

SEQ ID NO: 2652851 - DNA, 25 bp, Homo sapien
gacgtatgttgccttcctgcacttc

SEQ ID NO: 2652852 - DNA, 25 bp, Homo sapien
tccatgggtcattaggacgcttcat

SEQ ID NO: 2652853 - DNA, 25 bp, Homo sapien
cgtccatgggtcattaggacgcttc

SEQ ID NO: 2652854 - DNA, 25 bp, Homo sapien
gtccatgggtcattaggacgcttca

SEQ ID NO: 2652855 - DNA, 25 bp, Homo sapien
gctgggcaatgtgccatgagcttgg

SEQ ID NO: 2652856 - DNA, 25 bp, Homo sapien
aaattgccttcacccagcgtacttt

SEQ ID NO: 2652857 - DNA, 25 bp, Homo sapien
ctgccacaaattgccttcacccagc

SEQ ID NO: 2652858 - DNA, 25 bp, Homo sapien
tgtcctcttgggttgaaacccaggc

SEQ ID NO: 2652859 - DNA, 25 bp, Homo sapien
acaaattgccttcacccagcgtact

SEQ ID NO: 2652860 - DNA, 25 bp, Homo sapien
cacaatcaacacagtcttaagttct

SEQ ID NO: 2652861 - DNA, 25 bp, Homo sapien
acaatcaacacagtcttaagttctt

SEQ ID NO: 2652862 - DNA, 25 bp, Homo sapien
gattcctgagttgtacagagtcatt

SEQ ID NO: 2652863 - DNA, 25 bp, Homo sapien
agttgggaagcaggtatggtcccaa

SEQ ID NO: 2652864 - DNA, 25 bp, Homo sapien
ggtatggtcccaacatccacctttc

SEQ ID NO: 2652865 - DNA, 25 bp, Homo sapien
gagttgtacagagtcatttgctcta

SEQ ID NO: 2652866 - DNA, 25 bp, Homo sapien
gtaaaatcctgcagtggcgctcagt

SEQ ID NO: 2652867 - DNA, 25 bp, Homo sapien
gctggtgattctccgtgaatttgca

SEQ ID NO: 2652868 - DNA, 25 bp, Homo sapien
gtgctcctggctcgcatgctcagct

SEQ ID NO: 2652869 - DNA, 25 bp, Homo sapien
tgtgttgccacctcttgggctgagc

SEQ ID NO: 2652870 - DNA, 25 bp, Homo sapien
gtccgtattgatgatggctcatgtc

SEQ ID NO: 2652871 - DNA, 25 bp, Homo sapien
gagtccgtattgatgatggctcatg

SEQ ID NO: 2652872 - DNA, 25 bp, Homo sapien
cagagtccgtattgatgatggctca

SEQ ID NO: 2652873 - DNA, 25 bp, Homo sapien
tcagagtccgtattgatgatggctc

SEQ ID NO: 2652874 - DNA, 25 bp, Homo sapien
aagctttcctaatgcctagatttat

SEQ ID NO: 2652875 - DNA, 25 bp, Homo sapien
tcatttggcacctgcaagcttccag

SEQ ID NO: 2652876 - DNA, 25 bp, Homo sapien
tgatgcaagaagctagatgcgctgc

SEQ ID NO: 2652877 - DNA, 25 bp, Homo sapien
tcatcccaggataccaacagaaggt

SEQ ID NO: 2652878 - DNA, 25 bp, Homo sapien
cagtcagtccctggcaaacctttgg

SEQ ID NO: 2652879 - DNA, 25 bp, Homo sapien
atcaaatcctccacgttcatttcca

SEQ ID NO: 2652880 - DNA, 25 bp, Homo sapien
catttccatgtggaagtaatatctc

SEQ ID NO: 2652881 - DNA, 25 bp, Homo sapien
catgtggaagtaatatctccctttc

SEQ ID NO: 2652882 - DNA, 25 bp, Homo sapien
cacacctctttgtgtccttctctca

SEQ ID NO: 2652883 - DNA, 25 bp, Homo sapien
tgattgagagtcagtcagaccccag

SEQ ID NO: 2652884 - DNA, 25 bp, Homo sapien
ctagaccatgttgaaacagagttga

SEQ ID NO: 2652885 - DNA, 25 bp, Homo sapien
ccatgttgaaacagagttgattgag

SEQ ID NO: 2652886 - DNA, 25 bp, Homo sapien
aaacagagttgattgagagtcagtc

SEQ ID NO: 2652887 - DNA, 25 bp, Homo sapien
tagagtggcatagacttggctccct

SEQ ID NO: 2652888 - DNA, 25 bp, Homo sapien
catgaatggggcgaagaaaatttcc

SEQ ID NO: 2652889 - DNA, 25 bp, Homo sapien
tcaaaaaggttctcatgaatggggc

SEQ ID NO: 2652890 - DNA, 25 bp, Homo sapien
ccagaactgggttctcaggacaaag

SEQ ID NO: 2652891 - DNA, 25 bp, Homo sapien
gtcctccagcccacatcaggtgaca

SEQ ID NO: 2652892 - DNA, 25 bp, Homo sapien
tgcagcgaggtacccatggtgagct

SEQ ID NO: 2652893 - DNA, 25 bp, Homo sapien
ggtgacactgcagcgaggtacccat

SEQ ID NO: 2652894 - DNA, 25 bp, Homo sapien
acatcaggtgacactgcagcgaggt

SEQ ID NO: 2652895 - DNA, 25 bp, Homo sapien
gtatgccatgtgtggaaactttttc

SEQ ID NO: 2652896 - DNA, 25 bp, Homo sapien
agtctttcttcaggcatcctgttgc

SEQ ID NO: 2652897 - DNA, 25 bp, Homo sapien
aagtctttcttcaggcatcctgttg

SEQ ID NO: 2652898 - DNA, 25 bp, Homo sapien
ggagcttgccctggcaggagatctt

SEQ ID NO: 2652899 - DNA, 25 bp, Homo sapien
ttgccctggcaggagatcttcaccc

SEQ ID NO: 2652900 - DNA, 25 bp, Homo sapien
cttcaccccttacatgtccttgtcc

SEQ ID NO: 2652901 - DNA, 25 bp, Homo sapien
atgtccttgtccactcagctggacc

SEQ ID NO: 2652902 - DNA, 25 bp, Homo sapien
tgctttggacacagaggtaaatgct

SEQ ID NO: 2652903 - DNA, 25 bp, Homo sapien
tgggaaccttctccccacatgttgg

SEQ ID NO: 2652904 - DNA, 25 bp, Homo sapien
atttacaacatcttccatggcctga

SEQ ID NO: 2652905 - DNA, 25 bp, Homo sapien
catggcctgagtgctagaagtctta

SEQ ID NO: 2652906 - DNA, 25 bp, Homo sapien
atcaaggcaagtggcttttggcttc

SEQ ID NO: 2652907 - DNA, 25 bp, Homo sapien
tgctggtatataaaagcactatggt

SEQ ID NO: 2652908 - DNA, 25 bp, Homo sapien
aatcaaggcaagtggcttttggctt

SEQ ID NO: 2652909 - DNA, 25 bp, Homo sapien
tttgatatctttgagtcctagcctc

SEQ ID NO: 2652910 - DNA, 25 bp, Homo sapien
tgatatctttgagtcctagcctcat

SEQ ID NO: 2652911 - DNA, 25 bp, Homo sapien
ttgatatctttgagtcctagcctca

SEQ ID NO: 2652912 - DNA, 25 bp, Homo sapien
tgaacggaaaaggagcaatctgggg

SEQ ID NO: 2652913 - DNA, 25 bp, Homo sapien
ctgaacggaaaaggagcaatctggg

SEQ ID NO: 2652914 - DNA, 25 bp, Homo sapien
ttcgcgatgatgagctgcccctctt

SEQ ID NO: 2652915 - DNA, 25 bp, Homo sapien
tgctttcgcgatgatgagctgcccc

SEQ ID NO: 2652916 - DNA, 25 bp, Homo sapien
tgagctgctgctttcgcgatgatga

SEQ ID NO: 2652917 - DNA, 25 bp, Homo sapien
tgctgctttcgcgatgatgagctgc

SEQ ID NO: 2652918 - DNA, 25 bp, Homo sapien
aactttgtagtgtgggatcctgatg

SEQ ID NO: 2652919 - DNA, 25 bp, Homo sapien
caactttgtagtgtgggatcctgat

SEQ ID NO: 2652920 - DNA, 25 bp, Homo sapien
gcctgagatgtgtaccgtcgcttac

SEQ ID NO: 2652921 - DNA, 25 bp, Homo sapien
gatgtgtaccgtcgcttactgcttt

SEQ ID NO: 2652922 - DNA, 25 bp, Homo sapien
gccagtgatgtaacagccacttggg

SEQ ID NO: 2652923 - DNA, 25 bp, Homo sapien
ccacttgggtggtatgaaggcctga

SEQ ID NO: 2652924 - DNA, 25 bp, Homo sapien
ggcactggaccaaggctgccctcat

SEQ ID NO: 2652925 - DNA, 25 bp, Homo sapien
ctcatatgaggtggatgttgaggtg

SEQ ID NO: 2652926 - DNA, 25 bp, Homo sapien
tctaaaaggcactggaccaaggctg

SEQ ID NO: 2652927 - DNA, 25 bp, Homo sapien
gaagaaggtttgtacgaatgctgca

SEQ ID NO: 2652928 - DNA, 25 bp, Homo sapien
ttctggaacattggaggtagatgac

SEQ ID NO: 2652929 - DNA, 25 bp, Homo sapien
ctggtaaccttcgtgagagctggct

SEQ ID NO: 2652930 - DNA, 25 bp, Homo sapien
tcatcataggaagaaggcgagaaag

SEQ ID NO: 2652931 - DNA, 25 bp, Homo sapien
atgacagatggccatgtgttgagga

SEQ ID NO: 2652932 - DNA, 25 bp, Homo sapien
ggctttacatctttgggtcatgcag

SEQ ID NO: 2652933 - DNA, 25 bp, Homo sapien
ccagctgccttggaaatctgcccat

SEQ ID NO: 2652934 - DNA, 25 bp, Homo sapien
gcagttgtccaatttacttccagct

SEQ ID NO: 2652935 - DNA, 25 bp, Homo sapien
ttccagctgccttggaaatctgccc

SEQ ID NO: 2652936 - DNA, 25 bp, Homo sapien
gttgtcagtaggaatataaccagca

SEQ ID NO: 2652937 - DNA, 25 bp, Homo sapien
tcagcaatcctaggaaaggtaaaag

SEQ ID NO: 2652938 - DNA, 25 bp, Homo sapien
aaggcttctgattggcagagtggca

SEQ ID NO: 2652939 - DNA, 25 bp, Homo sapien
tatattgaggcccattatggaggct

SEQ ID NO: 2652940 - DNA, 25 bp, Homo sapien
tcttttggcggcaaagtagaaagca

SEQ ID NO: 2652941 - DNA, 25 bp, Homo sapien
tatgaagcccccagacttcaaactc

SEQ ID NO: 2652942 - DNA, 25 bp, Homo sapien
ggctgacttttgatacctttgaact

SEQ ID NO: 2652943 - DNA, 25 bp, Homo sapien
ttccttcagccttaaaggctgactt

SEQ ID NO: 2652944 - DNA, 25 bp, Homo sapien
gtcttcctggcggacctctgcaaga

SEQ ID NO: 2652945 - DNA, 25 bp, Homo sapien
ccctggagggttaatgggcctgcct

SEQ ID NO: 2652946 - DNA, 25 bp, Homo sapien
gcaaataactgggtcagagatctgt

SEQ ID NO: 2652947 - DNA, 25 bp, Homo sapien
caacagtgatttggtaataggcttc

SEQ ID NO: 2652948 - DNA, 25 bp, Homo sapien
agttctgattgagttctgagggagc

SEQ ID NO: 2652949 - DNA, 25 bp, Homo sapien
tagagcgactcgctcctgagttctg

SEQ ID NO: 2652950 - DNA, 25 bp, Homo sapien
tgagttctgattgagttctgaggga

SEQ ID NO: 2652951 - DNA, 25 bp, Homo sapien
catcttagagcgactcgctcctgag

SEQ ID NO: 2652952 - DNA, 25 bp, Homo sapien
ctagccatgggttatgcactgaggt

SEQ ID NO: 2652953 - DNA, 25 bp, Homo sapien
tcttatttggtaggctccaggtact

SEQ ID NO: 2652954 - DNA, 25 bp, Homo sapien
tacttcttttgaccactttactagc

SEQ ID NO: 2652955 - DNA, 25 bp, Homo sapien
catgtttcttatttggtaggctcca

SEQ ID NO: 2652956 - DNA, 25 bp, Homo sapien
gttgtgggcaaagtctgaaggtatt

SEQ ID NO: 2652957 - DNA, 25 bp, Homo sapien
tcccctgctcttgagttagtctcct

SEQ ID NO: 2652958 - DNA, 25 bp, Homo sapien
gatattgcaaccttccataccccag

SEQ ID NO: 2652959 - DNA, 25 bp, Homo sapien
tatgaagtgaccttgctttcccctg

SEQ ID NO: 2652960 - DNA, 25 bp, Homo sapien
accgtgaccagttcacccatcttta

SEQ ID NO: 2652961 - DNA, 25 bp, Homo sapien
gctccattttcgaccgtgaccagtt

SEQ ID NO: 2652962 - DNA, 25 bp, Homo sapien
gtgaccagttcacccatctttaggc

SEQ ID NO: 2652963 - DNA, 25 bp, Homo sapien
aaactgagtgcggacagccgatcca

SEQ ID NO: 2652964 - DNA, 25 bp, Homo sapien
agattctggtggcaactttctccca

SEQ ID NO: 2652965 - DNA, 25 bp, Homo sapien
ggatgccaaatgctatacccctaga

SEQ ID NO: 2652966 - DNA, 25 bp, Homo sapien
agtagcttctaaggcccctcaaaga

SEQ ID NO: 2652967 - DNA, 25 bp, Homo sapien
tacccctagactactgtggaataga

SEQ ID NO: 2652968 - DNA, 25 bp, Homo sapien
tcctcatggaagtgactgagcatgc

SEQ ID NO: 2652969 - DNA, 25 bp, Homo sapien
tcagggtgctgccaaatcttacaga

SEQ ID NO: 2652970 - DNA, 25 bp, Homo sapien
tcagatatggcaaacctcagggtgc

SEQ ID NO: 2652971 - DNA, 25 bp, Homo sapien
aacagcctgtgtgtagtgattcaac

SEQ ID NO: 2652972 - DNA, 25 bp, Homo sapien
gctgccagagcccatagttgctgac

SEQ ID NO: 2652973 - DNA, 25 bp, Homo sapien
gctgacctcggtactactgctattg

SEQ ID NO: 2652974 - DNA, 25 bp, Homo sapien
ctaccagtagcagacaaaaaagcct

SEQ ID NO: 2652975 - DNA, 25 bp, Homo sapien
tactactgctattggtggctctacc

SEQ ID NO: 2652976 - DNA, 25 bp, Homo sapien
gggaaagtcttagaaagctggcaga

SEQ ID NO: 2652977 - DNA, 25 bp, Homo sapien
ggcaacttgatgtgactggacttga

SEQ ID NO: 2652978 - DNA, 25 bp, Homo sapien
ttaataaggcaacttgatgtgactg

SEQ ID NO: 2652979 - DNA, 25 bp, Homo sapien
gaaagctggcagatccatgtcaatg

SEQ ID NO: 2652980 - DNA, 25 bp, Homo sapien
agacttgctcttggatgctgtcagg

SEQ ID NO: 2652981 - DNA, 25 bp, Homo sapien
agatgtggtggtgagacttgctctt

SEQ ID NO: 2652982 - DNA, 25 bp, Homo sapien
aaatagacaaattggcagctccttg

SEQ ID NO: 2652983 - DNA, 25 bp, Homo sapien
tcaggaagtatcatctgactgcgtt

SEQ ID NO: 2652984 - DNA, 25 bp, Homo sapien
atgcagccaggaaactccaggccat

SEQ ID NO: 2652985 - DNA, 25 bp, Homo sapien
tgcagccaggaaactccaggccatt

SEQ ID NO: 2652986 - DNA, 25 bp, Homo sapien
agccaggaaactccaggccattctc

SEQ ID NO: 2652987 - DNA, 25 bp, Homo sapien
caggaaactccaggccattctccat

SEQ ID NO: 2652988 - DNA, 25 bp, Homo sapien
tctccctttagcacagacaatgcgt

SEQ ID NO: 2652989 - DNA, 25 bp, Homo sapien
tggaacaaccgcttctggttacact

SEQ ID NO: 2652990 - DNA, 25 bp, Homo sapien
cgtttctctgtgctgaaaggtgtca

SEQ ID NO: 2652991 - DNA, 25 bp, Homo sapien
aacagtgtgcggctccatgggaaag

SEQ ID NO: 2652992 - DNA, 25 bp, Homo sapien
agcttgctgccatgaggatagagcc

SEQ ID NO: 2652993 - DNA, 25 bp, Homo sapien
tgtagagtgatgtatcctcttctac

SEQ ID NO: 2652994 - DNA, 25 bp, Homo sapien
tgttgtcctgtgtgttgtagagtga

SEQ ID NO: 2652995 - DNA, 25 bp, Homo sapien
tcttctacctcaacgaccactaggt

SEQ ID NO: 2652996 - DNA, 25 bp, Homo sapien
agtcctgaatgatggtattgttgca

SEQ ID NO: 2652997 - DNA, 25 bp, Homo sapien
tgagtcctctgggaaccaaaagtcc

SEQ ID NO: 2652998 - DNA, 25 bp, Homo sapien
tgttgcacttgattgcctctgagga

SEQ ID NO: 2652999 - DNA, 25 bp, Homo sapien
ccaaaagtcctgaatgatggtattg

SEQ ID NO: 2653000 - DNA, 25 bp, Homo sapien
ctgtgctctcgggtcttggtctgga

SEQ ID NO: 2653001 - DNA, 25 bp, Homo sapien
gagtgaggctcgtaacaccatttcc

SEQ ID NO: 2653002 - DNA, 25 bp, Homo sapien
tggatcctttgttggtggctgctgc

SEQ ID NO: 2653003 - DNA, 25 bp, Homo sapien
agcccctccggcgtggatcctttgt

SEQ ID NO: 2653004 - DNA, 25 bp, Homo sapien
taccctctggcctgttctgatctgt

SEQ ID NO: 2653005 - DNA, 25 bp, Homo sapien
ctaacccttaagttgccggctcgtg

SEQ ID NO: 2653006 - DNA, 25 bp, Homo sapien
cacagaatccgtaggaagtgggacc

SEQ ID NO: 2653007 - DNA, 25 bp, Homo sapien
tccctgggtgttgttcacaggcagc

SEQ ID NO: 2653008 - DNA, 25 bp, Homo sapien
tctttctcttctagtaatgcactgc

SEQ ID NO: 2653009 - DNA, 25 bp, Homo sapien
caactttatcatatgagaatccaga

SEQ ID NO: 2653010 - DNA, 25 bp, Homo sapien
tgatagctttagtgtcttgtccagg

SEQ ID NO: 2653011 - DNA, 25 bp, Homo sapien
cttgatatttggcactagaagcccc

SEQ ID NO: 2653012 - DNA, 25 bp, Homo sapien
tcgtattactgttaaacacactctt

SEQ ID NO: 2653013 - DNA, 25 bp, Homo sapien
tgcctggactggcaatcaccagcct

SEQ ID NO: 2653014 - DNA, 25 bp, Homo sapien
ttttgccatgggtcttgtgtccgtg

SEQ ID NO: 2653015 - DNA, 25 bp, Homo sapien
ccatggtgtcatgtggttgctggct

SEQ ID NO: 2653016 - DNA, 25 bp, Homo sapien
ctagaaaacgacagaatatgaagct

SEQ ID NO: 2653017 - DNA, 25 bp, Homo sapien
gacagaatatgaagcttactacttt

SEQ ID NO: 2653018 - DNA, 25 bp, Homo sapien
tgaagcttactacttttactctttc

SEQ ID NO: 2653019 - DNA, 25 bp, Homo sapien
tttactctttcagcttgactcttaa

SEQ ID NO: 2653020 - DNA, 25 bp, Homo sapien
tggtgcagttcacaggctcctgtta

SEQ ID NO: 2653021 - DNA, 25 bp, Homo sapien
gttcacaggctcctgttacataagc

SEQ ID NO: 2653022 - DNA, 25 bp, Homo sapien
aagcagcaactgaaaagttgacttc

SEQ ID NO: 2653023 - DNA, 25 bp, Homo sapien
ataagcagcaactgaaaagttgact

SEQ ID NO: 2653024 - DNA, 25 bp, Homo sapien
taaaacccttctggcagttctccaa

SEQ ID NO: 2653025 - DNA, 25 bp, Homo sapien
agcctgcagaaagtctattgctggt

SEQ ID NO: 2653026 - DNA, 25 bp, Homo sapien
cctgcagaaagtctattgctggtat

SEQ ID NO: 2653027 - DNA, 25 bp, Homo sapien
gcagaaagtctattgctggtattta

SEQ ID NO: 2653028 - DNA, 25 bp, Homo sapien
aagtctattgctggtatttatgcta

SEQ ID NO: 2653029 - DNA, 25 bp, Homo sapien
gccagactggctgatgaaggagttt

SEQ ID NO: 2653030 - DNA, 25 bp, Homo sapien
agacactgtatccataggaacctga

SEQ ID NO: 2653031 - DNA, 25 bp, Homo sapien
agactggctgatgaaggagttttgc

SEQ ID NO: 2653032 - DNA, 25 bp, Homo sapien
tgtgatgtggccagactggctgatg

SEQ ID NO: 2653033 - DNA, 25 bp, Homo sapien
ttcttgaaatccgtccagcatgcag

SEQ ID NO: 2653034 - DNA, 25 bp, Homo sapien
aaatcaccctgtagtttggacagtc

SEQ ID NO: 2653035 - DNA, 25 bp, Homo sapien
attatcttcttgaaatccgtccagc

SEQ ID NO: 2653036 - DNA, 25 bp, Homo sapien
ccaaatcaccctgtagtttggacag

SEQ ID NO: 2653037 - DNA, 25 bp, Homo sapien
ctgttgttgttagacccagaacggg

SEQ ID NO: 2653038 - DNA, 25 bp, Homo sapien
ggttgttcatatgactcagattggc

SEQ ID NO: 2653039 - DNA, 25 bp, Homo sapien
ccggggctgttgttgttagacccag

SEQ ID NO: 2653040 - DNA, 25 bp, Homo sapien
gggttgttcatatgactcagattgg

SEQ ID NO: 2653041 - DNA, 25 bp, Homo sapien
agccatgggtggtcctgagacttct

SEQ ID NO: 2653042 - DNA, 25 bp, Homo sapien
tcagtcttccccagcagccatgggt

SEQ ID NO: 2653043 - DNA, 25 bp, Homo sapien
tttatcaaaggagctcccttcagtc

SEQ ID NO: 2653044 - DNA, 25 bp, Homo sapien
tatctttgtttatcaaaggagctcc

SEQ ID NO: 2653045 - DNA, 25 bp, Homo sapien
tgagcaaaggcacgatatccaaaaa

SEQ ID NO: 2653046 - DNA, 25 bp, Homo sapien
cagctgagcaaaggcacgatatcca

SEQ ID NO: 2653047 - DNA, 25 bp, Homo sapien
aatgtgaaggtagctggtgagggac

SEQ ID NO: 2653048 - DNA, 25 bp, Homo sapien
aaggcacgatatccaaaaaagaggg

SEQ ID NO: 2653049 - DNA, 25 bp, Homo sapien
tcagtttatttaggagcatatgtgc

SEQ ID NO: 2653050 - DNA, 25 bp, Homo sapien
gagaaatctgggaacacaggttttc

SEQ ID NO: 2653051 - DNA, 25 bp, Homo sapien
caggaggactgatctttatgttaac

SEQ ID NO: 2653052 - DNA, 25 bp, Homo sapien
catatgtgctgacaattggcttccg

SEQ ID NO: 2653053 - DNA, 25 bp, Homo sapien
cattgaggacccagaactggtctgc

SEQ ID NO: 2653054 - DNA, 25 bp, Homo sapien
acatcctgctgggacgcaaccattc

SEQ ID NO: 2653055 - DNA, 25 bp, Homo sapien
gatctgggggaacagactcctcagg

SEQ ID NO: 2653056 - DNA, 25 bp, Homo sapien
accattctactggacctctaggctg

SEQ ID NO: 2653057 - DNA, 25 bp, Homo sapien
ccatctgaccatgtcagatcccaag

SEQ ID NO: 2653058 - DNA, 25 bp, Homo sapien
ccaattaaagagacgaagattctcg

SEQ ID NO: 2653059 - DNA, 25 bp, Homo sapien
gaagattctcgatttcaccccagct

SEQ ID NO: 2653060 - DNA, 25 bp, Homo sapien
cccaagtatttgtctgtgctccaat

SEQ ID NO: 2653061 - DNA, 25 bp, Homo sapien
cagggtgaacagatttgcagagtgg

SEQ ID NO: 2653062 - DNA, 25 bp, Homo sapien
gctggtgctactcccttgatgagga

SEQ ID NO: 2653063 - DNA, 25 bp, Homo sapien
gggcagcctatctggggaattaaat

SEQ ID NO: 2653064 - DNA, 25 bp, Homo sapien
ggtggggcactccatagttcccgtg

SEQ ID NO: 2653065 - DNA, 25 bp, Homo sapien
gaggaagaataagtacactgtttgt

SEQ ID NO: 2653066 - DNA, 25 bp, Homo sapien
attaaacaggagtcagtgccacaaa

SEQ ID NO: 2653067 - DNA, 25 bp, Homo sapien
gagccaattaaacaggagtcagtgc

SEQ ID NO: 2653068 - DNA, 25 bp, Homo sapien
gaagaataagtacactgtttgtaag

SEQ ID NO: 2653069 - DNA, 25 bp, Homo sapien
aaagttgagtgtgagtttcgttggc

SEQ ID NO: 2653070 - DNA, 25 bp, Homo sapien
gatacatctctccttagtattctgt

SEQ ID NO: 2653071 - DNA, 25 bp, Homo sapien
cttttaaagttgagtgtgagtttcg

SEQ ID NO: 2653072 - DNA, 25 bp, Homo sapien
cttcttttaaagttgagtgtgagtt

SEQ ID NO: 2653073 - DNA, 25 bp, Homo sapien
cactacgtgtgcatctggagcttgt

SEQ ID NO: 2653074 - DNA, 25 bp, Homo sapien
cattttagtcaaattgaatgccaag

SEQ ID NO: 2653075 - DNA, 25 bp, Homo sapien
gactctagtgtccatattgacagga

SEQ ID NO: 2653076 - DNA, 25 bp, Homo sapien
aatggagccaaatgtcaatggcacc

SEQ ID NO: 2653077 - DNA, 25 bp, Homo sapien
gctattttgtgtcacagataagaca

SEQ ID NO: 2653078 - DNA, 25 bp, Homo sapien
agctgtgtctcccttaaatctgtaa

SEQ ID NO: 2653079 - DNA, 25 bp, Homo sapien
ttttttgggtaagcactgcatcttg

SEQ ID NO: 2653080 - DNA, 25 bp, Homo sapien
gggtaagcactgcatcttgctatct

SEQ ID NO: 2653081 - DNA, 25 bp, Homo sapien
gagaatttgtcaagcgcaatagcat

SEQ ID NO: 2653082 - DNA, 25 bp, Homo sapien
tagcattaggcagagctctgttggg

SEQ ID NO: 2653083 - DNA, 25 bp, Homo sapien
caagcgcaatagcattaggcagagc

SEQ ID NO: 2653084 - DNA, 25 bp, Homo sapien
tttgtcaagcgcaatagcattaggc

SEQ ID NO: 2653085 - DNA, 25 bp, Homo sapien
cagtttgcagctagaatcacgcttg

SEQ ID NO: 2653086 - DNA, 25 bp, Homo sapien
gagtgcaatagccagggatattcca

SEQ ID NO: 2653087 - DNA, 25 bp, Homo sapien
gccctcatagaatgaccctgatcac

SEQ ID NO: 2653088 - DNA, 25 bp, Homo sapien
ccctgatcacgctgattcttcctgg

SEQ ID NO: 2653089 - DNA, 25 bp, Homo sapien
tccttgtcttactgtacaccctcat

SEQ ID NO: 2653090 - DNA, 25 bp, Homo sapien
ttgtcttactgtacaccctcatttc

SEQ ID NO: 2653091 - DNA, 25 bp, Homo sapien
tagcaacaagacagcatgcagaggg

SEQ ID NO: 2653092 - DNA, 25 bp, Homo sapien
agcaacaagacagcatgcagagggg

SEQ ID NO: 2653093 - DNA, 25 bp, Homo sapien
ggaagaggatattctttgaatagtg

SEQ ID NO: 2653094 - DNA, 25 bp, Homo sapien
tttgccgtgattggtggtattttcc

SEQ ID NO: 2653095 - DNA, 25 bp, Homo sapien
ttttgttgtcgttgccctctgctct

SEQ ID NO: 2653096 - DNA, 25 bp, Homo sapien
ctcttctgacagacggttttgccgt

SEQ ID NO: 2653097 - DNA, 25 bp, Homo sapien
cacacacaagtgcaaatgaacatgt

SEQ ID NO: 2653098 - DNA, 25 bp, Homo sapien
tgagtaaaacgtcagggccagtttg

SEQ ID NO: 2653099 - DNA, 25 bp, Homo sapien
agtaaaattgctctgggtctcaaga

SEQ ID NO: 2653100 - DNA, 25 bp, Homo sapien
gaggcccttgttgttccttcatgcc

SEQ ID NO: 2653101 - DNA, 25 bp, Homo sapien
agcaccagatgagggaaagggatcc

SEQ ID NO: 2653102 - DNA, 25 bp, Homo sapien
ttaatggcttttctcagaagcacca

SEQ ID NO: 2653103 - DNA, 25 bp, Homo sapien
tagtgcccattctttgtgttgagcc

SEQ ID NO: 2653104 - DNA, 25 bp, Homo sapien
gggatcctcttctgccatgatagtg

SEQ ID NO: 2653105 - DNA, 25 bp, Homo sapien
gcaaaggggaatgcgtggtactcct

SEQ ID NO: 2653106 - DNA, 25 bp, Homo sapien
attcccatggcagcatccaagcatt

SEQ ID NO: 2653107 - DNA, 25 bp, Homo sapien
ggcagcatccaagcattttattaca

SEQ ID NO: 2653108 - DNA, 25 bp, Homo sapien
ttattacaatcgcaaaggggaatgc

SEQ ID NO: 2653109 - DNA, 25 bp, Homo sapien
atcttagcactaagtgtttcactgg

SEQ ID NO: 2653110 - DNA, 25 bp, Homo sapien
taagtgtttcactggactcagtctt

SEQ ID NO: 2653111 - DNA, 25 bp, Homo sapien
tgcagggagtgtggcatgccctggg

SEQ ID NO: 2653112 - DNA, 25 bp, Homo sapien
gggggtgtcgtcatcattgccatct

SEQ ID NO: 2653113 - DNA, 25 bp, Homo sapien
ggcctggtctgaaaggtgggcctgg

SEQ ID NO: 2653114 - DNA, 25 bp, Homo sapien
tgggcctggagcctagtggagagag

SEQ ID NO: 2653115 - DNA, 25 bp, Homo sapien
ggcaggcctggtctgaaaggtgggc

SEQ ID NO: 2653116 - DNA, 25 bp, Homo sapien
cctggagcctagtggagagagacaa

SEQ ID NO: 2653117 - DNA, 25 bp, Homo sapien
cattctcctttagctgacctcggta

SEQ ID NO: 2653118 - DNA, 25 bp, Homo sapien
gaaactttgttcctgatccaaggct

SEQ ID NO: 2653119 - DNA, 25 bp, Homo sapien
tacaaccatggtacgaagctgcggt

SEQ ID NO: 2653120 - DNA, 25 bp, Homo sapien
ggtgtaccgctcagatgctttttgc

SEQ ID NO: 2653121 - DNA, 25 bp, Homo sapien
tccaccctttcagcctgtccaacac

SEQ ID NO: 2653122 - DNA, 25 bp, Homo sapien
cggtggcagtagcaggagctctgaa

SEQ ID NO: 2653123 - DNA, 25 bp, Homo sapien
tctgaaggaggttgtcctgcgccgc

SEQ ID NO: 2653124 - DNA, 25 bp, Homo sapien
aattccagaagaccgatcagtctct

SEQ ID NO: 2653125 - DNA, 25 bp, Homo sapien
tgcctggtcagacagaggcggtgtc

SEQ ID NO: 2653126 - DNA, 25 bp, Homo sapien
tgtacttcaattgacttccatttct

SEQ ID NO: 2653127 - DNA, 25 bp, Homo sapien
cttcagtttcatgtgtacttcaatt

SEQ ID NO: 2653128 - DNA, 25 bp, Homo sapien
ttgactccctttgatctcttactat

SEQ ID NO: 2653129 - DNA, 25 bp, Homo sapien
gactccctttgatctcttactattc

SEQ ID NO: 2653130 - DNA, 25 bp, Homo sapien
gaatacaacttgaagtttctgcaca

SEQ ID NO: 2653131 - DNA, 25 bp, Homo sapien
catgatttggatagaaacattccag

SEQ ID NO: 2653132 - DNA, 25 bp, Homo sapien
gacttgacatgatttggatagaaac

SEQ ID NO: 2653133 - DNA, 25 bp, Homo sapien
gcttctggtgcccacgttttgactt

SEQ ID NO: 2653134 - DNA, 25 bp, Homo sapien
gaaaagcttgaaagacggatcaaca

SEQ ID NO: 2653135 - DNA, 25 bp, Homo sapien
tactaataggatgcagattgccgtc

SEQ ID NO: 2653136 - DNA, 25 bp, Homo sapien
gaagctctcatttctaggcgctggg

SEQ ID NO: 2653137 - DNA, 25 bp, Homo sapien
cggatcaacaagacaagttgctgct

SEQ ID NO: 2653138 - DNA, 25 bp, Homo sapien
aagttgttctctggtctcagtccag

SEQ ID NO: 2653139 - DNA, 25 bp, Homo sapien
aaagttgttctctggtctcagtcca

SEQ ID NO: 2653140 - DNA, 25 bp, Homo sapien
cactcttagggtggtctttacagaa

SEQ ID NO: 2653141 - DNA, 25 bp, Homo sapien
ttccatttcagccactcttagggtg

SEQ ID NO: 2653142 - DNA, 25 bp, Homo sapien
ctctcccatatccagctccctttct

SEQ ID NO: 2653143 - DNA, 25 bp, Homo sapien
ccaataagtaactccaacctccaag

SEQ ID NO: 2653144 - DNA, 25 bp, Homo sapien
acacgctcttctgatgttgatactg

SEQ ID NO: 2653145 - DNA, 25 bp, Homo sapien
accaagttctatggcccaacccgtg

SEQ ID NO: 2653146 - DNA, 25 bp, Homo sapien
taagtaaacacgctcttctgatgtt

SEQ ID NO: 2653147 - DNA, 25 bp, Homo sapien
cctccaggccacgaatgatattgcc

SEQ ID NO: 2653148 - DNA, 25 bp, Homo sapien
ggatttcagtcaacacatggaggtg

SEQ ID NO: 2653149 - DNA, 25 bp, Homo sapien
catggaggtgtttgaaatgatctgc

SEQ ID NO: 2653150 - DNA, 25 bp, Homo sapien
tctggttcaaattctgtctacctgc

SEQ ID NO: 2653151 - DNA, 25 bp, Homo sapien
tttctttccttgaaccatctggttc

SEQ ID NO: 2653152 - DNA, 25 bp, Homo sapien
tggctgcatcacatgtagcaattac

SEQ ID NO: 2653153 - DNA, 25 bp, Homo sapien
ttactcccccagggatacatcgcat

SEQ ID NO: 2653154 - DNA, 25 bp, Homo sapien
gctgcatcacatgtagcaattactc

SEQ ID NO: 2653155 - DNA, 25 bp, Homo sapien
gcatcacatgtagcaattactcccc

SEQ ID NO: 2653156 - DNA, 25 bp, Homo sapien
agccttcctcttgcatggcagtagg

SEQ ID NO: 2653157 - DNA, 25 bp, Homo sapien
ccactagagctgattggagatagct

SEQ ID NO: 2653158 - DNA, 25 bp, Homo sapien
ggccttttcaaagagttccactaga

SEQ ID NO: 2653159 - DNA, 25 bp, Homo sapien
ttgcatggcagtaggttggccttgc

SEQ ID NO: 2653160 - DNA, 25 bp, Homo sapien
ttgctgccagaagaaccatttgcag

SEQ ID NO: 2653161 - DNA, 25 bp, Homo sapien
ctgccagaagaaccatttgcagaga

SEQ ID NO: 2653162 - DNA, 25 bp, Homo sapien
gaaataatttctatactctgaggag

SEQ ID NO: 2653163 - DNA, 25 bp, Homo sapien
taatttctatactctgaggagaagt

SEQ ID NO: 2653164 - DNA, 25 bp, Homo sapien
gcccagctcgctttgtgagtcctgg

SEQ ID NO: 2653165 - DNA, 25 bp, Homo sapien
accataatctttatctctgcaaaga

SEQ ID NO: 2653166 - DNA, 25 bp, Homo sapien
agcccagctcgctttgtgagtcctg

SEQ ID NO: 2653167 - DNA, 25 bp, Homo sapien
ttggcaaccataatctttatctctg

SEQ ID NO: 2653168 - DNA, 25 bp, Homo sapien
tgactctgtaaggtggtccgaggag

SEQ ID NO: 2653169 - DNA, 25 bp, Homo sapien
ggtggtccgaggagacctgccgctg

SEQ ID NO: 2653170 - DNA, 25 bp, Homo sapien
ggctgagcctgactgtgagaaaccc

SEQ ID NO: 2653171 - DNA, 25 bp, Homo sapien
gaaggtgattcacagggctgagcct

SEQ ID NO: 2653172 - DNA, 25 bp, Homo sapien
gtttgacaggaggatcattcggttc

SEQ ID NO: 2653173 - DNA, 25 bp, Homo sapien
atgatgttgaagacccgtggaaacc

SEQ ID NO: 2653174 - DNA, 25 bp, Homo sapien
gatcattcggttctgtgctgtgtga

SEQ ID NO: 2653175 - DNA, 25 bp, Homo sapien
caagtgcatgatgttgaagacccgt

SEQ ID NO: 2653176 - DNA, 25 bp, Homo sapien
caaaaaccttggcataagacagaga

SEQ ID NO: 2653177 - DNA, 25 bp, Homo sapien
tgtagggaactttctggactcccac

SEQ ID NO: 2653178 - DNA, 25 bp, Homo sapien
aacacataacaaagggcagccctcc

SEQ ID NO: 2653179 - DNA, 25 bp, Homo sapien
gaaacgtcccacactttgaagcaaa

SEQ ID NO: 2653180 - DNA, 25 bp, Homo sapien
aatgcaaatgtctaattgtccccca

SEQ ID NO: 2653181 - DNA, 25 bp, Homo sapien
tgggcatagtcagtgtcgtttatat

SEQ ID NO: 2653182 - DNA, 25 bp, Homo sapien
tatattgtagcagttacagctctgt

SEQ ID NO: 2653183 - DNA, 25 bp, Homo sapien
acagctctgtagtttatgatgcaaa

SEQ ID NO: 2653184 - DNA, 25 bp, Homo sapien
tagcaagttctagaaggtctccaag

SEQ ID NO: 2653185 - DNA, 25 bp, Homo sapien
cagtggcccctattgagaagttttc

SEQ ID NO: 2653186 - DNA, 25 bp, Homo sapien
tgtgtttgtccgtccatgccatgaa

SEQ ID NO: 2653187 - DNA, 25 bp, Homo sapien
tatacttcagtgctcacccgtaggc

SEQ ID NO: 2653188 - DNA, 25 bp, Homo sapien
ctgtgggtccgagagggaagctggc

SEQ ID NO: 2653189 - DNA, 25 bp, Homo sapien
gggtccgagagggaagctggctggg

SEQ ID NO: 2653190 - DNA, 25 bp, Homo sapien
ccgagagggaagctggctgggctgg

SEQ ID NO: 2653191 - DNA, 25 bp, Homo sapien
gtgggtccgagagggaagctggctg

SEQ ID NO: 2653192 - DNA, 25 bp, Homo sapien
gagcttgaagcctccacaccagctg

SEQ ID NO: 2653193 - DNA, 25 bp, Homo sapien
tctctctgaggacagagcttgaagc

SEQ ID NO: 2653194 - DNA, 25 bp, Homo sapien
gaggacagagcttgaagcctccaca

SEQ ID NO: 2653195 - DNA, 25 bp, Homo sapien
ctgctgctggagattcaaagcccaa

SEQ ID NO: 2653196 - DNA, 25 bp, Homo sapien
tagattctgtagcactggcatgccg

SEQ ID NO: 2653197 - DNA, 25 bp, Homo sapien
tagctgctggcacctacgtgtggac

SEQ ID NO: 2653198 - DNA, 25 bp, Homo sapien
cgtgtggactgacgaactttgagaa

SEQ ID NO: 2653199 - DNA, 25 bp, Homo sapien
ccaaacttgggctgttgaggcctga

SEQ ID NO: 2653200 - DNA, 25 bp, Homo sapien
ccactccgagaaggcgttagcaacg

SEQ ID NO: 2653201 - DNA, 25 bp, Homo sapien
cattcagcgatgcaagactttggac

SEQ ID NO: 2653202 - DNA, 25 bp, Homo sapien
gatgtgacagcaaagcgcatgagct

SEQ ID NO: 2653203 - DNA, 25 bp, Homo sapien
tagcaacgccgcagtagtgagtgcc

SEQ ID NO: 2653204 - DNA, 25 bp, Homo sapien
agatgtctgggtttatgataccctg

SEQ ID NO: 2653205 - DNA, 25 bp, Homo sapien
taccctgcacgaggagtggtccaag

SEQ ID NO: 2653206 - DNA, 25 bp, Homo sapien
gggtttatgataccctgcacgagga

SEQ ID NO: 2653207 - DNA, 25 bp, Homo sapien
aatggggtctcaaaagatgtctggg

SEQ ID NO: 2653208 - DNA, 25 bp, Homo sapien
gaaaggcttgtgtacgagtctgcaa

SEQ ID NO: 2653209 - DNA, 25 bp, Homo sapien
tatgacctgaagaagcgctattgct

SEQ ID NO: 2653210 - DNA, 25 bp, Homo sapien
ggagtttcaagacatccgggatgca

SEQ ID NO: 2653211 - DNA, 25 bp, Homo sapien
ccaggacatggtagtgcaactcttg

SEQ ID NO: 2653212 - DNA, 25 bp, Homo sapien
cttaaaaatgctcgaaagatgattc

SEQ ID NO: 2653213 - DNA, 25 bp, Homo sapien
ggcttaaaaatgctcgaaagatgat

SEQ ID NO: 2653214 - DNA, 25 bp, Homo sapien
taaaaatgctcgaaagatgattcat

SEQ ID NO: 2653215 - DNA, 25 bp, Homo sapien
gcttaaaaatgctcgaaagatgatt

SEQ ID NO: 2653216 - DNA, 25 bp, Homo sapien
tgcacagacaccctgagtgcgggca

SEQ ID NO: 2653217 - DNA, 25 bp, Homo sapien
aggaaagttggggccatgcacagac

SEQ ID NO: 2653218 - DNA, 25 bp, Homo sapien
aagttggggccatgcacagacaccc

SEQ ID NO: 2653219 - DNA, 25 bp, Homo sapien
gcacagacaccctgagtgcgggcat

SEQ ID NO: 2653220 - DNA, 25 bp, Homo sapien
tctcctctgcggaaagcagcgcttt

SEQ ID NO: 2653221 - DNA, 25 bp, Homo sapien
tcccctccgcggtgcaatgtctggg

SEQ ID NO: 2653222 - DNA, 25 bp, Homo sapien
gagccgagctaaggatacagtcagc

SEQ ID NO: 2653223 - DNA, 25 bp, Homo sapien
catcgccggagaggtcgaccggcct

SEQ ID NO: 2653224 - DNA, 25 bp, Homo sapien
gagggcaaggggagctcttctcggt

SEQ ID NO: 2653225 - DNA, 25 bp, Homo sapien
agagggcaaggggagctcttctcgg

SEQ ID NO: 2653226 - DNA, 25 bp, Homo sapien
tcttctcggtgcggagatcacggtg

SEQ ID NO: 2653227 - DNA, 25 bp, Homo sapien
tctcggtgcggagatcacggtgccc

SEQ ID NO: 2653228 - DNA, 25 bp, Homo sapien
gaggggtgagcgtgctccgagcact

SEQ ID NO: 2653229 - DNA, 25 bp, Homo sapien
tcgcgaggggtgagcgtgctccgag

SEQ ID NO: 2653230 - DNA, 25 bp, Homo sapien
tgttcgcgaggggtgagcgtgctcc

SEQ ID NO: 2653231 - DNA, 25 bp, Homo sapien
gtgtgttcgcgaggggtgagcgtgc

SEQ ID NO: 2653232 - DNA, 25 bp, Homo sapien
tgccccggacctgttgcaggcgctg

SEQ ID NO: 2653233 - DNA, 25 bp, Homo sapien
tgagacgaccggttcgtcgcctcct

SEQ ID NO: 2653234 - DNA, 25 bp, Homo sapien
aggcgaacgccatcggtagccggtc

SEQ ID NO: 2653235 - DNA, 25 bp, Homo sapien
gaactcagttgtgcgttgcggccag

SEQ ID NO: 2653236 - DNA, 25 bp, Homo sapien
cttccgcggcgcctgcagtggcagg

SEQ ID NO: 2653237 - DNA, 25 bp, Homo sapien
ctccttccgcggcgcctgcagtggc

SEQ ID NO: 2653238 - DNA, 25 bp, Homo sapien
cgcctccttccgcggcgcctgcagt

SEQ ID NO: 2653239 - DNA, 25 bp, Homo sapien
tccttccgcggcgcctgcagtggca

SEQ ID NO: 2653240 - DNA, 25 bp, Homo sapien
tcttgtccttcggtactatttgagt

SEQ ID NO: 2653241 - DNA, 25 bp, Homo sapien
tccttcggtactatttgagtgtgcc

SEQ ID NO: 2653242 - DNA, 25 bp, Homo sapien
tcctcttgtccttcggtactatttg

SEQ ID NO: 2653243 - DNA, 25 bp, Homo sapien
cggtactatttgagtgtgcctccat

SEQ ID NO: 2653244 - DNA, 25 bp, Homo sapien
tgtgctacagtgttccattcctggt

SEQ ID NO: 2653245 - DNA, 25 bp, Homo sapien
tatcttcagacccttctataattgg

SEQ ID NO: 2653246 - DNA, 25 bp, Homo sapien
gaagagggcactattgctttaccca

SEQ ID NO: 2653247 - DNA, 25 bp, Homo sapien
tggaaacccgcatttgtgttctgtg

SEQ ID NO: 2653248 - DNA, 25 bp, Homo sapien
tgtgggatccagatccgtccgcagg

SEQ ID NO: 2653249 - DNA, 25 bp, Homo sapien
tattcagcggtcctgagctcaccat

SEQ ID NO: 2653250 - DNA, 25 bp, Homo sapien
agatccgtccgcaggtcaaacacca

SEQ ID NO: 2653251 - DNA, 25 bp, Homo sapien
ggtccctggacatttcacctcccat

SEQ ID NO: 2653252 - DNA, 25 bp, Homo sapien
ctccaccctctctgggagcctctct

SEQ ID NO: 2653253 - DNA, 25 bp, Homo sapien
accctctctgggagcctctcttggg

SEQ ID NO: 2653254 - DNA, 25 bp, Homo sapien
tgggagcctctcttggggggctcac

SEQ ID NO: 2653255 - DNA, 25 bp, Homo sapien
caccctctctgggagcctctcttgg

SEQ ID NO: 2653256 - DNA, 25 bp, Homo sapien
tcctgttcttgtcgctgtgttgacc

SEQ ID NO: 2653257 - DNA, 25 bp, Homo sapien
agagggcacagccaacgaagcagca

SEQ ID NO: 2653258 - DNA, 25 bp, Homo sapien
tcagaaaggttatggagtgactgtg

SEQ ID NO: 2653259 - DNA, 25 bp, Homo sapien
gaggctaaagggttcctatcagaaa

SEQ ID NO: 2653260 - DNA, 25 bp, Homo sapien
gaagacgccacatgacatgtgaggc

SEQ ID NO: 2653261 - DNA, 25 bp, Homo sapien
cagaagacgccacatgacatgtgag

SEQ ID NO: 2653262 - DNA, 25 bp, Homo sapien
tcagaagacgccacatgacatgtga

SEQ ID NO: 2653263 - DNA, 25 bp, Homo sapien
agacgccacatgacatgtgaggcac

SEQ ID NO: 2653264 - DNA, 25 bp, Homo sapien
cttctattggaggcccaccccactt

SEQ ID NO: 2653265 - DNA, 25 bp, Homo sapien
tttcttctattggaggcccacccca

SEQ ID NO: 2653266 - DNA, 25 bp, Homo sapien
ttcttctattggaggcccaccccac

SEQ ID NO: 2653267 - DNA, 25 bp, Homo sapien
tcttctattggaggcccaccccact

SEQ ID NO: 2653268 - DNA, 25 bp, Homo sapien
taaacagtcattaaactggacactc

SEQ ID NO: 2653269 - DNA, 25 bp, Homo sapien
tcatagctccccagagaaatgctct

SEQ ID NO: 2653270 - DNA, 25 bp, Homo sapien
atgcaaggtatattttcatagctcc

SEQ ID NO: 2653271 - DNA, 25 bp, Homo sapien
aagggaaccactcagaaaattgcag

SEQ ID NO: 2653272 - DNA, 25 bp, Homo sapien
gaagatatatgaacaagttataaaa

SEQ ID NO: 2653273 - DNA, 25 bp, Homo sapien
tatatgaacaagttataaaaaaaca

SEQ ID NO: 2653274 - DNA, 25 bp, Homo sapien
ctgaagatatatgaacaagttataa

SEQ ID NO: 2653275 - DNA, 25 bp, Homo sapien
tatgaacaagttataaaaaaacaga

SEQ ID NO: 2653276 - DNA, 25 bp, Homo sapien
gcaaagaaaaagttagcttctgctg

SEQ ID NO: 2653277 - DNA, 25 bp, Homo sapien
agcaaagaaaaagttagcttctgct

SEQ ID NO: 2653278 - DNA, 25 bp, Homo sapien
tagcaaagaaaaagttagcttctgc

SEQ ID NO: 2653279 - DNA, 25 bp, Homo sapien
tctgccgagccggagcctcgggacc

SEQ ID NO: 2653280 - DNA, 25 bp, Homo sapien
gcgcggccgcgggtgagtcaccgag

SEQ ID NO: 2653281 - DNA, 25 bp, Homo sapien
gctttccgcccggtctgccgagccg

SEQ ID NO: 2653282 - DNA, 25 bp, Homo sapien
gcccggatcagaggaagcgcggccg

SEQ ID NO: 2653283 - DNA, 25 bp, Homo sapien
ggggcagccccagcccgcacagctc

SEQ ID NO: 2653284 - DNA, 25 bp, Homo sapien
ggccggggcagccccagcccgcaca

SEQ ID NO: 2653285 - DNA, 25 bp, Homo sapien
ggcggccggggcagccccagcccgc

SEQ ID NO: 2653286 - DNA, 25 bp, Homo sapien
gggcagccccagcccgcacagctcc

SEQ ID NO: 2653287 - DNA, 25 bp, Homo sapien
gcagtgtcgccaacagcagcgccag

SEQ ID NO: 2653288 - DNA, 25 bp, Homo sapien
cagcagtgtcgccaacagcagcgcc

SEQ ID NO: 2653289 - DNA, 25 bp, Homo sapien
agcagtgtcgccaacagcagcgcca

SEQ ID NO: 2653290 - DNA, 25 bp, Homo sapien
ccagcagtgtcgccaacagcagcgc

SEQ ID NO: 2653291 - DNA, 25 bp, Homo sapien
tcaccaagagcggcaggggccacag

SEQ ID NO: 2653292 - DNA, 25 bp, Homo sapien
accaagagcggcaggggccacagcg

SEQ ID NO: 2653293 - DNA, 25 bp, Homo sapien
caccaagagcggcaggggccacagc

SEQ ID NO: 2653294 - DNA, 25 bp, Homo sapien
ttcaccaagagcggcaggggccaca

SEQ ID NO: 2653295 - DNA, 25 bp, Homo sapien
atgtagaagttctccggggcgagat

SEQ ID NO: 2653296 - DNA, 25 bp, Homo sapien
ggcccgccgtggaattggggctgtg

SEQ ID NO: 2653297 - DNA, 25 bp, Homo sapien
aagttctccggggcgagatgcagca

SEQ ID NO: 2653298 - DNA, 25 bp, Homo sapien
gtggctgatgtagaagttctccggg

SEQ ID NO: 2653299 - DNA, 25 bp, Homo sapien
tctgcagccaaagggtgagagagac

SEQ ID NO: 2653300 - DNA, 25 bp, Homo sapien
cctgtctgcagccaaagggtgagag

SEQ ID NO: 2653301 - DNA, 25 bp, Homo sapien
gtgagagagacagaggcgctatcta

SEQ ID NO: 2653302 - DNA, 25 bp, Homo sapien
agagagacagaggcgctatctaggg

SEQ ID NO: 2653303 - DNA, 25 bp, Homo sapien
tcagcaggttcatgatgccacttgt

SEQ ID NO: 2653304 - DNA, 25 bp, Homo sapien
ctgactgaagggtgattgagacaag

SEQ ID NO: 2653305 - DNA, 25 bp, Homo sapien
gcctggaattcagcaggttcatgat

SEQ ID NO: 2653306 - DNA, 25 bp, Homo sapien
aagactcatctgaagatatgttggg

SEQ ID NO: 2653307 - DNA, 25 bp, Homo sapien
ctagcatggagtcagtttttggcac

SEQ ID NO: 2653308 - DNA, 25 bp, Homo sapien
tttttggcacttaagtccgtcagcg

SEQ ID NO: 2653309 - DNA, 25 bp, Homo sapien
tccgtcagcgagcacctgggatata

SEQ ID NO: 2653310 - DNA, 25 bp, Homo sapien
aactcactggttgagaactcagtgg

SEQ ID NO: 2653311 - DNA, 25 bp, Homo sapien
ccatctcaattcaggttgcaaaacc

SEQ ID NO: 2653312 - DNA, 25 bp, Homo sapien
gattccttggcaacgtaatgaccat

SEQ ID NO: 2653313 - DNA, 25 bp, Homo sapien
taagaacagctatggaattgaagag

SEQ ID NO: 2653314 - DNA, 25 bp, Homo sapien
tctgagtgctgagtatcaattgaaa

SEQ ID NO: 2653315 - DNA, 25 bp, Homo sapien
tcctcagaggaaatacttatcgggc

SEQ ID NO: 2653316 - DNA, 25 bp, Homo sapien
cctgcacgtgtgttgatatataaac

SEQ ID NO: 2653317 - DNA, 25 bp, Homo sapien
cagggtccacctctacacataatta

SEQ ID NO: 2653318 - DNA, 25 bp, Homo sapien
tgacatagatgtacacggaaggaga

SEQ ID NO: 2653319 - DNA, 25 bp, Homo sapien
agtttcctaaacatgtcattgatat

SEQ ID NO: 2653320 - DNA, 25 bp, Homo sapien
cacacacacttttgttaatccctca

SEQ ID NO: 2653321 - DNA, 25 bp, Homo sapien
caatgacacacaataagtttcctaa

SEQ ID NO: 2653322 - DNA, 25 bp, Homo sapien
ttctcccaagcacatgacctatttc

SEQ ID NO: 2653323 - DNA, 25 bp, Homo sapien
gctccccaaactctgttggccttaa

SEQ ID NO: 2653324 - DNA, 25 bp, Homo sapien
aaactctgttggccttaaggacagc

SEQ ID NO: 2653325 - DNA, 25 bp, Homo sapien
ccaaactctgttggccttaaggaca

SEQ ID NO: 2653326 - DNA, 25 bp, Homo sapien
gccttaaggacagccactggttctt

SEQ ID NO: 2653327 - DNA, 25 bp, Homo sapien
gaatcttgataaactaactggctaa

SEQ ID NO: 2653328 - DNA, 25 bp, Homo sapien
tccataagaatcttgataaactaac

SEQ ID NO: 2653329 - DNA, 25 bp, Homo sapien
agttccataagaatcttgataaact

SEQ ID NO: 2653330 - DNA, 25 bp, Homo sapien
taagaatcttgataaactaactggc

SEQ ID NO: 2653331 - DNA, 25 bp, Homo sapien
aaaccttggagaatcaataatggtg

SEQ ID NO: 2653332 - DNA, 25 bp, Homo sapien
aaccttggagaatcaataatggtgg

SEQ ID NO: 2653333 - DNA, 25 bp, Homo sapien
taatgtctggatgtatcaatcaaaa

SEQ ID NO: 2653334 - DNA, 25 bp, Homo sapien
actggcagataatgtctggatgtat

SEQ ID NO: 2653335 - DNA, 25 bp, Homo sapien
cacagcatcatttctgctttattcc

SEQ ID NO: 2653336 - DNA, 25 bp, Homo sapien
acacagcatcatttctgctttattc

SEQ ID NO: 2653337 - DNA, 25 bp, Homo sapien
aagaacacagcatcatttctgcttt

SEQ ID NO: 2653338 - DNA, 25 bp, Homo sapien
gaacacagcatcatttctgctttat

SEQ ID NO: 2653339 - DNA, 25 bp, Homo sapien
ctcagagggtctacaagcaatgaca

SEQ ID NO: 2653340 - DNA, 25 bp, Homo sapien
gacacagaaaagaccgggacaggga

SEQ ID NO: 2653341 - DNA, 25 bp, Homo sapien
ggtagtgccggtagtcccatccatt

SEQ ID NO: 2653342 - DNA, 25 bp, Homo sapien
gaaggacttccagtgaccaaagctg

SEQ ID NO: 2653343 - DNA, 25 bp, Homo sapien
ccagtgaagaacattaaacttatta

SEQ ID NO: 2653344 - DNA, 25 bp, Homo sapien
gtcatcaactatgtgccagtgaaga

SEQ ID NO: 2653345 - DNA, 25 bp, Homo sapien
aagactggtcatcaactatgtgcca

SEQ ID NO: 2653346 - DNA, 25 bp, Homo sapien
tctgatatgggaaagactggtcatc

SEQ ID NO: 2653347 - DNA, 25 bp, Homo sapien
tagcctacatacctaacattggaga

SEQ ID NO: 2653348 - DNA, 25 bp, Homo sapien
ttttggaattatggccggaggacag

SEQ ID NO: 2653349 - DNA, 25 bp, Homo sapien
gatccattggtccatgatacagtca

SEQ ID NO: 2653350 - DNA, 25 bp, Homo sapien
tgaacactgttaactgagactacca

SEQ ID NO: 2653351 - DNA, 25 bp, Homo sapien
gactcgaattcctcgtaatctggca

SEQ ID NO: 2653352 - DNA, 25 bp, Homo sapien
ttccccaagatagtgtatgcccagg

SEQ ID NO: 2653353 - DNA, 25 bp, Homo sapien
tacggacatcatttggtgtataaac

SEQ ID NO: 2653354 - DNA, 25 bp, Homo sapien
ggcatattcaatcaccatacggaca

SEQ ID NO: 2653355 - DNA, 25 bp, Homo sapien
gattttactacgtcattttattgaa

SEQ ID NO: 2653356 - DNA, 25 bp, Homo sapien
tactcattataaagatctggttttc

SEQ ID NO: 2653357 - DNA, 25 bp, Homo sapien
cattttattgaagctacaagatttt

SEQ ID NO: 2653358 - DNA, 25 bp, Homo sapien
ttttaaaagaagtgtactcattata

SEQ ID NO: 2653359 - DNA, 25 bp, Homo sapien
tcagagtagggtttataggtccaaa

SEQ ID NO: 2653360 - DNA, 25 bp, Homo sapien
tataggtccaaaagagtccaacttg

SEQ ID NO: 2653361 - DNA, 25 bp, Homo sapien
tctactgtaacatggagtcaggagg

SEQ ID NO: 2653362 - DNA, 25 bp, Homo sapien
gaagctgtatgttgtattcagagta

SEQ ID NO: 2653363 - DNA, 25 bp, Homo sapien
catctcctcccaaatgaatgaattg

SEQ ID NO: 2653364 - DNA, 25 bp, Homo sapien
tctcctcccaaatgaatgaattgat

SEQ ID NO: 2653365 - DNA, 25 bp, Homo sapien
ttcatctcctcccaaatgaatgaat

SEQ ID NO: 2653366 - DNA, 25 bp, Homo sapien
cacttcatctcctcccaaatgaatg

SEQ ID NO: 2653367 - DNA, 25 bp, Homo sapien
cctttttgcctcatgaaatcttgaa

SEQ ID NO: 2653368 - DNA, 25 bp, Homo sapien
aaatctgtgccaaagcctttttgcc

SEQ ID NO: 2653369 - DNA, 25 bp, Homo sapien
cttaaaatctgtgccaaagcctttt

SEQ ID NO: 2653370 - DNA, 25 bp, Homo sapien
tgaatgtagaaagattctagtttct

SEQ ID NO: 2653371 - DNA, 25 bp, Homo sapien
tacaaaaagcattaatacagaaata

SEQ ID NO: 2653372 - DNA, 25 bp, Homo sapien
aaaagcattaatacagaaataggct

SEQ ID NO: 2653373 - DNA, 25 bp, Homo sapien
tgatttttcacatctacacttaggc

SEQ ID NO: 2653374 - DNA, 25 bp, Homo sapien
tacacttaggcaaaggatgtagaga

SEQ ID NO: 2653375 - DNA, 25 bp, Homo sapien
ttcctggaattgacaaaatggaatg

SEQ ID NO: 2653376 - DNA, 25 bp, Homo sapien
catctcccaggagattctccctcag

SEQ ID NO: 2653377 - DNA, 25 bp, Homo sapien
tgaagacttcacagggtagccaggg

SEQ ID NO: 2653378 - DNA, 25 bp, Homo sapien
gatggtagtgaagacttcacagggt

SEQ ID NO: 2653379 - DNA, 25 bp, Homo sapien
tcagctttatagcagaagcagctca

SEQ ID NO: 2653380 - DNA, 25 bp, Homo sapien
gctgtcttaaaatggtagggaccac

SEQ ID NO: 2653381 - DNA, 25 bp, Homo sapien
tagggaccacgatctagcctgtcat

SEQ ID NO: 2653382 - DNA, 25 bp, Homo sapien
gcagctcaagttgggaagtgtcaca

SEQ ID NO: 2653383 - DNA, 25 bp, Homo sapien
ctcctgccagacaatggatcccttg

SEQ ID NO: 2653384 - DNA, 25 bp, Homo sapien
tttatcatcaaaaacctcctgccag

SEQ ID NO: 2653385 - DNA, 25 bp, Homo sapien
tgtttatggttgcaataatatccaa

SEQ ID NO: 2653386 - DNA, 25 bp, Homo sapien
aatggatcccttgtttatggttgca

SEQ ID NO: 2653387 - DNA, 25 bp, Homo sapien
tgcaaattcccagttgccccaagaa

SEQ ID NO: 2653388 - DNA, 25 bp, Homo sapien
agtagttagacttgcaaattcccag

SEQ ID NO: 2653389 - DNA, 25 bp, Homo sapien
tgatcagatgcagtcttcacaatgc

SEQ ID NO: 2653390 - DNA, 25 bp, Homo sapien
tacactagaaaggtaatactagtag

SEQ ID NO: 2653391 - DNA, 25 bp, Homo sapien
tgtgactctactgagttcctcagga

SEQ ID NO: 2653392 - DNA, 25 bp, Homo sapien
gagttcctcaggatatgcgctgtct

SEQ ID NO: 2653393 - DNA, 25 bp, Homo sapien
cttcaactattgtgcccggcgcaag

SEQ ID NO: 2653394 - DNA, 25 bp, Homo sapien
tgcgctgtctttccatacttcaact

SEQ ID NO: 2653395 - DNA, 25 bp, Homo sapien
agaaaggattacagggaagccagat

SEQ ID NO: 2653396 - DNA, 25 bp, Homo sapien
agcagaaaggattacagggaagcca

SEQ ID NO: 2653397 - DNA, 25 bp, Homo sapien
taccaaggagcagaaaggattacag

SEQ ID NO: 2653398 - DNA, 25 bp, Homo sapien
ctaagtaccaaggagcagaaaggat

SEQ ID NO: 2653399 - DNA, 25 bp, Homo sapien
caatcttgtccatagctaatcaaat

SEQ ID NO: 2653400 - DNA, 25 bp, Homo sapien
aatcaagaggttccactttatagta

SEQ ID NO: 2653401 - DNA, 25 bp, Homo sapien
tccaatcttgtccatagctaatcaa

SEQ ID NO: 2653402 - DNA, 25 bp, Homo sapien
tcctccaatcttgtccatagctaat

SEQ ID NO: 2653403 - DNA, 25 bp, Homo sapien
tgaagctccacccttcagatgttcc

SEQ ID NO: 2653404 - DNA, 25 bp, Homo sapien
tatcaattcttaatagacctatggt

SEQ ID NO: 2653405 - DNA, 25 bp, Homo sapien
ctcagaatcctaagacaacacagcc

SEQ ID NO: 2653406 - DNA, 25 bp, Homo sapien
atcagtaattatcgctttttggtcc

SEQ ID NO: 2653407 - DNA, 25 bp, Homo sapien
tcttgcccgtggttagcaggacctt

SEQ ID NO: 2653408 - DNA, 25 bp, Homo sapien
caggaccttgggagatgctaatggt

SEQ ID NO: 2653409 - DNA, 25 bp, Homo sapien
tccatctttatcctagggcaacatt

SEQ ID NO: 2653410 - DNA, 25 bp, Homo sapien
agttcaaagcttatacacagaggca

SEQ ID NO: 2653411 - DNA, 25 bp, Homo sapien
gttagttgcatccacatattctccc

SEQ ID NO: 2653412 - DNA, 25 bp, Homo sapien
cataatcttggagtgaggttagttg

SEQ ID NO: 2653413 - DNA, 25 bp, Homo sapien
tattctccccatagacaagcttctc

SEQ ID NO: 2653414 - DNA, 25 bp, Homo sapien
tagacaagcttctccaccaatgaaa

SEQ ID NO: 2653415 - DNA, 25 bp, Homo sapien
ttaattcttaaatgttatcaggtaa

SEQ ID NO: 2653416 - DNA, 25 bp, Homo sapien
cttaaatgttatcaggtaaatccca

SEQ ID NO: 2653417 - DNA, 25 bp, Homo sapien
tcttaaatgttatcaggtaaatccc

SEQ ID NO: 2653418 - DNA, 25 bp, Homo sapien
aaatgttatcaggtaaatcccatac

SEQ ID NO: 2653419 - DNA, 25 bp, Homo sapien
tgtcagtctgtcataggcgtcatcc

SEQ ID NO: 2653420 - DNA, 25 bp, Homo sapien
tgacatctttggaactccagagtct

SEQ ID NO: 2653421 - DNA, 25 bp, Homo sapien
taggcgtcatccatatctctgacat

SEQ ID NO: 2653422 - DNA, 25 bp, Homo sapien
tgcagcggtgccttgtcagtctgtc

SEQ ID NO: 2653423 - DNA, 25 bp, Homo sapien
aatcacactggacttaatagatttc

SEQ ID NO: 2653424 - DNA, 25 bp, Homo sapien
atggagttctaagttacaccaacat

SEQ ID NO: 2653425 - DNA, 25 bp, Homo sapien
tatctataaaacagtcacaagtctg

SEQ ID NO: 2653426 - DNA, 25 bp, Homo sapien
tttgttaggtaacatacatttctat

SEQ ID NO: 2653427 - DNA, 25 bp, Homo sapien
aagaggttgtgcagctattccacgt

SEQ ID NO: 2653428 - DNA, 25 bp, Homo sapien
ccagcataaagaggttgtgcagcta

SEQ ID NO: 2653429 - DNA, 25 bp, Homo sapien
cataaagaggttgtgcagctattcc

SEQ ID NO: 2653430 - DNA, 25 bp, Homo sapien
ggttacaatatccagcataaagagg

SEQ ID NO: 2653431 - DNA, 25 bp, Homo sapien
tcaaaaaacagtctaatatcttatt

SEQ ID NO: 2653432 - DNA, 25 bp, Homo sapien
caaaaaacagtctaatatcttattt

SEQ ID NO: 2653433 - DNA, 25 bp, Homo sapien
aataaagttgattgtagtacagatt

SEQ ID NO: 2653434 - DNA, 25 bp, Homo sapien
aaatgtaataagatagagggtcaaa

SEQ ID NO: 2653435 - DNA, 25 bp, Homo sapien
aatgtaataagatagagggtcaaag

SEQ ID NO: 2653436 - DNA, 25 bp, Homo sapien
agttattactataagtagccttcag

SEQ ID NO: 2653437 - DNA, 25 bp, Homo sapien
actataagtagccttcagaagagtg

SEQ ID NO: 2653438 - DNA, 25 bp, Homo sapien
gaagagtggtatcacaaagttgtgt

SEQ ID NO: 2653439 - DNA, 25 bp, Homo sapien
cttcagaagagtggtatcacaaagt

SEQ ID NO: 2653440 - DNA, 25 bp, Homo sapien
ttcagactcgccaggacaacaaagt

SEQ ID NO: 2653441 - DNA, 25 bp, Homo sapien
ctgaagaaagctgataagcaagttt

SEQ ID NO: 2653442 - DNA, 25 bp, Homo sapien
tattggatttgttcccttagcagaa

SEQ ID NO: 2653443 - DNA, 25 bp, Homo sapien
tgaatcttgaggttacagtagctag

SEQ ID NO: 2653444 - DNA, 25 bp, Homo sapien
attatattcatcttccattggccag

SEQ ID NO: 2653445 - DNA, 25 bp, Homo sapien
cagaaatttggctttgcggttggga

SEQ ID NO: 2653446 - DNA, 25 bp, Homo sapien
tagccagatgctacttgcccagcag

SEQ ID NO: 2653447 - DNA, 25 bp, Homo sapien
gggctttaccctcctcttataggca

SEQ ID NO: 2653448 - DNA, 25 bp, Homo sapien
taagatgagcgcttgctaaatgcca

SEQ ID NO: 2653449 - DNA, 25 bp, Homo sapien
tagctgcagctcgtagagccgaacg

SEQ ID NO: 2653450 - DNA, 25 bp, Homo sapien
tctaagcagccaggtataaatggtc

SEQ ID NO: 2653451 - DNA, 25 bp, Homo sapien
ccaagtccagtgcattagctgcagc

SEQ ID NO: 2653452 - DNA, 25 bp, Homo sapien
tagtcggatggtcatgaaaagaatg

SEQ ID NO: 2653453 - DNA, 25 bp, Homo sapien
aatgatcccatttcgtatagtcgga

SEQ ID NO: 2653454 - DNA, 25 bp, Homo sapien
gcctcccttccctaacataaatgta

SEQ ID NO: 2653455 - DNA, 25 bp, Homo sapien
tattgaaatattgcctacgcctccc

SEQ ID NO: 2653456 - DNA, 25 bp, Homo sapien
ttttgtctaccagtgctgctatgga

SEQ ID NO: 2653457 - DNA, 25 bp, Homo sapien
ggtgtgcaaatagctctgagactct

SEQ ID NO: 2653458 - DNA, 25 bp, Homo sapien
accttggaggttgagcggtgcctaa

SEQ ID NO: 2653459 - DNA, 25 bp, Homo sapien
ggtcatgtggactttaccttggagg

SEQ ID NO: 2653460 - DNA, 25 bp, Homo sapien
ttttctctatcattcggcgaagtcg

SEQ ID NO: 2653461 - DNA, 25 bp, Homo sapien
ccggtcactctgtgtaatgtgtgca

SEQ ID NO: 2653462 - DNA, 25 bp, Homo sapien
gaagtcgactcatctttgttccggt

SEQ ID NO: 2653463 - DNA, 25 bp, Homo sapien
cctcggtgttcgctcagtatggaag

SEQ ID NO: 2653464 - DNA, 25 bp, Homo sapien
ccacggaagaggacaacagggcctc

SEQ ID NO: 2653465 - DNA, 25 bp, Homo sapien
agccacggaagaggacaacagggcc

SEQ ID NO: 2653466 - DNA, 25 bp, Homo sapien
gaagaggacaacagggcctccggac

SEQ ID NO: 2653467 - DNA, 25 bp, Homo sapien
acggaagaggacaacagggcctccg

SEQ ID NO: 2653468 - DNA, 25 bp, Homo sapien
tttaaaacggccgagtgaagagcaa

SEQ ID NO: 2653469 - DNA, 25 bp, Homo sapien
cagccgctggagtgcgaaaacgctc

SEQ ID NO: 2653470 - DNA, 25 bp, Homo sapien
gcggtagagcggagaaagcctattt

SEQ ID NO: 2653471 - DNA, 25 bp, Homo sapien
gaagagcaagaaccacgcagcggtt

SEQ ID NO: 2653472 - DNA, 25 bp, Homo sapien
tttgaacgttcatgagcctctcgac

SEQ ID NO: 2653473 - DNA, 25 bp, Homo sapien
acggtatccatagcgtttacggtgt

SEQ ID NO: 2653474 - DNA, 25 bp, Homo sapien
gtaatccaaacggtatccatagcgt

SEQ ID NO: 2653475 - DNA, 25 bp, Homo sapien
ccaaacggtatccatagcgtttacg

SEQ ID NO: 2653476 - DNA, 25 bp, Homo sapien
cagcatgacgctgtttatggtaaag

SEQ ID NO: 2653477 - DNA, 25 bp, Homo sapien
gcatgacgctgtttatggtaaagct

SEQ ID NO: 2653478 - DNA, 25 bp, Homo sapien
tctcagcatgacgctgtttatggta

SEQ ID NO: 2653479 - DNA, 25 bp, Homo sapien
tattttctcagcatgacgctgttta

SEQ ID NO: 2653480 - DNA, 25 bp, Homo sapien
aagtactttagctcgagattgtccc

SEQ ID NO: 2653481 - DNA, 25 bp, Homo sapien
tattggaaagtactttagctcgaga

SEQ ID NO: 2653482 - DNA, 25 bp, Homo sapien
tgctccctgtggtgtcttttcatca

SEQ ID NO: 2653483 - DNA, 25 bp, Homo sapien
tcttttctgtttaatcatattggaa

SEQ ID NO: 2653484 - DNA, 25 bp, Homo sapien
ctttagtaaccattctcttccatgc

SEQ ID NO: 2653485 - DNA, 25 bp, Homo sapien
taaagccatctccaacaaagcacac

SEQ ID NO: 2653486 - DNA, 25 bp, Homo sapien
caaagcacactttagtaaccattct

SEQ ID NO: 2653487 - DNA, 25 bp, Homo sapien
gcacactttagtaaccattctcttc

SEQ ID NO: 2653488 - DNA, 25 bp, Homo sapien
tatcaaactggaattgactcttata

SEQ ID NO: 2653489 - DNA, 25 bp, Homo sapien
caaactggaattgactcttataaaa

SEQ ID NO: 2653490 - DNA, 25 bp, Homo sapien
tccttatcaaactggaattgactct

SEQ ID NO: 2653491 - DNA, 25 bp, Homo sapien
aactggaattgactcttataaaaca

SEQ ID NO: 2653492 - DNA, 25 bp, Homo sapien
ggcgggcggatcacggagatcgaga

SEQ ID NO: 2653493 - DNA, 25 bp, Homo sapien
gcgggcggatcacggagatcgagac

SEQ ID NO: 2653494 - DNA, 25 bp, Homo sapien
catcctggctaacacggtgaaaccc

SEQ ID NO: 2653495 - DNA, 25 bp, Homo sapien
tggaggagacccagaggagtctttg

SEQ ID NO: 2653496 - DNA, 25 bp, Homo sapien
ctggaggagacccagaggagtcttt

SEQ ID NO: 2653497 - DNA, 25 bp, Homo sapien
gaggagacccagaggagtctttgtt

SEQ ID NO: 2653498 - DNA, 25 bp, Homo sapien
aggagacccagaggagtctttgtta

SEQ ID NO: 2653499 - DNA, 25 bp, Homo sapien
atgaaaaaaggagtggactgtcagc

SEQ ID NO: 2653500 - DNA, 25 bp, Homo sapien
gaaaaaaggagtggactgtcagctt

SEQ ID NO: 2653501 - DNA, 25 bp, Homo sapien
gatgaaaaaaggagtggactgtcag

SEQ ID NO: 2653502 - DNA, 25 bp, Homo sapien
tgaaaaaaggagtggactgtcagct

SEQ ID NO: 2653503 - DNA, 25 bp, Homo sapien
caaggatcagcaggttaaatgactt

SEQ ID NO: 2653504 - DNA, 25 bp, Homo sapien
gattccaagtctttatataactcgg

SEQ ID NO: 2653505 - DNA, 25 bp, Homo sapien
tatataccaggccactatgctagct

SEQ ID NO: 2653506 - DNA, 25 bp, Homo sapien
taaatggtgagtggtaaacagactc

SEQ ID NO: 2653507 - DNA, 25 bp, Homo sapien
tacttcaatgacagtacctttggta

SEQ ID NO: 2653508 - DNA, 25 bp, Homo sapien
tacagtggggatgagggattcttct

SEQ ID NO: 2653509 - DNA, 25 bp, Homo sapien
aattcgctcacatttacttcaatga

SEQ ID NO: 2653510 - DNA, 25 bp, Homo sapien
tccttgtgtcacaaggcccaattcg

SEQ ID NO: 2653511 - DNA, 25 bp, Homo sapien
tgcatttatacatccatcattttca

SEQ ID NO: 2653512 - DNA, 25 bp, Homo sapien
ttgttggtaacctgggcatattttc

SEQ ID NO: 2653513 - DNA, 25 bp, Homo sapien
ttcaggattgttggtaacctgggca

SEQ ID NO: 2653514 - DNA, 25 bp, Homo sapien
tcattttcaggattgttggtaacct

SEQ ID NO: 2653515 - DNA, 25 bp, Homo sapien
taaatctcttcattgcagacatgta

SEQ ID NO: 2653516 - DNA, 25 bp, Homo sapien
tcttcaattggtgtgtagtcctcaa

SEQ ID NO: 2653517 - DNA, 25 bp, Homo sapien
tcacagtaatggcagtttcttcaat

SEQ ID NO: 2653518 - DNA, 25 bp, Homo sapien
gacatgtatggctgtttggtagtat

SEQ ID NO: 2653519 - DNA, 25 bp, Homo sapien
taccttctaaggtttggtcacacca

SEQ ID NO: 2653520 - DNA, 25 bp, Homo sapien
tcaggtgtcatctagtcgtctttca

SEQ ID NO: 2653521 - DNA, 25 bp, Homo sapien
ggaaattgctgaatacccactcaca

SEQ ID NO: 2653522 - DNA, 25 bp, Homo sapien
cacattggttgtactctgaagacag

SEQ ID NO: 2653523 - DNA, 25 bp, Homo sapien
attttagtatatgtgctgccgaagt

SEQ ID NO: 2653524 - DNA, 25 bp, Homo sapien
tgctaattttccctgtattgttcta

SEQ ID NO: 2653525 - DNA, 25 bp, Homo sapien
tatatgtgctgccgaagtgagcact

SEQ ID NO: 2653526 - DNA, 25 bp, Homo sapien
atgctaattttccctgtattgttct

SEQ ID NO: 2653527 - DNA, 25 bp, Homo sapien
cattatttgaggtagctaaggactg

SEQ ID NO: 2653528 - DNA, 25 bp, Homo sapien
tctatagtaagctgatgtcaggtca

SEQ ID NO: 2653529 - DNA, 25 bp, Homo sapien
tagtaaacgctcctatttgtgttag

SEQ ID NO: 2653530 - DNA, 25 bp, Homo sapien
caaaggtaagccagattatttcatt

SEQ ID NO: 2653531 - DNA, 25 bp, Homo sapien
tagaggttgaacttgaagacgtgcc

SEQ ID NO: 2653532 - DNA, 25 bp, Homo sapien
gaaagcacatcttgggagttcagac

SEQ ID NO: 2653533 - DNA, 25 bp, Homo sapien
gatagctgaattttccgaagaaccg

SEQ ID NO: 2653534 - DNA, 25 bp, Homo sapien
gcatatgtgcagacgcctagaagtt

SEQ ID NO: 2653535 - DNA, 25 bp, Homo sapien
acaattttgaagaaattgagttgta

SEQ ID NO: 2653536 - DNA, 25 bp, Homo sapien
tatacacatatagcagaacagaaat

SEQ ID NO: 2653537 - DNA, 25 bp, Homo sapien
aacttagtattaaaattaccatgtg

SEQ ID NO: 2653538 - DNA, 25 bp, Homo sapien
tatcctcaaagtaataacttagtat

SEQ ID NO: 2653539 - DNA, 25 bp, Homo sapien
gagaagggacccgtcatgcatgaca

SEQ ID NO: 2653540 - DNA, 25 bp, Homo sapien
ttgaatctccgacccatactgtgtg

SEQ ID NO: 2653541 - DNA, 25 bp, Homo sapien
tgaacttcccataagactggtagtg

SEQ ID NO: 2653542 - DNA, 25 bp, Homo sapien
tctaagaaggaggaacaacaagtgg

SEQ ID NO: 2653543 - DNA, 25 bp, Homo sapien
atatccactccagcatctatttttt

SEQ ID NO: 2653544 - DNA, 25 bp, Homo sapien
ttttattgtggccatacttacaggg

SEQ ID NO: 2653545 - DNA, 25 bp, Homo sapien
ttatgttcctaccagtagtgtaaaa

SEQ ID NO: 2653546 - DNA, 25 bp, Homo sapien
ttttgataataccacccttacagcc

SEQ ID NO: 2653547 - DNA, 25 bp, Homo sapien
ttcaggcacgacagttgattggctc

SEQ ID NO: 2653548 - DNA, 25 bp, Homo sapien
ctgtttcaggcacgacagttgattg

SEQ ID NO: 2653549 - DNA, 25 bp, Homo sapien
gtttcaggcacgacagttgattggc

SEQ ID NO: 2653550 - DNA, 25 bp, Homo sapien
tcaggcacgacagttgattggctct

SEQ ID NO: 2653551 - DNA, 25 bp, Homo sapien
aatatctgtgatgtgtccattgtgc

SEQ ID NO: 2653552 - DNA, 25 bp, Homo sapien
cacaagtgacgatgtggtcatgctt

SEQ ID NO: 2653553 - DNA, 25 bp, Homo sapien
caggatcatcagtgttggcttccag

SEQ ID NO: 2653554 - DNA, 25 bp, Homo sapien
cacactggcgcccattcttcttata

SEQ ID NO: 2653555 - DNA, 25 bp, Homo sapien
tttgaggcatcagcagcagacatgg

SEQ ID NO: 2653556 - DNA, 25 bp, Homo sapien
ggctcccactggcggagaagctgac

SEQ ID NO: 2653557 - DNA, 25 bp, Homo sapien
ggcatcagcagcagacatggtgctg

SEQ ID NO: 2653558 - DNA, 25 bp, Homo sapien
atggtgctgtcgtggctggcccagg

SEQ ID NO: 2653559 - DNA, 25 bp, Homo sapien
ggaactccgtcttcagattgagaca

SEQ ID NO: 2653560 - DNA, 25 bp, Homo sapien
gctggaactccgtcttcagattgag

SEQ ID NO: 2653561 - DNA, 25 bp, Homo sapien
agcagctggaactccgtcttcagat

SEQ ID NO: 2653562 - DNA, 25 bp, Homo sapien
gcagctggaactccgtcttcagatt

SEQ ID NO: 2653563 - DNA, 25 bp, Homo sapien
ctattctggcgcagcatcttcaaag

SEQ ID NO: 2653564 - DNA, 25 bp, Homo sapien
tgcaatatttgcgacaatctttctc

SEQ ID NO: 2653565 - DNA, 25 bp, Homo sapien
tgatgctattctggcgcagcatctt

SEQ ID NO: 2653566 - DNA, 25 bp, Homo sapien
atatttgcgacaatctttctcatcc

SEQ ID NO: 2653567 - DNA, 25 bp, Homo sapien
caagtgatcttccccctttagcgtc

SEQ ID NO: 2653568 - DNA, 25 bp, Homo sapien
ggtgtgctcagccatacctggctaa

SEQ ID NO: 2653569 - DNA, 25 bp, Homo sapien
atcttccccctttagcgtcctgaat

SEQ ID NO: 2653570 - DNA, 25 bp, Homo sapien
ttccccctttagcgtcctgaatagc

SEQ ID NO: 2653571 - DNA, 25 bp, Homo sapien
cacaagcaggttaatgaggccatag

SEQ ID NO: 2653572 - DNA, 25 bp, Homo sapien
aatctgggtaaataagcccacctga

SEQ ID NO: 2653573 - DNA, 25 bp, Homo sapien
ttggagaggcccaaaagcacagaat

SEQ ID NO: 2653574 - DNA, 25 bp, Homo sapien
cctgagtttgcaagagagtagcaca

SEQ ID NO: 2653575 - DNA, 25 bp, Homo sapien
aaaaagtagattctttctctctgga

SEQ ID NO: 2653576 - DNA, 25 bp, Homo sapien
tttggctcatcctcactttttacat

SEQ ID NO: 2653577 - DNA, 25 bp, Homo sapien
ttggctcatcctcactttttacatg

SEQ ID NO: 2653578 - DNA, 25 bp, Homo sapien
gagaacagtttaaaggttcctcaca

SEQ ID NO: 2653579 - DNA, 25 bp, Homo sapien
ttgctgcaaaggacacgatgttttt

SEQ ID NO: 2653580 - DNA, 25 bp, Homo sapien
tccatctgcatgcatccatgttgct

SEQ ID NO: 2653581 - DNA, 25 bp, Homo sapien
tgcaaaggacacgatgtttttgttt

SEQ ID NO: 2653582 - DNA, 25 bp, Homo sapien
gctgcaaaggacacgatgtttttgt

SEQ ID NO: 2653583 - DNA, 25 bp, Homo sapien
taacttgcatgcacctaagtggcag

SEQ ID NO: 2653584 - DNA, 25 bp, Homo sapien
gaacagaatcctgcgaaggtcggca

SEQ ID NO: 2653585 - DNA, 25 bp, Homo sapien
tccaccgggctatgcgaacagaatc

SEQ ID NO: 2653586 - DNA, 25 bp, Homo sapien
catctccagatgaaagtccgggctc

SEQ ID NO: 2653587 - DNA, 25 bp, Homo sapien
acttgtaattatgccctggaactgg

SEQ ID NO: 2653588 - DNA, 25 bp, Homo sapien
gcttagtatataccagaggaagttt

SEQ ID NO: 2653589 - DNA, 25 bp, Homo sapien
tgtgtcttttccacgcgctaaataa

SEQ ID NO: 2653590 - DNA, 25 bp, Homo sapien
cttattggagtgtcaaagatgatga

SEQ ID NO: 2653591 - DNA, 25 bp, Homo sapien
tgtgctatcacactctcccttgtct

SEQ ID NO: 2653592 - DNA, 25 bp, Homo sapien
ctgtgctatcacactctcccttgtc

SEQ ID NO: 2653593 - DNA, 25 bp, Homo sapien
tctccatgaagactccccattccca

SEQ ID NO: 2653594 - DNA, 25 bp, Homo sapien
tcgtttcttccactttggcatttat

SEQ ID NO: 2653595 - DNA, 25 bp, Homo sapien
agtgttcccatacacttcgtttctt

SEQ ID NO: 2653596 - DNA, 25 bp, Homo sapien
tcttcaccagtgttaatctcctcag

SEQ ID NO: 2653597 - DNA, 25 bp, Homo sapien
gtatcatttcggcaacactcagtgt

SEQ ID NO: 2653598 - DNA, 25 bp, Homo sapien
tggaaagtgaagtatctgggataat

SEQ ID NO: 2653599 - DNA, 25 bp, Homo sapien
taattctgtaccaacactggtatca

SEQ ID NO: 2653600 - DNA, 25 bp, Homo sapien
aagtatctgggataatgaatgcccc

SEQ ID NO: 2653601 - DNA, 25 bp, Homo sapien
aagagatatccggggagatcaggtt

SEQ ID NO: 2653602 - DNA, 25 bp, Homo sapien
agagatatccggggagatcaggttc

SEQ ID NO: 2653603 - DNA, 25 bp, Homo sapien
gagatatccggggagatcaggttcc

SEQ ID NO: 2653604 - DNA, 25 bp, Homo sapien
tattggtctgtactacccatcaact

SEQ ID NO: 2653605 - DNA, 25 bp, Homo sapien
catattggtctgtactacccatcaa

SEQ ID NO: 2653606 - DNA, 25 bp, Homo sapien
tggtctgtactacccatcaactttt

SEQ ID NO: 2653607 - DNA, 25 bp, Homo sapien
gatcatattggtctgtactacccat

SEQ ID NO: 2653608 - DNA, 25 bp, Homo sapien
cactggggaatggaacggttttgct

SEQ ID NO: 2653609 - DNA, 25 bp, Homo sapien
tttgtttcttggccatgaatcgctt

SEQ ID NO: 2653610 - DNA, 25 bp, Homo sapien
tttcttggccatgaatcgcttaatt

SEQ ID NO: 2653611 - DNA, 25 bp, Homo sapien
tgtttcttggccatgaatcgcttaa

SEQ ID NO: 2653612 - DNA, 25 bp, Homo sapien
ccagcttagttcttctccaatgtct

SEQ ID NO: 2653613 - DNA, 25 bp, Homo sapien
agttcttctccaatgtctccttttg

SEQ ID NO: 2653614 - DNA, 25 bp, Homo sapien
cagcttagttcttctccaatgtctc

SEQ ID NO: 2653615 - DNA, 25 bp, Homo sapien
cttagttcttctccaatgtctcctt

SEQ ID NO: 2653616 - DNA, 25 bp, Homo sapien
ttcctttggagcttgactggtagtc

SEQ ID NO: 2653617 - DNA, 25 bp, Homo sapien
tttcctttggagcttgactggtagt

SEQ ID NO: 2653618 - DNA, 25 bp, Homo sapien
tcctttggagcttgactggtagtca

SEQ ID NO: 2653619 - DNA, 25 bp, Homo sapien
tcaaccagcagataccgggtcagct

SEQ ID NO: 2653620 - DNA, 25 bp, Homo sapien
agcagataccgggtcagcttcagag

SEQ ID NO: 2653621 - DNA, 25 bp, Homo sapien
ccgggtcagcttcagaggaacttac

SEQ ID NO: 2653622 - DNA, 25 bp, Homo sapien
gataccgggtcagcttcagaggaac

SEQ ID NO: 2653623 - DNA, 25 bp, Homo sapien
tcttgtctaattctgaagctttcag

SEQ ID NO: 2653624 - DNA, 25 bp, Homo sapien
tctaattctgaagctttcagggctg

SEQ ID NO: 2653625 - DNA, 25 bp, Homo sapien
tgtctaattctgaagctttcagggc

SEQ ID NO: 2653626 - DNA, 25 bp, Homo sapien
attctgaagctttcagggctgtctc

SEQ ID NO: 2653627 - DNA, 25 bp, Homo sapien
gaaaattgtcttatgcttcaccttt

SEQ ID NO: 2653628 - DNA, 25 bp, Homo sapien
tcttatgcttcacctttgccaaccg

SEQ ID NO: 2653629 - DNA, 25 bp, Homo sapien
gtgtagaaggcagttaatggagcct

SEQ ID NO: 2653630 - DNA, 25 bp, Homo sapien
tagaaggcagttaatggagcctgca

SEQ ID NO: 2653631 - DNA, 25 bp, Homo sapien
gtaatgctgagcactctattgttac

SEQ ID NO: 2653632 - DNA, 25 bp, Homo sapien
tacgtccaccaaacgactctcttgg

SEQ ID NO: 2653633 - DNA, 25 bp, Homo sapien
gcagatctctcaatacgtccaccaa

SEQ ID NO: 2653634 - DNA, 25 bp, Homo sapien
ggcacgcagatctctcaatacgtcc

SEQ ID NO: 2653635 - DNA, 25 bp, Homo sapien
aacgactctcttgggtagcatgatg

SEQ ID NO: 2653636 - DNA, 25 bp, Homo sapien
ctgctgcttagcagtcatagccttc

SEQ ID NO: 2653637 - DNA, 25 bp, Homo sapien
ggggaggatggcggcacactccaag

SEQ ID NO: 2653638 - DNA, 25 bp, Homo sapien
gtcactttcagagtcgagatgtgtt

SEQ ID NO: 2653639 - DNA, 25 bp, Homo sapien
actttcagagtcgagatgtgtttgg

SEQ ID NO: 2653640 - DNA, 25 bp, Homo sapien
ttcatcctctaaagctttatgccag

SEQ ID NO: 2653641 - DNA, 25 bp, Homo sapien
tcatcctctaaagctttatgccaga

SEQ ID NO: 2653642 - DNA, 25 bp, Homo sapien
tcattcatcctctaaagctttatgc

SEQ ID NO: 2653643 - DNA, 25 bp, Homo sapien
cctctaaagctttatgccagatgtg

SEQ ID NO: 2653644 - DNA, 25 bp, Homo sapien
gatgctatgaagatctgcctccttg

SEQ ID NO: 2653645 - DNA, 25 bp, Homo sapien
taaagaatgagtcctaagcatggct

SEQ ID NO: 2653646 - DNA, 25 bp, Homo sapien
aggaagtcaactttcaggacagagc

SEQ ID NO: 2653647 - DNA, 25 bp, Homo sapien
tggccatcaccacgactaaagtcac

SEQ ID NO: 2653648 - DNA, 25 bp, Homo sapien
ataaagtctgacaacattcctgctc

SEQ ID NO: 2653649 - DNA, 25 bp, Homo sapien
caatcacaaaccatgttatccataa

SEQ ID NO: 2653650 - DNA, 25 bp, Homo sapien
caacacaaattagagttatcaaggc

SEQ ID NO: 2653651 - DNA, 25 bp, Homo sapien
ccttgcctcttgataggaatttccc

SEQ ID NO: 2653652 - DNA, 25 bp, Homo sapien
ctcagtcgtggaagacaaggctctt

SEQ ID NO: 2653653 - DNA, 25 bp, Homo sapien
accttttgtcctcagtcgtggaaga

SEQ ID NO: 2653654 - DNA, 25 bp, Homo sapien
tttgtcctcagtcgtggaagacaag

SEQ ID NO: 2653655 - DNA, 25 bp, Homo sapien
tcctcagtcgtggaagacaaggctc

SEQ ID NO: 2653656 - DNA, 25 bp, Homo sapien
tcagataaactctagatctcctagc

SEQ ID NO: 2653657 - DNA, 25 bp, Homo sapien
agatccagtgaagatcccagcaact

SEQ ID NO: 2653658 - DNA, 25 bp, Homo sapien
tcctagccacggtgaagatccagtg

SEQ ID NO: 2653659 - DNA, 25 bp, Homo sapien
ctagatctcctagccacggtgaaga

SEQ ID NO: 2653660 - DNA, 25 bp, Homo sapien
gagattctgagcctgagtcgggccc

SEQ ID NO: 2653661 - DNA, 25 bp, Homo sapien
gggataacaaagagccaaccaggcc

SEQ ID NO: 2653662 - DNA, 25 bp, Homo sapien
ttacaaagtcactggtcacatatgt

SEQ ID NO: 2653663 - DNA, 25 bp, Homo sapien
gaggaggcattaggagtaggatgaa

SEQ ID NO: 2653664 - DNA, 25 bp, Homo sapien
ccatcattgatgtggcgctattggg

SEQ ID NO: 2653665 - DNA, 25 bp, Homo sapien
gatgtggcgctattgggctactaca

SEQ ID NO: 2653666 - DNA, 25 bp, Homo sapien
attgatgtggcgctattgggctact

SEQ ID NO: 2653667 - DNA, 25 bp, Homo sapien
catcattgatgtggcgctattgggc

SEQ ID NO: 2653668 - DNA, 25 bp, Homo sapien
gcttctgcccaactgtcaaccttga

SEQ ID NO: 2653669 - DNA, 25 bp, Homo sapien
aactgtcaaccttgacaaactgtgg

SEQ ID NO: 2653670 - DNA, 25 bp, Homo sapien
tcaaccttgacaaactgtggacttt

SEQ ID NO: 2653671 - DNA, 25 bp, Homo sapien
gagcttctgcccaactgtcaacctt

SEQ ID NO: 2653672 - DNA, 25 bp, Homo sapien
cactgtcttgcctcctggtgagaaa

SEQ ID NO: 2653673 - DNA, 25 bp, Homo sapien
tctaagccaatagggttacaggttg

SEQ ID NO: 2653674 - DNA, 25 bp, Homo sapien
gatgaaatacacgaaatcctgttga

SEQ ID NO: 2653675 - DNA, 25 bp, Homo sapien
tagtataggcaaaggtccaacccca

SEQ ID NO: 2653676 - DNA, 25 bp, Homo sapien
tggtgcgcccgctttacaaagttag

SEQ ID NO: 2653677 - DNA, 25 bp, Homo sapien
gagattcactgggtcctaggtccta

SEQ ID NO: 2653678 - DNA, 25 bp, Homo sapien
tcctggaagtgcgtgaatagcaagc

SEQ ID NO: 2653679 - DNA, 25 bp, Homo sapien
gcatattcacaagaacccgctcgga

SEQ ID NO: 2653680 - DNA, 25 bp, Homo sapien
tgcagccgtatcctcagtgaatgtg

SEQ ID NO: 2653681 - DNA, 25 bp, Homo sapien
tttgagtgaagtcttgcagccgtat

SEQ ID NO: 2653682 - DNA, 25 bp, Homo sapien
tgaattccttgtgtacagctgccat

SEQ ID NO: 2653683 - DNA, 25 bp, Homo sapien
cagtgaatgtgcccctttggctgaa

SEQ ID NO: 2653684 - DNA, 25 bp, Homo sapien
gagtgccctcaaagtttcattcaac

SEQ ID NO: 2653685 - DNA, 25 bp, Homo sapien
catgatctggtcgtctgtgtataac

SEQ ID NO: 2653686 - DNA, 25 bp, Homo sapien
aaagatagccagcagaagattcagc

SEQ ID NO: 2653687 - DNA, 25 bp, Homo sapien
taatcagcgaagttctgcagaagcc

SEQ ID NO: 2653688 - DNA, 25 bp, Homo sapien
tttccccacagcaccatccatgcca

SEQ ID NO: 2653689 - DNA, 25 bp, Homo sapien
gatgtggaacaagctttgcttaagg

SEQ ID NO: 2653690 - DNA, 25 bp, Homo sapien
cagctgatgtggaacaagctttgct

SEQ ID NO: 2653691 - DNA, 25 bp, Homo sapien
tggaacaagctttgcttaaggcttg

SEQ ID NO: 2653692 - DNA, 25 bp, Homo sapien
atatgaggttctatgttatccttca

SEQ ID NO: 2653693 - DNA, 25 bp, Homo sapien
tgaggttctatgttatccttcaaag

SEQ ID NO: 2653694 - DNA, 25 bp, Homo sapien
ttaaagttccgtgacgtatggcagt

SEQ ID NO: 2653695 - DNA, 25 bp, Homo sapien
tccgtgacgtatggcagtttggctg

SEQ ID NO: 2653696 - DNA, 25 bp, Homo sapien
tcacagggcaggcttcacaacaagt

SEQ ID NO: 2653697 - DNA, 25 bp, Homo sapien
tctcagatggaagccctcataggca

SEQ ID NO: 2653698 - DNA, 25 bp, Homo sapien
gaggaacttaccctattaggcttga

SEQ ID NO: 2653699 - DNA, 25 bp, Homo sapien
tgatggaccatcctacacagactct

SEQ ID NO: 2653700 - DNA, 25 bp, Homo sapien
tcttgccctgaaaccatatgcatgg

SEQ ID NO: 2653701 - DNA, 25 bp, Homo sapien
aatcaggcatggcttagttgggacc

SEQ ID NO: 2653702 - DNA, 25 bp, Homo sapien
ggctctactagggaaggatacactt

SEQ ID NO: 2653703 - DNA, 25 bp, Homo sapien
tgttcgtaggcagcaaagtgttggc

SEQ ID NO: 2653704 - DNA, 25 bp, Homo sapien
gtatactttgaactcaggtagcatg

SEQ ID NO: 2653705 - DNA, 25 bp, Homo sapien
tatactttgaactcaggtagcatga

SEQ ID NO: 2653706 - DNA, 25 bp, Homo sapien
ctttgaactcaggtagcatgatgcc

SEQ ID NO: 2653707 - DNA, 25 bp, Homo sapien
tcttgcctgggtctgctgagtagct

SEQ ID NO: 2653708 - DNA, 25 bp, Homo sapien
ggtacttttattggcataatgttaa

SEQ ID NO: 2653709 - DNA, 25 bp, Homo sapien
gcccttattggtacttttattggca

SEQ ID NO: 2653710 - DNA, 25 bp, Homo sapien
taattaagattttagtaggggcaga

SEQ ID NO: 2653711 - DNA, 25 bp, Homo sapien
tgaactagacaactgattccaaagt

SEQ ID NO: 2653712 - DNA, 25 bp, Homo sapien
aatttagtgtattacagaggtggca

SEQ ID NO: 2653713 - DNA, 25 bp, Homo sapien
taagaacaataaggaggtaatgacc

SEQ ID NO: 2653714 - DNA, 25 bp, Homo sapien
taaataagagcaattaggaaaagtc

SEQ ID NO: 2653715 - DNA, 25 bp, Homo sapien
cggttgctcaggctcacatcagctg

SEQ ID NO: 2653716 - DNA, 25 bp, Homo sapien
tcacatcagctgacagtagtctttc

SEQ ID NO: 2653717 - DNA, 25 bp, Homo sapien
tatttcagcccaccttggatctcag

SEQ ID NO: 2653718 - DNA, 25 bp, Homo sapien
cggtggacagtttcacggttgctca

SEQ ID NO: 2653719 - DNA, 25 bp, Homo sapien
cagttaacgcagtcgcggagcggaa

SEQ ID NO: 2653720 - DNA, 25 bp, Homo sapien
tccagatctcactagaggccaccga

SEQ ID NO: 2653721 - DNA, 25 bp, Homo sapien
cgacgctcagcctggctccagttaa

SEQ ID NO: 2653722 - DNA, 25 bp, Homo sapien
agatctcactagaggccaccgaacc

SEQ ID NO: 2653723 - DNA, 25 bp, Homo sapien
tggcaaccaactttaaagcagccat

SEQ ID NO: 2653724 - DNA, 25 bp, Homo sapien
tgcattcgaaaaagtcttgacaaca

SEQ ID NO: 2653725 - DNA, 25 bp, Homo sapien
tgtccccactatgacttcccaggga

SEQ ID NO: 2653726 - DNA, 25 bp, Homo sapien
acatcatgcagatggtcagtgtcac

SEQ ID NO: 2653727 - DNA, 25 bp, Homo sapien
ccacaaagaggccatgcattcgaaa

SEQ ID NO: 2653728 - DNA, 25 bp, Homo sapien
gacattcataattccaaccacagat

SEQ ID NO: 2653729 - DNA, 25 bp, Homo sapien
tcataattccaaccacagatcttat

SEQ ID NO: 2653730 - DNA, 25 bp, Homo sapien
ggacattcataattccaaccacaga

SEQ ID NO: 2653731 - DNA, 25 bp, Homo sapien
ttccaaccacagatcttattgttac

SEQ ID NO: 2653732 - DNA, 25 bp, Homo sapien
aggatggctatgcatcgtgttattg

SEQ ID NO: 2653733 - DNA, 25 bp, Homo sapien
gcatcgtgttattgtcagaattata

SEQ ID NO: 2653734 - DNA, 25 bp, Homo sapien
gtcagaattataatgtcactgctca

SEQ ID NO: 2653735 - DNA, 25 bp, Homo sapien
tattgtcagaattataatgtcactg

SEQ ID NO: 2653736 - DNA, 25 bp, Homo sapien
tatattttgatccaagttgacgtaa

SEQ ID NO: 2653737 - DNA, 25 bp, Homo sapien
tgatccaagttgacgtaaattctgg

SEQ ID NO: 2653738 - DNA, 25 bp, Homo sapien
aagttgacgtaaattctggaactgg

SEQ ID NO: 2653739 - DNA, 25 bp, Homo sapien
ccaaaatatattttgatccaagttg

SEQ ID NO: 2653740 - DNA, 25 bp, Homo sapien
ccacagcaaatcaaaaatctgatga

SEQ ID NO: 2653741 - DNA, 25 bp, Homo sapien
aaatacatgatttgaatgaacaggt

SEQ ID NO: 2653742 - DNA, 25 bp, Homo sapien
atacatgatttgaatgaacaggttt

SEQ ID NO: 2653743 - DNA, 25 bp, Homo sapien
tgatgacaccagaagttaaatatgt

SEQ ID NO: 2653744 - DNA, 25 bp, Homo sapien
gaaaattgtgaaaaggccagcaata

SEQ ID NO: 2653745 - DNA, 25 bp, Homo sapien
ttgtctaagaagtgaatgacaactg

SEQ ID NO: 2653746 - DNA, 25 bp, Homo sapien
tactgaatacaaaacttgagaaaat

SEQ ID NO: 2653747 - DNA, 25 bp, Homo sapien
ctgtactgaatacaaaacttgagaa

SEQ ID NO: 2653748 - DNA, 25 bp, Homo sapien
aaatgtacctttacagcatggggaa

SEQ ID NO: 2653749 - DNA, 25 bp, Homo sapien
aattagctaatagtaaaattataca

SEQ ID NO: 2653750 - DNA, 25 bp, Homo sapien
tgttgataaactattattaagcata

SEQ ID NO: 2653751 - DNA, 25 bp, Homo sapien
tacctttacagcatggggaagaaaa

SEQ ID NO: 2653752 - DNA, 25 bp, Homo sapien
tagacagaagagaatacatatagcc

SEQ ID NO: 2653753 - DNA, 25 bp, Homo sapien
ctcacttctaggaatgtatcttaag

SEQ ID NO: 2653754 - DNA, 25 bp, Homo sapien
tgattaataaactacaagacgttta

SEQ ID NO: 2653755 - DNA, 25 bp, Homo sapien
taacctaacagtccaacattagatg

SEQ ID NO: 2653756 - DNA, 25 bp, Homo sapien
ttctgcagacaaaaaagtataccct

SEQ ID NO: 2653757 - DNA, 25 bp, Homo sapien
tgtatgatcctgtagtatgtgtacc

SEQ ID NO: 2653758 - DNA, 25 bp, Homo sapien
tgtatcaaagtatcatccttagtaa

SEQ ID NO: 2653759 - DNA, 25 bp, Homo sapien
tctttggcatcctcaaagctaaaca

SEQ ID NO: 2653760 - DNA, 25 bp, Homo sapien
tgagggcaaactttgctaatgtgct

SEQ ID NO: 2653761 - DNA, 25 bp, Homo sapien
tgctaatgtgcttgctctggaaagg

SEQ ID NO: 2653762 - DNA, 25 bp, Homo sapien
caaactttgctaatgtgcttgctct

SEQ ID NO: 2653763 - DNA, 25 bp, Homo sapien
tggaactgagggcaaactttgctaa

SEQ ID NO: 2653764 - DNA, 25 bp, Homo sapien
cacaagacattcaacaagagcatcg

SEQ ID NO: 2653765 - DNA, 25 bp, Homo sapien
gacatggtaccaactccaatcacaa

SEQ ID NO: 2653766 - DNA, 25 bp, Homo sapien
gcatcgagggtaaacgtaggaccta

SEQ ID NO: 2653767 - DNA, 25 bp, Homo sapien
gccattccacgagcaatattttccc

SEQ ID NO: 2653768 - DNA, 25 bp, Homo sapien
gaagaaagtcatgaacacgaagtag

SEQ ID NO: 2653769 - DNA, 25 bp, Homo sapien
caagctgggaagaaagtcatgaaca

SEQ ID NO: 2653770 - DNA, 25 bp, Homo sapien
cacgaagtagttggcaagaactgac

SEQ ID NO: 2653771 - DNA, 25 bp, Homo sapien
aagtcatgaacacgaagtagttggc

SEQ ID NO: 2653772 - DNA, 25 bp, Homo sapien
tggctgagctgccaaattggacgac

SEQ ID NO: 2653773 - DNA, 25 bp, Homo sapien
tacaggattcggcttattttcttct

SEQ ID NO: 2653774 - DNA, 25 bp, Homo sapien
caaattggacgaccctcgcggcttt

SEQ ID NO: 2653775 - DNA, 25 bp, Homo sapien
aaaactcgggcaaaatggctgagct

SEQ ID NO: 2653776 - DNA, 25 bp, Homo sapien
catccagtcctaatgaaaccttaga

SEQ ID NO: 2653777 - DNA, 25 bp, Homo sapien
cgactgtgagcatgaacaagaacca

SEQ ID NO: 2653778 - DNA, 25 bp, Homo sapien
tgtactgttttgaggagaaggatca

SEQ ID NO: 2653779 - DNA, 25 bp, Homo sapien
tagaagtatctgctgtactgttttg

SEQ ID NO: 2653780 - DNA, 25 bp, Homo sapien
cagaaggagagctaaacttagggta

SEQ ID NO: 2653781 - DNA, 25 bp, Homo sapien
tatttctgaccagcataggttcacg

SEQ ID NO: 2653782 - DNA, 25 bp, Homo sapien
taggttcacgtctacaacaattgtc

SEQ ID NO: 2653783 - DNA, 25 bp, Homo sapien
tagggtaataacttgttcaatatcc

SEQ ID NO: 2653784 - DNA, 25 bp, Homo sapien
gggtatctgtttcagccactaaggg

SEQ ID NO: 2653785 - DNA, 25 bp, Homo sapien
ggagttaccaaccacaaatgtagct

SEQ ID NO: 2653786 - DNA, 25 bp, Homo sapien
cattcttcattaggccgaggttccc

SEQ ID NO: 2653787 - DNA, 25 bp, Homo sapien
agtatcgagtaaggaggagttacca

SEQ ID NO: 2653788 - DNA, 25 bp, Homo sapien
ccaatctgatgagtgaaaatatctc

SEQ ID NO: 2653789 - DNA, 25 bp, Homo sapien
aactttgggattattgccaatctga

SEQ ID NO: 2653790 - DNA, 25 bp, Homo sapien
gacctttccctacaacctcaataga

SEQ ID NO: 2653791 - DNA, 25 bp, Homo sapien
tctcttaggatgaagttaatcacct

SEQ ID NO: 2653792 - DNA, 25 bp, Homo sapien
aaacttgctatttttgatatcctga

SEQ ID NO: 2653793 - DNA, 25 bp, Homo sapien
gttctttgctacctacacataaata

SEQ ID NO: 2653794 - DNA, 25 bp, Homo sapien
caggcaatatattcacatggtttaa

SEQ ID NO: 2653795 - DNA, 25 bp, Homo sapien
aaagacaggcttgcactaatacacc

SEQ ID NO: 2653796 - DNA, 25 bp, Homo sapien
ccatttaatacaaacaatgctaagc

SEQ ID NO: 2653797 - DNA, 25 bp, Homo sapien
tttaattaaaagatacctctgcaaa

SEQ ID NO: 2653798 - DNA, 25 bp, Homo sapien
tacaaacaatgctaagctaaaataa

SEQ ID NO: 2653799 - DNA, 25 bp, Homo sapien
tcatgttataaaccatttaatacaa

SEQ ID NO: 2653800 - DNA, 25 bp, Homo sapien
tggaaagtaactgtcggcgaataga

SEQ ID NO: 2653801 - DNA, 25 bp, Homo sapien
cagagtttccaacttgtaggctggg

SEQ ID NO: 2653802 - DNA, 25 bp, Homo sapien
gaatagatacaccacgctcatgagt

SEQ ID NO: 2653803 - DNA, 25 bp, Homo sapien
cattgactaactggatgatctcagc

SEQ ID NO: 2653804 - DNA, 25 bp, Homo sapien
tgccattggaacctgaaattctttt

SEQ ID NO: 2653805 - DNA, 25 bp, Homo sapien
aggggtcctgccactccaacaggga

SEQ ID NO: 2653806 - DNA, 25 bp, Homo sapien
caataacattctcacaacaagctcc

SEQ ID NO: 2653807 - DNA, 25 bp, Homo sapien
taacattctcacaacaagctcccat

SEQ ID NO: 2653808 - DNA, 25 bp, Homo sapien
agagaagcaagcacatgttacccaa

SEQ ID NO: 2653809 - DNA, 25 bp, Homo sapien
tgttacccaaaaatgctcatgcttg

SEQ ID NO: 2653810 - DNA, 25 bp, Homo sapien
ctacacagtatatgttagagaagca

SEQ ID NO: 2653811 - DNA, 25 bp, Homo sapien
gcttgacccaaaaggtatcactaat

SEQ ID NO: 2653812 - DNA, 25 bp, Homo sapien
tcagatgtttcgagccaggctttca

SEQ ID NO: 2653813 - DNA, 25 bp, Homo sapien
acgtggaagacgcacaactgggcca

SEQ ID NO: 2653814 - DNA, 25 bp, Homo sapien
tctgcagagtcacaagcacgtggaa

SEQ ID NO: 2653815 - DNA, 25 bp, Homo sapien
tcccatctgcaaggactcggctgct

SEQ ID NO: 2653816 - DNA, 25 bp, Homo sapien
tgtacatacaaatccactcacacac

SEQ ID NO: 2653817 - DNA, 25 bp, Homo sapien
cccaaccaagcataaatattactca

SEQ ID NO: 2653818 - DNA, 25 bp, Homo sapien
gctctttagcaggtaatatgttaac

SEQ ID NO: 2653819 - DNA, 25 bp, Homo sapien
taacaattatgtttggtaatcacag

SEQ ID NO: 2653820 - DNA, 25 bp, Homo sapien
tgcgtccagctatacttgtatgaag

SEQ ID NO: 2653821 - DNA, 25 bp, Homo sapien
acctggactggaaacggatataaag

SEQ ID NO: 2653822 - DNA, 25 bp, Homo sapien
ttgtatgaagtttctgtagacgtgc

SEQ ID NO: 2653823 - DNA, 25 bp, Homo sapien
tatgaagtttctgtagacgtgcaaa

SEQ ID NO: 2653824 - DNA, 25 bp, Homo sapien
taagattgttcccagtcctaagtaa

SEQ ID NO: 2653825 - DNA, 25 bp, Homo sapien
ttgaagaggtcagcttcaaaggtgg

SEQ ID NO: 2653826 - DNA, 25 bp, Homo sapien
taaactcaggatatgtgtaatgcca

SEQ ID NO: 2653827 - DNA, 25 bp, Homo sapien
caaatgtaaggaataccaatcaaca

SEQ ID NO: 2653828 - DNA, 25 bp, Homo sapien
tgacagcttcacaaacaacagattt

SEQ ID NO: 2653829 - DNA, 25 bp, Homo sapien
taccactaacggctagaatctgcat

SEQ ID NO: 2653830 - DNA, 25 bp, Homo sapien
gacaaccttggctggaatgacagct

SEQ ID NO: 2653831 - DNA, 25 bp, Homo sapien
tatccaatttatagcagcaggtttc

SEQ ID NO: 2653832 - DNA, 25 bp, Homo sapien
tagatggcggtgacaatgtttgctg

SEQ ID NO: 2653833 - DNA, 25 bp, Homo sapien
tgtccacaggcaatgtagatggcgg

SEQ ID NO: 2653834 - DNA, 25 bp, Homo sapien
gcgttgtagcctcctatgctcccag

SEQ ID NO: 2653835 - DNA, 25 bp, Homo sapien
taatgttgacctcaatcatagcctc

SEQ ID NO: 2653836 - DNA, 25 bp, Homo sapien
cttgcttccattaaagtaatacagt

SEQ ID NO: 2653837 - DNA, 25 bp, Homo sapien
catggtgcagctgatatataaatct

SEQ ID NO: 2653838 - DNA, 25 bp, Homo sapien
cgttcctatctctatagatggcatg

SEQ ID NO: 2653839 - DNA, 25 bp, Homo sapien
gtaatacagtttgaactaccaacat

SEQ ID NO: 2653840 - DNA, 25 bp, Homo sapien
cttgctgaggtagtaggttggtccc

SEQ ID NO: 2653841 - DNA, 25 bp, Homo sapien
tgctgaggtagtaggttggtcccac

SEQ ID NO: 2653842 - DNA, 25 bp, Homo sapien
tgaggtagtaggttggtcccaccac

SEQ ID NO: 2653843 - DNA, 25 bp, Homo sapien
gctgaggtagtaggttggtcccacc

SEQ ID NO: 2653844 - DNA, 25 bp, Homo sapien
cacaatggattaggctgatatgaca

SEQ ID NO: 2653845 - DNA, 25 bp, Homo sapien
gagagtcagaactaggcttgtggac

SEQ ID NO: 2653846 - DNA, 25 bp, Homo sapien
catagtctcagatagaaagagaaac

SEQ ID NO: 2653847 - DNA, 25 bp, Homo sapien
gcttgtggactctatgcctgataca

SEQ ID NO: 2653848 - DNA, 25 bp, Homo sapien
caagattcacccttaaaatcatgac

SEQ ID NO: 2653849 - DNA, 25 bp, Homo sapien
acaattcgggcaagctgccgggcat

SEQ ID NO: 2653850 - DNA, 25 bp, Homo sapien
attacggtcccacacacaattcggg

SEQ ID NO: 2653851 - DNA, 25 bp, Homo sapien
gacttttgacaagatgtcctgctgc

SEQ ID NO: 2653852 - DNA, 25 bp, Homo sapien
tgccataagtgacaattccccagcc

SEQ ID NO: 2653853 - DNA, 25 bp, Homo sapien
cttggaggtcttgtaaattgatctt

SEQ ID NO: 2653854 - DNA, 25 bp, Homo sapien
tggaggtcttgtaaattgatcttcg

SEQ ID NO: 2653855 - DNA, 25 bp, Homo sapien
tccttggaggtcttgtaaattgatc

SEQ ID NO: 2653856 - DNA, 25 bp, Homo sapien
ccttggaggtcttgtaaattgatct

SEQ ID NO: 2653857 - DNA, 25 bp, Homo sapien
catgttccagttcagaactgtcggg

SEQ ID NO: 2653858 - DNA, 25 bp, Homo sapien
ttagtcctttagaacccaatgccca

SEQ ID NO: 2653859 - DNA, 25 bp, Homo sapien
ggctgtctcagtgatcacatctatt

SEQ ID NO: 2653860 - DNA, 25 bp, Homo sapien
gccaaaaaccaagtggctgtctcag

SEQ ID NO: 2653861 - DNA, 25 bp, Homo sapien
aggagtctgcatggaaagaacctga

SEQ ID NO: 2653862 - DNA, 25 bp, Homo sapien
gaggagtctgcatggaaagaacctg

SEQ ID NO: 2653863 - DNA, 25 bp, Homo sapien
tgaggagtctgcatggaaagaacct

SEQ ID NO: 2653864 - DNA, 25 bp, Homo sapien
ggagtctgcatggaaagaacctgag

SEQ ID NO: 2653865 - DNA, 25 bp, Homo sapien
tgatttctaaggtcccagtcttgct

SEQ ID NO: 2653866 - DNA, 25 bp, Homo sapien
ggtccccttctgaagaataatgctg

SEQ ID NO: 2653867 - DNA, 25 bp, Homo sapien
tatttgccttcagaggtgagctgta

SEQ ID NO: 2653868 - DNA, 25 bp, Homo sapien
tagcctgcggagataaatacagtga

SEQ ID NO: 2653869 - DNA, 25 bp, Homo sapien
tgatttttatttcttgaacacttcc

SEQ ID NO: 2653870 - DNA, 25 bp, Homo sapien
gatttttatttcttgaacacttcca

SEQ ID NO: 2653871 - DNA, 25 bp, Homo sapien
ttgatttttatttcttgaacacttc

SEQ ID NO: 2653872 - DNA, 25 bp, Homo sapien
taggcacagttctagggccattcac

SEQ ID NO: 2653873 - DNA, 25 bp, Homo sapien
aatgtttcagtcaccaacctcctgg

SEQ ID NO: 2653874 - DNA, 25 bp, Homo sapien
caaagagccctgtgtgaatgtttca

SEQ ID NO: 2653875 - DNA, 25 bp, Homo sapien
aaagctaagagcgttcgtgggtcca

SEQ ID NO: 2653876 - DNA, 25 bp, Homo sapien
taattgtacaaaacattaatccagc

SEQ ID NO: 2653877 - DNA, 25 bp, Homo sapien
gcagacacaatcactaagaggctct

SEQ ID NO: 2653878 - DNA, 25 bp, Homo sapien
cagtcactaaaatgaacactcaaca

SEQ ID NO: 2653879 - DNA, 25 bp, Homo sapien
gcaatttaagctttacgtacaacag

SEQ ID NO: 2653880 - DNA, 25 bp, Homo sapien
tcaaacttgctcaggatggaaaaca

SEQ ID NO: 2653881 - DNA, 25 bp, Homo sapien
gagggctgagcatacaggtgaccac

SEQ ID NO: 2653882 - DNA, 25 bp, Homo sapien
tacctagcgtaggagcatacttcga

SEQ ID NO: 2653883 - DNA, 25 bp, Homo sapien
tctcggcttccagtgtagaggttac

SEQ ID NO: 2653884 - DNA, 25 bp, Homo sapien
tgttgcctgggtctaatcctgctcc

SEQ ID NO: 2653885 - DNA, 25 bp, Homo sapien
tacttttatgctccctgccaactgg

SEQ ID NO: 2653886 - DNA, 25 bp, Homo sapien
tatgcttagttagctggcgcgcaca

SEQ ID NO: 2653887 - DNA, 25 bp, Homo sapien
gacttccataatcaacacagggtag

SEQ ID NO: 2653888 - DNA, 25 bp, Homo sapien
aacaaaattattggaggtgcgtgtc

SEQ ID NO: 2653889 - DNA, 25 bp, Homo sapien
ctactggcatagttaaatgctgtcc

SEQ ID NO: 2653890 - DNA, 25 bp, Homo sapien
aatgctgtcctgagcaagttaaaga

SEQ ID NO: 2653891 - DNA, 25 bp, Homo sapien
tgttcaaggtttgagttctactggc

SEQ ID NO: 2653892 - DNA, 25 bp, Homo sapien
gattacgccataagcctgatggtgg

SEQ ID NO: 2653893 - DNA, 25 bp, Homo sapien
attacgccataagcctgatggtggt

SEQ ID NO: 2653894 - DNA, 25 bp, Homo sapien
ggattacgccataagcctgatggtg

SEQ ID NO: 2653895 - DNA, 25 bp, Homo sapien
tgcctgccacagaatgaccactgag

SEQ ID NO: 2653896 - DNA, 25 bp, Homo sapien
ttaagtggtaactgggtccagcagc

SEQ ID NO: 2653897 - DNA, 25 bp, Homo sapien
ataaagcgagctttggattcactgc

SEQ ID NO: 2653898 - DNA, 25 bp, Homo sapien
tctgtattaccgttgttaggattgg

SEQ ID NO: 2653899 - DNA, 25 bp, Homo sapien
tggtaagccctaaattggttctgcc

SEQ ID NO: 2653900 - DNA, 25 bp, Homo sapien
ggaaaatggtcaagataagttcatg

SEQ ID NO: 2653901 - DNA, 25 bp, Homo sapien
ggtatagactactttctggaaaatg

SEQ ID NO: 2653902 - DNA, 25 bp, Homo sapien
tcagtttgttatgaacacaatttgg

SEQ ID NO: 2653903 - DNA, 25 bp, Homo sapien
gaatgtcaaattttgagcctaatag

SEQ ID NO: 2653904 - DNA, 25 bp, Homo sapien
aacttagaaacactgttcaccttct

SEQ ID NO: 2653905 - DNA, 25 bp, Homo sapien
agtgacaggaggtgttactataaca

SEQ ID NO: 2653906 - DNA, 25 bp, Homo sapien
gaagatgctttgaatgtcacctaat

SEQ ID NO: 2653907 - DNA, 25 bp, Homo sapien
atgatctagtatactgactgctttg

SEQ ID NO: 2653908 - DNA, 25 bp, Homo sapien
taggaaggccctaacagtctgatta

SEQ ID NO: 2653909 - DNA, 25 bp, Homo sapien
aagctgctcttgacagacaagataa

SEQ ID NO: 2653910 - DNA, 25 bp, Homo sapien
caagttaataccagagttatcagag

SEQ ID NO: 2653911 - DNA, 25 bp, Homo sapien
acttacttggttcatcacagcagga

SEQ ID NO: 2653912 - DNA, 25 bp, Homo sapien
atgacaagaacgtgaccccatacct

SEQ ID NO: 2653913 - DNA, 25 bp, Homo sapien
ccagtgtagttccaggttatggtgg

SEQ ID NO: 2653914 - DNA, 25 bp, Homo sapien
gactgagtcctcataaccctaaaag

SEQ ID NO: 2653915 - DNA, 25 bp, Homo sapien
ggctcaatggtgtccctggtgtctg

SEQ ID NO: 2653916 - DNA, 25 bp, Homo sapien
ctggtgtctggagcaagtggctact

SEQ ID NO: 2653917 - DNA, 25 bp, Homo sapien
gcaagtggctactctgcaacatcca

SEQ ID NO: 2653918 - DNA, 25 bp, Homo sapien
tctgaatccagcttgcgtcgacatg

SEQ ID NO: 2653919 - DNA, 25 bp, Homo sapien
ggtcgtcaccagttgctgtataaaa

SEQ ID NO: 2653920 - DNA, 25 bp, Homo sapien
ggctgtaggcattgcatcgcatcta

SEQ ID NO: 2653921 - DNA, 25 bp, Homo sapien
tgtgcagtcaagacattgtgaagaa

SEQ ID NO: 2653922 - DNA, 25 bp, Homo sapien
tgcatcgcatctatttgctgaacat

SEQ ID NO: 2653923 - DNA, 25 bp, Homo sapien
tggagtttctttgcgttgagctgcc

SEQ ID NO: 2653924 - DNA, 25 bp, Homo sapien
gactactgctggtatttactcaagg

SEQ ID NO: 2653925 - DNA, 25 bp, Homo sapien
tagtactgccttgctgatcttgggt

SEQ ID NO: 2653926 - DNA, 25 bp, Homo sapien
taaaggctctccagtaggtgtcagt

SEQ ID NO: 2653927 - DNA, 25 bp, Homo sapien
tttccttccctatttgaaattggca

SEQ ID NO: 2653928 - DNA, 25 bp, Homo sapien
actcagcggccggattttctcttcc

SEQ ID NO: 2653929 - DNA, 25 bp, Homo sapien
ggctaagttcgggtggcagcgccgg

SEQ ID NO: 2653930 - DNA, 25 bp, Homo sapien
tgacggctggaagggtaggcttcct

SEQ ID NO: 2653931 - DNA, 25 bp, Homo sapien
cgttacctcaggatcgcgactacaa

SEQ ID NO: 2653932 - DNA, 25 bp, Homo sapien
tcgtcacccgggagagccggaggta

SEQ ID NO: 2653933 - DNA, 25 bp, Homo sapien
cctcctgcttttctacccgtcgtca

SEQ ID NO: 2653934 - DNA, 25 bp, Homo sapien
gaggctgcgcgagcgacggaccaac

SEQ ID NO: 2653935 - DNA, 25 bp, Homo sapien
tggtcacgcaactgtcaaacgaagc

SEQ ID NO: 2653936 - DNA, 25 bp, Homo sapien
gcaggcccgtcatcttcagcggaaa

SEQ ID NO: 2653937 - DNA, 25 bp, Homo sapien
gcccggagggttcgtcataaacaca

SEQ ID NO: 2653938 - DNA, 25 bp, Homo sapien
gaaaacccttggcactagtagctca

SEQ ID NO: 2653939 - DNA, 25 bp, Homo sapien
cataattattgtcagaatacctaga

SEQ ID NO: 2653940 - DNA, 25 bp, Homo sapien
caatgaatctacagaagaagtggtt

SEQ ID NO: 2653941 - DNA, 25 bp, Homo sapien
tctcttcaatcatcaaccaagttaa

SEQ ID NO: 2653942 - DNA, 25 bp, Homo sapien
tacttttatagcaccccagtcagat

SEQ ID NO: 2653943 - DNA, 25 bp, Homo sapien
taatatctaagcatccaataccaga

SEQ ID NO: 2653944 - DNA, 25 bp, Homo sapien
cataacactctaagtgaagggctgg

SEQ ID NO: 2653945 - DNA, 25 bp, Homo sapien
tactctcaggaaaggacaaatcata

SEQ ID NO: 2653946 - DNA, 25 bp, Homo sapien
taagtcaaagactccaaaaagtgag

SEQ ID NO: 2653947 - DNA, 25 bp, Homo sapien
tataacctacaaaacctactgcttg

SEQ ID NO: 2653948 - DNA, 25 bp, Homo sapien
gcatattagtcattgatccccttga

SEQ ID NO: 2653949 - DNA, 25 bp, Homo sapien
gaaagttttatctgtctctgacatg

SEQ ID NO: 2653950 - DNA, 25 bp, Homo sapien
gcctgagggctaaggtaaatattac

SEQ ID NO: 2653951 - DNA, 25 bp, Homo sapien
ttgccaaaactacatcttaagattt

SEQ ID NO: 2653952 - DNA, 25 bp, Homo sapien
ctggagtacagtcattcaatccttc

SEQ ID NO: 2653953 - DNA, 25 bp, Homo sapien
actgcaccttgccaaaactacatct

SEQ ID NO: 2653954 - DNA, 25 bp, Homo sapien
tggagtacagtcattcaatccttcc

SEQ ID NO: 2653955 - DNA, 25 bp, Homo sapien
gcaggtatgtcaacagtaaagtcca

SEQ ID NO: 2653956 - DNA, 25 bp, Homo sapien
tataacagctccctagtgacagcag

SEQ ID NO: 2653957 - DNA, 25 bp, Homo sapien
caaaatctttgtctgagagtaccaa

SEQ ID NO: 2653958 - DNA, 25 bp, Homo sapien
gcaaaactaccaggttcggagaaga

SEQ ID NO: 2653959 - DNA, 25 bp, Homo sapien
ccatatcacatgcaatgacatccac

SEQ ID NO: 2653960 - DNA, 25 bp, Homo sapien
agaatgataacttggataaagaagc

SEQ ID NO: 2653961 - DNA, 25 bp, Homo sapien
cccatatcacatgcaatgacatcca

SEQ ID NO: 2653962 - DNA, 25 bp, Homo sapien
gacagaatgataacttggataaaga

SEQ ID NO: 2653963 - DNA, 25 bp, Homo sapien
tatcttctttcgacaggatgaataa

SEQ ID NO: 2653964 - DNA, 25 bp, Homo sapien
caattcaaaggtcaattccccaagc

SEQ ID NO: 2653965 - DNA, 25 bp, Homo sapien
tggttctagtgaagaagaatgggac

SEQ ID NO: 2653966 - DNA, 25 bp, Homo sapien
aaggcctgccttgtgagaaccatgc

SEQ ID NO: 2653967 - DNA, 25 bp, Homo sapien
cctgggacaaggcaaaattgtgaga

SEQ ID NO: 2653968 - DNA, 25 bp, Homo sapien
tgacttacaggtttatagcaccagt

SEQ ID NO: 2653969 - DNA, 25 bp, Homo sapien
caaggctacagtaggccatggtcat

SEQ ID NO: 2653970 - DNA, 25 bp, Homo sapien
gaatcaaaagaattgggctatgggc

SEQ ID NO: 2653971 - DNA, 25 bp, Homo sapien
tagatgttatttcgtagtgcccagg

SEQ ID NO: 2653972 - DNA, 25 bp, Homo sapien
tgtatgctataaataagtggccaga

SEQ ID NO: 2653973 - DNA, 25 bp, Homo sapien
tgtgtcccaaagtacaagaaccact

SEQ ID NO: 2653974 - DNA, 25 bp, Homo sapien
tggagagctgtgacgccaaagctcc

SEQ ID NO: 2653975 - DNA, 25 bp, Homo sapien
ccattcctgctttattatcattaag

SEQ ID NO: 2653976 - DNA, 25 bp, Homo sapien
cattaagtcccatcctaagcagaag

SEQ ID NO: 2653977 - DNA, 25 bp, Homo sapien
tctttatctaatccttccattcctg

SEQ ID NO: 2653978 - DNA, 25 bp, Homo sapien
tctttgtaactgtcacacttctcct

SEQ ID NO: 2653979 - DNA, 25 bp, Homo sapien
aatgatgtataaccttgtgtttggc

SEQ ID NO: 2653980 - DNA, 25 bp, Homo sapien
ggtgcataatctctttgctatattg

SEQ ID NO: 2653981 - DNA, 25 bp, Homo sapien
ccagagaagccaaatggcctggtct

SEQ ID NO: 2653982 - DNA, 25 bp, Homo sapien
gagcttggccgatttttagatctta

SEQ ID NO: 2653983 - DNA, 25 bp, Homo sapien
tattgattgttcttctagtatcaca

SEQ ID NO: 2653984 - DNA, 25 bp, Homo sapien
gatgaggaccaattaatcaactttc

SEQ ID NO: 2653985 - DNA, 25 bp, Homo sapien
aatttctgcctaacagaaggtctca

SEQ ID NO: 2653986 - DNA, 25 bp, Homo sapien
agccagctcacctgacctatctttt

SEQ ID NO: 2653987 - DNA, 25 bp, Homo sapien
ttttcaattcgttggttgacttgct

SEQ ID NO: 2653988 - DNA, 25 bp, Homo sapien
tttcaattcgttggttgacttgctt

SEQ ID NO: 2653989 - DNA, 25 bp, Homo sapien
tgatttgagctttttgttgcatcat

SEQ ID NO: 2653990 - DNA, 25 bp, Homo sapien
tactattctaccagcttccacttta

SEQ ID NO: 2653991 - DNA, 25 bp, Homo sapien
attactattctaccagcttccactt

SEQ ID NO: 2653992 - DNA, 25 bp, Homo sapien
ctattctaccagcttccactttatt

SEQ ID NO: 2653993 - DNA, 25 bp, Homo sapien
ttactattctaccagcttccacttt

SEQ ID NO: 2653994 - DNA, 25 bp, Homo sapien
tttcagttatgacttgacaatacat

SEQ ID NO: 2653995 - DNA, 25 bp, Homo sapien
gagcaacacttagcaaagtaaagta

SEQ ID NO: 2653996 - DNA, 25 bp, Homo sapien
gagcagagcaacacttagcaaagta

SEQ ID NO: 2653997 - DNA, 25 bp, Homo sapien
gtaaatgagcagagcaacacttagc

SEQ ID NO: 2653998 - DNA, 25 bp, Homo sapien
taactacctgtcctatcaagctggg

SEQ ID NO: 2653999 - DNA, 25 bp, Homo sapien
tctagctgcgatgtatacaataaaa

SEQ ID NO: 2654000 - DNA, 25 bp, Homo sapien
tatcccgtggccttttctagctgcg

SEQ ID NO: 2654001 - DNA, 25 bp, Homo sapien
acataggctttggattaaatcctag

SEQ ID NO: 2654002 - DNA, 25 bp, Homo sapien
catttggcattctaatctatagtgt

SEQ ID NO: 2654003 - DNA, 25 bp, Homo sapien
tcatgtacatttggcattctaatct

SEQ ID NO: 2654004 - DNA, 25 bp, Homo sapien
ggcattctaatctatagtgtgactt

SEQ ID NO: 2654005 - DNA, 25 bp, Homo sapien
gttcatgtacatttggcattctaat

SEQ ID NO: 2654006 - DNA, 25 bp, Homo sapien
tactgtagcataatgtaaatgttcc

SEQ ID NO: 2654007 - DNA, 25 bp, Homo sapien
tgtagcataatgtaaatgttcctct

SEQ ID NO: 2654008 - DNA, 25 bp, Homo sapien
agatactgtagcataatgtaaatgt

SEQ ID NO: 2654009 - DNA, 25 bp, Homo sapien
gctgaacaggaaggtacaactgaag

SEQ ID NO: 2654010 - DNA, 25 bp, Homo sapien
tcaaatttcggctttgttctaattc

SEQ ID NO: 2654011 - DNA, 25 bp, Homo sapien
cactatggtattgctcaaatttcgg

SEQ ID NO: 2654012 - DNA, 25 bp, Homo sapien
gtcaatgtgcactatggtattgctc

SEQ ID NO: 2654013 - DNA, 25 bp, Homo sapien
ggtattgctcaaatttcggctttgt

SEQ ID NO: 2654014 - DNA, 25 bp, Homo sapien
tctacagctgcatagaaagcatcca

SEQ ID NO: 2654015 - DNA, 25 bp, Homo sapien
tccttcaattctggattgtccctca

SEQ ID NO: 2654016 - DNA, 25 bp, Homo sapien
gatcctacagcaatgggtttatcct

SEQ ID NO: 2654017 - DNA, 25 bp, Homo sapien
cagcatactcattgatcctacagca

SEQ ID NO: 2654018 - DNA, 25 bp, Homo sapien
cggtattttgataccatgaccctct

SEQ ID NO: 2654019 - DNA, 25 bp, Homo sapien
gttttgacttattctgtcacggtat

SEQ ID NO: 2654020 - DNA, 25 bp, Homo sapien
accaggtataagcaagactgtgcta

SEQ ID NO: 2654021 - DNA, 25 bp, Homo sapien
gttttaaggcatacttattatagaa

SEQ ID NO: 2654022 - DNA, 25 bp, Homo sapien
cactattataagttgtgggcacagc

SEQ ID NO: 2654023 - DNA, 25 bp, Homo sapien
tgggcacagcctcttagcaataaat

SEQ ID NO: 2654024 - DNA, 25 bp, Homo sapien
aataaatcctggcatggctgcacga

SEQ ID NO: 2654025 - DNA, 25 bp, Homo sapien
gctgcacgaacaccaaatctccttg

SEQ ID NO: 2654026 - DNA, 25 bp, Homo sapien
aagactcatggccataaaattggga

SEQ ID NO: 2654027 - DNA, 25 bp, Homo sapien
gttatattcaagtaggcttcatcaa

SEQ ID NO: 2654028 - DNA, 25 bp, Homo sapien
ttcttttatcctcaggccaattttg

SEQ ID NO: 2654029 - DNA, 25 bp, Homo sapien
ttatcctcaggccaattttgtcttt

SEQ ID NO: 2654030 - DNA, 25 bp, Homo sapien
gttcacttggaaaggatctcctggg

SEQ ID NO: 2654031 - DNA, 25 bp, Homo sapien
ttaccacttcctgggctgatgttcc

SEQ ID NO: 2654032 - DNA, 25 bp, Homo sapien
ggagagatggatcgttcatgctcac

SEQ ID NO: 2654033 - DNA, 25 bp, Homo sapien
gttttctgctcaattctgaaacgaa

SEQ ID NO: 2654034 - DNA, 25 bp, Homo sapien
tatgaaatttatgagtcgggcgcgg

SEQ ID NO: 2654035 - DNA, 25 bp, Homo sapien
gacaggattgaagtctcccaaggaa

SEQ ID NO: 2654036 - DNA, 25 bp, Homo sapien
cagtaagctgaatgagatcgcccca

SEQ ID NO: 2654037 - DNA, 25 bp, Homo sapien
tcaggtagtccacgagcttcggcct

SEQ ID NO: 2654038 - DNA, 25 bp, Homo sapien
tcttatcactgcatacttttgctaa

SEQ ID NO: 2654039 - DNA, 25 bp, Homo sapien
tccatcacagcttgtctattgggaa

SEQ ID NO: 2654040 - DNA, 25 bp, Homo sapien
aatgggtaaatccttgatgaagtcc

SEQ ID NO: 2654041 - DNA, 25 bp, Homo sapien
tacttttgctaacattgtatttggg

SEQ ID NO: 2654042 - DNA, 25 bp, Homo sapien
ccctctgttggtaaagttctgtaca

SEQ ID NO: 2654043 - DNA, 25 bp, Homo sapien
tgtacatgtaataattccaagggcc

SEQ ID NO: 2654044 - DNA, 25 bp, Homo sapien
ggtgtgttgaacctagacccaagga

SEQ ID NO: 2654045 - DNA, 25 bp, Homo sapien
tctgtaacttttcctattccagaaa

SEQ ID NO: 2654046 - DNA, 25 bp, Homo sapien
ggtgaattatggaatacggccatct

SEQ ID NO: 2654047 - DNA, 25 bp, Homo sapien
gcctcatctcaatggttaaaactga

SEQ ID NO: 2654048 - DNA, 25 bp, Homo sapien
tgacaccacaacctaggagtgattc

SEQ ID NO: 2654049 - DNA, 25 bp, Homo sapien
cacaacaacctgactactggcattt

SEQ ID NO: 2654050 - DNA, 25 bp, Homo sapien
ctctcaacgctcatacttttcctct

SEQ ID NO: 2654051 - DNA, 25 bp, Homo sapien
tctcaacgctcatacttttcctctc

SEQ ID NO: 2654052 - DNA, 25 bp, Homo sapien
ctcaacgctcatacttttcctctct

SEQ ID NO: 2654053 - DNA, 25 bp, Homo sapien
gagcaagctcactgcaaagttcttg

SEQ ID NO: 2654054 - DNA, 25 bp, Homo sapien
ttgctcttccgctttatttatctca

SEQ ID NO: 2654055 - DNA, 25 bp, Homo sapien
tcctgagcaagctcactgcaaagtt

SEQ ID NO: 2654056 - DNA, 25 bp, Homo sapien
tgagcaagctcactgcaaagttctt

SEQ ID NO: 2654057 - DNA, 25 bp, Homo sapien
aaaactaaggacaccatatcaaaat

SEQ ID NO: 2654058 - DNA, 25 bp, Homo sapien
taaaaactaaggacaccatatcaaa

SEQ ID NO: 2654059 - DNA, 25 bp, Homo sapien
gtgcccgccaccatttttagtagtg

SEQ ID NO: 2654060 - DNA, 25 bp, Homo sapien
tgcccgccaccatttttagtagtga

SEQ ID NO: 2654061 - DNA, 25 bp, Homo sapien
tgcacccaaccagaatacattattc

SEQ ID NO: 2654062 - DNA, 25 bp, Homo sapien
tcagaaaggtttacggacataagaa

SEQ ID NO: 2654063 - DNA, 25 bp, Homo sapien
acaagtgcgtgccagtacaccagct

SEQ ID NO: 2654064 - DNA, 25 bp, Homo sapien
gtatgacttcctaacttctagaaaa

SEQ ID NO: 2654065 - DNA, 25 bp, Homo sapien
aactgtagatgcacgagtttttact

SEQ ID NO: 2654066 - DNA, 25 bp, Homo sapien
cagatgaaactgtagatgcacgagt

SEQ ID NO: 2654067 - DNA, 25 bp, Homo sapien
agatgcacgagtttttacttcaaaa

SEQ ID NO: 2654068 - DNA, 25 bp, Homo sapien
gaaacaacagatgaaactgtagatg

SEQ ID NO: 2654069 - DNA, 25 bp, Homo sapien
ccttaatctcaagggatgtggaaaa

SEQ ID NO: 2654070 - DNA, 25 bp, Homo sapien
ccataagccttaatctcaagggatg

SEQ ID NO: 2654071 - DNA, 25 bp, Homo sapien
ctgtttttagcaattccttagcaat

SEQ ID NO: 2654072 - DNA, 25 bp, Homo sapien
tttttagcaattccttagcaatggc

SEQ ID NO: 2654073 - DNA, 25 bp, Homo sapien
tgattatttgggaaaatctagcaga

SEQ ID NO: 2654074 - DNA, 25 bp, Homo sapien
tttgggaaaatctagcagatttaag

SEQ ID NO: 2654075 - DNA, 25 bp, Homo sapien
gattatttgggaaaatctagcagat

SEQ ID NO: 2654076 - DNA, 25 bp, Homo sapien
gaaaatctagcagatttaaggaaaa

SEQ ID NO: 2654077 - DNA, 25 bp, Homo sapien
cagaatctcatatggttggaatcac

SEQ ID NO: 2654078 - DNA, 25 bp, Homo sapien
tcctgggcgctggacaaatttataa

SEQ ID NO: 2654079 - DNA, 25 bp, Homo sapien
ggttcacccttggaatacatcctgg

SEQ ID NO: 2654080 - DNA, 25 bp, Homo sapien
tgagcagaaggtacaatgagttccc

SEQ ID NO: 2654081 - DNA, 25 bp, Homo sapien
taaaagacttgcttgggagactaga

SEQ ID NO: 2654082 - DNA, 25 bp, Homo sapien
tgagccctaaagcaaacaggacagg

SEQ ID NO: 2654083 - DNA, 25 bp, Homo sapien
tacatgtttattcaaggcttccaga

SEQ ID NO: 2654084 - DNA, 25 bp, Homo sapien
cttcacataagtaaggctggcggta

SEQ ID NO: 2654085 - DNA, 25 bp, Homo sapien
tctacgttacaaacaggacaaacta

SEQ ID NO: 2654086 - DNA, 25 bp, Homo sapien
tgaacagggttagatctgaagtctt

SEQ ID NO: 2654087 - DNA, 25 bp, Homo sapien
catccacatgcacattgaacagggt

SEQ ID NO: 2654088 - DNA, 25 bp, Homo sapien
agctttctttgggttgattaactgg

SEQ ID NO: 2654089 - DNA, 25 bp, Homo sapien
ttattggtgaaatttgggtagagtc

SEQ ID NO: 2654090 - DNA, 25 bp, Homo sapien
agagtcagcactaccaaaaaataag

SEQ ID NO: 2654091 - DNA, 25 bp, Homo sapien
ttaaagaggctttctagttatgcag

SEQ ID NO: 2654092 - DNA, 25 bp, Homo sapien
tatatagttcatatgtaaacacacc

SEQ ID NO: 2654093 - DNA, 25 bp, Homo sapien
ttttgttcttgttacagccttctgt

SEQ ID NO: 2654094 - DNA, 25 bp, Homo sapien
tgttcttgttacagccttctgtact

SEQ ID NO: 2654095 - DNA, 25 bp, Homo sapien
agccttctgtactccacttgagcta

SEQ ID NO: 2654096 - DNA, 25 bp, Homo sapien
tacagccttctgtactccacttgag

SEQ ID NO: 2654097 - DNA, 25 bp, Homo sapien
ttaaaatgcaggaagagattctaga

SEQ ID NO: 2654098 - DNA, 25 bp, Homo sapien
attaaaatgcaggaagagattctag

SEQ ID NO: 2654099 - DNA, 25 bp, Homo sapien
ttgaattttcatattgtagccagct

SEQ ID NO: 2654100 - DNA, 25 bp, Homo sapien
gtagccagctttattaaagctcaaa

SEQ ID NO: 2654101 - DNA, 25 bp, Homo sapien
tgagtactttgtcatcaatcctggc

SEQ ID NO: 2654102 - DNA, 25 bp, Homo sapien
tatcaagggtatgtttgggattgtt

SEQ ID NO: 2654103 - DNA, 25 bp, Homo sapien
aatatatcaagggtatgtttgggat

SEQ ID NO: 2654104 - DNA, 25 bp, Homo sapien
ttgatgttgagtactttgtcatcaa

SEQ ID NO: 2654105 - DNA, 25 bp, Homo sapien
tggagaaactacttaagctaactac

SEQ ID NO: 2654106 - DNA, 25 bp, Homo sapien
taaagacactaggatcaatgccaac

SEQ ID NO: 2654107 - DNA, 25 bp, Homo sapien
tgtgtgaatctttgagagcccttac

SEQ ID NO: 2654108 - DNA, 25 bp, Homo sapien
gattggattggcatgctagcaggca

SEQ ID NO: 2654109 - DNA, 25 bp, Homo sapien
aaatgataatattcaactacataaa

SEQ ID NO: 2654110 - DNA, 25 bp, Homo sapien
aacaaaagtgaaggcataagaggga

SEQ ID NO: 2654111 - DNA, 25 bp, Homo sapien
aaacaaaagtgaaggcataagaggg

SEQ ID NO: 2654112 - DNA, 25 bp, Homo sapien
caaatggaatcatgttgatggcatc

SEQ ID NO: 2654113 - DNA, 25 bp, Homo sapien
caaggcattgtattagttagggtcc

SEQ ID NO: 2654114 - DNA, 25 bp, Homo sapien
tacttcagagtgcaattgctaggtt

SEQ ID NO: 2654115 - DNA, 25 bp, Homo sapien
tgcttcctaggatacatgttcatta

SEQ ID NO: 2654116 - DNA, 25 bp, Homo sapien
ggctgaaggcctgatagtccctggc

SEQ ID NO: 2654117 - DNA, 25 bp, Homo sapien
ccacagtctgcaagctgagaagcca

SEQ ID NO: 2654118 - DNA, 25 bp, Homo sapien
tgttcaagggcagaagacatgcagc

SEQ ID NO: 2654119 - DNA, 25 bp, Homo sapien
caagcagatggtgcagcccttcagt

SEQ ID NO: 2654120 - DNA, 25 bp, Homo sapien
tattcaaaacgcatagcccatcctc

SEQ ID NO: 2654121 - DNA, 25 bp, Homo sapien
gttacgaatttgaagtgtctctgca

SEQ ID NO: 2654122 - DNA, 25 bp, Homo sapien
tagctctatattacagggacaatgt

SEQ ID NO: 2654123 - DNA, 25 bp, Homo sapien
tgcattattcaagtgaggcaggaaa

SEQ ID NO: 2654124 - DNA, 25 bp, Homo sapien
gaccttgcggataccacaagtccca

SEQ ID NO: 2654125 - DNA, 25 bp, Homo sapien
cttactctagaaggccacttcttca

SEQ ID NO: 2654126 - DNA, 25 bp, Homo sapien
ttcagtggggacactgaccttgcgg

SEQ ID NO: 2654127 - DNA, 25 bp, Homo sapien
cattttcttagcacaaagttccttc

SEQ ID NO: 2654128 - DNA, 25 bp, Homo sapien
gggcttgacaaaagagatggaaaca

SEQ ID NO: 2654129 - DNA, 25 bp, Homo sapien
cctacaagagtagacagaattcagt

SEQ ID NO: 2654130 - DNA, 25 bp, Homo sapien
cagttggaaagtcaagagtttagac

SEQ ID NO: 2654131 - DNA, 25 bp, Homo sapien
tttagacaactgataagggcttgac

SEQ ID NO: 2654132 - DNA, 25 bp, Homo sapien
tatgtgaaacttagccatagctgga

SEQ ID NO: 2654133 - DNA, 25 bp, Homo sapien
gcgtgctaatacataaaagcttgcc

SEQ ID NO: 2654134 - DNA, 25 bp, Homo sapien
gatctggccctactcatctctctga

SEQ ID NO: 2654135 - DNA, 25 bp, Homo sapien
aaatatcaggttagttctcaagcag

SEQ ID NO: 2654136 - DNA, 25 bp, Homo sapien
tattttatcagaacaccgcccataa

SEQ ID NO: 2654137 - DNA, 25 bp, Homo sapien
gtgcaccaaatttgaggcattaaat

SEQ ID NO: 2654138 - DNA, 25 bp, Homo sapien
gaaatgggcctaatgtttgtaatag

SEQ ID NO: 2654139 - DNA, 25 bp, Homo sapien
gataaaaacaatagcaggtaagttg

SEQ ID NO: 2654140 - DNA, 25 bp, Homo sapien
tgcacagtgctaaggtttggttctc

SEQ ID NO: 2654141 - DNA, 25 bp, Homo sapien
gttcgctgggcaacaagcccctagt

SEQ ID NO: 2654142 - DNA, 25 bp, Homo sapien
aataaaacatccagcgaccatcgag

SEQ ID NO: 2654143 - DNA, 25 bp, Homo sapien
gatcgagtccgctctctgttgtggc

SEQ ID NO: 2654144 - DNA, 25 bp, Homo sapien
cgtgtccggcaactgctgtgtcctc

SEQ ID NO: 2654145 - DNA, 25 bp, Homo sapien
ggagctcgtgtccggcaactgctgt

SEQ ID NO: 2654146 - DNA, 25 bp, Homo sapien
ttcgggatccgggacaggctcctcc

SEQ ID NO: 2654147 - DNA, 25 bp, Homo sapien
ttccctgagacccttggcggccgca

SEQ ID NO: 2654148 - DNA, 25 bp, Homo sapien
cacaacattaatgttaaccttcttt

SEQ ID NO: 2654149 - DNA, 25 bp, Homo sapien
attgttcacaacattaatgttaacc

SEQ ID NO: 2654150 - DNA, 25 bp, Homo sapien
ccataagatccaaattattgctttt

SEQ ID NO: 2654151 - DNA, 25 bp, Homo sapien
tccataagatccaaattattgcttt

SEQ ID NO: 2654152 - DNA, 25 bp, Homo sapien
tttctccccactgcaaaatgcaggg

SEQ ID NO: 2654153 - DNA, 25 bp, Homo sapien
tgtgtttaagcaagaaatccactgc

SEQ ID NO: 2654154 - DNA, 25 bp, Homo sapien
ttatcagcaacatccaccctggcct

SEQ ID NO: 2654155 - DNA, 25 bp, Homo sapien
caccctggccttgtgtttaagcaag

SEQ ID NO: 2654156 - DNA, 25 bp, Homo sapien
caaggtgaattactgtcaagccgtg

SEQ ID NO: 2654157 - DNA, 25 bp, Homo sapien
cccagaccaggctgcaaggtgaatt

SEQ ID NO: 2654158 - DNA, 25 bp, Homo sapien
tttaaccagcatgagcatgacctca

SEQ ID NO: 2654159 - DNA, 25 bp, Homo sapien
tgctccagctttaaccagcatgagc

SEQ ID NO: 2654160 - DNA, 25 bp, Homo sapien
ttgaataagatactccacgatgcgc

SEQ ID NO: 2654161 - DNA, 25 bp, Homo sapien
cacgatgcgcacatgattgctctga

SEQ ID NO: 2654162 - DNA, 25 bp, Homo sapien
ggtccttgaggtgcagatcttgaat

SEQ ID NO: 2654163 - DNA, 25 bp, Homo sapien
tcatcaggctggttcaggtccttga

SEQ ID NO: 2654164 - DNA, 25 bp, Homo sapien
gatcttgcagctggacattactctc

SEQ ID NO: 2654165 - DNA, 25 bp, Homo sapien
ttgctgccaaccctttttcccaaca

SEQ ID NO: 2654166 - DNA, 25 bp, Homo sapien
cagttgaaaagagttttggacagga

SEQ ID NO: 2654167 - DNA, 25 bp, Homo sapien
tctgaactcagtttaagatcttgca

SEQ ID NO: 2654168 - DNA, 25 bp, Homo sapien
gcgcctagcccaccagtgagtcttt

SEQ ID NO: 2654169 - DNA, 25 bp, Homo sapien
cgcgcctagcccaccagtgagtctt

SEQ ID NO: 2654170 - DNA, 25 bp, Homo sapien
gcctagcccaccagtgagtctttta

SEQ ID NO: 2654171 - DNA, 25 bp, Homo sapien
ctagcccaccagtgagtcttttaag

SEQ ID NO: 2654172 - DNA, 25 bp, Homo sapien
cctctcagctgccaaaagaaatggt

SEQ ID NO: 2654173 - DNA, 25 bp, Homo sapien
ttcaacatggcccctctcagctgcc

SEQ ID NO: 2654174 - DNA, 25 bp, Homo sapien
gcccctctcagctgccaaaagaaat

SEQ ID NO: 2654175 - DNA, 25 bp, Homo sapien
atggcccctctcagctgccaaaaga

SEQ ID NO: 2654176 - DNA, 25 bp, Homo sapien
aagtatgcaggtttaggaaggtaag

SEQ ID NO: 2654177 - DNA, 25 bp, Homo sapien
tctgaagtatgcaggtttaggaagg

SEQ ID NO: 2654178 - DNA, 25 bp, Homo sapien
agtatgcaggtttaggaaggtaagt

SEQ ID NO: 2654179 - DNA, 25 bp, Homo sapien
tttggttaaagctgcggtccagagt

SEQ ID NO: 2654180 - DNA, 25 bp, Homo sapien
ttggttaaagctgcggtccagagtg

SEQ ID NO: 2654181 - DNA, 25 bp, Homo sapien
aaagctgcggtccagagtgtggacc

SEQ ID NO: 2654182 - DNA, 25 bp, Homo sapien
gttaaagctgcggtccagagtgtgg

SEQ ID NO: 2654183 - DNA, 25 bp, Homo sapien
tgcaacagagacacactcgacgtag

SEQ ID NO: 2654184 - DNA, 25 bp, Homo sapien
agagcatgctccttcaatagtaagg

SEQ ID NO: 2654185 - DNA, 25 bp, Homo sapien
taagggctgcaatggagtttctgga

SEQ ID NO: 2654186 - DNA, 25 bp, Homo sapien
cgtagaaacccctgtgccaggagag

SEQ ID NO: 2654187 - DNA, 25 bp, Homo sapien
ttgccactgggctagcagcacctgc

SEQ ID NO: 2654188 - DNA, 25 bp, Homo sapien
cagcgaggtgcaaggcagtgtttcc

SEQ ID NO: 2654189 - DNA, 25 bp, Homo sapien
tctcatttatgtcttgccactgggc

SEQ ID NO: 2654190 - DNA, 25 bp, Homo sapien
tgtgaccatgcttcgcagcgaggtg

SEQ ID NO: 2654191 - DNA, 25 bp, Homo sapien
cattttggcagtcacctgactggtc

SEQ ID NO: 2654192 - DNA, 25 bp, Homo sapien
gcaccagtctacctttcaaacagct

SEQ ID NO: 2654193 - DNA, 25 bp, Homo sapien
cagctgtgacagttacctgcccaca

SEQ ID NO: 2654194 - DNA, 25 bp, Homo sapien
tcatgagtgtctcagtgagaagcct

SEQ ID NO: 2654195 - DNA, 25 bp, Homo sapien
tgagaagtgaccatccagggcaaat

SEQ ID NO: 2654196 - DNA, 25 bp, Homo sapien
aggaccccactgacctgagtttcca

SEQ ID NO: 2654197 - DNA, 25 bp, Homo sapien
gagtttccaaacagccagacaaaaa

SEQ ID NO: 2654198 - DNA, 25 bp, Homo sapien
aaaagttactggaccataggttgag

SEQ ID NO: 2654199 - DNA, 25 bp, Homo sapien
ctagttctttccgtagctctcagga

SEQ ID NO: 2654200 - DNA, 25 bp, Homo sapien
tctttccgtagctctcaggagaggc

SEQ ID NO: 2654201 - DNA, 25 bp, Homo sapien
caggagaggcatcaagtttagaaat

SEQ ID NO: 2654202 - DNA, 25 bp, Homo sapien
tctcaggagaggcatcaagtttaga

SEQ ID NO: 2654203 - DNA, 25 bp, Homo sapien
tgtataagccaagcgtgcactagtt

SEQ ID NO: 2654204 - DNA, 25 bp, Homo sapien
ttctctgtataagccaagcgtgcac

SEQ ID NO: 2654205 - DNA, 25 bp, Homo sapien
cttctctgtataagccaagcgtgca

SEQ ID NO: 2654206 - DNA, 25 bp, Homo sapien
tctgtataagccaagcgtgcactag

SEQ ID NO: 2654207 - DNA, 25 bp, Homo sapien
tgaagggggataccgactggggaca

SEQ ID NO: 2654208 - DNA, 25 bp, Homo sapien
cacctgtgtaatgactgtagaggca

SEQ ID NO: 2654209 - DNA, 25 bp, Homo sapien
acctgtgtaatgactgtagaggcac

SEQ ID NO: 2654210 - DNA, 25 bp, Homo sapien
aaagcctttattggacccagggcag

SEQ ID NO: 2654211 - DNA, 25 bp, Homo sapien
tgataaaatgtgaggtaggacctcc

SEQ ID NO: 2654212 - DNA, 25 bp, Homo sapien
ttaatagggccctaaagagagcctg

SEQ ID NO: 2654213 - DNA, 25 bp, Homo sapien
taaattaggtgagtctgtcatagcc

SEQ ID NO: 2654214 - DNA, 25 bp, Homo sapien
tcacaatactactgggaggatacgt

SEQ ID NO: 2654215 - DNA, 25 bp, Homo sapien
tctcttacaggtcttagaagcctcc

SEQ ID NO: 2654216 - DNA, 25 bp, Homo sapien
tccgggaattgcgatgtgaacatct

SEQ ID NO: 2654217 - DNA, 25 bp, Homo sapien
agcaacagttagctgaggccttctc

SEQ ID NO: 2654218 - DNA, 25 bp, Homo sapien
ctggtgcagatcaacgttctcactg

SEQ ID NO: 2654219 - DNA, 25 bp, Homo sapien
gcagatcaacgttctcactgagaag

SEQ ID NO: 2654220 - DNA, 25 bp, Homo sapien
cctggttgctatctgcaaactactg

SEQ ID NO: 2654221 - DNA, 25 bp, Homo sapien
agttgacaagggatgcatggccgtt

SEQ ID NO: 2654222 - DNA, 25 bp, Homo sapien
gctgtgcacttaataaactgtttac

SEQ ID NO: 2654223 - DNA, 25 bp, Homo sapien
taaactgtttacaaccgtgatgtgg

SEQ ID NO: 2654224 - DNA, 25 bp, Homo sapien
tgtcaatatcatgctgtgcacttaa

SEQ ID NO: 2654225 - DNA, 25 bp, Homo sapien
ccgtgatgtggttgttgataacaac

SEQ ID NO: 2654226 - DNA, 25 bp, Homo sapien
cttggacggtgaaaagacaaatgga

SEQ ID NO: 2654227 - DNA, 25 bp, Homo sapien
aacttggacggtgaaaagacaaatg

SEQ ID NO: 2654228 - DNA, 25 bp, Homo sapien
acttggacggtgaaaagacaaatgg

SEQ ID NO: 2654229 - DNA, 25 bp, Homo sapien
tcaagtcacagcctgccttcagcag

SEQ ID NO: 2654230 - DNA, 25 bp, Homo sapien
gctacatgcagaggggtttgctgct

SEQ ID NO: 2654231 - DNA, 25 bp, Homo sapien
ttgtcaacagccttcaagtcacagc

SEQ ID NO: 2654232 - DNA, 25 bp, Homo sapien
gttccacatttccacgatcagcagc

SEQ ID NO: 2654233 - DNA, 25 bp, Homo sapien
tgagcatgcccacgacaaggctatg

SEQ ID NO: 2654234 - DNA, 25 bp, Homo sapien
tccaggcgtagtatctctctgcttt

SEQ ID NO: 2654235 - DNA, 25 bp, Homo sapien
tgcccacgacaaggctatggttgct

SEQ ID NO: 2654236 - DNA, 25 bp, Homo sapien
ctctctccaggcgtagtatctctct

SEQ ID NO: 2654237 - DNA, 25 bp, Homo sapien
tcagctgatggtaagccaggtccca

SEQ ID NO: 2654238 - DNA, 25 bp, Homo sapien
tcccagagaagcgtgcgaatgtgtc

SEQ ID NO: 2654239 - DNA, 25 bp, Homo sapien
taaagcctgttgacgggtccctgat

SEQ ID NO: 2654240 - DNA, 25 bp, Homo sapien
tctgtaaagttccacgaacgggcca

SEQ ID NO: 2654241 - DNA, 25 bp, Homo sapien
ctttctggagcgcagacttaaacag

SEQ ID NO: 2654242 - DNA, 25 bp, Homo sapien
tggagcgcagacttaaacagcgagc

SEQ ID NO: 2654243 - DNA, 25 bp, Homo sapien
ttcctctttctggagcgcagactta

SEQ ID NO: 2654244 - DNA, 25 bp, Homo sapien
tctggagcgcagacttaaacagcga

SEQ ID NO: 2654245 - DNA, 25 bp, Homo sapien
ctcgtcttaggatgtccatgagagg

SEQ ID NO: 2654246 - DNA, 25 bp, Homo sapien
tatgtggtataaatagtgtgtgctc

SEQ ID NO: 2654247 - DNA, 25 bp, Homo sapien
tgtgtgctcatggactgtgcttctg

SEQ ID NO: 2654248 - DNA, 25 bp, Homo sapien
caaatagacccctgagcaaggacac

SEQ ID NO: 2654249 - DNA, 25 bp, Homo sapien
tcatacagttgcttggccgggtcac

SEQ ID NO: 2654250 - DNA, 25 bp, Homo sapien
tgtggccatgttcacggaagctttc

SEQ ID NO: 2654251 - DNA, 25 bp, Homo sapien
ccgtgtagccagataagcagagccc

SEQ ID NO: 2654252 - DNA, 25 bp, Homo sapien
ttttgggaaacctgcgtgtaccagc

SEQ ID NO: 2654253 - DNA, 25 bp, Homo sapien
tagttccatactccgtgtgagccac

SEQ ID NO: 2654254 - DNA, 25 bp, Homo sapien
ccttccatagttccatactccgtgt

SEQ ID NO: 2654255 - DNA, 25 bp, Homo sapien
ctgtagctggtcaggatgatatttc

SEQ ID NO: 2654256 - DNA, 25 bp, Homo sapien
gtgagccacagctaacaccacgctg

SEQ ID NO: 2654257 - DNA, 25 bp, Homo sapien
atgagtaaccagtattgactgggtc

SEQ ID NO: 2654258 - DNA, 25 bp, Homo sapien
ctgagtagggggatgacacagaact

SEQ ID NO: 2654259 - DNA, 25 bp, Homo sapien
aggctaatgagtaaccagtattgac

SEQ ID NO: 2654260 - DNA, 25 bp, Homo sapien
gtagggggatgacacagaactgcca

SEQ ID NO: 2654261 - DNA, 25 bp, Homo sapien
cagaatagtctgaatcatccgaatc

SEQ ID NO: 2654262 - DNA, 25 bp, Homo sapien
gtcaatatactagagtgatccaaaa

SEQ ID NO: 2654263 - DNA, 25 bp, Homo sapien
ggaacctctttcataggaagaatac

SEQ ID NO: 2654264 - DNA, 25 bp, Homo sapien
tttggccaacaattgtttgagaacg

SEQ ID NO: 2654265 - DNA, 25 bp, Homo sapien
tcttggagtttgagtcagttttgct

SEQ ID NO: 2654266 - DNA, 25 bp, Homo sapien
gttttgcttttgaaatgacgagtct

SEQ ID NO: 2654267 - DNA, 25 bp, Homo sapien
ttcttggagtttgagtcagttttgc

SEQ ID NO: 2654268 - DNA, 25 bp, Homo sapien
gagtcagttttgcttttgaaatgac

SEQ ID NO: 2654269 - DNA, 25 bp, Homo sapien
ttaaaagaactgaatgctgagtgga

SEQ ID NO: 2654270 - DNA, 25 bp, Homo sapien
gaagaaatttatggcattaaaagaa

SEQ ID NO: 2654271 - DNA, 25 bp, Homo sapien
actgaatgctgagtggaaaatcatg

SEQ ID NO: 2654272 - DNA, 25 bp, Homo sapien
gagtggaaaatcatgtaaatacaat

SEQ ID NO: 2654273 - DNA, 25 bp, Homo sapien
ggcgtgaggctacacaggcattttc

SEQ ID NO: 2654274 - DNA, 25 bp, Homo sapien
gatttccgtactatgggcgtgaggc

SEQ ID NO: 2654275 - DNA, 25 bp, Homo sapien
tgttagagttccctgtcaccaccat

SEQ ID NO: 2654276 - DNA, 25 bp, Homo sapien
taaacaacattaacatgcccaaagg

SEQ ID NO: 2654277 - DNA, 25 bp, Homo sapien
gagaggtcagtggaaactggccata

SEQ ID NO: 2654278 - DNA, 25 bp, Homo sapien
gcataaagaggttaccccaatctgg

SEQ ID NO: 2654279 - DNA, 25 bp, Homo sapien
aaacattcataagattaagtgggcc

SEQ ID NO: 2654280 - DNA, 25 bp, Homo sapien
cagatgggacaatacttcttctcaa

SEQ ID NO: 2654281 - DNA, 25 bp, Homo sapien
aaattcaacagtttaacacttgaca

SEQ ID NO: 2654282 - DNA, 25 bp, Homo sapien
aattcaacagtttaacacttgacac

SEQ ID NO: 2654283 - DNA, 25 bp, Homo sapien
acagtttaacacttgacacagttat

SEQ ID NO: 2654284 - DNA, 25 bp, Homo sapien
tcaacagtttaacacttgacacagt

SEQ ID NO: 2654285 - DNA, 25 bp, Homo sapien
tgcagcactgaacctaccttgttct

SEQ ID NO: 2654286 - DNA, 25 bp, Homo sapien
tctttctcgccttattatttgaaac

SEQ ID NO: 2654287 - DNA, 25 bp, Homo sapien
gtttctggtgttctttctcgcctta

SEQ ID NO: 2654288 - DNA, 25 bp, Homo sapien
gttctccccgaacatctaaacactg

SEQ ID NO: 2654289 - DNA, 25 bp, Homo sapien
gattgattgcaggtcattttggcca

SEQ ID NO: 2654290 - DNA, 25 bp, Homo sapien
cacatgtggaaggaagtagtctgaa

SEQ ID NO: 2654291 - DNA, 25 bp, Homo sapien
tacaaaggaacctagatctccaggc

SEQ ID NO: 2654292 - DNA, 25 bp, Homo sapien
tagctaaggtcccagctgagtacat

SEQ ID NO: 2654293 - DNA, 25 bp, Homo sapien
ccagaatagttgaggctactgtcac

SEQ ID NO: 2654294 - DNA, 25 bp, Homo sapien
tctcctggtcctgctaaattcataa

SEQ ID NO: 2654295 - DNA, 25 bp, Homo sapien
gattggcaccatatatgatggcagg

SEQ ID NO: 2654296 - DNA, 25 bp, Homo sapien
tctagccactctgttattctcctgg

SEQ ID NO: 2654297 - DNA, 25 bp, Homo sapien
gctctcggaccaatcaaacggcaga

SEQ ID NO: 2654298 - DNA, 25 bp, Homo sapien
ggctctccaaagtaattccggcttc

SEQ ID NO: 2654299 - DNA, 25 bp, Homo sapien
aattcctccctgcagtttgaaactg

SEQ ID NO: 2654300 - DNA, 25 bp, Homo sapien
ttgaaactgtcaggttgccgtctag

SEQ ID NO: 2654301 - DNA, 25 bp, Homo sapien
cagatgagagagagcagcggcactt

SEQ ID NO: 2654302 - DNA, 25 bp, Homo sapien
tctctgtaggtatctgaggtgagca

SEQ ID NO: 2654303 - DNA, 25 bp, Homo sapien
cagatcatctgagaagggggcgatc

SEQ ID NO: 2654304 - DNA, 25 bp, Homo sapien
gcagcggcactttttgtgggagtgg

SEQ ID NO: 2654305 - DNA, 25 bp, Homo sapien
tccatacaagacttccagcagtgct

SEQ ID NO: 2654306 - DNA, 25 bp, Homo sapien
tccacttccatacaagacttccagc

SEQ ID NO: 2654307 - DNA, 25 bp, Homo sapien
cttccatacaagacttccagcagtg

SEQ ID NO: 2654308 - DNA, 25 bp, Homo sapien
catacaagacttccagcagtgctac

SEQ ID NO: 2654309 - DNA, 25 bp, Homo sapien
aactccttggcccagaaatgagaca

SEQ ID NO: 2654310 - DNA, 25 bp, Homo sapien
cattccttgaggtattagagctggc

SEQ ID NO: 2654311 - DNA, 25 bp, Homo sapien
agaacagtgcaaggtggatgtcctg

SEQ ID NO: 2654312 - DNA, 25 bp, Homo sapien
tatgactccactaaatgcaaaggtg

SEQ ID NO: 2654313 - DNA, 25 bp, Homo sapien
ttgtatcctgatgaataaaaatgac

SEQ ID NO: 2654314 - DNA, 25 bp, Homo sapien
acaacactgtataaagtaatactta

SEQ ID NO: 2654315 - DNA, 25 bp, Homo sapien
tatgaataacctttatttgatctgg

SEQ ID NO: 2654316 - DNA, 25 bp, Homo sapien
aattgttaaacggacatgatcgagc

SEQ ID NO: 2654317 - DNA, 25 bp, Homo sapien
agaatagttgttcacttttcaagct

SEQ ID NO: 2654318 - DNA, 25 bp, Homo sapien
aatagttgttcacttttcaagcttt

SEQ ID NO: 2654319 - DNA, 25 bp, Homo sapien
gaatagttgttcacttttcaagctt

SEQ ID NO: 2654320 - DNA, 25 bp, Homo sapien
tgacccggcattactgtcatgccac

SEQ ID NO: 2654321 - DNA, 25 bp, Homo sapien
cagagcagagtcgacacactgaccc

SEQ ID NO: 2654322 - DNA, 25 bp, Homo sapien
agagtcgacacactgacccggcatt

SEQ ID NO: 2654323 - DNA, 25 bp, Homo sapien
tcgacacactgacccggcattactg

SEQ ID NO: 2654324 - DNA, 25 bp, Homo sapien
agatccagggcctaaacctccagga

SEQ ID NO: 2654325 - DNA, 25 bp, Homo sapien
ccacttggctacactcggcatgcta

SEQ ID NO: 2654326 - DNA, 25 bp, Homo sapien
cagaaggccctgaggtcaagctcaa

SEQ ID NO: 2654327 - DNA, 25 bp, Homo sapien
aagctcaatcaagccagatccaggg

SEQ ID NO: 2654328 - DNA, 25 bp, Homo sapien
attctgcacacaggcatccctgact

SEQ ID NO: 2654329 - DNA, 25 bp, Homo sapien
acaggcatccctgactgctggagga

SEQ ID NO: 2654330 - DNA, 25 bp, Homo sapien
cagggttcaaaggaactgatattct

SEQ ID NO: 2654331 - DNA, 25 bp, Homo sapien
cctgactgctggaggaaaattgctc

SEQ ID NO: 2654332 - DNA, 25 bp, Homo sapien
gggtggacgagaggccccagttgtg

SEQ ID NO: 2654333 - DNA, 25 bp, Homo sapien
attgcaggcaatctggcccccagtg

SEQ ID NO: 2654334 - DNA, 25 bp, Homo sapien
caactttgcccaaggtaaacagaag

SEQ ID NO: 2654335 - DNA, 25 bp, Homo sapien
cagttgtggtgctacattgcaggca

SEQ ID NO: 2654336 - DNA, 25 bp, Homo sapien
ttccaccattccacattccatgctc

SEQ ID NO: 2654337 - DNA, 25 bp, Homo sapien
tccaccattccacattccatgctcc

SEQ ID NO: 2654338 - DNA, 25 bp, Homo sapien
tgtgaaatttatagcataggacgag

SEQ ID NO: 2654339 - DNA, 25 bp, Homo sapien
gttgtgaaatttatagcataggacg

SEQ ID NO: 2654340 - DNA, 25 bp, Homo sapien
gcctctctgaccaatggcattcatg

SEQ ID NO: 2654341 - DNA, 25 bp, Homo sapien
ctctgcaggattgcctctctgacca

SEQ ID NO: 2654342 - DNA, 25 bp, Homo sapien
ggattgcctctctgaccaatggcat

SEQ ID NO: 2654343 - DNA, 25 bp, Homo sapien
tctctgaccaatggcattcatggtc

SEQ ID NO: 2654344 - DNA, 25 bp, Homo sapien
tggtcaacccaatctaaagtgtcga

SEQ ID NO: 2654345 - DNA, 25 bp, Homo sapien
aaagtgtcgatcttagcacagctag

SEQ ID NO: 2654346 - DNA, 25 bp, Homo sapien
aagtgatgagccacttgaattggtc

SEQ ID NO: 2654347 - DNA, 25 bp, Homo sapien
gatgggcaaggatgagccaaaagga

SEQ ID NO: 2654348 - DNA, 25 bp, Homo sapien
gcagctgctgacaataccatcatta

SEQ ID NO: 2654349 - DNA, 25 bp, Homo sapien
gaatgatcagggaactctggcggca

SEQ ID NO: 2654350 - DNA, 25 bp, Homo sapien
tatcatgaatccaataattccagag

SEQ ID NO: 2654351 - DNA, 25 bp, Homo sapien
caatggcattgtctgagtcaagaga

SEQ ID NO: 2654352 - DNA, 25 bp, Homo sapien
gatggaatgagaatccggtgcctca

SEQ ID NO: 2654353 - DNA, 25 bp, Homo sapien
cccacaatagggatgtcactgcagc

SEQ ID NO: 2654354 - DNA, 25 bp, Homo sapien
gagatggtccttgctgtatagtcac

SEQ ID NO: 2654355 - DNA, 25 bp, Homo sapien
ctttgtggctacagtggctgcgtga

SEQ ID NO: 2654356 - DNA, 25 bp, Homo sapien
tccagatccatgggaaaagttgagg

SEQ ID NO: 2654357 - DNA, 25 bp, Homo sapien
agatccatgggaaaagttgaggaga

SEQ ID NO: 2654358 - DNA, 25 bp, Homo sapien
gttgaggagagggtgttgtctctgg

SEQ ID NO: 2654359 - DNA, 25 bp, Homo sapien
ttcataaataccatctcccattttg

SEQ ID NO: 2654360 - DNA, 25 bp, Homo sapien
tcacaccaataggtgacttcctggg

SEQ ID NO: 2654361 - DNA, 25 bp, Homo sapien
tcttagacaacttctgtgtccccat

SEQ ID NO: 2654362 - DNA, 25 bp, Homo sapien
gaccttctcacaccaataggtgact

SEQ ID NO: 2654363 - DNA, 25 bp, Homo sapien
ctgggaggcgttccagctcctactc

SEQ ID NO: 2654364 - DNA, 25 bp, Homo sapien
ctaaggctctaaggccctgtctctg

SEQ ID NO: 2654365 - DNA, 25 bp, Homo sapien
ctgctagtgtctactgctgatataa

SEQ ID NO: 2654366 - DNA, 25 bp, Homo sapien
tgctgatataactcccctgccctct

SEQ ID NO: 2654367 - DNA, 25 bp, Homo sapien
tggttcaagtggtatacaatgtgac

SEQ ID NO: 2654368 - DNA, 25 bp, Homo sapien
caggatgcctcagccacagttccat

SEQ ID NO: 2654369 - DNA, 25 bp, Homo sapien
aaggatgagtacaggatgcctcagc

SEQ ID NO: 2654370 - DNA, 25 bp, Homo sapien
aagcagagggatggataaagatgtc

SEQ ID NO: 2654371 - DNA, 25 bp, Homo sapien
gaagattagtcctccaagaaagggc

SEQ ID NO: 2654372 - DNA, 25 bp, Homo sapien
actgtaccaccatcgcacagcatgg

SEQ ID NO: 2654373 - DNA, 25 bp, Homo sapien
ctgtatctactgagatttggatatc

SEQ ID NO: 2654374 - DNA, 25 bp, Homo sapien
tggtgtcacaccctactccgattat

SEQ ID NO: 2654375 - DNA, 25 bp, Homo sapien
caatactgttagatatgctccccgt

SEQ ID NO: 2654376 - DNA, 25 bp, Homo sapien
taccatgtttttcccactgtggctg

SEQ ID NO: 2654377 - DNA, 25 bp, Homo sapien
tgctaccatgtttttcccactgtgg

SEQ ID NO: 2654378 - DNA, 25 bp, Homo sapien
cagatacttaaatccaccgaggaag

SEQ ID NO: 2654379 - DNA, 25 bp, Homo sapien
tttctcagctgccagatacttaaat

SEQ ID NO: 2654380 - DNA, 25 bp, Homo sapien
catccgatagatctctgcaacatga

SEQ ID NO: 2654381 - DNA, 25 bp, Homo sapien
caggcccctctagcatccgatagat

SEQ ID NO: 2654382 - DNA, 25 bp, Homo sapien
ttttaatggaccagggaccattgca

SEQ ID NO: 2654383 - DNA, 25 bp, Homo sapien
atggaccagggaccattgcaggccc

SEQ ID NO: 2654384 - DNA, 25 bp, Homo sapien
ttatcagtgataatcatttgaagtg

SEQ ID NO: 2654385 - DNA, 25 bp, Homo sapien
tccagttatcagtgataatcatttg

SEQ ID NO: 2654386 - DNA, 25 bp, Homo sapien
atcatttgaagtgttggattatctc

SEQ ID NO: 2654387 - DNA, 25 bp, Homo sapien
gaagtgttggattatctccaatcat

SEQ ID NO: 2654388 - DNA, 25 bp, Homo sapien
cttggcagtcttggcctcgtctttc

SEQ ID NO: 2654389 - DNA, 25 bp, Homo sapien
agtctgggctttgttgaactcttcc

SEQ ID NO: 2654390 - DNA, 25 bp, Homo sapien
tctgccttggcagtcttggcctcgt

SEQ ID NO: 2654391 - DNA, 25 bp, Homo sapien
cttggcctcgtctttcttcttggca

SEQ ID NO: 2654392 - DNA, 25 bp, Homo sapien
gcagccaacatgactgttataaaga

SEQ ID NO: 2654393 - DNA, 25 bp, Homo sapien
tctgcagtttgctcatcatctcata

SEQ ID NO: 2654394 - DNA, 25 bp, Homo sapien
catagcagccaacatgactgttata

SEQ ID NO: 2654395 - DNA, 25 bp, Homo sapien
tagagattgcagttcagcttgctca

SEQ ID NO: 2654396 - DNA, 25 bp, Homo sapien
aggactggaggccatagatgttcga

SEQ ID NO: 2654397 - DNA, 25 bp, Homo sapien
gaggactggaggccatagatgttcg

SEQ ID NO: 2654398 - DNA, 25 bp, Homo sapien
tccagatcttcagttgttgcgacag

SEQ ID NO: 2654399 - DNA, 25 bp, Homo sapien
ttctgtgcgggtttggaggactact

SEQ ID NO: 2654400 - DNA, 25 bp, Homo sapien
ggacttgccactcccaatggtagga

SEQ ID NO: 2654401 - DNA, 25 bp, Homo sapien
tgtcattaaggtgggaaaagtgcaa

SEQ ID NO: 2654402 - DNA, 25 bp, Homo sapien
cagctaagacaagcttattatcctc

SEQ ID NO: 2654403 - DNA, 25 bp, Homo sapien
gtttcccgaatttcttctgcatgag

SEQ ID NO: 2654404 - DNA, 25 bp, Homo sapien
ttctgtttcccgaatttcttctgca

SEQ ID NO: 2654405 - DNA, 25 bp, Homo sapien
cactggaaccacctttcagctccat

SEQ ID NO: 2654406 - DNA, 25 bp, Homo sapien
gccactggaaccacctttcagctcc

SEQ ID NO: 2654407 - DNA, 25 bp, Homo sapien
aagccactggaaccacctttcagct

SEQ ID NO: 2654408 - DNA, 25 bp, Homo sapien
agagcctgcagctctccataaaagc

SEQ ID NO: 2654409 - DNA, 25 bp, Homo sapien
taaccataagcgccattatccttgg

SEQ ID NO: 2654410 - DNA, 25 bp, Homo sapien
accataagcgccattatccttggag

SEQ ID NO: 2654411 - DNA, 25 bp, Homo sapien
aaccataagcgccattatccttgga

SEQ ID NO: 2654412 - DNA, 25 bp, Homo sapien
ttaaccataagcgccattatccttg

SEQ ID NO: 2654413 - DNA, 25 bp, Homo sapien
gtcttgcctactgctccagcgacag

SEQ ID NO: 2654414 - DNA, 25 bp, Homo sapien
gtggatcaaggtaacagcagcaaga

SEQ ID NO: 2654415 - DNA, 25 bp, Homo sapien
gggtgtgtaggtcttgcctactgct

SEQ ID NO: 2654416 - DNA, 25 bp, Homo sapien
aggcaccgagtggatcaaggtaaca

SEQ ID NO: 2654417 - DNA, 25 bp, Homo sapien
aaatgggcctcctgttacattgtga

SEQ ID NO: 2654418 - DNA, 25 bp, Homo sapien
gctgatggtattagagtatcactct

SEQ ID NO: 2654419 - DNA, 25 bp, Homo sapien
tcaagctgatggtattagagtatca

SEQ ID NO: 2654420 - DNA, 25 bp, Homo sapien
aatgggcctcctgttacattgtgac

SEQ ID NO: 2654421 - DNA, 25 bp, Homo sapien
tgaagctttgtatgtcatattgtgc

SEQ ID NO: 2654422 - DNA, 25 bp, Homo sapien
catattgtgctgttctactgtttct

SEQ ID NO: 2654423 - DNA, 25 bp, Homo sapien
catccaaattggaacctttgagaaa

SEQ ID NO: 2654424 - DNA, 25 bp, Homo sapien
aaatagccagcatctttttagaaac

SEQ ID NO: 2654425 - DNA, 25 bp, Homo sapien
tctgctgacacatcttgaatgtcta

SEQ ID NO: 2654426 - DNA, 25 bp, Homo sapien
tggtcacctggcacgctctagtagg

SEQ ID NO: 2654427 - DNA, 25 bp, Homo sapien
tccccatgaaggagatatgagctgt

SEQ ID NO: 2654428 - DNA, 25 bp, Homo sapien
caactaaaggcagcaaactacatgg

SEQ ID NO: 2654429 - DNA, 25 bp, Homo sapien
tacatggacatgagatgatccctag

SEQ ID NO: 2654430 - DNA, 25 bp, Homo sapien
agtgatgtcatcctgctgggtttgt

SEQ ID NO: 2654431 - DNA, 25 bp, Homo sapien
tgtcatcctgctgggtttgtgtact

SEQ ID NO: 2654432 - DNA, 25 bp, Homo sapien
atcctgctgggtttgtgtacttctc

SEQ ID NO: 2654433 - DNA, 25 bp, Homo sapien
gctgggtttgtgtacttctctttaa

SEQ ID NO: 2654434 - DNA, 25 bp, Homo sapien
gatcctctagagataacaccaagga

SEQ ID NO: 2654435 - DNA, 25 bp, Homo sapien
tctagttcaggatctccaaggctct

SEQ ID NO: 2654436 - DNA, 25 bp, Homo sapien
taacaccaaggattttcctgcacat

SEQ ID NO: 2654437 - DNA, 25 bp, Homo sapien
ggctctgacaatgaagatcctctag

SEQ ID NO: 2654438 - DNA, 25 bp, Homo sapien
ggaatctggatctggagatctggaa

SEQ ID NO: 2654439 - DNA, 25 bp, Homo sapien
tgtcctgaagtctagtattagcttt

SEQ ID NO: 2654440 - DNA, 25 bp, Homo sapien
tctcacgtccagggcctgagctctg

SEQ ID NO: 2654441 - DNA, 25 bp, Homo sapien
gagaatggaatctggatctggagat

SEQ ID NO: 2654442 - DNA, 25 bp, Homo sapien
tcaaggaagactcccgcctggtggg

SEQ ID NO: 2654443 - DNA, 25 bp, Homo sapien
ctggtgggaggagcccttgtggaag

SEQ ID NO: 2654444 - DNA, 25 bp, Homo sapien
gtgggaggagcccttgtggaaggct

SEQ ID NO: 2654445 - DNA, 25 bp, Homo sapien
ggaggagcccttgtggaaggctcac

SEQ ID NO: 2654446 - DNA, 25 bp, Homo sapien
cagaggaagttctgaatgacacagg

SEQ ID NO: 2654447 - DNA, 25 bp, Homo sapien
cacaggccaggatggtttgacccat

SEQ ID NO: 2654448 - DNA, 25 bp, Homo sapien
gaggaagttctgaatgacacaggcc

SEQ ID NO: 2654449 - DNA, 25 bp, Homo sapien
acacaggccaggatggtttgaccca

SEQ ID NO: 2654450 - DNA, 25 bp, Homo sapien
agagtggaaccgcatcacacagcat

SEQ ID NO: 2654451 - DNA, 25 bp, Homo sapien
agaagagtggaaccgcatcacacag

SEQ ID NO: 2654452 - DNA, 25 bp, Homo sapien
tggctgagaagagtggaaccgcatc

SEQ ID NO: 2654453 - DNA, 25 bp, Homo sapien
tgagaagagtggaaccgcatcacac

SEQ ID NO: 2654454 - DNA, 25 bp, Homo sapien
tggcaccgagcatgaagttgatctt

SEQ ID NO: 2654455 - DNA, 25 bp, Homo sapien
tttggcaccgagcatgaagttgatc

SEQ ID NO: 2654456 - DNA, 25 bp, Homo sapien
gcaccgagcatgaagttgatcttgc

SEQ ID NO: 2654457 - DNA, 25 bp, Homo sapien
ctttggcaccgagcatgaagttgat

SEQ ID NO: 2654458 - DNA, 25 bp, Homo sapien
tttgctgctgcccgtgatggcccag

SEQ ID NO: 2654459 - DNA, 25 bp, Homo sapien
gctgcccgtgatggcccaggtatat

SEQ ID NO: 2654460 - DNA, 25 bp, Homo sapien
atgccaaatcactctgccgaatcaa

SEQ ID NO: 2654461 - DNA, 25 bp, Homo sapien
gccaaatcactctgccgaatcaaca

SEQ ID NO: 2654462 - DNA, 25 bp, Homo sapien
tgcctcttcagtattggaatgcagt

SEQ ID NO: 2654463 - DNA, 25 bp, Homo sapien
cagagcctgatagcagcctccttta

SEQ ID NO: 2654464 - DNA, 25 bp, Homo sapien
cagctgtcaaatcgttagtcacaca

SEQ ID NO: 2654465 - DNA, 25 bp, Homo sapien
gattgtctacaacatcaccacatgt

SEQ ID NO: 2654466 - DNA, 25 bp, Homo sapien
aattccacaaggcaatacaggcacc

SEQ ID NO: 2654467 - DNA, 25 bp, Homo sapien
gcaatacaggcacccaagctgttct

SEQ ID NO: 2654468 - DNA, 25 bp, Homo sapien
gaattccacaaggcaatacaggcac

SEQ ID NO: 2654469 - DNA, 25 bp, Homo sapien
cttccagacagcgtaaaatacccac

SEQ ID NO: 2654470 - DNA, 25 bp, Homo sapien
agggtttagctttcttccagacagc

SEQ ID NO: 2654471 - DNA, 25 bp, Homo sapien
tagctttcttccagacagcgtaaaa

SEQ ID NO: 2654472 - DNA, 25 bp, Homo sapien
ttcttccagacagcgtaaaataccc

SEQ ID NO: 2654473 - DNA, 25 bp, Homo sapien
tgtgccgtccccgaaatcgttgctc

SEQ ID NO: 2654474 - DNA, 25 bp, Homo sapien
tgctgcgggaagtagggcatcctca

SEQ ID NO: 2654475 - DNA, 25 bp, Homo sapien
tcacggaacccaagtggagtgggaa

SEQ ID NO: 2654476 - DNA, 25 bp, Homo sapien
aagcggtcacacaggcgtgtgccgt

SEQ ID NO: 2654477 - DNA, 25 bp, Homo sapien
ctccgtctgccactctcgcctgcag

SEQ ID NO: 2654478 - DNA, 25 bp, Homo sapien
agccgtcggacacccttgccctgag

SEQ ID NO: 2654479 - DNA, 25 bp, Homo sapien
ctgcagccgcctcagtgcgggcgcc

SEQ ID NO: 2654480 - DNA, 25 bp, Homo sapien
ctcccggcttgcacgctgcggtcct

SEQ ID NO: 2654481 - DNA, 25 bp, Homo sapien
ccagggacatcaacagcacagggca

SEQ ID NO: 2654482 - DNA, 25 bp, Homo sapien
tccagggacatcaacagcacagggc

SEQ ID NO: 2654483 - DNA, 25 bp, Homo sapien
ctccagggacatcaacagcacaggg

SEQ ID NO: 2654484 - DNA, 25 bp, Homo sapien
cagggacatcaacagcacagggcag

SEQ ID NO: 2654485 - DNA, 25 bp, Homo sapien
catatccttctgtagatctggaccc

SEQ ID NO: 2654486 - DNA, 25 bp, Homo sapien
tcctctccatatccttctgtagatc

SEQ ID NO: 2654487 - DNA, 25 bp, Homo sapien
tccatatccttctgtagatctggac

SEQ ID NO: 2654488 - DNA, 25 bp, Homo sapien
tctccatatccttctgtagatctgg

SEQ ID NO: 2654489 - DNA, 25 bp, Homo sapien
ggcagaggggctcataacatccctc

SEQ ID NO: 2654490 - DNA, 25 bp, Homo sapien
agaggggctcataacatccctcttc

SEQ ID NO: 2654491 - DNA, 25 bp, Homo sapien
cagaggggctcataacatccctctt

SEQ ID NO: 2654492 - DNA, 25 bp, Homo sapien
gcagaggggctcataacatccctct

SEQ ID NO: 2654493 - DNA, 25 bp, Homo sapien
aaacagcatgggtgtgtagaaggca

SEQ ID NO: 2654494 - DNA, 25 bp, Homo sapien
tacatctgccacgtttttgtggaaa

SEQ ID NO: 2654495 - DNA, 25 bp, Homo sapien
tgccagcagactcgggctcttctaa

SEQ ID NO: 2654496 - DNA, 25 bp, Homo sapien
aaagtacttgcagatatgtagtgtg

SEQ ID NO: 2654497 - DNA, 25 bp, Homo sapien
atcatccactttgggttcaaaacag

SEQ ID NO: 2654498 - DNA, 25 bp, Homo sapien
ctgatggccaatgagaagatgggaa

SEQ ID NO: 2654499 - DNA, 25 bp, Homo sapien
tcacagcctcctttcagtggttcag

SEQ ID NO: 2654500 - DNA, 25 bp, Homo sapien
gctctgacagcatcatccactttgg

SEQ ID NO: 2654501 - DNA, 25 bp, Homo sapien
accattataggtttctccagccggg

SEQ ID NO: 2654502 - DNA, 25 bp, Homo sapien
catcttggaaccgactgtaggacct

SEQ ID NO: 2654503 - DNA, 25 bp, Homo sapien
tctcagcactgggtaacacgaagcc

SEQ ID NO: 2654504 - DNA, 25 bp, Homo sapien
tccagccgggtagtagtcatcatca

SEQ ID NO: 2654505 - DNA, 25 bp, Homo sapien
gactgcggcgcctgaaagctataca

SEQ ID NO: 2654506 - DNA, 25 bp, Homo sapien
cagcctctactgcaagactgcggcg

SEQ ID NO: 2654507 - DNA, 25 bp, Homo sapien
agtattcagcgggaaaccattctct

SEQ ID NO: 2654508 - DNA, 25 bp, Homo sapien
gtctgcagcagccaataactcttaa

SEQ ID NO: 2654509 - DNA, 25 bp, Homo sapien
aatatcactcatctttgtaaccctc

SEQ ID NO: 2654510 - DNA, 25 bp, Homo sapien
tctttgtaaccctcagcaataaagc

SEQ ID NO: 2654511 - DNA, 25 bp, Homo sapien
taaagcagttgaaccaataatgatc

SEQ ID NO: 2654512 - DNA, 25 bp, Homo sapien
tcagcaataaagcagttgaaccaat

SEQ ID NO: 2654513 - DNA, 25 bp, Homo sapien
ctgatacagttagggatttcttcat

SEQ ID NO: 2654514 - DNA, 25 bp, Homo sapien
atgccttggctatcatcctcaacta

SEQ ID NO: 2654515 - DNA, 25 bp, Homo sapien
aatgcttccgattctgacacctctg

SEQ ID NO: 2654516 - DNA, 25 bp, Homo sapien
tgcccaatgccttggctatcatcct

SEQ ID NO: 2654517 - DNA, 25 bp, Homo sapien
cttccagaaatgcttccgattctga

SEQ ID NO: 2654518 - DNA, 25 bp, Homo sapien
ctaaatggatgaatctgagtctgct

SEQ ID NO: 2654519 - DNA, 25 bp, Homo sapien
gagcctgagtcctggatcctattgc

SEQ ID NO: 2654520 - DNA, 25 bp, Homo sapien
ccactactaggaaggcagaaagcca

SEQ ID NO: 2654521 - DNA, 25 bp, Homo sapien
ggtaataccactaccagagcctgag

SEQ ID NO: 2654522 - DNA, 25 bp, Homo sapien
gaaagccagcacaagagacaactct

SEQ ID NO: 2654523 - DNA, 25 bp, Homo sapien
ggacctttcctgtaacacctacatg

SEQ ID NO: 2654524 - DNA, 25 bp, Homo sapien
tcattagcccccatgtcagagacat

SEQ ID NO: 2654525 - DNA, 25 bp, Homo sapien
ttgcttttaccgtggagtcaccctg

SEQ ID NO: 2654526 - DNA, 25 bp, Homo sapien
tgcgtgacatccaagaacgttctct

SEQ ID NO: 2654527 - DNA, 25 bp, Homo sapien
cacatgtgtaacgttttggttgaga

SEQ ID NO: 2654528 - DNA, 25 bp, Homo sapien
tgtgtgtctatccaacagggagcca

SEQ ID NO: 2654529 - DNA, 25 bp, Homo sapien
tctcactgtgaatcccttgcttgct

SEQ ID NO: 2654530 - DNA, 25 bp, Homo sapien
taaatggtggacgagtactgtggat

SEQ ID NO: 2654531 - DNA, 25 bp, Homo sapien
gcgccaaccaccacccgcggccacc

SEQ ID NO: 2654532 - DNA, 25 bp, Homo sapien
aaaataagcgctttgattaacacag

SEQ ID NO: 2654533 - DNA, 25 bp, Homo sapien
acaaaataagcgctttgattaacac

SEQ ID NO: 2654534 - DNA, 25 bp, Homo sapien
tacaaaataagcgctttgattaaca

SEQ ID NO: 2654535 - DNA, 25 bp, Homo sapien
caaaataagcgctttgattaacaca

SEQ ID NO: 2654536 - DNA, 25 bp, Homo sapien
gaaatcttggatactgcaggaacgg

SEQ ID NO: 2654537 - DNA, 25 bp, Homo sapien
ctcacgaggcgttggaaagtctgct

SEQ ID NO: 2654538 - DNA, 25 bp, Homo sapien
ggaaggctcgcaaaaagtcatcatg

SEQ ID NO: 2654539 - DNA, 25 bp, Homo sapien
gatcttttatgacctagtgcggcaa

SEQ ID NO: 2654540 - DNA, 25 bp, Homo sapien
tttgggtcatctcttttccgtgtag

SEQ ID NO: 2654541 - DNA, 25 bp, Homo sapien
ccgtgtagtgttttttctggtatct

SEQ ID NO: 2654542 - DNA, 25 bp, Homo sapien
gggtcatctcttttccgtgtagtgt

SEQ ID NO: 2654543 - DNA, 25 bp, Homo sapien
cttcatttgggtcatctcttttccg

SEQ ID NO: 2654544 - DNA, 25 bp, Homo sapien
ttctcatagactttcggatgatgct

SEQ ID NO: 2654545 - DNA, 25 bp, Homo sapien
ctcatagactttcggatgatgctgt

SEQ ID NO: 2654546 - DNA, 25 bp, Homo sapien
tctcatagactttcggatgatgctg

SEQ ID NO: 2654547 - DNA, 25 bp, Homo sapien
gaaggcaaagaatccgttgacagac

SEQ ID NO: 2654548 - DNA, 25 bp, Homo sapien
tccagaaagtaagcgacagaagaga

SEQ ID NO: 2654549 - DNA, 25 bp, Homo sapien
ccgaatccagaaagtaagcgacaga

SEQ ID NO: 2654550 - DNA, 25 bp, Homo sapien
gttgacagacatgcaaatcagaaga

SEQ ID NO: 2654551 - DNA, 25 bp, Homo sapien
cgagaacacagtgggtatggctcct

SEQ ID NO: 2654552 - DNA, 25 bp, Homo sapien
ttttcccgggccaggacttcagcaa

SEQ ID NO: 2654553 - DNA, 25 bp, Homo sapien
gcagagccagctcaagtgttcgccc

SEQ ID NO: 2654554 - DNA, 25 bp, Homo sapien
gcagaggcgtagatgccaccgatca

SEQ ID NO: 2654555 - DNA, 25 bp, Homo sapien
tatctttaataaagctggatacagt

SEQ ID NO: 2654556 - DNA, 25 bp, Homo sapien
taacgattgtctgcccatgtcctgc

SEQ ID NO: 2654557 - DNA, 25 bp, Homo sapien
gtcctgcctgaaataccatgattgt

SEQ ID NO: 2654558 - DNA, 25 bp, Homo sapien
catgtcctgcctgaaataccatgat

SEQ ID NO: 2654559 - DNA, 25 bp, Homo sapien
ccttggactcttcagaatcatttgc

SEQ ID NO: 2654560 - DNA, 25 bp, Homo sapien
ttgccactggtgacttttgcatgaa

SEQ ID NO: 2654561 - DNA, 25 bp, Homo sapien
ttggactcttcagaatcatttgcca

SEQ ID NO: 2654562 - DNA, 25 bp, Homo sapien
tgcatgaactgagcttctatcttca

SEQ ID NO: 2654563 - DNA, 25 bp, Homo sapien
agtattccactaacttaggccccag

SEQ ID NO: 2654564 - DNA, 25 bp, Homo sapien
catctctcagcacatatatcattcc

SEQ ID NO: 2654565 - DNA, 25 bp, Homo sapien
gaaaagcaaagatgccacctgaatc

SEQ ID NO: 2654566 - DNA, 25 bp, Homo sapien
tctgtaaaggtcatcaatacatctc

SEQ ID NO: 2654567 - DNA, 25 bp, Homo sapien
ctttgataaaattcgacactccttc

SEQ ID NO: 2654568 - DNA, 25 bp, Homo sapien
gaaaaggcttatccatcacgatcaa

SEQ ID NO: 2654569 - DNA, 25 bp, Homo sapien
gcagcacatgaaaaggcttatccat

SEQ ID NO: 2654570 - DNA, 25 bp, Homo sapien
aatctatttgtgacaaacccatagc

SEQ ID NO: 2654571 - DNA, 25 bp, Homo sapien
cagaagcctctccaaggacgccggg

SEQ ID NO: 2654572 - DNA, 25 bp, Homo sapien
agaagcctctccaaggacgccgggc

SEQ ID NO: 2654573 - DNA, 25 bp, Homo sapien
gaagcctctccaaggacgccgggct

SEQ ID NO: 2654574 - DNA, 25 bp, Homo sapien
agcctctccaaggacgccgggctcc

SEQ ID NO: 2654575 - DNA, 25 bp, Homo sapien
cccctgacgcctgcctcccaggcac

SEQ ID NO: 2654576 - DNA, 25 bp, Homo sapien
ggcccctgacgcctgcctcccaggc

SEQ ID NO: 2654577 - DNA, 25 bp, Homo sapien
ctggaggcccctgacgcctgcctcc

SEQ ID NO: 2654578 - DNA, 25 bp, Homo sapien
ggaggcccctgacgcctgcctccca

SEQ ID NO: 2654579 - DNA, 25 bp, Homo sapien
attaaacctagttgtgataccttct

SEQ ID NO: 2654580 - DNA, 25 bp, Homo sapien
ttaaacctagttgtgataccttctc

SEQ ID NO: 2654581 - DNA, 25 bp, Homo sapien
tcagctttaagacccataatggcag

SEQ ID NO: 2654582 - DNA, 25 bp, Homo sapien
gagcagtgagctgatctgggcatca

SEQ ID NO: 2654583 - DNA, 25 bp, Homo sapien
gcaggtatgcatgtaccaaacccca

SEQ ID NO: 2654584 - DNA, 25 bp, Homo sapien
gctttttccaatagaccactgtgct

SEQ ID NO: 2654585 - DNA, 25 bp, Homo sapien
aaacacacgccaactgtgaaactgg

SEQ ID NO: 2654586 - DNA, 25 bp, Homo sapien
tccaacaagaatcgtgggctttcag

SEQ ID NO: 2654587 - DNA, 25 bp, Homo sapien
acaggggagtgcacagacgatgaca

SEQ ID NO: 2654588 - DNA, 25 bp, Homo sapien
actggtaggccgatcccatgctgaa

SEQ ID NO: 2654589 - DNA, 25 bp, Homo sapien
ctgagtatctgcaataataagtgtt

SEQ ID NO: 2654590 - DNA, 25 bp, Homo sapien
gagtatctgcaataataagtgttac

SEQ ID NO: 2654591 - DNA, 25 bp, Homo sapien
tgagtatctgcaataataagtgtta

SEQ ID NO: 2654592 - DNA, 25 bp, Homo sapien
tcaggctgaccccgggctctcatgt

SEQ ID NO: 2654593 - DNA, 25 bp, Homo sapien
ctgaccccgggctctcatgttggtg

SEQ ID NO: 2654594 - DNA, 25 bp, Homo sapien
tgttggtgtcatgaattaacttcag

SEQ ID NO: 2654595 - DNA, 25 bp, Homo sapien
aacttcagaatcatccaagcttcat

SEQ ID NO: 2654596 - DNA, 25 bp, Homo sapien
tctgttaaaggcctcatggtggtcc

SEQ ID NO: 2654597 - DNA, 25 bp, Homo sapien
cctcgggtactgaacctgggagtca

SEQ ID NO: 2654598 - DNA, 25 bp, Homo sapien
cacttgaaaaggtatgacctggccg

SEQ ID NO: 2654599 - DNA, 25 bp, Homo sapien
cagagccctcgagtcctagataggc

SEQ ID NO: 2654600 - DNA, 25 bp, Homo sapien
acctcctataccatgttcctgtgtc

SEQ ID NO: 2654601 - DNA, 25 bp, Homo sapien
caatcagctcatctatttgtttagg

SEQ ID NO: 2654602 - DNA, 25 bp, Homo sapien
ccgtacagctcggtgcggatccgaa

SEQ ID NO: 2654603 - DNA, 25 bp, Homo sapien
cggtgcggatccgaacaaaacacct

SEQ ID NO: 2654604 - DNA, 25 bp, Homo sapien
ggtcatcatgggacttgttacttac

SEQ ID NO: 2654605 - DNA, 25 bp, Homo sapien
aaattaacatgcaggtcatcatggg

SEQ ID NO: 2654606 - DNA, 25 bp, Homo sapien
caggtcatcatgggacttgttactt

SEQ ID NO: 2654607 - DNA, 25 bp, Homo sapien
ataaattaacatgcaggtcatcatg

SEQ ID NO: 2654608 - DNA, 25 bp, Homo sapien
cctgactgggtagttgaaacatctc

SEQ ID NO: 2654609 - DNA, 25 bp, Homo sapien
tttattgtattatccctgactgggt

SEQ ID NO: 2654610 - DNA, 25 bp, Homo sapien
ccaaacaattgtaagctttattgta

SEQ ID NO: 2654611 - DNA, 25 bp, Homo sapien
caaaggacagggtgaaccaaacaat

SEQ ID NO: 2654612 - DNA, 25 bp, Homo sapien
tcagggaaccaaacggataatccat

SEQ ID NO: 2654613 - DNA, 25 bp, Homo sapien
catttctggttagcaatgcatattc

SEQ ID NO: 2654614 - DNA, 25 bp, Homo sapien
ctgcagaggtttaatgacatcaggg

SEQ ID NO: 2654615 - DNA, 25 bp, Homo sapien
gccattgtcgtattccattccagta

SEQ ID NO: 2654616 - DNA, 25 bp, Homo sapien
aaactatgcctgtttcagtgcaggg

SEQ ID NO: 2654617 - DNA, 25 bp, Homo sapien
gcctattaagaagtattgaaattca

SEQ ID NO: 2654618 - DNA, 25 bp, Homo sapien
tgactaaatgtacaaactaaaacaa

SEQ ID NO: 2654619 - DNA, 25 bp, Homo sapien
gaagtattgaaattcatcatgaaaa

SEQ ID NO: 2654620 - DNA, 25 bp, Homo sapien
ttcactgaagttacatcctcaaagg

SEQ ID NO: 2654621 - DNA, 25 bp, Homo sapien
ggtgttcactgaagttacatcctca

SEQ ID NO: 2654622 - DNA, 25 bp, Homo sapien
gtaggtgttcactgaagttacatcc

SEQ ID NO: 2654623 - DNA, 25 bp, Homo sapien
gaagttacatcctcaaaggtgcagg

SEQ ID NO: 2654624 - DNA, 25 bp, Homo sapien
gacatcccgtcttgttgtgaaaaaa

SEQ ID NO: 2654625 - DNA, 25 bp, Homo sapien
aataaatccagtaggcactatagtc

SEQ ID NO: 2654626 - DNA, 25 bp, Homo sapien
tagcattgttaagcgcccaattctg

SEQ ID NO: 2654627 - DNA, 25 bp, Homo sapien
agtcatcatcaaaggtaatctgaca

SEQ ID NO: 2654628 - DNA, 25 bp, Homo sapien
gaagaaacagctgatccccgaaagc

SEQ ID NO: 2654629 - DNA, 25 bp, Homo sapien
ggattcactggtgccgaaccaaagg

SEQ ID NO: 2654630 - DNA, 25 bp, Homo sapien
tgaccacgtcaagagagttccaggc

SEQ ID NO: 2654631 - DNA, 25 bp, Homo sapien
ggtcaatccattgtacagacacagc

SEQ ID NO: 2654632 - DNA, 25 bp, Homo sapien
cattccattaaggtggctctcctcc

SEQ ID NO: 2654633 - DNA, 25 bp, Homo sapien
gcagcacttagactcacctggtggg

SEQ ID NO: 2654634 - DNA, 25 bp, Homo sapien
gccagaagcctttgctctcaatttg

SEQ ID NO: 2654635 - DNA, 25 bp, Homo sapien
caaaagtaccctgtgactgcagctg

SEQ ID NO: 2654636 - DNA, 25 bp, Homo sapien
tattgctccatgctttgcttctcat

SEQ ID NO: 2654637 - DNA, 25 bp, Homo sapien
ctattgctccatgctttgcttctca

SEQ ID NO: 2654638 - DNA, 25 bp, Homo sapien
tctattgctccatgctttgcttctc

SEQ ID NO: 2654639 - DNA, 25 bp, Homo sapien
gaagggaaagaatgaaatgatctag

SEQ ID NO: 2654640 - DNA, 25 bp, Homo sapien
gaaagaatgaaatgatctagtgtca

SEQ ID NO: 2654641 - DNA, 25 bp, Homo sapien
agggaaagaatgaaatgatctagtg

SEQ ID NO: 2654642 - DNA, 25 bp, Homo sapien
tgaagggaaagaatgaaatgatcta

SEQ ID NO: 2654643 - DNA, 25 bp, Homo sapien
cagctgtagaatgagttaatgcatt

SEQ ID NO: 2654644 - DNA, 25 bp, Homo sapien
gacttgccgacttctcagctgtaga

SEQ ID NO: 2654645 - DNA, 25 bp, Homo sapien
cttgcagaaccctgacttgccgact

SEQ ID NO: 2654646 - DNA, 25 bp, Homo sapien
tgcagaaccctgacttgccgacttc

SEQ ID NO: 2654647 - DNA, 25 bp, Homo sapien
gctgaccagagagccaaatattaag

SEQ ID NO: 2654648 - DNA, 25 bp, Homo sapien
tattaagtttcccaggacggctgct

SEQ ID NO: 2654649 - DNA, 25 bp, Homo sapien
gctgccttgcatagcgcatttaaga

SEQ ID NO: 2654650 - DNA, 25 bp, Homo sapien
agcacagtagaagccagcaggatgg

SEQ ID NO: 2654651 - DNA, 25 bp, Homo sapien
taaaaatgagttgaggccgccagtg

SEQ ID NO: 2654652 - DNA, 25 bp, Homo sapien
gaagctgaatgtcaactgcgggcca

SEQ ID NO: 2654653 - DNA, 25 bp, Homo sapien
gaggactagagacagcgatgcccat

SEQ ID NO: 2654654 - DNA, 25 bp, Homo sapien
taagcgcgtttatctggcaaggcgg

SEQ ID NO: 2654655 - DNA, 25 bp, Homo sapien
tgcccaaccatgctagccttaagta

SEQ ID NO: 2654656 - DNA, 25 bp, Homo sapien
tacgtatcacatgggaggtgctcaa

SEQ ID NO: 2654657 - DNA, 25 bp, Homo sapien
tcagtgaaggctcggctcagctctt

SEQ ID NO: 2654658 - DNA, 25 bp, Homo sapien
caaaaaccaggtaatcaaggagctt

SEQ ID NO: 2654659 - DNA, 25 bp, Homo sapien
cttcttggatgactacgtgggcgca

SEQ ID NO: 2654660 - DNA, 25 bp, Homo sapien
gaaacccgtctgagtctgaacaaag

SEQ ID NO: 2654661 - DNA, 25 bp, Homo sapien
tcagacctgactggaaggcacctag

SEQ ID NO: 2654662 - DNA, 25 bp, Homo sapien
gaacacctcagaagaaagcgggact

SEQ ID NO: 2654663 - DNA, 25 bp, Homo sapien
tgatatacactaaatatctttgcag

SEQ ID NO: 2654664 - DNA, 25 bp, Homo sapien
ttaatctgatatacactaaatatct

SEQ ID NO: 2654665 - DNA, 25 bp, Homo sapien
cactaaatatctttgcagctgttac

SEQ ID NO: 2654666 - DNA, 25 bp, Homo sapien
tacactaaatatctttgcagctgtt

SEQ ID NO: 2654667 - DNA, 25 bp, Homo sapien
gattattaggaatttcacatttggg

SEQ ID NO: 2654668 - DNA, 25 bp, Homo sapien
ttggggctttggagccactggtcca

SEQ ID NO: 2654669 - DNA, 25 bp, Homo sapien
ggaatttcacatttggggctttgga

SEQ ID NO: 2654670 - DNA, 25 bp, Homo sapien
tcacatttggggctttggagccact

SEQ ID NO: 2654671 - DNA, 25 bp, Homo sapien
gcccatcagaccataggcacattcc

SEQ ID NO: 2654672 - DNA, 25 bp, Homo sapien
ccatcagaccataggcacattccat

SEQ ID NO: 2654673 - DNA, 25 bp, Homo sapien
cccatcagaccataggcacattcca

SEQ ID NO: 2654674 - DNA, 25 bp, Homo sapien
aggtgctgtctgttcagcctccctg

SEQ ID NO: 2654675 - DNA, 25 bp, Homo sapien
tgaggaagcagatgttagggagtgg

SEQ ID NO: 2654676 - DNA, 25 bp, Homo sapien
tgctgtctgttcagcctccctgaga

SEQ ID NO: 2654677 - DNA, 25 bp, Homo sapien
gaagcagatgttagggagtggagct

SEQ ID NO: 2654678 - DNA, 25 bp, Homo sapien
gctgatgcagtttccttggaaatct

SEQ ID NO: 2654679 - DNA, 25 bp, Homo sapien
tttgctgatgcagtttccttggaaa

SEQ ID NO: 2654680 - DNA, 25 bp, Homo sapien
cttggaaatctcagtccaaagggca

SEQ ID NO: 2654681 - DNA, 25 bp, Homo sapien
ctgaatttgctgatgcagtttcctt

SEQ ID NO: 2654682 - DNA, 25 bp, Homo sapien
gtccccgtatatgcatgaccacttc

SEQ ID NO: 2654683 - DNA, 25 bp, Homo sapien
gagttggtaaggtccccgtatatgc

SEQ ID NO: 2654684 - DNA, 25 bp, Homo sapien
ggtaaggtccccgtatatgcatgac

SEQ ID NO: 2654685 - DNA, 25 bp, Homo sapien
taaggtccccgtatatgcatgacca

SEQ ID NO: 2654686 - DNA, 25 bp, Homo sapien
ctgcactcattagagtctcaacagg

SEQ ID NO: 2654687 - DNA, 25 bp, Homo sapien
ccttggagagttccccatattccca

SEQ ID NO: 2654688 - DNA, 25 bp, Homo sapien
ttctccttggagagttccccatatt

SEQ ID NO: 2654689 - DNA, 25 bp, Homo sapien
tgctgcactcattagagtctcaaca

SEQ ID NO: 2654690 - DNA, 25 bp, Homo sapien
actgaacaaaggatttcacactgga

SEQ ID NO: 2654691 - DNA, 25 bp, Homo sapien
tgaacaaaggatttcacactggaaa

SEQ ID NO: 2654692 - DNA, 25 bp, Homo sapien
acactgaacaaaggatttcacactg

SEQ ID NO: 2654693 - DNA, 25 bp, Homo sapien
aagccacactgaacaaaggatttca

SEQ ID NO: 2654694 - DNA, 25 bp, Homo sapien
acaacaataaagaaatctactaagt

SEQ ID NO: 2654695 - DNA, 25 bp, Homo sapien
gcaagaccttgtataatatatttgg

SEQ ID NO: 2654696 - DNA, 25 bp, Homo sapien
tcttagcaagaccttgtataatata

SEQ ID NO: 2654697 - DNA, 25 bp, Homo sapien
taagttcttagcaagaccttgtata

SEQ ID NO: 2654698 - DNA, 25 bp, Homo sapien
ctcctgctataaactggctccgttg

SEQ ID NO: 2654699 - DNA, 25 bp, Homo sapien
gagagctgtatagtaaatttaagga

SEQ ID NO: 2654700 - DNA, 25 bp, Homo sapien
gacttggttacttcactttgtggga

SEQ ID NO: 2654701 - DNA, 25 bp, Homo sapien
tccgttgtttctgagagctgtatag

SEQ ID NO: 2654702 - DNA, 25 bp, Homo sapien
tgcaagttaaaagcctcagggtggg

SEQ ID NO: 2654703 - DNA, 25 bp, Homo sapien
ccctgggcaagtgtgtaaagtggtc

SEQ ID NO: 2654704 - DNA, 25 bp, Homo sapien
gaaatggacatcctagtggagggac

SEQ ID NO: 2654705 - DNA, 25 bp, Homo sapien
gatcttagaaaagaggtccacaccc

SEQ ID NO: 2654706 - DNA, 25 bp, Homo sapien
caaatttcatgcgcgtccatgagaa

SEQ ID NO: 2654707 - DNA, 25 bp, Homo sapien
aatttcatgcgcgtccatgagaaga

SEQ ID NO: 2654708 - DNA, 25 bp, Homo sapien
accaaatttcatgcgcgtccatgag

SEQ ID NO: 2654709 - DNA, 25 bp, Homo sapien
atttcatgcgcgtccatgagaagag

SEQ ID NO: 2654710 - DNA, 25 bp, Homo sapien
ctgtgagacttacctgaagctcggc

SEQ ID NO: 2654711 - DNA, 25 bp, Homo sapien
cttccactgtgagacttacctgaag

SEQ ID NO: 2654712 - DNA, 25 bp, Homo sapien
agacttacctgaagctcggcgtccg

SEQ ID NO: 2654713 - DNA, 25 bp, Homo sapien
tgagacttacctgaagctcggcgtc

SEQ ID NO: 2654714 - DNA, 25 bp, Homo sapien
agcgaagagaggctgggattaaggg

SEQ ID NO: 2654715 - DNA, 25 bp, Homo sapien
tgaaagcgaagagaggctgggatta

SEQ ID NO: 2654716 - DNA, 25 bp, Homo sapien
ctgggattaagggtgcaaaggaata

SEQ ID NO: 2654717 - DNA, 25 bp, Homo sapien
agagtatatgggtttggcaccacgg

SEQ ID NO: 2654718 - DNA, 25 bp, Homo sapien
cagttaaggcgggacagggcatatt

SEQ ID NO: 2654719 - DNA, 25 bp, Homo sapien
ttaaggcgggacagggcatattcac

SEQ ID NO: 2654720 - DNA, 25 bp, Homo sapien
gccatttacacttttgtggtggaat

SEQ ID NO: 2654721 - DNA, 25 bp, Homo sapien
atcagttaaggcgggacagggcata

SEQ ID NO: 2654722 - DNA, 25 bp, Homo sapien
gaaatgcagccgttgttttgtcaat

SEQ ID NO: 2654723 - DNA, 25 bp, Homo sapien
gttgaaatgcagccgttgttttgtc

SEQ ID NO: 2654724 - DNA, 25 bp, Homo sapien
tgaaatgcagccgttgttttgtcaa

SEQ ID NO: 2654725 - DNA, 25 bp, Homo sapien
aatgcagccgttgttttgtcaatca

SEQ ID NO: 2654726 - DNA, 25 bp, Homo sapien
tagggggaggtggtatcattgctcc

SEQ ID NO: 2654727 - DNA, 25 bp, Homo sapien
agggggaggtggtatcattgctcct

SEQ ID NO: 2654728 - DNA, 25 bp, Homo sapien
ggggaggtggtatcattgctcctac

SEQ ID NO: 2654729 - DNA, 25 bp, Homo sapien
gggggaggtggtatcattgctccta

SEQ ID NO: 2654730 - DNA, 25 bp, Homo sapien
gcatcatggcaggacccctcatatg

SEQ ID NO: 2654731 - DNA, 25 bp, Homo sapien
catcatggcaggacccctcatatgg

SEQ ID NO: 2654732 - DNA, 25 bp, Homo sapien
tataaaaccgacataatgagccctc

SEQ ID NO: 2654733 - DNA, 25 bp, Homo sapien
atataaaaccgacataatgagccct

SEQ ID NO: 2654734 - DNA, 25 bp, Homo sapien
taaaaccgacataatgagccctctc

SEQ ID NO: 2654735 - DNA, 25 bp, Homo sapien
aaccgacataatgagccctctcctt

SEQ ID NO: 2654736 - DNA, 25 bp, Homo sapien
gaagatctgcgacccactccctcgg

SEQ ID NO: 2654737 - DNA, 25 bp, Homo sapien
cctcggtgctctctcgccagagcca

SEQ ID NO: 2654738 - DNA, 25 bp, Homo sapien
tagccgcccgaagatctgcgaccca

SEQ ID NO: 2654739 - DNA, 25 bp, Homo sapien
gacccactccctcggtgctctctcg

SEQ ID NO: 2654740 - DNA, 25 bp, Homo sapien
cccgcggctaccctcgctggccagg

SEQ ID NO: 2654741 - DNA, 25 bp, Homo sapien
cggctaccctcgctggccaggctcg

SEQ ID NO: 2654742 - DNA, 25 bp, Homo sapien
ccccgccggcgcgctcggatcccgc

SEQ ID NO: 2654743 - DNA, 25 bp, Homo sapien
gctaccctcgctggccaggctcgcg

SEQ ID NO: 2654744 - DNA, 25 bp, Homo sapien
tgcagcgacggcagctcttcgtgtg

SEQ ID NO: 2654745 - DNA, 25 bp, Homo sapien
tctctgcagcgacggcagctcttcg

SEQ ID NO: 2654746 - DNA, 25 bp, Homo sapien
ggtctctgcagcgacggcagctctt

SEQ ID NO: 2654747 - DNA, 25 bp, Homo sapien
gcgacggcagctcttcgtgtggcat

SEQ ID NO: 2654748 - DNA, 25 bp, Homo sapien
cgggagtgattccaacaagatggca

SEQ ID NO: 2654749 - DNA, 25 bp, Homo sapien
taagtgaccaacttgaatgccagca

SEQ ID NO: 2654750 - DNA, 25 bp, Homo sapien
tattgctcatgagggccgacatcaa

SEQ ID NO: 2654751 - DNA, 25 bp, Homo sapien
tgccagatctggactcccttgatag

SEQ ID NO: 2654752 - DNA, 25 bp, Homo sapien
caggctcctcatcccaccctgagaa

SEQ ID NO: 2654753 - DNA, 25 bp, Homo sapien
caccctgagaagcctgcttcgtgta

SEQ ID NO: 2654754 - DNA, 25 bp, Homo sapien
cctgagaagcctgcttcgtgtagga

SEQ ID NO: 2654755 - DNA, 25 bp, Homo sapien
ggctcctcatcccaccctgagaagc

SEQ ID NO: 2654756 - DNA, 25 bp, Homo sapien
tactagatcttacctgaggaagcac

SEQ ID NO: 2654757 - DNA, 25 bp, Homo sapien
caggtgaatggggagtcatatttca

SEQ ID NO: 2654758 - DNA, 25 bp, Homo sapien
ctctggtgggctgccttactagatc

SEQ ID NO: 2654759 - DNA, 25 bp, Homo sapien
tttcatgaggctgactatgtgacta

SEQ ID NO: 2654760 - DNA, 25 bp, Homo sapien
ccttgaggaataacagccaaaggca

SEQ ID NO: 2654761 - DNA, 25 bp, Homo sapien
tatctattcatcaccagtagtggga

SEQ ID NO: 2654762 - DNA, 25 bp, Homo sapien
cctgggtcctaaaacatggctataa

SEQ ID NO: 2654763 - DNA, 25 bp, Homo sapien
caatgcgagaaacttacctgggtcc

SEQ ID NO: 2654764 - DNA, 25 bp, Homo sapien
agaagggtctgcgagcagccccgca

SEQ ID NO: 2654765 - DNA, 25 bp, Homo sapien
agccccgcacacaacagattgctga

SEQ ID NO: 2654766 - DNA, 25 bp, Homo sapien
cacacaacagattgctgaaagctta

SEQ ID NO: 2654767 - DNA, 25 bp, Homo sapien
cagattgctgaaagcttatgctgcc

SEQ ID NO: 2654768 - DNA, 25 bp, Homo sapien
gctgagattcacgaaccctgccact

SEQ ID NO: 2654769 - DNA, 25 bp, Homo sapien
tattacagttgtaccttctcttacc

SEQ ID NO: 2654770 - DNA, 25 bp, Homo sapien
acagttgtaccttctcttaccaaca

SEQ ID NO: 2654771 - DNA, 25 bp, Homo sapien
cctgccactggctttataagaagta

SEQ ID NO: 2654772 - DNA, 25 bp, Homo sapien
gcagcaataagctttttcatagaaa

SEQ ID NO: 2654773 - DNA, 25 bp, Homo sapien
ggagatgcaaaccagcctttctgag

SEQ ID NO: 2654774 - DNA, 25 bp, Homo sapien
atccccaggcttcccaaattgtgca

SEQ ID NO: 2654775 - DNA, 25 bp, Homo sapien
agccacgctacccttaggagatgca

SEQ ID NO: 2654776 - DNA, 25 bp, Homo sapien
ctactccagatcccaagccagcctt

SEQ ID NO: 2654777 - DNA, 25 bp, Homo sapien
tttcatcttgatatcaggtctggag

SEQ ID NO: 2654778 - DNA, 25 bp, Homo sapien
tcctttcatcttgatatcaggtctg

SEQ ID NO: 2654779 - DNA, 25 bp, Homo sapien
tcatcttgatatcaggtctggagga

SEQ ID NO: 2654780 - DNA, 25 bp, Homo sapien
tggacagtgacgagaaggctgcagc

SEQ ID NO: 2654781 - DNA, 25 bp, Homo sapien
ggacagtgacgagaaggctgcagca

SEQ ID NO: 2654782 - DNA, 25 bp, Homo sapien
ctggacagtgacgagaaggctgcag

SEQ ID NO: 2654783 - DNA, 25 bp, Homo sapien
tatttgctgggtcaatggtaaagcc

SEQ ID NO: 2654784 - DNA, 25 bp, Homo sapien
ccagggccggaactaaggtctgtca

SEQ ID NO: 2654785 - DNA, 25 bp, Homo sapien
gccgtgaaccacaaaaaacatgagg

SEQ ID NO: 2654786 - DNA, 25 bp, Homo sapien
aagggactgcccacagctatttgct

SEQ ID NO: 2654787 - DNA, 25 bp, Homo sapien
ttcataagcaatgttctgccgcctc

SEQ ID NO: 2654788 - DNA, 25 bp, Homo sapien
gcagagagcctttcatcgtccacaa

SEQ ID NO: 2654789 - DNA, 25 bp, Homo sapien
gagagcctttcatcgtccacaatag

SEQ ID NO: 2654790 - DNA, 25 bp, Homo sapien
tcataagcaatgttctgccgcctcc

SEQ ID NO: 2654791 - DNA, 25 bp, Homo sapien
ccgtgatttcctgggaggctccgag

SEQ ID NO: 2654792 - DNA, 25 bp, Homo sapien
gaatagttgccttcctcctagtgcc

SEQ ID NO: 2654793 - DNA, 25 bp, Homo sapien
tgaagaatttgaaacaatctgcagt

SEQ ID NO: 2654794 - DNA, 25 bp, Homo sapien
tgaaacaatctgcagttggccccgt

SEQ ID NO: 2654795 - DNA, 25 bp, Homo sapien
catttatcatcattgggctgcgagt

SEQ ID NO: 2654796 - DNA, 25 bp, Homo sapien
atcatcattgggctgcgagtgggga

SEQ ID NO: 2654797 - DNA, 25 bp, Homo sapien
catcattgggctgcgagtggggaaa

SEQ ID NO: 2654798 - DNA, 25 bp, Homo sapien
tttatcatcattgggctgcgagtgg

SEQ ID NO: 2654799 - DNA, 25 bp, Homo sapien
tcttggccgagtacagtgagtggct

SEQ ID NO: 2654800 - DNA, 25 bp, Homo sapien
agtgatgtcccctctgaataaagaa

SEQ ID NO: 2654801 - DNA, 25 bp, Homo sapien
taagtcaactccattcatgtgaaca

SEQ ID NO: 2654802 - DNA, 25 bp, Homo sapien
gaataaagaacttttcaatggcctg

SEQ ID NO: 2654803 - DNA, 25 bp, Homo sapien
gggaccattgttttcttaatgctat

SEQ ID NO: 2654804 - DNA, 25 bp, Homo sapien
caaagtgctggaagataagcacaag

SEQ ID NO: 2654805 - DNA, 25 bp, Homo sapien
ctataaatcaatttgggaccattgt

SEQ ID NO: 2654806 - DNA, 25 bp, Homo sapien
gaatatttctagaaactgtattgaa

SEQ ID NO: 2654807 - DNA, 25 bp, Homo sapien
tctaaacaagcctatcaccaaggga

SEQ ID NO: 2654808 - DNA, 25 bp, Homo sapien
tcaccactagataaggccagagctt

SEQ ID NO: 2654809 - DNA, 25 bp, Homo sapien
cacaaaaggaatcacacccgtgttt

SEQ ID NO: 2654810 - DNA, 25 bp, Homo sapien
tgaccttcacaatagctccggttgg

SEQ ID NO: 2654811 - DNA, 25 bp, Homo sapien
tgtatttgcgtaagtacttggtgag

SEQ ID NO: 2654812 - DNA, 25 bp, Homo sapien
gaatgcatcccatgcgctacttgta

SEQ ID NO: 2654813 - DNA, 25 bp, Homo sapien
ttctcctttctgtggtaaatgtgaa

SEQ ID NO: 2654814 - DNA, 25 bp, Homo sapien
gtacttggtgagtttctcctttctg

SEQ ID NO: 2654815 - DNA, 25 bp, Homo sapien
tctgataaccaaggggctatatttt

SEQ ID NO: 2654816 - DNA, 25 bp, Homo sapien
ttggataatgctgctctgataacca

SEQ ID NO: 2654817 - DNA, 25 bp, Homo sapien
aggctacattgagcctgataatttt

SEQ ID NO: 2654818 - DNA, 25 bp, Homo sapien
cacacatttcagtcaaggctacatt

SEQ ID NO: 2654819 - DNA, 25 bp, Homo sapien
caggaaggcttctctatttgattca

SEQ ID NO: 2654820 - DNA, 25 bp, Homo sapien
caccgagaacctgctggacaggaaa

SEQ ID NO: 2654821 - DNA, 25 bp, Homo sapien
aatgtgtatccctaacatcctgaag

SEQ ID NO: 2654822 - DNA, 25 bp, Homo sapien
gagtctccgccctcaaaaaatgtgt

SEQ ID NO: 2654823 - DNA, 25 bp, Homo sapien
gaatgaacacagtactctcaagtgg

SEQ ID NO: 2654824 - DNA, 25 bp, Homo sapien
tggagaccagctagcactaagacag

SEQ ID NO: 2654825 - DNA, 25 bp, Homo sapien
aatggcagctggactaggttattcc

SEQ ID NO: 2654826 - DNA, 25 bp, Homo sapien
tgttgacacctgactaaagccactt

SEQ ID NO: 2654827 - DNA, 25 bp, Homo sapien
tgggctctggatataggctcagctc

SEQ ID NO: 2654828 - DNA, 25 bp, Homo sapien
tctggatataggctcagctctcttc

SEQ ID NO: 2654829 - DNA, 25 bp, Homo sapien
gctctggatataggctcagctctct

SEQ ID NO: 2654830 - DNA, 25 bp, Homo sapien
ggctctggatataggctcagctctc

SEQ ID NO: 2654831 - DNA, 25 bp, Homo sapien
acacctggggggctgtacagaatga

SEQ ID NO: 2654832 - DNA, 25 bp, Homo sapien
ggctgtacagaatgagtgcctggcc

SEQ ID NO: 2654833 - DNA, 25 bp, Homo sapien
gctgtacagaatgagtgcctggcca

SEQ ID NO: 2654834 - DNA, 25 bp, Homo sapien
gtacagaatgagtgcctggccaagg

SEQ ID NO: 2654835 - DNA, 25 bp, Homo sapien
ctgcgtgttccatggaaccctacca

SEQ ID NO: 2654836 - DNA, 25 bp, Homo sapien
catgtcgacgttctctgttctgatt

SEQ ID NO: 2654837 - DNA, 25 bp, Homo sapien
tctgttctgatttcctgaatcttct

SEQ ID NO: 2654838 - DNA, 25 bp, Homo sapien
tgcacatgtcgacgttctctgttct

SEQ ID NO: 2654839 - DNA, 25 bp, Homo sapien
aaggtttgcacatgtcgacgttctc

SEQ ID NO: 2654840 - DNA, 25 bp, Homo sapien
ctacacatttgggagttggcaggaa

SEQ ID NO: 2654841 - DNA, 25 bp, Homo sapien
caaagttaagtggatgagagcgtcc

SEQ ID NO: 2654842 - DNA, 25 bp, Homo sapien
gaagcccaggactttcgcacttagg

SEQ ID NO: 2654843 - DNA, 25 bp, Homo sapien
tatagagaaggtacagactgaagcc

SEQ ID NO: 2654844 - DNA, 25 bp, Homo sapien
gagggtgccatacaggccacaagag

SEQ ID NO: 2654845 - DNA, 25 bp, Homo sapien
tatctgtcaaatgctcacctggtga

SEQ ID NO: 2654846 - DNA, 25 bp, Homo sapien
gacaaagcccttattgctgtgggac

SEQ ID NO: 2654847 - DNA, 25 bp, Homo sapien
gagatttgcagtttcgacggtttcc

SEQ ID NO: 2654848 - DNA, 25 bp, Homo sapien
gatagaagttgacaggtccagcgag

SEQ ID NO: 2654849 - DNA, 25 bp, Homo sapien
tgcagtggtagctagctcaggccaa

SEQ ID NO: 2654850 - DNA, 25 bp, Homo sapien
aggatctcggagatgtgacccctac

SEQ ID NO: 2654851 - DNA, 25 bp, Homo sapien
caaatgagggcaaggcaaaaggatc

SEQ ID NO: 2654852 - DNA, 25 bp, Homo sapien
ttaaaaagatcatccctggctgggt

SEQ ID NO: 2654853 - DNA, 25 bp, Homo sapien
tctcaagctgaaattcaacttggtg

SEQ ID NO: 2654854 - DNA, 25 bp, Homo sapien
ttttctaaaagcacagtatatgcag

SEQ ID NO: 2654855 - DNA, 25 bp, Homo sapien
ggagttttgccgtttcacatctgga

SEQ ID NO: 2654856 - DNA, 25 bp, Homo sapien
ggtaaacacgttactgttatttgca

SEQ ID NO: 2654857 - DNA, 25 bp, Homo sapien
tgagttggtacttatctccctgaga

SEQ ID NO: 2654858 - DNA, 25 bp, Homo sapien
catcccatggatgatgcatatttac

SEQ ID NO: 2654859 - DNA, 25 bp, Homo sapien
tacaggaatgcgtgctacttaacat

SEQ ID NO: 2654860 - DNA, 25 bp, Homo sapien
tctctaaaatcctgaatctttcccc

SEQ ID NO: 2654861 - DNA, 25 bp, Homo sapien
tccgaggtggagagtacggataatc

SEQ ID NO: 2654862 - DNA, 25 bp, Homo sapien
caggatgtaataactctctaaaatc

SEQ ID NO: 2654863 - DNA, 25 bp, Homo sapien
tacggataatcacccgaatcaggat

SEQ ID NO: 2654864 - DNA, 25 bp, Homo sapien
gcattcactcccttgagcttggttt

SEQ ID NO: 2654865 - DNA, 25 bp, Homo sapien
ggcattcactcccttgagcttggtt

SEQ ID NO: 2654866 - DNA, 25 bp, Homo sapien
ttggcattcactcccttgagcttgg

SEQ ID NO: 2654867 - DNA, 25 bp, Homo sapien
cattcactcccttgagcttggtttt

SEQ ID NO: 2654868 - DNA, 25 bp, Homo sapien
cagatgacagagtctttgaagaacc

SEQ ID NO: 2654869 - DNA, 25 bp, Homo sapien
ggacccctagactcccagaaactga

SEQ ID NO: 2654870 - DNA, 25 bp, Homo sapien
tgaaagggcaacatgatcacagtgg

SEQ ID NO: 2654871 - DNA, 25 bp, Homo sapien
atgagcaccccatgagatagtcagc

SEQ ID NO: 2654872 - DNA, 25 bp, Homo sapien
tgtttccaagggcacggagtggtcc

SEQ ID NO: 2654873 - DNA, 25 bp, Homo sapien
gagtggtcctccgacaagaacgagc

SEQ ID NO: 2654874 - DNA, 25 bp, Homo sapien
tgtttcaggtccagtcctctagggc

SEQ ID NO: 2654875 - DNA, 25 bp, Homo sapien
caagccggatttcagtgaggccagt

SEQ ID NO: 2654876 - DNA, 25 bp, Homo sapien
tcaatctatctttacacagccaacg

SEQ ID NO: 2654877 - DNA, 25 bp, Homo sapien
ttctggattcactcttgcttactgt

SEQ ID NO: 2654878 - DNA, 25 bp, Homo sapien
ggcaaagtatccctcacctgtatca

SEQ ID NO: 2654879 - DNA, 25 bp, Homo sapien
cgttctcatctagtacaagcctgat

SEQ ID NO: 2654880 - DNA, 25 bp, Homo sapien
cactatgcaaatatcagggctctga

SEQ ID NO: 2654881 - DNA, 25 bp, Homo sapien
taaaccaggagacttatcttaacca

SEQ ID NO: 2654882 - DNA, 25 bp, Homo sapien
aaccaaaattatctcaaagtcaact

SEQ ID NO: 2654883 - DNA, 25 bp, Homo sapien
caaagtcaacttccattggccgaat

SEQ ID NO: 2654884 - DNA, 25 bp, Homo sapien
gttcacatgtcacaatggtgtgctg

SEQ ID NO: 2654885 - DNA, 25 bp, Homo sapien
ttcacatgtcacaatggtgtgctga

SEQ ID NO: 2654886 - DNA, 25 bp, Homo sapien
tcacatgtcacaatggtgtgctgag

SEQ ID NO: 2654887 - DNA, 25 bp, Homo sapien
gcagacaaggcttctttaaataaca

SEQ ID NO: 2654888 - DNA, 25 bp, Homo sapien
caggaacttatgacaacacacttat

SEQ ID NO: 2654889 - DNA, 25 bp, Homo sapien
tccaataccaggaacttatgacaac

SEQ ID NO: 2654890 - DNA, 25 bp, Homo sapien
gggcattggaattaaggaagcagac

SEQ ID NO: 2654891 - DNA, 25 bp, Homo sapien
ttcttccaattcagtggttggtggc

SEQ ID NO: 2654892 - DNA, 25 bp, Homo sapien
ggttggtggcaattcttcaactaag

SEQ ID NO: 2654893 - DNA, 25 bp, Homo sapien
aagaacttggctaactttgcaaggt

SEQ ID NO: 2654894 - DNA, 25 bp, Homo sapien
tgcaaggtaaactccattccggagc

SEQ ID NO: 2654895 - DNA, 25 bp, Homo sapien
cccatcattcaactcaacagttatg

SEQ ID NO: 2654896 - DNA, 25 bp, Homo sapien
tgaaacaaatcctagatctatcact

SEQ ID NO: 2654897 - DNA, 25 bp, Homo sapien
atgtatctctaaaaaatcgggattt

SEQ ID NO: 2654898 - DNA, 25 bp, Homo sapien
aacagtgcggtttttattgttgatc

SEQ ID NO: 2654899 - DNA, 25 bp, Homo sapien
aaagtgagtcatttgcaataacttt

SEQ ID NO: 2654900 - DNA, 25 bp, Homo sapien
gagagaaggaaccacacaaaaagtg

SEQ ID NO: 2654901 - DNA, 25 bp, Homo sapien
acacaaaaagtgagtcatttgcaat

SEQ ID NO: 2654902 - DNA, 25 bp, Homo sapien
gagaaggaaccacacaaaaagtgag

SEQ ID NO: 2654903 - DNA, 25 bp, Homo sapien
cttgggtagaccaatagactccatc

SEQ ID NO: 2654904 - DNA, 25 bp, Homo sapien
tagactccatcgctcttaaccactg

SEQ ID NO: 2654905 - DNA, 25 bp, Homo sapien
cggtattatctgtgtgtcgaaaatg

SEQ ID NO: 2654906 - DNA, 25 bp, Homo sapien
tcttaaccactggacggtattatct

SEQ ID NO: 2654907 - DNA, 25 bp, Homo sapien
gatgtttgtgtactacccctttgcc

SEQ ID NO: 2654908 - DNA, 25 bp, Homo sapien
cataacccagtctccaaagtcattg

SEQ ID NO: 2654909 - DNA, 25 bp, Homo sapien
tgggcacatccctcattctgagttc

SEQ ID NO: 2654910 - DNA, 25 bp, Homo sapien
tcagattccagtgcgtgaaggctta

SEQ ID NO: 2654911 - DNA, 25 bp, Homo sapien
cgtgaatgcaatatatcattcttgg

SEQ ID NO: 2654912 - DNA, 25 bp, Homo sapien
ctcagtgcgtgaatgcaatatatca

SEQ ID NO: 2654913 - DNA, 25 bp, Homo sapien
tgtttttccgatcatagacatctgt

SEQ ID NO: 2654914 - DNA, 25 bp, Homo sapien
atatcattcttggtatgtttttccg

SEQ ID NO: 2654915 - DNA, 25 bp, Homo sapien
taataacgtacctgggcatttcacc

SEQ ID NO: 2654916 - DNA, 25 bp, Homo sapien
gactcgccatgggagaagaacccaa

SEQ ID NO: 2654917 - DNA, 25 bp, Homo sapien
caaagttgcgccatgttctgactca

SEQ ID NO: 2654918 - DNA, 25 bp, Homo sapien
caagtgatccatccgaaacccagat

SEQ ID NO: 2654919 - DNA, 25 bp, Homo sapien
ggcatggcccactagaccacgaata

SEQ ID NO: 2654920 - DNA, 25 bp, Homo sapien
caactaagtggagtgtcacgcaggc

SEQ ID NO: 2654921 - DNA, 25 bp, Homo sapien
ttcaagggactagcaactgatagca

SEQ ID NO: 2654922 - DNA, 25 bp, Homo sapien
cctaagaaccccgatgggcatggcc

SEQ ID NO: 2654923 - DNA, 25 bp, Homo sapien
gccagcttgaaagggtacacacaca

SEQ ID NO: 2654924 - DNA, 25 bp, Homo sapien
taataggtaccatatctttgggcct

SEQ ID NO: 2654925 - DNA, 25 bp, Homo sapien
cacgaggcttacaagccaggaaggc

SEQ ID NO: 2654926 - DNA, 25 bp, Homo sapien
gttactatagatattggctcctggg

SEQ ID NO: 2654927 - DNA, 25 bp, Homo sapien
acccataacctgagaaaagaacttg

SEQ ID NO: 2654928 - DNA, 25 bp, Homo sapien
cataaggtagtaatgatggcatcca

SEQ ID NO: 2654929 - DNA, 25 bp, Homo sapien
tagagtggcaagactatcagtgggt

SEQ ID NO: 2654930 - DNA, 25 bp, Homo sapien
caagtaccacataccccttgaggaa

SEQ ID NO: 2654931 - DNA, 25 bp, Homo sapien
ctggggtgctattcctagtttgaac

SEQ ID NO: 2654932 - DNA, 25 bp, Homo sapien
tgaagtctactttgcccaacaaatc

SEQ ID NO: 2654933 - DNA, 25 bp, Homo sapien
tgtgaagtctactttgcccaacaaa

SEQ ID NO: 2654934 - DNA, 25 bp, Homo sapien
ccaacaaatcctggatctggggtgc

SEQ ID NO: 2654935 - DNA, 25 bp, Homo sapien
catccacggacagttcattggccag

SEQ ID NO: 2654936 - DNA, 25 bp, Homo sapien
ggacagttcattggccagaatacca

SEQ ID NO: 2654937 - DNA, 25 bp, Homo sapien
gccagaataccacctattttgctga

SEQ ID NO: 2654938 - DNA, 25 bp, Homo sapien
gttcattggccagaataccacctat

SEQ ID NO: 2654939 - DNA, 25 bp, Homo sapien
tattctggtgcaaggttgtcatcca

SEQ ID NO: 2654940 - DNA, 25 bp, Homo sapien
gtgttacaacggtttgctctgctat

SEQ ID NO: 2654941 - DNA, 25 bp, Homo sapien
catccactaaagttaaaaccgcatt

SEQ ID NO: 2654942 - DNA, 25 bp, Homo sapien
gttacaacggtttgctctgctattc

SEQ ID NO: 2654943 - DNA, 25 bp, Homo sapien
ttccaaaactcgaaattcaaatgga

SEQ ID NO: 2654944 - DNA, 25 bp, Homo sapien
atttccaaaactcgaaattcaaatg

SEQ ID NO: 2654945 - DNA, 25 bp, Homo sapien
tccaaaactcgaaattcaaatggaa

SEQ ID NO: 2654946 - DNA, 25 bp, Homo sapien
ctgcttgtgtcagcagttcttcata

SEQ ID NO: 2654947 - DNA, 25 bp, Homo sapien
tgactttattaatattgccttggat

SEQ ID NO: 2654948 - DNA, 25 bp, Homo sapien
cagcagttcttcataagcatctctt

SEQ ID NO: 2654949 - DNA, 25 bp, Homo sapien
ggatttctgcttgtgtcagcagttc

SEQ ID NO: 2654950 - DNA, 25 bp, Homo sapien
cagcattgatatggtccactgcagc

SEQ ID NO: 2654951 - DNA, 25 bp, Homo sapien
ttcgttctgatacatggcagcagca

SEQ ID NO: 2654952 - DNA, 25 bp, Homo sapien
tcagtgcaagcagcgtattctcggg

SEQ ID NO: 2654953 - DNA, 25 bp, Homo sapien
tctggaggttgaaaagttcgttctg

SEQ ID NO: 2654954 - DNA, 25 bp, Homo sapien
gatctccaggtttatatgatttaaa

SEQ ID NO: 2654955 - DNA, 25 bp, Homo sapien
caaaaaaatacgtcttagatttcag

SEQ ID NO: 2654956 - DNA, 25 bp, Homo sapien
atctggatttagcttatccaaaaaa

SEQ ID NO: 2654957 - DNA, 25 bp, Homo sapien
cagatctccaggtttatatgattta

SEQ ID NO: 2654958 - DNA, 25 bp, Homo sapien
cagacacaagatcgttgctttccaa

SEQ ID NO: 2654959 - DNA, 25 bp, Homo sapien
ccagattgtttaagcctattgcggg

SEQ ID NO: 2654960 - DNA, 25 bp, Homo sapien
ttccacatatgccttgtccagattg

SEQ ID NO: 2654961 - DNA, 25 bp, Homo sapien
gggcttctgagttgattctgcacag

SEQ ID NO: 2654962 - DNA, 25 bp, Homo sapien
cttgcccttgggataaaacttctag

SEQ ID NO: 2654963 - DNA, 25 bp, Homo sapien
gaatttcattccagcttaagttatc

SEQ ID NO: 2654964 - DNA, 25 bp, Homo sapien
tcttcttgaatttgagcattaacca

SEQ ID NO: 2654965 - DNA, 25 bp, Homo sapien
cattaaccatatcaatacaattctg

SEQ ID NO: 2654966 - DNA, 25 bp, Homo sapien
tcccactatgctagagaaggaaagt

SEQ ID NO: 2654967 - DNA, 25 bp, Homo sapien
cttcttctcccactatgctagagaa

SEQ ID NO: 2654968 - DNA, 25 bp, Homo sapien
tctcccactatgctagagaaggaaa

SEQ ID NO: 2654969 - DNA, 25 bp, Homo sapien
gagaaggaaagtgtcttatacttac

SEQ ID NO: 2654970 - DNA, 25 bp, Homo sapien
tgattgaaatcacctgctaaagttg

SEQ ID NO: 2654971 - DNA, 25 bp, Homo sapien
gctgacttgattgaaatcacctgct

SEQ ID NO: 2654972 - DNA, 25 bp, Homo sapien
ttcagctgacttgattgaaatcacc

SEQ ID NO: 2654973 - DNA, 25 bp, Homo sapien
gaaatcacctgctaaagttgctgtc

SEQ ID NO: 2654974 - DNA, 25 bp, Homo sapien
tggtcttaacagaaccaaggccgat

SEQ ID NO: 2654975 - DNA, 25 bp, Homo sapien
aatggtcttaacagaaccaaggccg

SEQ ID NO: 2654976 - DNA, 25 bp, Homo sapien
ggtcttaacagaaccaaggccgatc

SEQ ID NO: 2654977 - DNA, 25 bp, Homo sapien
tcttaacagaaccaaggccgatcac

SEQ ID NO: 2654978 - DNA, 25 bp, Homo sapien
ggagcaaagtttctaaagtcctcaa

SEQ ID NO: 2654979 - DNA, 25 bp, Homo sapien
atcactaatattcgcagtaggtagg

SEQ ID NO: 2654980 - DNA, 25 bp, Homo sapien
cattgatgtaccctacagctacaac

SEQ ID NO: 2654981 - DNA, 25 bp, Homo sapien
taaagtcctcaaaggattcccttca

SEQ ID NO: 2654982 - DNA, 25 bp, Homo sapien
tgatttagcatggtataaaacatcc

SEQ ID NO: 2654983 - DNA, 25 bp, Homo sapien
gcatggtataaaacatcctggtagt

SEQ ID NO: 2654984 - DNA, 25 bp, Homo sapien
catcctggtagtgctgggcatgggc

SEQ ID NO: 2654985 - DNA, 25 bp, Homo sapien
tccgagtttctgtgatttagcatgg

SEQ ID NO: 2654986 - DNA, 25 bp, Homo sapien
gacctagacagaggagatgaccgcc

SEQ ID NO: 2654987 - DNA, 25 bp, Homo sapien
gcagttcctaggttctaaagaccta

SEQ ID NO: 2654988 - DNA, 25 bp, Homo sapien
tcctgtttcgaatgaggcagttcct

SEQ ID NO: 2654989 - DNA, 25 bp, Homo sapien
gagatgaccgccctttcagttgggt

SEQ ID NO: 2654990 - DNA, 25 bp, Homo sapien
tatcatctcaatgggaacaactggg

SEQ ID NO: 2654991 - DNA, 25 bp, Homo sapien
tgctgtgaccctgtggatgcttttc

SEQ ID NO: 2654992 - DNA, 25 bp, Homo sapien
tattctacaccaacctggccattgc

SEQ ID NO: 2654993 - DNA, 25 bp, Homo sapien
tggtgtcccggccaatgctgtgacc

SEQ ID NO: 2654994 - DNA, 25 bp, Homo sapien
ctcctctattttacaccgtgaattc

SEQ ID NO: 2654995 - DNA, 25 bp, Homo sapien
ctctattttacaccgtgaattcagc

SEQ ID NO: 2654996 - DNA, 25 bp, Homo sapien
caatctcaggtttacgtggagggtt

SEQ ID NO: 2654997 - DNA, 25 bp, Homo sapien
ttgtgcaatctcaggtttacgtgga

SEQ ID NO: 2654998 - DNA, 25 bp, Homo sapien
gcacaggagagcaaacttctacaga

SEQ ID NO: 2654999 - DNA, 25 bp, Homo sapien
ggcaagtttcctgcctgcacggcac

SEQ ID NO: 2655000 - DNA, 25 bp, Homo sapien
tgctgctgacacatggaactgaggt

SEQ ID NO: 2655001 - DNA, 25 bp, Homo sapien
tacatcctttccctgcggaggacca

SEQ ID NO: 2655002 - DNA, 25 bp, Homo sapien
tggcatcatcgacggcttgctgtat

SEQ ID NO: 2655003 - DNA, 25 bp, Homo sapien
tcatcgacggcttgctgtatctcat

SEQ ID NO: 2655004 - DNA, 25 bp, Homo sapien
cacgttggcatcatcgacggcttgc

SEQ ID NO: 2655005 - DNA, 25 bp, Homo sapien
attgttttgctctgtccttgtccac

SEQ ID NO: 2655006 - DNA, 25 bp, Homo sapien
ctaatttcggtataattatgtgtcc

SEQ ID NO: 2655007 - DNA, 25 bp, Homo sapien
tgttcagcaacattgttacattttg

SEQ ID NO: 2655008 - DNA, 25 bp, Homo sapien
aatcactgacaatagggcaaccaac

SEQ ID NO: 2655009 - DNA, 25 bp, Homo sapien
tatgtgtccaagaactaaaacttgg

SEQ ID NO: 2655010 - DNA, 25 bp, Homo sapien
tctttcagatttgagctcttttgcc

SEQ ID NO: 2655011 - DNA, 25 bp, Homo sapien
tgattaacatcaaccaccagagtaa

SEQ ID NO: 2655012 - DNA, 25 bp, Homo sapien
tagtatttgtcagcacactccggga

SEQ ID NO: 2655013 - DNA, 25 bp, Homo sapien
ttttgccttcacaagggcatcatag

SEQ ID NO: 2655014 - DNA, 25 bp, Homo sapien
caattctttcccaatgaaggatgag

SEQ ID NO: 2655015 - DNA, 25 bp, Homo sapien
tgaccagatgccaagtaagagagtg

SEQ ID NO: 2655016 - DNA, 25 bp, Homo sapien
taagctctacttctaaggccacaca

SEQ ID NO: 2655017 - DNA, 25 bp, Homo sapien
tactagcctagaagttgacagccac

SEQ ID NO: 2655018 - DNA, 25 bp, Homo sapien
ctccaataaggagatacccacaagg

SEQ ID NO: 2655019 - DNA, 25 bp, Homo sapien
cacaaggactgtggcccttatttaa

SEQ ID NO: 2655020 - DNA, 25 bp, Homo sapien
tgttcggcattaaaccaaagcagaa

SEQ ID NO: 2655021 - DNA, 25 bp, Homo sapien
tttaaggacggccaatgttcggcat

SEQ ID NO: 2655022 - DNA, 25 bp, Homo sapien
ccaggaactctcttttgaatcagtg

SEQ ID NO: 2655023 - DNA, 25 bp, Homo sapien
ggttgagtttgagccatgaaccgtc

SEQ ID NO: 2655024 - DNA, 25 bp, Homo sapien
gaatcagtgttgtaatagtagtcat

SEQ ID NO: 2655025 - DNA, 25 bp, Homo sapien
tacaagcatgattcaggtgtgaccc

SEQ ID NO: 2655026 - DNA, 25 bp, Homo sapien
tccccaggccagagtaggcagaccc

SEQ ID NO: 2655027 - DNA, 25 bp, Homo sapien
ttcttccccaggccagagtaggcag

SEQ ID NO: 2655028 - DNA, 25 bp, Homo sapien
tcttccccaggccagagtaggcaga

SEQ ID NO: 2655029 - DNA, 25 bp, Homo sapien
cttccccaggccagagtaggcagac

SEQ ID NO: 2655030 - DNA, 25 bp, Homo sapien
aaagactgcaatggccataaggtcc

SEQ ID NO: 2655031 - DNA, 25 bp, Homo sapien
tggccataaggtcctcagacttctt

SEQ ID NO: 2655032 - DNA, 25 bp, Homo sapien
ttccctcggactgccaaggaaaaga

SEQ ID NO: 2655033 - DNA, 25 bp, Homo sapien
cgcttccctcggactgccaaggaaa

SEQ ID NO: 2655034 - DNA, 25 bp, Homo sapien
gcttgaaagcgaagaagcaactctt

SEQ ID NO: 2655035 - DNA, 25 bp, Homo sapien
tattctcacgaatgtaacctactgt

SEQ ID NO: 2655036 - DNA, 25 bp, Homo sapien
aactcttctgaagcagaccatatat

SEQ ID NO: 2655037 - DNA, 25 bp, Homo sapien
cctactgtgacttcctcaataatgt

SEQ ID NO: 2655038 - DNA, 25 bp, Homo sapien
gacttcctctatattgacctgggca

SEQ ID NO: 2655039 - DNA, 25 bp, Homo sapien
tccataagcacttgagacagaatgc

SEQ ID NO: 2655040 - DNA, 25 bp, Homo sapien
tgtagccggagtatagctggcctcg

SEQ ID NO: 2655041 - DNA, 25 bp, Homo sapien
tttccttggcagaccactgatggca

SEQ ID NO: 2655042 - DNA, 25 bp, Homo sapien
agaatactacatgcctcatctttca

SEQ ID NO: 2655043 - DNA, 25 bp, Homo sapien
gagcttttcctattatgtcctaaca

SEQ ID NO: 2655044 - DNA, 25 bp, Homo sapien
gaactcttgtgcatagccatgacat

SEQ ID NO: 2655045 - DNA, 25 bp, Homo sapien
ttagttcctttgagatgagcttttc

SEQ ID NO: 2655046 - DNA, 25 bp, Homo sapien
ggaatgctttttacactactggtgg

SEQ ID NO: 2655047 - DNA, 25 bp, Homo sapien
ttttttgctcctggatatgaagaga

SEQ ID NO: 2655048 - DNA, 25 bp, Homo sapien
ggcagcttggctgggaatataattt

SEQ ID NO: 2655049 - DNA, 25 bp, Homo sapien
gagctcattattatgtttcatctca

SEQ ID NO: 2655050 - DNA, 25 bp, Homo sapien
gaactgtctccctcttacaggtaag

SEQ ID NO: 2655051 - DNA, 25 bp, Homo sapien
tctctccaggttctacaagtgtctg

SEQ ID NO: 2655052 - DNA, 25 bp, Homo sapien
aagtgtctgggtgccttgttacagg

SEQ ID NO: 2655053 - DNA, 25 bp, Homo sapien
gaagtttgctggtaacaagtgctct

SEQ ID NO: 2655054 - DNA, 25 bp, Homo sapien
aacttgtggccctgaatcccttgga

SEQ ID NO: 2655055 - DNA, 25 bp, Homo sapien
aaaacactggtgctgcaactgacca

SEQ ID NO: 2655056 - DNA, 25 bp, Homo sapien
taagtatctttaccacaacacgtgg

SEQ ID NO: 2655057 - DNA, 25 bp, Homo sapien
ggaggatgctctaccaacttgtggc

SEQ ID NO: 2655058 - DNA, 25 bp, Homo sapien
tagaatcagtattatcaatgaacgt

SEQ ID NO: 2655059 - DNA, 25 bp, Homo sapien
gtttgccgcctgtgcatatactcct

SEQ ID NO: 2655060 - DNA, 25 bp, Homo sapien
ttgccgcctgtgcatatactccttc

SEQ ID NO: 2655061 - DNA, 25 bp, Homo sapien
tatcaatgaacgtttgccgcctgtg

SEQ ID NO: 2655062 - DNA, 25 bp, Homo sapien
gccaagcacttggtatggtaggaaa

SEQ ID NO: 2655063 - DNA, 25 bp, Homo sapien
cacctgggttcgactaattcagctc

SEQ ID NO: 2655064 - DNA, 25 bp, Homo sapien
gattaggtaaatgagcagcagaact

SEQ ID NO: 2655065 - DNA, 25 bp, Homo sapien
tgacttcaaggctcacatgtaccct

SEQ ID NO: 2655066 - DNA, 25 bp, Homo sapien
tctctgaaatactgtagtcttgaaa

SEQ ID NO: 2655067 - DNA, 25 bp, Homo sapien
gttgccattcggaaccaggactgaa

SEQ ID NO: 2655068 - DNA, 25 bp, Homo sapien
tactgtagtcttgaaagatagctct

SEQ ID NO: 2655069 - DNA, 25 bp, Homo sapien
ttgcagttgccattcggaaccagga

SEQ ID NO: 2655070 - DNA, 25 bp, Homo sapien
tctctagctttgttcgctctcaaca

SEQ ID NO: 2655071 - DNA, 25 bp, Homo sapien
gctctcaacagtgactgtattttca

SEQ ID NO: 2655072 - DNA, 25 bp, Homo sapien
ctcaacagtgactgtattttcacaa

SEQ ID NO: 2655073 - DNA, 25 bp, Homo sapien
ctttgttcgctctcaacagtgactg

SEQ ID NO: 2655074 - DNA, 25 bp, Homo sapien
gctagataagtgacttacattcttg

SEQ ID NO: 2655075 - DNA, 25 bp, Homo sapien
ccagcccaaaggatctttgggaagg

SEQ ID NO: 2655076 - DNA, 25 bp, Homo sapien
tctcccagcccaaaggatctttggg

SEQ ID NO: 2655077 - DNA, 25 bp, Homo sapien
gaccttgtgcttgagctagataagt

SEQ ID NO: 2655078 - DNA, 25 bp, Homo sapien
ttcttcccttaatcgtgcaacctct

SEQ ID NO: 2655079 - DNA, 25 bp, Homo sapien
atcgtgcaacctctagttcctcctg

SEQ ID NO: 2655080 - DNA, 25 bp, Homo sapien
caaatttgcgaattactgttaatgg

SEQ ID NO: 2655081 - DNA, 25 bp, Homo sapien
ggtatacaaatttgcgaattactgt

SEQ ID NO: 2655082 - DNA, 25 bp, Homo sapien
caattgaagggcactcttggtttct

SEQ ID NO: 2655083 - DNA, 25 bp, Homo sapien
tatgtaaattgggtggagactacac

SEQ ID NO: 2655084 - DNA, 25 bp, Homo sapien
tactggtcatttacgtgggtcaaga

SEQ ID NO: 2655085 - DNA, 25 bp, Homo sapien
tggtcttgtgtaaataattgccctc

SEQ ID NO: 2655086 - DNA, 25 bp, Homo sapien
ggccgctggcgctctatgagccact

SEQ ID NO: 2655087 - DNA, 25 bp, Homo sapien
cccgttgtccagaacgttcgcttgg

SEQ ID NO: 2655088 - DNA, 25 bp, Homo sapien
ccctggtgtctttatgaggtctgga

SEQ ID NO: 2655089 - DNA, 25 bp, Homo sapien
gaacgttcgcttggttgctggccgc

SEQ ID NO: 2655090 - DNA, 25 bp, Homo sapien
ccttggttgtcggtgttattcagta

SEQ ID NO: 2655091 - DNA, 25 bp, Homo sapien
tattccttggttgtcggtgttattc

SEQ ID NO: 2655092 - DNA, 25 bp, Homo sapien
tgtaaaaggtaaaacagctgctgat

SEQ ID NO: 2655093 - DNA, 25 bp, Homo sapien
tggttgtcggtgttattcagtattt

SEQ ID NO: 2655094 - DNA, 25 bp, Homo sapien
tccataaatttagtggacttgttct

SEQ ID NO: 2655095 - DNA, 25 bp, Homo sapien
tctcgctgattagaggcataattat

SEQ ID NO: 2655096 - DNA, 25 bp, Homo sapien
aaagcttgagaagtagatattcttc

SEQ ID NO: 2655097 - DNA, 25 bp, Homo sapien
tatagtgtgaaaataacagtatcca

SEQ ID NO: 2655098 - DNA, 25 bp, Homo sapien
agaaggcaggtatgagctgaaaatg

SEQ ID NO: 2655099 - DNA, 25 bp, Homo sapien
cactgttcccagtttataacgtgta

SEQ ID NO: 2655100 - DNA, 25 bp, Homo sapien
ctgttcccagtttataacgtgtatg

SEQ ID NO: 2655101 - DNA, 25 bp, Homo sapien
ggcaggtatgagctgaaaatggacc

SEQ ID NO: 2655102 - DNA, 25 bp, Homo sapien
catcttgatgactgtagggttacca

SEQ ID NO: 2655103 - DNA, 25 bp, Homo sapien
ccccgggcacctctattgaagctga

SEQ ID NO: 2655104 - DNA, 25 bp, Homo sapien
tctcttttaccactggagccaggag

SEQ ID NO: 2655105 - DNA, 25 bp, Homo sapien
taactatgtcctgtacctggtccac

SEQ ID NO: 2655106 - DNA, 25 bp, Homo sapien
atgcggtgtttgggacaaccaattt

SEQ ID NO: 2655107 - DNA, 25 bp, Homo sapien
atatgcggtgtttgggacaaccaat

SEQ ID NO: 2655108 - DNA, 25 bp, Homo sapien
gtgtttgggacaaccaattttcata

SEQ ID NO: 2655109 - DNA, 25 bp, Homo sapien
tgtttgggacaaccaattttcatac

SEQ ID NO: 2655110 - DNA, 25 bp, Homo sapien
tctgggtatgttagagcttgttctg

SEQ ID NO: 2655111 - DNA, 25 bp, Homo sapien
ttcacttctgggtatgttagagctt

SEQ ID NO: 2655112 - DNA, 25 bp, Homo sapien
caggttctcaatggaagcctccagt

SEQ ID NO: 2655113 - DNA, 25 bp, Homo sapien
ttgtcggtgacccttctcaggttct

SEQ ID NO: 2655114 - DNA, 25 bp, Homo sapien
cacaatataagggaaaactgctgtc

SEQ ID NO: 2655115 - DNA, 25 bp, Homo sapien
agaatgttaaacttgctgcaagtac

SEQ ID NO: 2655116 - DNA, 25 bp, Homo sapien
catcgtattccaagaacgttccagg

SEQ ID NO: 2655117 - DNA, 25 bp, Homo sapien
cactacaggggcttattttacatcg

SEQ ID NO: 2655118 - DNA, 25 bp, Homo sapien
aaacacacagcaattgttccagtca

SEQ ID NO: 2655119 - DNA, 25 bp, Homo sapien
aaattaaacataagatgagatggta

SEQ ID NO: 2655120 - DNA, 25 bp, Homo sapien
tccactgatgataataactgagctg

SEQ ID NO: 2655121 - DNA, 25 bp, Homo sapien
ggaaaaaacacacagcaattgttcc

SEQ ID NO: 2655122 - DNA, 25 bp, Homo sapien
tttggctatatacctcaatccataa

SEQ ID NO: 2655123 - DNA, 25 bp, Homo sapien
ctttggctatatacctcaatccata

SEQ ID NO: 2655124 - DNA, 25 bp, Homo sapien
tttctcatggatcgaattcttcagt

SEQ ID NO: 2655125 - DNA, 25 bp, Homo sapien
aatagctcatcttctgttgcatcgg

SEQ ID NO: 2655126 - DNA, 25 bp, Homo sapien
cttctgttgcatcggggaatttctc

SEQ ID NO: 2655127 - DNA, 25 bp, Homo sapien
aatttctcatggatcgaattcttca

SEQ ID NO: 2655128 - DNA, 25 bp, Homo sapien
caggagaagctatggtgagattacc

SEQ ID NO: 2655129 - DNA, 25 bp, Homo sapien
ttctgatgtaaatcctaacaaggag

SEQ ID NO: 2655130 - DNA, 25 bp, Homo sapien
gatctccaaattaacctcagcttaa

SEQ ID NO: 2655131 - DNA, 25 bp, Homo sapien
tcttgagagtcattagaaacagaag

SEQ ID NO: 2655132 - DNA, 25 bp, Homo sapien
gctgcgtgctgaagaaccttggcca

SEQ ID NO: 2655133 - DNA, 25 bp, Homo sapien
ggctggattcatgtaccgatagtac

SEQ ID NO: 2655134 - DNA, 25 bp, Homo sapien
gaatttatctgacctccagctgtca

SEQ ID NO: 2655135 - DNA, 25 bp, Homo sapien
catgtcgatgatatcaaagccatct

SEQ ID NO: 2655136 - DNA, 25 bp, Homo sapien
tcctgatacgtctctgataaataat

SEQ ID NO: 2655137 - DNA, 25 bp, Homo sapien
cctgatacgtctctgataaataatt

SEQ ID NO: 2655138 - DNA, 25 bp, Homo sapien
tgatacgtctctgataaataattgt

SEQ ID NO: 2655139 - DNA, 25 bp, Homo sapien
ctgatacgtctctgataaataattg

SEQ ID NO: 2655140 - DNA, 25 bp, Homo sapien
gaacaaacatgacaagaggaaagtg

SEQ ID NO: 2655141 - DNA, 25 bp, Homo sapien
tccaggaggagtgaatctgactacc

SEQ ID NO: 2655142 - DNA, 25 bp, Homo sapien
gatgttacacttctatggcctgttg

SEQ ID NO: 2655143 - DNA, 25 bp, Homo sapien
tcactcactccaagggagaccgagg

SEQ ID NO: 2655144 - DNA, 25 bp, Homo sapien
tgtcaccaggtctgtgtatttgtcc

SEQ ID NO: 2655145 - DNA, 25 bp, Homo sapien
ccatattaaacttctcttctggctc

SEQ ID NO: 2655146 - DNA, 25 bp, Homo sapien
caataagtcctgtagagattaagca

SEQ ID NO: 2655147 - DNA, 25 bp, Homo sapien
ggtccattgctaagatggctcccca

SEQ ID NO: 2655148 - DNA, 25 bp, Homo sapien
gatgcctaaatcatgggtccattgc

SEQ ID NO: 2655149 - DNA, 25 bp, Homo sapien
ttattaatgtctaggagtcagggaa

SEQ ID NO: 2655150 - DNA, 25 bp, Homo sapien
aaactgcctgcttccgagaaatggg

SEQ ID NO: 2655151 - DNA, 25 bp, Homo sapien
tagcatagctttggcggatgagaac

SEQ ID NO: 2655152 - DNA, 25 bp, Homo sapien
taatacatgctaatggctgacggca

SEQ ID NO: 2655153 - DNA, 25 bp, Homo sapien
gatgagaacaccatagcctgtcctg

SEQ ID NO: 2655154 - DNA, 25 bp, Homo sapien
tgtctaccacccattttgagttcac

SEQ ID NO: 2655155 - DNA, 25 bp, Homo sapien
accacgtctagcctcaatttcttga

SEQ ID NO: 2655156 - DNA, 25 bp, Homo sapien
accatttggagacactattttccca

SEQ ID NO: 2655157 - DNA, 25 bp, Homo sapien
ttcccattgaacttagtcccctgtc

SEQ ID NO: 2655158 - DNA, 25 bp, Homo sapien
taaaatgtacgatgcaatggcttct

SEQ ID NO: 2655159 - DNA, 25 bp, Homo sapien
taccgggtacccattggcagtcact

SEQ ID NO: 2655160 - DNA, 25 bp, Homo sapien
tcactgccctaaaagataccgggta

SEQ ID NO: 2655161 - DNA, 25 bp, Homo sapien
ttacacatgaacagcgacacatctg

SEQ ID NO: 2655162 - DNA, 25 bp, Homo sapien
gtcatttttctcaggggcaattgca

SEQ ID NO: 2655163 - DNA, 25 bp, Homo sapien
agaaaagattccacggttggcacct

SEQ ID NO: 2655164 - DNA, 25 bp, Homo sapien
caattcactcagtaagtcatttttc

SEQ ID NO: 2655165 - DNA, 25 bp, Homo sapien
agcgaccccagcaattcactcagta

SEQ ID NO: 2655166 - DNA, 25 bp, Homo sapien
gcttcaccgtcctctatgtcatatt

SEQ ID NO: 2655167 - DNA, 25 bp, Homo sapien
tgaaagctgacttagtgtatttgcc

SEQ ID NO: 2655168 - DNA, 25 bp, Homo sapien
gagaaatctcggtctttgaaagctg

SEQ ID NO: 2655169 - DNA, 25 bp, Homo sapien
tatcatgaggcttcggctatctata

SEQ ID NO: 2655170 - DNA, 25 bp, Homo sapien
tatgatcaagagtgtgggccctgga

SEQ ID NO: 2655171 - DNA, 25 bp, Homo sapien
ttcactttcagggatggctaaccag

SEQ ID NO: 2655172 - DNA, 25 bp, Homo sapien
taagatctcacagtatgccaagagg

SEQ ID NO: 2655173 - DNA, 25 bp, Homo sapien
aacttggttgcggtcctactgtcga

SEQ ID NO: 2655174 - DNA, 25 bp, Homo sapien
tccctggctggttccggatcacatc

SEQ ID NO: 2655175 - DNA, 25 bp, Homo sapien
ccctggctggttccggatcacatca

SEQ ID NO: 2655176 - DNA, 25 bp, Homo sapien
tggctggttccggatcacatcaatt

SEQ ID NO: 2655177 - DNA, 25 bp, Homo sapien
ctggttccggatcacatcaattatc

SEQ ID NO: 2655178 - DNA, 25 bp, Homo sapien
acggctcaccatgtccgtggcatgg

SEQ ID NO: 2655179 - DNA, 25 bp, Homo sapien
gaatctatcattgcacggctcacca

SEQ ID NO: 2655180 - DNA, 25 bp, Homo sapien
tctggagtcctggaatctatcattg

SEQ ID NO: 2655181 - DNA, 25 bp, Homo sapien
ccatgtccgtggcatggtctacctc

SEQ ID NO: 2655182 - DNA, 25 bp, Homo sapien
cagtctgttccaacgtccgaagatt

SEQ ID NO: 2655183 - DNA, 25 bp, Homo sapien
gtgtccagtctgttccaacgtccga

SEQ ID NO: 2655184 - DNA, 25 bp, Homo sapien
ccaacgtccgaagattcctctggat

SEQ ID NO: 2655185 - DNA, 25 bp, Homo sapien
tctgttccaacgtccgaagattcct

SEQ ID NO: 2655186 - DNA, 25 bp, Homo sapien
aatgtcttggtatttattttcggat

SEQ ID NO: 2655187 - DNA, 25 bp, Homo sapien
cttggtatttattttcggatgacac

SEQ ID NO: 2655188 - DNA, 25 bp, Homo sapien
gagaatgtcttggtatttattttcg

SEQ ID NO: 2655189 - DNA, 25 bp, Homo sapien
cttggcaatctcattgagaatgtct

SEQ ID NO: 2655190 - DNA, 25 bp, Homo sapien
gcagtagtaagtcgctatttgtaac

SEQ ID NO: 2655191 - DNA, 25 bp, Homo sapien
tttgtaacttgacttgtagcttatc

SEQ ID NO: 2655192 - DNA, 25 bp, Homo sapien
caagaagaatatcaagcagtagtaa

SEQ ID NO: 2655193 - DNA, 25 bp, Homo sapien
catccctttttacttcagaactgga

SEQ ID NO: 2655194 - DNA, 25 bp, Homo sapien
taaacaagtctttatgtaggtgtca

SEQ ID NO: 2655195 - DNA, 25 bp, Homo sapien
ttttgccaattcagcttttcgaagc

SEQ ID NO: 2655196 - DNA, 25 bp, Homo sapien
cattcagggtctgctgaagttttgc

SEQ ID NO: 2655197 - DNA, 25 bp, Homo sapien
gctgccttcttgttaagtgcattca

SEQ ID NO: 2655198 - DNA, 25 bp, Homo sapien
agtgtacttcactggcttcgctctc

SEQ ID NO: 2655199 - DNA, 25 bp, Homo sapien
ttgaagatcatctatatctagcagg

SEQ ID NO: 2655200 - DNA, 25 bp, Homo sapien
catctatatctagcaggacaccttt

SEQ ID NO: 2655201 - DNA, 25 bp, Homo sapien
tctagtttaattgatctccgagtat

SEQ ID NO: 2655202 - DNA, 25 bp, Homo sapien
gaaaaggcaaatgccagtgagtctg

SEQ ID NO: 2655203 - DNA, 25 bp, Homo sapien
aagaaaaggcaaatgccagtgagtc

SEQ ID NO: 2655204 - DNA, 25 bp, Homo sapien
agaaaaggcaaatgccagtgagtct

SEQ ID NO: 2655205 - DNA, 25 bp, Homo sapien
cagtagctatgatatcaaatgtaac

SEQ ID NO: 2655206 - DNA, 25 bp, Homo sapien
ttacatcgaaaatgcctacatcttc

SEQ ID NO: 2655207 - DNA, 25 bp, Homo sapien
tacatcttcagtagctatgatatca

SEQ ID NO: 2655208 - DNA, 25 bp, Homo sapien
ttttgatcttacatcgaaaatgcct

SEQ ID NO: 2655209 - DNA, 25 bp, Homo sapien
gtcagattcaattgacctaatcacc

SEQ ID NO: 2655210 - DNA, 25 bp, Homo sapien
caattgacctaatcacctgggtggg

SEQ ID NO: 2655211 - DNA, 25 bp, Homo sapien
gcatcattaaatctcaactttgaca

SEQ ID NO: 2655212 - DNA, 25 bp, Homo sapien
caaaagtcagattcaattgacctaa

SEQ ID NO: 2655213 - DNA, 25 bp, Homo sapien
cagcaggtatatgagaaggtttaca

SEQ ID NO: 2655214 - DNA, 25 bp, Homo sapien
ttcagcaggtatatgagaaggttta

SEQ ID NO: 2655215 - DNA, 25 bp, Homo sapien
ggtatatgagaaggtttacattcac

SEQ ID NO: 2655216 - DNA, 25 bp, Homo sapien
attcactttaaccttatcaaacatt

SEQ ID NO: 2655217 - DNA, 25 bp, Homo sapien
ggcacctgggtacattcttcagaac

SEQ ID NO: 2655218 - DNA, 25 bp, Homo sapien
acatgtttgtccctagtcagctaaa

SEQ ID NO: 2655219 - DNA, 25 bp, Homo sapien
tagtcacttaaaggctctgcgtgca

SEQ ID NO: 2655220 - DNA, 25 bp, Homo sapien
gcaagagtctttacatgaggcagta

SEQ ID NO: 2655221 - DNA, 25 bp, Homo sapien
gaatccttttgtggtgaagactcct

SEQ ID NO: 2655222 - DNA, 25 bp, Homo sapien
tgcgtataactgaaaaggcttgccc

SEQ ID NO: 2655223 - DNA, 25 bp, Homo sapien
taaactgtcagcaggaatcacactc

SEQ ID NO: 2655224 - DNA, 25 bp, Homo sapien
tacatggctgcctagttagggacta

SEQ ID NO: 2655225 - DNA, 25 bp, Homo sapien
tctaccaaagcctgcattaaggcta

SEQ ID NO: 2655226 - DNA, 25 bp, Homo sapien
catacatacccgcaaactgttgaga

SEQ ID NO: 2655227 - DNA, 25 bp, Homo sapien
tgagatagtgagcattgttttaagc

SEQ ID NO: 2655228 - DNA, 25 bp, Homo sapien
tccaatgctagcagtagggcaagag

SEQ ID NO: 2655229 - DNA, 25 bp, Homo sapien
taacattcaagcatatcattcagtg

SEQ ID NO: 2655230 - DNA, 25 bp, Homo sapien
tgcccggagcaagaaggaagcttac

SEQ ID NO: 2655231 - DNA, 25 bp, Homo sapien
ttgcaataagttaagataagctcct

SEQ ID NO: 2655232 - DNA, 25 bp, Homo sapien
aacattgctccctaattttggctcc

SEQ ID NO: 2655233 - DNA, 25 bp, Homo sapien
tcaacaataacctcatcttgtgggc

SEQ ID NO: 2655234 - DNA, 25 bp, Homo sapien
gatctcacacaaatagcaattggtg

SEQ ID NO: 2655235 - DNA, 25 bp, Homo sapien
cattcataccgcttaaagatctcac

SEQ ID NO: 2655236 - DNA, 25 bp, Homo sapien
gggccaacagagaaatcattcacag

SEQ ID NO: 2655237 - DNA, 25 bp, Homo sapien
cgaccctcggcgagcgctgtgtctg

SEQ ID NO: 2655238 - DNA, 25 bp, Homo sapien
cgcagggtgcccacgggtaagatca

SEQ ID NO: 2655239 - DNA, 25 bp, Homo sapien
agatcagggtccaagcgaccctcgg

SEQ ID NO: 2655240 - DNA, 25 bp, Homo sapien
tccggcgtgcagtgagagtctctgc

SEQ ID NO: 2655241 - DNA, 25 bp, Homo sapien
ggctctgcgcggcgctgctccggga

SEQ ID NO: 2655242 - DNA, 25 bp, Homo sapien
ctccgcttcaccctctctcctgact

SEQ ID NO: 2655243 - DNA, 25 bp, Homo sapien
gcctcgggctgctccgcttcaccct

SEQ ID NO: 2655244 - DNA, 25 bp, Homo sapien
tgacttctgcgggtcggggagccgg

SEQ ID NO: 2655245 - DNA, 25 bp, Homo sapien
cgggcagacaacagcgggccgcaca

SEQ ID NO: 2655246 - DNA, 25 bp, Homo sapien
gacaacagcgggccgcacagactga

SEQ ID NO: 2655247 - DNA, 25 bp, Homo sapien
ggcagacaacagcgggccgcacaga

SEQ ID NO: 2655248 - DNA, 25 bp, Homo sapien
cagacaacagcgggccgcacagact

SEQ ID NO: 2655249 - DNA, 25 bp, Homo sapien
gggctgcaccctccaagatcgagtc

SEQ ID NO: 2655250 - DNA, 25 bp, Homo sapien
caagtgcaacgcaggactgcaggct

SEQ ID NO: 2655251 - DNA, 25 bp, Homo sapien
ggtggcacgccccacctaaacgtga

SEQ ID NO: 2655252 - DNA, 25 bp, Homo sapien
tattggtggagcaacgtgagagctt

SEQ ID NO: 2655253 - DNA, 25 bp, Homo sapien
tagagaaagcctgcacttcggagag

SEQ ID NO: 2655254 - DNA, 25 bp, Homo sapien
aatgagagaataccacagtccgtgc

SEQ ID NO: 2655255 - DNA, 25 bp, Homo sapien
tgcttacggtagaaccactgctcag

SEQ ID NO: 2655256 - DNA, 25 bp, Homo sapien
taccaaggcgatagggcacagactt

SEQ ID NO: 2655257 - DNA, 25 bp, Homo sapien
gcaaataatgtatataggaccgtca

SEQ ID NO: 2655258 - DNA, 25 bp, Homo sapien
tatataggaccgtcagggcccttta

SEQ ID NO: 2655259 - DNA, 25 bp, Homo sapien
gtggcttcctccaagtaccacgaca

SEQ ID NO: 2655260 - DNA, 25 bp, Homo sapien
taccacgacaaggtcagtgtgggag

SEQ ID NO: 2655261 - DNA, 25 bp, Homo sapien
gaagcataggaaagcaagcctaaga

SEQ ID NO: 2655262 - DNA, 25 bp, Homo sapien
tggaagcataggaaagcaagcctaa

SEQ ID NO: 2655263 - DNA, 25 bp, Homo sapien
cataggaaagcaagcctaagaggaa

SEQ ID NO: 2655264 - DNA, 25 bp, Homo sapien
agcataggaaagcaagcctaagagg

SEQ ID NO: 2655265 - DNA, 25 bp, Homo sapien
taaggtggcatttgttgcttttgat

SEQ ID NO: 2655266 - DNA, 25 bp, Homo sapien
aaggtggcatttgttgcttttgatt

SEQ ID NO: 2655267 - DNA, 25 bp, Homo sapien
ctaaggtggcatttgttgcttttga

SEQ ID NO: 2655268 - DNA, 25 bp, Homo sapien
ctgtattcagttaacccactttcat

SEQ ID NO: 2655269 - DNA, 25 bp, Homo sapien
tgtattcagttaacccactttcatt

SEQ ID NO: 2655270 - DNA, 25 bp, Homo sapien
tctgtattcagttaacccactttca

SEQ ID NO: 2655271 - DNA, 25 bp, Homo sapien
aaatggttcatatttatcattgggg

SEQ ID NO: 2655272 - DNA, 25 bp, Homo sapien
tttcaggatgaacacaacgatggcc

SEQ ID NO: 2655273 - DNA, 25 bp, Homo sapien
cactccggtgtacacagatgggaca

SEQ ID NO: 2655274 - DNA, 25 bp, Homo sapien
gaggctgactacaaacactccggtg

SEQ ID NO: 2655275 - DNA, 25 bp, Homo sapien
gctggtcaaatatccggaggcatct

SEQ ID NO: 2655276 - DNA, 25 bp, Homo sapien
ttcgagcagggtttcattgagcaca

SEQ ID NO: 2655277 - DNA, 25 bp, Homo sapien
taacagaccgtggaaatgatcagcg

SEQ ID NO: 2655278 - DNA, 25 bp, Homo sapien
gagagggactgcatgggatacacca

SEQ ID NO: 2655279 - DNA, 25 bp, Homo sapien
taaaatgctgcagtgacgaagcgac

SEQ ID NO: 2655280 - DNA, 25 bp, Homo sapien
ctgggatcggaactttctttgcagc

SEQ ID NO: 2655281 - DNA, 25 bp, Homo sapien
ctttctttgcagcataagatactgt

SEQ ID NO: 2655282 - DNA, 25 bp, Homo sapien
gctgttataactgctgggatcggaa

SEQ ID NO: 2655283 - DNA, 25 bp, Homo sapien
taactgctgggatcggaactttctt

SEQ ID NO: 2655284 - DNA, 25 bp, Homo sapien
tgttattcaggttactagagcaggt

SEQ ID NO: 2655285 - DNA, 25 bp, Homo sapien
caggttactagagcaggtatccatt

SEQ ID NO: 2655286 - DNA, 25 bp, Homo sapien
ttgtatatgctgttattcaggttac

SEQ ID NO: 2655287 - DNA, 25 bp, Homo sapien
tatgctgttattcaggttactagag

SEQ ID NO: 2655288 - DNA, 25 bp, Homo sapien
cttgacagctcccataaaaagcagg

SEQ ID NO: 2655289 - DNA, 25 bp, Homo sapien
tcagcacctattggagtggccacag

SEQ ID NO: 2655290 - DNA, 25 bp, Homo sapien
aggaatagcctactctgaaagccag

SEQ ID NO: 2655291 - DNA, 25 bp, Homo sapien
tgggtgcttccatatcagaactgac

SEQ ID NO: 2655292 - DNA, 25 bp, Homo sapien
cctgatttgagcaatctattgagca

SEQ ID NO: 2655293 - DNA, 25 bp, Homo sapien
aaaccagtgctagcttctacttaca

SEQ ID NO: 2655294 - DNA, 25 bp, Homo sapien
caaacttctttagctgacaggcctt

SEQ ID NO: 2655295 - DNA, 25 bp, Homo sapien
tgttatttctaagcagactgacatg

SEQ ID NO: 2655296 - DNA, 25 bp, Homo sapien
taagaatgaacataaaaacagtgac

SEQ ID NO: 2655297 - DNA, 25 bp, Homo sapien
ttcacatttattaatacaggttatg

SEQ ID NO: 2655298 - DNA, 25 bp, Homo sapien
aatgttcacatttattaatacaggt

SEQ ID NO: 2655299 - DNA, 25 bp, Homo sapien
aaacagtgacatactattttgtaag

SEQ ID NO: 2655300 - DNA, 25 bp, Homo sapien
tgaactcaatctattccttgaaaca

SEQ ID NO: 2655301 - DNA, 25 bp, Homo sapien
tttcattgactatgactctagaaat

SEQ ID NO: 2655302 - DNA, 25 bp, Homo sapien
acacacgtgaaaagtccaggcctta

SEQ ID NO: 2655303 - DNA, 25 bp, Homo sapien
taaaaagcttgtgtgttaacttata

SEQ ID NO: 2655304 - DNA, 25 bp, Homo sapien
taatgactggtgtaataggagacag

SEQ ID NO: 2655305 - DNA, 25 bp, Homo sapien
ctttcacatgttgtgtagcttctgg

SEQ ID NO: 2655306 - DNA, 25 bp, Homo sapien
ggaactctgagaataattgcattag

SEQ ID NO: 2655307 - DNA, 25 bp, Homo sapien
tcacattgcagctcacttaaccaca

SEQ ID NO: 2655308 - DNA, 25 bp, Homo sapien
catgctgtgttatctgaattctgag

SEQ ID NO: 2655309 - DNA, 25 bp, Homo sapien
tgtttccataagactagcatgcaat

SEQ ID NO: 2655310 - DNA, 25 bp, Homo sapien
cagcctgctgggttgaaactgtaca

SEQ ID NO: 2655311 - DNA, 25 bp, Homo sapien
tctgagatgctactgaatttgacct

SEQ ID NO: 2655312 - DNA, 25 bp, Homo sapien
tcatccaggctggatggcacaatct

SEQ ID NO: 2655313 - DNA, 25 bp, Homo sapien
tagagacagggtttcacatgttggc

SEQ ID NO: 2655314 - DNA, 25 bp, Homo sapien
acccgcctcggcctcactaaagtgc

SEQ ID NO: 2655315 - DNA, 25 bp, Homo sapien
gagacagggtttcacatgttggcca

SEQ ID NO: 2655316 - DNA, 25 bp, Homo sapien
gaatgcatctcagtattggacagcc

SEQ ID NO: 2655317 - DNA, 25 bp, Homo sapien
tgggtcgcatagcagcacaccaaaa

SEQ ID NO: 2655318 - DNA, 25 bp, Homo sapien
cacttccttggatgggtcgcatagc

SEQ ID NO: 2655319 - DNA, 25 bp, Homo sapien
tattggacagcccacccttcgtggt

SEQ ID NO: 2655320 - DNA, 25 bp, Homo sapien
aggcgctgccgctatctgccgggca

SEQ ID NO: 2655321 - DNA, 25 bp, Homo sapien
ctatctgccgggcactatctttaaa

SEQ ID NO: 2655322 - DNA, 25 bp, Homo sapien
gttgctttctggtaaccaggcgctg

SEQ ID NO: 2655323 - DNA, 25 bp, Homo sapien
taagattagagccatttaagctatc

SEQ ID NO: 2655324 - DNA, 25 bp, Homo sapien
gcctggcagaataaattgtttccat

SEQ ID NO: 2655325 - DNA, 25 bp, Homo sapien
tgcctggcagaataaattgtttcca

SEQ ID NO: 2655326 - DNA, 25 bp, Homo sapien
gtgcctggcagaataaattgtttcc

SEQ ID NO: 2655327 - DNA, 25 bp, Homo sapien
tgcatgtgctgcgcttttctccact

SEQ ID NO: 2655328 - DNA, 25 bp, Homo sapien
ctccactgatctatctgcagatcca

SEQ ID NO: 2655329 - DNA, 25 bp, Homo sapien
gcatgtgctgcgcttttctccactg

SEQ ID NO: 2655330 - DNA, 25 bp, Homo sapien
ttgcatgtgctgcgcttttctccac

SEQ ID NO: 2655331 - DNA, 25 bp, Homo sapien
agtcaataaccaccttgacattgtt

SEQ ID NO: 2655332 - DNA, 25 bp, Homo sapien
caagtcaataaccaccttgacattg

SEQ ID NO: 2655333 - DNA, 25 bp, Homo sapien
gtcaataaccaccttgacattgttg

SEQ ID NO: 2655334 - DNA, 25 bp, Homo sapien
acaagtcaataaccaccttgacatt

SEQ ID NO: 2655335 - DNA, 25 bp, Homo sapien
gtgcaatccaatgcccttgcttggg

SEQ ID NO: 2655336 - DNA, 25 bp, Homo sapien
caatgtcacacctggtgtcccctgg

SEQ ID NO: 2655337 - DNA, 25 bp, Homo sapien
tggtgtcccctggtgcaatccaatg

SEQ ID NO: 2655338 - DNA, 25 bp, Homo sapien
ctgacaatgtcacacctggtgtccc

SEQ ID NO: 2655339 - DNA, 25 bp, Homo sapien
ctaccacgccagacagcttgttggc

SEQ ID NO: 2655340 - DNA, 25 bp, Homo sapien
tgacctttacatcaacgcccctttg

SEQ ID NO: 2655341 - DNA, 25 bp, Homo sapien
cttctctgctactgacctttacatc

SEQ ID NO: 2655342 - DNA, 25 bp, Homo sapien
ccacgccagacagcttgttggcttc

SEQ ID NO: 2655343 - DNA, 25 bp, Homo sapien
gactgccaaccctctggtggagaca

SEQ ID NO: 2655344 - DNA, 25 bp, Homo sapien
aagtacatgcaaggcaggattctga

SEQ ID NO: 2655345 - DNA, 25 bp, Homo sapien
tactgtcctcagttgctgctggaga

SEQ ID NO: 2655346 - DNA, 25 bp, Homo sapien
tctgagagataatgactgccaaccc

SEQ ID NO: 2655347 - DNA, 25 bp, Homo sapien
tcaaggaggactgtaccctagatgg

SEQ ID NO: 2655348 - DNA, 25 bp, Homo sapien
gaggactgtaccctagatggtggct

SEQ ID NO: 2655349 - DNA, 25 bp, Homo sapien
cctagatggtggctgaggtcactca

SEQ ID NO: 2655350 - DNA, 25 bp, Homo sapien
tgtaccctagatggtggctgaggtc

SEQ ID NO: 2655351 - DNA, 25 bp, Homo sapien
ctttgaatttgtcgtgaaagcctgg

SEQ ID NO: 2655352 - DNA, 25 bp, Homo sapien
aatttgtcgtgaaagcctggaaaga

SEQ ID NO: 2655353 - DNA, 25 bp, Homo sapien
tgaatttgtcgtgaaagcctggaaa

SEQ ID NO: 2655354 - DNA, 25 bp, Homo sapien
tttgaatttgtcgtgaaagcctgga

SEQ ID NO: 2655355 - DNA, 25 bp, Homo sapien
tgacacacgcatgtgaacgcccgat

SEQ ID NO: 2655356 - DNA, 25 bp, Homo sapien
gaacgcccgatcattatgctcttga

SEQ ID NO: 2655357 - DNA, 25 bp, Homo sapien
cacgcatgtgaacgcccgatcatta

SEQ ID NO: 2655358 - DNA, 25 bp, Homo sapien
cacatctgacacacgcatgtgaacg

SEQ ID NO: 2655359 - DNA, 25 bp, Homo sapien
tgacaaaaagccttctgcattgtat

SEQ ID NO: 2655360 - DNA, 25 bp, Homo sapien
aagccttctgcattgtatgtagcac

SEQ ID NO: 2655361 - DNA, 25 bp, Homo sapien
ctttgacaaaaagccttctgcattg

SEQ ID NO: 2655362 - DNA, 25 bp, Homo sapien
caaaaagccttctgcattgtatgta

SEQ ID NO: 2655363 - DNA, 25 bp, Homo sapien
gagtctggagttgaaagtgcataca

SEQ ID NO: 2655364 - DNA, 25 bp, Homo sapien
cccagggttgttgttgaagccaaag

SEQ ID NO: 2655365 - DNA, 25 bp, Homo sapien
gatcagaactctaaatgggcttggt

SEQ ID NO: 2655366 - DNA, 25 bp, Homo sapien
tttgaagactgggagacctctgtgt

SEQ ID NO: 2655367 - DNA, 25 bp, Homo sapien
ttcaggtgttgatgactccttcgcc

SEQ ID NO: 2655368 - DNA, 25 bp, Homo sapien
agtcagtttgcaggtgtttttctgt

SEQ ID NO: 2655369 - DNA, 25 bp, Homo sapien
ttctgtaattttgggagtatagtat

SEQ ID NO: 2655370 - DNA, 25 bp, Homo sapien
actccttcgccctgaagggattgga

SEQ ID NO: 2655371 - DNA, 25 bp, Homo sapien
cgccgccgattcgaaactcagagct

SEQ ID NO: 2655372 - DNA, 25 bp, Homo sapien
tgccccgaatcggagcctctgctgc

SEQ ID NO: 2655373 - DNA, 25 bp, Homo sapien
tcagagctccactggacgcaccgag

SEQ ID NO: 2655374 - DNA, 25 bp, Homo sapien
ggacgcaccgagagaaagtcagcct

SEQ ID NO: 2655375 - DNA, 25 bp, Homo sapien
gaggctgctagcaggatggcggccc

SEQ ID NO: 2655376 - DNA, 25 bp, Homo sapien
agaggctgctagcaggatggcggcc

SEQ ID NO: 2655377 - DNA, 25 bp, Homo sapien
accgtctgcccagcgtgcccaggac

SEQ ID NO: 2655378 - DNA, 25 bp, Homo sapien
cctcagagataagagccctccttgg

SEQ ID NO: 2655379 - DNA, 25 bp, Homo sapien
ctcagagataagagccctccttggc

SEQ ID NO: 2655380 - DNA, 25 bp, Homo sapien
caccgtctgcccagcgtgcccagga

SEQ ID NO: 2655381 - DNA, 25 bp, Homo sapien
attaccaccagaacccatcagggac

SEQ ID NO: 2655382 - DNA, 25 bp, Homo sapien
aaagttccgctcgtaaatcctcgtg

SEQ ID NO: 2655383 - DNA, 25 bp, Homo sapien
gcccaacgggcctgagcgctcatta

SEQ ID NO: 2655384 - DNA, 25 bp, Homo sapien
tggtcaaatataaggcagggtccaa

SEQ ID NO: 2655385 - DNA, 25 bp, Homo sapien
agccagtggccgctccgggtggcac

SEQ ID NO: 2655386 - DNA, 25 bp, Homo sapien
gacggccgggcgcaagtgctgctct

SEQ ID NO: 2655387 - DNA, 25 bp, Homo sapien
gcagcacatccaaggaacgcgacgg

SEQ ID NO: 2655388 - DNA, 25 bp, Homo sapien
cgggcgcaagtgctgctctgttccc

SEQ ID NO: 2655389 - DNA, 25 bp, Homo sapien
gagaagacagggcaatacttgcact

SEQ ID NO: 2655390 - DNA, 25 bp, Homo sapien
cagggcaatacttgcactgccgtat

SEQ ID NO: 2655391 - DNA, 25 bp, Homo sapien
ccagggggatattaaacctactcat

SEQ ID NO: 2655392 - DNA, 25 bp, Homo sapien
aatacttgcactgccgtataccagg

SEQ ID NO: 2655393 - DNA, 25 bp, Homo sapien
taactccttttccagtgacgtggga

SEQ ID NO: 2655394 - DNA, 25 bp, Homo sapien
gaatcagcagccatattgccaggga

SEQ ID NO: 2655395 - DNA, 25 bp, Homo sapien
cggacacttcggcaaaggagagcgt

SEQ ID NO: 2655396 - DNA, 25 bp, Homo sapien
gcagggtgcttcttcttagttcgga

SEQ ID NO: 2655397 - DNA, 25 bp, Homo sapien
aactcactgctgttgattggaaacc

SEQ ID NO: 2655398 - DNA, 25 bp, Homo sapien
gggagctcctagcaatcctgagagg

SEQ ID NO: 2655399 - DNA, 25 bp, Homo sapien
tggaaacctgattctggcagctcat

SEQ ID NO: 2655400 - DNA, 25 bp, Homo sapien
gatgtggtccaaaccctctgaaggc

SEQ ID NO: 2655401 - DNA, 25 bp, Homo sapien
gggtaatagaccgacaccctgtcca

SEQ ID NO: 2655402 - DNA, 25 bp, Homo sapien
taaagtatagccacaaaaaagagat

SEQ ID NO: 2655403 - DNA, 25 bp, Homo sapien
tgtaggcccgagctaatacggaggc

SEQ ID NO: 2655404 - DNA, 25 bp, Homo sapien
gatcattgtctgcactaagttcagc

SEQ ID NO: 2655405 - DNA, 25 bp, Homo sapien
tcttgtctgaatttctgggcgtgga

SEQ ID NO: 2655406 - DNA, 25 bp, Homo sapien
ctgttctgagtctgcgtggtccaga

SEQ ID NO: 2655407 - DNA, 25 bp, Homo sapien
ccagcagctagagcgagcaagaggc

SEQ ID NO: 2655408 - DNA, 25 bp, Homo sapien
gattagcaagccgttttcctcccag

SEQ ID NO: 2655409 - DNA, 25 bp, Homo sapien
atggtgttgggagctcccattcttc

SEQ ID NO: 2655410 - DNA, 25 bp, Homo sapien
tgagcacactgtgtggaaagctaat

SEQ ID NO: 2655411 - DNA, 25 bp, Homo sapien
tgggagctcccattcttccatgcct

SEQ ID NO: 2655412 - DNA, 25 bp, Homo sapien
tgtgtggaaagctaattccatctgc

SEQ ID NO: 2655413 - DNA, 25 bp, Homo sapien
ccgagacacgggactgtatgctgta

SEQ ID NO: 2655414 - DNA, 25 bp, Homo sapien
taaggaatgcgatgactcagccgag

SEQ ID NO: 2655415 - DNA, 25 bp, Homo sapien
tgactcagccgagacacgggactgt

SEQ ID NO: 2655416 - DNA, 25 bp, Homo sapien
gacacgggactgtatgctgtatcct

SEQ ID NO: 2655417 - DNA, 25 bp, Homo sapien
gcagaactgaccactccagaagcag

SEQ ID NO: 2655418 - DNA, 25 bp, Homo sapien
agcagaactgaccactccagaagca

SEQ ID NO: 2655419 - DNA, 25 bp, Homo sapien
tccatggccatctcgagctgggtgg

SEQ ID NO: 2655420 - DNA, 25 bp, Homo sapien
gaagattctaatcatggtgtccatg

SEQ ID NO: 2655421 - DNA, 25 bp, Homo sapien
gaattccgtgagctctcgctgcagg

SEQ ID NO: 2655422 - DNA, 25 bp, Homo sapien
gccagaatagcggtggaagattcta

SEQ ID NO: 2655423 - DNA, 25 bp, Homo sapien
ttacaagcaactgtcagagctgcca

SEQ ID NO: 2655424 - DNA, 25 bp, Homo sapien
cacttcgttgtccttattggcatcc

SEQ ID NO: 2655425 - DNA, 25 bp, Homo sapien
gccaccatgaccacgaattcattaa

SEQ ID NO: 2655426 - DNA, 25 bp, Homo sapien
gcactatcttatcaaccaactgggt

SEQ ID NO: 2655427 - DNA, 25 bp, Homo sapien
ttcctttcttcttcaattgttctac

SEQ ID NO: 2655428 - DNA, 25 bp, Homo sapien
tttcctttcttcttcaattgttcta

SEQ ID NO: 2655429 - DNA, 25 bp, Homo sapien
caatttaaggatatgaatgtccatc

SEQ ID NO: 2655430 - DNA, 25 bp, Homo sapien
tgtaatgccctcgttttgacaaacc

SEQ ID NO: 2655431 - DNA, 25 bp, Homo sapien
tactgggtctatagatctgaacggt

SEQ ID NO: 2655432 - DNA, 25 bp, Homo sapien
gcatatagcctcttaataatacagg

SEQ ID NO: 2655433 - DNA, 25 bp, Homo sapien
tggcaaccactataagcagcaatca

SEQ ID NO: 2655434 - DNA, 25 bp, Homo sapien
agactcagactatcttatttcaaga

SEQ ID NO: 2655435 - DNA, 25 bp, Homo sapien
gaatttaatgtttggctacttggca

SEQ ID NO: 2655436 - DNA, 25 bp, Homo sapien
taataaagtaaactagaatagcaaa

SEQ ID NO: 2655437 - DNA, 25 bp, Homo sapien
agcacatttgctatccgtatacaca

SEQ ID NO: 2655438 - DNA, 25 bp, Homo sapien
gagtgcaatcactccatgatttcct

SEQ ID NO: 2655439 - DNA, 25 bp, Homo sapien
ttgcactgagtgcaatcactccatg

SEQ ID NO: 2655440 - DNA, 25 bp, Homo sapien
cacctccttgagtatttgcactgag

SEQ ID NO: 2655441 - DNA, 25 bp, Homo sapien
gaatttggccgatgaccgctttagc

SEQ ID NO: 2655442 - DNA, 25 bp, Homo sapien
tggttgaactcatttggtgttccac

SEQ ID NO: 2655443 - DNA, 25 bp, Homo sapien
gaagggccagcaggtcagtccaggg

SEQ ID NO: 2655444 - DNA, 25 bp, Homo sapien
ggagccctgcagttgtaatgtcctc

SEQ ID NO: 2655445 - DNA, 25 bp, Homo sapien
agtgaggagcgctccattacagtca

SEQ ID NO: 2655446 - DNA, 25 bp, Homo sapien
ttacagtcagatgtacagcttcttg

SEQ ID NO: 2655447 - DNA, 25 bp, Homo sapien
cacttgaaatccagccaatggctgt

SEQ ID NO: 2655448 - DNA, 25 bp, Homo sapien
taagtttatctaccactctgctgtg

SEQ ID NO: 2655449 - DNA, 25 bp, Homo sapien
cccttgattagcattcacgaacttc

SEQ ID NO: 2655450 - DNA, 25 bp, Homo sapien
cgtcctgagagcgatgattttcaag

SEQ ID NO: 2655451 - DNA, 25 bp, Homo sapien
ttatttagcccttgattagcattca

SEQ ID NO: 2655452 - DNA, 25 bp, Homo sapien
cctgagagcgatgattttcaaggat

SEQ ID NO: 2655453 - DNA, 25 bp, Homo sapien
gagaatctacttcatacagctgtag

SEQ ID NO: 2655454 - DNA, 25 bp, Homo sapien
tagaggcacatcacattggctgagg

SEQ ID NO: 2655455 - DNA, 25 bp, Homo sapien
catggacctagggaaaattcgaatg

SEQ ID NO: 2655456 - DNA, 25 bp, Homo sapien
catgggaagggctcaagcagctttc

SEQ ID NO: 2655457 - DNA, 25 bp, Homo sapien
taagagtctgaatacccatccaaag

SEQ ID NO: 2655458 - DNA, 25 bp, Homo sapien
gaatatccagtgtcataatgccatg

SEQ ID NO: 2655459 - DNA, 25 bp, Homo sapien
aaaatcgtgcctagttctatctctg

SEQ ID NO: 2655460 - DNA, 25 bp, Homo sapien
tcttcaagtaaaaggacatcgtggt

SEQ ID NO: 2655461 - DNA, 25 bp, Homo sapien
tgcagttaggccagagtatactcct

SEQ ID NO: 2655462 - DNA, 25 bp, Homo sapien
cagattggacaattctatcgcctta

SEQ ID NO: 2655463 - DNA, 25 bp, Homo sapien
caattctatcgccttaatatctgca

SEQ ID NO: 2655464 - DNA, 25 bp, Homo sapien
taggccagagtatactcctgggtga

SEQ ID NO: 2655465 - DNA, 25 bp, Homo sapien
gtccagggagggctctgttttagcc

SEQ ID NO: 2655466 - DNA, 25 bp, Homo sapien
cacagctcctaaccaggctctatag

SEQ ID NO: 2655467 - DNA, 25 bp, Homo sapien
tataggactttcttgcaaatttcac

SEQ ID NO: 2655468 - DNA, 25 bp, Homo sapien
gctttatgcttcgttttctctggag

SEQ ID NO: 2655469 - DNA, 25 bp, Homo sapien
gaattttaatctgggcttcacgagc

SEQ ID NO: 2655470 - DNA, 25 bp, Homo sapien
cctttctattttgcaaagctgattc

SEQ ID NO: 2655471 - DNA, 25 bp, Homo sapien
actgccgcaagctggaaactgtcaa

SEQ ID NO: 2655472 - DNA, 25 bp, Homo sapien
tcagatggtttgcaactcttcaggg

SEQ ID NO: 2655473 - DNA, 25 bp, Homo sapien
tgtcctggacctgagtggaaaggtc

SEQ ID NO: 2655474 - DNA, 25 bp, Homo sapien
gaatgacgaaggagagaccgtctct

SEQ ID NO: 2655475 - DNA, 25 bp, Homo sapien
gaccgtctcttgagatctcgcagct

SEQ ID NO: 2655476 - DNA, 25 bp, Homo sapien
tatctggaagggtcagagtctggct

SEQ ID NO: 2655477 - DNA, 25 bp, Homo sapien
caatgttgggacaggtaaagatttc

SEQ ID NO: 2655478 - DNA, 25 bp, Homo sapien
aaagcaaagttcctctggctctctc

SEQ ID NO: 2655479 - DNA, 25 bp, Homo sapien
cccctgcctttttgagtaagaactg

SEQ ID NO: 2655480 - DNA, 25 bp, Homo sapien
caaaagcaaagttcctctggctctc

SEQ ID NO: 2655481 - DNA, 25 bp, Homo sapien
tctctttcccattgatgtagccaca

SEQ ID NO: 2655482 - DNA, 25 bp, Homo sapien
ctctttcccattgatgtagccacag

SEQ ID NO: 2655483 - DNA, 25 bp, Homo sapien
tgtctcattgacagagtacgtggcg

SEQ ID NO: 2655484 - DNA, 25 bp, Homo sapien
cacaaattttcagcgtggcccagca

SEQ ID NO: 2655485 - DNA, 25 bp, Homo sapien
tggcgatgacgagggtccagctctc

SEQ ID NO: 2655486 - DNA, 25 bp, Homo sapien
tgatcggagctcagtaaccatgggt

SEQ ID NO: 2655487 - DNA, 25 bp, Homo sapien
ttatagagcagtggggagcggaggc

SEQ ID NO: 2655488 - DNA, 25 bp, Homo sapien
tttatagagcagtggggagcggagg

SEQ ID NO: 2655489 - DNA, 25 bp, Homo sapien
ttcctacaccctcgcgcagactgag

SEQ ID NO: 2655490 - DNA, 25 bp, Homo sapien
tcgcgcagactgagagctagaagct

SEQ ID NO: 2655491 - DNA, 25 bp, Homo sapien
cagactgagagctagaagctggtag

SEQ ID NO: 2655492 - DNA, 25 bp, Homo sapien
accctcgcgcagactgagagctaga

SEQ ID NO: 2655493 - DNA, 25 bp, Homo sapien
aagatgagaatgaagtgacactgaa

SEQ ID NO: 2655494 - DNA, 25 bp, Homo sapien
cctcttagagccgtcaggaagatga

SEQ ID NO: 2655495 - DNA, 25 bp, Homo sapien
ggctttcccctcttagagccgtcag

SEQ ID NO: 2655496 - DNA, 25 bp, Homo sapien
tcccctcttagagccgtcaggaaga

SEQ ID NO: 2655497 - DNA, 25 bp, Homo sapien
tcagcatagcgaataaagagagagg

SEQ ID NO: 2655498 - DNA, 25 bp, Homo sapien
ccctgccactcagcatagcgaataa

SEQ ID NO: 2655499 - DNA, 25 bp, Homo sapien
tgccactcagcatagcgaataaaga

SEQ ID NO: 2655500 - DNA, 25 bp, Homo sapien
ccactcagcatagcgaataaagaga

SEQ ID NO: 2655501 - DNA, 25 bp, Homo sapien
ggcaagaaacataggtcagtccgga

SEQ ID NO: 2655502 - DNA, 25 bp, Homo sapien
acataggtcagtccggaaaagttca

SEQ ID NO: 2655503 - DNA, 25 bp, Homo sapien
agaaacataggtcagtccggaaaag

SEQ ID NO: 2655504 - DNA, 25 bp, Homo sapien
ataggtcagtccggaaaagttcaag

SEQ ID NO: 2655505 - DNA, 25 bp, Homo sapien
caggaaaggatcgtagtccgccgct

SEQ ID NO: 2655506 - DNA, 25 bp, Homo sapien
agagcgcggcggtacggctgctccc

SEQ ID NO: 2655507 - DNA, 25 bp, Homo sapien
tgaagagcaggaaaggatcgtagtc

SEQ ID NO: 2655508 - DNA, 25 bp, Homo sapien
aaggatcgtagtccgccgcttccct

SEQ ID NO: 2655509 - DNA, 25 bp, Homo sapien
agctgcggccggtcggcggtgaagg

SEQ ID NO: 2655510 - DNA, 25 bp, Homo sapien
atgaagaaggctgcgcagtgcagct

SEQ ID NO: 2655511 - DNA, 25 bp, Homo sapien
ggcggtgaaggtgaactggccctgg

SEQ ID NO: 2655512 - DNA, 25 bp, Homo sapien
tggtaatgaactcctcgggctcgct

SEQ ID NO: 2655513 - DNA, 25 bp, Homo sapien
ttcaggaagtcgccgccctgacagt

SEQ ID NO: 2655514 - DNA, 25 bp, Homo sapien
gaagtcgccgccctgacagtcgatg

SEQ ID NO: 2655515 - DNA, 25 bp, Homo sapien
agtcgccgccctgacagtcgatgga

SEQ ID NO: 2655516 - DNA, 25 bp, Homo sapien
tcgccgccctgacagtcgatggaga

SEQ ID NO: 2655517 - DNA, 25 bp, Homo sapien
ccctccggctaggttggctggccgt

SEQ ID NO: 2655518 - DNA, 25 bp, Homo sapien
gtcttcgggtaagggcgagattctc

SEQ ID NO: 2655519 - DNA, 25 bp, Homo sapien
gactcgggcaccagcgaagtgtcta

SEQ ID NO: 2655520 - DNA, 25 bp, Homo sapien
aagtgccactggctacctacgctca

SEQ ID NO: 2655521 - DNA, 25 bp, Homo sapien
tagggcctcgaaagcgcccagaagg

SEQ ID NO: 2655522 - DNA, 25 bp, Homo sapien
tagaagttcctagggcctcgaaagc

SEQ ID NO: 2655523 - DNA, 25 bp, Homo sapien
ccagaagggaatttaaaccatggca

SEQ ID NO: 2655524 - DNA, 25 bp, Homo sapien
ctcgaaagcgcccagaagggaattt

SEQ ID NO: 2655525 - DNA, 25 bp, Homo sapien
tgaaaaaaatacagacatagatgct

SEQ ID NO: 2655526 - DNA, 25 bp, Homo sapien
aaaaaatacagacatagatgctatc

SEQ ID NO: 2655527 - DNA, 25 bp, Homo sapien
aaaatacagacatagatgctatcat

SEQ ID NO: 2655528 - DNA, 25 bp, Homo sapien
gaaaaaaatacagacatagatgcta

SEQ ID NO: 2655529 - DNA, 25 bp, Homo sapien
agaaatctatgtaccgctcagctga

SEQ ID NO: 2655530 - DNA, 25 bp, Homo sapien
tgctaagaccactctcacagaaatc

SEQ ID NO: 2655531 - DNA, 25 bp, Homo sapien
tcctggttcatggactcggaagaag

SEQ ID NO: 2655532 - DNA, 25 bp, Homo sapien
ctgtctttatggttaatgtgaatcc

SEQ ID NO: 2655533 - DNA, 25 bp, Homo sapien
caggataaattatggagaagctgca

SEQ ID NO: 2655534 - DNA, 25 bp, Homo sapien
aagctgcagtttcgatgctggtgtg

SEQ ID NO: 2655535 - DNA, 25 bp, Homo sapien
tgtcccagggtaagatcagatattt

SEQ ID NO: 2655536 - DNA, 25 bp, Homo sapien
tgaagaccatttacgtgtcccaggg

SEQ ID NO: 2655537 - DNA, 25 bp, Homo sapien
aaccatttgaccaacagcgggtcca

SEQ ID NO: 2655538 - DNA, 25 bp, Homo sapien
gaccaacagcgggtccatgaattca

SEQ ID NO: 2655539 - DNA, 25 bp, Homo sapien
catttaaaccaattacagaagtcaa

SEQ ID NO: 2655540 - DNA, 25 bp, Homo sapien
aagacacatttaaaccaattacaga

SEQ ID NO: 2655541 - DNA, 25 bp, Homo sapien
tattccctcgcaacctgctgaggat

SEQ ID NO: 2655542 - DNA, 25 bp, Homo sapien
cacaaagtctcctattccctcgcaa

SEQ ID NO: 2655543 - DNA, 25 bp, Homo sapien
gtagcagagatcagctaaaggcgtc

SEQ ID NO: 2655544 - DNA, 25 bp, Homo sapien
aagggtccaatccagttcctcccag

SEQ ID NO: 2655545 - DNA, 25 bp, Homo sapien
ggctccagctgacgatactcaaaag

SEQ ID NO: 2655546 - DNA, 25 bp, Homo sapien
ggagaccatgcgcaccacagtgttg

SEQ ID NO: 2655547 - DNA, 25 bp, Homo sapien
gttttccagctcgtacggctccagc

SEQ ID NO: 2655548 - DNA, 25 bp, Homo sapien
gaccagacaaacagaattccccgat

SEQ ID NO: 2655549 - DNA, 25 bp, Homo sapien
tgcgctcaaggctgggaatactgac

SEQ ID NO: 2655550 - DNA, 25 bp, Homo sapien
ttaccagtttcaggtttgtagcaca

SEQ ID NO: 2655551 - DNA, 25 bp, Homo sapien
taaaactaatataagtgctgccact

SEQ ID NO: 2655552 - DNA, 25 bp, Homo sapien
agaactatgatcctaccaatcaggg

SEQ ID NO: 2655553 - DNA, 25 bp, Homo sapien
ctggtgtctttggctggcttgatta

SEQ ID NO: 2655554 - DNA, 25 bp, Homo sapien
tacatctgaaccgttaataacacaa

SEQ ID NO: 2655555 - DNA, 25 bp, Homo sapien
tctgaaccgttaataacacaagaca

SEQ ID NO: 2655556 - DNA, 25 bp, Homo sapien
ttgattacatctgaaccgttaataa

SEQ ID NO: 2655557 - DNA, 25 bp, Homo sapien
ctatacttataggtctagatcttgc

SEQ ID NO: 2655558 - DNA, 25 bp, Homo sapien
gatcttgcttctaaggctgggccca

SEQ ID NO: 2655559 - DNA, 25 bp, Homo sapien
ctctccattctgttgactatactta

SEQ ID NO: 2655560 - DNA, 25 bp, Homo sapien
tccattccacacaggatagattgca

SEQ ID NO: 2655561 - DNA, 25 bp, Homo sapien
caccctattttaattaatcgatgag

SEQ ID NO: 2655562 - DNA, 25 bp, Homo sapien
gggcactcaatgtcagcactggttg

SEQ ID NO: 2655563 - DNA, 25 bp, Homo sapien
tgtttttcattggaaaggccaggat

SEQ ID NO: 2655564 - DNA, 25 bp, Homo sapien
gctttgccaatggaccaccctattt

SEQ ID NO: 2655565 - DNA, 25 bp, Homo sapien
ttaagtggactgaggtgatattgag

SEQ ID NO: 2655566 - DNA, 25 bp, Homo sapien
cgtgctcctgtatgtggaagtcagt

SEQ ID NO: 2655567 - DNA, 25 bp, Homo sapien
ggaagtcagtttgatagtgaacaag

SEQ ID NO: 2655568 - DNA, 25 bp, Homo sapien
tgagtctattggcatccattcctgt

SEQ ID NO: 2655569 - DNA, 25 bp, Homo sapien
ttttggatctcgccatcttcaacag

SEQ ID NO: 2655570 - DNA, 25 bp, Homo sapien
ttattttggatctcgccatcttcaa

SEQ ID NO: 2655571 - DNA, 25 bp, Homo sapien
tattttggatctcgccatcttcaac

SEQ ID NO: 2655572 - DNA, 25 bp, Homo sapien
tttggatctcgccatcttcaacagc

SEQ ID NO: 2655573 - DNA, 25 bp, Homo sapien
aaaataggtcatataaaagagtggc

SEQ ID NO: 2655574 - DNA, 25 bp, Homo sapien
gagtcactcctgcaatgggttaacc

SEQ ID NO: 2655575 - DNA, 25 bp, Homo sapien
tgggcaagtatcttaacctatttcg

SEQ ID NO: 2655576 - DNA, 25 bp, Homo sapien
tatgaatgagtagctgtatgacctt

SEQ ID NO: 2655577 - DNA, 25 bp, Homo sapien
caagacaagggtatcgatcaggaag

SEQ ID NO: 2655578 - DNA, 25 bp, Homo sapien
taggccacacccaaaagtgaagggc

SEQ ID NO: 2655579 - DNA, 25 bp, Homo sapien
tgtcattagcccagcgtcacggcaa

SEQ ID NO: 2655580 - DNA, 25 bp, Homo sapien
gactgctgtccatgaggcctctagg

SEQ ID NO: 2655581 - DNA, 25 bp, Homo sapien
gaagagggctgtgaagtccagaaat

SEQ ID NO: 2655582 - DNA, 25 bp, Homo sapien
gttttacttggttcacagtcttcag

SEQ ID NO: 2655583 - DNA, 25 bp, Homo sapien
ctgccacgttttacttggttcacag

SEQ ID NO: 2655584 - DNA, 25 bp, Homo sapien
gtccagaaattgctgctaagtgcat

SEQ ID NO: 2655585 - DNA, 25 bp, Homo sapien
gaattcccagcgtattgcaagcagc

SEQ ID NO: 2655586 - DNA, 25 bp, Homo sapien
tatctggaaccactactgggcctgg

SEQ ID NO: 2655587 - DNA, 25 bp, Homo sapien
gaactttgctatgtcctgagggaga

SEQ ID NO: 2655588 - DNA, 25 bp, Homo sapien
taggagaaatagagcctgggcaccc

SEQ ID NO: 2655589 - DNA, 25 bp, Homo sapien
tgtggataagggcacattgcacctt

SEQ ID NO: 2655590 - DNA, 25 bp, Homo sapien
tgcggataagggcacaccgattgta

SEQ ID NO: 2655591 - DNA, 25 bp, Homo sapien
ccgattgtaactgatggtggcccaa

SEQ ID NO: 2655592 - DNA, 25 bp, Homo sapien
gcaggtttttctgtaacaagtagga

SEQ ID NO: 2655593 - DNA, 25 bp, Homo sapien
gcatgtggttgccatatttctcatt

SEQ ID NO: 2655594 - DNA, 25 bp, Homo sapien
tgtggttgccatatttctcatttcc

SEQ ID NO: 2655595 - DNA, 25 bp, Homo sapien
gtggttgccatatttctcatttcct

SEQ ID NO: 2655596 - DNA, 25 bp, Homo sapien
tcagcatgtggttgccatatttctc

SEQ ID NO: 2655597 - DNA, 25 bp, Homo sapien
agactgcgggttgccccatagcaga

SEQ ID NO: 2655598 - DNA, 25 bp, Homo sapien
tcagactgcgggttgccccatagca

SEQ ID NO: 2655599 - DNA, 25 bp, Homo sapien
agaggccaggaaccttgagtctctt

SEQ ID NO: 2655600 - DNA, 25 bp, Homo sapien
gaaccttgagtctcttgagtcagag

SEQ ID NO: 2655601 - DNA, 25 bp, Homo sapien
ccattttactgcatctagcaatgtg

SEQ ID NO: 2655602 - DNA, 25 bp, Homo sapien
cattttactgcatctagcaatgtga

SEQ ID NO: 2655603 - DNA, 25 bp, Homo sapien
atcctttggtgaagttttcctatgt

SEQ ID NO: 2655604 - DNA, 25 bp, Homo sapien
aatcctttggtgaagttttcctatg

SEQ ID NO: 2655605 - DNA, 25 bp, Homo sapien
tcctttggtgaagttttcctatgta

SEQ ID NO: 2655606 - DNA, 25 bp, Homo sapien
gagcgtcggataagcagtcggaaaa

SEQ ID NO: 2655607 - DNA, 25 bp, Homo sapien
agcagtcggaaaaccagaggccaga

SEQ ID NO: 2655608 - DNA, 25 bp, Homo sapien
gataagcagtcggaaaaccagaggc

SEQ ID NO: 2655609 - DNA, 25 bp, Homo sapien
acagagggaggagcgtcggataagc

SEQ ID NO: 2655610 - DNA, 25 bp, Homo sapien
aacggggctgcgagcaacgagcaag

SEQ ID NO: 2655611 - DNA, 25 bp, Homo sapien
aacgagcaaggggaccgaggatggc

SEQ ID NO: 2655612 - DNA, 25 bp, Homo sapien
tggcccctgcccgatgtgcgcggcc

SEQ ID NO: 2655613 - DNA, 25 bp, Homo sapien
tgcgcggcctgcaaaccggaaaact

SEQ ID NO: 2655614 - DNA, 25 bp, Homo sapien
acccggctggccgcggtggcccctg

SEQ ID NO: 2655615 - DNA, 25 bp, Homo sapien
gctggccgcggtggcccctggccat

SEQ ID NO: 2655616 - DNA, 25 bp, Homo sapien
ccggctggccgcggtggcccctggc

SEQ ID NO: 2655617 - DNA, 25 bp, Homo sapien
ggctggccgcggtggcccctggcca

SEQ ID NO: 2655618 - DNA, 25 bp, Homo sapien
tcaggccgaaacggacgccggcgga

SEQ ID NO: 2655619 - DNA, 25 bp, Homo sapien
ccagagaccactggagcgcgcgggc

SEQ ID NO: 2655620 - DNA, 25 bp, Homo sapien
cccagagaccactggagcgcgcggg

SEQ ID NO: 2655621 - DNA, 25 bp, Homo sapien
gacgccggcggacccagagaccact

SEQ ID NO: 2655622 - DNA, 25 bp, Homo sapien
agctccggcgcgagactgctcgtcg

SEQ ID NO: 2655623 - DNA, 25 bp, Homo sapien
gagctccggcgcgagactgctcgtc

SEQ ID NO: 2655624 - DNA, 25 bp, Homo sapien
cgagactgctcgtcgccgcggaggg

SEQ ID NO: 2655625 - DNA, 25 bp, Homo sapien
gcgcgagactgctcgtcgccgcgga

SEQ ID NO: 2655626 - DNA, 25 bp, Homo sapien
gcggcgaccgcggcggggacggcgc

SEQ ID NO: 2655627 - DNA, 25 bp, Homo sapien
gcggggacggcgcctccgaggccat

SEQ ID NO: 2655628 - DNA, 25 bp, Homo sapien
ccgcggcggggacggcgcctccgag

SEQ ID NO: 2655629 - DNA, 25 bp, Homo sapien
gcgaccgcggcggggacggcgcctc

SEQ ID NO: 2655630 - DNA, 25 bp, Homo sapien
ttgcagctccgcagttcacgttcca

SEQ ID NO: 2655631 - DNA, 25 bp, Homo sapien
tgctttctgcgttctggtacagccg

SEQ ID NO: 2655632 - DNA, 25 bp, Homo sapien
tgtgatgcagcagcttctcgatctc

SEQ ID NO: 2655633 - DNA, 25 bp, Homo sapien
accttccgccttagctgggccagct

SEQ ID NO: 2655634 - DNA, 25 bp, Homo sapien
cttccgaggctatcacgggcttcga

SEQ ID NO: 2655635 - DNA, 25 bp, Homo sapien
ctctacagtagttctgagcccctgc

SEQ ID NO: 2655636 - DNA, 25 bp, Homo sapien
tactttaagtactctacagtagttc

SEQ ID NO: 2655637 - DNA, 25 bp, Homo sapien
ccgaggctatcacgggcttcgaagg

SEQ ID NO: 2655638 - DNA, 25 bp, Homo sapien
cgccagccgcgagacattgatttaa

SEQ ID NO: 2655639 - DNA, 25 bp, Homo sapien
cttaagttcaattcacgccagccgc

SEQ ID NO: 2655640 - DNA, 25 bp, Homo sapien
tggaattgtaactgcgctgagcttc

SEQ ID NO: 2655641 - DNA, 25 bp, Homo sapien
taaatgcgcctactgccaatgggat

SEQ ID NO: 2655642 - DNA, 25 bp, Homo sapien
ggtatataagttcacacacccagtg

SEQ ID NO: 2655643 - DNA, 25 bp, Homo sapien
tactactgtgagctatcattctcat

SEQ ID NO: 2655644 - DNA, 25 bp, Homo sapien
gggaactgagactcggtatataagt

SEQ ID NO: 2655645 - DNA, 25 bp, Homo sapien
cacccagtgaatagcagagatggga

SEQ ID NO: 2655646 - DNA, 25 bp, Homo sapien
catgctgggcactatacttgatgct

SEQ ID NO: 2655647 - DNA, 25 bp, Homo sapien
gttcatcgctgggaattagtgcccc

SEQ ID NO: 2655648 - DNA, 25 bp, Homo sapien
gagggaagcaagacactgatcgtga

SEQ ID NO: 2655649 - DNA, 25 bp, Homo sapien
gatctgttgctaatactagggcagg

SEQ ID NO: 2655650 - DNA, 25 bp, Homo sapien
ctgtttgtacttctacatcagactt

SEQ ID NO: 2655651 - DNA, 25 bp, Homo sapien
tgtttgtacttctacatcagacttt

SEQ ID NO: 2655652 - DNA, 25 bp, Homo sapien
ctgagattgaccaaggagcatggtt

SEQ ID NO: 2655653 - DNA, 25 bp, Homo sapien
gattgaccaaggagcatggttctct

SEQ ID NO: 2655654 - DNA, 25 bp, Homo sapien
aatttgaggcaaaatggtccacttg

SEQ ID NO: 2655655 - DNA, 25 bp, Homo sapien
tcaaaatagaagtttcgatagcttg

SEQ ID NO: 2655656 - DNA, 25 bp, Homo sapien
tctatcggtaccagggtaagcatca

SEQ ID NO: 2655657 - DNA, 25 bp, Homo sapien
cattttctgttctatcggtaccagg

SEQ ID NO: 2655658 - DNA, 25 bp, Homo sapien
ttttggaacacaatgtagtaggaaa

SEQ ID NO: 2655659 - DNA, 25 bp, Homo sapien
tgttcagtcaaaatatctggacaaa

SEQ ID NO: 2655660 - DNA, 25 bp, Homo sapien
tatgctgtgacggaccaaagaagtc

SEQ ID NO: 2655661 - DNA, 25 bp, Homo sapien
gtaaatgtggtattgttgtccacag

SEQ ID NO: 2655662 - DNA, 25 bp, Homo sapien
caaactttcagctaatgatgagcct

SEQ ID NO: 2655663 - DNA, 25 bp, Homo sapien
ggaggtatcttctgttgctaatgca

SEQ ID NO: 2655664 - DNA, 25 bp, Homo sapien
taatgatgagccttctaaggaggta

SEQ ID NO: 2655665 - DNA, 25 bp, Homo sapien
cagtctgtgatacagccgcttctgc

SEQ ID NO: 2655666 - DNA, 25 bp, Homo sapien
agtaataaattccagtggaaggatc

SEQ ID NO: 2655667 - DNA, 25 bp, Homo sapien
agaatgaaactgataacgaccactt

SEQ ID NO: 2655668 - DNA, 25 bp, Homo sapien
tgtgctagaagtcggataaggttgc

SEQ ID NO: 2655669 - DNA, 25 bp, Homo sapien
catttgttgcagaagaatctggatc

SEQ ID NO: 2655670 - DNA, 25 bp, Homo sapien
gatgttttcatgaagaggagactct

SEQ ID NO: 2655671 - DNA, 25 bp, Homo sapien
tggtaatggcttcgtcataactatc

SEQ ID NO: 2655672 - DNA, 25 bp, Homo sapien
catatttgcgaaattttcttcctca

SEQ ID NO: 2655673 - DNA, 25 bp, Homo sapien
cactagttggaacagtgactttggg

SEQ ID NO: 2655674 - DNA, 25 bp, Homo sapien
aatgataaagagtgatcctatctgc

SEQ ID NO: 2655675 - DNA, 25 bp, Homo sapien
gtgatcctatctgcaacacaggtga

SEQ ID NO: 2655676 - DNA, 25 bp, Homo sapien
attactctaatacatgggggccaaa

SEQ ID NO: 2655677 - DNA, 25 bp, Homo sapien
tacatgggggccaaattttgtcttc

SEQ ID NO: 2655678 - DNA, 25 bp, Homo sapien
aacttcagggattcggagagtatgt

SEQ ID NO: 2655679 - DNA, 25 bp, Homo sapien
tactgacaccaacttcagggattcg

SEQ ID NO: 2655680 - DNA, 25 bp, Homo sapien
cagggattcggagagtatgttccat

SEQ ID NO: 2655681 - DNA, 25 bp, Homo sapien
ttcagggattcggagagtatgttcc

SEQ ID NO: 2655682 - DNA, 25 bp, Homo sapien
aatttagaatatgtcctacctcttc

SEQ ID NO: 2655683 - DNA, 25 bp, Homo sapien
tacctcttctcctttggtactagag

SEQ ID NO: 2655684 - DNA, 25 bp, Homo sapien
tgatgatgttaacttgagcctttga

SEQ ID NO: 2655685 - DNA, 25 bp, Homo sapien
cacaaactattatatgcttctggta

SEQ ID NO: 2655686 - DNA, 25 bp, Homo sapien
ctgccttgatccacaaggacataac

SEQ ID NO: 2655687 - DNA, 25 bp, Homo sapien
caaatactttgctacatgctgagga

SEQ ID NO: 2655688 - DNA, 25 bp, Homo sapien
cagccaagtaagtacccactgatta

SEQ ID NO: 2655689 - DNA, 25 bp, Homo sapien
tagaagtcaaaactcaacagccaag

SEQ ID NO: 2655690 - DNA, 25 bp, Homo sapien
agactaagaataaggcctcccgcct

SEQ ID NO: 2655691 - DNA, 25 bp, Homo sapien
catctccatgctcaagtacgtaagg

SEQ ID NO: 2655692 - DNA, 25 bp, Homo sapien
tcatctccatgctcaagtacgtaag

SEQ ID NO: 2655693 - DNA, 25 bp, Homo sapien
tgtgaaaggataagacagtttctcc

SEQ ID NO: 2655694 - DNA, 25 bp, Homo sapien
gcgaaggtgggctctaacctgccct

SEQ ID NO: 2655695 - DNA, 25 bp, Homo sapien
tgaaaggataagacagtttctccaa

SEQ ID NO: 2655696 - DNA, 25 bp, Homo sapien
aaaggataagacagtttctccaatt

SEQ ID NO: 2655697 - DNA, 25 bp, Homo sapien
ctgtaaaccatattttactcgtatt

SEQ ID NO: 2655698 - DNA, 25 bp, Homo sapien
tcctccttacttagtgttggaccaa

SEQ ID NO: 2655699 - DNA, 25 bp, Homo sapien
ttcctccttacttagtgttggacca

SEQ ID NO: 2655700 - DNA, 25 bp, Homo sapien
caacctgctccctacgttttccagc

SEQ ID NO: 2655701 - DNA, 25 bp, Homo sapien
ttcaatgtcttttcatcttcgtatt

SEQ ID NO: 2655702 - DNA, 25 bp, Homo sapien
tacgttttccagctctatctttata

SEQ ID NO: 2655703 - DNA, 25 bp, Homo sapien
tttatattttggattcttcaatgtc

SEQ ID NO: 2655704 - DNA, 25 bp, Homo sapien
ggcgttttcattcctccaccatcct

SEQ ID NO: 2655705 - DNA, 25 bp, Homo sapien
cggcgttttcattcctccaccatcc

SEQ ID NO: 2655706 - DNA, 25 bp, Homo sapien
gttttcattcctccaccatccttcc

SEQ ID NO: 2655707 - DNA, 25 bp, Homo sapien
gcgttttcattcctccaccatcctt

SEQ ID NO: 2655708 - DNA, 25 bp, Homo sapien
taaggtttgtgtgaaagataaccta

SEQ ID NO: 2655709 - DNA, 25 bp, Homo sapien
aacctcctacgaaccatgggaccat

SEQ ID NO: 2655710 - DNA, 25 bp, Homo sapien
ttaaaccactatgtcattttccaga

SEQ ID NO: 2655711 - DNA, 25 bp, Homo sapien
gaaagttctacagtcaggttactta

SEQ ID NO: 2655712 - DNA, 25 bp, Homo sapien
gagcacatattctaacctaggtctg

SEQ ID NO: 2655713 - DNA, 25 bp, Homo sapien
tattctaacctaggtctgactacaa

SEQ ID NO: 2655714 - DNA, 25 bp, Homo sapien
gcacatattctaacctaggtctgac

SEQ ID NO: 2655715 - DNA, 25 bp, Homo sapien
ctaacctaggtctgactacaaaatc

SEQ ID NO: 2655716 - DNA, 25 bp, Homo sapien
gagtatgtcattccaccctaaccag

SEQ ID NO: 2655717 - DNA, 25 bp, Homo sapien
tcttgccttgtcaataagtacagcc

SEQ ID NO: 2655718 - DNA, 25 bp, Homo sapien
gaaaatagagtgctccttaactagc

SEQ ID NO: 2655719 - DNA, 25 bp, Homo sapien
gaaaaacctgtcagatgcatcaaat

SEQ ID NO: 2655720 - DNA, 25 bp, Homo sapien
atggtttgcctgtccccaagcctgc

SEQ ID NO: 2655721 - DNA, 25 bp, Homo sapien
tgtgttcgccgaagctgaagctgga

SEQ ID NO: 2655722 - DNA, 25 bp, Homo sapien
ccaagcctgcatgtgttcgccgaag

SEQ ID NO: 2655723 - DNA, 25 bp, Homo sapien
catcttcaaatgaggatggtttgcc

SEQ ID NO: 2655724 - DNA, 25 bp, Homo sapien
ggcatggtccctgggtcatcttttt

SEQ ID NO: 2655725 - DNA, 25 bp, Homo sapien
gtccctgggtcatctttttgaggct

SEQ ID NO: 2655726 - DNA, 25 bp, Homo sapien
ccaaggcatggtccctgggtcatct

SEQ ID NO: 2655727 - DNA, 25 bp, Homo sapien
atggtccctgggtcatctttttgag

SEQ ID NO: 2655728 - DNA, 25 bp, Homo sapien
actgtgacatagttcccctgtgctg

SEQ ID NO: 2655729 - DNA, 25 bp, Homo sapien
ggtaaactgtgacatagttcccctg

SEQ ID NO: 2655730 - DNA, 25 bp, Homo sapien
aaagctgcaaaccatacacatttct

SEQ ID NO: 2655731 - DNA, 25 bp, Homo sapien
gacatagttcccctgtgctgctgat

SEQ ID NO: 2655732 - DNA, 25 bp, Homo sapien
tgataaactcatccgtgccctgtga

SEQ ID NO: 2655733 - DNA, 25 bp, Homo sapien
ggctagttgcttatatggatgttgt

SEQ ID NO: 2655734 - DNA, 25 bp, Homo sapien
tgcatcttacatgaatatatggaga

SEQ ID NO: 2655735 - DNA, 25 bp, Homo sapien
tatggagacaagaacagatgtacac

SEQ ID NO: 2655736 - DNA, 25 bp, Homo sapien
ctacaatatgttacctgttcattag

SEQ ID NO: 2655737 - DNA, 25 bp, Homo sapien
taacaaaatgtatgcgccactaccc

SEQ ID NO: 2655738 - DNA, 25 bp, Homo sapien
tacttaggctatttcaaggataaca

SEQ ID NO: 2655739 - DNA, 25 bp, Homo sapien
cagtacatagcaacagattcttcac

SEQ ID NO: 2655740 - DNA, 25 bp, Homo sapien
tccaaatttggagtttagggcctga

SEQ ID NO: 2655741 - DNA, 25 bp, Homo sapien
taatttcccagcaaacacctgagag

SEQ ID NO: 2655742 - DNA, 25 bp, Homo sapien
tgtcagactatgcaggtggccaaga

SEQ ID NO: 2655743 - DNA, 25 bp, Homo sapien
taactaccctgtgccatttagactg

SEQ ID NO: 2655744 - DNA, 25 bp, Homo sapien
tttgctattcatgacagacacgtga

SEQ ID NO: 2655745 - DNA, 25 bp, Homo sapien
ttacagatggaaatagacccagaca

SEQ ID NO: 2655746 - DNA, 25 bp, Homo sapien
tcagtactttaaccactaatagtgg

SEQ ID NO: 2655747 - DNA, 25 bp, Homo sapien
tagtggaaccctgagactttagatc

SEQ ID NO: 2655748 - DNA, 25 bp, Homo sapien
aatagtaagcatacccaaggtcctg

SEQ ID NO: 2655749 - DNA, 25 bp, Homo sapien
taggctctacggatgcaatagtaag

SEQ ID NO: 2655750 - DNA, 25 bp, Homo sapien
gctatgaacatgctcgtgtactgaa

SEQ ID NO: 2655751 - DNA, 25 bp, Homo sapien
tgataagactccatcaagccacttg

SEQ ID NO: 2655752 - DNA, 25 bp, Homo sapien
tgagtgcaagctttgactctgtcac

SEQ ID NO: 2655753 - DNA, 25 bp, Homo sapien
tatcaatcacctacttgagtgcaag

SEQ ID NO: 2655754 - DNA, 25 bp, Homo sapien
gcctcttcagtctcgatacaaaaaa

SEQ ID NO: 2655755 - DNA, 25 bp, Homo sapien
tctgttcttcctgacaagacctggt

SEQ ID NO: 2655756 - DNA, 25 bp, Homo sapien
tcctgaatatctccaggccgagtgt

SEQ ID NO: 2655757 - DNA, 25 bp, Homo sapien
tattaccacatagatttcctgagca

SEQ ID NO: 2655758 - DNA, 25 bp, Homo sapien
actcgtggctcatatccctgcagag

SEQ ID NO: 2655759 - DNA, 25 bp, Homo sapien
gaatgacatttcgacccctgagtat

SEQ ID NO: 2655760 - DNA, 25 bp, Homo sapien
ttccctgcactcctctttcgacaag

SEQ ID NO: 2655761 - DNA, 25 bp, Homo sapien
ggaatgtggaaattcgtcaccactc

SEQ ID NO: 2655762 - DNA, 25 bp, Homo sapien
tttcgacaagcttgttcggaatgtg

SEQ ID NO: 2655763 - DNA, 25 bp, Homo sapien
tgttcggaatgtggaaattcgtcac

SEQ ID NO: 2655764 - DNA, 25 bp, Homo sapien
tctccgggccggctgtcgcgactgt

SEQ ID NO: 2655765 - DNA, 25 bp, Homo sapien
ggcccgggattctgtggcaaggccc

SEQ ID NO: 2655766 - DNA, 25 bp, Homo sapien
cgcgcggggcgtgcccttcgctggg

SEQ ID NO: 2655767 - DNA, 25 bp, Homo sapien
cggctgtcgcgactgtgagaaagca

SEQ ID NO: 2655768 - DNA, 25 bp, Homo sapien
ggagcgcaggtgagcagcgaccgcg

SEQ ID NO: 2655769 - DNA, 25 bp, Homo sapien
tggagggggatctaccatctcggac

SEQ ID NO: 2655770 - DNA, 25 bp, Homo sapien
cttccagactcggtggcgaggcggg

SEQ ID NO: 2655771 - DNA, 25 bp, Homo sapien
gacaaaatgtcagcgaggcgcctgg

SEQ ID NO: 2655772 - DNA, 25 bp, Homo sapien
gacgtgtgaatgcagcgctgtgtct

SEQ ID NO: 2655773 - DNA, 25 bp, Homo sapien
aaatctgtcgctcgcgatccttggc

SEQ ID NO: 2655774 - DNA, 25 bp, Homo sapien
tattgcgtcatcttaaaaccctggc

SEQ ID NO: 2655775 - DNA, 25 bp, Homo sapien
gatccttggcggtttcagagcgact

SEQ ID NO: 2655776 - DNA, 25 bp, Homo sapien
actcaggcccgggaattcaggtctt

SEQ ID NO: 2655777 - DNA, 25 bp, Homo sapien
tgagcatcatctagccaaagctggt

SEQ ID NO: 2655778 - DNA, 25 bp, Homo sapien
tggtgaacaccaataagcgccgcct

SEQ ID NO: 2655779 - DNA, 25 bp, Homo sapien
cttcatctgtcccaacctaggttgg

SEQ ID NO: 2655780 - DNA, 25 bp, Homo sapien
taacttgtgacatcatgcgcctaca

SEQ ID NO: 2655781 - DNA, 25 bp, Homo sapien
gcccatttgggctccgggaatcacg

SEQ ID NO: 2655782 - DNA, 25 bp, Homo sapien
tgtgccagtcatgtacaggagctaa

SEQ ID NO: 2655783 - DNA, 25 bp, Homo sapien
gagcatggcccagaaaagttgacct

SEQ ID NO: 2655784 - DNA, 25 bp, Homo sapien
agttggtttaccagcccagcaggga

SEQ ID NO: 2655785 - DNA, 25 bp, Homo sapien
tgaccccctatcctgtacccgtata

SEQ ID NO: 2655786 - DNA, 25 bp, Homo sapien
acccgtataaactccagacaccagg

SEQ ID NO: 2655787 - DNA, 25 bp, Homo sapien
tttggccctccatgaccccctatcc

SEQ ID NO: 2655788 - DNA, 25 bp, Homo sapien
atgaccccctatcctgtacccgtat

SEQ ID NO: 2655789 - DNA, 25 bp, Homo sapien
gttttcctgcaattagacaggcccg

SEQ ID NO: 2655790 - DNA, 25 bp, Homo sapien
ttttcctgcaattagacaggcccgt

SEQ ID NO: 2655791 - DNA, 25 bp, Homo sapien
ttttgccaacttccagggcagggta

SEQ ID NO: 2655792 - DNA, 25 bp, Homo sapien
tgccaacttccagggcagggtacag

SEQ ID NO: 2655793 - DNA, 25 bp, Homo sapien
gggcagggtacagaaatgagatcct

SEQ ID NO: 2655794 - DNA, 25 bp, Homo sapien
ggcagggtacagaaatgagatcctc

SEQ ID NO: 2655795 - DNA, 25 bp, Homo sapien
tatttggaggatgataccctgcaaa

SEQ ID NO: 2655796 - DNA, 25 bp, Homo sapien
gtctgatagacaattggaatagcct

SEQ ID NO: 2655797 - DNA, 25 bp, Homo sapien
tactgtcctccagaataaattgcat

SEQ ID NO: 2655798 - DNA, 25 bp, Homo sapien
cacaacagctaggatacatgagtct

SEQ ID NO: 2655799 - DNA, 25 bp, Homo sapien
caggatagaattccggtacgggatc

SEQ ID NO: 2655800 - DNA, 25 bp, Homo sapien
aaattatctgcatcctaggccttgt

SEQ ID NO: 2655801 - DNA, 25 bp, Homo sapien
ggtctgaacctacaaacctcaggat

SEQ ID NO: 2655802 - DNA, 25 bp, Homo sapien
taagaaagcatgtagagagtggccc

SEQ ID NO: 2655803 - DNA, 25 bp, Homo sapien
gctccagaactgtaggccagatcaa

SEQ ID NO: 2655804 - DNA, 25 bp, Homo sapien
tccagaactgtaggccagatcaatt

SEQ ID NO: 2655805 - DNA, 25 bp, Homo sapien
cagaactgtaggccagatcaatttc

SEQ ID NO: 2655806 - DNA, 25 bp, Homo sapien
gaactgtaggccagatcaatttctt

SEQ ID NO: 2655807 - DNA, 25 bp, Homo sapien
gaaattgcaaatgcggagctaagtg

SEQ ID NO: 2655808 - DNA, 25 bp, Homo sapien
gcatttctcattgtgtctcacagca

SEQ ID NO: 2655809 - DNA, 25 bp, Homo sapien
gatagctttgatcctggccatccat

SEQ ID NO: 2655810 - DNA, 25 bp, Homo sapien
gctaagtgaagtagacagaaagtac

SEQ ID NO: 2655811 - DNA, 25 bp, Homo sapien
tatgctcccttgactcttggatccc

SEQ ID NO: 2655812 - DNA, 25 bp, Homo sapien
ggaagcctgggatacaggtaggcta

SEQ ID NO: 2655813 - DNA, 25 bp, Homo sapien
gataggccccacataaacctctacg

SEQ ID NO: 2655814 - DNA, 25 bp, Homo sapien
gggcctgctctatgctcccttgact

SEQ ID NO: 2655815 - DNA, 25 bp, Homo sapien
gaaagcagattaggagtcacctggg

SEQ ID NO: 2655816 - DNA, 25 bp, Homo sapien
cctctggagcgggtgatcattgagt

SEQ ID NO: 2655817 - DNA, 25 bp, Homo sapien
gcattatgatacatgaaagtctgac

SEQ ID NO: 2655818 - DNA, 25 bp, Homo sapien
taagtcaggaactgtcggtttatac

SEQ ID NO: 2655819 - DNA, 25 bp, Homo sapien
tctagcaatcccactccaggtattt

SEQ ID NO: 2655820 - DNA, 25 bp, Homo sapien
tgtgatctagcaatcccactccagg

SEQ ID NO: 2655821 - DNA, 25 bp, Homo sapien
tgatctagcaatcccactccaggta

SEQ ID NO: 2655822 - DNA, 25 bp, Homo sapien
tagcaatcccactccaggtatttat

SEQ ID NO: 2655823 - DNA, 25 bp, Homo sapien
cctggaactctcagacagtcctggt

SEQ ID NO: 2655824 - DNA, 25 bp, Homo sapien
agtgtaaaatgttactattactttg

SEQ ID NO: 2655825 - DNA, 25 bp, Homo sapien
cacctggaactctcagacagtcctg

SEQ ID NO: 2655826 - DNA, 25 bp, Homo sapien
ctcagacagtcctggtaggagtgta

SEQ ID NO: 2655827 - DNA, 25 bp, Homo sapien
tgagcacaccgaaaattcccaggta

SEQ ID NO: 2655828 - DNA, 25 bp, Homo sapien
gagcacaccgaaaattcccaggtag

SEQ ID NO: 2655829 - DNA, 25 bp, Homo sapien
tggctttgccagcaacaggacaaca

SEQ ID NO: 2655830 - DNA, 25 bp, Homo sapien
ccagcaacaggacaacattgggcat

SEQ ID NO: 2655831 - DNA, 25 bp, Homo sapien
gctttgccagcaacaggacaacatt

SEQ ID NO: 2655832 - DNA, 25 bp, Homo sapien
tgccagcaacaggacaacattgggc

SEQ ID NO: 2655833 - DNA, 25 bp, Homo sapien
gaagatatagtccattcctctcact

SEQ ID NO: 2655834 - DNA, 25 bp, Homo sapien
caataaggtgtcagcaggtatttac

SEQ ID NO: 2655835 - DNA, 25 bp, Homo sapien
taaggcattctcctaggtcccaaga

SEQ ID NO: 2655836 - DNA, 25 bp, Homo sapien
tctggcacatttggccaataaggtg

SEQ ID NO: 2655837 - DNA, 25 bp, Homo sapien
caccagcctcgctgtctggtatata

SEQ ID NO: 2655838 - DNA, 25 bp, Homo sapien
taaacaaggatctccggaactggtg

SEQ ID NO: 2655839 - DNA, 25 bp, Homo sapien
gatctccggaactggtggacccagg

SEQ ID NO: 2655840 - DNA, 25 bp, Homo sapien
agcctcgctgtctggtatatagtaa

SEQ ID NO: 2655841 - DNA, 25 bp, Homo sapien
cactttctccttcggcctgccctgt

SEQ ID NO: 2655842 - DNA, 25 bp, Homo sapien
cctgtcctcatgttcggcaccagga

SEQ ID NO: 2655843 - DNA, 25 bp, Homo sapien
gttcggcaccaggatctgtgttttc

SEQ ID NO: 2655844 - DNA, 25 bp, Homo sapien
ccagagtactctgaagcacctcatg

SEQ ID NO: 2655845 - DNA, 25 bp, Homo sapien
ctcacaggtttcatacaagacctag

SEQ ID NO: 2655846 - DNA, 25 bp, Homo sapien
gctggcctccatgtggtgggcacca

SEQ ID NO: 2655847 - DNA, 25 bp, Homo sapien
tttcatacaagacctaggctggcct

SEQ ID NO: 2655848 - DNA, 25 bp, Homo sapien
caggtttcatacaagacctaggctg

SEQ ID NO: 2655849 - DNA, 25 bp, Homo sapien
tttgcaggtagccaggacggtcact

SEQ ID NO: 2655850 - DNA, 25 bp, Homo sapien
tccagcagcaacacaattaaggttc

SEQ ID NO: 2655851 - DNA, 25 bp, Homo sapien
cattcccatcacagcttgagtggta

SEQ ID NO: 2655852 - DNA, 25 bp, Homo sapien
tgagtggtaagtgcagatccagcag

SEQ ID NO: 2655853 - DNA, 25 bp, Homo sapien
ccagacttcaaaggaatctagaatt

SEQ ID NO: 2655854 - DNA, 25 bp, Homo sapien
tcaaaggaatctagaattctaagca

SEQ ID NO: 2655855 - DNA, 25 bp, Homo sapien
aaggaatctagaattctaagcatac

SEQ ID NO: 2655856 - DNA, 25 bp, Homo sapien
cagacttcaaaggaatctagaattc

SEQ ID NO: 2655857 - DNA, 25 bp, Homo sapien
tttggatggcacgttgtaggtgaac

SEQ ID NO: 2655858 - DNA, 25 bp, Homo sapien
ttggatggcacgttgtaggtgaaca

SEQ ID NO: 2655859 - DNA, 25 bp, Homo sapien
aggattaagaatccccatgtcccca

SEQ ID NO: 2655860 - DNA, 25 bp, Homo sapien
ctttggatggcacgttgtaggtgaa

SEQ ID NO: 2655861 - DNA, 25 bp, Homo sapien
gcatgcacaacccataaaggtgggc

SEQ ID NO: 2655862 - DNA, 25 bp, Homo sapien
tggaaagctgcttggcagtcatgca

SEQ ID NO: 2655863 - DNA, 25 bp, Homo sapien
ggcaagcagttccacacaggcataa

SEQ ID NO: 2655864 - DNA, 25 bp, Homo sapien
cccagtcactggtgaaggcaagcag

SEQ ID NO: 2655865 - DNA, 25 bp, Homo sapien
ctgatgatgtttcgtgtgctgacac

SEQ ID NO: 2655866 - DNA, 25 bp, Homo sapien
cttgagttaaagtaaatgctccaga

SEQ ID NO: 2655867 - DNA, 25 bp, Homo sapien
ttaatacttgagttaaagtaaatgc

SEQ ID NO: 2655868 - DNA, 25 bp, Homo sapien
gtttcgtgtgctgacacttggctcc

SEQ ID NO: 2655869 - DNA, 25 bp, Homo sapien
tagccattggggaacaacaacacta

SEQ ID NO: 2655870 - DNA, 25 bp, Homo sapien
ctgtgaaacacagtcctgttgggat

SEQ ID NO: 2655871 - DNA, 25 bp, Homo sapien
aacaacactaaaatgcctcctgtga

SEQ ID NO: 2655872 - DNA, 25 bp, Homo sapien
ccagatgtctctcgtttattccagt

SEQ ID NO: 2655873 - DNA, 25 bp, Homo sapien
gctttgcccaagtttgcacatctgg

SEQ ID NO: 2655874 - DNA, 25 bp, Homo sapien
taagagtcattagtcctgttcctgg

SEQ ID NO: 2655875 - DNA, 25 bp, Homo sapien
ccatcctggaacgtgggtggaaaga

SEQ ID NO: 2655876 - DNA, 25 bp, Homo sapien
gaaggctccagcaaatagtgaaaat

SEQ ID NO: 2655877 - DNA, 25 bp, Homo sapien
tgtgggccctcttcttgaggaaata

SEQ ID NO: 2655878 - DNA, 25 bp, Homo sapien
ggctcctgtgggccctcttcttgag

SEQ ID NO: 2655879 - DNA, 25 bp, Homo sapien
ctcctgtgggccctcttcttgagga

SEQ ID NO: 2655880 - DNA, 25 bp, Homo sapien
cctgtgggccctcttcttgaggaaa

SEQ ID NO: 2655881 - DNA, 25 bp, Homo sapien
ggactgccacagtccatttcttttc

SEQ ID NO: 2655882 - DNA, 25 bp, Homo sapien
aggactgccacagtccatttctttt

SEQ ID NO: 2655883 - DNA, 25 bp, Homo sapien
tccaggactgccacagtccatttct

SEQ ID NO: 2655884 - DNA, 25 bp, Homo sapien
ccaggactgccacagtccatttctt

SEQ ID NO: 2655885 - DNA, 25 bp, Homo sapien
cagagggccacttgctgacactgga

SEQ ID NO: 2655886 - DNA, 25 bp, Homo sapien
tgactttatgtttccgtagggagcc

SEQ ID NO: 2655887 - DNA, 25 bp, Homo sapien
gtgcttcttactttgcgtgaagaca

SEQ ID NO: 2655888 - DNA, 25 bp, Homo sapien
tgacactggaattccactgcttgtg

SEQ ID NO: 2655889 - DNA, 25 bp, Homo sapien
gcttccaggcggatcatcctcacat

SEQ ID NO: 2655890 - DNA, 25 bp, Homo sapien
ggcttccaggcggatcatcctcaca

SEQ ID NO: 2655891 - DNA, 25 bp, Homo sapien
tccaggcggatcatcctcacataat

SEQ ID NO: 2655892 - DNA, 25 bp, Homo sapien
ggcggatcatcctcacataattttt

SEQ ID NO: 2655893 - DNA, 25 bp, Homo sapien
cagatgcagtcagcaggccacggcc

SEQ ID NO: 2655894 - DNA, 25 bp, Homo sapien
cctgtttcaaggatccatggactgc

SEQ ID NO: 2655895 - DNA, 25 bp, Homo sapien
gaggacaattccaatgccccataga

SEQ ID NO: 2655896 - DNA, 25 bp, Homo sapien
tccagaacaacaaagtggtgctatt

SEQ ID NO: 2655897 - DNA, 25 bp, Homo sapien
tagcaataggccaaagcaactcaac

SEQ ID NO: 2655898 - DNA, 25 bp, Homo sapien
caacctccagaagcaagtagcatga

SEQ ID NO: 2655899 - DNA, 25 bp, Homo sapien
gtgacatccccagacacagttccag

SEQ ID NO: 2655900 - DNA, 25 bp, Homo sapien
gggaacaatccattccttctaatgg

SEQ ID NO: 2655901 - DNA, 25 bp, Homo sapien
taacagctcatatttgcctcaagga

SEQ ID NO: 2655902 - DNA, 25 bp, Homo sapien
gagcctagcaaacaagagccagttt

SEQ ID NO: 2655903 - DNA, 25 bp, Homo sapien
gagccgcacatagggaacattagga

SEQ ID NO: 2655904 - DNA, 25 bp, Homo sapien
tcttgtatttggactctgagcctag

SEQ ID NO: 2655905 - DNA, 25 bp, Homo sapien
tagaagacgcaagatgatgggaatc

SEQ ID NO: 2655906 - DNA, 25 bp, Homo sapien
tcatggcgagatcccacaagggtga

SEQ ID NO: 2655907 - DNA, 25 bp, Homo sapien
ggctccttgagcgtagttcctctca

SEQ ID NO: 2655908 - DNA, 25 bp, Homo sapien
ttgtgggagctaccctagcatctgt

SEQ ID NO: 2655909 - DNA, 25 bp, Homo sapien
tagaagcaaatcacaggttccatcc

SEQ ID NO: 2655910 - DNA, 25 bp, Homo sapien
aagaatgcatataataacaccttgc

SEQ ID NO: 2655911 - DNA, 25 bp, Homo sapien
catctgtctttcataacgagccttg

SEQ ID NO: 2655912 - DNA, 25 bp, Homo sapien
acgagccttgttcgcctttgccatg

SEQ ID NO: 2655913 - DNA, 25 bp, Homo sapien
catataataacaccttgcctctcag

SEQ ID NO: 2655914 - DNA, 25 bp, Homo sapien
cctttagctcagtatgaggcaatat

SEQ ID NO: 2655915 - DNA, 25 bp, Homo sapien
gctcagtatgaggcaatatcctttt

SEQ ID NO: 2655916 - DNA, 25 bp, Homo sapien
tcctttagctcagtatgaggcaata

SEQ ID NO: 2655917 - DNA, 25 bp, Homo sapien
agctcagtatgaggcaatatccttt

SEQ ID NO: 2655918 - DNA, 25 bp, Homo sapien
catttcctgcctgcggacttcagag

SEQ ID NO: 2655919 - DNA, 25 bp, Homo sapien
cataggaacctacccaagagaaaga

SEQ ID NO: 2655920 - DNA, 25 bp, Homo sapien
tcttgccgtcagttggaggctgcct

SEQ ID NO: 2655921 - DNA, 25 bp, Homo sapien
cattgttgctgacctgctgacttgc

SEQ ID NO: 2655922 - DNA, 25 bp, Homo sapien
aatagtgctctgttccatcctatgc

SEQ ID NO: 2655923 - DNA, 25 bp, Homo sapien
ccatcctatgcctggtggatccata

SEQ ID NO: 2655924 - DNA, 25 bp, Homo sapien
ctatgcctggtggatccataccctc

SEQ ID NO: 2655925 - DNA, 25 bp, Homo sapien
gttcactgtggtcaatagtgctctg

SEQ ID NO: 2655926 - DNA, 25 bp, Homo sapien
aaacaaaccgccctgcatggataat

SEQ ID NO: 2655927 - DNA, 25 bp, Homo sapien
tgcttatgcacctcctgagacagga

SEQ ID NO: 2655928 - DNA, 25 bp, Homo sapien
gctatgatttttgctggccatcagg

SEQ ID NO: 2655929 - DNA, 25 bp, Homo sapien
taaaagaatatgtgcacatgcctga

SEQ ID NO: 2655930 - DNA, 25 bp, Homo sapien
gctatatgccaagactgttatcaca

SEQ ID NO: 2655931 - DNA, 25 bp, Homo sapien
ttcattgcacaaataggtattgagc

SEQ ID NO: 2655932 - DNA, 25 bp, Homo sapien
tatgctttgtaggatgctcagcagc

SEQ ID NO: 2655933 - DNA, 25 bp, Homo sapien
gaacctgtgtactgcttcaatgaag

SEQ ID NO: 2655934 - DNA, 25 bp, Homo sapien
taccatcatcggcaagttaggcaac

SEQ ID NO: 2655935 - DNA, 25 bp, Homo sapien
gatgatgacagccaacacacgctta

SEQ ID NO: 2655936 - DNA, 25 bp, Homo sapien
caaacagccagggttcaactcttcg

SEQ ID NO: 2655937 - DNA, 25 bp, Homo sapien
caccagcctagtggtatagcaagaa

SEQ ID NO: 2655938 - DNA, 25 bp, Homo sapien
tcatgggatgcgaaacctaacagcc

SEQ ID NO: 2655939 - DNA, 25 bp, Homo sapien
cgactgtgggactcgagtacgtgca

SEQ ID NO: 2655940 - DNA, 25 bp, Homo sapien
cgtgcagattttggtatagcgggca

SEQ ID NO: 2655941 - DNA, 25 bp, Homo sapien
tgtgcagttccacttacacgtggat

SEQ ID NO: 2655942 - DNA, 25 bp, Homo sapien
tgcaacacagaaggcagataagttt

SEQ ID NO: 2655943 - DNA, 25 bp, Homo sapien
gatttgcaacacagaaggcagataa

SEQ ID NO: 2655944 - DNA, 25 bp, Homo sapien
agaagatttgcaacacagaaggcag

SEQ ID NO: 2655945 - DNA, 25 bp, Homo sapien
gaagatttgcaacacagaaggcaga

SEQ ID NO: 2655946 - DNA, 25 bp, Homo sapien
gcaggagccttgtacgtccgaagag

SEQ ID NO: 2655947 - DNA, 25 bp, Homo sapien
gaaaggatgacataggcaggagcct

SEQ ID NO: 2655948 - DNA, 25 bp, Homo sapien
tttcctttggacccagtgctatgct

SEQ ID NO: 2655949 - DNA, 25 bp, Homo sapien
gttagatgttccacccacacactca

SEQ ID NO: 2655950 - DNA, 25 bp, Homo sapien
tgtgacaaagttgcctacctcagag

SEQ ID NO: 2655951 - DNA, 25 bp, Homo sapien
gactttgggcttgttactcagcctc

SEQ ID NO: 2655952 - DNA, 25 bp, Homo sapien
tacctcagaggtttgcgagcttggt

SEQ ID NO: 2655953 - DNA, 25 bp, Homo sapien
gtttcatagggtgcctgggccctga

SEQ ID NO: 2655954 - DNA, 25 bp, Homo sapien
tcacagtgtcatgggtataaataaa

SEQ ID NO: 2655955 - DNA, 25 bp, Homo sapien
taaaatgaaaggctagcttgacgtc

SEQ ID NO: 2655956 - DNA, 25 bp, Homo sapien
cttgacgtcagcagtgaggattctc

SEQ ID NO: 2655957 - DNA, 25 bp, Homo sapien
tgaggattctcacattccacttcac

SEQ ID NO: 2655958 - DNA, 25 bp, Homo sapien
gctgccatgccctgtcagagtgtta

SEQ ID NO: 2655959 - DNA, 25 bp, Homo sapien
ggcacatccctaaaggctgcttctg

SEQ ID NO: 2655960 - DNA, 25 bp, Homo sapien
tgacacaagtgaagagcaggcaact

SEQ ID NO: 2655961 - DNA, 25 bp, Homo sapien
gagctgcggtaaagcccactctgtc

SEQ ID NO: 2655962 - DNA, 25 bp, Homo sapien
aattcaaaccatggccatctggctt

SEQ ID NO: 2655963 - DNA, 25 bp, Homo sapien
tctccaaattcaaaccatggccatc

SEQ ID NO: 2655964 - DNA, 25 bp, Homo sapien
aactctccaaattcaaaccatggcc

SEQ ID NO: 2655965 - DNA, 25 bp, Homo sapien
ccaaattcaaaccatggccatctgg

SEQ ID NO: 2655966 - DNA, 25 bp, Homo sapien
ccacgtttttctaggagcccaagca

SEQ ID NO: 2655967 - DNA, 25 bp, Homo sapien
gcagtatgaatatggccttcgccac

SEQ ID NO: 2655968 - DNA, 25 bp, Homo sapien
gccccagctgagatattgattgccg

SEQ ID NO: 2655969 - DNA, 25 bp, Homo sapien
cctatggaacatggcaaaggtgacc

SEQ ID NO: 2655970 - DNA, 25 bp, Homo sapien
tggagggattttgaactaaggtcta

SEQ ID NO: 2655971 - DNA, 25 bp, Homo sapien
gaactaaggtctagagagcatttgc

SEQ ID NO: 2655972 - DNA, 25 bp, Homo sapien
gattttgaactaaggtctagagagc

SEQ ID NO: 2655973 - DNA, 25 bp, Homo sapien
tttgaactaaggtctagagagcatt

SEQ ID NO: 2655974 - DNA, 25 bp, Homo sapien
caatctgggtaggtagctgctatca

SEQ ID NO: 2655975 - DNA, 25 bp, Homo sapien
tacaaacatgagtcaaacacggatc

SEQ ID NO: 2655976 - DNA, 25 bp, Homo sapien
tgcagctaagcttctagagccgccc

SEQ ID NO: 2655977 - DNA, 25 bp, Homo sapien
tgcttgcagctattaccatgcctgg

SEQ ID NO: 2655978 - DNA, 25 bp, Homo sapien
cccaggaaaacgctgaaagatcaga

SEQ ID NO: 2655979 - DNA, 25 bp, Homo sapien
ggactcaggattcggattcccaaca

SEQ ID NO: 2655980 - DNA, 25 bp, Homo sapien
gatcagatttgcctgcagccctcaa

SEQ ID NO: 2655981 - DNA, 25 bp, Homo sapien
tcgagggaagtccagcctcgctgga

SEQ ID NO: 2655982 - DNA, 25 bp, Homo sapien
agtacagctggtccatgccggcggc

SEQ ID NO: 2655983 - DNA, 25 bp, Homo sapien
gcctcgtgcccacgtgaaggctctg

SEQ ID NO: 2655984 - DNA, 25 bp, Homo sapien
tccgtgggactctggcagcgagcct

SEQ ID NO: 2655985 - DNA, 25 bp, Homo sapien
cacgcgctcggtgggcagtacagct

SEQ ID NO: 2655986 - DNA, 25 bp, Homo sapien
gcttgtgccagcggccgggtaccca

SEQ ID NO: 2655987 - DNA, 25 bp, Homo sapien
tgggcttgtgccagcggccgggtac

SEQ ID NO: 2655988 - DNA, 25 bp, Homo sapien
gggcttgtgccagcggccgggtacc

SEQ ID NO: 2655989 - DNA, 25 bp, Homo sapien
ggcttgtgccagcggccgggtaccc

SEQ ID NO: 2655990 - DNA, 25 bp, Homo sapien
gaagcgtggaaaacaccaggcgcaa

SEQ ID NO: 2655991 - DNA, 25 bp, Homo sapien
agccactggaagcacgaggaggaat

SEQ ID NO: 2655992 - DNA, 25 bp, Homo sapien
ccaggcgcaacagcagcccgaggag

SEQ ID NO: 2655993 - DNA, 25 bp, Homo sapien
gcccgacggagaaacaggtccagct

SEQ ID NO: 2655994 - DNA, 25 bp, Homo sapien
ctcgccgccagcagtgtttttctgg

SEQ ID NO: 2655995 - DNA, 25 bp, Homo sapien
gccagcagtgtttttctggagctgg

SEQ ID NO: 2655996 - DNA, 25 bp, Homo sapien
gcagtgtttttctggagctggcaac

SEQ ID NO: 2655997 - DNA, 25 bp, Homo sapien
cagcagtgtttttctggagctggca

SEQ ID NO: 2655998 - DNA, 25 bp, Homo sapien
cctttaccttttctgagatgtggga

SEQ ID NO: 2655999 - DNA, 25 bp, Homo sapien
gtgaattttaggatgtctgcaagcc

SEQ ID NO: 2656000 - DNA, 25 bp, Homo sapien
tctaaggacaggttttcaatagtcc

SEQ ID NO: 2656001 - DNA, 25 bp, Homo sapien
caaaaccaaggacttctaaggacag

SEQ ID NO: 2656002 - DNA, 25 bp, Homo sapien
ctagggctgtgaaaggaggtgctct

SEQ ID NO: 2656003 - DNA, 25 bp, Homo sapien
ggcacttcccatgtcacaccattaa

SEQ ID NO: 2656004 - DNA, 25 bp, Homo sapien
tctgcagcatggcacttcccatgtc

SEQ ID NO: 2656005 - DNA, 25 bp, Homo sapien
tcacaccattaaacatctccaaggc

SEQ ID NO: 2656006 - DNA, 25 bp, Homo sapien
aggaggcccctcccgaaatggcagg

SEQ ID NO: 2656007 - DNA, 25 bp, Homo sapien
ctcccgaaatggcaggggccctaca

SEQ ID NO: 2656008 - DNA, 25 bp, Homo sapien
caggaggcccctcccgaaatggcag

SEQ ID NO: 2656009 - DNA, 25 bp, Homo sapien
tcccgaaatggcaggggccctacag

SEQ ID NO: 2656010 - DNA, 25 bp, Homo sapien
gaccgcgcgcgtcaccccaactttc

SEQ ID NO: 2656011 - DNA, 25 bp, Homo sapien
ccccggcctgtgtgtccgccgctcc

SEQ ID NO: 2656012 - DNA, 25 bp, Homo sapien
tgtgtccgccgctccgtcgggctgg

SEQ ID NO: 2656013 - DNA, 25 bp, Homo sapien
cgccgggacccagcgcacccgctgc

SEQ ID NO: 2656014 - DNA, 25 bp, Homo sapien
agacatggatgctgggggcgcagcc

SEQ ID NO: 2656015 - DNA, 25 bp, Homo sapien
tgcgagacatggatgctgggggcgc

SEQ ID NO: 2656016 - DNA, 25 bp, Homo sapien
cgagacatggatgctgggggcgcag

SEQ ID NO: 2656017 - DNA, 25 bp, Homo sapien
ctgcgagacatggatgctgggggcg

SEQ ID NO: 2656018 - DNA, 25 bp, Homo sapien
ccctgcgacacgctggtggtctggc

SEQ ID NO: 2656019 - DNA, 25 bp, Homo sapien
gtgtagcaggtctgagtctcggcct

SEQ ID NO: 2656020 - DNA, 25 bp, Homo sapien
gagtcccggcagtagatcacgccgc

SEQ ID NO: 2656021 - DNA, 25 bp, Homo sapien
gagctggactcgtccgagtcccggc

SEQ ID NO: 2656022 - DNA, 25 bp, Homo sapien
gttacagtgacaaacaacaggttcc

SEQ ID NO: 2656023 - DNA, 25 bp, Homo sapien
tctgtctaggatgcagccaacccag

SEQ ID NO: 2656024 - DNA, 25 bp, Homo sapien
tgacactccgaactcatggcccggt

SEQ ID NO: 2656025 - DNA, 25 bp, Homo sapien
caaggcacgcaaatccagctcagtg

SEQ ID NO: 2656026 - DNA, 25 bp, Homo sapien
ctttgagaacatacgggaggacact

SEQ ID NO: 2656027 - DNA, 25 bp, Homo sapien
cctattgaccaggtaaaggctgtga

SEQ ID NO: 2656028 - DNA, 25 bp, Homo sapien
gttgtatgtgcagaatcatcctcag

SEQ ID NO: 2656029 - DNA, 25 bp, Homo sapien
ctctctgtacaataggatatgccat

SEQ ID NO: 2656030 - DNA, 25 bp, Homo sapien
caaacatggagtagctagagttgcc

SEQ ID NO: 2656031 - DNA, 25 bp, Homo sapien
tcaaccgtcaggcaaaaggatggtc

SEQ ID NO: 2656032 - DNA, 25 bp, Homo sapien
gagaaagcttactcctggcacatag

SEQ ID NO: 2656033 - DNA, 25 bp, Homo sapien
caaagtatagcgttcagcacatgcc

SEQ ID NO: 2656034 - DNA, 25 bp, Homo sapien
catctggaaactaacaacatcctgt

SEQ ID NO: 2656035 - DNA, 25 bp, Homo sapien
cctacaacacagtctggccacaaat

SEQ ID NO: 2656036 - DNA, 25 bp, Homo sapien
ggatatttcctgaatcgctagcacc

SEQ ID NO: 2656037 - DNA, 25 bp, Homo sapien
cattctgtatgaatggagggaaaac

SEQ ID NO: 2656038 - DNA, 25 bp, Homo sapien
tgattactggcctttacccatgacc

SEQ ID NO: 2656039 - DNA, 25 bp, Homo sapien
ccagtttagtgccacagaatctgcc

SEQ ID NO: 2656040 - DNA, 25 bp, Homo sapien
gaccagtttagtgccacagaatctg

SEQ ID NO: 2656041 - DNA, 25 bp, Homo sapien
tattttgattactggcctttaccca

SEQ ID NO: 2656042 - DNA, 25 bp, Homo sapien
ctccaactttgctggttgaacaaac

SEQ ID NO: 2656043 - DNA, 25 bp, Homo sapien
ctggttgaacaaactctggactctg

SEQ ID NO: 2656044 - DNA, 25 bp, Homo sapien
tgctggttgaacaaactctggactc

SEQ ID NO: 2656045 - DNA, 25 bp, Homo sapien
actttgctggttgaacaaactctgg

SEQ ID NO: 2656046 - DNA, 25 bp, Homo sapien
ctacagccctccgattggtcaccac

SEQ ID NO: 2656047 - DNA, 25 bp, Homo sapien
tacagccctccgattggtcaccaca

SEQ ID NO: 2656048 - DNA, 25 bp, Homo sapien
ccctccgattggtcaccacagcctc

SEQ ID NO: 2656049 - DNA, 25 bp, Homo sapien
cagccctccgattggtcaccacagc

SEQ ID NO: 2656050 - DNA, 25 bp, Homo sapien
gcagggcagcaaccacaaggacagg

SEQ ID NO: 2656051 - DNA, 25 bp, Homo sapien
agggcagggcagcaaccacaaggac

SEQ ID NO: 2656052 - DNA, 25 bp, Homo sapien
agaagaagggcagggcagcaaccac

SEQ ID NO: 2656053 - DNA, 25 bp, Homo sapien
gggctccacatgtgactgagaagaa

SEQ ID NO: 2656054 - DNA, 25 bp, Homo sapien
ttgacagtcctaatgggccagatca

SEQ ID NO: 2656055 - DNA, 25 bp, Homo sapien
cagggtttgacagtcctaatgggcc

SEQ ID NO: 2656056 - DNA, 25 bp, Homo sapien
gaaggctccacagtcagtcagccag

SEQ ID NO: 2656057 - DNA, 25 bp, Homo sapien
cagccagtcccagggtttgacagtc

SEQ ID NO: 2656058 - DNA, 25 bp, Homo sapien
tgcaaaactcccctctaccactgcc

SEQ ID NO: 2656059 - DNA, 25 bp, Homo sapien
taccactgcccgtagggagatcagg

SEQ ID NO: 2656060 - DNA, 25 bp, Homo sapien
caggctaagtggatcacactccctt

SEQ ID NO: 2656061 - DNA, 25 bp, Homo sapien
gggagatcaggctaagtggatcaca

SEQ ID NO: 2656062 - DNA, 25 bp, Homo sapien
ctttgatataataagagattccaac

SEQ ID NO: 2656063 - DNA, 25 bp, Homo sapien
agccggcactcagtcaacacattgc

SEQ ID NO: 2656064 - DNA, 25 bp, Homo sapien
ccagccggcactcagtcaacacatt

SEQ ID NO: 2656065 - DNA, 25 bp, Homo sapien
ctggaagaacccaattcccaatccg

SEQ ID NO: 2656066 - DNA, 25 bp, Homo sapien
attcccaatccgtaactcctgccag

SEQ ID NO: 2656067 - DNA, 25 bp, Homo sapien
tcatgctctcccagtaggagtgtct

SEQ ID NO: 2656068 - DNA, 25 bp, Homo sapien
catgctctcccagtaggagtgtctc

SEQ ID NO: 2656069 - DNA, 25 bp, Homo sapien
atgctctcccagtaggagtgtctca

SEQ ID NO: 2656070 - DNA, 25 bp, Homo sapien
tgctctcccagtaggagtgtctcac

SEQ ID NO: 2656071 - DNA, 25 bp, Homo sapien
gggctggcatcatcaccactcaggc

SEQ ID NO: 2656072 - DNA, 25 bp, Homo sapien
cattccaatttcctgccagtatctc

SEQ ID NO: 2656073 - DNA, 25 bp, Homo sapien
ttagcaggggccactgctatcgcct

SEQ ID NO: 2656074 - DNA, 25 bp, Homo sapien
ggggccactgctatcgcctgttcct

SEQ ID NO: 2656075 - DNA, 25 bp, Homo sapien
tagaaatgcacagaatggccgggtc

SEQ ID NO: 2656076 - DNA, 25 bp, Homo sapien
caggctgggcagaccccttgagatt

SEQ ID NO: 2656077 - DNA, 25 bp, Homo sapien
atgtgttcaccagcacctcctgtgg

SEQ ID NO: 2656078 - DNA, 25 bp, Homo sapien
gacattgaatgtgcagccttttaga

SEQ ID NO: 2656079 - DNA, 25 bp, Homo sapien
tacaaaagtcatcgtcacatggaaa

SEQ ID NO: 2656080 - DNA, 25 bp, Homo sapien
aagtcatcgtcacatggaaaagaga

SEQ ID NO: 2656081 - DNA, 25 bp, Homo sapien
aatacaaaagtcatcgtcacatgga

SEQ ID NO: 2656082 - DNA, 25 bp, Homo sapien
caaaagtcatcgtcacatggaaaag

SEQ ID NO: 2656083 - DNA, 25 bp, Homo sapien
ctcaatggaagggtcgaaatagaaa

SEQ ID NO: 2656084 - DNA, 25 bp, Homo sapien
caacagacataatagggcaaccaat

SEQ ID NO: 2656085 - DNA, 25 bp, Homo sapien
taagaaattaggaccaacgtgccca

SEQ ID NO: 2656086 - DNA, 25 bp, Homo sapien
ggcaaccaatcttcttgtatcaaag

SEQ ID NO: 2656087 - DNA, 25 bp, Homo sapien
tcaggccactacagagagttctaga

SEQ ID NO: 2656088 - DNA, 25 bp, Homo sapien
tgtcggaagaagaggactcacggcc

SEQ ID NO: 2656089 - DNA, 25 bp, Homo sapien
tcacactttcctgagcgtgccggac

SEQ ID NO: 2656090 - DNA, 25 bp, Homo sapien
cagggctcaaattcgctgtcggaag

SEQ ID NO: 2656091 - DNA, 25 bp, Homo sapien
acacagtgcgcgaggcaggcgccac

SEQ ID NO: 2656092 - DNA, 25 bp, Homo sapien
gatgaggagagtggacatgaaggca

SEQ ID NO: 2656093 - DNA, 25 bp, Homo sapien
tgctccaaggtccaaggagcttgct

SEQ ID NO: 2656094 - DNA, 25 bp, Homo sapien
tctttgcagcgtgcacacacagtgc

SEQ ID NO: 2656095 - DNA, 25 bp, Homo sapien
agcttccattatacacgccctcatt

SEQ ID NO: 2656096 - DNA, 25 bp, Homo sapien
attatacacgccctcattttcctct

SEQ ID NO: 2656097 - DNA, 25 bp, Homo sapien
acacgccctcattttcctctcggag

SEQ ID NO: 2656098 - DNA, 25 bp, Homo sapien
cctcattttcctctcggagccccac

SEQ ID NO: 2656099 - DNA, 25 bp, Homo sapien
ctagttgttagcagagcaacaggtc

SEQ ID NO: 2656100 - DNA, 25 bp, Homo sapien
tgttagcagagcaacaggtcataat

SEQ ID NO: 2656101 - DNA, 25 bp, Homo sapien
tagcagagcaacaggtcataataac

SEQ ID NO: 2656102 - DNA, 25 bp, Homo sapien
gttgttagcagagcaacaggtcata

SEQ ID NO: 2656103 - DNA, 25 bp, Homo sapien
ctgccacagggaaattgaatgccgt

SEQ ID NO: 2656104 - DNA, 25 bp, Homo sapien
tttcagaaggcaagataggtcctcc

SEQ ID NO: 2656105 - DNA, 25 bp, Homo sapien
gcgttgttccaaccatacactgcca

SEQ ID NO: 2656106 - DNA, 25 bp, Homo sapien
gaatgccgtgatgattccaaccagg

SEQ ID NO: 2656107 - DNA, 25 bp, Homo sapien
caggttcactcgttcatctttggcc

SEQ ID NO: 2656108 - DNA, 25 bp, Homo sapien
cagcaggttcactcgttcatctttg

SEQ ID NO: 2656109 - DNA, 25 bp, Homo sapien
ggttcactcgttcatctttggccat

SEQ ID NO: 2656110 - DNA, 25 bp, Homo sapien
acagcaggttcactcgttcatcttt

SEQ ID NO: 2656111 - DNA, 25 bp, Homo sapien
tccaagttccaacaaacttctccca

SEQ ID NO: 2656112 - DNA, 25 bp, Homo sapien
gctgatggaacaactaagctgaggt

SEQ ID NO: 2656113 - DNA, 25 bp, Homo sapien
tggagtggcccatagagaacattag

SEQ ID NO: 2656114 - DNA, 25 bp, Homo sapien
ctcgcagtggtacacctctggccag

SEQ ID NO: 2656115 - DNA, 25 bp, Homo sapien
catgggttcccaactcggatctgtg

SEQ ID NO: 2656116 - DNA, 25 bp, Homo sapien
gcgaaagattctgcccagatctttg

SEQ ID NO: 2656117 - DNA, 25 bp, Homo sapien
cctccaaaggcacctccaatctcag

SEQ ID NO: 2656118 - DNA, 25 bp, Homo sapien
tcctccaaaggcacctccaatctca

SEQ ID NO: 2656119 - DNA, 25 bp, Homo sapien
tctcctccaaaggcacctccaatct

SEQ ID NO: 2656120 - DNA, 25 bp, Homo sapien
tccaaaggcacctccaatctcagcc

SEQ ID NO: 2656121 - DNA, 25 bp, Homo sapien
caagtagaccttctcatgtactgtt

SEQ ID NO: 2656122 - DNA, 25 bp, Homo sapien
gtagaccttctcatgtactgtttcc

SEQ ID NO: 2656123 - DNA, 25 bp, Homo sapien
ttctcatgtactgtttccaggcatc

SEQ ID NO: 2656124 - DNA, 25 bp, Homo sapien
gaccttctcatgtactgtttccagg

SEQ ID NO: 2656125 - DNA, 25 bp, Homo sapien
aacacctcaaattaagggatgttca

SEQ ID NO: 2656126 - DNA, 25 bp, Homo sapien
taagggatgttcatctaaaacacct

SEQ ID NO: 2656127 - DNA, 25 bp, Homo sapien
tcatagggggattagtcactgtcac

SEQ ID NO: 2656128 - DNA, 25 bp, Homo sapien
cactgtcacagtcataataatgcat

SEQ ID NO: 2656129 - DNA, 25 bp, Homo sapien
cccgactctggtgtgtcaggaccac

SEQ ID NO: 2656130 - DNA, 25 bp, Homo sapien
actctggtgtgtcaggaccactcat

SEQ ID NO: 2656131 - DNA, 25 bp, Homo sapien
tttcccgactctggtgtgtcaggac

SEQ ID NO: 2656132 - DNA, 25 bp, Homo sapien
gactctggtgtgtcaggaccactca

SEQ ID NO: 2656133 - DNA, 25 bp, Homo sapien
gactcagctatcatgcctggaccca

SEQ ID NO: 2656134 - DNA, 25 bp, Homo sapien
gacattgacagctatctgtgttcat

SEQ ID NO: 2656135 - DNA, 25 bp, Homo sapien
acccaagactcagctatcatgcctg

SEQ ID NO: 2656136 - DNA, 25 bp, Homo sapien
gacccagacattgacagctatctgt

SEQ ID NO: 2656137 - DNA, 25 bp, Homo sapien
tcctggcaactctgataccctggac

SEQ ID NO: 2656138 - DNA, 25 bp, Homo sapien
gctcactgggcagcccatgagcttc

SEQ ID NO: 2656139 - DNA, 25 bp, Homo sapien
actgggcagcccatgagcttccctt

SEQ ID NO: 2656140 - DNA, 25 bp, Homo sapien
caagagctcactgggcagcccatga

SEQ ID NO: 2656141 - DNA, 25 bp, Homo sapien
gaggtcaactgtcccaaaagaacac

SEQ ID NO: 2656142 - DNA, 25 bp, Homo sapien
tggcactaggtagtgaccagcagga

SEQ ID NO: 2656143 - DNA, 25 bp, Homo sapien
aacctgtagcaggtgtattcacaga

SEQ ID NO: 2656144 - DNA, 25 bp, Homo sapien
ggcttctgtgtccaaaagaggtcaa

SEQ ID NO: 2656145 - DNA, 25 bp, Homo sapien
tagggtcctgcgtcagtctcatggg

SEQ ID NO: 2656146 - DNA, 25 bp, Homo sapien
cgatgcgcacctccgcagaagacac

SEQ ID NO: 2656147 - DNA, 25 bp, Homo sapien
ctgaatagggtcctgcgtcagtctc

SEQ ID NO: 2656148 - DNA, 25 bp, Homo sapien
agtctcatgggcccgatgcgcacct

SEQ ID NO: 2656149 - DNA, 25 bp, Homo sapien
tcaaagacagcagtgtcggcattcc

SEQ ID NO: 2656150 - DNA, 25 bp, Homo sapien
agtgcttgccaccttcttctagttg

SEQ ID NO: 2656151 - DNA, 25 bp, Homo sapien
taagttacgatacgaagtgagcatc

SEQ ID NO: 2656152 - DNA, 25 bp, Homo sapien
tcctaactttggatcagctgctgac

SEQ ID NO: 2656153 - DNA, 25 bp, Homo sapien
aaagggcatcttgaaataaatcatc

SEQ ID NO: 2656154 - DNA, 25 bp, Homo sapien
acaaaaagggcatcttgaaataaat

SEQ ID NO: 2656155 - DNA, 25 bp, Homo sapien
caacaaaaagggcatcttgaaataa

SEQ ID NO: 2656156 - DNA, 25 bp, Homo sapien
aaaaagggcatcttgaaataaatca

SEQ ID NO: 2656157 - DNA, 25 bp, Homo sapien
gaaagcattcaagggctgactctgg

SEQ ID NO: 2656158 - DNA, 25 bp, Homo sapien
actctggagtccgagcaatattgca

SEQ ID NO: 2656159 - DNA, 25 bp, Homo sapien
tataaccagctctgtcgcaggccca

SEQ ID NO: 2656160 - DNA, 25 bp, Homo sapien
actgcttctgcatcgaagttctgag

SEQ ID NO: 2656161 - DNA, 25 bp, Homo sapien
gaaccggtatggtaagagagaccta

SEQ ID NO: 2656162 - DNA, 25 bp, Homo sapien
atctctccaaaggaaccggtatggt

SEQ ID NO: 2656163 - DNA, 25 bp, Homo sapien
tatggtaagagagacctaggcctct

SEQ ID NO: 2656164 - DNA, 25 bp, Homo sapien
caaaggaaccggtatggtaagagag

SEQ ID NO: 2656165 - DNA, 25 bp, Homo sapien
gatcaccgtgtgctcggagggattt

SEQ ID NO: 2656166 - DNA, 25 bp, Homo sapien
ggagggatttgtggcccggatcgac

SEQ ID NO: 2656167 - DNA, 25 bp, Homo sapien
tcaccgtgtgctcggagggatttgt

SEQ ID NO: 2656168 - DNA, 25 bp, Homo sapien
aaaccactgcgaggatcaccgtgtg

SEQ ID NO: 2656169 - DNA, 25 bp, Homo sapien
ggtcactcagcagatacaaaccagg

SEQ ID NO: 2656170 - DNA, 25 bp, Homo sapien
gcagaaaatgtggtcactcagcaga

SEQ ID NO: 2656171 - DNA, 25 bp, Homo sapien
gcaaagcagaaaatgtggtcactca

SEQ ID NO: 2656172 - DNA, 25 bp, Homo sapien
gcagatacaaaccaggattcctcac

SEQ ID NO: 2656173 - DNA, 25 bp, Homo sapien
tgacgcctcttcatggtcatccgat

SEQ ID NO: 2656174 - DNA, 25 bp, Homo sapien
ctgacgcctcttcatggtcatccga

SEQ ID NO: 2656175 - DNA, 25 bp, Homo sapien
cctgttgaagcctgcgtggagaaga

SEQ ID NO: 2656176 - DNA, 25 bp, Homo sapien
aagaggaaggactgacgcctcttca

SEQ ID NO: 2656177 - DNA, 25 bp, Homo sapien
aaagagctcgactggcagctgctcg

SEQ ID NO: 2656178 - DNA, 25 bp, Homo sapien
ccagagagcaaaaacgcaaagagct

SEQ ID NO: 2656179 - DNA, 25 bp, Homo sapien
gcagctgctcgttactttcccatga

SEQ ID NO: 2656180 - DNA, 25 bp, Homo sapien
ccttaacagttctccgtggcagctt

SEQ ID NO: 2656181 - DNA, 25 bp, Homo sapien
aactgggagcgaacttccccatgtt

SEQ ID NO: 2656182 - DNA, 25 bp, Homo sapien
tcagttcattatagcaagcaattat

SEQ ID NO: 2656183 - DNA, 25 bp, Homo sapien
agttcattatagcaagcaattatgc

SEQ ID NO: 2656184 - DNA, 25 bp, Homo sapien
taatttgaactgggagcgaacttcc

SEQ ID NO: 2656185 - DNA, 25 bp, Homo sapien
ttatttctatggcttcatgacagtg

SEQ ID NO: 2656186 - DNA, 25 bp, Homo sapien
acgtggtcatcgcttgttatttcta

SEQ ID NO: 2656187 - DNA, 25 bp, Homo sapien
tcatgacagtgatctaatgctgtaa

SEQ ID NO: 2656188 - DNA, 25 bp, Homo sapien
agtgatctaatgctgtaaacactga

SEQ ID NO: 2656189 - DNA, 25 bp, Homo sapien
ggatgatgggaaagtacttgataaa

SEQ ID NO: 2656190 - DNA, 25 bp, Homo sapien
ctatcagtattctttgcacagcttg

SEQ ID NO: 2656191 - DNA, 25 bp, Homo sapien
tctcctaagaaaatgtgctgataca

SEQ ID NO: 2656192 - DNA, 25 bp, Homo sapien
gataaaaagtgtggcttaaacctga

SEQ ID NO: 2656193 - DNA, 25 bp, Homo sapien
tactgacatgtagtactcagggccc

SEQ ID NO: 2656194 - DNA, 25 bp, Homo sapien
ctgacatgtagtactcagggccctc

SEQ ID NO: 2656195 - DNA, 25 bp, Homo sapien
actgacatgtagtactcagggccct

SEQ ID NO: 2656196 - DNA, 25 bp, Homo sapien
tgacatgtagtactcagggccctcc

SEQ ID NO: 2656197 - DNA, 25 bp, Homo sapien
cagcagtcatgaacagggtggcaca

SEQ ID NO: 2656198 - DNA, 25 bp, Homo sapien
caagcggtgaagaatgtcgggaaaa

SEQ ID NO: 2656199 - DNA, 25 bp, Homo sapien
tattaacacgatcaaccctgagagt

SEQ ID NO: 2656200 - DNA, 25 bp, Homo sapien
gcttcggagatgttcgaaccaactg

SEQ ID NO: 2656201 - DNA, 25 bp, Homo sapien
tggtagcccatcatcctttcgaagg

SEQ ID NO: 2656202 - DNA, 25 bp, Homo sapien
cagatcagcgagttcttttcccagg

SEQ ID NO: 2656203 - DNA, 25 bp, Homo sapien
tcttatcgcttttgggcagatcagc

SEQ ID NO: 2656204 - DNA, 25 bp, Homo sapien
tattgatggtgtcgagaaggtctgc

SEQ ID NO: 2656205 - DNA, 25 bp, Homo sapien
ggatttccgtctggcatagtaaacc

SEQ ID NO: 2656206 - DNA, 25 bp, Homo sapien
atgctgtccccggatttccgtctgg

SEQ ID NO: 2656207 - DNA, 25 bp, Homo sapien
gtccccggatttccgtctggcatag

SEQ ID NO: 2656208 - DNA, 25 bp, Homo sapien
ttggatgctgtccccggatttccgt

SEQ ID NO: 2656209 - DNA, 25 bp, Homo sapien
gggcctccaaggaacaagtccagaa

SEQ ID NO: 2656210 - DNA, 25 bp, Homo sapien
tccaaggaacaagtccagaaccggc

SEQ ID NO: 2656211 - DNA, 25 bp, Homo sapien
gtgggcctccaaggaacaagtccag

SEQ ID NO: 2656212 - DNA, 25 bp, Homo sapien
gcctccaaggaacaagtccagaacc

SEQ ID NO: 2656213 - DNA, 25 bp, Homo sapien
ttggctttgtaaatctcacaaaatt

SEQ ID NO: 2656214 - DNA, 25 bp, Homo sapien
tgatgtatggttagggggtcctgtt

SEQ ID NO: 2656215 - DNA, 25 bp, Homo sapien
ggtcctgtttggctttgtaaatctc

SEQ ID NO: 2656216 - DNA, 25 bp, Homo sapien
catgatgtatggttagggggtcctg

SEQ ID NO: 2656217 - DNA, 25 bp, Homo sapien
tgttccttatacacccaagctatga

SEQ ID NO: 2656218 - DNA, 25 bp, Homo sapien
tgtgttccttatacacccaagctat

SEQ ID NO: 2656219 - DNA, 25 bp, Homo sapien
acgttgtgttccttatacacccaag

SEQ ID NO: 2656220 - DNA, 25 bp, Homo sapien
cttatacacccaagctatgaacctg

SEQ ID NO: 2656221 - DNA, 25 bp, Homo sapien
ttattgtcagtggtacaacacagtt

SEQ ID NO: 2656222 - DNA, 25 bp, Homo sapien
ttcttgagcgagacaaaatgcctaa

SEQ ID NO: 2656223 - DNA, 25 bp, Homo sapien
gagcgagacaaaatgcctaattttc

SEQ ID NO: 2656224 - DNA, 25 bp, Homo sapien
tacaacacagtttcttgagcgagac

SEQ ID NO: 2656225 - DNA, 25 bp, Homo sapien
gacatcagggctaaaccccagaaaa

SEQ ID NO: 2656226 - DNA, 25 bp, Homo sapien
catgggccgattttgacatcagggc

SEQ ID NO: 2656227 - DNA, 25 bp, Homo sapien
aaatgcaaacccatgggccgatttt

SEQ ID NO: 2656228 - DNA, 25 bp, Homo sapien
accggaaccgcctgcagacaggtgc

SEQ ID NO: 2656229 - DNA, 25 bp, Homo sapien
ctgtgagcacagtcctacgaggcaa

SEQ ID NO: 2656230 - DNA, 25 bp, Homo sapien
tcctctgtgacatgctggtgaagcc

SEQ ID NO: 2656231 - DNA, 25 bp, Homo sapien
tcagacaaggcccatgatccaggac

SEQ ID NO: 2656232 - DNA, 25 bp, Homo sapien
tgggcacaagcaactacagagtcct

SEQ ID NO: 2656233 - DNA, 25 bp, Homo sapien
acagagcctggcatgatcacctcca

SEQ ID NO: 2656234 - DNA, 25 bp, Homo sapien
gagcctggcatgatcacctccagca

SEQ ID NO: 2656235 - DNA, 25 bp, Homo sapien
caagagagccccctctcagcttcag

SEQ ID NO: 2656236 - DNA, 25 bp, Homo sapien
cctttccctcgcaagccaagagagc

SEQ ID NO: 2656237 - DNA, 25 bp, Homo sapien
taaaacataggctcttccatgagct

SEQ ID NO: 2656238 - DNA, 25 bp, Homo sapien
cagtgatagtgtggtcagtgccaaa

SEQ ID NO: 2656239 - DNA, 25 bp, Homo sapien
catgagctccactgatcaaatcttt

SEQ ID NO: 2656240 - DNA, 25 bp, Homo sapien
gaccaagacatgatgctgccctgga

SEQ ID NO: 2656241 - DNA, 25 bp, Homo sapien
tactagacccaaagcagcttgagag

SEQ ID NO: 2656242 - DNA, 25 bp, Homo sapien
tagacccaaagcagcttgagagcag

SEQ ID NO: 2656243 - DNA, 25 bp, Homo sapien
aagcagcttgagagcaggctccccc

SEQ ID NO: 2656244 - DNA, 25 bp, Homo sapien
ctctactagacccaaagcagcttga

SEQ ID NO: 2656245 - DNA, 25 bp, Homo sapien
tggtggtgcagcgtcgcagggacga

SEQ ID NO: 2656246 - DNA, 25 bp, Homo sapien
tttggtggtgcagcgtcgcagggac

SEQ ID NO: 2656247 - DNA, 25 bp, Homo sapien
ggtgcagcgtcgcagggacgatgat

SEQ ID NO: 2656248 - DNA, 25 bp, Homo sapien
ggagttttggtggtgcagcgtcgca

SEQ ID NO: 2656249 - DNA, 25 bp, Homo sapien
tctgtggctaaagggggcagccgtt

SEQ ID NO: 2656250 - DNA, 25 bp, Homo sapien
cttctgtggctaaagggggcagccg

SEQ ID NO: 2656251 - DNA, 25 bp, Homo sapien
tgtgcttctgtggctaaagggggca

SEQ ID NO: 2656252 - DNA, 25 bp, Homo sapien
actgtgcttctgtggctaaaggggg

SEQ ID NO: 2656253 - DNA, 25 bp, Homo sapien
ctggaccaaagcgcccttgatggcc

SEQ ID NO: 2656254 - DNA, 25 bp, Homo sapien
tggaccaaagcgcccttgatggcca

SEQ ID NO: 2656255 - DNA, 25 bp, Homo sapien
ggagcaaggcctagagccccgaagc

SEQ ID NO: 2656256 - DNA, 25 bp, Homo sapien
gcctagagccccgaagcccctagaa

SEQ ID NO: 2656257 - DNA, 25 bp, Homo sapien
ctgcctctggagggcctacttgggc

SEQ ID NO: 2656258 - DNA, 25 bp, Homo sapien
tctgcctctggagggcctacttggg

SEQ ID NO: 2656259 - DNA, 25 bp, Homo sapien
accccaggaattcatcacaacgctg

SEQ ID NO: 2656260 - DNA, 25 bp, Homo sapien
tcacaacgctgctcaccttcagcag

SEQ ID NO: 2656261 - DNA, 25 bp, Homo sapien
caagaggaaccagagtgtaccccag

SEQ ID NO: 2656262 - DNA, 25 bp, Homo sapien
gaggaaccagagtgtaccccaggaa

SEQ ID NO: 2656263 - DNA, 25 bp, Homo sapien
agctgggattatagcggcacgccgc

SEQ ID NO: 2656264 - DNA, 25 bp, Homo sapien
cacttttgccaaaaaatttgatagc

SEQ ID NO: 2656265 - DNA, 25 bp, Homo sapien
gacacctggccttacactacaaagt

SEQ ID NO: 2656266 - DNA, 25 bp, Homo sapien
caaattctctgaaaactacaactca

SEQ ID NO: 2656267 - DNA, 25 bp, Homo sapien
acttttcctgagtccgttaggaatg

SEQ ID NO: 2656268 - DNA, 25 bp, Homo sapien
agtccgttaggaatggactgtgagt

SEQ ID NO: 2656269 - DNA, 25 bp, Homo sapien
tagactaccactggaacttttcctg

SEQ ID NO: 2656270 - DNA, 25 bp, Homo sapien
gtggcattttgtgatagcaggctag

SEQ ID NO: 2656271 - DNA, 25 bp, Homo sapien
tgcaacttcacgacagaactgaatg

SEQ ID NO: 2656272 - DNA, 25 bp, Homo sapien
acttcacgacagaactgaatgcttt

SEQ ID NO: 2656273 - DNA, 25 bp, Homo sapien
attcttgatctgcaacttcacgaca

SEQ ID NO: 2656274 - DNA, 25 bp, Homo sapien
gatctgcaacttcacgacagaactg

SEQ ID NO: 2656275 - DNA, 25 bp, Homo sapien
gtgtattcccacatgctggcagcat

SEQ ID NO: 2656276 - DNA, 25 bp, Homo sapien
caggcagccagtgcggtaagatgac

SEQ ID NO: 2656277 - DNA, 25 bp, Homo sapien
ccatcacactgtggcccggaagggc

SEQ ID NO: 2656278 - DNA, 25 bp, Homo sapien
gattgtggaccaccccgtgagtgtg

SEQ ID NO: 2656279 - DNA, 25 bp, Homo sapien
ttagagtgacggtgaactgagtgcc

SEQ ID NO: 2656280 - DNA, 25 bp, Homo sapien
ctgaatcacgatgaatcttgtgaat

SEQ ID NO: 2656281 - DNA, 25 bp, Homo sapien
ggcgttcagtatgataaggttgcca

SEQ ID NO: 2656282 - DNA, 25 bp, Homo sapien
tgtcctacatggtatctagccaaga

SEQ ID NO: 2656283 - DNA, 25 bp, Homo sapien
gccaaccttgtgatatgagcacgtg

SEQ ID NO: 2656284 - DNA, 25 bp, Homo sapien
agactttcggcccactctcttgggt

SEQ ID NO: 2656285 - DNA, 25 bp, Homo sapien
cgtcaatggactctttcctcctgtt

SEQ ID NO: 2656286 - DNA, 25 bp, Homo sapien
gatttcacgtcaatggactctttcc

SEQ ID NO: 2656287 - DNA, 25 bp, Homo sapien
gatgatatcgatttcacgtcaatgg

SEQ ID NO: 2656288 - DNA, 25 bp, Homo sapien
cactgcctcgagatgatatcgattt

SEQ ID NO: 2656289 - DNA, 25 bp, Homo sapien
cccgctgctagtgcagcagccattg

SEQ ID NO: 2656290 - DNA, 25 bp, Homo sapien
tccaaaaacagtgaatccagttcaa

SEQ ID NO: 2656291 - DNA, 25 bp, Homo sapien
tgcatgctcttcagcctccactgtg

SEQ ID NO: 2656292 - DNA, 25 bp, Homo sapien
tggaaagaagacagtccccttcaag

SEQ ID NO: 2656293 - DNA, 25 bp, Homo sapien
agtcacccaaacccaacttttgcag

SEQ ID NO: 2656294 - DNA, 25 bp, Homo sapien
aacccaacttttgcagttccatgac

SEQ ID NO: 2656295 - DNA, 25 bp, Homo sapien
ggccgtgtaaccagatgactgtgca

SEQ ID NO: 2656296 - DNA, 25 bp, Homo sapien
tcctaagctgctggccgtgtaacca

SEQ ID NO: 2656297 - DNA, 25 bp, Homo sapien
gccatggacggatagcgacgattct

SEQ ID NO: 2656298 - DNA, 25 bp, Homo sapien
gatagcgacgattctgcaggcttgg

SEQ ID NO: 2656299 - DNA, 25 bp, Homo sapien
gtggatcctcgccatggacggatag

SEQ ID NO: 2656300 - DNA, 25 bp, Homo sapien
gcctcgatggtcatggagtggatcc

SEQ ID NO: 2656301 - DNA, 25 bp, Homo sapien
gagtacagttctgtggtccgtaaaa

SEQ ID NO: 2656302 - DNA, 25 bp, Homo sapien
agatcactggtgtgaggatcttcat

SEQ ID NO: 2656303 - DNA, 25 bp, Homo sapien
atcaggcctccaacaagatcactgg

SEQ ID NO: 2656304 - DNA, 25 bp, Homo sapien
ctgtccaaggcttccgctactgtga

SEQ ID NO: 2656305 - DNA, 25 bp, Homo sapien
gcttttcaggttttgcctcatcact

SEQ ID NO: 2656306 - DNA, 25 bp, Homo sapien
tctcttgcttttcaggttttgcctc

SEQ ID NO: 2656307 - DNA, 25 bp, Homo sapien
tttcaggttttgcctcatcactcac

SEQ ID NO: 2656308 - DNA, 25 bp, Homo sapien
tgcttttcaggttttgcctcatcac

SEQ ID NO: 2656309 - DNA, 25 bp, Homo sapien
cattcccagacgatgtgtgctaagg

SEQ ID NO: 2656310 - DNA, 25 bp, Homo sapien
gaaacccacgatggtatggcagtga

SEQ ID NO: 2656311 - DNA, 25 bp, Homo sapien
aattgtcctgcctgtaacgtgtgta

SEQ ID NO: 2656312 - DNA, 25 bp, Homo sapien
tattaattaatgaaggactcccctg

SEQ ID NO: 2656313 - DNA, 25 bp, Homo sapien
cacatactcgtttcctgacagtctt

SEQ ID NO: 2656314 - DNA, 25 bp, Homo sapien
acacatactcgtttcctgacagtct

SEQ ID NO: 2656315 - DNA, 25 bp, Homo sapien
acatactcgtttcctgacagtcttc

SEQ ID NO: 2656316 - DNA, 25 bp, Homo sapien
aacacatactcgtttcctgacagtc

SEQ ID NO: 2656317 - DNA, 25 bp, Homo sapien
cattgatggttattggcattgcaag

SEQ ID NO: 2656318 - DNA, 25 bp, Homo sapien
gttattggcattgcaaggtgactgt

SEQ ID NO: 2656319 - DNA, 25 bp, Homo sapien
ctctcctcattatcaagtaattgag

SEQ ID NO: 2656320 - DNA, 25 bp, Homo sapien
cttttatgcgtaatggcttccaatt

SEQ ID NO: 2656321 - DNA, 25 bp, Homo sapien
ttcacatactccaaaccgagagaag

SEQ ID NO: 2656322 - DNA, 25 bp, Homo sapien
ggtagttggcttcgatcacttggaa

SEQ ID NO: 2656323 - DNA, 25 bp, Homo sapien
caggcccgaagagtggtttcagaac

SEQ ID NO: 2656324 - DNA, 25 bp, Homo sapien
cgtgcaggacgtcggcagcatgggt

SEQ ID NO: 2656325 - DNA, 25 bp, Homo sapien
ttttcagaacgtttttagccagctg

SEQ ID NO: 2656326 - DNA, 25 bp, Homo sapien
gaggcggcctcggacatgcagcatc

SEQ ID NO: 2656327 - DNA, 25 bp, Homo sapien
gacatgcagcatcgctttactgtgc

SEQ ID NO: 2656328 - DNA, 25 bp, Homo sapien
cttctgacctagatgtggagaggcg

SEQ ID NO: 2656329 - DNA, 25 bp, Homo sapien
ctgggatatggggaggcaaggttga

SEQ ID NO: 2656330 - DNA, 25 bp, Homo sapien
tatggggaggcaaggttgagcatta

SEQ ID NO: 2656331 - DNA, 25 bp, Homo sapien
ggaggcaaggttgagcattacccac

SEQ ID NO: 2656332 - DNA, 25 bp, Homo sapien
gatatggggaggcaaggttgagcat

SEQ ID NO: 2656333 - DNA, 25 bp, Homo sapien
tgcctgcattgcagaggaaagagtt

SEQ ID NO: 2656334 - DNA, 25 bp, Homo sapien
gagttggtccttcccgggtgatcca

SEQ ID NO: 2656335 - DNA, 25 bp, Homo sapien
tggtgtccttgaccgtgagctggaa

SEQ ID NO: 2656336 - DNA, 25 bp, Homo sapien
atccacgtcatggactgtggcagca

SEQ ID NO: 2656337 - DNA, 25 bp, Homo sapien
ggtacagtgggacagctaatatttt

SEQ ID NO: 2656338 - DNA, 25 bp, Homo sapien
ttcacaaacttgagcacaggagccc

SEQ ID NO: 2656339 - DNA, 25 bp, Homo sapien
accacttaaacttcacaaacttgag

SEQ ID NO: 2656340 - DNA, 25 bp, Homo sapien
gggcaaggttattttatcatctggt

SEQ ID NO: 2656341 - DNA, 25 bp, Homo sapien
cactgcactctgtgcaaacacaggg

SEQ ID NO: 2656342 - DNA, 25 bp, Homo sapien
catggtggacgtttatctgacaagg

SEQ ID NO: 2656343 - DNA, 25 bp, Homo sapien
aacacagggattcccattgcacagg

SEQ ID NO: 2656344 - DNA, 25 bp, Homo sapien
catcaaaacagtaaggtggcaggaa

SEQ ID NO: 2656345 - DNA, 25 bp, Homo sapien
ctctgttgccaaaaccatgtcaata

SEQ ID NO: 2656346 - DNA, 25 bp, Homo sapien
catgtcaataatagcctggcgcagc

SEQ ID NO: 2656347 - DNA, 25 bp, Homo sapien
ctggcgcagcgttcgataatggttc

SEQ ID NO: 2656348 - DNA, 25 bp, Homo sapien
accatgtcaataatagcctggcgca

SEQ ID NO: 2656349 - DNA, 25 bp, Homo sapien
gttgcattcacagtcgctgccttca

SEQ ID NO: 2656350 - DNA, 25 bp, Homo sapien
tgtgcaaaatactcctcagagatcc

SEQ ID NO: 2656351 - DNA, 25 bp, Homo sapien
gcccattcaatgcacaggtccaagg

SEQ ID NO: 2656352 - DNA, 25 bp, Homo sapien
catcatgcgtttgatcaggatttgg

SEQ ID NO: 2656353 - DNA, 25 bp, Homo sapien
ggtcctcagacttacgtaagtcagc

SEQ ID NO: 2656354 - DNA, 25 bp, Homo sapien
taagtcagctgagctacactgacta

SEQ ID NO: 2656355 - DNA, 25 bp, Homo sapien
aagaaataggctcagcaaggtcctc

SEQ ID NO: 2656356 - DNA, 25 bp, Homo sapien
ccctgtgaaaatgggtcattatcca

SEQ ID NO: 2656357 - DNA, 25 bp, Homo sapien
gaagtagtcaatgaaagagatctga

SEQ ID NO: 2656358 - DNA, 25 bp, Homo sapien
gcatcaccacaggtagtccctgtct

SEQ ID NO: 2656359 - DNA, 25 bp, Homo sapien
agacttggggatgctacaggtattc

SEQ ID NO: 2656360 - DNA, 25 bp, Homo sapien
gctacaggtattccggtcaaacact

SEQ ID NO: 2656361 - DNA, 25 bp, Homo sapien
cattaaacactagtttctgaaatgc

SEQ ID NO: 2656362 - DNA, 25 bp, Homo sapien
ttttgaaaagctgcttatcagtgac

SEQ ID NO: 2656363 - DNA, 25 bp, Homo sapien
ttgaaaagctgcttatcagtgacat

SEQ ID NO: 2656364 - DNA, 25 bp, Homo sapien
gtcattaaacactagtttctgaaat

SEQ ID NO: 2656365 - DNA, 25 bp, Homo sapien
tgtcttccagtgtttgtagttgtca

SEQ ID NO: 2656366 - DNA, 25 bp, Homo sapien
tagctgtcagatggaagcctcaaac

SEQ ID NO: 2656367 - DNA, 25 bp, Homo sapien
actttaggtcatctagtgtcttcca

SEQ ID NO: 2656368 - DNA, 25 bp, Homo sapien
caaatgttgcatcagggctggcaga

SEQ ID NO: 2656369 - DNA, 25 bp, Homo sapien
cacagtgtcctttgtcggtcaagag

SEQ ID NO: 2656370 - DNA, 25 bp, Homo sapien
tgtcctttgtcggtcaagaggcccc

SEQ ID NO: 2656371 - DNA, 25 bp, Homo sapien
ctctcgtttacgctactgtgattca

SEQ ID NO: 2656372 - DNA, 25 bp, Homo sapien
tcgtttacgctactgtgattcacag

SEQ ID NO: 2656373 - DNA, 25 bp, Homo sapien
taacttaggtgtcataccatcggcc

SEQ ID NO: 2656374 - DNA, 25 bp, Homo sapien
tgataccagtctagagagggcaccc

SEQ ID NO: 2656375 - DNA, 25 bp, Homo sapien
tagttacagtgaaccagctccatgg

SEQ ID NO: 2656376 - DNA, 25 bp, Homo sapien
taagctacttagtcaccatcctggg

SEQ ID NO: 2656377 - DNA, 25 bp, Homo sapien
tggtcattatacaggcgtacctcag

SEQ ID NO: 2656378 - DNA, 25 bp, Homo sapien
taagctacctcaattacagaagact

SEQ ID NO: 2656379 - DNA, 25 bp, Homo sapien
gactttctcccattattcacgtgct

SEQ ID NO: 2656380 - DNA, 25 bp, Homo sapien
tagaaattctgcattggcccataca

SEQ ID NO: 2656381 - DNA, 25 bp, Homo sapien
caccaagcagctctaaaaacaggaa

SEQ ID NO: 2656382 - DNA, 25 bp, Homo sapien
tgtagtgcccagtatcaccaagcag

SEQ ID NO: 2656383 - DNA, 25 bp, Homo sapien
tgaggcccagtgcagtaaggccttg

SEQ ID NO: 2656384 - DNA, 25 bp, Homo sapien
gagtagaccagtggcataatgttac

SEQ ID NO: 2656385 - DNA, 25 bp, Homo sapien
tttgaacctagatccttgtgaaagg

SEQ ID NO: 2656386 - DNA, 25 bp, Homo sapien
gagccatgggctaaatgggtactag

SEQ ID NO: 2656387 - DNA, 25 bp, Homo sapien
gaacatgttgcttctcaggtcctag

SEQ ID NO: 2656388 - DNA, 25 bp, Homo sapien
ttgtggacctaccaaccaggaacat

SEQ ID NO: 2656389 - DNA, 25 bp, Homo sapien
gatgattctaggacaggtgcttgca

SEQ ID NO: 2656390 - DNA, 25 bp, Homo sapien
tcacgtgaggaatgagcaagggact

SEQ ID NO: 2656391 - DNA, 25 bp, Homo sapien
gaatctctggtgaaaacaagaaggc

SEQ ID NO: 2656392 - DNA, 25 bp, Homo sapien
gggactggagtaacatgaccttgat

SEQ ID NO: 2656393 - DNA, 25 bp, Homo sapien
taagggaccgttagttattgatagc

SEQ ID NO: 2656394 - DNA, 25 bp, Homo sapien
gagactagatcactaagagttgtag

SEQ ID NO: 2656395 - DNA, 25 bp, Homo sapien
gagttgtagccctacaaattatcta

SEQ ID NO: 2656396 - DNA, 25 bp, Homo sapien
ggatagcatccccattgagtaaatg

SEQ ID NO: 2656397 - DNA, 25 bp, Homo sapien
ccagttgcttgggattgtacatcac

SEQ ID NO: 2656398 - DNA, 25 bp, Homo sapien
gccccagggcaaccttagaattgta

SEQ ID NO: 2656399 - DNA, 25 bp, Homo sapien
tcttgcagtacataggcacgttagc

SEQ ID NO: 2656400 - DNA, 25 bp, Homo sapien
cacgttagccatgatgtggatgtca

SEQ ID NO: 2656401 - DNA, 25 bp, Homo sapien
gtgatactaccagacaagttcagag

SEQ ID NO: 2656402 - DNA, 25 bp, Homo sapien
gggcagaactggcaagtctgactgc

SEQ ID NO: 2656403 - DNA, 25 bp, Homo sapien
ccagtgtagggcagaactggcaagt

SEQ ID NO: 2656404 - DNA, 25 bp, Homo sapien
gaactggcaagtctgactgcagagt

SEQ ID NO: 2656405 - DNA, 25 bp, Homo sapien
tgtagggcagaactggcaagtctga

SEQ ID NO: 2656406 - DNA, 25 bp, Homo sapien
tttagaactgaatggacacactcaa

SEQ ID NO: 2656407 - DNA, 25 bp, Homo sapien
agaactgaatggacacactcaaaag

SEQ ID NO: 2656408 - DNA, 25 bp, Homo sapien
aacttttagaactgaatggacacac

SEQ ID NO: 2656409 - DNA, 25 bp, Homo sapien
gctattattacatttccttccttgg

SEQ ID NO: 2656410 - DNA, 25 bp, Homo sapien
atggaattgtagttgtgtggaatgc

SEQ ID NO: 2656411 - DNA, 25 bp, Homo sapien
atgatggaattgtagttgtgtggaa

SEQ ID NO: 2656412 - DNA, 25 bp, Homo sapien
tgatggaattgtagttgtgtggaat

SEQ ID NO: 2656413 - DNA, 25 bp, Homo sapien
gatggaattgtagttgtgtggaatg

SEQ ID NO: 2656414 - DNA, 25 bp, Homo sapien
gcaatagtttactgagcatgatgtt

SEQ ID NO: 2656415 - DNA, 25 bp, Homo sapien
tgcaatagtttactgagcatgatgt

SEQ ID NO: 2656416 - DNA, 25 bp, Homo sapien
caatagtttactgagcatgatgttt

SEQ ID NO: 2656417 - DNA, 25 bp, Homo sapien
aatagtttactgagcatgatgtttt

SEQ ID NO: 2656418 - DNA, 25 bp, Homo sapien
aacccagaatccctacactgaactg

SEQ ID NO: 2656419 - DNA, 25 bp, Homo sapien
gaaggctcatcatgatattgtacga

SEQ ID NO: 2656420 - DNA, 25 bp, Homo sapien
catgatattgtacgatttctggtac

SEQ ID NO: 2656421 - DNA, 25 bp, Homo sapien
gaactgctagtactgaaggctcatc

SEQ ID NO: 2656422 - DNA, 25 bp, Homo sapien
tttatggggttcagatctgaaagga

SEQ ID NO: 2656423 - DNA, 25 bp, Homo sapien
taattgggaacagggcaaagtgacc

SEQ ID NO: 2656424 - DNA, 25 bp, Homo sapien
actctttaacagctataatgtactc

SEQ ID NO: 2656425 - DNA, 25 bp, Homo sapien
ctataatgtactctgtaataattgg

SEQ ID NO: 2656426 - DNA, 25 bp, Homo sapien
tatgagaaacatccatacggccacc

SEQ ID NO: 2656427 - DNA, 25 bp, Homo sapien
acggccaccctttgcataaatatag

SEQ ID NO: 2656428 - DNA, 25 bp, Homo sapien
taaggtctgacatgacttttgacat

SEQ ID NO: 2656429 - DNA, 25 bp, Homo sapien
tagcatgtttctccccagagtgaca

SEQ ID NO: 2656430 - DNA, 25 bp, Homo sapien
tcccccagtagcacagggacaatgg

SEQ ID NO: 2656431 - DNA, 25 bp, Homo sapien
tgtcctcaacttgcctccgcaagct

SEQ ID NO: 2656432 - DNA, 25 bp, Homo sapien
gtcctttgcacggagactctagagt

SEQ ID NO: 2656433 - DNA, 25 bp, Homo sapien
cgcaagctccgtggctgcgaccctg

SEQ ID NO: 2656434 - DNA, 25 bp, Homo sapien
tggtgaatgcggcaatctgctctgc

SEQ ID NO: 2656435 - DNA, 25 bp, Homo sapien
tgatgtaaaaataagtagggcccag

SEQ ID NO: 2656436 - DNA, 25 bp, Homo sapien
cctctggggaattcggtgcaggtca

SEQ ID NO: 2656437 - DNA, 25 bp, Homo sapien
aggtcagcgaggctcttttggtgaa

SEQ ID NO: 2656438 - DNA, 25 bp, Homo sapien
agcatgtcattgtttgcaacctgag

SEQ ID NO: 2656439 - DNA, 25 bp, Homo sapien
taaagatagcataaataagagtact

SEQ ID NO: 2656440 - DNA, 25 bp, Homo sapien
ttttaaagatagcataaataagagt

SEQ ID NO: 2656441 - DNA, 25 bp, Homo sapien
gtgaagcatgtcattgtttgcaacc

SEQ ID NO: 2656442 - DNA, 25 bp, Homo sapien
ctagattggaacaattaatttgctc

SEQ ID NO: 2656443 - DNA, 25 bp, Homo sapien
tgttcatatttcaccctttgtcgat

SEQ ID NO: 2656444 - DNA, 25 bp, Homo sapien
tatttcaccctttgtcgatgatttc

SEQ ID NO: 2656445 - DNA, 25 bp, Homo sapien
tttcattgcttactagattggaaca

SEQ ID NO: 2656446 - DNA, 25 bp, Homo sapien
cagccagcagtcaagaccaaagtct

SEQ ID NO: 2656447 - DNA, 25 bp, Homo sapien
atccagccagcagtcaagaccaaag

SEQ ID NO: 2656448 - DNA, 25 bp, Homo sapien
gccagcagtcaagaccaaagtcttc

SEQ ID NO: 2656449 - DNA, 25 bp, Homo sapien
taagaatccagccagcagtcaagac

SEQ ID NO: 2656450 - DNA, 25 bp, Homo sapien
aaagcttcagaatctaccatggagg

SEQ ID NO: 2656451 - DNA, 25 bp, Homo sapien
taccatggaggaagagagtgctctc

SEQ ID NO: 2656452 - DNA, 25 bp, Homo sapien
tgaataaaactacggttgacacttg

SEQ ID NO: 2656453 - DNA, 25 bp, Homo sapien
cttgctcctggacgagagagtgaaa

SEQ ID NO: 2656454 - DNA, 25 bp, Homo sapien
catggttccagccggaaaaagagga

SEQ ID NO: 2656455 - DNA, 25 bp, Homo sapien
ccggaaaaagaggaagttggcgcat

SEQ ID NO: 2656456 - DNA, 25 bp, Homo sapien
cagccggaaaaagaggaagttggcg

SEQ ID NO: 2656457 - DNA, 25 bp, Homo sapien
ctccatggttccagccggaaaaaga

SEQ ID NO: 2656458 - DNA, 25 bp, Homo sapien
tcttcagctctacgaaattccttcg

SEQ ID NO: 2656459 - DNA, 25 bp, Homo sapien
tcagctctacgaaattccttcgctt

SEQ ID NO: 2656460 - DNA, 25 bp, Homo sapien
cttcagctctacgaaattccttcgc

SEQ ID NO: 2656461 - DNA, 25 bp, Homo sapien
agctctacgaaattccttcgctttt

SEQ ID NO: 2656462 - DNA, 25 bp, Homo sapien
ctttcgaagcatcttttgggcaaac

SEQ ID NO: 2656463 - DNA, 25 bp, Homo sapien
tcttgccatcctcgccactcgaatt

SEQ ID NO: 2656464 - DNA, 25 bp, Homo sapien
ttttcttgccatcctcgccactcga

SEQ ID NO: 2656465 - DNA, 25 bp, Homo sapien
catcctcgccactcgaatttcagtt

SEQ ID NO: 2656466 - DNA, 25 bp, Homo sapien
tgccatcctcgccactcgaatttca

SEQ ID NO: 2656467 - DNA, 25 bp, Homo sapien
gctcacagcactgatacctctgatt

SEQ ID NO: 2656468 - DNA, 25 bp, Homo sapien
ctttgggctcacagcactgatacct

SEQ ID NO: 2656469 - DNA, 25 bp, Homo sapien
tgggctcacagcactgatacctctg

SEQ ID NO: 2656470 - DNA, 25 bp, Homo sapien
ctcacagcactgatacctctgattc

SEQ ID NO: 2656471 - DNA, 25 bp, Homo sapien
aatcctccatgcagataatgccgta

SEQ ID NO: 2656472 - DNA, 25 bp, Homo sapien
tccacctcgtggagaagacaatttg

SEQ ID NO: 2656473 - DNA, 25 bp, Homo sapien
caaatcctccatgcagataatgccg

SEQ ID NO: 2656474 - DNA, 25 bp, Homo sapien
cagattggggtacccccatgctata

SEQ ID NO: 2656475 - DNA, 25 bp, Homo sapien
ttcaatttgagagcaggtactgttt

SEQ ID NO: 2656476 - DNA, 25 bp, Homo sapien
tactgtttattaaccaaccagctta

SEQ ID NO: 2656477 - DNA, 25 bp, Homo sapien
ttagaaaaataatcatggtagacac

SEQ ID NO: 2656478 - DNA, 25 bp, Homo sapien
ctgtttattaaccaaccagcttaga

SEQ ID NO: 2656479 - DNA, 25 bp, Homo sapien
agtaaatcaatagccagtgaagtgt

SEQ ID NO: 2656480 - DNA, 25 bp, Homo sapien
acttacaatagtggaaatgcgggac

SEQ ID NO: 2656481 - DNA, 25 bp, Homo sapien
ctgattttgtgccaataaacaaagt

SEQ ID NO: 2656482 - DNA, 25 bp, Homo sapien
tatcttgcaatgaagtataaccact

SEQ ID NO: 2656483 - DNA, 25 bp, Homo sapien
tcaagtcagcattgtgttacggtgg

SEQ ID NO: 2656484 - DNA, 25 bp, Homo sapien
ctctgctgaagagttgctgccactg

SEQ ID NO: 2656485 - DNA, 25 bp, Homo sapien
tacggtggtgaaaaggtaagctcat

SEQ ID NO: 2656486 - DNA, 25 bp, Homo sapien
tagcctccttgtaataggacccagg

SEQ ID NO: 2656487 - DNA, 25 bp, Homo sapien
tctgcatgtgctggtcaaatccaaa

SEQ ID NO: 2656488 - DNA, 25 bp, Homo sapien
tgcatgtgctggtcaaatccaaacc

SEQ ID NO: 2656489 - DNA, 25 bp, Homo sapien
ctgcatgtgctggtcaaatccaaac

SEQ ID NO: 2656490 - DNA, 25 bp, Homo sapien
cgaggaagaggtgatctgacccatt

SEQ ID NO: 2656491 - DNA, 25 bp, Homo sapien
gcttctcaggaggaacgtgacagtg

SEQ ID NO: 2656492 - DNA, 25 bp, Homo sapien
tgtggtggtcctgtcgtccctcgtg

SEQ ID NO: 2656493 - DNA, 25 bp, Homo sapien
tggctggagtagactaaagcagtca

SEQ ID NO: 2656494 - DNA, 25 bp, Homo sapien
atgggcctgtccaacagcctggcgg

SEQ ID NO: 2656495 - DNA, 25 bp, Homo sapien
acagcctggcgggttccaacggcgc

SEQ ID NO: 2656496 - DNA, 25 bp, Homo sapien
cggccccagcaacgtctccggttcg

SEQ ID NO: 2656497 - DNA, 25 bp, Homo sapien
tccccggacagcagcgacgtgtggc

SEQ ID NO: 2656498 - DNA, 25 bp, Homo sapien
gtattctagactgcaacaccgttca

SEQ ID NO: 2656499 - DNA, 25 bp, Homo sapien
caggaagaaagtggtaggcgacggc

SEQ ID NO: 2656500 - DNA, 25 bp, Homo sapien
gggagtattctagactgcaacaccg

SEQ ID NO: 2656501 - DNA, 25 bp, Homo sapien
caggcacggtagaaaggcgagggcc

SEQ ID NO: 2656502 - DNA, 25 bp, Homo sapien
cgccgacactgggatacgcagcaat

SEQ ID NO: 2656503 - DNA, 25 bp, Homo sapien
tcattaatccgttgtgccaccagct

SEQ ID NO: 2656504 - DNA, 25 bp, Homo sapien
tagagccctgttgcctcattaatcc

SEQ ID NO: 2656505 - DNA, 25 bp, Homo sapien
aagagacgagacctgtttatccatc

SEQ ID NO: 2656506 - DNA, 25 bp, Homo sapien
tgggaaccgtttagtcacagacacc

SEQ ID NO: 2656507 - DNA, 25 bp, Homo sapien
caaacatttcgggattcactggcac

SEQ ID NO: 2656508 - DNA, 25 bp, Homo sapien
tcaaaacataatcccggtgcggcgt

SEQ ID NO: 2656509 - DNA, 25 bp, Homo sapien
taagaccgctaacagctcaattggg

SEQ ID NO: 2656510 - DNA, 25 bp, Homo sapien
catttgctggattccaatgagatct

SEQ ID NO: 2656511 - DNA, 25 bp, Homo sapien
cacggctggctgatcgaaatgaacc

SEQ ID NO: 2656512 - DNA, 25 bp, Homo sapien
gaattcggcccagagttcacggctg

SEQ ID NO: 2656513 - DNA, 25 bp, Homo sapien
gagatctaggctttaatacagctcc

SEQ ID NO: 2656514 - DNA, 25 bp, Homo sapien
cttaatagggggacaaactgagagt

SEQ ID NO: 2656515 - DNA, 25 bp, Homo sapien
aatagggggacaaactgagagtatt

SEQ ID NO: 2656516 - DNA, 25 bp, Homo sapien
atagggggacaaactgagagtattt

SEQ ID NO: 2656517 - DNA, 25 bp, Homo sapien
taatagggggacaaactgagagtat

SEQ ID NO: 2656518 - DNA, 25 bp, Homo sapien
tatgaacaaaaatagtgtgctgtaa

SEQ ID NO: 2656519 - DNA, 25 bp, Homo sapien
agaatggccctgtcacctgccacat

SEQ ID NO: 2656520 - DNA, 25 bp, Homo sapien
gtaattccattgaccgtgtccccca

SEQ ID NO: 2656521 - DNA, 25 bp, Homo sapien
gcacagtcaggcttgcctttcaata

SEQ ID NO: 2656522 - DNA, 25 bp, Homo sapien
cacggcgtggctttattaccttaag

SEQ ID NO: 2656523 - DNA, 25 bp, Homo sapien
tttcgtagtctaccagtgcgctggg

SEQ ID NO: 2656524 - DNA, 25 bp, Homo sapien
tgctacacccaggtttcacggcgtg

SEQ ID NO: 2656525 - DNA, 25 bp, Homo sapien
aagagcaaataaggcgaatgagcgc

SEQ ID NO: 2656526 - DNA, 25 bp, Homo sapien
taggtctcggaattctcctcccagg

SEQ ID NO: 2656527 - DNA, 25 bp, Homo sapien
tggtgtggccaataccctgcattca

SEQ ID NO: 2656528 - DNA, 25 bp, Homo sapien
cagctcagaagaaactggtgtggcc

SEQ ID NO: 2656529 - DNA, 25 bp, Homo sapien
cacataggccgcgttggtagcagct

SEQ ID NO: 2656530 - DNA, 25 bp, Homo sapien
cttcacattaactattacacattca

SEQ ID NO: 2656531 - DNA, 25 bp, Homo sapien
tgatttcgtcccattgttattactc

SEQ ID NO: 2656532 - DNA, 25 bp, Homo sapien
gttattactctgatgtgtcttcaca

SEQ ID NO: 2656533 - DNA, 25 bp, Homo sapien
agagatggataatcctttgatttcg

SEQ ID NO: 2656534 - DNA, 25 bp, Homo sapien
ggaataaaactctggtaaatacata

SEQ ID NO: 2656535 - DNA, 25 bp, Homo sapien
ccatgatcatgtgggaaatgcctta

SEQ ID NO: 2656536 - DNA, 25 bp, Homo sapien
caggcgctacccaggtggattcaga

SEQ ID NO: 2656537 - DNA, 25 bp, Homo sapien
aacagcaatgggcctgaccggcact

SEQ ID NO: 2656538 - DNA, 25 bp, Homo sapien
tatatttctttcggctaaatcacgg

SEQ ID NO: 2656539 - DNA, 25 bp, Homo sapien
aaatcacggtttaatcgagcccaca

SEQ ID NO: 2656540 - DNA, 25 bp, Homo sapien
ttaaggaaatcgctcttcaatgctg

SEQ ID NO: 2656541 - DNA, 25 bp, Homo sapien
ggaaatcgctcttcaatgctgatta

SEQ ID NO: 2656542 - DNA, 25 bp, Homo sapien
cagctgttccctacattcagactta

SEQ ID NO: 2656543 - DNA, 25 bp, Homo sapien
tgttccctacattcagacttattgg

SEQ ID NO: 2656544 - DNA, 25 bp, Homo sapien
cattcagacttattggtagaactcc

SEQ ID NO: 2656545 - DNA, 25 bp, Homo sapien
tattggtagaactcctctagagatt

SEQ ID NO: 2656546 - DNA, 25 bp, Homo sapien
ctgaactactactgcaggttgttcc

SEQ ID NO: 2656547 - DNA, 25 bp, Homo sapien
taactttatgctctgtggaccgccc

SEQ ID NO: 2656548 - DNA, 25 bp, Homo sapien
gagctgcttgtaggaccattggcat

SEQ ID NO: 2656549 - DNA, 25 bp, Homo sapien
tgtaggaccattggcatcaggactg

SEQ ID NO: 2656550 - DNA, 25 bp, Homo sapien
caggactggttgtaactttatgctc

SEQ ID NO: 2656551 - DNA, 25 bp, Homo sapien
catgccaagtagcacctccgaggtt

SEQ ID NO: 2656552 - DNA, 25 bp, Homo sapien
tgcttcatgccaagtagcacctccg

SEQ ID NO: 2656553 - DNA, 25 bp, Homo sapien
ggagcagttgcttcatgccaagtag

SEQ ID NO: 2656554 - DNA, 25 bp, Homo sapien
caagtagcacctccgaggtttccgg

SEQ ID NO: 2656555 - DNA, 25 bp, Homo sapien
aggctccaaattgaaaacgggactg

SEQ ID NO: 2656556 - DNA, 25 bp, Homo sapien
ggactgtgagaatctcaaagggctg

SEQ ID NO: 2656557 - DNA, 25 bp, Homo sapien
ccaaattgaaaacgggactgtgaga

SEQ ID NO: 2656558 - DNA, 25 bp, Homo sapien
aattgaaaacgggactgtgagaatc

SEQ ID NO: 2656559 - DNA, 25 bp, Homo sapien
catcccctcatgaaaggaggtgata

SEQ ID NO: 2656560 - DNA, 25 bp, Homo sapien
ttgcaccatcccctcatgaaaggag

SEQ ID NO: 2656561 - DNA, 25 bp, Homo sapien
caccatcccctcatgaaaggaggtg

SEQ ID NO: 2656562 - DNA, 25 bp, Homo sapien
cccctcatgaaaggaggtgatattt

SEQ ID NO: 2656563 - DNA, 25 bp, Homo sapien
ctgaaacttttctcgtatggggtgg

SEQ ID NO: 2656564 - DNA, 25 bp, Homo sapien
cagtgaagttagaagcctgaaactt

SEQ ID NO: 2656565 - DNA, 25 bp, Homo sapien
ttcagtgaagttagaagcctgaaac

SEQ ID NO: 2656566 - DNA, 25 bp, Homo sapien
agcctgaaacttttctcgtatgggg

SEQ ID NO: 2656567 - DNA, 25 bp, Homo sapien
ggtgcaatctcagctcatcacagcc

SEQ ID NO: 2656568 - DNA, 25 bp, Homo sapien
cagctcatcacagcctccgcctcct

SEQ ID NO: 2656569 - DNA, 25 bp, Homo sapien
atggtgcaatctcagctcatcacag

SEQ ID NO: 2656570 - DNA, 25 bp, Homo sapien
tgcaatctcagctcatcacagcctc

SEQ ID NO: 2656571 - DNA, 25 bp, Homo sapien
cagaaatgagctgaaccgctacggt

SEQ ID NO: 2656572 - DNA, 25 bp, Homo sapien
gcaaataaatggagtaaagacagga

SEQ ID NO: 2656573 - DNA, 25 bp, Homo sapien
ctgacttggtccaaattaggattaa

SEQ ID NO: 2656574 - DNA, 25 bp, Homo sapien
gagattagtagaatgagcagaaatg

SEQ ID NO: 2656575 - DNA, 25 bp, Homo sapien
acccagcaactgcagtcggaaaaga

SEQ ID NO: 2656576 - DNA, 25 bp, Homo sapien
cattacggaggaacggccccataat

SEQ ID NO: 2656577 - DNA, 25 bp, Homo sapien
gagcaaagcaacacacattacggag

SEQ ID NO: 2656578 - DNA, 25 bp, Homo sapien
tgctgaggcatacgcggctgatgtt

SEQ ID NO: 2656579 - DNA, 25 bp, Homo sapien
aatgggctcgcttctcactgttggt

SEQ ID NO: 2656580 - DNA, 25 bp, Homo sapien
gaaggccacttgtcagtatatatca

SEQ ID NO: 2656581 - DNA, 25 bp, Homo sapien
tacaatgggcatagatgaaaacacc

SEQ ID NO: 2656582 - DNA, 25 bp, Homo sapien
gataggacattcgtagaaggccact

SEQ ID NO: 2656583 - DNA, 25 bp, Homo sapien
ctctgcagtctccagaatcaaggat

SEQ ID NO: 2656584 - DNA, 25 bp, Homo sapien
tgcagtctccagaatcaaggatcat

SEQ ID NO: 2656585 - DNA, 25 bp, Homo sapien
tctctctgcagtctccagaatcaag

SEQ ID NO: 2656586 - DNA, 25 bp, Homo sapien
tctgcagtctccagaatcaaggatc

SEQ ID NO: 2656587 - DNA, 25 bp, Homo sapien
aaaaaatattatgtgattaattggc

SEQ ID NO: 2656588 - DNA, 25 bp, Homo sapien
aatattatgtgattaattggctata

SEQ ID NO: 2656589 - DNA, 25 bp, Homo sapien
aaatagttactcaaagcaagatgtt

SEQ ID NO: 2656590 - DNA, 25 bp, Homo sapien
atagttactcaaagcaagatgtttt

SEQ ID NO: 2656591 - DNA, 25 bp, Homo sapien
acccagctggaatgcaaatggtgcc

SEQ ID NO: 2656592 - DNA, 25 bp, Homo sapien
tctaataatgaggaaaaacaaggag

SEQ ID NO: 2656593 - DNA, 25 bp, Homo sapien
aaacaaatcatctaataatgaggaa

SEQ ID NO: 2656594 - DNA, 25 bp, Homo sapien
gacccagctggaatgcaaatggtgc

SEQ ID NO: 2656595 - DNA, 25 bp, Homo sapien
ggtagtgcagtcctgtaatttgctt

SEQ ID NO: 2656596 - DNA, 25 bp, Homo sapien
ggtttgctcgatgcaattcccagct

SEQ ID NO: 2656597 - DNA, 25 bp, Homo sapien
gctggggacagttccaagttatagg

SEQ ID NO: 2656598 - DNA, 25 bp, Homo sapien
tgcttaaattcctgtaaaccaagaa

SEQ ID NO: 2656599 - DNA, 25 bp, Homo sapien
cctcggtggcccaaggtactgcttg

SEQ ID NO: 2656600 - DNA, 25 bp, Homo sapien
gctacatgttgggatacagtggtga

SEQ ID NO: 2656601 - DNA, 25 bp, Homo sapien
taactgctgtgcgtaaggctttgct

SEQ ID NO: 2656602 - DNA, 25 bp, Homo sapien
tactggcccaaggtacctcggtggc

SEQ ID NO: 2656603 - DNA, 25 bp, Homo sapien
cagtggagcagcgaaggcgaggctc

SEQ ID NO: 2656604 - DNA, 25 bp, Homo sapien
agctggtggcaggtgtggactggca

SEQ ID NO: 2656605 - DNA, 25 bp, Homo sapien
ctggtggcaggtgtggactggcagt

SEQ ID NO: 2656606 - DNA, 25 bp, Homo sapien
ggtggcaggtgtggactggcagtgg

SEQ ID NO: 2656607 - DNA, 25 bp, Homo sapien
cggcattgtcgcccgtgaagctggc

SEQ ID NO: 2656608 - DNA, 25 bp, Homo sapien
attgtcgcccgtgaagctggccttg

SEQ ID NO: 2656609 - DNA, 25 bp, Homo sapien
cccgggcggcattgtcgcccgtgaa

SEQ ID NO: 2656610 - DNA, 25 bp, Homo sapien
aagactgcccgggcggcattgtcgc

SEQ ID NO: 2656611 - DNA, 25 bp, Homo sapien
tcgtcgcccacataggaatccttct

SEQ ID NO: 2656612 - DNA, 25 bp, Homo sapien
cataggaatccttctgacccatgcc

SEQ ID NO: 2656613 - DNA, 25 bp, Homo sapien
aggaatccttctgacccatgcccac

SEQ ID NO: 2656614 - DNA, 25 bp, Homo sapien
ctcgtcgcccacataggaatccttc

SEQ ID NO: 2656615 - DNA, 25 bp, Homo sapien
gacagcatagtctggatggccaagt

SEQ ID NO: 2656616 - DNA, 25 bp, Homo sapien
catagtctggatggccaagtacatg

SEQ ID NO: 2656617 - DNA, 25 bp, Homo sapien
cagcatagtctggatggccaagtac

SEQ ID NO: 2656618 - DNA, 25 bp, Homo sapien
ggacagcatagtctggatggccaag

SEQ ID NO: 2656619 - DNA, 25 bp, Homo sapien
cgtagatgggcacagtgtgggtgac

SEQ ID NO: 2656620 - DNA, 25 bp, Homo sapien
ctcgtagatgggcacagtgtgggtg

SEQ ID NO: 2656621 - DNA, 25 bp, Homo sapien
ccctcgtagatgggcacagtgtggg

SEQ ID NO: 2656622 - DNA, 25 bp, Homo sapien
tcgtagatgggcacagtgtgggtga

SEQ ID NO: 2656623 - DNA, 25 bp, Homo sapien
tccagaagcaggatggcgttgggga

SEQ ID NO: 2656624 - DNA, 25 bp, Homo sapien
ccaggtccagaagcaggatggcgtt

SEQ ID NO: 2656625 - DNA, 25 bp, Homo sapien
aggtccagaagcaggatggcgttgg

SEQ ID NO: 2656626 - DNA, 25 bp, Homo sapien
cagaagcaggatggcgttggggagg

SEQ ID NO: 2656627 - DNA, 25 bp, Homo sapien
tgctcgaagtccaggacgaggtagc

SEQ ID NO: 2656628 - DNA, 25 bp, Homo sapien
cgaagtccaggacgaggtagcacag

SEQ ID NO: 2656629 - DNA, 25 bp, Homo sapien
tcctgctcgaagtccaggacgaggt

SEQ ID NO: 2656630 - DNA, 25 bp, Homo sapien
gtccaggacgaggtagcacagcttc

SEQ ID NO: 2656631 - DNA, 25 bp, Homo sapien
ctgttgggcagctggtagctcttct

SEQ ID NO: 2656632 - DNA, 25 bp, Homo sapien
gacctggctgttgggcagctggtag

SEQ ID NO: 2656633 - DNA, 25 bp, Homo sapien
gctgttgggcagctggtagctcttc

SEQ ID NO: 2656634 - DNA, 25 bp, Homo sapien
ctggctgttgggcagctggtagctc

SEQ ID NO: 2656635 - DNA, 25 bp, Homo sapien
ctggaagagcgcctcggggcagcag

SEQ ID NO: 2656636 - DNA, 25 bp, Homo sapien
aaggctggaagagcgcctcggggca

SEQ ID NO: 2656637 - DNA, 25 bp, Homo sapien
aggaaggctggaagagcgcctcggg

SEQ ID NO: 2656638 - DNA, 25 bp, Homo sapien
gctggaagagcgcctcggggcagca

SEQ ID NO: 2656639 - DNA, 25 bp, Homo sapien
ttgcggatgtccaagtcacacttca

SEQ ID NO: 2656640 - DNA, 25 bp, Homo sapien
atagtggtgccaccagacagcactg

SEQ ID NO: 2656641 - DNA, 25 bp, Homo sapien
accagacagcactgtgctggtgtac

SEQ ID NO: 2656642 - DNA, 25 bp, Homo sapien
tgctggtgtacaggtctttgcggat

SEQ ID NO: 2656643 - DNA, 25 bp, Homo sapien
gatcttgatcttcgtcctgctgggc

SEQ ID NO: 2656644 - DNA, 25 bp, Homo sapien
atcttcgtcctgctgggcgccaggg

SEQ ID NO: 2656645 - DNA, 25 bp, Homo sapien
ttgatcttcgtcctgctgggcgcca

SEQ ID NO: 2656646 - DNA, 25 bp, Homo sapien
tcttgatcttcgtcctgctgggcgc

SEQ ID NO: 2656647 - DNA, 25 bp, Homo sapien
tggagcctccaatccacacagagta

SEQ ID NO: 2656648 - DNA, 25 bp, Homo sapien
ggccaggatggagcctccaatccac

SEQ ID NO: 2656649 - DNA, 25 bp, Homo sapien
caggatggagcctccaatccacaca

SEQ ID NO: 2656650 - DNA, 25 bp, Homo sapien
ggatggagcctccaatccacacaga

SEQ ID NO: 2656651 - DNA, 25 bp, Homo sapien
atttgcggtgaacgatggagggcca

SEQ ID NO: 2656652 - DNA, 25 bp, Homo sapien
gcggtgaacgatggagggccagact

SEQ ID NO: 2656653 - DNA, 25 bp, Homo sapien
ttgcggtgaacgatggagggccaga

SEQ ID NO: 2656654 - DNA, 25 bp, Homo sapien
tttgcggtgaacgatggagggccag

SEQ ID NO: 2656655 - DNA, 25 bp, Homo sapien
tggactcggtagacgactgggccat

SEQ ID NO: 2656656 - DNA, 25 bp, Homo sapien
ctcggtagacgactgggccattctc

SEQ ID NO: 2656657 - DNA, 25 bp, Homo sapien
gactcggtagacgactgggccattc

SEQ ID NO: 2656658 - DNA, 25 bp, Homo sapien
gtgtggactcggtagacgactgggc

SEQ ID NO: 2656659 - DNA, 25 bp, Homo sapien
tgaagctatttgaagcaaatgacat

SEQ ID NO: 2656660 - DNA, 25 bp, Homo sapien
tgcactgaagctatttgaagcaaat

SEQ ID NO: 2656661 - DNA, 25 bp, Homo sapien
agcagtgcactgaagctatttgaag

SEQ ID NO: 2656662 - DNA, 25 bp, Homo sapien
cagtgcactgaagctatttgaagca

SEQ ID NO: 2656663 - DNA, 25 bp, Homo sapien
actctcactttatgaccatcagcca

SEQ ID NO: 2656664 - DNA, 25 bp, Homo sapien
gccaccttctgactatcacattttc

SEQ ID NO: 2656665 - DNA, 25 bp, Homo sapien
agccaccttctgactatcacatttt

SEQ ID NO: 2656666 - DNA, 25 bp, Homo sapien
tcccactctcactttatgaccatca

SEQ ID NO: 2656667 - DNA, 25 bp, Homo sapien
gaagtaggtttacttgaccattgct

SEQ ID NO: 2656668 - DNA, 25 bp, Homo sapien
tatggggtagaagccagttcagaag

SEQ ID NO: 2656669 - DNA, 25 bp, Homo sapien
atgtaagggagaaggtgtctattga

SEQ ID NO: 2656670 - DNA, 25 bp, Homo sapien
tctattgaggacatactattggtat

SEQ ID NO: 2656671 - DNA, 25 bp, Homo sapien
cccaagacacccaggatgctcgtgg

SEQ ID NO: 2656672 - DNA, 25 bp, Homo sapien
gacacccaggatgctcgtggtctct

SEQ ID NO: 2656673 - DNA, 25 bp, Homo sapien
gatgctcgtggtctctttgtagccc

SEQ ID NO: 2656674 - DNA, 25 bp, Homo sapien
tgctctggcagaacatccccaagac

SEQ ID NO: 2656675 - DNA, 25 bp, Homo sapien
ccagagaccactgagaggagaccag

SEQ ID NO: 2656676 - DNA, 25 bp, Homo sapien
cagagaccactgagaggagaccagc

SEQ ID NO: 2656677 - DNA, 25 bp, Homo sapien
ttctcagtgcagaggaactttgtcc

SEQ ID NO: 2656678 - DNA, 25 bp, Homo sapien
cactctgtgggcaatagcagcttga

SEQ ID NO: 2656679 - DNA, 25 bp, Homo sapien
cttgaatggcagttggctctaaaca

SEQ ID NO: 2656680 - DNA, 25 bp, Homo sapien
cagaggaactttgtcccactctgtg

SEQ ID NO: 2656681 - DNA, 25 bp, Homo sapien
taataaccgtttcataggtatctgc

SEQ ID NO: 2656682 - DNA, 25 bp, Homo sapien
gctgaaattaaaagcgaaaaggcca

SEQ ID NO: 2656683 - DNA, 25 bp, Homo sapien
ctgaaattaaaagcgaaaaggccat

SEQ ID NO: 2656684 - DNA, 25 bp, Homo sapien
aataaccgtttcataggtatctgct

SEQ ID NO: 2656685 - DNA, 25 bp, Homo sapien
gaaagcggctcagggaatacggttc

SEQ ID NO: 2656686 - DNA, 25 bp, Homo sapien
taattgctcggctcccttcatgcac

SEQ ID NO: 2656687 - DNA, 25 bp, Homo sapien
aggaagggagccctttgccctcgcg

SEQ ID NO: 2656688 - DNA, 25 bp, Homo sapien
tcattctgcgggtagctggaaagcg

SEQ ID NO: 2656689 - DNA, 25 bp, Homo sapien
gcaaagtcacagtctgcacaaacag

SEQ ID NO: 2656690 - DNA, 25 bp, Homo sapien
agtcacagtctgcacaaacagagct

SEQ ID NO: 2656691 - DNA, 25 bp, Homo sapien
tcagcaggcaaagtcacagtctgca

SEQ ID NO: 2656692 - DNA, 25 bp, Homo sapien
cagggatcagcaggcaaagtcacag

SEQ ID NO: 2656693 - DNA, 25 bp, Homo sapien
atgtagggtgagcttccgtgggcat

SEQ ID NO: 2656694 - DNA, 25 bp, Homo sapien
aggcaatgtagggtgagcttccgtg

SEQ ID NO: 2656695 - DNA, 25 bp, Homo sapien
caatgtagggtgagcttccgtgggc

SEQ ID NO: 2656696 - DNA, 25 bp, Homo sapien
gcaatgtagggtgagcttccgtggg

SEQ ID NO: 2656697 - DNA, 25 bp, Homo sapien
ttctgacaaaggaccgctcccaact

SEQ ID NO: 2656698 - DNA, 25 bp, Homo sapien
cactttaggagccacagcaaccaca

SEQ ID NO: 2656699 - DNA, 25 bp, Homo sapien
tgtcgacactagcaagtgttctttc

SEQ ID NO: 2656700 - DNA, 25 bp, Homo sapien
caactgccacatcggagcctctgtt

SEQ ID NO: 2656701 - DNA, 25 bp, Homo sapien
tctaagctaccagagcccctgtcca

SEQ ID NO: 2656702 - DNA, 25 bp, Homo sapien
tgtccacgaattgcctccacccttc

SEQ ID NO: 2656703 - DNA, 25 bp, Homo sapien
ctcagccacctctaagctaccagag

SEQ ID NO: 2656704 - DNA, 25 bp, Homo sapien
agagcccctgtccacgaattgcctc

SEQ ID NO: 2656705 - DNA, 25 bp, Homo sapien
gccctcagggggagagcttcctgga

SEQ ID NO: 2656706 - DNA, 25 bp, Homo sapien
gggagagcttcctggagcaacattt

SEQ ID NO: 2656707 - DNA, 25 bp, Homo sapien
gagagcttcctggagcaacatttac

SEQ ID NO: 2656708 - DNA, 25 bp, Homo sapien
ctgccctcagggggagagcttcctg

SEQ ID NO: 2656709 - DNA, 25 bp, Homo sapien
gccctagaaggtttgtgtttgcatg

SEQ ID NO: 2656710 - DNA, 25 bp, Homo sapien
aagccctagaaggtttgtgtttgca

SEQ ID NO: 2656711 - DNA, 25 bp, Homo sapien
agccctagaaggtttgtgtttgcat

SEQ ID NO: 2656712 - DNA, 25 bp, Homo sapien
ccctagaaggtttgtgtttgcatgt

SEQ ID NO: 2656713 - DNA, 25 bp, Homo sapien
tgtctgaagtggggaatcgtacccc

SEQ ID NO: 2656714 - DNA, 25 bp, Homo sapien
gcttgtctgaagtggggaatcgtac

SEQ ID NO: 2656715 - DNA, 25 bp, Homo sapien
cttgtctgaagtggggaatcgtacc

SEQ ID NO: 2656716 - DNA, 25 bp, Homo sapien
tgcttgtctgaagtggggaatcgta

SEQ ID NO: 2656717 - DNA, 25 bp, Homo sapien
tccactgctgtccacgtgaatggtg

SEQ ID NO: 2656718 - DNA, 25 bp, Homo sapien
ggttccactgctgtccacgtgaatg

SEQ ID NO: 2656719 - DNA, 25 bp, Homo sapien
gcagtcggatgcctcgtatctagaa

SEQ ID NO: 2656720 - DNA, 25 bp, Homo sapien
gatgcctcgtatctagaagtcctaa

SEQ ID NO: 2656721 - DNA, 25 bp, Homo sapien
gggcagcagtcggatgcctcgtatc

SEQ ID NO: 2656722 - DNA, 25 bp, Homo sapien
cgtatctagaagtcctaacaaagca

SEQ ID NO: 2656723 - DNA, 25 bp, Homo sapien
gcattgtaatgacctggctccttgg

SEQ ID NO: 2656724 - DNA, 25 bp, Homo sapien
tcctcctgcggccatatactgcatt

SEQ ID NO: 2656725 - DNA, 25 bp, Homo sapien
tactgcattgtaatgacctggctcc

SEQ ID NO: 2656726 - DNA, 25 bp, Homo sapien
ctccatggctgggtcattgccttcc

SEQ ID NO: 2656727 - DNA, 25 bp, Homo sapien
ccttggtgacattcggggattcctt

SEQ ID NO: 2656728 - DNA, 25 bp, Homo sapien
tccttggtgacattcggggattcct

SEQ ID NO: 2656729 - DNA, 25 bp, Homo sapien
gattcctttctgtgtattatagcca

SEQ ID NO: 2656730 - DNA, 25 bp, Homo sapien
gtattatagccacgggttgtgcctg

SEQ ID NO: 2656731 - DNA, 25 bp, Homo sapien
cttctgtggccctcagcgggacgga

SEQ ID NO: 2656732 - DNA, 25 bp, Homo sapien
gaaccaggcggttgcggcaaaaaga

SEQ ID NO: 2656733 - DNA, 25 bp, Homo sapien
aagtttatttcagcctgcaaacgtg

SEQ ID NO: 2656734 - DNA, 25 bp, Homo sapien
gcggcaaaaagagcttgggatttca

SEQ ID NO: 2656735 - DNA, 25 bp, Homo sapien
tcttcttcaagcaaagaagccagtc

SEQ ID NO: 2656736 - DNA, 25 bp, Homo sapien
cagtcccagagcaataaataaagtt

SEQ ID NO: 2656737 - DNA, 25 bp, Homo sapien
aatgtcttcttcaagcaaagaagcc

SEQ ID NO: 2656738 - DNA, 25 bp, Homo sapien
tatgtaagaatgtaggtatacatac

SEQ ID NO: 2656739 - DNA, 25 bp, Homo sapien
gtggagccagcatgcaccttcggaa

SEQ ID NO: 2656740 - DNA, 25 bp, Homo sapien
tactctgccccagaatatgcagcca

SEQ ID NO: 2656741 - DNA, 25 bp, Homo sapien
cggaaacaattgatgtactctgccc

SEQ ID NO: 2656742 - DNA, 25 bp, Homo sapien
agtggagtcaccagagtgagacgaa

SEQ ID NO: 2656743 - DNA, 25 bp, Homo sapien
tcgcggatttctctggagacagccc

SEQ ID NO: 2656744 - DNA, 25 bp, Homo sapien
caattttgccacattggagacgttc

SEQ ID NO: 2656745 - DNA, 25 bp, Homo sapien
aaatgtgtcggctttgattagcacc

SEQ ID NO: 2656746 - DNA, 25 bp, Homo sapien
ggctaactgtcaacgaaaacttgta

SEQ ID NO: 2656747 - DNA, 25 bp, Homo sapien
gcttttatctctcttcgtgagacag

SEQ ID NO: 2656748 - DNA, 25 bp, Homo sapien
tctctcttcgtgagacagacctctc

SEQ ID NO: 2656749 - DNA, 25 bp, Homo sapien
tccttccggagcatccaatttttct

SEQ ID NO: 2656750 - DNA, 25 bp, Homo sapien
tccttcttctgttcagaggtctggg

SEQ ID NO: 2656751 - DNA, 25 bp, Homo sapien
ctcacaccaacagctaaatctttgc

SEQ ID NO: 2656752 - DNA, 25 bp, Homo sapien
cctcacaccaacagctaaatctttg

SEQ ID NO: 2656753 - DNA, 25 bp, Homo sapien
tgacagggcacccctccttttattc

SEQ ID NO: 2656754 - DNA, 25 bp, Homo sapien
tctgctatttataagactatagaac

SEQ ID NO: 2656755 - DNA, 25 bp, Homo sapien
ttaaagtcattaaggaacaggcatt

SEQ ID NO: 2656756 - DNA, 25 bp, Homo sapien
ttctgacatattgatgtgatcattt

SEQ ID NO: 2656757 - DNA, 25 bp, Homo sapien
aggctgcccagttgacccatagaaa

SEQ ID NO: 2656758 - DNA, 25 bp, Homo sapien
ccagtttagccccaaaggatacgtg

SEQ ID NO: 2656759 - DNA, 25 bp, Homo sapien
gaaacacattatctaggagctcaag

SEQ ID NO: 2656760 - DNA, 25 bp, Homo sapien
gagctatgtggacgccagaggcact

SEQ ID NO: 2656761 - DNA, 25 bp, Homo sapien
gagacatcaagtgttcacactcagt

SEQ ID NO: 2656762 - DNA, 25 bp, Homo sapien
cagtaaatctacatgttgtaactac

SEQ ID NO: 2656763 - DNA, 25 bp, Homo sapien
ctgagacatcaagtgttcacactca

SEQ ID NO: 2656764 - DNA, 25 bp, Homo sapien
catgttgtaactacactacctttct

SEQ ID NO: 2656765 - DNA, 25 bp, Homo sapien
taggttccgaccattccagtgtggc

SEQ ID NO: 2656766 - DNA, 25 bp, Homo sapien
tttaggttccgaccattccagtgtg

SEQ ID NO: 2656767 - DNA, 25 bp, Homo sapien
taaactcatctttaggttccgacca

SEQ ID NO: 2656768 - DNA, 25 bp, Homo sapien
catctttaggttccgaccattccag

SEQ ID NO: 2656769 - DNA, 25 bp, Homo sapien
cctggacttgtccattctattaaga

SEQ ID NO: 2656770 - DNA, 25 bp, Homo sapien
tggatttcctgtagaatggctgtaa

SEQ ID NO: 2656771 - DNA, 25 bp, Homo sapien
tggctgtaatattccagttagagcc

SEQ ID NO: 2656772 - DNA, 25 bp, Homo sapien
tagagccgaggaaactcgaagcctg

SEQ ID NO: 2656773 - DNA, 25 bp, Homo sapien
tatgttcaattggttttctgctttt

SEQ ID NO: 2656774 - DNA, 25 bp, Homo sapien
atgttcaattggttttctgctttta

SEQ ID NO: 2656775 - DNA, 25 bp, Homo sapien
tttatgttcaattggttttctgctt

SEQ ID NO: 2656776 - DNA, 25 bp, Homo sapien
tgttcaattggttttctgcttttaa

SEQ ID NO: 2656777 - DNA, 25 bp, Homo sapien
ggctgaaagaaagcatcatctgttt

SEQ ID NO: 2656778 - DNA, 25 bp, Homo sapien
tgtcaagctgagttaaacccagagt

SEQ ID NO: 2656779 - DNA, 25 bp, Homo sapien
tggctactgtcaagctgagttaaac

SEQ ID NO: 2656780 - DNA, 25 bp, Homo sapien
gacgacaatatcttggtgaaggaga

SEQ ID NO: 2656781 - DNA, 25 bp, Homo sapien
cgctgccatagtttatgataggtag

SEQ ID NO: 2656782 - DNA, 25 bp, Homo sapien
gaagggttacgctgccatagtttat

SEQ ID NO: 2656783 - DNA, 25 bp, Homo sapien
agcaagtgaagggttacgctgccat

SEQ ID NO: 2656784 - DNA, 25 bp, Homo sapien
gataggtagtgagagccacaaccct

SEQ ID NO: 2656785 - DNA, 25 bp, Homo sapien
gacgccgatactggcagctgagaag

SEQ ID NO: 2656786 - DNA, 25 bp, Homo sapien
gggatgatttagacgccgatactgg

SEQ ID NO: 2656787 - DNA, 25 bp, Homo sapien
aagcagaatattttagcagcagcac

SEQ ID NO: 2656788 - DNA, 25 bp, Homo sapien
gatttagacgccgatactggcagct

SEQ ID NO: 2656789 - DNA, 25 bp, Homo sapien
gaaggagatgatgtaatctcgagta

SEQ ID NO: 2656790 - DNA, 25 bp, Homo sapien
taatctcgagtatgctgatgacatc

SEQ ID NO: 2656791 - DNA, 25 bp, Homo sapien
ggtttctgcaccagaagagctggcg

SEQ ID NO: 2656792 - DNA, 25 bp, Homo sapien
ctgctgagtctgtggtttctgcacc

SEQ ID NO: 2656793 - DNA, 25 bp, Homo sapien
gaaataatcatgggtattgctgttg

SEQ ID NO: 2656794 - DNA, 25 bp, Homo sapien
ttttcattatggagagactctgtta

SEQ ID NO: 2656795 - DNA, 25 bp, Homo sapien
cattatggagagactctgttacatg

SEQ ID NO: 2656796 - DNA, 25 bp, Homo sapien
tgtttacatctccgacaccctcatt

SEQ ID NO: 2656797 - DNA, 25 bp, Homo sapien
ttcattatggagagactctgttaca

SEQ ID NO: 2656798 - DNA, 25 bp, Homo sapien
actgggtgaacagcccatgtgcttt

SEQ ID NO: 2656799 - DNA, 25 bp, Homo sapien
gttgtaactgggtgaacagcccatg

SEQ ID NO: 2656800 - DNA, 25 bp, Homo sapien
catgtgctttctccaccgttcacaa

SEQ ID NO: 2656801 - DNA, 25 bp, Homo sapien
tttctccaccgttcacaagcttttc

SEQ ID NO: 2656802 - DNA, 25 bp, Homo sapien
gacaagaggtgacctgagagctttg

SEQ ID NO: 2656803 - DNA, 25 bp, Homo sapien
aagaggtgacctgagagctttgccc

SEQ ID NO: 2656804 - DNA, 25 bp, Homo sapien
gagacaagaggtgacctgagagctt

SEQ ID NO: 2656805 - DNA, 25 bp, Homo sapien
ctggagacaagaggtgacctgagag

SEQ ID NO: 2656806 - DNA, 25 bp, Homo sapien
aaggccattgttgacagtcgtcagc

SEQ ID NO: 2656807 - DNA, 25 bp, Homo sapien
gaatgaatcttccttggactgacct

SEQ ID NO: 2656808 - DNA, 25 bp, Homo sapien
ggactgacctccagctatcctggaa

SEQ ID NO: 2656809 - DNA, 25 bp, Homo sapien
tgcgagggcagccttccattcagct

SEQ ID NO: 2656810 - DNA, 25 bp, Homo sapien
taagagagtttgaagggcttagcat

SEQ ID NO: 2656811 - DNA, 25 bp, Homo sapien
gcttttcagcgggatggaattccag

SEQ ID NO: 2656812 - DNA, 25 bp, Homo sapien
ttatggatggacaataaatcaaaat

SEQ ID NO: 2656813 - DNA, 25 bp, Homo sapien
atcttaaatatcacccagtcccctg

SEQ ID NO: 2656814 - DNA, 25 bp, Homo sapien
gggaaacaaagcacactaatccaat

SEQ ID NO: 2656815 - DNA, 25 bp, Homo sapien
ctgaggaaaatcagctcatccaagg

SEQ ID NO: 2656816 - DNA, 25 bp, Homo sapien
tcctctgaggaaaatcagctcatcc

SEQ ID NO: 2656817 - DNA, 25 bp, Homo sapien
ggatcctctgaggaaaatcagctca

SEQ ID NO: 2656818 - DNA, 25 bp, Homo sapien
ctggatcctctgaggaaaatcagct

SEQ ID NO: 2656819 - DNA, 25 bp, Homo sapien
ctggtgacataatgaatgattattt

SEQ ID NO: 2656820 - DNA, 25 bp, Homo sapien
tggtgacataatgaatgattatttc

SEQ ID NO: 2656821 - DNA, 25 bp, Homo sapien
aatattgctaatgaagccggctccc

SEQ ID NO: 2656822 - DNA, 25 bp, Homo sapien
caggtggataaaatagtactgcatt

SEQ ID NO: 2656823 - DNA, 25 bp, Homo sapien
gcaatttgccccaggcccctattaa

SEQ ID NO: 2656824 - DNA, 25 bp, Homo sapien
tattaaatgaattatcacggcccct

SEQ ID NO: 2656825 - DNA, 25 bp, Homo sapien
caaaacggaatattatctgtccaag

SEQ ID NO: 2656826 - DNA, 25 bp, Homo sapien
gaaagtgctttcctgaatcgtgttg

SEQ ID NO: 2656827 - DNA, 25 bp, Homo sapien
gattgtcattgcctctcagaaacaa

SEQ ID NO: 2656828 - DNA, 25 bp, Homo sapien
tttgtggtctcctccgggcctctgg

SEQ ID NO: 2656829 - DNA, 25 bp, Homo sapien
tctgctccatctatacatctattta

SEQ ID NO: 2656830 - DNA, 25 bp, Homo sapien
taaatatactgatggtgctacaggg

SEQ ID NO: 2656831 - DNA, 25 bp, Homo sapien
aatatactgatggtgctacagggac

SEQ ID NO: 2656832 - DNA, 25 bp, Homo sapien
tattaaatatactgatggtgctaca

SEQ ID NO: 2656833 - DNA, 25 bp, Homo sapien
gaaatcggtgtttgagtattccatg

SEQ ID NO: 2656834 - DNA, 25 bp, Homo sapien
ggaatcatttttggcggaacaatgg

SEQ ID NO: 2656835 - DNA, 25 bp, Homo sapien
cccatcagggaggtgatatctttaa

SEQ ID NO: 2656836 - DNA, 25 bp, Homo sapien
gcccgaaatttagtggtcccatcag

SEQ ID NO: 2656837 - DNA, 25 bp, Homo sapien
cttcagattctcgactccagagagc

SEQ ID NO: 2656838 - DNA, 25 bp, Homo sapien
tcagattctcgactccagagagctg

SEQ ID NO: 2656839 - DNA, 25 bp, Homo sapien
gattctcgactccagagagctggca

SEQ ID NO: 2656840 - DNA, 25 bp, Homo sapien
gagctggcagccaggtcgccaccat

SEQ ID NO: 2656841 - DNA, 25 bp, Homo sapien
gaaaatgttgacctggatatctgca

SEQ ID NO: 2656842 - DNA, 25 bp, Homo sapien
gccatttttgttgccctgtacaacc

SEQ ID NO: 2656843 - DNA, 25 bp, Homo sapien
cgttgaattgtccaaaattgccatt

SEQ ID NO: 2656844 - DNA, 25 bp, Homo sapien
tgttgccctgtacaaccttctgtgc

SEQ ID NO: 2656845 - DNA, 25 bp, Homo sapien
gaggacagccatccatattcctgag

SEQ ID NO: 2656846 - DNA, 25 bp, Homo sapien
aaagcaggagtagatgcggctgaca

SEQ ID NO: 2656847 - DNA, 25 bp, Homo sapien
aaccgaattgggcagctgggttcca

SEQ ID NO: 2656848 - DNA, 25 bp, Homo sapien
tttcttcgaatgaccaaattggtgg

SEQ ID NO: 2656849 - DNA, 25 bp, Homo sapien
caacagattcaatctgggttgccac

SEQ ID NO: 2656850 - DNA, 25 bp, Homo sapien
tcaaatcattcccacaacaacagat

SEQ ID NO: 2656851 - DNA, 25 bp, Homo sapien
atcattcccacaacaacagattcaa

SEQ ID NO: 2656852 - DNA, 25 bp, Homo sapien
acaacagattcaatctgggttgcca

SEQ ID NO: 2656853 - DNA, 25 bp, Homo sapien
aaatcatctggcttttgactaacaa

SEQ ID NO: 2656854 - DNA, 25 bp, Homo sapien
agaacggagtgatttataggcggtt

SEQ ID NO: 2656855 - DNA, 25 bp, Homo sapien
cactaatgtgcaggatgagaacgga

SEQ ID NO: 2656856 - DNA, 25 bp, Homo sapien
catctgtgaactcgtctttaaccta

SEQ ID NO: 2656857 - DNA, 25 bp, Homo sapien
atttccccagcacggagcatgccgt

SEQ ID NO: 2656858 - DNA, 25 bp, Homo sapien
cggagcatgccgtttggttcagaaa

SEQ ID NO: 2656859 - DNA, 25 bp, Homo sapien
gagtcattttgcacactcgcctcat

SEQ ID NO: 2656860 - DNA, 25 bp, Homo sapien
cgcctcatttacttgctgctttaat

SEQ ID NO: 2656861 - DNA, 25 bp, Homo sapien
tggtgctggcgtccattgcacgacg

SEQ ID NO: 2656862 - DNA, 25 bp, Homo sapien
gaagcctgcgaggagtaaggtttcc

SEQ ID NO: 2656863 - DNA, 25 bp, Homo sapien
tatgacagcccggtttgtgcaccag

SEQ ID NO: 2656864 - DNA, 25 bp, Homo sapien
tcggactttgcggacgtaaacacgc

SEQ ID NO: 2656865 - DNA, 25 bp, Homo sapien
tctccaacagtctctatgtttgctg

SEQ ID NO: 2656866 - DNA, 25 bp, Homo sapien
aacgtagtgaccctgctgatagcca

SEQ ID NO: 2656867 - DNA, 25 bp, Homo sapien
ggagagggccgagaaatcatcctca

SEQ ID NO: 2656868 - DNA, 25 bp, Homo sapien
tgatagccatagattaaaacgtacc

SEQ ID NO: 2656869 - DNA, 25 bp, Homo sapien
ggtggtccgccttgttggcaatatc

SEQ ID NO: 2656870 - DNA, 25 bp, Homo sapien
catgggccatggcagagactcgcac

SEQ ID NO: 2656871 - DNA, 25 bp, Homo sapien
ggaccccagcacaggaagccatggg

SEQ ID NO: 2656872 - DNA, 25 bp, Homo sapien
cacaggaagccatgggccatggcag

SEQ ID NO: 2656873 - DNA, 25 bp, Homo sapien
tcaggcaggtgtctggaccccagca

SEQ ID NO: 2656874 - DNA, 25 bp, Homo sapien
tcaggtgggttctggcaacgttgcc

SEQ ID NO: 2656875 - DNA, 25 bp, Homo sapien
taaatccgggacaatcgtacgtgag

SEQ ID NO: 2656876 - DNA, 25 bp, Homo sapien
tcacttcaagagtttgggcctgccc

SEQ ID NO: 2656877 - DNA, 25 bp, Homo sapien
ggaaatcagggcgaagcaggtcctc

SEQ ID NO: 2656878 - DNA, 25 bp, Homo sapien
tcttctcactggaatgccatgaatc

SEQ ID NO: 2656879 - DNA, 25 bp, Homo sapien
ttttgctgtcggggaatgtttctgg

SEQ ID NO: 2656880 - DNA, 25 bp, Homo sapien
gctgtcggggaatgtttctggataa

SEQ ID NO: 2656881 - DNA, 25 bp, Homo sapien
tttgctgtcggggaatgtttctgga

SEQ ID NO: 2656882 - DNA, 25 bp, Homo sapien
tgctgtcggggaatgtttctggata

SEQ ID NO: 2656883 - DNA, 25 bp, Homo sapien
tggaaacacagacgctccctgagag

SEQ ID NO: 2656884 - DNA, 25 bp, Homo sapien
tctggaaatggaactctgggctaat

SEQ ID NO: 2656885 - DNA, 25 bp, Homo sapien
tccttcttaccccagctggaggtga

SEQ ID NO: 2656886 - DNA, 25 bp, Homo sapien
gggctaatacctcagctcggcaatg

SEQ ID NO: 2656887 - DNA, 25 bp, Homo sapien
tatgcacacggaaacagcaactact

SEQ ID NO: 2656888 - DNA, 25 bp, Homo sapien
gcattgacggcacagagcacttctt

SEQ ID NO: 2656889 - DNA, 25 bp, Homo sapien
gcaactactaattctctggccagag

SEQ ID NO: 2656890 - DNA, 25 bp, Homo sapien
tgcaggtctctaaatgcagcccggg

SEQ ID NO: 2656891 - DNA, 25 bp, Homo sapien
ggagcttgacaaaagtactggcttt

SEQ ID NO: 2656892 - DNA, 25 bp, Homo sapien
taattacatgctgcgggaaacaggc

SEQ ID NO: 2656893 - DNA, 25 bp, Homo sapien
tctctgagtgctatccatctttcca

SEQ ID NO: 2656894 - DNA, 25 bp, Homo sapien
tactggctttgtacaacatttcctt

SEQ ID NO: 2656895 - DNA, 25 bp, Homo sapien
ttatgccaatacattagctgacgat

SEQ ID NO: 2656896 - DNA, 25 bp, Homo sapien
cgataatgaatcttctgttctgaaa

SEQ ID NO: 2656897 - DNA, 25 bp, Homo sapien
tgccaatacattagctgacgataat

SEQ ID NO: 2656898 - DNA, 25 bp, Homo sapien
cattagctgacgataatgaatcttc

SEQ ID NO: 2656899 - DNA, 25 bp, Homo sapien
tcctctgtggagttgttgccaaaat

SEQ ID NO: 2656900 - DNA, 25 bp, Homo sapien
tatggttgttgattatttgtctgaa

SEQ ID NO: 2656901 - DNA, 25 bp, Homo sapien
acagaaccttaagtgcatgagagag

SEQ ID NO: 2656902 - DNA, 25 bp, Homo sapien
cacttggagaatagctgtggtcctc

SEQ ID NO: 2656903 - DNA, 25 bp, Homo sapien
ctcagtcgattgtggaactagattc

SEQ ID NO: 2656904 - DNA, 25 bp, Homo sapien
aactagattcatgccgtgggaaatc

SEQ ID NO: 2656905 - DNA, 25 bp, Homo sapien
gaaatctcggaatgacttagccgtg

SEQ ID NO: 2656906 - DNA, 25 bp, Homo sapien
tgacttagccgtgacttctttcctg

SEQ ID NO: 2656907 - DNA, 25 bp, Homo sapien
cataccattgattgtattaacctag

SEQ ID NO: 2656908 - DNA, 25 bp, Homo sapien
tccaccgatcatattttcataccat

SEQ ID NO: 2656909 - DNA, 25 bp, Homo sapien
cagttaccagccaatcaaaagtttt

SEQ ID NO: 2656910 - DNA, 25 bp, Homo sapien
ttcacttcatccagttaccagccaa

SEQ ID NO: 2656911 - DNA, 25 bp, Homo sapien
caggtgtatcaaagagagacggtac

SEQ ID NO: 2656912 - DNA, 25 bp, Homo sapien
tatcaaagagagacggtacctttgg

SEQ ID NO: 2656913 - DNA, 25 bp, Homo sapien
caaagagagacggtacctttggtga

SEQ ID NO: 2656914 - DNA, 25 bp, Homo sapien
tctgctcacaggtgtatcaaagaga

SEQ ID NO: 2656915 - DNA, 25 bp, Homo sapien
ttggataatgctcccaagtctggcc

SEQ ID NO: 2656916 - DNA, 25 bp, Homo sapien
aataggctcggcaggaatttgcacg

SEQ ID NO: 2656917 - DNA, 25 bp, Homo sapien
ccaaatatcagtgggttaagccatc

SEQ ID NO: 2656918 - DNA, 25 bp, Homo sapien
cattagcatgccatgaactgaagcc

SEQ ID NO: 2656919 - DNA, 25 bp, Homo sapien
tgcaggaaaagcgactcagtgaaac

SEQ ID NO: 2656920 - DNA, 25 bp, Homo sapien
cccgccctcaaattggatactagaa

SEQ ID NO: 2656921 - DNA, 25 bp, Homo sapien
aggaagcaccaggatctgcagaatc

SEQ ID NO: 2656922 - DNA, 25 bp, Homo sapien
caaaaaacataaggtcctcaggaag

SEQ ID NO: 2656923 - DNA, 25 bp, Homo sapien
caagtggaatagtgatttggcaaca

SEQ ID NO: 2656924 - DNA, 25 bp, Homo sapien
agtccaatggccgtggaacaagtgg

SEQ ID NO: 2656925 - DNA, 25 bp, Homo sapien
tggcaacagataatagattcagatt

SEQ ID NO: 2656926 - DNA, 25 bp, Homo sapien
tagattcagatttgaggatcttggc

SEQ ID NO: 2656927 - DNA, 25 bp, Homo sapien
tcacaaagtaattgacagactcacc

SEQ ID NO: 2656928 - DNA, 25 bp, Homo sapien
aaagcactccatctaaagttgggca

SEQ ID NO: 2656929 - DNA, 25 bp, Homo sapien
tgaccgccagttgacacggctgagt

SEQ ID NO: 2656930 - DNA, 25 bp, Homo sapien
ggactctgagtgtagactcttctac

SEQ ID NO: 2656931 - DNA, 25 bp, Homo sapien
cagtacatatacctgaactgtgcca

SEQ ID NO: 2656932 - DNA, 25 bp, Homo sapien
gtgccacaaaaagttgtctacatta

SEQ ID NO: 2656933 - DNA, 25 bp, Homo sapien
ggttcttcaccacattgacgcagta

SEQ ID NO: 2656934 - DNA, 25 bp, Homo sapien
taacagactttcatttccgtaatcg

SEQ ID NO: 2656935 - DNA, 25 bp, Homo sapien
gttaacccagtatccactccagttg

SEQ ID NO: 2656936 - DNA, 25 bp, Homo sapien
ctccaagtttgatggctgatcttga

SEQ ID NO: 2656937 - DNA, 25 bp, Homo sapien
tgatggctgatcttgaaggtttaca

SEQ ID NO: 2656938 - DNA, 25 bp, Homo sapien
actccagttgcacttcccacaccag

SEQ ID NO: 2656939 - DNA, 25 bp, Homo sapien
gttcactggatattgtgagactgaa

SEQ ID NO: 2656940 - DNA, 25 bp, Homo sapien
tgttcactggatattgtgagactga

SEQ ID NO: 2656941 - DNA, 25 bp, Homo sapien
gccttgttcactggatattgtgaga

SEQ ID NO: 2656942 - DNA, 25 bp, Homo sapien
cttgttcactggatattgtgagact

SEQ ID NO: 2656943 - DNA, 25 bp, Homo sapien
gtttcactgtgtaataatgaatttc

SEQ ID NO: 2656944 - DNA, 25 bp, Homo sapien
ttttatgtaacagttcttcaaattc

SEQ ID NO: 2656945 - DNA, 25 bp, Homo sapien
ggggtttcactgtgtaataatgaat

SEQ ID NO: 2656946 - DNA, 25 bp, Homo sapien
taatttttatgtaacagttcttcaa

SEQ ID NO: 2656947 - DNA, 25 bp, Homo sapien
gctgttctacagtatttgctgtgct

SEQ ID NO: 2656948 - DNA, 25 bp, Homo sapien
ctaaagaccagaggacctcttctcc

SEQ ID NO: 2656949 - DNA, 25 bp, Homo sapien
gctcccaccatgattgacacagaag

SEQ ID NO: 2656950 - DNA, 25 bp, Homo sapien
gccatgctacctacaacttgaataa

SEQ ID NO: 2656951 - DNA, 25 bp, Homo sapien
gggacactctcacccaaaaactgcg

SEQ ID NO: 2656952 - DNA, 25 bp, Homo sapien
cccagagggtgagctaaagcagagt

SEQ ID NO: 2656953 - DNA, 25 bp, Homo sapien
caaagtccttgcctgtcggaacagg

SEQ ID NO: 2656954 - DNA, 25 bp, Homo sapien
gattacttaagaatagtattgttgg

SEQ ID NO: 2656955 - DNA, 25 bp, Homo sapien
ctttagctgtacagagcagaaatgt

SEQ ID NO: 2656956 - DNA, 25 bp, Homo sapien
cattcttgattttgtctggctttag

SEQ ID NO: 2656957 - DNA, 25 bp, Homo sapien
tctaaactaggatattaactaacgc

SEQ ID NO: 2656958 - DNA, 25 bp, Homo sapien
gatctcatgagatggtgtacttcaa

SEQ ID NO: 2656959 - DNA, 25 bp, Homo sapien
tagacgggatgtgataatacttgcc

SEQ ID NO: 2656960 - DNA, 25 bp, Homo sapien
gacactttagatcttaaagcctgag

SEQ ID NO: 2656961 - DNA, 25 bp, Homo sapien
ccttcccacctcaggcttccgagta

SEQ ID NO: 2656962 - DNA, 25 bp, Homo sapien
tgatccttcccacctcaggcttccg

SEQ ID NO: 2656963 - DNA, 25 bp, Homo sapien
atccttcccacctcaggcttccgag

SEQ ID NO: 2656964 - DNA, 25 bp, Homo sapien
gtgatccttcccacctcaggcttcc

SEQ ID NO: 2656965 - DNA, 25 bp, Homo sapien
gaccagtgctcttgaggtgacctaa

SEQ ID NO: 2656966 - DNA, 25 bp, Homo sapien
cacaaaggtagaacattgcactgcc

SEQ ID NO: 2656967 - DNA, 25 bp, Homo sapien
aaaacttacggctttgactctgtga

SEQ ID NO: 2656968 - DNA, 25 bp, Homo sapien
cagttttcctaaacaaccctgcagg

SEQ ID NO: 2656969 - DNA, 25 bp, Homo sapien
tccttaacggatcaaaacggatgca

SEQ ID NO: 2656970 - DNA, 25 bp, Homo sapien
tctaaagcccggagcaggaaagtcc

SEQ ID NO: 2656971 - DNA, 25 bp, Homo sapien
caatgggtatccttctccaaagaca

SEQ ID NO: 2656972 - DNA, 25 bp, Homo sapien
aagtatagcaaagagctgtccgggc

SEQ ID NO: 2656973 - DNA, 25 bp, Homo sapien
tcattgaaaagatggaatggtcgct

SEQ ID NO: 2656974 - DNA, 25 bp, Homo sapien
gcttctgtgcggatcctccaaacca

SEQ ID NO: 2656975 - DNA, 25 bp, Homo sapien
caaaccatcgttgggagaggcctcc

SEQ ID NO: 2656976 - DNA, 25 bp, Homo sapien
gaatggtcgcttctgtgcggatcct

SEQ ID NO: 2656977 - DNA, 25 bp, Homo sapien
ttcagctccaaacgggaactggtgg

SEQ ID NO: 2656978 - DNA, 25 bp, Homo sapien
tattagtgagtaacacgactggcgc

SEQ ID NO: 2656979 - DNA, 25 bp, Homo sapien
tttggtagctagacgccaataggac

SEQ ID NO: 2656980 - DNA, 25 bp, Homo sapien
taggctccctagtgcatattagtga

SEQ ID NO: 2656981 - DNA, 25 bp, Homo sapien
gctttgggtgttaatgccttccttg

SEQ ID NO: 2656982 - DNA, 25 bp, Homo sapien
gaatcccttgacagtttcagtacct

SEQ ID NO: 2656983 - DNA, 25 bp, Homo sapien
tgaaacccacctgagaaggcgggct

SEQ ID NO: 2656984 - DNA, 25 bp, Homo sapien
ggcctccaggttcgcgttctacctg

SEQ ID NO: 2656985 - DNA, 25 bp, Homo sapien
tctccggaggagtattctaacagct

SEQ ID NO: 2656986 - DNA, 25 bp, Homo sapien
acgatcaagtttggaggacgtccct

SEQ ID NO: 2656987 - DNA, 25 bp, Homo sapien
taggtgctcatcattggctctccgg

SEQ ID NO: 2656988 - DNA, 25 bp, Homo sapien
gctcttgcgtgcttccacagtgaca

SEQ ID NO: 2656989 - DNA, 25 bp, Homo sapien
gctatgtgtatatcaatgttctcat

SEQ ID NO: 2656990 - DNA, 25 bp, Homo sapien
aaagtaatcaaagcctagctctttt

SEQ ID NO: 2656991 - DNA, 25 bp, Homo sapien
ggtatgtgtccgagattttccaggc

SEQ ID NO: 2656992 - DNA, 25 bp, Homo sapien
tgtaatcaggtatgtgtccgagatt

SEQ ID NO: 2656993 - DNA, 25 bp, Homo sapien
ttaattgtaaatagcactgcactcc

SEQ ID NO: 2656994 - DNA, 25 bp, Homo sapien
caatggaagtagagagagaacaaat

SEQ ID NO: 2656995 - DNA, 25 bp, Homo sapien
gtaaccagttatgatcaattaattg

SEQ ID NO: 2656996 - DNA, 25 bp, Homo sapien
aagcaatggaagtagagagagaaca

SEQ ID NO: 2656997 - DNA, 25 bp, Homo sapien
gaggacatgcagacatatggtccat

SEQ ID NO: 2656998 - DNA, 25 bp, Homo sapien
tgggaacactgatatgaggacatgc

SEQ ID NO: 2656999 - DNA, 25 bp, Homo sapien
tggccaacctgagatgactttggtg

SEQ ID NO: 2657000 - DNA, 25 bp, Homo sapien
ccaacctgagatgactttggtggtg

SEQ ID NO: 2657001 - DNA, 25 bp, Homo sapien
tggcaagaggccagagatcaaggcc

SEQ ID NO: 2657002 - DNA, 25 bp, Homo sapien
gatcaaggccctcgagtattaactt

SEQ ID NO: 2657003 - DNA, 25 bp, Homo sapien
gcaaaatggctacttcttcagaaat

SEQ ID NO: 2657004 - DNA, 25 bp, Homo sapien
catcctccggaatctgcaaaatggc

SEQ ID NO: 2657005 - DNA, 25 bp, Homo sapien
ttgatccaaggagccttgagaagga

SEQ ID NO: 2657006 - DNA, 25 bp, Homo sapien
tgctaaatcacggagagcagccttg

SEQ ID NO: 2657007 - DNA, 25 bp, Homo sapien
gagaatcccggcctcccatcttccg

SEQ ID NO: 2657008 - DNA, 25 bp, Homo sapien
ttggcgctgccggtcccaacttgat

SEQ ID NO: 2657009 - DNA, 25 bp, Homo sapien
ctgcgaccgagtaggcagtcggggc

SEQ ID NO: 2657010 - DNA, 25 bp, Homo sapien
gcgaccgagtaggcagtcggggcga

SEQ ID NO: 2657011 - DNA, 25 bp, Homo sapien
tgcgaccgagtaggcagtcggggcg

SEQ ID NO: 2657012 - DNA, 25 bp, Homo sapien
ccgacccaggcgcagagagagagac

SEQ ID NO: 2657013 - DNA, 25 bp, Homo sapien
gccgccgagcagatccgggtgcagc

SEQ ID NO: 2657014 - DNA, 25 bp, Homo sapien
ccggatcccacgctccgggctttag

SEQ ID NO: 2657015 - DNA, 25 bp, Homo sapien
tgagcatgcccggtgcggcgggctc

SEQ ID NO: 2657016 - DNA, 25 bp, Homo sapien
ctctctggctctcggcgtcacccac

SEQ ID NO: 2657017 - DNA, 25 bp, Homo sapien
agggattgttgagatccgggtcggc

SEQ ID NO: 2657018 - DNA, 25 bp, Homo sapien
ttgttgagatccgggtcggcaaacg

SEQ ID NO: 2657019 - DNA, 25 bp, Homo sapien
gattgttgagatccgggtcggcaaa

SEQ ID NO: 2657020 - DNA, 25 bp, Homo sapien
ggattgttgagatccgggtcggcaa

SEQ ID NO: 2657021 - DNA, 25 bp, Homo sapien
gctttggtatcaataacctcaacct

SEQ ID NO: 2657022 - DNA, 25 bp, Homo sapien
cgtccacgtgcactattgttttcca

SEQ ID NO: 2657023 - DNA, 25 bp, Homo sapien
ggaagaggtcgtccacgtgcactat

SEQ ID NO: 2657024 - DNA, 25 bp, Homo sapien
cttgctagaagcagctgggtaggga

SEQ ID NO: 2657025 - DNA, 25 bp, Homo sapien
gttacactcattaggaaattcagaa

SEQ ID NO: 2657026 - DNA, 25 bp, Homo sapien
gagagttatttagatgttgcattca

SEQ ID NO: 2657027 - DNA, 25 bp, Homo sapien
cagttggaaacaaattacacgtgct

SEQ ID NO: 2657028 - DNA, 25 bp, Homo sapien
ttacacgtgctaacagttacactca

SEQ ID NO: 2657029 - DNA, 25 bp, Homo sapien
tgatatctgctaacacaggcttggg

SEQ ID NO: 2657030 - DNA, 25 bp, Homo sapien
tatgatatctgctaacacaggcttg

SEQ ID NO: 2657031 - DNA, 25 bp, Homo sapien
ctgctaacacaggcttgggtttcat

SEQ ID NO: 2657032 - DNA, 25 bp, Homo sapien
atctgctaacacaggcttgggtttc

SEQ ID NO: 2657033 - DNA, 25 bp, Homo sapien
caactgtagtgttgaggaagccata

SEQ ID NO: 2657034 - DNA, 25 bp, Homo sapien
tgttgaggaagccatagtctctaac

SEQ ID NO: 2657035 - DNA, 25 bp, Homo sapien
aaattagctttagcaactgtagtgt

SEQ ID NO: 2657036 - DNA, 25 bp, Homo sapien
tagtgttgaggaagccatagtctct

SEQ ID NO: 2657037 - DNA, 25 bp, Homo sapien
tttcagatttttagaggctctacac

SEQ ID NO: 2657038 - DNA, 25 bp, Homo sapien
tcagatttttagaggctctacacaa

SEQ ID NO: 2657039 - DNA, 25 bp, Homo sapien
cagatttttagaggctctacacaaa

SEQ ID NO: 2657040 - DNA, 25 bp, Homo sapien
ttcagatttttagaggctctacaca

SEQ ID NO: 2657041 - DNA, 25 bp, Homo sapien
tgaggtcctacctttaatctcctta

SEQ ID NO: 2657042 - DNA, 25 bp, Homo sapien
aagagctgaggtcctacctttaatc

SEQ ID NO: 2657043 - DNA, 25 bp, Homo sapien
gagctgaggtcctacctttaatctc

SEQ ID NO: 2657044 - DNA, 25 bp, Homo sapien
cagaaatcctacaggctagaagagc

SEQ ID NO: 2657045 - DNA, 25 bp, Homo sapien
ccgagaatggattatattcatcaag

SEQ ID NO: 2657046 - DNA, 25 bp, Homo sapien
gttctagaatccgagaatggattat

SEQ ID NO: 2657047 - DNA, 25 bp, Homo sapien
catcaagtcctggtggaacatttct

SEQ ID NO: 2657048 - DNA, 25 bp, Homo sapien
tcttgtcacttgtgtaactgatgga

SEQ ID NO: 2657049 - DNA, 25 bp, Homo sapien
gtgacagaaatcatatatggcatca

SEQ ID NO: 2657050 - DNA, 25 bp, Homo sapien
catgtccctttatggtcagagatga

SEQ ID NO: 2657051 - DNA, 25 bp, Homo sapien
ttctctctgctctatgtgacagaaa

SEQ ID NO: 2657052 - DNA, 25 bp, Homo sapien
cactgtcagtacctggaattttctc

SEQ ID NO: 2657053 - DNA, 25 bp, Homo sapien
ccctgagcaaaggacccagtaagta

SEQ ID NO: 2657054 - DNA, 25 bp, Homo sapien
tcctgagccacagctaagtttatgg

SEQ ID NO: 2657055 - DNA, 25 bp, Homo sapien
gaccacagccttgtaagaccctgag

SEQ ID NO: 2657056 - DNA, 25 bp, Homo sapien
aatgctgtatctgaactcctgagcc

SEQ ID NO: 2657057 - DNA, 25 bp, Homo sapien
tattgctggttgtgtattgggtaca

SEQ ID NO: 2657058 - DNA, 25 bp, Homo sapien
tggttgtgtattgggtacattaggc

SEQ ID NO: 2657059 - DNA, 25 bp, Homo sapien
tgctggttgtgtattgggtacatta

SEQ ID NO: 2657060 - DNA, 25 bp, Homo sapien
gttgtgtattgggtacattaggcat

SEQ ID NO: 2657061 - DNA, 25 bp, Homo sapien
caatctgtgtataagctggatgttc

SEQ ID NO: 2657062 - DNA, 25 bp, Homo sapien
tctgtgtataagctggatgttcctc

SEQ ID NO: 2657063 - DNA, 25 bp, Homo sapien
tgcaatctgtgtataagctggatgt

SEQ ID NO: 2657064 - DNA, 25 bp, Homo sapien
tgtataagctggatgttcctctgtt

SEQ ID NO: 2657065 - DNA, 25 bp, Homo sapien
ttctagttcttcctggcgcttaaga

SEQ ID NO: 2657066 - DNA, 25 bp, Homo sapien
cttcctggcgcttaagaagttcagc

SEQ ID NO: 2657067 - DNA, 25 bp, Homo sapien
ttttgcatttctcgttcccgacgat

SEQ ID NO: 2657068 - DNA, 25 bp, Homo sapien
cgacgatctaattctgcggcttttc

SEQ ID NO: 2657069 - DNA, 25 bp, Homo sapien
gatagaaacaaggtccgacaggaaa

SEQ ID NO: 2657070 - DNA, 25 bp, Homo sapien
tgatagaaacaaggtccgacaggaa

SEQ ID NO: 2657071 - DNA, 25 bp, Homo sapien
acaaggtccgacaggaaaattgcta

SEQ ID NO: 2657072 - DNA, 25 bp, Homo sapien
aggtccgacaggaaaattgctagga

SEQ ID NO: 2657073 - DNA, 25 bp, Homo sapien
ataagctttactgtcttttggaatt

SEQ ID NO: 2657074 - DNA, 25 bp, Homo sapien
ctcacaggcaatgatgtagctaaac

SEQ ID NO: 2657075 - DNA, 25 bp, Homo sapien
gatgtagctaaaccagaggcgcact

SEQ ID NO: 2657076 - DNA, 25 bp, Homo sapien
aaaaggaaacgtgatgtctcttgat

SEQ ID NO: 2657077 - DNA, 25 bp, Homo sapien
gaggcgcactaccttaagggcttct

SEQ ID NO: 2657078 - DNA, 25 bp, Homo sapien
gaaagctccataaagtggtctgtac

SEQ ID NO: 2657079 - DNA, 25 bp, Homo sapien
tcaatccaaaatcaaccgctcttgc

SEQ ID NO: 2657080 - DNA, 25 bp, Homo sapien
agtggtctgtaccaacagacaaatg

SEQ ID NO: 2657081 - DNA, 25 bp, Homo sapien
ctcaatccaaaatcaaccgctcttg

SEQ ID NO: 2657082 - DNA, 25 bp, Homo sapien
tatggttatccaattgttctagcag

SEQ ID NO: 2657083 - DNA, 25 bp, Homo sapien
tcctttctgcattacgttccctttg

SEQ ID NO: 2657084 - DNA, 25 bp, Homo sapien
tcaaaattagtagtctgtctatggc

SEQ ID NO: 2657085 - DNA, 25 bp, Homo sapien
taaaacatggcaatgagttaacatg

SEQ ID NO: 2657086 - DNA, 25 bp, Homo sapien
tgccccagttatgaaatcctgcagc

SEQ ID NO: 2657087 - DNA, 25 bp, Homo sapien
tagacgaagaagaatacaaagaatc

SEQ ID NO: 2657088 - DNA, 25 bp, Homo sapien
tcctgcagcttggagtacatgtaca

SEQ ID NO: 2657089 - DNA, 25 bp, Homo sapien
gcaaactgacaaatatagacgaaga

SEQ ID NO: 2657090 - DNA, 25 bp, Homo sapien
cctagcctgggtccagatagtctcc

SEQ ID NO: 2657091 - DNA, 25 bp, Homo sapien
tcctagcctgggtccagatagtctc

SEQ ID NO: 2657092 - DNA, 25 bp, Homo sapien
ctcctagcctgggtccagatagtct

SEQ ID NO: 2657093 - DNA, 25 bp, Homo sapien
tagcctgggtccagatagtctccat

SEQ ID NO: 2657094 - DNA, 25 bp, Homo sapien
tcggaccggcttaaaaaatggcgca

SEQ ID NO: 2657095 - DNA, 25 bp, Homo sapien
gaatattgcgcctttcggaccggct

SEQ ID NO: 2657096 - DNA, 25 bp, Homo sapien
cccgaatattgcgcctttcggaccg

SEQ ID NO: 2657097 - DNA, 25 bp, Homo sapien
ccacccgaatattgcgcctttcgga

SEQ ID NO: 2657098 - DNA, 25 bp, Homo sapien
tattttggttgagaccagtaaggga

SEQ ID NO: 2657099 - DNA, 25 bp, Homo sapien
gaccagtaagggatgaaatccaacc

SEQ ID NO: 2657100 - DNA, 25 bp, Homo sapien
agaccagtaagggatgaaatccaac

SEQ ID NO: 2657101 - DNA, 25 bp, Homo sapien
ttttgaacataactagtgagatgac

SEQ ID NO: 2657102 - DNA, 25 bp, Homo sapien
agtgagatgactgctgatgctgtga

SEQ ID NO: 2657103 - DNA, 25 bp, Homo sapien
aacataactagtgagatgactgctg

SEQ ID NO: 2657104 - DNA, 25 bp, Homo sapien
taactagtgagatgactgctgatgc

SEQ ID NO: 2657105 - DNA, 25 bp, Homo sapien
actgacagaagcaatcacagcactg

SEQ ID NO: 2657106 - DNA, 25 bp, Homo sapien
ttaagataaaatctgtatactatgc

SEQ ID NO: 2657107 - DNA, 25 bp, Homo sapien
aatctgtatactatgcattttaccc

SEQ ID NO: 2657108 - DNA, 25 bp, Homo sapien
tgccatctcattagtaggtattcaa

SEQ ID NO: 2657109 - DNA, 25 bp, Homo sapien
catggtccctaagatacaaggcaac

SEQ ID NO: 2657110 - DNA, 25 bp, Homo sapien
ggtgcttaacagctgcgtacccaga

SEQ ID NO: 2657111 - DNA, 25 bp, Homo sapien
agttgaggacaccaaacctgagtgg

SEQ ID NO: 2657112 - DNA, 25 bp, Homo sapien
tatggttccaaagcaaaactcttgc

SEQ ID NO: 2657113 - DNA, 25 bp, Homo sapien
tctgagagagaagtagcatgcctat

SEQ ID NO: 2657114 - DNA, 25 bp, Homo sapien
tgtaaaacccaagtacacagaaggc

SEQ ID NO: 2657115 - DNA, 25 bp, Homo sapien
taatagacaatgtgaaccatccaga

SEQ ID NO: 2657116 - DNA, 25 bp, Homo sapien
gatgataatccttgaactgggcagg

SEQ ID NO: 2657117 - DNA, 25 bp, Homo sapien
gacagttttgttggacatcacacct

SEQ ID NO: 2657118 - DNA, 25 bp, Homo sapien
gccttctcaaaactagcacctgttg

SEQ ID NO: 2657119 - DNA, 25 bp, Homo sapien
gcaaactcctgttgggccttctcaa

SEQ ID NO: 2657120 - DNA, 25 bp, Homo sapien
cacctgttgtgcgatatagtccatg

SEQ ID NO: 2657121 - DNA, 25 bp, Homo sapien
ttcctggttttagcccatgcacaag

SEQ ID NO: 2657122 - DNA, 25 bp, Homo sapien
catgcacaagtgaacaggaaatatc

SEQ ID NO: 2657123 - DNA, 25 bp, Homo sapien
ccatgctgtctgtactgtgtgtttt

SEQ ID NO: 2657124 - DNA, 25 bp, Homo sapien
tatttgtagaatacagtaactggag

SEQ ID NO: 2657125 - DNA, 25 bp, Homo sapien
tattaaatgcgtttttaatcataag

SEQ ID NO: 2657126 - DNA, 25 bp, Homo sapien
taattcactgaatgtcatcccccaa

SEQ ID NO: 2657127 - DNA, 25 bp, Homo sapien
aaataattcactgaatgtcatcccc

SEQ ID NO: 2657128 - DNA, 25 bp, Homo sapien
ctgaaataattcactgaatgtcatc

SEQ ID NO: 2657129 - DNA, 25 bp, Homo sapien
cagtcaccatgatggcagcgcagta

SEQ ID NO: 2657130 - DNA, 25 bp, Homo sapien
tgtggtgcccatgcaaattagagat

SEQ ID NO: 2657131 - DNA, 25 bp, Homo sapien
tgttacctagtgacatgcagcgctg

SEQ ID NO: 2657132 - DNA, 25 bp, Homo sapien
gaaacatgcaacattagagggacac

SEQ ID NO: 2657133 - DNA, 25 bp, Homo sapien
gagggtttcagctacaccatcagcc

SEQ ID NO: 2657134 - DNA, 25 bp, Homo sapien
tataagacaggttagtggcaatacc

SEQ ID NO: 2657135 - DNA, 25 bp, Homo sapien
gccatttgaaacacggccagcacta

SEQ ID NO: 2657136 - DNA, 25 bp, Homo sapien
aaaagtgtgagggatgcataggccc

SEQ ID NO: 2657137 - DNA, 25 bp, Homo sapien
taatctctcattcagggtaagcaac

SEQ ID NO: 2657138 - DNA, 25 bp, Homo sapien
tctagtatctgttgtccctaaagga

SEQ ID NO: 2657139 - DNA, 25 bp, Homo sapien
aagacaactggaacgaggcggcatg

SEQ ID NO: 2657140 - DNA, 25 bp, Homo sapien
cagcaggtactcacctttaggtggc

SEQ ID NO: 2657141 - DNA, 25 bp, Homo sapien
tgatattcaacagccacttgagcca

SEQ ID NO: 2657142 - DNA, 25 bp, Homo sapien
gactcaatttgagccttcaaacttg

SEQ ID NO: 2657143 - DNA, 25 bp, Homo sapien
gtatttacagctgatggactcaatt

SEQ ID NO: 2657144 - DNA, 25 bp, Homo sapien
cattgtctagcattgatttggttcc

SEQ ID NO: 2657145 - DNA, 25 bp, Homo sapien
tagctggtacataatcactgaggag

SEQ ID NO: 2657146 - DNA, 25 bp, Homo sapien
ttatgtcaaagttaagcccgcacgc

SEQ ID NO: 2657147 - DNA, 25 bp, Homo sapien
cacgccaggcccagttaatgctagt

SEQ ID NO: 2657148 - DNA, 25 bp, Homo sapien
taatgctagaccagtatttaagggc

SEQ ID NO: 2657149 - DNA, 25 bp, Homo sapien
gaattatggagagcgtgagtcccac

SEQ ID NO: 2657150 - DNA, 25 bp, Homo sapien
taccccacaggaagacaggcttgtt

SEQ ID NO: 2657151 - DNA, 25 bp, Homo sapien
tgttctctggtcttacgtggtcctc

SEQ ID NO: 2657152 - DNA, 25 bp, Homo sapien
taaaagcatgctctccacttcagtg

SEQ ID NO: 2657153 - DNA, 25 bp, Homo sapien
cgcactctggtactgggcattcgct

SEQ ID NO: 2657154 - DNA, 25 bp, Homo sapien
tcttcgcccggaacatcaatatgtg

SEQ ID NO: 2657155 - DNA, 25 bp, Homo sapien
catgtcattgtcacctgtcgctcga

SEQ ID NO: 2657156 - DNA, 25 bp, Homo sapien
gaacttgaaacaaacgcagccagtg

SEQ ID NO: 2657157 - DNA, 25 bp, Homo sapien
cgggagccctgtcctaaaagtgcag

SEQ ID NO: 2657158 - DNA, 25 bp, Homo sapien
aaccaggacagtgccccctgggttg

SEQ ID NO: 2657159 - DNA, 25 bp, Homo sapien
agcaaccaggacagtgccccctggg

SEQ ID NO: 2657160 - DNA, 25 bp, Homo sapien
ccctgtcctaaaagtgcagcagcaa

SEQ ID NO: 2657161 - DNA, 25 bp, Homo sapien
aatagagttgattgccagtcttgcc

SEQ ID NO: 2657162 - DNA, 25 bp, Homo sapien
gctcacctagtaccaaaacagcagg

SEQ ID NO: 2657163 - DNA, 25 bp, Homo sapien
gtttctcaaaacttagctcacctag

SEQ ID NO: 2657164 - DNA, 25 bp, Homo sapien
tactgttaagcaaaagcgcttggtc

SEQ ID NO: 2657165 - DNA, 25 bp, Homo sapien
gtccgggaaggtcgcacgaagctcc

SEQ ID NO: 2657166 - DNA, 25 bp, Homo sapien
cctgctctcctgagtggtccgggaa

SEQ ID NO: 2657167 - DNA, 25 bp, Homo sapien
cagccttgttgttgtcatatccctc

SEQ ID NO: 2657168 - DNA, 25 bp, Homo sapien
ctccaggggactgtacagccaggtc

SEQ ID NO: 2657169 - DNA, 25 bp, Homo sapien
tctgtggagcacactgcggggccca

SEQ ID NO: 2657170 - DNA, 25 bp, Homo sapien
cgcctctcctgttctctcgacctac

SEQ ID NO: 2657171 - DNA, 25 bp, Homo sapien
gtcctctctgtggagcacactgcgg

SEQ ID NO: 2657172 - DNA, 25 bp, Homo sapien
tcatggtgattcccaggaggcctgt

SEQ ID NO: 2657173 - DNA, 25 bp, Homo sapien
tgggccttcggtgacggactggaag

SEQ ID NO: 2657174 - DNA, 25 bp, Homo sapien
catttgctgttgatggggcctcctg

SEQ ID NO: 2657175 - DNA, 25 bp, Homo sapien
agttttgccaggacggcaaggtggc

SEQ ID NO: 2657176 - DNA, 25 bp, Homo sapien
gctcccacacatgttggcaggtccg

SEQ ID NO: 2657177 - DNA, 25 bp, Homo sapien
ggaaagggtcgctcttcagcctcac

SEQ ID NO: 2657178 - DNA, 25 bp, Homo sapien
tgaggaaagggtcgctcttcagcct

SEQ ID NO: 2657179 - DNA, 25 bp, Homo sapien
gctgaggaaagggtcgctcttcagc

SEQ ID NO: 2657180 - DNA, 25 bp, Homo sapien
tggtcccctgtatcctggggatttc

SEQ ID NO: 2657181 - DNA, 25 bp, Homo sapien
caagcagcttgtcagtggtttccaa

SEQ ID NO: 2657182 - DNA, 25 bp, Homo sapien
tggacgtgaagaagcgctctctgcg

SEQ ID NO: 2657183 - DNA, 25 bp, Homo sapien
tgtatgatccgcctcacagtgacaa

SEQ ID NO: 2657184 - DNA, 25 bp, Homo sapien
cctgcagatcgtattggagctggac

SEQ ID NO: 2657185 - DNA, 25 bp, Homo sapien
ggactgactgatctcttggctcttt

SEQ ID NO: 2657186 - DNA, 25 bp, Homo sapien
gcccataagatttgacgttcagcca

SEQ ID NO: 2657187 - DNA, 25 bp, Homo sapien
aaattgcccataagatttgacgttc

SEQ ID NO: 2657188 - DNA, 25 bp, Homo sapien
caagtcttggactgactgatctctt

SEQ ID NO: 2657189 - DNA, 25 bp, Homo sapien
caacaatttgtgctacatggctggt

SEQ ID NO: 2657190 - DNA, 25 bp, Homo sapien
ccaagtcccaaaggtgtggcgtttg

SEQ ID NO: 2657191 - DNA, 25 bp, Homo sapien
cgtttggatagcgaaaccaacaatt

SEQ ID NO: 2657192 - DNA, 25 bp, Homo sapien
tggcgattctgtatagcccgtgacg

SEQ ID NO: 2657193 - DNA, 25 bp, Homo sapien
cacacgaatgtccaaaggcatgcac

SEQ ID NO: 2657194 - DNA, 25 bp, Homo sapien
catttcttccacacgaatgtccaaa

SEQ ID NO: 2657195 - DNA, 25 bp, Homo sapien
gcatgcaccatttgtggcgaaccca

SEQ ID NO: 2657196 - DNA, 25 bp, Homo sapien
atttgtggcgaacccatttctgttg

SEQ ID NO: 2657197 - DNA, 25 bp, Homo sapien
tctgccccttgcactgtcgtaagtt

SEQ ID NO: 2657198 - DNA, 25 bp, Homo sapien
ttttcaacactgatagacaagtctg

SEQ ID NO: 2657199 - DNA, 25 bp, Homo sapien
gcagcaggcgcgcacagtgtctgcc

SEQ ID NO: 2657200 - DNA, 25 bp, Homo sapien
gaagtcctgggtgctcgctgtaagc

SEQ ID NO: 2657201 - DNA, 25 bp, Homo sapien
tctgtggcttcagctgctacttgca

SEQ ID NO: 2657202 - DNA, 25 bp, Homo sapien
tgcctgttggggtcttcccctggtg

SEQ ID NO: 2657203 - DNA, 25 bp, Homo sapien
tacttgcaggccagaccctctcctc

SEQ ID NO: 2657204 - DNA, 25 bp, Homo sapien
aggtgcagacccatccagccagctg

SEQ ID NO: 2657205 - DNA, 25 bp, Homo sapien
tgacttcttttgcctgccccttcat

SEQ ID NO: 2657206 - DNA, 25 bp, Homo sapien
ttttgcctgccccttcatcaaggtc

SEQ ID NO: 2657207 - DNA, 25 bp, Homo sapien
tggctgacttcttttgcctgcccct

SEQ ID NO: 2657208 - DNA, 25 bp, Homo sapien
tttgcctgccccttcatcaaggtct

SEQ ID NO: 2657209 - DNA, 25 bp, Homo sapien
ccaatcgacactggccgcttttctt

SEQ ID NO: 2657210 - DNA, 25 bp, Homo sapien
gtattctttcgtgtaataaccacag

SEQ ID NO: 2657211 - DNA, 25 bp, Homo sapien
tcctctgtagttggtgccaatcgac

SEQ ID NO: 2657212 - DNA, 25 bp, Homo sapien
taaaattctttgattgtgtgtactc

SEQ ID NO: 2657213 - DNA, 25 bp, Homo sapien
ctcttggtgaatagatgctctctct

SEQ ID NO: 2657214 - DNA, 25 bp, Homo sapien
cacagctcttggtgaatagatgctc

SEQ ID NO: 2657215 - DNA, 25 bp, Homo sapien
caaccacagctcttggtgaatagat

SEQ ID NO: 2657216 - DNA, 25 bp, Homo sapien
cagctcttggtgaatagatgctctc

SEQ ID NO: 2657217 - DNA, 25 bp, Homo sapien
ctctgggacgcattcaaagcagtgt

SEQ ID NO: 2657218 - DNA, 25 bp, Homo sapien
tctgggacgcattcaaagcagtgtg

SEQ ID NO: 2657219 - DNA, 25 bp, Homo sapien
ggacgcattcaaagcagtgtgtaga

SEQ ID NO: 2657220 - DNA, 25 bp, Homo sapien
tgggacgcattcaaagcagtgtgta

SEQ ID NO: 2657221 - DNA, 25 bp, Homo sapien
gataaagagggcttgggccaccttc

SEQ ID NO: 2657222 - DNA, 25 bp, Homo sapien
ttcagaccaatgctaatcggcgctt

SEQ ID NO: 2657223 - DNA, 25 bp, Homo sapien
aaggcttctttctgaaggtgggcca

SEQ ID NO: 2657224 - DNA, 25 bp, Homo sapien
gagatgataaggatttgcactggct

SEQ ID NO: 2657225 - DNA, 25 bp, Homo sapien
tgtgtctgctccccgggaaaagcac

SEQ ID NO: 2657226 - DNA, 25 bp, Homo sapien
tcccatggggatgagaagtgaatca

SEQ ID NO: 2657227 - DNA, 25 bp, Homo sapien
tttctcctgattcccatggggatga

SEQ ID NO: 2657228 - DNA, 25 bp, Homo sapien
ccccgggaaaagcactcactgtgag

SEQ ID NO: 2657229 - DNA, 25 bp, Homo sapien
ccaatcttttgggatgaggaccctt

SEQ ID NO: 2657230 - DNA, 25 bp, Homo sapien
gtgtttcctgcaagtccaatctttt

SEQ ID NO: 2657231 - DNA, 25 bp, Homo sapien
tcttttgggatgaggaccctttctc

SEQ ID NO: 2657232 - DNA, 25 bp, Homo sapien
cctgcaagtccaatcttttgggatg

SEQ ID NO: 2657233 - DNA, 25 bp, Homo sapien
ataggagacaatttcagacaggcac

SEQ ID NO: 2657234 - DNA, 25 bp, Homo sapien
taggagacaatttcagacaggcacg

SEQ ID NO: 2657235 - DNA, 25 bp, Homo sapien
ggagacaatttcagacaggcacgtg

SEQ ID NO: 2657236 - DNA, 25 bp, Homo sapien
gacaatttcagacaggcacgtgaca

SEQ ID NO: 2657237 - DNA, 25 bp, Homo sapien
ggtagattgcttttctgggttccta

SEQ ID NO: 2657238 - DNA, 25 bp, Homo sapien
gattgcttttctgggttcctagctg

SEQ ID NO: 2657239 - DNA, 25 bp, Homo sapien
tagattgcttttctgggttcctagc

SEQ ID NO: 2657240 - DNA, 25 bp, Homo sapien
catggcggggaggtgtcctgacttt

SEQ ID NO: 2657241 - DNA, 25 bp, Homo sapien
gggcaagtggtgtagacctctgggc

SEQ ID NO: 2657242 - DNA, 25 bp, Homo sapien
cagggcaagtggtgtagacctctgg

SEQ ID NO: 2657243 - DNA, 25 bp, Homo sapien
agggcaagtggtgtagacctctggg

SEQ ID NO: 2657244 - DNA, 25 bp, Homo sapien
cattggcaggttgtttccccaaggc

SEQ ID NO: 2657245 - DNA, 25 bp, Homo sapien
gaaattgaagccgtatttgaaagat

SEQ ID NO: 2657246 - DNA, 25 bp, Homo sapien
tttcagtgtcttgtcttatcaggta

SEQ ID NO: 2657247 - DNA, 25 bp, Homo sapien
tcttatcaggtaaagccttctagag

SEQ ID NO: 2657248 - DNA, 25 bp, Homo sapien
tagaggagatggacttttcatgctg

SEQ ID NO: 2657249 - DNA, 25 bp, Homo sapien
tgcccttggtgggacccagagtcca

SEQ ID NO: 2657250 - DNA, 25 bp, Homo sapien
gcctgcccttggtgggacccagagt

SEQ ID NO: 2657251 - DNA, 25 bp, Homo sapien
tgggacccagagtccacccaagggc

SEQ ID NO: 2657252 - DNA, 25 bp, Homo sapien
cttggtgggacccagagtccaccca

SEQ ID NO: 2657253 - DNA, 25 bp, Homo sapien
tccagctggcggttcctgaatgagg

SEQ ID NO: 2657254 - DNA, 25 bp, Homo sapien
aatgcagaaggtccagctggcggtt

SEQ ID NO: 2657255 - DNA, 25 bp, Homo sapien
gaaaagtggaacaagcccaaggcat

SEQ ID NO: 2657256 - DNA, 25 bp, Homo sapien
ctcccagaccttttcgtgaagacgt

SEQ ID NO: 2657257 - DNA, 25 bp, Homo sapien
gcgggactactgatggcacactttt

SEQ ID NO: 2657258 - DNA, 25 bp, Homo sapien
catatcgtatgtgctggtgtcctgg

SEQ ID NO: 2657259 - DNA, 25 bp, Homo sapien
ccttggcttccgagtggaatcttgc

SEQ ID NO: 2657260 - DNA, 25 bp, Homo sapien
tctccatggaccgagtctctcctgg

SEQ ID NO: 2657261 - DNA, 25 bp, Homo sapien
ctttcattgttagaggctggatttt

SEQ ID NO: 2657262 - DNA, 25 bp, Homo sapien
gctttcattgttagaggctggattt

SEQ ID NO: 2657263 - DNA, 25 bp, Homo sapien
gctttgtctaccaggagaacttcaa

SEQ ID NO: 2657264 - DNA, 25 bp, Homo sapien
ctggaaaagggcttattggcattct

SEQ ID NO: 2657265 - DNA, 25 bp, Homo sapien
cttggtgctttgtctaccaggagaa

SEQ ID NO: 2657266 - DNA, 25 bp, Homo sapien
accaggagaacttcaagatcaccag

SEQ ID NO: 2657267 - DNA, 25 bp, Homo sapien
cagggatcctaaatgcttgtacaga

SEQ ID NO: 2657268 - DNA, 25 bp, Homo sapien
gcttgtacagacatcaactcctgaa

SEQ ID NO: 2657269 - DNA, 25 bp, Homo sapien
aactcctgaaatgttgatactgccc

SEQ ID NO: 2657270 - DNA, 25 bp, Homo sapien
ctgtcagggaatagagaccagggat

SEQ ID NO: 2657271 - DNA, 25 bp, Homo sapien
tcttgctgccttttgatttcgtctt

SEQ ID NO: 2657272 - DNA, 25 bp, Homo sapien
tcaactgggacaggactctcgcttc

SEQ ID NO: 2657273 - DNA, 25 bp, Homo sapien
tctgtttaccgtgatggttctcaac

SEQ ID NO: 2657274 - DNA, 25 bp, Homo sapien
tgatttcgtcttctgtttaccgtga

SEQ ID NO: 2657275 - DNA, 25 bp, Homo sapien
aaaccagtccaggttgtcagggctg

SEQ ID NO: 2657276 - DNA, 25 bp, Homo sapien
gacatcaggcgtgtcactgttaatg

SEQ ID NO: 2657277 - DNA, 25 bp, Homo sapien
ttgcagatctctgccgaaatgcaaa

SEQ ID NO: 2657278 - DNA, 25 bp, Homo sapien
gaaatgcaaaccagtccaggttgtc

SEQ ID NO: 2657279 - DNA, 25 bp, Homo sapien
ctcctttgagcggagcaccagggag

SEQ ID NO: 2657280 - DNA, 25 bp, Homo sapien
tctggctgagttgacgccaatactc

SEQ ID NO: 2657281 - DNA, 25 bp, Homo sapien
gaaacatctgatcttgttcaaaggg

SEQ ID NO: 2657282 - DNA, 25 bp, Homo sapien
gaagattgaactgattgtgacccca

SEQ ID NO: 2657283 - DNA, 25 bp, Homo sapien
tccagtttattctcctctctggtgt

SEQ ID NO: 2657284 - DNA, 25 bp, Homo sapien
tgtctgaaccatcacagtctcctct

SEQ ID NO: 2657285 - DNA, 25 bp, Homo sapien
ggtccagtcgaaactctcctaaagc

SEQ ID NO: 2657286 - DNA, 25 bp, Homo sapien
gagcttgcattagccttaaggtcca

SEQ ID NO: 2657287 - DNA, 25 bp, Homo sapien
ggcttagtgccccacattctaagat

SEQ ID NO: 2657288 - DNA, 25 bp, Homo sapien
catttcccgactcttcttcccctgg

SEQ ID NO: 2657289 - DNA, 25 bp, Homo sapien
cctggtgtccctagattgggcttag

SEQ ID NO: 2657290 - DNA, 25 bp, Homo sapien
gccccacattctaagattcataaga

SEQ ID NO: 2657291 - DNA, 25 bp, Homo sapien
tcccgagggaccagaactctgggaa

SEQ ID NO: 2657292 - DNA, 25 bp, Homo sapien
actcccgagggaccagaactctggg

SEQ ID NO: 2657293 - DNA, 25 bp, Homo sapien
aagcactcccgagggaccagaactc

SEQ ID NO: 2657294 - DNA, 25 bp, Homo sapien
acagaagcactcccgagggaccaga

SEQ ID NO: 2657295 - DNA, 25 bp, Homo sapien
gtgagcttggccagcggcagaaacc

SEQ ID NO: 2657296 - DNA, 25 bp, Homo sapien
gcaggtgagcttggccagcggcaga

SEQ ID NO: 2657297 - DNA, 25 bp, Homo sapien
cttagcaggtgagcttggccagcgg

SEQ ID NO: 2657298 - DNA, 25 bp, Homo sapien
tagcaggtgagcttggccagcggca

SEQ ID NO: 2657299 - DNA, 25 bp, Homo sapien
cgatcacgaggtctatagtcctgcc

SEQ ID NO: 2657300 - DNA, 25 bp, Homo sapien
aacattgtgctggaaccaaagagcc

SEQ ID NO: 2657301 - DNA, 25 bp, Homo sapien
aagagccagcattccatggtattgt

SEQ ID NO: 2657302 - DNA, 25 bp, Homo sapien
tgtctctgctgatttacgatcacga

SEQ ID NO: 2657303 - DNA, 25 bp, Homo sapien
cactttagaaacagctccatggcca

SEQ ID NO: 2657304 - DNA, 25 bp, Homo sapien
tcttgagcactgagcgaagggagtc

SEQ ID NO: 2657305 - DNA, 25 bp, Homo sapien
caggtgaatgctgtgatcatattgc

SEQ ID NO: 2657306 - DNA, 25 bp, Homo sapien
tctcgaaagctgtgtgaaggttgga

SEQ ID NO: 2657307 - DNA, 25 bp, Homo sapien
ctaactgaacacttctgtaatttca

SEQ ID NO: 2657308 - DNA, 25 bp, Homo sapien
gcaatttttcctgcatttgagacat

SEQ ID NO: 2657309 - DNA, 25 bp, Homo sapien
tgacataatgaatgcttctaagtaa

SEQ ID NO: 2657310 - DNA, 25 bp, Homo sapien
aaaaacagcaatttttcctgcattt

SEQ ID NO: 2657311 - DNA, 25 bp, Homo sapien
ctgcatagtgagctaaaggaaagcc

SEQ ID NO: 2657312 - DNA, 25 bp, Homo sapien
ggaaagcctgatgcagcaaaaaagt

SEQ ID NO: 2657313 - DNA, 25 bp, Homo sapien
aaagtgagttgtcaaggctgaaaaa

SEQ ID NO: 2657314 - DNA, 25 bp, Homo sapien
ggatattgctgcatagtgagctaaa

SEQ ID NO: 2657315 - DNA, 25 bp, Homo sapien
attggtgagttgtaaagaaattgga

SEQ ID NO: 2657316 - DNA, 25 bp, Homo sapien
cattggtgagttgtaaagaaattgg

SEQ ID NO: 2657317 - DNA, 25 bp, Homo sapien
aatcaaagcagaacatcccggccta

SEQ ID NO: 2657318 - DNA, 25 bp, Homo sapien
tgttctattctgagtgtcgcccaaa

SEQ ID NO: 2657319 - DNA, 25 bp, Homo sapien
aacctatgtccttcctaaatgggag

SEQ ID NO: 2657320 - DNA, 25 bp, Homo sapien
catgtcaaagatggacaagacccat

SEQ ID NO: 2657321 - DNA, 25 bp, Homo sapien
agattccggcgagccagagctgtta

SEQ ID NO: 2657322 - DNA, 25 bp, Homo sapien
tttgccttaccccttggccagagag

SEQ ID NO: 2657323 - DNA, 25 bp, Homo sapien
tgttagaggctcaccccagagaggt

SEQ ID NO: 2657324 - DNA, 25 bp, Homo sapien
cggagtaactgagcttgaagggaca

SEQ ID NO: 2657325 - DNA, 25 bp, Homo sapien
ttgaaattgcaacgcggccgctatg

SEQ ID NO: 2657326 - DNA, 25 bp, Homo sapien
gcaacgcggccgctatggaaagtgt

SEQ ID NO: 2657327 - DNA, 25 bp, Homo sapien
ctctttgaaattgcaacgcggccgc

SEQ ID NO: 2657328 - DNA, 25 bp, Homo sapien
aacgcggccgctatggaaagtgtgt

SEQ ID NO: 2657329 - DNA, 25 bp, Homo sapien
gggccatttcctgtatgtcccattt

SEQ ID NO: 2657330 - DNA, 25 bp, Homo sapien
catgtaggttaccatcggtgggtga

SEQ ID NO: 2657331 - DNA, 25 bp, Homo sapien
tctgttgtgattgtgcgagtgtgtt

SEQ ID NO: 2657332 - DNA, 25 bp, Homo sapien
tgtttgtgcatgtaggttaccatcg

SEQ ID NO: 2657333 - DNA, 25 bp, Homo sapien
cggagcctcctctccggaagagggc

SEQ ID NO: 2657334 - DNA, 25 bp, Homo sapien
ctagatattcagagggcacgggaac

SEQ ID NO: 2657335 - DNA, 25 bp, Homo sapien
cagacggccgttctttccgcttggg

SEQ ID NO: 2657336 - DNA, 25 bp, Homo sapien
gctgctcgaagctgctccgggagct

SEQ ID NO: 2657337 - DNA, 25 bp, Homo sapien
ccttctgggtactgtttgtgtgctg

SEQ ID NO: 2657338 - DNA, 25 bp, Homo sapien
ctttcctcactgattgcgtgccttc

SEQ ID NO: 2657339 - DNA, 25 bp, Homo sapien
ttcctcaaccagagtggccccaact

SEQ ID NO: 2657340 - DNA, 25 bp, Homo sapien
gattgcgtgccttctgggtactgtt

SEQ ID NO: 2657341 - DNA, 25 bp, Homo sapien
ttgtgcaagacagtatgtggcaaaa

SEQ ID NO: 2657342 - DNA, 25 bp, Homo sapien
ttctccaactaatgtcaaatagcag

SEQ ID NO: 2657343 - DNA, 25 bp, Homo sapien
cttcctttaacattgtgcaagacag

SEQ ID NO: 2657344 - DNA, 25 bp, Homo sapien
taatgtcaaatagcaggcctgtaat

SEQ ID NO: 2657345 - DNA, 25 bp, Homo sapien
tgcccaggttatcaccactgtactc

SEQ ID NO: 2657346 - DNA, 25 bp, Homo sapien
gattgtgatgttactgcctgcccag

SEQ ID NO: 2657347 - DNA, 25 bp, Homo sapien
tgcctgcccaggttatcaccactgt

SEQ ID NO: 2657348 - DNA, 25 bp, Homo sapien
tggtgattgtgatgttactgcctgc

SEQ ID NO: 2657349 - DNA, 25 bp, Homo sapien
ggctgaacactgatagtgtgggcaa

SEQ ID NO: 2657350 - DNA, 25 bp, Homo sapien
caatgaggattttaagacaagtgtc

SEQ ID NO: 2657351 - DNA, 25 bp, Homo sapien
tgtctgcttagctgccacggctatg

SEQ ID NO: 2657352 - DNA, 25 bp, Homo sapien
aagctctcgagctttgccaaagggc

SEQ ID NO: 2657353 - DNA, 25 bp, Homo sapien
gctaccagtcagcttacaacagctt

SEQ ID NO: 2657354 - DNA, 25 bp, Homo sapien
tgtcagatggataactgcagggaca

SEQ ID NO: 2657355 - DNA, 25 bp, Homo sapien
tgtaccaggatctccgctaccagtc

SEQ ID NO: 2657356 - DNA, 25 bp, Homo sapien
tacagacgtgttcacagcagggtgg

SEQ ID NO: 2657357 - DNA, 25 bp, Homo sapien
gggtagccaaacatcttacatggga

SEQ ID NO: 2657358 - DNA, 25 bp, Homo sapien
cctctggtgcacaggccaaaactct

SEQ ID NO: 2657359 - DNA, 25 bp, Homo sapien
tggtacaggacttacacctctggtg

SEQ ID NO: 2657360 - DNA, 25 bp, Homo sapien
ccaaaactctcagtgatggaatcac

SEQ ID NO: 2657361 - DNA, 25 bp, Homo sapien
ttcttccccaaaattatgatgcaaa

SEQ ID NO: 2657362 - DNA, 25 bp, Homo sapien
tatttcagaggttcttggacagcag

SEQ ID NO: 2657363 - DNA, 25 bp, Homo sapien
ttaagacttgccttatatttcagag

SEQ ID NO: 2657364 - DNA, 25 bp, Homo sapien
caaatgcagttcatccctgggagaa

SEQ ID NO: 2657365 - DNA, 25 bp, Homo sapien
gtttgaggaagagcaatattcccat

SEQ ID NO: 2657366 - DNA, 25 bp, Homo sapien
gatgtttataaccaaggcagggctc

SEQ ID NO: 2657367 - DNA, 25 bp, Homo sapien
gagcaatattcccatttgcaaccag

SEQ ID NO: 2657368 - DNA, 25 bp, Homo sapien
caataaactggtgatgtgtttgagg

SEQ ID NO: 2657369 - DNA, 25 bp, Homo sapien
cagaagcttgttgagtggtgaaaac

SEQ ID NO: 2657370 - DNA, 25 bp, Homo sapien
caaaggtcttgggagagcttgccat

SEQ ID NO: 2657371 - DNA, 25 bp, Homo sapien
tgaaaacatttcagcccgcatagtg

SEQ ID NO: 2657372 - DNA, 25 bp, Homo sapien
catagtgctactaccagagttgcga

SEQ ID NO: 2657373 - DNA, 25 bp, Homo sapien
gcccttaccacacagcgagatgaga

SEQ ID NO: 2657374 - DNA, 25 bp, Homo sapien
tttgagccacatgtgcaccagcgca

SEQ ID NO: 2657375 - DNA, 25 bp, Homo sapien
tctgggtctctgactagctggcaca

SEQ ID NO: 2657376 - DNA, 25 bp, Homo sapien
gcctgcagttgttgggacattcaaa

SEQ ID NO: 2657377 - DNA, 25 bp, Homo sapien
cagggtgctcaactatccagagtcc

SEQ ID NO: 2657378 - DNA, 25 bp, Homo sapien
gccagggtgctcaactatccagagt

SEQ ID NO: 2657379 - DNA, 25 bp, Homo sapien
ttgtactcttccacactctgcctgg

SEQ ID NO: 2657380 - DNA, 25 bp, Homo sapien
ggtgctcaactatccagagtccaaa

SEQ ID NO: 2657381 - DNA, 25 bp, Homo sapien
tggactggttcagtacttccccgac

SEQ ID NO: 2657382 - DNA, 25 bp, Homo sapien
gtacttccccgactaggctcttcaa

SEQ ID NO: 2657383 - DNA, 25 bp, Homo sapien
tggttcagtacttccccgactaggc

SEQ ID NO: 2657384 - DNA, 25 bp, Homo sapien
cgactaggctcttcaattggtttct

SEQ ID NO: 2657385 - DNA, 25 bp, Homo sapien
cagctggtggagtcttaaatggaac

SEQ ID NO: 2657386 - DNA, 25 bp, Homo sapien
tgacttgaaggaagctaccaaaacc

SEQ ID NO: 2657387 - DNA, 25 bp, Homo sapien
cacattccggtggtgtgacttgaag

SEQ ID NO: 2657388 - DNA, 25 bp, Homo sapien
ccagagggcctatgagtaatcgtga

SEQ ID NO: 2657389 - DNA, 25 bp, Homo sapien
cctgtagcttgagaagcatgtcagc

SEQ ID NO: 2657390 - DNA, 25 bp, Homo sapien
catggtcagccagaatcagagggcc

SEQ ID NO: 2657391 - DNA, 25 bp, Homo sapien
caggacgtgattttcagagcaggaa

SEQ ID NO: 2657392 - DNA, 25 bp, Homo sapien
ctccaggtccgatgggcaggttgcc

SEQ ID NO: 2657393 - DNA, 25 bp, Homo sapien
cttcccaggacggtgagctcttgct

SEQ ID NO: 2657394 - DNA, 25 bp, Homo sapien
tgcacattcctactcctccgtgaag

SEQ ID NO: 2657395 - DNA, 25 bp, Homo sapien
attgcaatgccctccttcagtcctg

SEQ ID NO: 2657396 - DNA, 25 bp, Homo sapien
gttgccctgcgccttctgtagagtt

SEQ ID NO: 2657397 - DNA, 25 bp, Homo sapien
gaaggagtgtgtccattgataagca

SEQ ID NO: 2657398 - DNA, 25 bp, Homo sapien
tttctgcctgctagaaggagtgtgt

SEQ ID NO: 2657399 - DNA, 25 bp, Homo sapien
gcctgctagaaggagtgtgtccatt

SEQ ID NO: 2657400 - DNA, 25 bp, Homo sapien
gtccattgataagcagtgatgttgc

SEQ ID NO: 2657401 - DNA, 25 bp, Homo sapien
gatgcaccagccgtgattgtggaga

SEQ ID NO: 2657402 - DNA, 25 bp, Homo sapien
tgtaaacaaacgatgactgcttgaa

SEQ ID NO: 2657403 - DNA, 25 bp, Homo sapien
ccagccgtgattgtggagacctcca

SEQ ID NO: 2657404 - DNA, 25 bp, Homo sapien
gatgactgcttgaagatgcaccagc

SEQ ID NO: 2657405 - DNA, 25 bp, Homo sapien
gggtttctgccaagagatccactgt

SEQ ID NO: 2657406 - DNA, 25 bp, Homo sapien
tagggtttctgccaagagatccact

SEQ ID NO: 2657407 - DNA, 25 bp, Homo sapien
ggtttctgccaagagatccactgtt

SEQ ID NO: 2657408 - DNA, 25 bp, Homo sapien
tgtagggtttctgccaagagatcca

SEQ ID NO: 2657409 - DNA, 25 bp, Homo sapien
catggttctttccactcttgtatcc

SEQ ID NO: 2657410 - DNA, 25 bp, Homo sapien
tcttgtatccctccgtccattattt

SEQ ID NO: 2657411 - DNA, 25 bp, Homo sapien
actgggcacaagaaccgcagggagt

SEQ ID NO: 2657412 - DNA, 25 bp, Homo sapien
gggatgaggcatggttctttccact

SEQ ID NO: 2657413 - DNA, 25 bp, Homo sapien
ctgtggtgtgagaagcctctgagcc

SEQ ID NO: 2657414 - DNA, 25 bp, Homo sapien
cactgtggtgtgagaagcctctgag

SEQ ID NO: 2657415 - DNA, 25 bp, Homo sapien
cacactgtggtgtgagaagcctctg

SEQ ID NO: 2657416 - DNA, 25 bp, Homo sapien
tgtggtgtgagaagcctctgagcct

SEQ ID NO: 2657417 - DNA, 25 bp, Homo sapien
caccatggctgatctttgtagttgc

SEQ ID NO: 2657418 - DNA, 25 bp, Homo sapien
tgttttcgcagggtagtggtccaga

SEQ ID NO: 2657419 - DNA, 25 bp, Homo sapien
cactagtggctgttaggaagacacc

SEQ ID NO: 2657420 - DNA, 25 bp, Homo sapien
tgtctgtccatcttggtttcttatg

SEQ ID NO: 2657421 - DNA, 25 bp, Homo sapien
cactctgaaaggtttagaggcctct

SEQ ID NO: 2657422 - DNA, 25 bp, Homo sapien
tagaggcctctcagtgtagctgatt

SEQ ID NO: 2657423 - DNA, 25 bp, Homo sapien
caagtagatgttacccagggtgagc

SEQ ID NO: 2657424 - DNA, 25 bp, Homo sapien
tttattctcttagagttcatgagac

SEQ ID NO: 2657425 - DNA, 25 bp, Homo sapien
aaacccattcccgtaatcagttgct

SEQ ID NO: 2657426 - DNA, 25 bp, Homo sapien
tgcttttgtcccctaacatcctccc

SEQ ID NO: 2657427 - DNA, 25 bp, Homo sapien
ccattcccgtaatcagttgcttttg

SEQ ID NO: 2657428 - DNA, 25 bp, Homo sapien
cccattcccgtaatcagttgctttt

SEQ ID NO: 2657429 - DNA, 25 bp, Homo sapien
acctcgctcttccaggccggcagcc

SEQ ID NO: 2657430 - DNA, 25 bp, Homo sapien
ctcgctcttccaggccggcagcccg

SEQ ID NO: 2657431 - DNA, 25 bp, Homo sapien
aacctcgctcttccaggccggcagc

SEQ ID NO: 2657432 - DNA, 25 bp, Homo sapien
ccaacctcgctcttccaggccggca

SEQ ID NO: 2657433 - DNA, 25 bp, Homo sapien
ccgcgggcgctggcaggcggggctc

SEQ ID NO: 2657434 - DNA, 25 bp, Homo sapien
ttgaggccgcgggcgctggcaggcg

SEQ ID NO: 2657435 - DNA, 25 bp, Homo sapien
cgcgggcgctggcaggcggggctcg

SEQ ID NO: 2657436 - DNA, 25 bp, Homo sapien
cccttgaggccgcgggcgctggcag

SEQ ID NO: 2657437 - DNA, 25 bp, Homo sapien
tacgcggcgcccccgccgcccgcgc

SEQ ID NO: 2657438 - DNA, 25 bp, Homo sapien
gcggcgcccccgccgcccgcgccgc

SEQ ID NO: 2657439 - DNA, 25 bp, Homo sapien
cgcggcgcccccgccgcccgcgccg

SEQ ID NO: 2657440 - DNA, 25 bp, Homo sapien
ctaggctggaacgacgtcggcttcc

SEQ ID NO: 2657441 - DNA, 25 bp, Homo sapien
acaactactacacgcagccgctgtg

SEQ ID NO: 2657442 - DNA, 25 bp, Homo sapien
agccgctgtgcacgccgtcgcggag

SEQ ID NO: 2657443 - DNA, 25 bp, Homo sapien
gggtgctcctggacaactactacac

SEQ ID NO: 2657444 - DNA, 25 bp, Homo sapien
taggaaaccacagtgcaaatttaat

SEQ ID NO: 2657445 - DNA, 25 bp, Homo sapien
ttggtgccctccaagcgtcagctga

SEQ ID NO: 2657446 - DNA, 25 bp, Homo sapien
cctcattctatcagcggtacaaggg

SEQ ID NO: 2657447 - DNA, 25 bp, Homo sapien
ctgagtttccaagaagccgggcagc

SEQ ID NO: 2657448 - DNA, 25 bp, Homo sapien
tctaactgtcagagttgttgcaggc

SEQ ID NO: 2657449 - DNA, 25 bp, Homo sapien
ctttacaggagacgcgggctgtgaa

SEQ ID NO: 2657450 - DNA, 25 bp, Homo sapien
gatctgagtcagaggtttaaccatt

SEQ ID NO: 2657451 - DNA, 25 bp, Homo sapien
gagacgcgggctgtgaagatgcttt

SEQ ID NO: 2657452 - DNA, 25 bp, Homo sapien
cagaaagtctggatggcaacgggaa

SEQ ID NO: 2657453 - DNA, 25 bp, Homo sapien
gaagcggcttcatgggtgtacacta

SEQ ID NO: 2657454 - DNA, 25 bp, Homo sapien
aacgggaatctactggtcatacggc

SEQ ID NO: 2657455 - DNA, 25 bp, Homo sapien
gaaggattgctactccgctggataa

SEQ ID NO: 2657456 - DNA, 25 bp, Homo sapien
aatgcattcggttcttgacagctga

SEQ ID NO: 2657457 - DNA, 25 bp, Homo sapien
tatagctacagcatccagaagagtc

SEQ ID NO: 2657458 - DNA, 25 bp, Homo sapien
tggttggcaacacgacatctggaag

SEQ ID NO: 2657459 - DNA, 25 bp, Homo sapien
tacaactaagtgaagtgggacagca

SEQ ID NO: 2657460 - DNA, 25 bp, Homo sapien
ggagaacctccacgaagattcacag

SEQ ID NO: 2657461 - DNA, 25 bp, Homo sapien
tcacagagactcaagtattaaacgt

SEQ ID NO: 2657462 - DNA, 25 bp, Homo sapien
tcagctgcctttggatggagtcata

SEQ ID NO: 2657463 - DNA, 25 bp, Homo sapien
cccgtgtagagcttctaactagtag

SEQ ID NO: 2657464 - DNA, 25 bp, Homo sapien
agtgaatgtgctaagtttaataaac

SEQ ID NO: 2657465 - DNA, 25 bp, Homo sapien
ggataacttggatgccccatgtcta

SEQ ID NO: 2657466 - DNA, 25 bp, Homo sapien
ttagagaggttgtttgtggataact

SEQ ID NO: 2657467 - DNA, 25 bp, Homo sapien
cttgatctatatgggcattgggcct

SEQ ID NO: 2657468 - DNA, 25 bp, Homo sapien
ccgcggctctgtgggcgccgggttc

SEQ ID NO: 2657469 - DNA, 25 bp, Homo sapien
cgcggctctgtgggcgccgggttcc

SEQ ID NO: 2657470 - DNA, 25 bp, Homo sapien
cttcttggcccccgggcgtccagca

SEQ ID NO: 2657471 - DNA, 25 bp, Homo sapien
cttggcccccgggcgtccagcaggt

SEQ ID NO: 2657472 - DNA, 25 bp, Homo sapien
gcccccgggcgtccagcaggtgcca

SEQ ID NO: 2657473 - DNA, 25 bp, Homo sapien
tggcccccgggcgtccagcaggtgc

SEQ ID NO: 2657474 - DNA, 25 bp, Homo sapien
gacggattagcccaaagagctgcgg

SEQ ID NO: 2657475 - DNA, 25 bp, Homo sapien
gtgaccctgagctagtcgcctgact

SEQ ID NO: 2657476 - DNA, 25 bp, Homo sapien
aaatgtgtgcgcgacatgcgtccga

SEQ ID NO: 2657477 - DNA, 25 bp, Homo sapien
gtccaagtgttttgccgaggcccca

SEQ ID NO: 2657478 - DNA, 25 bp, Homo sapien
attataccccttttgtgtcctgctt

SEQ ID NO: 2657479 - DNA, 25 bp, Homo sapien
ttataccccttttgtgtcctgctta

SEQ ID NO: 2657480 - DNA, 25 bp, Homo sapien
ggaatgctgcactatggccacattt

SEQ ID NO: 2657481 - DNA, 25 bp, Homo sapien
gccacatttgctatgcttccacctt

SEQ ID NO: 2657482 - DNA, 25 bp, Homo sapien
tatggccacatttgctatgcttcca

SEQ ID NO: 2657483 - DNA, 25 bp, Homo sapien
gaatgctgcactatggccacatttg

SEQ ID NO: 2657484 - DNA, 25 bp, Homo sapien
ctgcgtctgggtgttctatcactgc

SEQ ID NO: 2657485 - DNA, 25 bp, Homo sapien
gagtaatgagaaagctgccatctcc

SEQ ID NO: 2657486 - DNA, 25 bp, Homo sapien
taatgagaaagctgccatctccaat

SEQ ID NO: 2657487 - DNA, 25 bp, Homo sapien
gcgtctgggtgttctatcactgcct

SEQ ID NO: 2657488 - DNA, 25 bp, Homo sapien
taatcaccctcactataaacgctgt

SEQ ID NO: 2657489 - DNA, 25 bp, Homo sapien
tggcaatcttagcaagcaaaacacc

SEQ ID NO: 2657490 - DNA, 25 bp, Homo sapien
aaaactgtgttgacttccttgccct

SEQ ID NO: 2657491 - DNA, 25 bp, Homo sapien
tcagcagggtgaatcagaagcagga

SEQ ID NO: 2657492 - DNA, 25 bp, Homo sapien
tgctctcaagaattccatgtgaagt

SEQ ID NO: 2657493 - DNA, 25 bp, Homo sapien
ctctcaagaattccatgtgaagttg

SEQ ID NO: 2657494 - DNA, 25 bp, Homo sapien
cctgctctcaagaattccatgtgaa

SEQ ID NO: 2657495 - DNA, 25 bp, Homo sapien
ctgctctcaagaattccatgtgaag

SEQ ID NO: 2657496 - DNA, 25 bp, Homo sapien
caagagttcagatagtgagcctagc

SEQ ID NO: 2657497 - DNA, 25 bp, Homo sapien
caagtaagatgagtataagccactc

SEQ ID NO: 2657498 - DNA, 25 bp, Homo sapien
tacttgaccttgcacctccagatag

SEQ ID NO: 2657499 - DNA, 25 bp, Homo sapien
accagcagagttgggtacaatctcc

SEQ ID NO: 2657500 - DNA, 25 bp, Homo sapien
tgtatattgatgtctggcagatccc

SEQ ID NO: 2657501 - DNA, 25 bp, Homo sapien
aaagcatcacctttgccagccactt

SEQ ID NO: 2657502 - DNA, 25 bp, Homo sapien
aacttctagctgttgtcgaaaaagt

SEQ ID NO: 2657503 - DNA, 25 bp, Homo sapien
ttccctggcgaggtcacaggcagca

SEQ ID NO: 2657504 - DNA, 25 bp, Homo sapien
aacaaacagagtggtgtcatcatcc

SEQ ID NO: 2657505 - DNA, 25 bp, Homo sapien
gctttcaccttgttcaccagggtag

SEQ ID NO: 2657506 - DNA, 25 bp, Homo sapien
tggaatttgtgcttgtccctgcaga

SEQ ID NO: 2657507 - DNA, 25 bp, Homo sapien
ttgtgggttgaaggcatgaccccag

SEQ ID NO: 2657508 - DNA, 25 bp, Homo sapien
gtgaggaattatgagagaatcaaaa

SEQ ID NO: 2657509 - DNA, 25 bp, Homo sapien
ttcttccctcttgagttagaaacaa

SEQ ID NO: 2657510 - DNA, 25 bp, Homo sapien
gcagtgtgaggaattatgagagaat

SEQ ID NO: 2657511 - DNA, 25 bp, Homo sapien
gtgtgaggaattatgagagaatcaa

SEQ ID NO: 2657512 - DNA, 25 bp, Homo sapien
catcttgtctggtaaacccatgtca

SEQ ID NO: 2657513 - DNA, 25 bp, Homo sapien
ggtaatctctgaaacaatgagtagc

SEQ ID NO: 2657514 - DNA, 25 bp, Homo sapien
gattgaggcacagcataggagaaat

SEQ ID NO: 2657515 - DNA, 25 bp, Homo sapien
tttccccgggtgagaagattgaggc

SEQ ID NO: 2657516 - DNA, 25 bp, Homo sapien
gaatgtgtgtctatcagactgacta

SEQ ID NO: 2657517 - DNA, 25 bp, Homo sapien
taaagcagattttgaatggtaaagg

SEQ ID NO: 2657518 - DNA, 25 bp, Homo sapien
tctactggtccaaacataaagcaga

SEQ ID NO: 2657519 - DNA, 25 bp, Homo sapien
gaatggtaaaggtaaatatagcaaa

SEQ ID NO: 2657520 - DNA, 25 bp, Homo sapien
taactgccacgggtctatctgattc

SEQ ID NO: 2657521 - DNA, 25 bp, Homo sapien
cacagcttcttcaacgtgctcaaaa

SEQ ID NO: 2657522 - DNA, 25 bp, Homo sapien
tctgattcttttaagacttccacag

SEQ ID NO: 2657523 - DNA, 25 bp, Homo sapien
atgtctccctctgggcctatgcaca

SEQ ID NO: 2657524 - DNA, 25 bp, Homo sapien
ctcacaatatcaagcacactttgtt

SEQ ID NO: 2657525 - DNA, 25 bp, Homo sapien
gtgtatcacggtatgggtccaaatt

SEQ ID NO: 2657526 - DNA, 25 bp, Homo sapien
cttagaggttagccattcccctcca

SEQ ID NO: 2657527 - DNA, 25 bp, Homo sapien
taaatttcgtaagcaacaactgagc

SEQ ID NO: 2657528 - DNA, 25 bp, Homo sapien
gcaccatgaggtgcgctttcagccc

SEQ ID NO: 2657529 - DNA, 25 bp, Homo sapien
gtgtcgggcccaaagcggcagttca

SEQ ID NO: 2657530 - DNA, 25 bp, Homo sapien
ttcatgagctccatcgtcttcaagc

SEQ ID NO: 2657531 - DNA, 25 bp, Homo sapien
ttgccacagtcaggcgcgtggaacc

SEQ ID NO: 2657532 - DNA, 25 bp, Homo sapien
tacaaggacctctactatgcacctg

SEQ ID NO: 2657533 - DNA, 25 bp, Homo sapien
gagaaatacaaggacctctactatg

SEQ ID NO: 2657534 - DNA, 25 bp, Homo sapien
aaggacctctactatgcacctgagc

SEQ ID NO: 2657535 - DNA, 25 bp, Homo sapien
gacctctactatgcacctgagctta

SEQ ID NO: 2657536 - DNA, 25 bp, Homo sapien
tgggccacaatttattatagccatt

SEQ ID NO: 2657537 - DNA, 25 bp, Homo sapien
atgttttgtcatatgcagtctctta

SEQ ID NO: 2657538 - DNA, 25 bp, Homo sapien
aaaaactataaactttagatgatgc

SEQ ID NO: 2657539 - DNA, 25 bp, Homo sapien
tattgtaaaactgggccacaattta

SEQ ID NO: 2657540 - DNA, 25 bp, Homo sapien
tcacaatagttaacagcatttctgt

SEQ ID NO: 2657541 - DNA, 25 bp, Homo sapien
ctgaatcacaatagttaacagcatt

SEQ ID NO: 2657542 - DNA, 25 bp, Homo sapien
ttctcattttcaaatgatggatgct

SEQ ID NO: 2657543 - DNA, 25 bp, Homo sapien
aacagcatttctgttactgttctca

SEQ ID NO: 2657544 - DNA, 25 bp, Homo sapien
cctgatgtggtagggctcaaatcca

SEQ ID NO: 2657545 - DNA, 25 bp, Homo sapien
ggtgtgcatgtccaaaccacttccc

SEQ ID NO: 2657546 - DNA, 25 bp, Homo sapien
caggttgtaggcctctctggcgtat

SEQ ID NO: 2657547 - DNA, 25 bp, Homo sapien
cagctcctctgcaattgccctgatg

SEQ ID NO: 2657548 - DNA, 25 bp, Homo sapien
cacaagagaacaatgggccagctac

SEQ ID NO: 2657549 - DNA, 25 bp, Homo sapien
ccctggaaaatctggaccacaagag

SEQ ID NO: 2657550 - DNA, 25 bp, Homo sapien
ggccagctactttgcttgtgggcaa

SEQ ID NO: 2657551 - DNA, 25 bp, Homo sapien
ccagatgactcatttgactgtcccc

SEQ ID NO: 2657552 - DNA, 25 bp, Homo sapien
cacacagtcaaaacttggtggataa

SEQ ID NO: 2657553 - DNA, 25 bp, Homo sapien
gacggaaaactgtgtccatatccat

SEQ ID NO: 2657554 - DNA, 25 bp, Homo sapien
ggataatcaggctaaagcagaactt

SEQ ID NO: 2657555 - DNA, 25 bp, Homo sapien
ggcctttcttacatttcaataacaa

SEQ ID NO: 2657556 - DNA, 25 bp, Homo sapien
gaagtctggctttgacagcgaagga

SEQ ID NO: 2657557 - DNA, 25 bp, Homo sapien
agtctggctttgacagcgaaggaca

SEQ ID NO: 2657558 - DNA, 25 bp, Homo sapien
aagtctggctttgacagcgaaggac

SEQ ID NO: 2657559 - DNA, 25 bp, Homo sapien
tgcagtgcttaaccacagcaggagc

SEQ ID NO: 2657560 - DNA, 25 bp, Homo sapien
gagctcaatatgcacacacttgtgg

SEQ ID NO: 2657561 - DNA, 25 bp, Homo sapien
gttcttggagaacaaggtgcctctc

SEQ ID NO: 2657562 - DNA, 25 bp, Homo sapien
cacagcatgattggacagtaagttc

SEQ ID NO: 2657563 - DNA, 25 bp, Homo sapien
ttcgcctggccagacctaatatctt

SEQ ID NO: 2657564 - DNA, 25 bp, Homo sapien
cacttcgcctggccagacctaatat

SEQ ID NO: 2657565 - DNA, 25 bp, Homo sapien
gtcacttcgcctggccagacctaat

SEQ ID NO: 2657566 - DNA, 25 bp, Homo sapien
agtcacttcgcctggccagacctaa

SEQ ID NO: 2657567 - DNA, 25 bp, Homo sapien
tgtctaacacaatgctaagtaaggg

SEQ ID NO: 2657568 - DNA, 25 bp, Homo sapien
tagtttataacctagctacctatga

SEQ ID NO: 2657569 - DNA, 25 bp, Homo sapien
gagaagattataagcttatcacgtg

SEQ ID NO: 2657570 - DNA, 25 bp, Homo sapien
cactgtgcacctattagtatgtcta

SEQ ID NO: 2657571 - DNA, 25 bp, Homo sapien
caagcaggagatattgtgtaaacgg

SEQ ID NO: 2657572 - DNA, 25 bp, Homo sapien
gcaggagatattgtgtaaacggtcc

SEQ ID NO: 2657573 - DNA, 25 bp, Homo sapien
gaagcaagcaggagatattgtgtaa

SEQ ID NO: 2657574 - DNA, 25 bp, Homo sapien
ctatgaagcaagcaggagatattgt

SEQ ID NO: 2657575 - DNA, 25 bp, Homo sapien
tgctattctcatgatgtcctgcact

SEQ ID NO: 2657576 - DNA, 25 bp, Homo sapien
tttgtgctggtgcagacccaaggaa

SEQ ID NO: 2657577 - DNA, 25 bp, Homo sapien
gattcggtgtggagacatctctccc

SEQ ID NO: 2657578 - DNA, 25 bp, Homo sapien
tcctatacagtttagcacacctaaa

SEQ ID NO: 2657579 - DNA, 25 bp, Homo sapien
tgtacagtaactagataaaagcctt

SEQ ID NO: 2657580 - DNA, 25 bp, Homo sapien
ctcatatcctacacctgaaacagtg

SEQ ID NO: 2657581 - DNA, 25 bp, Homo sapien
ctacacctgaaacagtgaccatcaa

SEQ ID NO: 2657582 - DNA, 25 bp, Homo sapien
tgatccacaacctcatatcctacac

SEQ ID NO: 2657583 - DNA, 25 bp, Homo sapien
gtgaccatcaacatggctgatggtg

SEQ ID NO: 2657584 - DNA, 25 bp, Homo sapien
catctccacgaggtgcactgtgctt

SEQ ID NO: 2657585 - DNA, 25 bp, Homo sapien
tcatctccacgaggtgcactgtgct

SEQ ID NO: 2657586 - DNA, 25 bp, Homo sapien
tctccacgaggtgcactgtgcttcc

SEQ ID NO: 2657587 - DNA, 25 bp, Homo sapien
tccacgaggtgcactgtgcttcctg

SEQ ID NO: 2657588 - DNA, 25 bp, Homo sapien
ttcctccttccagtctcttcaactt

SEQ ID NO: 2657589 - DNA, 25 bp, Homo sapien
agcacaatctgatgctggtctgtcc

SEQ ID NO: 2657590 - DNA, 25 bp, Homo sapien
tctgtcctacaccatgtgcgtgttc

SEQ ID NO: 2657591 - DNA, 25 bp, Homo sapien
tggtctgggccttctcagggttgcc

SEQ ID NO: 2657592 - DNA, 25 bp, Homo sapien
gataagatataagccctgtctctga

SEQ ID NO: 2657593 - DNA, 25 bp, Homo sapien
tgaaagcccacatctattgcaaagc

SEQ ID NO: 2657594 - DNA, 25 bp, Homo sapien
ttaactcaccgaatcctccctatgg

SEQ ID NO: 2657595 - DNA, 25 bp, Homo sapien
tccctatggccctaagagtaggtgg

SEQ ID NO: 2657596 - DNA, 25 bp, Homo sapien
aaggcatttgggctttcaacttctg

SEQ ID NO: 2657597 - DNA, 25 bp, Homo sapien
cttaaaggcatttgggctttcaact

SEQ ID NO: 2657598 - DNA, 25 bp, Homo sapien
aaaggcatttgggctttcaacttct

SEQ ID NO: 2657599 - DNA, 25 bp, Homo sapien
taaaggcatttgggctttcaacttc

SEQ ID NO: 2657600 - DNA, 25 bp, Homo sapien
atgcggaccgactaggcgagccttc

SEQ ID NO: 2657601 - DNA, 25 bp, Homo sapien
gcgcgggccaacacggaccttgggc

SEQ ID NO: 2657602 - DNA, 25 bp, Homo sapien
tccagacaggtggtcgacacggatg

SEQ ID NO: 2657603 - DNA, 25 bp, Homo sapien
tctttatacccgcagttgggcgtgg

SEQ ID NO: 2657604 - DNA, 25 bp, Homo sapien
cagtagctatgctatacagtccagg

SEQ ID NO: 2657605 - DNA, 25 bp, Homo sapien
tactgtgcagtaatcaccctggtgt

SEQ ID NO: 2657606 - DNA, 25 bp, Homo sapien
ggtggccaaatcactcaaagacttc

SEQ ID NO: 2657607 - DNA, 25 bp, Homo sapien
gcacatgctgtactctatgatgaga

SEQ ID NO: 2657608 - DNA, 25 bp, Homo sapien
tcctgcctttacgtagcccctcttc

SEQ ID NO: 2657609 - DNA, 25 bp, Homo sapien
atctctccagcatttaaacgttcta

SEQ ID NO: 2657610 - DNA, 25 bp, Homo sapien
cagcatttaaacgttctaggatgcc

SEQ ID NO: 2657611 - DNA, 25 bp, Homo sapien
ctgggtgctccacagcagcttcagg

SEQ ID NO: 2657612 - DNA, 25 bp, Homo sapien
taagacatagttgcccctgttctcc

SEQ ID NO: 2657613 - DNA, 25 bp, Homo sapien
tctgaggaactctcgatgaagctgg

SEQ ID NO: 2657614 - DNA, 25 bp, Homo sapien
tctgcatgacgtttgagccagctct

SEQ ID NO: 2657615 - DNA, 25 bp, Homo sapien
gttctccagcttgtcttcactcgca

SEQ ID NO: 2657616 - DNA, 25 bp, Homo sapien
tcatctgcttcgctaaatgcctctt

SEQ ID NO: 2657617 - DNA, 25 bp, Homo sapien
atctgcttcgctaaatgcctctttg

SEQ ID NO: 2657618 - DNA, 25 bp, Homo sapien
tcttcatctgcttcgctaaatgcct

SEQ ID NO: 2657619 - DNA, 25 bp, Homo sapien
gcttcgctaaatgcctctttgttaa

SEQ ID NO: 2657620 - DNA, 25 bp, Homo sapien
tttacaatagtatcttattccagaa

SEQ ID NO: 2657621 - DNA, 25 bp, Homo sapien
tattcaaacattcacatcttagttg

SEQ ID NO: 2657622 - DNA, 25 bp, Homo sapien
ctaaaatgggtgagtatatgagaca

SEQ ID NO: 2657623 - DNA, 25 bp, Homo sapien
gactgttatggaatagttcaaagct

SEQ ID NO: 2657624 - DNA, 25 bp, Homo sapien
cagctaaggtatgaaggtgtctgac

SEQ ID NO: 2657625 - DNA, 25 bp, Homo sapien
ggtgtctgactcactcctcctgcta

SEQ ID NO: 2657626 - DNA, 25 bp, Homo sapien
gggcgatgtcgcaagcagcttcatt

SEQ ID NO: 2657627 - DNA, 25 bp, Homo sapien
gcaatcaagaagtccacgttcttct

SEQ ID NO: 2657628 - DNA, 25 bp, Homo sapien
aaatgtactaggtgtatttgtctta

SEQ ID NO: 2657629 - DNA, 25 bp, Homo sapien
taaccccacacagtactcttgaaag

SEQ ID NO: 2657630 - DNA, 25 bp, Homo sapien
actattgctagttatgattgtcacc

SEQ ID NO: 2657631 - DNA, 25 bp, Homo sapien
tgtatttgtcttatctttcaccaca

SEQ ID NO: 2657632 - DNA, 25 bp, Homo sapien
ctggaatcagttaaggttagagtac

SEQ ID NO: 2657633 - DNA, 25 bp, Homo sapien
tggaatcagttaaggttagagtact

SEQ ID NO: 2657634 - DNA, 25 bp, Homo sapien
gccacaggtttaccggatgctatca

SEQ ID NO: 2657635 - DNA, 25 bp, Homo sapien
ggggggcacgccatgcaaatctcct

SEQ ID NO: 2657636 - DNA, 25 bp, Homo sapien
tgcacatggttgctgccacaggttt

SEQ ID NO: 2657637 - DNA, 25 bp, Homo sapien
gatgctatcaaggtttcaactgccc

SEQ ID NO: 2657638 - DNA, 25 bp, Homo sapien
agatgtgcactagtgtgttctttta

SEQ ID NO: 2657639 - DNA, 25 bp, Homo sapien
tcttttaagacttactaatcacaaa

SEQ ID NO: 2657640 - DNA, 25 bp, Homo sapien
tttaagacttactaatcacaaactg

SEQ ID NO: 2657641 - DNA, 25 bp, Homo sapien
gattggaaactatagactgaggata

SEQ ID NO: 2657642 - DNA, 25 bp, Homo sapien
cacagaaccctattaacattctcga

SEQ ID NO: 2657643 - DNA, 25 bp, Homo sapien
cgatgattggaaactatagactgag

SEQ ID NO: 2657644 - DNA, 25 bp, Homo sapien
taacattctcgatgattggaaacta

SEQ ID NO: 2657645 - DNA, 25 bp, Homo sapien
gaattctgggagatcgatgaatccc

SEQ ID NO: 2657646 - DNA, 25 bp, Homo sapien
tgcagtcaggagtgtggtaagccaa

SEQ ID NO: 2657647 - DNA, 25 bp, Homo sapien
gtggcagttcacaccaatgatggat

SEQ ID NO: 2657648 - DNA, 25 bp, Homo sapien
tcaggtgagctttcagtcgggcagc

SEQ ID NO: 2657649 - DNA, 25 bp, Homo sapien
cagctcctctgcaattgccctgatg

SEQ ID NO: 2657650 - DNA, 25 bp, Homo sapien
cctgatgtggtagggctcaaatcca

SEQ ID NO: 2657651 - DNA, 25 bp, Homo sapien
ggtgtgcatgtccaaaccacttccc

SEQ ID NO: 2657652 - DNA, 25 bp, Homo sapien
caggttgtaggcctctctggcgtat

SEQ ID NO: 2657653 - DNA, 25 bp, Homo sapien
ttaaaacaatctccagaaatcacct

SEQ ID NO: 2657654 - DNA, 25 bp, Homo sapien
cacctaataaggatgctttgtaaac

SEQ ID NO: 2657655 - DNA, 25 bp, Homo sapien
gcagtcttctaaatggcctcacttg

SEQ ID NO: 2657656 - DNA, 25 bp, Homo sapien
tcaggtcaaatacgttctatattct

SEQ ID NO: 2657657 - DNA, 25 bp, Homo sapien
ggaatgtaaactctgagggcaaaga

SEQ ID NO: 2657658 - DNA, 25 bp, Homo sapien
aatttaagagtattgtgcaccacac

SEQ ID NO: 2657659 - DNA, 25 bp, Homo sapien
gtcttatttgccaccgtattcccag

SEQ ID NO: 2657660 - DNA, 25 bp, Homo sapien
tcccagctctgaaaatcatgcttga

SEQ ID NO: 2657661 - DNA, 25 bp, Homo sapien
ctagcaagtcttcctcacatggcga

SEQ ID NO: 2657662 - DNA, 25 bp, Homo sapien
taaccttgccctgggctacctgaga

SEQ ID NO: 2657663 - DNA, 25 bp, Homo sapien
tgcttccttctagctcaggcctcaa

SEQ ID NO: 2657664 - DNA, 25 bp, Homo sapien
caaaccctggataacttctgcacct

SEQ ID NO: 2657665 - DNA, 25 bp, Homo sapien
gctttggtctttatatcatggaacc

SEQ ID NO: 2657666 - DNA, 25 bp, Homo sapien
taaaaagcaaaggtgtcaatctcag

SEQ ID NO: 2657667 - DNA, 25 bp, Homo sapien
ttaaataatttcacgcagcacacaa

SEQ ID NO: 2657668 - DNA, 25 bp, Homo sapien
cacaaagttgcctatcagacattaa

SEQ ID NO: 2657669 - DNA, 25 bp, Homo sapien
tcagctcggctgttcctttggtcac

SEQ ID NO: 2657670 - DNA, 25 bp, Homo sapien
tctggctttgacattgaagggttgt

SEQ ID NO: 2657671 - DNA, 25 bp, Homo sapien
cagctgctgctcagttgtggcttct

SEQ ID NO: 2657672 - DNA, 25 bp, Homo sapien
tatggccggcctgaggctatccgaa

SEQ ID NO: 2657673 - DNA, 25 bp, Homo sapien
tcacagggtgggtgcttagtgaacc

SEQ ID NO: 2657674 - DNA, 25 bp, Homo sapien
tgtgcagcagtgatttccataatac

SEQ ID NO: 2657675 - DNA, 25 bp, Homo sapien
caataatatgtgtaggatggcattc

SEQ ID NO: 2657676 - DNA, 25 bp, Homo sapien
gcccctttccatagcgctttatctg

SEQ ID NO: 2657677 - DNA, 25 bp, Homo sapien
tctgctcagccttatggcccagagg

SEQ ID NO: 2657678 - DNA, 25 bp, Homo sapien
tactggtagaaaagtgggtcacgaa

SEQ ID NO: 2657679 - DNA, 25 bp, Homo sapien
cccagtagtgggtcataaaaatcca

SEQ ID NO: 2657680 - DNA, 25 bp, Homo sapien
gttctcaatctaggaaaccaggcta

SEQ ID NO: 2657681 - DNA, 25 bp, Homo sapien
caaacatacctgtaccatctctaga

SEQ ID NO: 2657682 - DNA, 25 bp, Homo sapien
gggaaattcagctggtaatgctata

SEQ ID NO: 2657683 - DNA, 25 bp, Homo sapien
tctaagactttgagagtgggatatg

SEQ ID NO: 2657684 - DNA, 25 bp, Homo sapien
tgttgcagtccagtcaagcctaggc

SEQ ID NO: 2657685 - DNA, 25 bp, Homo sapien
tgggtcccacccattcctctgctac

SEQ ID NO: 2657686 - DNA, 25 bp, Homo sapien
tctgctaccacctgtcttactccta

SEQ ID NO: 2657687 - DNA, 25 bp, Homo sapien
cttgtttcctatacacaaagtccac

SEQ ID NO: 2657688 - DNA, 25 bp, Homo sapien
aaagtccacactgatagcttggcca

SEQ ID NO: 2657689 - DNA, 25 bp, Homo sapien
tttcgagctgttattatcacttgtc

SEQ ID NO: 2657690 - DNA, 25 bp, Homo sapien
aaggctggcgtgaatgagtctgccc

SEQ ID NO: 2657691 - DNA, 25 bp, Homo sapien
agtctgcccatttatttcgagctgt

SEQ ID NO: 2657692 - DNA, 25 bp, Homo sapien
caagctgctgtgggccatgcagtag

SEQ ID NO: 2657693 - DNA, 25 bp, Homo sapien
cgtctgctctgaatgttgttggcaa

SEQ ID NO: 2657694 - DNA, 25 bp, Homo sapien
ggctgactcatcaggttactgtgac

SEQ ID NO: 2657695 - DNA, 25 bp, Homo sapien
tatgacactttggtcgcgtctgctc

SEQ ID NO: 2657696 - DNA, 25 bp, Homo sapien
tactgtgacctgtattagctgcagc

SEQ ID NO: 2657697 - DNA, 25 bp, Homo sapien
tagacacatggtgttgaagaaggtt

SEQ ID NO: 2657698 - DNA, 25 bp, Homo sapien
catagacacatggtgttgaagaagg

SEQ ID NO: 2657699 - DNA, 25 bp, Homo sapien
tgtcatagacacatggtgttgaaga

SEQ ID NO: 2657700 - DNA, 25 bp, Homo sapien
aggtgtcatagacacatggtgttga

SEQ ID NO: 2657701 - DNA, 25 bp, Homo sapien
tggatgtgctgcaggttcaggcaac

SEQ ID NO: 2657702 - DNA, 25 bp, Homo sapien
cctaagtgaggtagaacagaggtca

SEQ ID NO: 2657703 - DNA, 25 bp, Homo sapien
tcaggtccaggcaggtcaggtctga

SEQ ID NO: 2657704 - DNA, 25 bp, Homo sapien
tgaagtcagacccttgcactagaaa

SEQ ID NO: 2657705 - DNA, 25 bp, Homo sapien
cagacctaactaatagtcctgtgag

SEQ ID NO: 2657706 - DNA, 25 bp, Homo sapien
ccttcccacagacctaactaatagt

SEQ ID NO: 2657707 - DNA, 25 bp, Homo sapien
gttagtctatgaggagtttccaaca

SEQ ID NO: 2657708 - DNA, 25 bp, Homo sapien
acaacatgcagctacaggaaaagcc

SEQ ID NO: 2657709 - DNA, 25 bp, Homo sapien
gcagcagctatttgcaggctgaatc

SEQ ID NO: 2657710 - DNA, 25 bp, Homo sapien
ggactacctgtaggtgcgtgccacc

SEQ ID NO: 2657711 - DNA, 25 bp, Homo sapien
gtgcagcagctatttgcaggctgaa

SEQ ID NO: 2657712 - DNA, 25 bp, Homo sapien
tgcagcagctatttgcaggctgaat

SEQ ID NO: 2657713 - DNA, 25 bp, Homo sapien
tttactctgatcttcgggaactgca

SEQ ID NO: 2657714 - DNA, 25 bp, Homo sapien
catctgttttctagcgagtggttct

SEQ ID NO: 2657715 - DNA, 25 bp, Homo sapien
tctagcgagtggttctccttgaaca

SEQ ID NO: 2657716 - DNA, 25 bp, Homo sapien
gaactgcacgcatctgttttctagc

SEQ ID NO: 2657717 - DNA, 25 bp, Homo sapien
gccttcagccatcttagtgcgccgg

SEQ ID NO: 2657718 - DNA, 25 bp, Homo sapien
gaaggacaataagcgtcccgggagc

SEQ ID NO: 2657719 - DNA, 25 bp, Homo sapien
tcccgggagcaggtagttcacatgg

SEQ ID NO: 2657720 - DNA, 25 bp, Homo sapien
cacctgcggccggatctgtttacaa

SEQ ID NO: 2657721 - DNA, 25 bp, Homo sapien
ctcgtcgaacacatggggccgcaca

SEQ ID NO: 2657722 - DNA, 25 bp, Homo sapien
acagccacccagtccgactcgagcg

SEQ ID NO: 2657723 - DNA, 25 bp, Homo sapien
cacccagtccgactcgagcgtctcc

SEQ ID NO: 2657724 - DNA, 25 bp, Homo sapien
tcgtcgaacacatggggccgcacag

SEQ ID NO: 2657725 - DNA, 25 bp, Homo sapien
aatctcgttccaggccacaataaag

SEQ ID NO: 2657726 - DNA, 25 bp, Homo sapien
gttccaggccacaataaagacgaat

SEQ ID NO: 2657727 - DNA, 25 bp, Homo sapien
tgccctcaatctcgttccaggccac

SEQ ID NO: 2657728 - DNA, 25 bp, Homo sapien
taaagacgaatttgtgtttctcgcg

SEQ ID NO: 2657729 - DNA, 25 bp, Homo sapien
caggtagacctggagctggtaacac

SEQ ID NO: 2657730 - DNA, 25 bp, Homo sapien
gaggcgctcactatccgtacagagg

SEQ ID NO: 2657731 - DNA, 25 bp, Homo sapien
gatcatcggtctcggtgaagagcac

SEQ ID NO: 2657732 - DNA, 25 bp, Homo sapien
taaccagagttgcagaggcagtggc

SEQ ID NO: 2657733 - DNA, 25 bp, Homo sapien
agaaaaacaaccgtcctactgcgca

SEQ ID NO: 2657734 - DNA, 25 bp, Homo sapien
aggtagatcaggaacccctcttggt

SEQ ID NO: 2657735 - DNA, 25 bp, Homo sapien
tgaagggcaaggtagatcaggaacc

SEQ ID NO: 2657736 - DNA, 25 bp, Homo sapien
tggtttccgcttgtccagaaaaaca

SEQ ID NO: 2657737 - DNA, 25 bp, Homo sapien
cataattaattcgaaatgagttatc

SEQ ID NO: 2657738 - DNA, 25 bp, Homo sapien
tcataattaattcgaaatgagttat

SEQ ID NO: 2657739 - DNA, 25 bp, Homo sapien
tgtcataattaattcgaaatgagtt

SEQ ID NO: 2657740 - DNA, 25 bp, Homo sapien
gtcataattaattcgaaatgagtta

SEQ ID NO: 2657741 - DNA, 25 bp, Homo sapien
taattataagaaggaggccggcgcg

SEQ ID NO: 2657742 - DNA, 25 bp, Homo sapien
tataattataagaaggaggccggcg

SEQ ID NO: 2657743 - DNA, 25 bp, Homo sapien
ctataattataagaaggaggccggc

SEQ ID NO: 2657744 - DNA, 25 bp, Homo sapien
ttactataattataagaaggaggcc

SEQ ID NO: 2657745 - DNA, 25 bp, Homo sapien
tacatttccacatttacactgccca

SEQ ID NO: 2657746 - DNA, 25 bp, Homo sapien
tactgagaaataaggaccagtgcca

SEQ ID NO: 2657747 - DNA, 25 bp, Homo sapien
gaccagtgccatacatttccacatt

SEQ ID NO: 2657748 - DNA, 25 bp, Homo sapien
ggtctgtttcccctactgagaaata

SEQ ID NO: 2657749 - DNA, 25 bp, Homo sapien
gagagccacactgaataagaacgca

SEQ ID NO: 2657750 - DNA, 25 bp, Homo sapien
cacactgaataagaacgcagatgga

SEQ ID NO: 2657751 - DNA, 25 bp, Homo sapien
gccacactgaataagaacgcagatg

SEQ ID NO: 2657752 - DNA, 25 bp, Homo sapien
gagccacactgaataagaacgcaga

SEQ ID NO: 2657753 - DNA, 25 bp, Homo sapien
tgtgatctcagctcactgcaacctc

SEQ ID NO: 2657754 - DNA, 25 bp, Homo sapien
ggagtgcagtggtgtgatctcagct

SEQ ID NO: 2657755 - DNA, 25 bp, Homo sapien
cagaatctcactctatgacacaggc

SEQ ID NO: 2657756 - DNA, 25 bp, Homo sapien
ccatgttgccccctggatggtcttg

SEQ ID NO: 2657757 - DNA, 25 bp, Homo sapien
tgtggaacaagacagtttcacaact

SEQ ID NO: 2657758 - DNA, 25 bp, Homo sapien
ctgtggaacaagacagtttcacaac

SEQ ID NO: 2657759 - DNA, 25 bp, Homo sapien
tggaacaagacagtttcacaactaa

SEQ ID NO: 2657760 - DNA, 25 bp, Homo sapien
gaacaagacagtttcacaactaaga

SEQ ID NO: 2657761 - DNA, 25 bp, Homo sapien
gctctctgtattcttgtgcttatcc

SEQ ID NO: 2657762 - DNA, 25 bp, Homo sapien
tgtcttcgtagcatggcaagttctc

SEQ ID NO: 2657763 - DNA, 25 bp, Homo sapien
catcctccatctgatacaagtccag

SEQ ID NO: 2657764 - DNA, 25 bp, Homo sapien
gttctctcatgtctcggaatggctg

SEQ ID NO: 2657765 - DNA, 25 bp, Homo sapien
tcggttgtagcttctgcaaggctgc

SEQ ID NO: 2657766 - DNA, 25 bp, Homo sapien
ctccaaaacattaaagaggagacat

SEQ ID NO: 2657767 - DNA, 25 bp, Homo sapien
gagtacacagtctccaaaacattaa

SEQ ID NO: 2657768 - DNA, 25 bp, Homo sapien
cacagtctccaaaacattaaagagg

SEQ ID NO: 2657769 - DNA, 25 bp, Homo sapien
ctaagagtacacagtctccaaaaca

SEQ ID NO: 2657770 - DNA, 25 bp, Homo sapien
tattctattatagtcacgtgctgcg

SEQ ID NO: 2657771 - DNA, 25 bp, Homo sapien
gatttacccatgctgtgtccatcag

SEQ ID NO: 2657772 - DNA, 25 bp, Homo sapien
gaatccatttagagtggtcaactca

SEQ ID NO: 2657773 - DNA, 25 bp, Homo sapien
tgacagctgtatacacctctgaaac

SEQ ID NO: 2657774 - DNA, 25 bp, Homo sapien
agaatttactaggagacaactggca

SEQ ID NO: 2657775 - DNA, 25 bp, Homo sapien
ttctacacttgatgaaaaagggctc

SEQ ID NO: 2657776 - DNA, 25 bp, Homo sapien
gagtagatactgaaatgcagcccat

SEQ ID NO: 2657777 - DNA, 25 bp, Homo sapien
tatttcacagaaaggcacctacaga

SEQ ID NO: 2657778 - DNA, 25 bp, Homo sapien
tcaggctaaggaccgtgtatttaat

SEQ ID NO: 2657779 - DNA, 25 bp, Homo sapien
tgaggttcattaactgcagatggct

SEQ ID NO: 2657780 - DNA, 25 bp, Homo sapien
aaaccactgaaaaggcatgcgagag

SEQ ID NO: 2657781 - DNA, 25 bp, Homo sapien
ttgtgcctgctaagggatggaaagc

SEQ ID NO: 2657782 - DNA, 25 bp, Homo sapien
gactctcaattcttcgaggtcccag

SEQ ID NO: 2657783 - DNA, 25 bp, Homo sapien
gagctttagctgttatttcaaagta

SEQ ID NO: 2657784 - DNA, 25 bp, Homo sapien
gctttccgctgccaatcagcatctt

SEQ ID NO: 2657785 - DNA, 25 bp, Homo sapien
tcttgaatagacagtacagccatgt

SEQ ID NO: 2657786 - DNA, 25 bp, Homo sapien
gagtttttccatccgttcagcagcc

SEQ ID NO: 2657787 - DNA, 25 bp, Homo sapien
tagtgcatgtttccgctgttccaag

SEQ ID NO: 2657788 - DNA, 25 bp, Homo sapien
tagctctcatcatctgcaaagtttc

SEQ ID NO: 2657789 - DNA, 25 bp, Homo sapien
tcagctcgcattcgatcatacacag

SEQ ID NO: 2657790 - DNA, 25 bp, Homo sapien
aacatctgaaatttccagactgagt

SEQ ID NO: 2657791 - DNA, 25 bp, Homo sapien
taacatctgaaatttccagactgag

SEQ ID NO: 2657792 - DNA, 25 bp, Homo sapien
acatctgaaatttccagactgagtt

SEQ ID NO: 2657793 - DNA, 25 bp, Homo sapien
cagacgtggatttgccaagggctgt

SEQ ID NO: 2657794 - DNA, 25 bp, Homo sapien
cggtgagttctatctagaccaagag

SEQ ID NO: 2657795 - DNA, 25 bp, Homo sapien
caagggctgtggtctaaagataacc

SEQ ID NO: 2657796 - DNA, 25 bp, Homo sapien
agataaccaaaacctcatcagaggc

SEQ ID NO: 2657797 - DNA, 25 bp, Homo sapien
gtacttcatacaactgaagttgcag

SEQ ID NO: 2657798 - DNA, 25 bp, Homo sapien
caatcgtgctatcgcttctgtacca

SEQ ID NO: 2657799 - DNA, 25 bp, Homo sapien
gaagttgcagatcataataatcagc

SEQ ID NO: 2657800 - DNA, 25 bp, Homo sapien
gatgctttctagttgcgctgtcaat

SEQ ID NO: 2657801 - DNA, 25 bp, Homo sapien
taagtacgcagatgctgccatctct

SEQ ID NO: 2657802 - DNA, 25 bp, Homo sapien
tggcctccatgctttcgtaagtgtc

SEQ ID NO: 2657803 - DNA, 25 bp, Homo sapien
tcatagtataccacttcatctcttt

SEQ ID NO: 2657804 - DNA, 25 bp, Homo sapien
ttctctctgtaagtacgcagatgct

SEQ ID NO: 2657805 - DNA, 25 bp, Homo sapien
ggcagaaacccgtccacgtcttgct

SEQ ID NO: 2657806 - DNA, 25 bp, Homo sapien
gcagaaacccgtccacgtcttgctt

SEQ ID NO: 2657807 - DNA, 25 bp, Homo sapien
tcttggcagaaacccgtccacgtct

SEQ ID NO: 2657808 - DNA, 25 bp, Homo sapien
ttggcagaaacccgtccacgtcttg

SEQ ID NO: 2657809 - DNA, 25 bp, Homo sapien
cagctccacgatagttaacatctgg

SEQ ID NO: 2657810 - DNA, 25 bp, Homo sapien
aacagctccacgatagttaacatct

SEQ ID NO: 2657811 - DNA, 25 bp, Homo sapien
gaaacagctccacgatagttaacat

SEQ ID NO: 2657812 - DNA, 25 bp, Homo sapien
ctagaaacagctccacgatagttaa

SEQ ID NO: 2657813 - DNA, 25 bp, Homo sapien
ccgagtgcgctgttggattttttca

SEQ ID NO: 2657814 - DNA, 25 bp, Homo sapien
tagttgtactgtgtgatgggttcta

SEQ ID NO: 2657815 - DNA, 25 bp, Homo sapien
gtgatgggttctatattcatcttca

SEQ ID NO: 2657816 - DNA, 25 bp, Homo sapien
tatattcatcttcaatccgagtgcg

SEQ ID NO: 2657817 - DNA, 25 bp, Homo sapien
tcttggctaacccaggcactttttc

SEQ ID NO: 2657818 - DNA, 25 bp, Homo sapien
ctgtttaaatgttcgaagtctatcc

SEQ ID NO: 2657819 - DNA, 25 bp, Homo sapien
ctctcttggctaacccaggcacttt

SEQ ID NO: 2657820 - DNA, 25 bp, Homo sapien
gaagtctatccagtgttctctgtct

SEQ ID NO: 2657821 - DNA, 25 bp, Homo sapien
tcttcttgcatgagctagtcgtaat

SEQ ID NO: 2657822 - DNA, 25 bp, Homo sapien
tgtaacacacttggtaaagagtcac

SEQ ID NO: 2657823 - DNA, 25 bp, Homo sapien
ttaagtatgacttgcccaggatacc

SEQ ID NO: 2657824 - DNA, 25 bp, Homo sapien
gagtcacaatgatcctcttggagaa

SEQ ID NO: 2657825 - DNA, 25 bp, Homo sapien
tttatggtaacagaacatggttcga

SEQ ID NO: 2657826 - DNA, 25 bp, Homo sapien
gaggcagttcagaggtaacaccact

SEQ ID NO: 2657827 - DNA, 25 bp, Homo sapien
tgtgatggcccacgcttgactcttc

SEQ ID NO: 2657828 - DNA, 25 bp, Homo sapien
tatcttcaagttgcacaaggctctg

SEQ ID NO: 2657829 - DNA, 25 bp, Homo sapien
ctggctgctgtcaaagaggtgtgct

SEQ ID NO: 2657830 - DNA, 25 bp, Homo sapien
cactggctgactttgggatcctctt

SEQ ID NO: 2657831 - DNA, 25 bp, Homo sapien
gggcactggctgactttgggatcct

SEQ ID NO: 2657832 - DNA, 25 bp, Homo sapien
ctgcaaaccttcagcagtctttctg

SEQ ID NO: 2657833 - DNA, 25 bp, Homo sapien
tgaaaactaccacgcttcaaggagg

SEQ ID NO: 2657834 - DNA, 25 bp, Homo sapien
tatcgggtagaagtgtgaaggattc

SEQ ID NO: 2657835 - DNA, 25 bp, Homo sapien
aaaggaggcagagttcgctgttcaa

SEQ ID NO: 2657836 - DNA, 25 bp, Homo sapien
catggatgctccgtgttagagggtc

SEQ ID NO: 2657837 - DNA, 25 bp, Homo sapien
gaactgtaaagtgggagacaaccta

SEQ ID NO: 2657838 - DNA, 25 bp, Homo sapien
gaagctatgagtaacatcccagcca

SEQ ID NO: 2657839 - DNA, 25 bp, Homo sapien
ccagctgtggaattagtcagtgcaa

SEQ ID NO: 2657840 - DNA, 25 bp, Homo sapien
tcttgaatcacgaggcacaggttgc

SEQ ID NO: 2657841 - DNA, 25 bp, Homo sapien
cagtagatctctgtcaacccagtgt

SEQ ID NO: 2657842 - DNA, 25 bp, Homo sapien
gcttaactggccattacaaggatgt

SEQ ID NO: 2657843 - DNA, 25 bp, Homo sapien
gaacgactggaaagtgataacctgc

SEQ ID NO: 2657844 - DNA, 25 bp, Homo sapien
caactgaggaaccaagtgcttaaac

SEQ ID NO: 2657845 - DNA, 25 bp, Homo sapien
taggaacctgcaccttaaggcaagg

SEQ ID NO: 2657846 - DNA, 25 bp, Homo sapien
tacagggtactgcacactgagtcca

SEQ ID NO: 2657847 - DNA, 25 bp, Homo sapien
tagctggctgccaacaatactctgc

SEQ ID NO: 2657848 - DNA, 25 bp, Homo sapien
tgaaatgccagccacggagacttgt

SEQ ID NO: 2657849 - DNA, 25 bp, Homo sapien
ttgaagcacataaaaagtacgggcg

SEQ ID NO: 2657850 - DNA, 25 bp, Homo sapien
tcaagtgggcagtaacattaatctc

SEQ ID NO: 2657851 - DNA, 25 bp, Homo sapien
caaacagcggtttgtggatacagaa

SEQ ID NO: 2657852 - DNA, 25 bp, Homo sapien
tagccaggcattcctcatactgctg

SEQ ID NO: 2657853 - DNA, 25 bp, Homo sapien
gatgcaacatgctctaacagtaagg

SEQ ID NO: 2657854 - DNA, 25 bp, Homo sapien
gatagagcccttaaggacccaatag

SEQ ID NO: 2657855 - DNA, 25 bp, Homo sapien
tctgtgatataaagtggccatgcca

SEQ ID NO: 2657856 - DNA, 25 bp, Homo sapien
ttccaaacagagagaatgctgccca

SEQ ID NO: 2657857 - DNA, 25 bp, Homo sapien
cagcaacggtgctagtagatgtagg

SEQ ID NO: 2657858 - DNA, 25 bp, Homo sapien
caaggggccgacatagaggataaca

SEQ ID NO: 2657859 - DNA, 25 bp, Homo sapien
gacatctggtgagcaggctctgcca

SEQ ID NO: 2657860 - DNA, 25 bp, Homo sapien
tagttacaaggctctttatcagcaa

SEQ ID NO: 2657861 - DNA, 25 bp, Homo sapien
tttgctttctatgccacattgtcct

SEQ ID NO: 2657862 - DNA, 25 bp, Homo sapien
tgctttctatgccacattgtcctct

SEQ ID NO: 2657863 - DNA, 25 bp, Homo sapien
gctttctatgccacattgtcctctc

SEQ ID NO: 2657864 - DNA, 25 bp, Homo sapien
tcccagtggatccctctttgctttc

SEQ ID NO: 2657865 - DNA, 25 bp, Homo sapien
aataaaagaccttataggctgggca

SEQ ID NO: 2657866 - DNA, 25 bp, Homo sapien
tcttggtaccagtatgcagcactta

SEQ ID NO: 2657867 - DNA, 25 bp, Homo sapien
cagcacttacaggagccctttgagc

SEQ ID NO: 2657868 - DNA, 25 bp, Homo sapien
cataaatagcgtctggaagcaggac

SEQ ID NO: 2657869 - DNA, 25 bp, Homo sapien
tccccaccttgagctacttgttaaa

SEQ ID NO: 2657870 - DNA, 25 bp, Homo sapien
caacatctagcaacatactttggac

SEQ ID NO: 2657871 - DNA, 25 bp, Homo sapien
agtgcctagtcaccaaacgtcttgc

SEQ ID NO: 2657872 - DNA, 25 bp, Homo sapien
aacgtcttgcagtgcttctaatgcc

SEQ ID NO: 2657873 - DNA, 25 bp, Homo sapien
gaaataactcatggctctaggatct

SEQ ID NO: 2657874 - DNA, 25 bp, Homo sapien
caaagatcagggtgaagacacttcg

SEQ ID NO: 2657875 - DNA, 25 bp, Homo sapien
tctgctaccaaagtccaagcgattc

SEQ ID NO: 2657876 - DNA, 25 bp, Homo sapien
tggatacttgggtcgattcccctgt

SEQ ID NO: 2657877 - DNA, 25 bp, Homo sapien
gacctggagggacaactgtctgact

SEQ ID NO: 2657878 - DNA, 25 bp, Homo sapien
agaaattcggaacaaagacctggag

SEQ ID NO: 2657879 - DNA, 25 bp, Homo sapien
ttggccaagctactagaatgcagct

SEQ ID NO: 2657880 - DNA, 25 bp, Homo sapien
tgtctgacttagagcaacgtctgga

SEQ ID NO: 2657881 - DNA, 25 bp, Homo sapien
ttcttgaggcacattgttagattgc

SEQ ID NO: 2657882 - DNA, 25 bp, Homo sapien
ggcacattgttagattgctatttga

SEQ ID NO: 2657883 - DNA, 25 bp, Homo sapien
cttgaggcacattgttagattgcta

SEQ ID NO: 2657884 - DNA, 25 bp, Homo sapien
agatgttctgtaggccaggcgaggt

SEQ ID NO: 2657885 - DNA, 25 bp, Homo sapien
atccaacccactttaacagccatct

SEQ ID NO: 2657886 - DNA, 25 bp, Homo sapien
cttttgtccattcaaaagcttcagt

SEQ ID NO: 2657887 - DNA, 25 bp, Homo sapien
tttgtccattcaaaagcttcagtga

SEQ ID NO: 2657888 - DNA, 25 bp, Homo sapien
agaaacttttgtccattcaaaagct

SEQ ID NO: 2657889 - DNA, 25 bp, Homo sapien
aacttttgtccattcaaaagcttca

SEQ ID NO: 2657890 - DNA, 25 bp, Homo sapien
ctttttccgtctgtcctgagtgtaa

SEQ ID NO: 2657891 - DNA, 25 bp, Homo sapien
tttccgtctgtcctgagtgtaacac

SEQ ID NO: 2657892 - DNA, 25 bp, Homo sapien
tccgtctgtcctgagtgtaacacat

SEQ ID NO: 2657893 - DNA, 25 bp, Homo sapien
cttttgatactcctttttccgtctg

SEQ ID NO: 2657894 - DNA, 25 bp, Homo sapien
tgttgtgtttcttggcaaactgcat

SEQ ID NO: 2657895 - DNA, 25 bp, Homo sapien
attcgtatctttgtgcttcgggttt

SEQ ID NO: 2657896 - DNA, 25 bp, Homo sapien
tttgtgcttcgggtttcttgatacc

SEQ ID NO: 2657897 - DNA, 25 bp, Homo sapien
gtttcttggcaaactgcatgttcct

SEQ ID NO: 2657898 - DNA, 25 bp, Homo sapien
gggtggacagtgtaggcaagttgag

SEQ ID NO: 2657899 - DNA, 25 bp, Homo sapien
tagagatatctactctgaagcctct

SEQ ID NO: 2657900 - DNA, 25 bp, Homo sapien
gttggcagatagagatatctactct

SEQ ID NO: 2657901 - DNA, 25 bp, Homo sapien
atccttgtccttggcctttggccag

SEQ ID NO: 2657902 - DNA, 25 bp, Homo sapien
gcctctgtaggggcctgggcacctt

SEQ ID NO: 2657903 - DNA, 25 bp, Homo sapien
gaatagagttgatcgctgtctcctc

SEQ ID NO: 2657904 - DNA, 25 bp, Homo sapien
tataggactcggtgaagccggattc

SEQ ID NO: 2657905 - DNA, 25 bp, Homo sapien
tccctgagtgtcgaggaggacatga

SEQ ID NO: 2657906 - DNA, 25 bp, Homo sapien
ttaactcgaataagcaaatgccgcc

SEQ ID NO: 2657907 - DNA, 25 bp, Homo sapien
tgggatttttattcacgtgcacgtc

SEQ ID NO: 2657908 - DNA, 25 bp, Homo sapien
ctaatgtgagcgcagggaagccgtg

SEQ ID NO: 2657909 - DNA, 25 bp, Homo sapien
gccgtggcattactgcttttgggat

SEQ ID NO: 2657910 - DNA, 25 bp, Homo sapien
acgtcgcgtttggttgctcgctcca

SEQ ID NO: 2657911 - DNA, 25 bp, Homo sapien
gcagcggcaggcttcaggccgccgg

SEQ ID NO: 2657912 - DNA, 25 bp, Homo sapien
cggcaggcttcaggccgccggggct

SEQ ID NO: 2657913 - DNA, 25 bp, Homo sapien
ctgctctgcccggcggtagccggag

SEQ ID NO: 2657914 - DNA, 25 bp, Homo sapien
gctgctctgcccggcggtagccgga

SEQ ID NO: 2657915 - DNA, 25 bp, Homo sapien
gctagcttcacgccggcggcgctga

SEQ ID NO: 2657916 - DNA, 25 bp, Homo sapien
gccgcgctagcttcacgccggcggc

SEQ ID NO: 2657917 - DNA, 25 bp, Homo sapien
ctcccgtcccttcccgcgagcagag

SEQ ID NO: 2657918 - DNA, 25 bp, Homo sapien
tctgccgccgcgctagcttcacgcc

SEQ ID NO: 2657919 - DNA, 25 bp, Homo sapien
tgagctgcgggtgacgtgtgtgcgg

SEQ ID NO: 2657920 - DNA, 25 bp, Homo sapien
ctcggtgacgtgagctgcgggtgac

SEQ ID NO: 2657921 - DNA, 25 bp, Homo sapien
cgtgtgtgcggagagaagcgcgctg

SEQ ID NO: 2657922 - DNA, 25 bp, Homo sapien
ctgacgttgctatttaaaggtcctc

SEQ ID NO: 2657923 - DNA, 25 bp, Homo sapien
ttagcagtacttccggccgcgtgac

SEQ ID NO: 2657924 - DNA, 25 bp, Homo sapien
gtacttccggccgcgtgacatcatc

SEQ ID NO: 2657925 - DNA, 25 bp, Homo sapien
agcagtacttccggccgcgtgacat

SEQ ID NO: 2657926 - DNA, 25 bp, Homo sapien
cagtacttccggccgcgtgacatca

SEQ ID NO: 2657927 - DNA, 25 bp, Homo sapien
gttgcaaggaaatctcctcctcccg

SEQ ID NO: 2657928 - DNA, 25 bp, Homo sapien
gcttccttgttcgagctcctctcgg

SEQ ID NO: 2657929 - DNA, 25 bp, Homo sapien
tcactcaggtttggcacatttgttg

SEQ ID NO: 2657930 - DNA, 25 bp, Homo sapien
tcctctcgggctgtctcctgtgctt

SEQ ID NO: 2657931 - DNA, 25 bp, Homo sapien
tcttggcctcctgcttcgtcatgac

SEQ ID NO: 2657932 - DNA, 25 bp, Homo sapien
ttggcctcctgcttcgtcatgacag

SEQ ID NO: 2657933 - DNA, 25 bp, Homo sapien
gtcatgacagcaggggccggagcca

SEQ ID NO: 2657934 - DNA, 25 bp, Homo sapien
tttcttggcctcctgcttcgtcatg

SEQ ID NO: 2657935 - DNA, 25 bp, Homo sapien
gctatctgccactgcaacgtgatac

SEQ ID NO: 2657936 - DNA, 25 bp, Homo sapien
tggttcagagcctgaatgaactggt

SEQ ID NO: 2657937 - DNA, 25 bp, Homo sapien
ctatctgccactgcaacgtgataca

SEQ ID NO: 2657938 - DNA, 25 bp, Homo sapien
cgttgtgtgccacacgttgtgtgca

SEQ ID NO: 2657939 - DNA, 25 bp, Homo sapien
caggaagacaaccagacgttgtgtg

SEQ ID NO: 2657940 - DNA, 25 bp, Homo sapien
ctcaaaggccaggtagtctcttaat

SEQ ID NO: 2657941 - DNA, 25 bp, Homo sapien
caaccagacgttgtgtgccacacgt

SEQ ID NO: 2657942 - DNA, 25 bp, Homo sapien
tgcttcccccttcataatgtagtaa

SEQ ID NO: 2657943 - DNA, 25 bp, Homo sapien
ccagttttgcttcccccttcataat

SEQ ID NO: 2657944 - DNA, 25 bp, Homo sapien
cttcccccttcataatgtagtaagg

SEQ ID NO: 2657945 - DNA, 25 bp, Homo sapien
tgtcccagttttgcttcccccttca

SEQ ID NO: 2657946 - DNA, 25 bp, Homo sapien
tcccagtgatggcggagctcatcat

SEQ ID NO: 2657947 - DNA, 25 bp, Homo sapien
ggcggagctcatcatatatgttgta

SEQ ID NO: 2657948 - DNA, 25 bp, Homo sapien
ttgccttcccagtgatggcggagct

SEQ ID NO: 2657949 - DNA, 25 bp, Homo sapien
tgaaggtgacaatgatccaggtctt

SEQ ID NO: 2657950 - DNA, 25 bp, Homo sapien
atttgttgtagacaccactgcactt

SEQ ID NO: 2657951 - DNA, 25 bp, Homo sapien
aagtgaagcaatggaagtagagaag

SEQ ID NO: 2657952 - DNA, 25 bp, Homo sapien
gtcaagtgaagcaatggaagtagag

SEQ ID NO: 2657953 - DNA, 25 bp, Homo sapien
tttgttgtagacaccactgcacttg

SEQ ID NO: 2657954 - DNA, 25 bp, Homo sapien
ttacaggcgtgataaattttgtatt

SEQ ID NO: 2657955 - DNA, 25 bp, Homo sapien
taaagtcacccgtaatctcaccatc

SEQ ID NO: 2657956 - DNA, 25 bp, Homo sapien
tttaaagtcacccgtaatctcacca

SEQ ID NO: 2657957 - DNA, 25 bp, Homo sapien
cccgtaatctcaccatcctaacaaa

SEQ ID NO: 2657958 - DNA, 25 bp, Homo sapien
tgctgccgtagattctataggaacc

SEQ ID NO: 2657959 - DNA, 25 bp, Homo sapien
ctctgctgccgtagattctatagga

SEQ ID NO: 2657960 - DNA, 25 bp, Homo sapien
ctgccgtagattctataggaaccat

SEQ ID NO: 2657961 - DNA, 25 bp, Homo sapien
tctgctgccgtagattctataggaa

SEQ ID NO: 2657962 - DNA, 25 bp, Homo sapien
gttttggcccaatataaatacagct

SEQ ID NO: 2657963 - DNA, 25 bp, Homo sapien
ggccatatttaacctacccaatctg

SEQ ID NO: 2657964 - DNA, 25 bp, Homo sapien
tacccaatctgagtgtatccttaag

SEQ ID NO: 2657965 - DNA, 25 bp, Homo sapien
ttagacatgatagcatatttcctga

SEQ ID NO: 2657966 - DNA, 25 bp, Homo sapien
gccttctattgattgggtggagccc

SEQ ID NO: 2657967 - DNA, 25 bp, Homo sapien
gatgttccagctcaaaggcaattac

SEQ ID NO: 2657968 - DNA, 25 bp, Homo sapien
gcaattacataagaggaattccctc

SEQ ID NO: 2657969 - DNA, 25 bp, Homo sapien
aggttcctgattcctcctgattcca

SEQ ID NO: 2657970 - DNA, 25 bp, Homo sapien
cagtctcctgggtccgtttattctt

SEQ ID NO: 2657971 - DNA, 25 bp, Homo sapien
cccctatcaagaacaggcataggct

SEQ ID NO: 2657972 - DNA, 25 bp, Homo sapien
tattcttcctaataatcatttactg

SEQ ID NO: 2657973 - DNA, 25 bp, Homo sapien
tcaaaaaaattgtctacactttcca

SEQ ID NO: 2657974 - DNA, 25 bp, Homo sapien
tgtctttgtagcgaggagcactgcg

SEQ ID NO: 2657975 - DNA, 25 bp, Homo sapien
gaggacgagctgaccacgtactgag

SEQ ID NO: 2657976 - DNA, 25 bp, Homo sapien
gttgagttgcccaccagccttaggg

SEQ ID NO: 2657977 - DNA, 25 bp, Homo sapien
cataaggctcctatggaggacgagc

SEQ ID NO: 2657978 - DNA, 25 bp, Homo sapien
gtctagattttgagctgttctgcaa

SEQ ID NO: 2657979 - DNA, 25 bp, Homo sapien
tagattttgagctgttctgcaaacc

SEQ ID NO: 2657980 - DNA, 25 bp, Homo sapien
tgcagtctagattttgagctgttct

SEQ ID NO: 2657981 - DNA, 25 bp, Homo sapien
ttttgagctgttctgcaaaccatct

SEQ ID NO: 2657982 - DNA, 25 bp, Homo sapien
aattgtgtccctttttgtcagcata

SEQ ID NO: 2657983 - DNA, 25 bp, Homo sapien
aaatgtgaccgaccagacaaactgg

SEQ ID NO: 2657984 - DNA, 25 bp, Homo sapien
gcttccactaacaattcctccaggt

SEQ ID NO: 2657985 - DNA, 25 bp, Homo sapien
ggacagtcagactgagtcaggcctg

SEQ ID NO: 2657986 - DNA, 25 bp, Homo sapien
attttagtaattcaccaggcacggt

SEQ ID NO: 2657987 - DNA, 25 bp, Homo sapien
tgtgcctggtctaacttctaaaaaa

SEQ ID NO: 2657988 - DNA, 25 bp, Homo sapien
tgagatagggactcactcattgccc

SEQ ID NO: 2657989 - DNA, 25 bp, Homo sapien
cattgtgcctggtctaacttctaaa

SEQ ID NO: 2657990 - DNA, 25 bp, Homo sapien
tggttgctaccataaggagagaacc

SEQ ID NO: 2657991 - DNA, 25 bp, Homo sapien
ctgaacaacgtggttgctaccataa

SEQ ID NO: 2657992 - DNA, 25 bp, Homo sapien
caacgtggttgctaccataaggaga

SEQ ID NO: 2657993 - DNA, 25 bp, Homo sapien
gctaccataaggagagaacctgaag

SEQ ID NO: 2657994 - DNA, 25 bp, Homo sapien
gtgcagccgttctagctgtaacaga

SEQ ID NO: 2657995 - DNA, 25 bp, Homo sapien
gccgttctagctgtaacagacgttt

SEQ ID NO: 2657996 - DNA, 25 bp, Homo sapien
tgcagccgttctagctgtaacagac

SEQ ID NO: 2657997 - DNA, 25 bp, Homo sapien
cagccgttctagctgtaacagacgt

SEQ ID NO: 2657998 - DNA, 25 bp, Homo sapien
ctgtcaaagacacccggaagaccga

SEQ ID NO: 2657999 - DNA, 25 bp, Homo sapien
caaagacacccggaagaccgacgtg

SEQ ID NO: 2658000 - DNA, 25 bp, Homo sapien
tgtcaaagacacccggaagaccgac

SEQ ID NO: 2658001 - DNA, 25 bp, Homo sapien
cgtacttggtcgtagctttctcccg

SEQ ID NO: 2658002 - DNA, 25 bp, Homo sapien
gcccgtgggacagctaggcccagct

SEQ ID NO: 2658003 - DNA, 25 bp, Homo sapien
ttctaaggcccgagctgggcgtact

SEQ ID NO: 2658004 - DNA, 25 bp, Homo sapien
gcactgcccgttcagaagttctaag

SEQ ID NO: 2658005 - DNA, 25 bp, Homo sapien
ctccgggaagggctaagcagggcct

SEQ ID NO: 2658006 - DNA, 25 bp, Homo sapien
tccgggaagggctaagcagggccta

SEQ ID NO: 2658007 - DNA, 25 bp, Homo sapien
ggtgtcctccgggaagggctaagca

SEQ ID NO: 2658008 - DNA, 25 bp, Homo sapien
gtgtcctccgggaagggctaagcag

SEQ ID NO: 2658009 - DNA, 25 bp, Homo sapien
cagatgccgcccataaatttggaat

SEQ ID NO: 2658010 - DNA, 25 bp, Homo sapien
cgagtaagcaaagtaagcggtccta

SEQ ID NO: 2658011 - DNA, 25 bp, Homo sapien
ggcagtacgcgaggaatagaaaacg

SEQ ID NO: 2658012 - DNA, 25 bp, Homo sapien
tgggcctacactgctgcgttcctct

SEQ ID NO: 2658013 - DNA, 25 bp, Homo sapien
gaaacaccatgcaagggtcccaaga

SEQ ID NO: 2658014 - DNA, 25 bp, Homo sapien
tcaccaccctttgaaacaccatgca

SEQ ID NO: 2658015 - DNA, 25 bp, Homo sapien
caccctttgaaacaccatgcaaggg

SEQ ID NO: 2658016 - DNA, 25 bp, Homo sapien
ttgaaacaccatgcaagggtcccaa

SEQ ID NO: 2658017 - DNA, 25 bp, Homo sapien
cttgagagacgaagagcttttctac

SEQ ID NO: 2658018 - DNA, 25 bp, Homo sapien
tgagagacgaagagcttttctacaa

SEQ ID NO: 2658019 - DNA, 25 bp, Homo sapien
ttgagagacgaagagcttttctaca

SEQ ID NO: 2658020 - DNA, 25 bp, Homo sapien
cagatgtttagtctagggcagaaat

SEQ ID NO: 2658021 - DNA, 25 bp, Homo sapien
cagccagatgtttagtctagggcag

SEQ ID NO: 2658022 - DNA, 25 bp, Homo sapien
ccacagccagatgtttagtctaggg

SEQ ID NO: 2658023 - DNA, 25 bp, Homo sapien
aaattcccagaaatatatcaagctc

SEQ ID NO: 2658024 - DNA, 25 bp, Homo sapien
taaaattccctaggttggccacaga

SEQ ID NO: 2658025 - DNA, 25 bp, Homo sapien
tggaccagagacaaggttaacctcc

SEQ ID NO: 2658026 - DNA, 25 bp, Homo sapien
caccagtccagggttcataacagat

SEQ ID NO: 2658027 - DNA, 25 bp, Homo sapien
gggaatcccctagcaaaaatacata

SEQ ID NO: 2658028 - DNA, 25 bp, Homo sapien
tgatgggaagctaacagttcaaatt

SEQ ID NO: 2658029 - DNA, 25 bp, Homo sapien
gatgggaagctaacagttcaaatta

SEQ ID NO: 2658030 - DNA, 25 bp, Homo sapien
gtgatgggaagctaacagttcaaat

SEQ ID NO: 2658031 - DNA, 25 bp, Homo sapien
acagaaacgatgtcaggaacaaatg

SEQ ID NO: 2658032 - DNA, 25 bp, Homo sapien
tctcacttaaaataggcatccatgg

SEQ ID NO: 2658033 - DNA, 25 bp, Homo sapien
tgggacacaaggcaagaccctatct

SEQ ID NO: 2658034 - DNA, 25 bp, Homo sapien
taacattgtaacagaaggtccagaa

SEQ ID NO: 2658035 - DNA, 25 bp, Homo sapien
tggaagtgaacatgtattcttctac

SEQ ID NO: 2658036 - DNA, 25 bp, Homo sapien
tattatgttgttgatgatttggagt

SEQ ID NO: 2658037 - DNA, 25 bp, Homo sapien
tgaagggtgggcgacccaaaattga

SEQ ID NO: 2658038 - DNA, 25 bp, Homo sapien
tatgttgttgatgatttggagtgaa

SEQ ID NO: 2658039 - DNA, 25 bp, Homo sapien
ttatgttgttgatgatttggagtga

SEQ ID NO: 2658040 - DNA, 25 bp, Homo sapien
ggtctgtattggactgacatttcca

SEQ ID NO: 2658041 - DNA, 25 bp, Homo sapien
tccttcctcgaaataatggggaagc

SEQ ID NO: 2658042 - DNA, 25 bp, Homo sapien
gaagctgaggtctgtattggactga

SEQ ID NO: 2658043 - DNA, 25 bp, Homo sapien
gctgtaatgacacagctctagacaa

SEQ ID NO: 2658044 - DNA, 25 bp, Homo sapien
gggcaacggccatattaagacacag

SEQ ID NO: 2658045 - DNA, 25 bp, Homo sapien
caacaccttgatctagcctccagaa

SEQ ID NO: 2658046 - DNA, 25 bp, Homo sapien
gttatggcaaccctaccctagcaaa

SEQ ID NO: 2658047 - DNA, 25 bp, Homo sapien
tcatggaaccttacctgtgtgagat

SEQ ID NO: 2658048 - DNA, 25 bp, Homo sapien
tgttcagcacaagaaatgcctctca

SEQ ID NO: 2658049 - DNA, 25 bp, Homo sapien
gatacgattaagtgagctgagtgct

SEQ ID NO: 2658050 - DNA, 25 bp, Homo sapien
tcatcagcaggaaagaccaattaag

SEQ ID NO: 2658051 - DNA, 25 bp, Homo sapien
gacattggacaacgaagaaattcaa

SEQ ID NO: 2658052 - DNA, 25 bp, Homo sapien
atataccttagtaattaaagataca

SEQ ID NO: 2658053 - DNA, 25 bp, Homo sapien
tataccttagtaattaaagatacaa

SEQ ID NO: 2658054 - DNA, 25 bp, Homo sapien
ttcacctgataaaggcactatctgg

SEQ ID NO: 2658055 - DNA, 25 bp, Homo sapien
gcattgagtatcttcgttcacctga

SEQ ID NO: 2658056 - DNA, 25 bp, Homo sapien
gtggaacacatctgactatatctgg

SEQ ID NO: 2658057 - DNA, 25 bp, Homo sapien
caatttctcgaaaaggtggaacaca

SEQ ID NO: 2658058 - DNA, 25 bp, Homo sapien
ggcacgttctacttaatccaggata

SEQ ID NO: 2658059 - DNA, 25 bp, Homo sapien
atcaaagtaatgtttggacagaaaa

SEQ ID NO: 2658060 - DNA, 25 bp, Homo sapien
cagaaaattaggctgaatagtactt

SEQ ID NO: 2658061 - DNA, 25 bp, Homo sapien
tgtctgggttctaataaaattttca

SEQ ID NO: 2658062 - DNA, 25 bp, Homo sapien
aatttatacataggctttcatatcc

SEQ ID NO: 2658063 - DNA, 25 bp, Homo sapien
gctttcatatccacgatagtcttta

SEQ ID NO: 2658064 - DNA, 25 bp, Homo sapien
cacccagcaaaaaggttcttatacg

SEQ ID NO: 2658065 - DNA, 25 bp, Homo sapien
gttcttatacgttcattcaaaggtc

SEQ ID NO: 2658066 - DNA, 25 bp, Homo sapien
tactgtgcattcaaggcttcaaacc

SEQ ID NO: 2658067 - DNA, 25 bp, Homo sapien
taaacattagctaccactgtcacag

SEQ ID NO: 2658068 - DNA, 25 bp, Homo sapien
caaactgtcgagcacaatgccagta

SEQ ID NO: 2658069 - DNA, 25 bp, Homo sapien
cagaggtaaaccaaacaaactgtcg

SEQ ID NO: 2658070 - DNA, 25 bp, Homo sapien
taagaatccgtatctctagcctgac

SEQ ID NO: 2658071 - DNA, 25 bp, Homo sapien
cagtgtatctcccacgcctagagct

SEQ ID NO: 2658072 - DNA, 25 bp, Homo sapien
tctactctagggtgtttcaactgtc

SEQ ID NO: 2658073 - DNA, 25 bp, Homo sapien
tagcctcagatagccctgtgctggt

SEQ ID NO: 2658074 - DNA, 25 bp, Homo sapien
tgtagtagggtacacaggacagccc

SEQ ID NO: 2658075 - DNA, 25 bp, Homo sapien
taaaggcacatgtccacagactcat

SEQ ID NO: 2658076 - DNA, 25 bp, Homo sapien
tattctgtctcagcaaatgaggcca

SEQ ID NO: 2658077 - DNA, 25 bp, Homo sapien
taagctggcctaaaatgtcgatatt

SEQ ID NO: 2658078 - DNA, 25 bp, Homo sapien
aatatgcaacagaggacctacatag

SEQ ID NO: 2658079 - DNA, 25 bp, Homo sapien
aggacctacatagcccacgtgccta

SEQ ID NO: 2658080 - DNA, 25 bp, Homo sapien
gcaacagaggacctacatagcccac

SEQ ID NO: 2658081 - DNA, 25 bp, Homo sapien
tacatagcccacgtgcctaaatatt

SEQ ID NO: 2658082 - DNA, 25 bp, Homo sapien
caggctgcagggtaacatttctaca

SEQ ID NO: 2658083 - DNA, 25 bp, Homo sapien
gggagagatacaccacattcatgga

SEQ ID NO: 2658084 - DNA, 25 bp, Homo sapien
ctatgtaccaagagatgtgcaggat

SEQ ID NO: 2658085 - DNA, 25 bp, Homo sapien
gacaataaagcacaccagaagaatg

SEQ ID NO: 2658086 - DNA, 25 bp, Homo sapien
aatactcaggagtgggacaaatacc

SEQ ID NO: 2658087 - DNA, 25 bp, Homo sapien
cagaggcattctgggcaatttggca

SEQ ID NO: 2658088 - DNA, 25 bp, Homo sapien
tggtcaccttaagggcacaaacacg

SEQ ID NO: 2658089 - DNA, 25 bp, Homo sapien
taaaacacaattgactgaccgggta

SEQ ID NO: 2658090 - DNA, 25 bp, Homo sapien
atttttcaatctttgtagagacagg

SEQ ID NO: 2658091 - DNA, 25 bp, Homo sapien
cacccagctaatttttcaatctttg

SEQ ID NO: 2658092 - DNA, 25 bp, Homo sapien
aatttttcaatctttgtagagacag

SEQ ID NO: 2658093 - DNA, 25 bp, Homo sapien
ccagctaatttttcaatctttgtag

SEQ ID NO: 2658094 - DNA, 25 bp, Homo sapien
ataactccagtatctgctgactcaa

SEQ ID NO: 2658095 - DNA, 25 bp, Homo sapien
gcagctgtgttcgacagagttcttt

SEQ ID NO: 2658096 - DNA, 25 bp, Homo sapien
tgacatgtttcaaataactccagta

SEQ ID NO: 2658097 - DNA, 25 bp, Homo sapien
gctgtgttcgacagagttctttctt

SEQ ID NO: 2658098 - DNA, 25 bp, Homo sapien
ctgctccgggtaccaaatccattta

SEQ ID NO: 2658099 - DNA, 25 bp, Homo sapien
tccttaacaactaggcataaatcac

SEQ ID NO: 2658100 - DNA, 25 bp, Homo sapien
tgctccgggtaccaaatccatttaa

SEQ ID NO: 2658101 - DNA, 25 bp, Homo sapien
cttccttaacaactaggcataaatc

SEQ ID NO: 2658102 - DNA, 25 bp, Homo sapien
tacacaggagtatcagttaacagga

SEQ ID NO: 2658103 - DNA, 25 bp, Homo sapien
taagctgctcaaggatagtttcata

SEQ ID NO: 2658104 - DNA, 25 bp, Homo sapien
gcttgagtataatctagcagcacga

SEQ ID NO: 2658105 - DNA, 25 bp, Homo sapien
cattggtagttcagaagaaacctca

SEQ ID NO: 2658106 - DNA, 25 bp, Homo sapien
aaggtgagtatatgccgtgcttcag

SEQ ID NO: 2658107 - DNA, 25 bp, Homo sapien
gtatatgccgtgcttcagtcttctg

SEQ ID NO: 2658108 - DNA, 25 bp, Homo sapien
cagaagtgtttatggactaaggtga

SEQ ID NO: 2658109 - DNA, 25 bp, Homo sapien
tatggactaaggtgagtatatgccg

SEQ ID NO: 2658110 - DNA, 25 bp, Homo sapien
caaacttgaggcatgtcagacttac

SEQ ID NO: 2658111 - DNA, 25 bp, Homo sapien
tcaggtgacatacaaacttgaggca

SEQ ID NO: 2658112 - DNA, 25 bp, Homo sapien
taagtaaagttacgtcaggtgacat

SEQ ID NO: 2658113 - DNA, 25 bp, Homo sapien
cagaagataatgtaagaggcatttt

SEQ ID NO: 2658114 - DNA, 25 bp, Homo sapien
gggcttttagcttttcacagatact

SEQ ID NO: 2658115 - DNA, 25 bp, Homo sapien
gatcctgaccagaataaacagttct

SEQ ID NO: 2658116 - DNA, 25 bp, Homo sapien
tcattgcaagccagatgaaattctc

SEQ ID NO: 2658117 - DNA, 25 bp, Homo sapien
catttaggtctcatgttcagtgatg

SEQ ID NO: 2658118 - DNA, 25 bp, Homo sapien
gaataattcagaatgcagaaggtcc

SEQ ID NO: 2658119 - DNA, 25 bp, Homo sapien
tatttgagatggcttaacatgtgga

SEQ ID NO: 2658120 - DNA, 25 bp, Homo sapien
ctcctagaacagatgtaagttattc

SEQ ID NO: 2658121 - DNA, 25 bp, Homo sapien
cagtgacttgttacttgacttgtac

SEQ ID NO: 2658122 - DNA, 25 bp, Homo sapien
cagaatatatatcagctgggcttgg

SEQ ID NO: 2658123 - DNA, 25 bp, Homo sapien
aaattacagaatatatatcagctgg

SEQ ID NO: 2658124 - DNA, 25 bp, Homo sapien
caatgttttaccatcaaaattacag

SEQ ID NO: 2658125 - DNA, 25 bp, Homo sapien
tctgttacaatgttttaccatcaaa

SEQ ID NO: 2658126 - DNA, 25 bp, Homo sapien
tcagatcagcttagtgaacaccaat

SEQ ID NO: 2658127 - DNA, 25 bp, Homo sapien
aattcttctaaggttggaggctcca

SEQ ID NO: 2658128 - DNA, 25 bp, Homo sapien
gaattcacagtgttccaacgcacat

SEQ ID NO: 2658129 - DNA, 25 bp, Homo sapien
aatgctttgcaacatgatacacggg

SEQ ID NO: 2658130 - DNA, 25 bp, Homo sapien
agctgaggtctctcaatgtagcccg

SEQ ID NO: 2658131 - DNA, 25 bp, Homo sapien
ttggcacttttgctcgaatcagctg

SEQ ID NO: 2658132 - DNA, 25 bp, Homo sapien
ttttgctcgaatcagctgaggtctc

SEQ ID NO: 2658133 - DNA, 25 bp, Homo sapien
gctcgaatcagctgaggtctctcaa

SEQ ID NO: 2658134 - DNA, 25 bp, Homo sapien
tctgagcaagttatcccattaagtt

SEQ ID NO: 2658135 - DNA, 25 bp, Homo sapien
ggtaggaaccaccatatccagccga

SEQ ID NO: 2658136 - DNA, 25 bp, Homo sapien
tcatacctatgcgagatcccaactt

SEQ ID NO: 2658137 - DNA, 25 bp, Homo sapien
cctgggaagagctatctatactact

SEQ ID NO: 2658138 - DNA, 25 bp, Homo sapien
cttattccaacaatattgtttacat

SEQ ID NO: 2658139 - DNA, 25 bp, Homo sapien
gtttacattcaagtcaaactccaca

SEQ ID NO: 2658140 - DNA, 25 bp, Homo sapien
tattgtttacattcaagtcaaactc

SEQ ID NO: 2658141 - DNA, 25 bp, Homo sapien
caacaatattgtttacattcaagtc

SEQ ID NO: 2658142 - DNA, 25 bp, Homo sapien
ggtatgcataagttctgagaaggaa

SEQ ID NO: 2658143 - DNA, 25 bp, Homo sapien
gcataagttctgagaaggaatgtgt

SEQ ID NO: 2658144 - DNA, 25 bp, Homo sapien
ataagttctgagaaggaatgtgttt

SEQ ID NO: 2658145 - DNA, 25 bp, Homo sapien
atgcataagttctgagaaggaatgt

SEQ ID NO: 2658146 - DNA, 25 bp, Homo sapien
agtatatgattttagtgtagcaaca

SEQ ID NO: 2658147 - DNA, 25 bp, Homo sapien
gagatgtcactatttatgccaaaca

SEQ ID NO: 2658148 - DNA, 25 bp, Homo sapien
gattcacctataactgacagtatat

SEQ ID NO: 2658149 - DNA, 25 bp, Homo sapien
caaaacaaagaacactgtctccgtg

SEQ ID NO: 2658150 - DNA, 25 bp, Homo sapien
tagctgcttaaagtaccacgactgg

SEQ ID NO: 2658151 - DNA, 25 bp, Homo sapien
tgtaaatagtgcaaaaccatcaata

SEQ ID NO: 2658152 - DNA, 25 bp, Homo sapien
catttatctgatggtgacttgccca

SEQ ID NO: 2658153 - DNA, 25 bp, Homo sapien
tcttaatcaccagcactaacggacg

SEQ ID NO: 2658154 - DNA, 25 bp, Homo sapien
aaatgtgtttcatggaccttagaaa

SEQ ID NO: 2658155 - DNA, 25 bp, Homo sapien
tttatatttggctaaacatcttgaa

SEQ ID NO: 2658156 - DNA, 25 bp, Homo sapien
ttttgggtgtgaaaattcatgggaa

SEQ ID NO: 2658157 - DNA, 25 bp, Homo sapien
taaggcattggtaagacaatctttg

SEQ ID NO: 2658158 - DNA, 25 bp, Homo sapien
tcatgtaatgaacaggtaaaagaaa

SEQ ID NO: 2658159 - DNA, 25 bp, Homo sapien
tgccaaaagtggaaagggtgtaaca

SEQ ID NO: 2658160 - DNA, 25 bp, Homo sapien
gaatgccaatttcaccctaggagta

SEQ ID NO: 2658161 - DNA, 25 bp, Homo sapien
tctccaccatagaggaaaggttact

SEQ ID NO: 2658162 - DNA, 25 bp, Homo sapien
taccaagaacggacaaggttgacac

SEQ ID NO: 2658163 - DNA, 25 bp, Homo sapien
tatatattcaagactggtcagcaat

SEQ ID NO: 2658164 - DNA, 25 bp, Homo sapien
tgtattaagattagcctgaactact

SEQ ID NO: 2658165 - DNA, 25 bp, Homo sapien
gaagattatcaaacctctctaatga

SEQ ID NO: 2658166 - DNA, 25 bp, Homo sapien
taaaacagccaatgtcatatgtttc

SEQ ID NO: 2658167 - DNA, 25 bp, Homo sapien
gatgatcatgtatgctaaatgcttt

SEQ ID NO: 2658168 - DNA, 25 bp, Homo sapien
gggcatctgtgatttacgtacattt

SEQ ID NO: 2658169 - DNA, 25 bp, Homo sapien
gtagggcacatattatggatgatca

SEQ ID NO: 2658170 - DNA, 25 bp, Homo sapien
gctaggactaacgatatgtgccacc

SEQ ID NO: 2658171 - DNA, 25 bp, Homo sapien
taccagaaagctctgtatgcctagg

SEQ ID NO: 2658172 - DNA, 25 bp, Homo sapien
atttctagccaattgatgatcttac

SEQ ID NO: 2658173 - DNA, 25 bp, Homo sapien
ctgtatgcctaggaatatggtaaac

SEQ ID NO: 2658174 - DNA, 25 bp, Homo sapien
attatttctagccaattgatgatct

SEQ ID NO: 2658175 - DNA, 25 bp, Homo sapien
gatttataaacactagtcatcagag

SEQ ID NO: 2658176 - DNA, 25 bp, Homo sapien
tctggtaccataactagaatgctag

SEQ ID NO: 2658177 - DNA, 25 bp, Homo sapien
tagccactggttgaggatctttcaa

SEQ ID NO: 2658178 - DNA, 25 bp, Homo sapien
gacaaaaacaaatactagccactgg

SEQ ID NO: 2658179 - DNA, 25 bp, Homo sapien
gctacatcccaggtataagaccata

SEQ ID NO: 2658180 - DNA, 25 bp, Homo sapien
aagtttaaagcttccgtgattcacg

SEQ ID NO: 2658181 - DNA, 25 bp, Homo sapien
tgtcagctacatcccaggtataaga

SEQ ID NO: 2658182 - DNA, 25 bp, Homo sapien
gcttccgtgattcacgtgactcatt

SEQ ID NO: 2658183 - DNA, 25 bp, Homo sapien
tggagggatggaaggatgggttcag

SEQ ID NO: 2658184 - DNA, 25 bp, Homo sapien
gggatggaaggatgggttcaggtag

SEQ ID NO: 2658185 - DNA, 25 bp, Homo sapien
gatggaaggatgggttcaggtaggg

SEQ ID NO: 2658186 - DNA, 25 bp, Homo sapien
aattttttggagggatggaaggatg

SEQ ID NO: 2658187 - DNA, 25 bp, Homo sapien
tattatccagcaccttgcatgtgtg

SEQ ID NO: 2658188 - DNA, 25 bp, Homo sapien
tacgtggtttcagaagagtagtcaa

SEQ ID NO: 2658189 - DNA, 25 bp, Homo sapien
ccaattaatgtcagcaggattcata

SEQ ID NO: 2658190 - DNA, 25 bp, Homo sapien
tattatgcagacaagaaccatgtac

SEQ ID NO: 2658191 - DNA, 25 bp, Homo sapien
gacagccaggctgcgaatgcaaagg

SEQ ID NO: 2658192 - DNA, 25 bp, Homo sapien
aaagttaggtctcttgcaccaaaga

SEQ ID NO: 2658193 - DNA, 25 bp, Homo sapien
tgctgatatggaaagtttcactggt

SEQ ID NO: 2658194 - DNA, 25 bp, Homo sapien
caatacaagccaaaagttaggtctc

SEQ ID NO: 2658195 - DNA, 25 bp, Homo sapien
ctgaaatgtggacaattaagcgctt

SEQ ID NO: 2658196 - DNA, 25 bp, Homo sapien
tacgttaccttcaaagtctgaaatg

SEQ ID NO: 2658197 - DNA, 25 bp, Homo sapien
ttgaaaaccgttctttaaatgatga

SEQ ID NO: 2658198 - DNA, 25 bp, Homo sapien
ctggaataagttagaatggctaacc

SEQ ID NO: 2658199 - DNA, 25 bp, Homo sapien
tcatttttttctgagactgtcccat

SEQ ID NO: 2658200 - DNA, 25 bp, Homo sapien
tccatcatttttttctgagactgtc

SEQ ID NO: 2658201 - DNA, 25 bp, Homo sapien
cttttgccagattccatcatttttt

SEQ ID NO: 2658202 - DNA, 25 bp, Homo sapien
catcatttttttctgagactgtccc

SEQ ID NO: 2658203 - DNA, 25 bp, Homo sapien
gctcatagaactgtctataataatg

SEQ ID NO: 2658204 - DNA, 25 bp, Homo sapien
tctgctcatagaactgtctataata

SEQ ID NO: 2658205 - DNA, 25 bp, Homo sapien
catagaactgtctataataatggca

SEQ ID NO: 2658206 - DNA, 25 bp, Homo sapien
gaactgtctataataatggcaaaaa

SEQ ID NO: 2658207 - DNA, 25 bp, Homo sapien
gaactgaagagtcgtgagatccact

SEQ ID NO: 2658208 - DNA, 25 bp, Homo sapien
taaagttgatactcctcaacatggg

SEQ ID NO: 2658209 - DNA, 25 bp, Homo sapien
aaatgctgaatgacctgagaccgac

SEQ ID NO: 2658210 - DNA, 25 bp, Homo sapien
aggtcactgtttaatagctcccgct

SEQ ID NO: 2658211 - DNA, 25 bp, Homo sapien
taaatcctgaactaggctcctcttt

SEQ ID NO: 2658212 - DNA, 25 bp, Homo sapien
ataaatcctgaactaggctcctctt

SEQ ID NO: 2658213 - DNA, 25 bp, Homo sapien
tataaatcctgaactaggctcctct

SEQ ID NO: 2658214 - DNA, 25 bp, Homo sapien
tgattcattctttgagaggtaagga

SEQ ID NO: 2658215 - DNA, 25 bp, Homo sapien
gaacattacatggagcttgatgtac

SEQ ID NO: 2658216 - DNA, 25 bp, Homo sapien
gctgtatagcaggactaaaagactc

SEQ ID NO: 2658217 - DNA, 25 bp, Homo sapien
tacatggagcttgatgtacaaggtg

SEQ ID NO: 2658218 - DNA, 25 bp, Homo sapien
cagaagagctgcaagtaactcctaa

SEQ ID NO: 2658219 - DNA, 25 bp, Homo sapien
cagttctgtccagcctgattataca

SEQ ID NO: 2658220 - DNA, 25 bp, Homo sapien
gcttttccagattgatcagaagagc

SEQ ID NO: 2658221 - DNA, 25 bp, Homo sapien
actctctctggacttagaactcaca

SEQ ID NO: 2658222 - DNA, 25 bp, Homo sapien
tggaaatagtattggttacaggaaa

SEQ ID NO: 2658223 - DNA, 25 bp, Homo sapien
tgcagttcattagtacagactccaa

SEQ ID NO: 2658224 - DNA, 25 bp, Homo sapien
gttttagatccctcatgtattgcag

SEQ ID NO: 2658225 - DNA, 25 bp, Homo sapien
aacagaaagactactctgctctatt

SEQ ID NO: 2658226 - DNA, 25 bp, Homo sapien
gaattttgattcttgtaaagcacac

SEQ ID NO: 2658227 - DNA, 25 bp, Homo sapien
gaatataatcatgggtcctgtatgg

SEQ ID NO: 2658228 - DNA, 25 bp, Homo sapien
cagagaaagactatcacttgggacc

SEQ ID NO: 2658229 - DNA, 25 bp, Homo sapien
tttgttccgatcaagaggagtttgt

SEQ ID NO: 2658230 - DNA, 25 bp, Homo sapien
tccattcaataccatcaggccttgg

SEQ ID NO: 2658231 - DNA, 25 bp, Homo sapien
ttggcttcacgaactgaaatcattt

SEQ ID NO: 2658232 - DNA, 25 bp, Homo sapien
tggctttggcttcacgaactgaaat

SEQ ID NO: 2658233 - DNA, 25 bp, Homo sapien
ttctccattcaataccatcaggcct

SEQ ID NO: 2658234 - DNA, 25 bp, Homo sapien
ggccttcaatttagcatctatgaga

SEQ ID NO: 2658235 - DNA, 25 bp, Homo sapien
tcaaccacaagtaagagggataaag

SEQ ID NO: 2658236 - DNA, 25 bp, Homo sapien
cgaatcttaccaactagaaagggtg

SEQ ID NO: 2658237 - DNA, 25 bp, Homo sapien
tcactcaaagtgtctcaaggatata

SEQ ID NO: 2658238 - DNA, 25 bp, Homo sapien
gatccttgatcatatcaaatttctg

SEQ ID NO: 2658239 - DNA, 25 bp, Homo sapien
gctgtatttgttccatcaaaaggtt

SEQ ID NO: 2658240 - DNA, 25 bp, Homo sapien
ccttgatcatatcaaatttctgctt

SEQ ID NO: 2658241 - DNA, 25 bp, Homo sapien
tggctgtatttgttccatcaaaagg

SEQ ID NO: 2658242 - DNA, 25 bp, Homo sapien
agggttgatctaatgcattgtttac

SEQ ID NO: 2658243 - DNA, 25 bp, Homo sapien
ctagggttgatctaatgcattgttt

SEQ ID NO: 2658244 - DNA, 25 bp, Homo sapien
tagggttgatctaatgcattgttta

SEQ ID NO: 2658245 - DNA, 25 bp, Homo sapien
ttctaaggccacaataaattcccca

SEQ ID NO: 2658246 - DNA, 25 bp, Homo sapien
aagaatgttaatagttggttctctc

SEQ ID NO: 2658247 - DNA, 25 bp, Homo sapien
ttatgcagaacaaaagactgagagt

SEQ ID NO: 2658248 - DNA, 25 bp, Homo sapien
aatttatgcagaacaaaagactgag

SEQ ID NO: 2658249 - DNA, 25 bp, Homo sapien
tgttaatagttggttctctctaggt

SEQ ID NO: 2658250 - DNA, 25 bp, Homo sapien
ggtagtatactgttcaaatctctct

SEQ ID NO: 2658251 - DNA, 25 bp, Homo sapien
tacaggtagtatactgttcaaatct

SEQ ID NO: 2658252 - DNA, 25 bp, Homo sapien
gctcttacaggtagtatactgttca

SEQ ID NO: 2658253 - DNA, 25 bp, Homo sapien
cagcagctcttacaggtagtatact

SEQ ID NO: 2658254 - DNA, 25 bp, Homo sapien
gcactaagctatcgtaaagcacagg

SEQ ID NO: 2658255 - DNA, 25 bp, Homo sapien
ctcttcaggattagcatgtggtaca

SEQ ID NO: 2658256 - DNA, 25 bp, Homo sapien
caaagcctcagtctatcccagtgag

SEQ ID NO: 2658257 - DNA, 25 bp, Homo sapien
aactgttgtaagagttagtgctccc

SEQ ID NO: 2658258 - DNA, 25 bp, Homo sapien
aatgttggacatagttcttttgaaa

SEQ ID NO: 2658259 - DNA, 25 bp, Homo sapien
acagcaggtctaaaaaatgttggac

SEQ ID NO: 2658260 - DNA, 25 bp, Homo sapien
aagacccttaataaacactgtagct

SEQ ID NO: 2658261 - DNA, 25 bp, Homo sapien
aactgtactacagcaggtctaaaaa

SEQ ID NO: 2658262 - DNA, 25 bp, Homo sapien
ttttattgcatttgacatcatacaa

SEQ ID NO: 2658263 - DNA, 25 bp, Homo sapien
gcatttgacatcatacaaaaatttg

SEQ ID NO: 2658264 - DNA, 25 bp, Homo sapien
tgcatttgacatcatacaaaaattt

SEQ ID NO: 2658265 - DNA, 25 bp, Homo sapien
tattgcatttgacatcatacaaaaa

SEQ ID NO: 2658266 - DNA, 25 bp, Homo sapien
agtcaaccctccgtaaccatgtagg

SEQ ID NO: 2658267 - DNA, 25 bp, Homo sapien
ccgaacaggtatagactttttgtct

SEQ ID NO: 2658268 - DNA, 25 bp, Homo sapien
aaatggacagatcaacacaaacaga

SEQ ID NO: 2658269 - DNA, 25 bp, Homo sapien
gaaaataatttagtactcaccacac

SEQ ID NO: 2658270 - DNA, 25 bp, Homo sapien
tgaccatgctcatccagtacaaaag

SEQ ID NO: 2658271 - DNA, 25 bp, Homo sapien
tcttaacaccagctagacttcacca

SEQ ID NO: 2658272 - DNA, 25 bp, Homo sapien
gctgtggcaatctgttaaacactaa

SEQ ID NO: 2658273 - DNA, 25 bp, Homo sapien
aaaggaattcaatcacagctgtggc

SEQ ID NO: 2658274 - DNA, 25 bp, Homo sapien
ccgcccgcgccgcgcctggtgttct

SEQ ID NO: 2658275 - DNA, 25 bp, Homo sapien
agccgcccgcgccgcgcctggtgtt

SEQ ID NO: 2658276 - DNA, 25 bp, Homo sapien
gcccgcgccgcgcctggtgttctcc

SEQ ID NO: 2658277 - DNA, 25 bp, Homo sapien
ccggagccggagccgcccgcgccgc

SEQ ID NO: 2658278 - DNA, 25 bp, Homo sapien
cgtggttgctatcgcggctcgccat

SEQ ID NO: 2658279 - DNA, 25 bp, Homo sapien
tcgtccccgtcggagccgagaaagc

SEQ ID NO: 2658280 - DNA, 25 bp, Homo sapien
cgagaaagctctcgccagcgtggtt

SEQ ID NO: 2658281 - DNA, 25 bp, Homo sapien
tctcgccagcgtggttgctatcgcg

SEQ ID NO: 2658282 - DNA, 25 bp, Homo sapien
acacccacctgccaccttcaaagcc

SEQ ID NO: 2658283 - DNA, 25 bp, Homo sapien
tgagatggtacacacccacctgcca

SEQ ID NO: 2658284 - DNA, 25 bp, Homo sapien
ctgagatggtacacacccacctgcc

SEQ ID NO: 2658285 - DNA, 25 bp, Homo sapien
cccacctgccaccttcaaagccttt

SEQ ID NO: 2658286 - DNA, 25 bp, Homo sapien
tctgcccttgcacagtacccatagt

SEQ ID NO: 2658287 - DNA, 25 bp, Homo sapien
tacttcttcaacatcggctctgctg

SEQ ID NO: 2658288 - DNA, 25 bp, Homo sapien
gataaacaggtgacatacattcagg

SEQ ID NO: 2658289 - DNA, 25 bp, Homo sapien
tcacactccccatgttagggaaacg

SEQ ID NO: 2658290 - DNA, 25 bp, Homo sapien
ttctaagtgatctgtgggaaaggct

SEQ ID NO: 2658291 - DNA, 25 bp, Homo sapien
aagagttggctttcactggtctaca

SEQ ID NO: 2658292 - DNA, 25 bp, Homo sapien
tcctgcaaggactagttaaatgtga

SEQ ID NO: 2658293 - DNA, 25 bp, Homo sapien
acctgttttatagaagcactggcaa

SEQ ID NO: 2658294 - DNA, 25 bp, Homo sapien
tgtcaaaacacctaggtaagcacat

SEQ ID NO: 2658295 - DNA, 25 bp, Homo sapien
ttgtcaaaacacctaggtaagcaca

SEQ ID NO: 2658296 - DNA, 25 bp, Homo sapien
agaagaaggctggctcaaataacac

SEQ ID NO: 2658297 - DNA, 25 bp, Homo sapien
aagaaggctggctcaaataacacac

SEQ ID NO: 2658298 - DNA, 25 bp, Homo sapien
caacccctcccattctgagctcttt

SEQ ID NO: 2658299 - DNA, 25 bp, Homo sapien
gcagtcaacccctcccattctgagc

SEQ ID NO: 2658300 - DNA, 25 bp, Homo sapien
gataccctcggttcactcctgttag

SEQ ID NO: 2658301 - DNA, 25 bp, Homo sapien
tcctgttagcaggatagactgaggc

SEQ ID NO: 2658302 - DNA, 25 bp, Homo sapien
tctccctgaccacctaggatggtgt

SEQ ID NO: 2658303 - DNA, 25 bp, Homo sapien
cacggttaactctgtccatgctcaa

SEQ ID NO: 2658304 - DNA, 25 bp, Homo sapien
gtggcagtgttgtcactaaagcctg

SEQ ID NO: 2658305 - DNA, 25 bp, Homo sapien
gtaaggctttcctagcaaactgaaa

SEQ ID NO: 2658306 - DNA, 25 bp, Homo sapien
tgttgtcactaaagcctgggtttct

SEQ ID NO: 2658307 - DNA, 25 bp, Homo sapien
caaactgaaacctgtttggtggcag

SEQ ID NO: 2658308 - DNA, 25 bp, Homo sapien
ttcttagctcccaatgactgagaac

SEQ ID NO: 2658309 - DNA, 25 bp, Homo sapien
ctcatccattaatagacacttaggc

SEQ ID NO: 2658310 - DNA, 25 bp, Homo sapien
gcgcccagccctaagtgtatatttg

SEQ ID NO: 2658311 - DNA, 25 bp, Homo sapien
cccttaacgtaatgatctccagatc

SEQ ID NO: 2658312 - DNA, 25 bp, Homo sapien
gatactctcctagtgaagaccttca

SEQ ID NO: 2658313 - DNA, 25 bp, Homo sapien
cttcacatccgtttttagaccgact

SEQ ID NO: 2658314 - DNA, 25 bp, Homo sapien
agcaccagatactctcctagtgaag

SEQ ID NO: 2658315 - DNA, 25 bp, Homo sapien
tttagaccgacttgagagctactga

SEQ ID NO: 2658316 - DNA, 25 bp, Homo sapien
gctggccagatcctgcaatagttca

SEQ ID NO: 2658317 - DNA, 25 bp, Homo sapien
acattggcagcatcgcaggaccaga

SEQ ID NO: 2658318 - DNA, 25 bp, Homo sapien
ctgtgccaggaacatatgatgtcct

SEQ ID NO: 2658319 - DNA, 25 bp, Homo sapien
cacaggtacctgtgaagcaggtagc

SEQ ID NO: 2658320 - DNA, 25 bp, Homo sapien
tgtgttggttctccgggcctgtttg

SEQ ID NO: 2658321 - DNA, 25 bp, Homo sapien
gtggcagtgtgttggttctccgggc

SEQ ID NO: 2658322 - DNA, 25 bp, Homo sapien
aacctaagagagagtcctctggagg

SEQ ID NO: 2658323 - DNA, 25 bp, Homo sapien
taaacctaagagagagtcctctgga

SEQ ID NO: 2658324 - DNA, 25 bp, Homo sapien
tgcacatctgtatttgcataagctt

SEQ ID NO: 2658325 - DNA, 25 bp, Homo sapien
tcagttagaactcagcgatgccacg

SEQ ID NO: 2658326 - DNA, 25 bp, Homo sapien
agcgatgccacgatcccatacagat

SEQ ID NO: 2658327 - DNA, 25 bp, Homo sapien
gctttaagcactccagaactatagt

SEQ ID NO: 2658328 - DNA, 25 bp, Homo sapien
cattatgccagctatcttttggtta

SEQ ID NO: 2658329 - DNA, 25 bp, Homo sapien
aatagtgaaatgtcccttttatctg

SEQ ID NO: 2658330 - DNA, 25 bp, Homo sapien
tgcatttttacttggaaccttccta

SEQ ID NO: 2658331 - DNA, 25 bp, Homo sapien
gtctctccttatggttctgtaaata

SEQ ID NO: 2658332 - DNA, 25 bp, Homo sapien
gaggggtcagatatgatatactcct

SEQ ID NO: 2658333 - DNA, 25 bp, Homo sapien
gaaaaggaggggtcagatatgatat

SEQ ID NO: 2658334 - DNA, 25 bp, Homo sapien
gtcagatatgatatactcctgcttg

SEQ ID NO: 2658335 - DNA, 25 bp, Homo sapien
aaaggaggggtcagatatgatatac

SEQ ID NO: 2658336 - DNA, 25 bp, Homo sapien
gcttgctgaagttaaaggactgcct

SEQ ID NO: 2658337 - DNA, 25 bp, Homo sapien
ccccagtaatcggaggtgtatttga

SEQ ID NO: 2658338 - DNA, 25 bp, Homo sapien
tctttctccgtggttagtacctggc

SEQ ID NO: 2658339 - DNA, 25 bp, Homo sapien
cctttccggcgtaatgatggtgaac

SEQ ID NO: 2658340 - DNA, 25 bp, Homo sapien
tctgatcctttggagagtgcgcctc

SEQ ID NO: 2658341 - DNA, 25 bp, Homo sapien
tttctattgaagtcaggtccggctg

SEQ ID NO: 2658342 - DNA, 25 bp, Homo sapien
cactgactgtgaatgcctgagctgt

SEQ ID NO: 2658343 - DNA, 25 bp, Homo sapien
tctgaggcctcgtctcctgatagga

SEQ ID NO: 2658344 - DNA, 25 bp, Homo sapien
tctggagagaacagttccgcttctt

SEQ ID NO: 2658345 - DNA, 25 bp, Homo sapien
taaacatattggagaatcgcactca

SEQ ID NO: 2658346 - DNA, 25 bp, Homo sapien
cctgggttgcatacggtggaaatga

SEQ ID NO: 2658347 - DNA, 25 bp, Homo sapien
gcagttaatagtgaatcaggctcaa

SEQ ID NO: 2658348 - DNA, 25 bp, Homo sapien
tgtagaagatacctccactgccggt

SEQ ID NO: 2658349 - DNA, 25 bp, Homo sapien
taagactggacgatctacaggagtg

SEQ ID NO: 2658350 - DNA, 25 bp, Homo sapien
tttcctcaggaaggtccggcttagc

SEQ ID NO: 2658351 - DNA, 25 bp, Homo sapien
gtttctttgacatccgcaggcttgg

SEQ ID NO: 2658352 - DNA, 25 bp, Homo sapien
tatctggagtgctcgatccaaaaaa

SEQ ID NO: 2658353 - DNA, 25 bp, Homo sapien
cttcaggatctatcacagtcactgc

SEQ ID NO: 2658354 - DNA, 25 bp, Homo sapien
caagctggacatccacgatttgaaa

SEQ ID NO: 2658355 - DNA, 25 bp, Homo sapien
cacagtcactgctttttctacggat

SEQ ID NO: 2658356 - DNA, 25 bp, Homo sapien
catagactcggctacattcacagaa

SEQ ID NO: 2658357 - DNA, 25 bp, Homo sapien
gaagtgctgtggcatagcatcggct

SEQ ID NO: 2658358 - DNA, 25 bp, Homo sapien
ccatttagatggaggagcgattgct

SEQ ID NO: 2658359 - DNA, 25 bp, Homo sapien
aagtacctctgggttcatcagcagt

SEQ ID NO: 2658360 - DNA, 25 bp, Homo sapien
tgtgatatctactgaaccgcctttc

SEQ ID NO: 2658361 - DNA, 25 bp, Homo sapien
tcatgacaagaaagaaccactggca

SEQ ID NO: 2658362 - DNA, 25 bp, Homo sapien
tttacacgggtatcttccgcagcct

SEQ ID NO: 2658363 - DNA, 25 bp, Homo sapien
caaatatggcggtgtttctgagctc

SEQ ID NO: 2658364 - DNA, 25 bp, Homo sapien
caccttttgcatatgtgtcttcagg

SEQ ID NO: 2658365 - DNA, 25 bp, Homo sapien
tcaccttttgcatatgtgtcttcag

SEQ ID NO: 2658366 - DNA, 25 bp, Homo sapien
agtcttcaccttttgcatatgtgtc

SEQ ID NO: 2658367 - DNA, 25 bp, Homo sapien
ctgtaaagtcttcaccttttgcata

SEQ ID NO: 2658368 - DNA, 25 bp, Homo sapien
tgatcttctgaaagtccggctggct

SEQ ID NO: 2658369 - DNA, 25 bp, Homo sapien
gttttatgacaagcaactgtttcac

SEQ ID NO: 2658370 - DNA, 25 bp, Homo sapien
tgatcgattgaagaaataaaggccg

SEQ ID NO: 2658371 - DNA, 25 bp, Homo sapien
ttcagaaatgatactaaaggcagtc

SEQ ID NO: 2658372 - DNA, 25 bp, Homo sapien
attgtgggctgaataaatgataaat

SEQ ID NO: 2658373 - DNA, 25 bp, Homo sapien
tctggggagatgttataatcaatca

SEQ ID NO: 2658374 - DNA, 25 bp, Homo sapien
gaattgtgggctgaataaatgataa

SEQ ID NO: 2658375 - DNA, 25 bp, Homo sapien
ctggggagatgttataatcaatcaa

SEQ ID NO: 2658376 - DNA, 25 bp, Homo sapien
gatgagataatatgttgtggccctt

SEQ ID NO: 2658377 - DNA, 25 bp, Homo sapien
tccactgaacttactgggaaagaga

SEQ ID NO: 2658378 - DNA, 25 bp, Homo sapien
catgttctagtgcactttccactga

SEQ ID NO: 2658379 - DNA, 25 bp, Homo sapien
cccggtgactttgagtccacatctc

SEQ ID NO: 2658380 - DNA, 25 bp, Homo sapien
taatagtggtaggaaatatctgggt

SEQ ID NO: 2658381 - DNA, 25 bp, Homo sapien
cttttgagttagagatgtgtcatgg

SEQ ID NO: 2658382 - DNA, 25 bp, Homo sapien
tccaactgcttcttcatacagatcc

SEQ ID NO: 2658383 - DNA, 25 bp, Homo sapien
ccagaaattctggatcaatgacttt

SEQ ID NO: 2658384 - DNA, 25 bp, Homo sapien
tccccttctgcagctatcggttggt

SEQ ID NO: 2658385 - DNA, 25 bp, Homo sapien
tcttctccctgcaaatagttccaaa

SEQ ID NO: 2658386 - DNA, 25 bp, Homo sapien
gctatcggttggtatgaatcatcct

SEQ ID NO: 2658387 - DNA, 25 bp, Homo sapien
tgcatcgctacgttaccaacggtct

SEQ ID NO: 2658388 - DNA, 25 bp, Homo sapien
gatgggtgtcttcaaatggaaccgc

SEQ ID NO: 2658389 - DNA, 25 bp, Homo sapien
tcctccgggaaggacacttgtactg

SEQ ID NO: 2658390 - DNA, 25 bp, Homo sapien
tctgcacgctccagaacatgatggg

SEQ ID NO: 2658391 - DNA, 25 bp, Homo sapien
tgaacagggctattacggagcctct

SEQ ID NO: 2658392 - DNA, 25 bp, Homo sapien
tgaggaaccacttcattatgcaggg

SEQ ID NO: 2658393 - DNA, 25 bp, Homo sapien
gagataagacatcttcaggtgtgga

SEQ ID NO: 2658394 - DNA, 25 bp, Homo sapien
tgtgccttttcagttactacctcag

SEQ ID NO: 2658395 - DNA, 25 bp, Homo sapien
cactgatgtgctcaaaggattcctt

SEQ ID NO: 2658396 - DNA, 25 bp, Homo sapien
tgtcaagcgttgaaacttcatggtc

SEQ ID NO: 2658397 - DNA, 25 bp, Homo sapien
tgcaggtgtaacagtatgtgtcaat

SEQ ID NO: 2658398 - DNA, 25 bp, Homo sapien
gaaattggacatttgcaggtgtaac

SEQ ID NO: 2658399 - DNA, 25 bp, Homo sapien
ctttacagcacttatagctgtgtca

SEQ ID NO: 2658400 - DNA, 25 bp, Homo sapien
cgggatctcagcaaactgtagcctt

SEQ ID NO: 2658401 - DNA, 25 bp, Homo sapien
gcgggatctcagcaaactgtagcct

SEQ ID NO: 2658402 - DNA, 25 bp, Homo sapien
ggcgggatctcagcaaactgtagcc

SEQ ID NO: 2658403 - DNA, 25 bp, Homo sapien
tggcgggatctcagcaaactgtagc

SEQ ID NO: 2658404 - DNA, 25 bp, Homo sapien
caatcctcaaggacttttcttgtaa

SEQ ID NO: 2658405 - DNA, 25 bp, Homo sapien
cttcaatcctcaaggacttttcttg

SEQ ID NO: 2658406 - DNA, 25 bp, Homo sapien
atctcactaacaaaggcttcaatcc

SEQ ID NO: 2658407 - DNA, 25 bp, Homo sapien
aaaaggattctatctcactaacaaa

SEQ ID NO: 2658408 - DNA, 25 bp, Homo sapien
tctgcttctctcacgatggtctcca

SEQ ID NO: 2658409 - DNA, 25 bp, Homo sapien
tctgctcatgcaggaactccatctt

SEQ ID NO: 2658410 - DNA, 25 bp, Homo sapien
aagacggcctcatcaagctcctctg

SEQ ID NO: 2658411 - DNA, 25 bp, Homo sapien
ctctcacgatggtctccagggtgtc

SEQ ID NO: 2658412 - DNA, 25 bp, Homo sapien
taatgtttaaatgccagaattatat

SEQ ID NO: 2658413 - DNA, 25 bp, Homo sapien
cagagtgggcgcaaggtgtttgagc

SEQ ID NO: 2658414 - DNA, 25 bp, Homo sapien
cagaattatataaatcccacacaga

SEQ ID NO: 2658415 - DNA, 25 bp, Homo sapien
tgggcgcaaggtgtttgagcccatt

SEQ ID NO: 2658416 - DNA, 25 bp, Homo sapien
atctgggcattgaggctttcagggt

SEQ ID NO: 2658417 - DNA, 25 bp, Homo sapien
gacagtgaccaatgaatccagtggg

SEQ ID NO: 2658418 - DNA, 25 bp, Homo sapien
gcaggaacaaggcttctttccctcc

SEQ ID NO: 2658419 - DNA, 25 bp, Homo sapien
ccagtgggacgcaatggatgatgat

SEQ ID NO: 2658420 - DNA, 25 bp, Homo sapien
gcttcttgctgtgtgacaattaggc

SEQ ID NO: 2658421 - DNA, 25 bp, Homo sapien
tatttctgcttaatcctggcttcat

SEQ ID NO: 2658422 - DNA, 25 bp, Homo sapien
cttcttgctgtgtgacaattaggct

SEQ ID NO: 2658423 - DNA, 25 bp, Homo sapien
ccactatttctgcttaatcctggct

SEQ ID NO: 2658424 - DNA, 25 bp, Homo sapien
taacattgttccgttttgccttgct

SEQ ID NO: 2658425 - DNA, 25 bp, Homo sapien
ttgttccgttttgccttgctgtatc

SEQ ID NO: 2658426 - DNA, 25 bp, Homo sapien
ttccgttttgccttgctgtatctcc

SEQ ID NO: 2658427 - DNA, 25 bp, Homo sapien
cattgttccgttttgccttgctgta

SEQ ID NO: 2658428 - DNA, 25 bp, Homo sapien
caaagataaggttctcagggaacaa

SEQ ID NO: 2658429 - DNA, 25 bp, Homo sapien
ccaaaatttgccctggcaagagctg

SEQ ID NO: 2658430 - DNA, 25 bp, Homo sapien
tatgcttcacaaacagtgcccaatt

SEQ ID NO: 2658431 - DNA, 25 bp, Homo sapien
agaagctttgccttaattacacaca

SEQ ID NO: 2658432 - DNA, 25 bp, Homo sapien
tggcgcccagcttcatcaagtgtgt

SEQ ID NO: 2658433 - DNA, 25 bp, Homo sapien
acagggagatgattagcgtgacaca

SEQ ID NO: 2658434 - DNA, 25 bp, Homo sapien
ccaactgcatatggtgctatggacg

SEQ ID NO: 2658435 - DNA, 25 bp, Homo sapien
caagggccaactgtagataattagc

SEQ ID NO: 2658436 - DNA, 25 bp, Homo sapien
ttctcaaacctcgatattaagcttc

SEQ ID NO: 2658437 - DNA, 25 bp, Homo sapien
tcaaacctcgatattaagcttctaa

SEQ ID NO: 2658438 - DNA, 25 bp, Homo sapien
tgttctcaaacctcgatattaagct

SEQ ID NO: 2658439 - DNA, 25 bp, Homo sapien
aacctcgatattaagcttctaatca

SEQ ID NO: 2658440 - DNA, 25 bp, Homo sapien
tggtcacttcttgccgagctgtcat

SEQ ID NO: 2658441 - DNA, 25 bp, Homo sapien
cgaaaagggaaaacgcagcaggcat

SEQ ID NO: 2658442 - DNA, 25 bp, Homo sapien
tgtcatcataatgttcgaaaaggga

SEQ ID NO: 2658443 - DNA, 25 bp, Homo sapien
tgttttaacatctggtcacttcttg

SEQ ID NO: 2658444 - DNA, 25 bp, Homo sapien
ctcctccatgcagtaaacctgaaat

SEQ ID NO: 2658445 - DNA, 25 bp, Homo sapien
ccatgcagtaaacctgaaatgaatc

SEQ ID NO: 2658446 - DNA, 25 bp, Homo sapien
tcctgaggttctaatctaggaggct

SEQ ID NO: 2658447 - DNA, 25 bp, Homo sapien
ttggttcctgaggttctaatctagg

SEQ ID NO: 2658448 - DNA, 25 bp, Homo sapien
acagacctgagaaactgccacccat

SEQ ID NO: 2658449 - DNA, 25 bp, Homo sapien
tcattgtggagcacactgtcctctc

SEQ ID NO: 2658450 - DNA, 25 bp, Homo sapien
ttgtggagcacactgtcctctctat

SEQ ID NO: 2658451 - DNA, 25 bp, Homo sapien
tgaatgaatcttgtggcttgttggt

SEQ ID NO: 2658452 - DNA, 25 bp, Homo sapien
ggtatcacagactagattatcagat

SEQ ID NO: 2658453 - DNA, 25 bp, Homo sapien
taacatatgtgactagagaccctac

SEQ ID NO: 2658454 - DNA, 25 bp, Homo sapien
gagaccctactaaacatgacatggt

SEQ ID NO: 2658455 - DNA, 25 bp, Homo sapien
taacagtgtacataacatatgtgac

SEQ ID NO: 2658456 - DNA, 25 bp, Homo sapien
caaatcctggtttcttctcatgaat

SEQ ID NO: 2658457 - DNA, 25 bp, Homo sapien
taaatctcagtaacacattctcaag

SEQ ID NO: 2658458 - DNA, 25 bp, Homo sapien
gataggtcataagctactctaagaa

SEQ ID NO: 2658459 - DNA, 25 bp, Homo sapien
gaattctttccactagggatttcca

SEQ ID NO: 2658460 - DNA, 25 bp, Homo sapien
tgtcctaaagatggccctttcactg

SEQ ID NO: 2658461 - DNA, 25 bp, Homo sapien
tgatagcatcggtcaggttccagat

SEQ ID NO: 2658462 - DNA, 25 bp, Homo sapien
tccagatcttcaaaaatgcagtagc

SEQ ID NO: 2658463 - DNA, 25 bp, Homo sapien
caggctacatccagtgaagttcaca

SEQ ID NO: 2658464 - DNA, 25 bp, Homo sapien
ggaccccaggcttaagtcatcgttg

SEQ ID NO: 2658465 - DNA, 25 bp, Homo sapien
ggacagtcgtggagcaatgccagct

SEQ ID NO: 2658466 - DNA, 25 bp, Homo sapien
tctgcaggcatcagttctaggaagc

SEQ ID NO: 2658467 - DNA, 25 bp, Homo sapien
ccattatcttaaaggcagtgcagcc

SEQ ID NO: 2658468 - DNA, 25 bp, Homo sapien
gccatcggatagtggctgtgttcca

SEQ ID NO: 2658469 - DNA, 25 bp, Homo sapien
tcaggagagtgctgtctgcagtact

SEQ ID NO: 2658470 - DNA, 25 bp, Homo sapien
gtactccagagtgtaggtctccgtg

SEQ ID NO: 2658471 - DNA, 25 bp, Homo sapien
agtacagtcctcagcgcggatcaca

SEQ ID NO: 2658472 - DNA, 25 bp, Homo sapien
tcagcggcttcattagctcagcagg

SEQ ID NO: 2658473 - DNA, 25 bp, Homo sapien
gagctgcaaatcaagtcagcggctt

SEQ ID NO: 2658474 - DNA, 25 bp, Homo sapien
gattttagacggcatttctcccttg

SEQ ID NO: 2658475 - DNA, 25 bp, Homo sapien
tcattggtgaactgtgatagagctg

SEQ ID NO: 2658476 - DNA, 25 bp, Homo sapien
tgcatggtaccacccagtcatcagg

SEQ ID NO: 2658477 - DNA, 25 bp, Homo sapien
gatggctactaggtctcagggtttc

SEQ ID NO: 2658478 - DNA, 25 bp, Homo sapien
tgatcttgcctctgaaagagctggg

SEQ ID NO: 2658479 - DNA, 25 bp, Homo sapien
gctgaaggccctcaatggaacgcca

SEQ ID NO: 2658480 - DNA, 25 bp, Homo sapien
cttcatggaaccaacaaaggagtga

SEQ ID NO: 2658481 - DNA, 25 bp, Homo sapien
gcatcggaccgtgtaaagaatgttt

SEQ ID NO: 2658482 - DNA, 25 bp, Homo sapien
taagagattatcctcaaagctagac

SEQ ID NO: 2658483 - DNA, 25 bp, Homo sapien
agtaactttatccattgctgtgcaa

SEQ ID NO: 2658484 - DNA, 25 bp, Homo sapien
ctatgacaggcaattctgttcctgc

SEQ ID NO: 2658485 - DNA, 25 bp, Homo sapien
tgctccaccaggtggggccccaaaa

SEQ ID NO: 2658486 - DNA, 25 bp, Homo sapien
tatgacaggcaattctgttcctgct

SEQ ID NO: 2658487 - DNA, 25 bp, Homo sapien
gacaggcaattctgttcctgctcca

SEQ ID NO: 2658488 - DNA, 25 bp, Homo sapien
tatgtattgatatgggatgctcacc

SEQ ID NO: 2658489 - DNA, 25 bp, Homo sapien
atgcagtgtcactcttgtctcccgg

SEQ ID NO: 2658490 - DNA, 25 bp, Homo sapien
tgcagtgtcactcttgtctcccggg

SEQ ID NO: 2658491 - DNA, 25 bp, Homo sapien
atgtattgatatgggatgctcacca

SEQ ID NO: 2658492 - DNA, 25 bp, Homo sapien
gatgggaccatttatctagagaacc

SEQ ID NO: 2658493 - DNA, 25 bp, Homo sapien
gaaagtttgccatgactaaggtgca

SEQ ID NO: 2658494 - DNA, 25 bp, Homo sapien
aaagcattcccattaagtcagagag

SEQ ID NO: 2658495 - DNA, 25 bp, Homo sapien
gatgcttgtgaggacagcctctcta

SEQ ID NO: 2658496 - DNA, 25 bp, Homo sapien
cgattgctggtggatgataagctcc

SEQ ID NO: 2658497 - DNA, 25 bp, Homo sapien
catagtgcaatggaaagagatggct

SEQ ID NO: 2658498 - DNA, 25 bp, Homo sapien
ccagtggagctgaaacttatcacag

SEQ ID NO: 2658499 - DNA, 25 bp, Homo sapien
cgcagcacctagagcctctgagcag

SEQ ID NO: 2658500 - DNA, 25 bp, Homo sapien
ttcacttgtcccaaatgcattgatg

SEQ ID NO: 2658501 - DNA, 25 bp, Homo sapien
gatggccctcacatagaaaaagtag

SEQ ID NO: 2658502 - DNA, 25 bp, Homo sapien
ggtggagatgagagcagcttcactc

SEQ ID NO: 2658503 - DNA, 25 bp, Homo sapien
tggaggttaactttcagctggagtc

SEQ ID NO: 2658504 - DNA, 25 bp, Homo sapien
taaagttgccctctaggacatcttc

SEQ ID NO: 2658505 - DNA, 25 bp, Homo sapien
ccactgacagtaggttgggagttta

SEQ ID NO: 2658506 - DNA, 25 bp, Homo sapien
aagaaatagcttggaaatagctcac

SEQ ID NO: 2658507 - DNA, 25 bp, Homo sapien
gagtttataaagttgccctctagga

SEQ ID NO: 2658508 - DNA, 25 bp, Homo sapien
cttgaggaaatgtgtagagcaggat

SEQ ID NO: 2658509 - DNA, 25 bp, Homo sapien
ttctctcaacaagagaaatctggtt

SEQ ID NO: 2658510 - DNA, 25 bp, Homo sapien
aagctgatcactgtcccacttgagg

SEQ ID NO: 2658511 - DNA, 25 bp, Homo sapien
cgtctcctctcaccaaagctgatca

SEQ ID NO: 2658512 - DNA, 25 bp, Homo sapien
tccaccctatcctccgcctttgcct

SEQ ID NO: 2658513 - DNA, 25 bp, Homo sapien
agagcttgcaggcaaattgcagggc

SEQ ID NO: 2658514 - DNA, 25 bp, Homo sapien
cacaaactcacacagtttaggcagg

SEQ ID NO: 2658515 - DNA, 25 bp, Homo sapien
gtcaatcagagtatgctcagtgcag

SEQ ID NO: 2658516 - DNA, 25 bp, Homo sapien
tcagtgcaggaatcgccggcctgta

SEQ ID NO: 2658517 - DNA, 25 bp, Homo sapien
gcctgtatctcataagcataaacat

SEQ ID NO: 2658518 - DNA, 25 bp, Homo sapien
cagatgccgagtcgatatgctgggc

SEQ ID NO: 2658519 - DNA, 25 bp, Homo sapien
tgccgagtcgatatgctgggcagtc

SEQ ID NO: 2658520 - DNA, 25 bp, Homo sapien
ctggagcagatgccgagtcgatatg

SEQ ID NO: 2658521 - DNA, 25 bp, Homo sapien
ccccttgtcctagggcacctgcctg

SEQ ID NO: 2658522 - DNA, 25 bp, Homo sapien
taactcccctcaggactccttgccc

SEQ ID NO: 2658523 - DNA, 25 bp, Homo sapien
ttggactctggtggtaactcccctc

SEQ ID NO: 2658524 - DNA, 25 bp, Homo sapien
ctccttgccccagactggccacatt

SEQ ID NO: 2658525 - DNA, 25 bp, Homo sapien
tgcaggtggtcccacccaagttctg

SEQ ID NO: 2658526 - DNA, 25 bp, Homo sapien
ggctggacgctcagtcacatgaaca

SEQ ID NO: 2658527 - DNA, 25 bp, Homo sapien
ggctctatccccaggtgcaaagtac

SEQ ID NO: 2658528 - DNA, 25 bp, Homo sapien
tgatgatgaagagcaactgctcgct

SEQ ID NO: 2658529 - DNA, 25 bp, Homo sapien
cgctctctgcgttgatgaagataag

SEQ ID NO: 2658530 - DNA, 25 bp, Homo sapien
tcgtcagagatgtcttaccagcaca

SEQ ID NO: 2658531 - DNA, 25 bp, Homo sapien
tatgcatgcagccatcattagtgca

SEQ ID NO: 2658532 - DNA, 25 bp, Homo sapien
catcctttagtgcagcgaggtgaca

SEQ ID NO: 2658533 - DNA, 25 bp, Homo sapien
aatgcgcgggagactttttgaataa

SEQ ID NO: 2658534 - DNA, 25 bp, Homo sapien
gactcatgttctacagtatacatta

SEQ ID NO: 2658535 - DNA, 25 bp, Homo sapien
taaaattttagggaggagagactca

SEQ ID NO: 2658536 - DNA, 25 bp, Homo sapien
tagactctaaccatttatttaacaa

SEQ ID NO: 2658537 - DNA, 25 bp, Homo sapien
ggaaatttctaatatatagcacatt

SEQ ID NO: 2658538 - DNA, 25 bp, Homo sapien
gctgctgttcgacactcaaatgcat

SEQ ID NO: 2658539 - DNA, 25 bp, Homo sapien
gtctgccgctgctgttcgacactca

SEQ ID NO: 2658540 - DNA, 25 bp, Homo sapien
cacacagccagggtttggtgtgtag

SEQ ID NO: 2658541 - DNA, 25 bp, Homo sapien
gtgtaggtgtctgccgctgctgttc

SEQ ID NO: 2658542 - DNA, 25 bp, Homo sapien
tttgattcaatgtaaaccttgtacc

SEQ ID NO: 2658543 - DNA, 25 bp, Homo sapien
gatgatctcattataattccaaaat

SEQ ID NO: 2658544 - DNA, 25 bp, Homo sapien
ttccaaaatccaaaagctcgtacta

SEQ ID NO: 2658545 - DNA, 25 bp, Homo sapien
tccaaaatccaaaagctcgtactaa

SEQ ID NO: 2658546 - DNA, 25 bp, Homo sapien
taagagatgatctcattataattcc

SEQ ID NO: 2658547 - DNA, 25 bp, Homo sapien
caggattgcctacaacagcatagga

SEQ ID NO: 2658548 - DNA, 25 bp, Homo sapien
tcagaataggctgcaagagtcctcc

SEQ ID NO: 2658549 - DNA, 25 bp, Homo sapien
gcactttctatagtagccaacccag

SEQ ID NO: 2658550 - DNA, 25 bp, Homo sapien
tttgcctaagtcctctgatccagtg

SEQ ID NO: 2658551 - DNA, 25 bp, Homo sapien
tgtgggcataaaacctttgcagaac

SEQ ID NO: 2658552 - DNA, 25 bp, Homo sapien
tggttgctaagcagatcccttgggt

SEQ ID NO: 2658553 - DNA, 25 bp, Homo sapien
gaatctgcttcacccaattgtcaaa

SEQ ID NO: 2658554 - DNA, 25 bp, Homo sapien
acaagacaccgctgctgttttcttc

SEQ ID NO: 2658555 - DNA, 25 bp, Homo sapien
gatctggtggcaaagcttggtgaca

SEQ ID NO: 2658556 - DNA, 25 bp, Homo sapien
atcagccagcctagcctagcagcgc

SEQ ID NO: 2658557 - DNA, 25 bp, Homo sapien
cactgtatggtactgtgttggatct

SEQ ID NO: 2658558 - DNA, 25 bp, Homo sapien
gcttggtgacaacaatgagcatgtg

SEQ ID NO: 2658559 - DNA, 25 bp, Homo sapien
ctgccgttgaggctgtgtaatcaga

SEQ ID NO: 2658560 - DNA, 25 bp, Homo sapien
ctgctgccgttgaggctgtgtaatc

SEQ ID NO: 2658561 - DNA, 25 bp, Homo sapien
tgctgccgttgaggctgtgtaatca

SEQ ID NO: 2658562 - DNA, 25 bp, Homo sapien
gctgccgttgaggctgtgtaatcag

SEQ ID NO: 2658563 - DNA, 25 bp, Homo sapien
taatccaggttaggatacttccctc

SEQ ID NO: 2658564 - DNA, 25 bp, Homo sapien
tacttccctccactatgcaactggt

SEQ ID NO: 2658565 - DNA, 25 bp, Homo sapien
gagatgccgtaagatctcatagtcc

SEQ ID NO: 2658566 - DNA, 25 bp, Homo sapien
ttctgccctttgagatgccgtaaga

SEQ ID NO: 2658567 - DNA, 25 bp, Homo sapien
tggatgtctgctctcgtagcctaac

SEQ ID NO: 2658568 - DNA, 25 bp, Homo sapien
tctcgtagcctaacataaagtttca

SEQ ID NO: 2658569 - DNA, 25 bp, Homo sapien
ccccacactgaaacctggatgtctg

SEQ ID NO: 2658570 - DNA, 25 bp, Homo sapien
ctctcctccgccatcatttcccaca

SEQ ID NO: 2658571 - DNA, 25 bp, Homo sapien
cctctcgagcaggaaaggtagggag

SEQ ID NO: 2658572 - DNA, 25 bp, Homo sapien
cgagcaggaaaggtagggagattcc

SEQ ID NO: 2658573 - DNA, 25 bp, Homo sapien
ctcgagcaggaaaggtagggagatt

SEQ ID NO: 2658574 - DNA, 25 bp, Homo sapien
agcaggaaaggtagggagattccat

SEQ ID NO: 2658575 - DNA, 25 bp, Homo sapien
cctcactccctctatggggctctcc

SEQ ID NO: 2658576 - DNA, 25 bp, Homo sapien
ttcctttggccactttccaaggaga

SEQ ID NO: 2658577 - DNA, 25 bp, Homo sapien
ggccactttccaaggagacattttc

SEQ ID NO: 2658578 - DNA, 25 bp, Homo sapien
tggggctctccttcctttggccact

SEQ ID NO: 2658579 - DNA, 25 bp, Homo sapien
agtaacaacactcctggcacctggg

SEQ ID NO: 2658580 - DNA, 25 bp, Homo sapien
caaggtgacactctggagagccacc

SEQ ID NO: 2658581 - DNA, 25 bp, Homo sapien
ccagtcaggactgggattggccctg

SEQ ID NO: 2658582 - DNA, 25 bp, Homo sapien
gcagcgtccattgccgcagtaacaa

SEQ ID NO: 2658583 - DNA, 25 bp, Homo sapien
ctgggaagaatctgagcctcggctg

SEQ ID NO: 2658584 - DNA, 25 bp, Homo sapien
gcagctgggaagaatctgagcctcg

SEQ ID NO: 2658585 - DNA, 25 bp, Homo sapien
cagctgggaagaatctgagcctcgg

SEQ ID NO: 2658586 - DNA, 25 bp, Homo sapien
gctgggaagaatctgagcctcggct

SEQ ID NO: 2658587 - DNA, 25 bp, Homo sapien
tgccatttaactgcatcgtgcttgc

SEQ ID NO: 2658588 - DNA, 25 bp, Homo sapien
atcgtgcttgccttcacatgtgcca

SEQ ID NO: 2658589 - DNA, 25 bp, Homo sapien
aatccagttccagaaacaatttctc

SEQ ID NO: 2658590 - DNA, 25 bp, Homo sapien
tgccttcacatgtgccaaacacata

SEQ ID NO: 2658591 - DNA, 25 bp, Homo sapien
ttaacaatagggtcaccgaaggtca

SEQ ID NO: 2658592 - DNA, 25 bp, Homo sapien
ggtttctactttgtaaatggagaca

SEQ ID NO: 2658593 - DNA, 25 bp, Homo sapien
taacaatagggtcaccgaaggtcat

SEQ ID NO: 2658594 - DNA, 25 bp, Homo sapien
ttctaatggttctaagaaatagaat

SEQ ID NO: 2658595 - DNA, 25 bp, Homo sapien
aaatttctcttccagtgatgaaagt

SEQ ID NO: 2658596 - DNA, 25 bp, Homo sapien
ctaatggttctaagaaatagaattc

SEQ ID NO: 2658597 - DNA, 25 bp, Homo sapien
atttctcttccagtgatgaaagtct

SEQ ID NO: 2658598 - DNA, 25 bp, Homo sapien
tggttcccaagaacactgagtattg

SEQ ID NO: 2658599 - DNA, 25 bp, Homo sapien
tcccaagagagtctgggctccgttc

SEQ ID NO: 2658600 - DNA, 25 bp, Homo sapien
tctaggtgcttactcaccaccagca

SEQ ID NO: 2658601 - DNA, 25 bp, Homo sapien
tcagcgtttaagttcctgcgctttg

SEQ ID NO: 2658602 - DNA, 25 bp, Homo sapien
tggggtcgtctgtcctgctaacagt

SEQ ID NO: 2658603 - DNA, 25 bp, Homo sapien
tggtttgggtccatagcagcactgt

SEQ ID NO: 2658604 - DNA, 25 bp, Homo sapien
gctaacagtgaatccaccctctttg

SEQ ID NO: 2658605 - DNA, 25 bp, Homo sapien
ggaaactggtttgggtccatagcag

SEQ ID NO: 2658606 - DNA, 25 bp, Homo sapien
tccctattttccacaagcttttgga

SEQ ID NO: 2658607 - DNA, 25 bp, Homo sapien
cctattttccacaagcttttggaat

SEQ ID NO: 2658608 - DNA, 25 bp, Homo sapien
attttccacaagcttttggaatgtt

SEQ ID NO: 2658609 - DNA, 25 bp, Homo sapien
ctacttccctattttccacaagctt

SEQ ID NO: 2658610 - DNA, 25 bp, Homo sapien
atctgtctccccgagactttcccca

SEQ ID NO: 2658611 - DNA, 25 bp, Homo sapien
cacaatctgtctccccgagactttc

SEQ ID NO: 2658612 - DNA, 25 bp, Homo sapien
caatctgtctccccgagactttccc

SEQ ID NO: 2658613 - DNA, 25 bp, Homo sapien
tccccaacacaccatagacattcat

SEQ ID NO: 2658614 - DNA, 25 bp, Homo sapien
atccaattgtctcctcgtcgtcttc

SEQ ID NO: 2658615 - DNA, 25 bp, Homo sapien
gattgatattctccctccttaggcc

SEQ ID NO: 2658616 - DNA, 25 bp, Homo sapien
taggcccttcaaagtttggatccag

SEQ ID NO: 2658617 - DNA, 25 bp, Homo sapien
cccttcaaagtttggatccagcctg

SEQ ID NO: 2658618 - DNA, 25 bp, Homo sapien
ctccgttgcctgttgtcaagggcat

SEQ ID NO: 2658619 - DNA, 25 bp, Homo sapien
tacctcctccgttgcctgttgtcaa

SEQ ID NO: 2658620 - DNA, 25 bp, Homo sapien
tcctccgttgcctgttgtcaagggc

SEQ ID NO: 2658621 - DNA, 25 bp, Homo sapien
tggctcctacctcctccgttgcctg

SEQ ID NO: 2658622 - DNA, 25 bp, Homo sapien
cagggtacagaaggttgagttcttt

SEQ ID NO: 2658623 - DNA, 25 bp, Homo sapien
gcagggtacagaaggttgagttctt

SEQ ID NO: 2658624 - DNA, 25 bp, Homo sapien
ggcagggtacagaaggttgagttct

SEQ ID NO: 2658625 - DNA, 25 bp, Homo sapien
gcactggatgggaggagtataggga

SEQ ID NO: 2658626 - DNA, 25 bp, Homo sapien
cactggatgggaggagtatagggag

SEQ ID NO: 2658627 - DNA, 25 bp, Homo sapien
atgcactggatgggaggagtatagg

SEQ ID NO: 2658628 - DNA, 25 bp, Homo sapien
tgcactggatgggaggagtataggg

SEQ ID NO: 2658629 - DNA, 25 bp, Homo sapien
cctggaatttggacacccagtgtct

SEQ ID NO: 2658630 - DNA, 25 bp, Homo sapien
ctacccctggaatttggacacccag

SEQ ID NO: 2658631 - DNA, 25 bp, Homo sapien
cccctggaatttggacacccagtgt

SEQ ID NO: 2658632 - DNA, 25 bp, Homo sapien
ggttcctggagtctgtgggttttca

SEQ ID NO: 2658633 - DNA, 25 bp, Homo sapien
cctgacccctcaggtctagtcactc

SEQ ID NO: 2658634 - DNA, 25 bp, Homo sapien
agcatctctgctgaggccgcctttg

SEQ ID NO: 2658635 - DNA, 25 bp, Homo sapien
gtctacagatccctgagacagcctt

SEQ ID NO: 2658636 - DNA, 25 bp, Homo sapien
tctctgtctacagatccctgagaca

SEQ ID NO: 2658637 - DNA, 25 bp, Homo sapien
gttgggatcttgtcttcagtgagtc

SEQ ID NO: 2658638 - DNA, 25 bp, Homo sapien
tgccatgttgggatcttgtcttcag

SEQ ID NO: 2658639 - DNA, 25 bp, Homo sapien
catgttgggatcttgtcttcagtga

SEQ ID NO: 2658640 - DNA, 25 bp, Homo sapien
tgggatcttgtcttcagtgagtctc

SEQ ID NO: 2658641 - DNA, 25 bp, Homo sapien
tgatctccttcagtggacggtaggc

SEQ ID NO: 2658642 - DNA, 25 bp, Homo sapien
tgactttcgtctgagactatctggg

SEQ ID NO: 2658643 - DNA, 25 bp, Homo sapien
ggatgtccatactgatctccttcag

SEQ ID NO: 2658644 - DNA, 25 bp, Homo sapien
gacggtaggctacaacacaaggtgc

SEQ ID NO: 2658645 - DNA, 25 bp, Homo sapien
catttaaacctcactaggcctgcaa

SEQ ID NO: 2658646 - DNA, 25 bp, Homo sapien
tttgagagaaagctcgcctgtgggt

SEQ ID NO: 2658647 - DNA, 25 bp, Homo sapien
gaacatgtagccacgtgaaaggccg

SEQ ID NO: 2658648 - DNA, 25 bp, Homo sapien
cagtcgtcttcttgcaaattcagag

SEQ ID NO: 2658649 - DNA, 25 bp, Homo sapien
gtcccttgacatggtagttctcccg

SEQ ID NO: 2658650 - DNA, 25 bp, Homo sapien
gacaagatgctcacctttaatgaag

SEQ ID NO: 2658651 - DNA, 25 bp, Homo sapien
tgtagtgtttgctaggagcccagga

SEQ ID NO: 2658652 - DNA, 25 bp, Homo sapien
caaaggtcaggtcagtaagcccatt

SEQ ID NO: 2658653 - DNA, 25 bp, Homo sapien
acacaaggtgggcattaacaaacca

SEQ ID NO: 2658654 - DNA, 25 bp, Homo sapien
gctgtaaagaacattgaaggtggtc

SEQ ID NO: 2658655 - DNA, 25 bp, Homo sapien
ggaaaaacaccattgaaagaggcag

SEQ ID NO: 2658656 - DNA, 25 bp, Homo sapien
gatagtatcttagaaaacctgttgg

SEQ ID NO: 2658657 - DNA, 25 bp, Homo sapien
ggcaaagcaggcacgtcccacacag

SEQ ID NO: 2658658 - DNA, 25 bp, Homo sapien
aggcaaagcaggcacgtcccacaca

SEQ ID NO: 2658659 - DNA, 25 bp, Homo sapien
cagcatgatgtgacctctaacctaa

SEQ ID NO: 2658660 - DNA, 25 bp, Homo sapien
agagagctactcaatcagggtaaga

SEQ ID NO: 2658661 - DNA, 25 bp, Homo sapien
agagatgagaataccatggcagctg

SEQ ID NO: 2658662 - DNA, 25 bp, Homo sapien
caaaagctcactaggttcaaaacca

SEQ ID NO: 2658663 - DNA, 25 bp, Homo sapien
taaatcaaacccgtaggccacagtg

SEQ ID NO: 2658664 - DNA, 25 bp, Homo sapien
tccctaggccagtccaatgtggtgc

SEQ ID NO: 2658665 - DNA, 25 bp, Homo sapien
gggttccctgcgaaagctactgtca

SEQ ID NO: 2658666 - DNA, 25 bp, Homo sapien
agatgggagcacctacctagaaggc

SEQ ID NO: 2658667 - DNA, 25 bp, Homo sapien
tgacgacacaaaagcggaaatccct

SEQ ID NO: 2658668 - DNA, 25 bp, Homo sapien
cgacacaaaagcggaaatccctgat

SEQ ID NO: 2658669 - DNA, 25 bp, Homo sapien
atgacgacacaaaagcggaaatccc

SEQ ID NO: 2658670 - DNA, 25 bp, Homo sapien
gacgacacaaaagcggaaatccctg

SEQ ID NO: 2658671 - DNA, 25 bp, Homo sapien
tgcaaggctactggctgacagctcc

SEQ ID NO: 2658672 - DNA, 25 bp, Homo sapien
tttagtgctagctaggcatagggcc

SEQ ID NO: 2658673 - DNA, 25 bp, Homo sapien
tagggcctcctagctagagactgta

SEQ ID NO: 2658674 - DNA, 25 bp, Homo sapien
cctccgtggcaactatggtggctgt

SEQ ID NO: 2658675 - DNA, 25 bp, Homo sapien
gagggaccactgtcatgactgctgg

SEQ ID NO: 2658676 - DNA, 25 bp, Homo sapien
catcagtacctctgttgggaaccag

SEQ ID NO: 2658677 - DNA, 25 bp, Homo sapien
ggtcatatctgttggaggccaccgt

SEQ ID NO: 2658678 - DNA, 25 bp, Homo sapien
agagatcccaccacatctgcgaggg

SEQ ID NO: 2658679 - DNA, 25 bp, Homo sapien
tatactaggcaaaaggcacaccaag

SEQ ID NO: 2658680 - DNA, 25 bp, Homo sapien
caccaagtaagagccagaggaaata

SEQ ID NO: 2658681 - DNA, 25 bp, Homo sapien
tcctcccaggcaatcgaagtaaaag

SEQ ID NO: 2658682 - DNA, 25 bp, Homo sapien
acagagagaactggtagtcctccca

SEQ ID NO: 2658683 - DNA, 25 bp, Homo sapien
tgacattcaatgcagatccatgctg

SEQ ID NO: 2658684 - DNA, 25 bp, Homo sapien
cacttctgaagtggcagactcttgg

SEQ ID NO: 2658685 - DNA, 25 bp, Homo sapien
tacaatgtggctgcgagaacagcaa

SEQ ID NO: 2658686 - DNA, 25 bp, Homo sapien
cagagggctagctactgcatttcac

SEQ ID NO: 2658687 - DNA, 25 bp, Homo sapien
cggggccgcagggagaaaggcgcgg

SEQ ID NO: 2658688 - DNA, 25 bp, Homo sapien
ggccgcagggagaaaggcgcgggtg

SEQ ID NO: 2658689 - DNA, 25 bp, Homo sapien
cgcagggagaaaggcgcgggtgtga

SEQ ID NO: 2658690 - DNA, 25 bp, Homo sapien
ggagaaaggcgcgggtgtgaggatg

SEQ ID NO: 2658691 - DNA, 25 bp, Homo sapien
cgggcgctttatggtgcggccgggc

SEQ ID NO: 2658692 - DNA, 25 bp, Homo sapien
tgcgttgaacctcggtcggcgcccg

SEQ ID NO: 2658693 - DNA, 25 bp, Homo sapien
gcaggtgacccgtgctcggcgtccg

SEQ ID NO: 2658694 - DNA, 25 bp, Homo sapien
cgggccgtgcgttgaacctcggtcg

SEQ ID NO: 2658695 - DNA, 25 bp, Homo sapien
cctgccgctagccaccgctgcagga

SEQ ID NO: 2658696 - DNA, 25 bp, Homo sapien
gcgcctgccgctagccaccgctgca

SEQ ID NO: 2658697 - DNA, 25 bp, Homo sapien
gggcgcctgccgctagccaccgctg

SEQ ID NO: 2658698 - DNA, 25 bp, Homo sapien
cgcctgccgctagccaccgctgcag

SEQ ID NO: 2658699 - DNA, 25 bp, Homo sapien
ttgtttaagcgtcccatcacagtaa

SEQ ID NO: 2658700 - DNA, 25 bp, Homo sapien
tagcctctgactggaagatgggaga

SEQ ID NO: 2658701 - DNA, 25 bp, Homo sapien
gaacttttagtctgcagcttgaagg

SEQ ID NO: 2658702 - DNA, 25 bp, Homo sapien
tctgtcaggactggcagcagagcgc

SEQ ID NO: 2658703 - DNA, 25 bp, Homo sapien
tgtgtcattcttcaactcttcaagc

SEQ ID NO: 2658704 - DNA, 25 bp, Homo sapien
ttccgactgctccagtgaaacaact

SEQ ID NO: 2658705 - DNA, 25 bp, Homo sapien
caccagtgctggcaaatcttcgtat

SEQ ID NO: 2658706 - DNA, 25 bp, Homo sapien
caaatcttcgtattttttccgactg

SEQ ID NO: 2658707 - DNA, 25 bp, Homo sapien
gccagccccctttcccggtgctcat

SEQ ID NO: 2658708 - DNA, 25 bp, Homo sapien
ctcttgccagccccctttcccggtg

SEQ ID NO: 2658709 - DNA, 25 bp, Homo sapien
gaagagaacagacagggttcccttc

SEQ ID NO: 2658710 - DNA, 25 bp, Homo sapien
agaacagacagggttcccttcctct

SEQ ID NO: 2658711 - DNA, 25 bp, Homo sapien
gctacttgggacactgaggtggagg

SEQ ID NO: 2658712 - DNA, 25 bp, Homo sapien
ctacttgggacactgaggtggagga

SEQ ID NO: 2658713 - DNA, 25 bp, Homo sapien
ttgggacactgaggtggaggattgc

SEQ ID NO: 2658714 - DNA, 25 bp, Homo sapien
acttgggacactgaggtggaggatt

SEQ ID NO: 2658715 - DNA, 25 bp, Homo sapien
tcaacaaatggtgtgataagtgtcc

SEQ ID NO: 2658716 - DNA, 25 bp, Homo sapien
gcctcctggtaacaagactgggttg

SEQ ID NO: 2658717 - DNA, 25 bp, Homo sapien
caaccaatggtgtgataagtggcag

SEQ ID NO: 2658718 - DNA, 25 bp, Homo sapien
gaagcaagcacaggtcaaccaatgg

SEQ ID NO: 2658719 - DNA, 25 bp, Homo sapien
tggaaagtcctcaattcaatggtct

SEQ ID NO: 2658720 - DNA, 25 bp, Homo sapien
aggaggatcctgtgccgccttccgt

SEQ ID NO: 2658721 - DNA, 25 bp, Homo sapien
gggagattgtgaacggaatccacct

SEQ ID NO: 2658722 - DNA, 25 bp, Homo sapien
cacctggatgcagtccaggtagagc

SEQ ID NO: 2658723 - DNA, 25 bp, Homo sapien
tggccacctggaacagtgagcctct

SEQ ID NO: 2658724 - DNA, 25 bp, Homo sapien
ctggccacctggaacagtgagcctc

SEQ ID NO: 2658725 - DNA, 25 bp, Homo sapien
tgctctgttgacagtcccacttttc

SEQ ID NO: 2658726 - DNA, 25 bp, Homo sapien
tgacagtcccacttttcggtgatgg

SEQ ID NO: 2658727 - DNA, 25 bp, Homo sapien
tgtgttgatgaaggcatgcaaactg

SEQ ID NO: 2658728 - DNA, 25 bp, Homo sapien
gagtttgtgttgatgaaggcatgca

SEQ ID NO: 2658729 - DNA, 25 bp, Homo sapien
ggtccttcacctctcccaggagttg

SEQ ID NO: 2658730 - DNA, 25 bp, Homo sapien
tctgatgatatgtcccgcttgttac

SEQ ID NO: 2658731 - DNA, 25 bp, Homo sapien
cgtgggcccccggagatctggctca

SEQ ID NO: 2658732 - DNA, 25 bp, Homo sapien
tgcagctccactagcttgtggggag

SEQ ID NO: 2658733 - DNA, 25 bp, Homo sapien
tggcgtgcggggctgcgtgggcccc

SEQ ID NO: 2658734 - DNA, 25 bp, Homo sapien
cagctatggtgtttcgcaaaaatga

SEQ ID NO: 2658735 - DNA, 25 bp, Homo sapien
ctggcattcagctatggtgtttcgc

SEQ ID NO: 2658736 - DNA, 25 bp, Homo sapien
ggcattcagctatggtgtttcgcaa

SEQ ID NO: 2658737 - DNA, 25 bp, Homo sapien
cattcagctatggtgtttcgcaaaa

SEQ ID NO: 2658738 - DNA, 25 bp, Homo sapien
gaaacatgggttggagtcacaccga

SEQ ID NO: 2658739 - DNA, 25 bp, Homo sapien
tacattggacacctcggaaacatgg

SEQ ID NO: 2658740 - DNA, 25 bp, Homo sapien
tcaacatcaatacaggtgatcccgt

SEQ ID NO: 2658741 - DNA, 25 bp, Homo sapien
tggaagccatctctactgtcggtac

SEQ ID NO: 2658742 - DNA, 25 bp, Homo sapien
cagggtgaggaggatacttagggat

SEQ ID NO: 2658743 - DNA, 25 bp, Homo sapien
gaggaggatacttagggatcccctc

SEQ ID NO: 2658744 - DNA, 25 bp, Homo sapien
ggtgaggaggatacttagggatccc

SEQ ID NO: 2658745 - DNA, 25 bp, Homo sapien
gcagggtgaggaggatacttaggga

SEQ ID NO: 2658746 - DNA, 25 bp, Homo sapien
ttatgcagtgcacgcccgggtagca

SEQ ID NO: 2658747 - DNA, 25 bp, Homo sapien
agcccactgggcaggcgtcacatct

SEQ ID NO: 2658748 - DNA, 25 bp, Homo sapien
tggcaaaactgatcccaacaccctg

SEQ ID NO: 2658749 - DNA, 25 bp, Homo sapien
ggagacaaatttatgcagtgcacgc

SEQ ID NO: 2658750 - DNA, 25 bp, Homo sapien
aaagtattaacgcagatcgagttgg

SEQ ID NO: 2658751 - DNA, 25 bp, Homo sapien
ggaacgcacgctccatttcgacact

SEQ ID NO: 2658752 - DNA, 25 bp, Homo sapien
agatcgagttgggaacgcacgctcc

SEQ ID NO: 2658753 - DNA, 25 bp, Homo sapien
taacgcagatcgagttgggaacgca

SEQ ID NO: 2658754 - DNA, 25 bp, Homo sapien
gatcaccagtataccccggcttaca

SEQ ID NO: 2658755 - DNA, 25 bp, Homo sapien
attcacactgcaagggttcagctct

SEQ ID NO: 2658756 - DNA, 25 bp, Homo sapien
ttccgctttgcatccccttatctga

SEQ ID NO: 2658757 - DNA, 25 bp, Homo sapien
ttacaaggcccacagcggtaagatc

SEQ ID NO: 2658758 - DNA, 25 bp, Homo sapien
tggcatccaggtacccaagtggaca

SEQ ID NO: 2658759 - DNA, 25 bp, Homo sapien
tctggcatccaggtacccaagtgga

SEQ ID NO: 2658760 - DNA, 25 bp, Homo sapien
gtggacagggttgccccccagccaa

SEQ ID NO: 2658761 - DNA, 25 bp, Homo sapien
caagtggacagggttgccccccagc

SEQ ID NO: 2658762 - DNA, 25 bp, Homo sapien
cagagcatggcagttcttcgtcggg

SEQ ID NO: 2658763 - DNA, 25 bp, Homo sapien
tcgtcggggtaactgtcgatgtcca

SEQ ID NO: 2658764 - DNA, 25 bp, Homo sapien
tcggggtaactgtcgatgtccacat

SEQ ID NO: 2658765 - DNA, 25 bp, Homo sapien
catctccagcccaaccgactccaca

SEQ ID NO: 2658766 - DNA, 25 bp, Homo sapien
acaagcgtcgccaatgccatctctg

SEQ ID NO: 2658767 - DNA, 25 bp, Homo sapien
gtcagcatcctcgtcacaagcgtcg

SEQ ID NO: 2658768 - DNA, 25 bp, Homo sapien
ttcttggccagaatttggcacatat

SEQ ID NO: 2658769 - DNA, 25 bp, Homo sapien
caggatcccatctccgtcagcatcc

SEQ ID NO: 2658770 - DNA, 25 bp, Homo sapien
tcgttatttaagacactcaggcagt

SEQ ID NO: 2658771 - DNA, 25 bp, Homo sapien
ccatcggtgtctttctggtcgttat

SEQ ID NO: 2658772 - DNA, 25 bp, Homo sapien
caaagatatctttatcgctgttcct

SEQ ID NO: 2658773 - DNA, 25 bp, Homo sapien
cattatgaatcaggacacagttatc

SEQ ID NO: 2658774 - DNA, 25 bp, Homo sapien
tgtcccgttggtcacgattgggaaa

SEQ ID NO: 2658775 - DNA, 25 bp, Homo sapien
atcaccatccttgtcccgttggtca

SEQ ID NO: 2658776 - DNA, 25 bp, Homo sapien
ggtcacgattgggaaattttgggca

SEQ ID NO: 2658777 - DNA, 25 bp, Homo sapien
gaaattttgggcagttgtccagaat

SEQ ID NO: 2658778 - DNA, 25 bp, Homo sapien
gtccccaaccagatcattatccaca

SEQ ID NO: 2658779 - DNA, 25 bp, Homo sapien
gagtccccaaccagatcattatcca

SEQ ID NO: 2658780 - DNA, 25 bp, Homo sapien
aggagtccccaaccagatcattatc

SEQ ID NO: 2658781 - DNA, 25 bp, Homo sapien
ccccaaccagatcattatccacatc

SEQ ID NO: 2658782 - DNA, 25 bp, Homo sapien
agggaccagaccatgctctagggcc

SEQ ID NO: 2658783 - DNA, 25 bp, Homo sapien
gaaagtgaagtcagccttgacaagc

SEQ ID NO: 2658784 - DNA, 25 bp, Homo sapien
tctagggccacacctaccacatggt

SEQ ID NO: 2658785 - DNA, 25 bp, Homo sapien
gagacctctcatggttactctggaa

SEQ ID NO: 2658786 - DNA, 25 bp, Homo sapien
atccttatcggtgtccagctgggca

SEQ ID NO: 2658787 - DNA, 25 bp, Homo sapien
ccaggtctgggataccatcattgtc

SEQ ID NO: 2658788 - DNA, 25 bp, Homo sapien
accagccggcagttgtctggtccag

SEQ ID NO: 2658789 - DNA, 25 bp, Homo sapien
atcatcatcacactcgtcaccaatt

SEQ ID NO: 2658790 - DNA, 25 bp, Homo sapien
ggaccacggtctggtaagccctgaa

SEQ ID NO: 2658791 - DNA, 25 bp, Homo sapien
tggttcaggaccacccagttgggat

SEQ ID NO: 2658792 - DNA, 25 bp, Homo sapien
ttctctgggcagacgtcgatccgat

SEQ ID NO: 2658793 - DNA, 25 bp, Homo sapien
gacctggtcctggtcaaagtcagac

SEQ ID NO: 2658794 - DNA, 25 bp, Homo sapien
ggccaagtaaccttaaggaagctca

SEQ ID NO: 2658795 - DNA, 25 bp, Homo sapien
agagttgagggagttcagaacagtc

SEQ ID NO: 2658796 - DNA, 25 bp, Homo sapien
agggagttcagaacagtcttgaagg

SEQ ID NO: 2658797 - DNA, 25 bp, Homo sapien
gccaagtaaccttaaggaagctcaa

SEQ ID NO: 2658798 - DNA, 25 bp, Homo sapien
gttcatggtctgtacaatctccatg

SEQ ID NO: 2658799 - DNA, 25 bp, Homo sapien
ctgttcatggtctgtacaatctcca

SEQ ID NO: 2658800 - DNA, 25 bp, Homo sapien
tcatggtctgtacaatctccatgcc

SEQ ID NO: 2658801 - DNA, 25 bp, Homo sapien
actgttcatggtctgtacaatctcc

SEQ ID NO: 2658802 - DNA, 25 bp, Homo sapien
aatatgtctgctccgtctgcttcca

SEQ ID NO: 2658803 - DNA, 25 bp, Homo sapien
caggttctgcaactgctcggaatgg

SEQ ID NO: 2658804 - DNA, 25 bp, Homo sapien
catctgtctgggtattcacatggaa

SEQ ID NO: 2658805 - DNA, 25 bp, Homo sapien
ttggtagccaaagataaagcctgca

SEQ ID NO: 2658806 - DNA, 25 bp, Homo sapien
tgctgtaggaaccagcggtaggaca

SEQ ID NO: 2658807 - DNA, 25 bp, Homo sapien
tgacctggtcactggtgtcccccgt

SEQ ID NO: 2658808 - DNA, 25 bp, Homo sapien
ctggacctgtcttagacttcacagc

SEQ ID NO: 2658809 - DNA, 25 bp, Homo sapien
gaaccagcggtaggacaccttgtcc

SEQ ID NO: 2658810 - DNA, 25 bp, Homo sapien
ggtggtctgaccctgaatatcttct

SEQ ID NO: 2658811 - DNA, 25 bp, Homo sapien
ttctatccccatcttggtcctactg

SEQ ID NO: 2658812 - DNA, 25 bp, Homo sapien
atgcaccaaccccacaacgctgggt

SEQ ID NO: 2658813 - DNA, 25 bp, Homo sapien
ctactgtcctgtccgggtggtctga

SEQ ID NO: 2658814 - DNA, 25 bp, Homo sapien
catttttcgctgacctggattgtac

SEQ ID NO: 2658815 - DNA, 25 bp, Homo sapien
gattgtactgtagctgttgccactt

SEQ ID NO: 2658816 - DNA, 25 bp, Homo sapien
tgttggtcacactatcaaacttgag

SEQ ID NO: 2658817 - DNA, 25 bp, Homo sapien
tctgtctctcacaaggcctaacatg

SEQ ID NO: 2658818 - DNA, 25 bp, Homo sapien
ctgcggacaacacggccggaggggc

SEQ ID NO: 2658819 - DNA, 25 bp, Homo sapien
tgcggacaacacggccggaggggcc

SEQ ID NO: 2658820 - DNA, 25 bp, Homo sapien
tatggtgacgccagagtcagccacc

SEQ ID NO: 2658821 - DNA, 25 bp, Homo sapien
gagaagcagaaaacgccaagtcggc

SEQ ID NO: 2658822 - DNA, 25 bp, Homo sapien
ggaccagatgatgttttcttgagag

SEQ ID NO: 2658823 - DNA, 25 bp, Homo sapien
agtcggcctccacgcattgtggtgt

SEQ ID NO: 2658824 - DNA, 25 bp, Homo sapien
attatcgaagcggtcgaaattctgg

SEQ ID NO: 2658825 - DNA, 25 bp, Homo sapien
gaagcggtcgaaattctgggtttga

SEQ ID NO: 2658826 - DNA, 25 bp, Homo sapien
ttaattatcgaagcggtcgaaattc

SEQ ID NO: 2658827 - DNA, 25 bp, Homo sapien
tatcgaagcggtcgaaattctgggt

SEQ ID NO: 2658828 - DNA, 25 bp, Homo sapien
aatatatatggttttagtgttccga

SEQ ID NO: 2658829 - DNA, 25 bp, Homo sapien
tatggttttagtgttccgaaaagca

SEQ ID NO: 2658830 - DNA, 25 bp, Homo sapien
ttattgccacattcacataaaacgt

SEQ ID NO: 2658831 - DNA, 25 bp, Homo sapien
acataaaacgttttgatatatttgg

SEQ ID NO: 2658832 - DNA, 25 bp, Homo sapien
ctgcaagttaacagggatccctccg

SEQ ID NO: 2658833 - DNA, 25 bp, Homo sapien
ggccaccgggtctgagaagaaacta

SEQ ID NO: 2658834 - DNA, 25 bp, Homo sapien
ggcctgggccttgtgattcacgcat

SEQ ID NO: 2658835 - DNA, 25 bp, Homo sapien
acgcataggctcatcttatcggcca

SEQ ID NO: 2658836 - DNA, 25 bp, Homo sapien
ttgaaggggccagaatagaagtctg

SEQ ID NO: 2658837 - DNA, 25 bp, Homo sapien
tcaatatgcttacagtccactaggg

SEQ ID NO: 2658838 - DNA, 25 bp, Homo sapien
aagaattgggcaaatctgtcccagg

SEQ ID NO: 2658839 - DNA, 25 bp, Homo sapien
aataagcttaagaattacgttgaag

SEQ ID NO: 2658840 - DNA, 25 bp, Homo sapien
caggccatgtgtcctggaaaatgag

SEQ ID NO: 2658841 - DNA, 25 bp, Homo sapien
caagttggggctagtgcattcttca

SEQ ID NO: 2658842 - DNA, 25 bp, Homo sapien
tgacagcaggatagctcaggccccc

SEQ ID NO: 2658843 - DNA, 25 bp, Homo sapien
agaggtgctccttgccacatcgcca

SEQ ID NO: 2658844 - DNA, 25 bp, Homo sapien
gctacagccagagcaagcctgtgga

SEQ ID NO: 2658845 - DNA, 25 bp, Homo sapien
ctacagccagagcaagcctgtggac

SEQ ID NO: 2658846 - DNA, 25 bp, Homo sapien
gccagagcaagcctgtggacagccc

SEQ ID NO: 2658847 - DNA, 25 bp, Homo sapien
acagccagagcaagcctgtggacag

SEQ ID NO: 2658848 - DNA, 25 bp, Homo sapien
gggctccttgcaccagataagaagg

SEQ ID NO: 2658849 - DNA, 25 bp, Homo sapien
tgggctccttgcaccagataagaag

SEQ ID NO: 2658850 - DNA, 25 bp, Homo sapien
tccaacttagttgctaaggatgcgg

SEQ ID NO: 2658851 - DNA, 25 bp, Homo sapien
ttccaacttagttgctaaggatgcg

SEQ ID NO: 2658852 - DNA, 25 bp, Homo sapien
ccaacttagttgctaaggatgcggc

SEQ ID NO: 2658853 - DNA, 25 bp, Homo sapien
ccggcacctgcaggtatagcccatg

SEQ ID NO: 2658854 - DNA, 25 bp, Homo sapien
cctgcaggtatagcccatggcggga

SEQ ID NO: 2658855 - DNA, 25 bp, Homo sapien
acctgcaggtatagcccatggcggg

SEQ ID NO: 2658856 - DNA, 25 bp, Homo sapien
ggcacctgcaggtatagcccatggc

SEQ ID NO: 2658857 - DNA, 25 bp, Homo sapien
cctcacagctgcaagtgtgctaggg

SEQ ID NO: 2658858 - DNA, 25 bp, Homo sapien
acagctgcaagtgtgctagggattg

SEQ ID NO: 2658859 - DNA, 25 bp, Homo sapien
tccttctcagaggatcttccatttg

SEQ ID NO: 2658860 - DNA, 25 bp, Homo sapien
taggggtggcaattggtctccctgc

SEQ ID NO: 2658861 - DNA, 25 bp, Homo sapien
gagaacccggtttgcaagaagacaa

SEQ ID NO: 2658862 - DNA, 25 bp, Homo sapien
tcctgagcttgaggttccatgaaac

SEQ ID NO: 2658863 - DNA, 25 bp, Homo sapien
caagatttctaagatccaagctcgg

SEQ ID NO: 2658864 - DNA, 25 bp, Homo sapien
gtgacgagataagcacaggccctgt

SEQ ID NO: 2658865 - DNA, 25 bp, Homo sapien
gtgacagggatgggcttctgattgc

SEQ ID NO: 2658866 - DNA, 25 bp, Homo sapien
atgttcataaacaagactacctgca

SEQ ID NO: 2658867 - DNA, 25 bp, Homo sapien
gcttctgattgccatgttcataaac

SEQ ID NO: 2658868 - DNA, 25 bp, Homo sapien
aaacaagactacctgcaactactcc

SEQ ID NO: 2658869 - DNA, 25 bp, Homo sapien
gaatcagattttcggttcctccttc

SEQ ID NO: 2658870 - DNA, 25 bp, Homo sapien
tctcctctcgttttgactttccagt

SEQ ID NO: 2658871 - DNA, 25 bp, Homo sapien
catcataatgactccaaagtactct

SEQ ID NO: 2658872 - DNA, 25 bp, Homo sapien
ctacttggtggtcaagactgaatca

SEQ ID NO: 2658873 - DNA, 25 bp, Homo sapien
tgggatgttggttcagcagctcaag

SEQ ID NO: 2658874 - DNA, 25 bp, Homo sapien
ggaaatttcttcgaaatggctgctg

SEQ ID NO: 2658875 - DNA, 25 bp, Homo sapien
ccatctaagctggacaatcagtgtc

SEQ ID NO: 2658876 - DNA, 25 bp, Homo sapien
tcagttaattgatccaagagtggac

SEQ ID NO: 2658877 - DNA, 25 bp, Homo sapien
gttttctagtaggagcagccatgtg

SEQ ID NO: 2658878 - DNA, 25 bp, Homo sapien
tgaaagctgtggaccgcacttcctt

SEQ ID NO: 2658879 - DNA, 25 bp, Homo sapien
tttttcctgcccttatgctggtgac

SEQ ID NO: 2658880 - DNA, 25 bp, Homo sapien
gacaccctgtcctgatatatgagaa

SEQ ID NO: 2658881 - DNA, 25 bp, Homo sapien
ctaattccgttcttcaacatgtggc

SEQ ID NO: 2658882 - DNA, 25 bp, Homo sapien
ccagcctgacttgagcactttttca

SEQ ID NO: 2658883 - DNA, 25 bp, Homo sapien
tttgggggtagagatggtttcgcca

SEQ ID NO: 2658884 - DNA, 25 bp, Homo sapien
cacccagcctgacttgagcactttt

SEQ ID NO: 2658885 - DNA, 25 bp, Homo sapien
agggtctcagtctgccaccccagct

SEQ ID NO: 2658886 - DNA, 25 bp, Homo sapien
gctgtagccaaattatgtggttacg

SEQ ID NO: 2658887 - DNA, 25 bp, Homo sapien
ttttctgaaacgattagctgtagcc

SEQ ID NO: 2658888 - DNA, 25 bp, Homo sapien
gatcctgggaagttctctcaggtaa

SEQ ID NO: 2658889 - DNA, 25 bp, Homo sapien
tatgtcccaatccacttctatagga

SEQ ID NO: 2658890 - DNA, 25 bp, Homo sapien
cacttggcttgtggaatttactgaa

SEQ ID NO: 2658891 - DNA, 25 bp, Homo sapien
tgtcctatacctcttggaaacgaaa

SEQ ID NO: 2658892 - DNA, 25 bp, Homo sapien
tatttcaggcagaggtgcgctctgt

SEQ ID NO: 2658893 - DNA, 25 bp, Homo sapien
tctcatttggtgtactctagtgtcc

SEQ ID NO: 2658894 - DNA, 25 bp, Homo sapien
tggatgaacaaaacagatgtggatg

SEQ ID NO: 2658895 - DNA, 25 bp, Homo sapien
ggatgaacaaaacagatgtggatgt

SEQ ID NO: 2658896 - DNA, 25 bp, Homo sapien
atgaacaaaacagatgtggatgtat

SEQ ID NO: 2658897 - DNA, 25 bp, Homo sapien
ctggatgaacaaaacagatgtggat

SEQ ID NO: 2658898 - DNA, 25 bp, Homo sapien
cagctgaaaatgttagcacgtgtat

SEQ ID NO: 2658899 - DNA, 25 bp, Homo sapien
gatgcaagaggaagagttacagttg

SEQ ID NO: 2658900 - DNA, 25 bp, Homo sapien
ctgatgcaagaggaagagttacagt

SEQ ID NO: 2658901 - DNA, 25 bp, Homo sapien
ttctcagctgaaaatgttagcacgt

SEQ ID NO: 2658902 - DNA, 25 bp, Homo sapien
tattccttggctggccgtgattggc

SEQ ID NO: 2658903 - DNA, 25 bp, Homo sapien
cagtcaaggtccagctgacaaggcc

SEQ ID NO: 2658904 - DNA, 25 bp, Homo sapien
cgtgagtctggtttgtgacatcccg

SEQ ID NO: 2658905 - DNA, 25 bp, Homo sapien
cacacaacgttttccagatgcgtga

SEQ ID NO: 2658906 - DNA, 25 bp, Homo sapien
taacgtgaccataccgttcaggttc

SEQ ID NO: 2658907 - DNA, 25 bp, Homo sapien
gaccagaagaagcttgttaggcaat

SEQ ID NO: 2658908 - DNA, 25 bp, Homo sapien
tgtgttctggatctgtaacgtgacc

SEQ ID NO: 2658909 - DNA, 25 bp, Homo sapien
ctgtaaaagcggaagtcgttttgtg

SEQ ID NO: 2658910 - DNA, 25 bp, Homo sapien
ggcacctgcttttcaactgcaccct

SEQ ID NO: 2658911 - DNA, 25 bp, Homo sapien
atttatagggtccaagaggaggcac

SEQ ID NO: 2658912 - DNA, 25 bp, Homo sapien
tgccaaaatcttgagtccccagcgc

SEQ ID NO: 2658913 - DNA, 25 bp, Homo sapien
tcacttccgcctcttagagccttgt

SEQ ID NO: 2658914 - DNA, 25 bp, Homo sapien
tcttgtggggccagtcattctcatc

SEQ ID NO: 2658915 - DNA, 25 bp, Homo sapien
aaaaatatcttgtggggccagtcat

SEQ ID NO: 2658916 - DNA, 25 bp, Homo sapien
aaaatatcttgtggggccagtcatt

SEQ ID NO: 2658917 - DNA, 25 bp, Homo sapien
atatcttgtggggccagtcattctc

SEQ ID NO: 2658918 - DNA, 25 bp, Homo sapien
gataccagttatgttgacttccttc

SEQ ID NO: 2658919 - DNA, 25 bp, Homo sapien
tggataccagttatgttgacttcct

SEQ ID NO: 2658920 - DNA, 25 bp, Homo sapien
ataccagttatgttgacttccttct

SEQ ID NO: 2658921 - DNA, 25 bp, Homo sapien
ctggataccagttatgttgacttcc

SEQ ID NO: 2658922 - DNA, 25 bp, Homo sapien
caaccaaactgatcatggttgaaat

SEQ ID NO: 2658923 - DNA, 25 bp, Homo sapien
tttcaaccaaactgatcatggttga

SEQ ID NO: 2658924 - DNA, 25 bp, Homo sapien
ccaaactgatcatggttgaaatatc

SEQ ID NO: 2658925 - DNA, 25 bp, Homo sapien
ctaccagtttgtcccaaaggaattg

SEQ ID NO: 2658926 - DNA, 25 bp, Homo sapien
tattcctgctttgaccgcggctagg

SEQ ID NO: 2658927 - DNA, 25 bp, Homo sapien
tctgtgtgatgatatcggcggtccc

SEQ ID NO: 2658928 - DNA, 25 bp, Homo sapien
aacatcgagagcttcttcagcggga

SEQ ID NO: 2658929 - DNA, 25 bp, Homo sapien
tcttctgggtcaagatggcctcctg

SEQ ID NO: 2658930 - DNA, 25 bp, Homo sapien
tagaaatagaacacaagccgcctga

SEQ ID NO: 2658931 - DNA, 25 bp, Homo sapien
gaacagtccacatcttttgaagggc

SEQ ID NO: 2658932 - DNA, 25 bp, Homo sapien
tagtcatttgggattcagacacaaa

SEQ ID NO: 2658933 - DNA, 25 bp, Homo sapien
gcagagcgcttttattctttgcacc

SEQ ID NO: 2658934 - DNA, 25 bp, Homo sapien
ctgtagagctcatcagtcggcccct

SEQ ID NO: 2658935 - DNA, 25 bp, Homo sapien
caaagggctttaggtgtcgagtgta

SEQ ID NO: 2658936 - DNA, 25 bp, Homo sapien
tagtctggaactaagtggtagcaag

SEQ ID NO: 2658937 - DNA, 25 bp, Homo sapien
tactgggatgacattgtgttcggct

SEQ ID NO: 2658938 - DNA, 25 bp, Homo sapien
cctcaggaatctggaagattgacat

SEQ ID NO: 2658939 - DNA, 25 bp, Homo sapien
ccctcaggaatctggaagattgaca

SEQ ID NO: 2658940 - DNA, 25 bp, Homo sapien
aaaggccctcaggaatctggaagat

SEQ ID NO: 2658941 - DNA, 25 bp, Homo sapien
ggccctcaggaatctggaagattga

SEQ ID NO: 2658942 - DNA, 25 bp, Homo sapien
ctgcagataaatagaacagacaaaa

SEQ ID NO: 2658943 - DNA, 25 bp, Homo sapien
tgcagataaatagaacagacaaaag

SEQ ID NO: 2658944 - DNA, 25 bp, Homo sapien
tttggaaatgagcattgtcagccat

SEQ ID NO: 2658945 - DNA, 25 bp, Homo sapien
gctttggaaatgagcattgtcagcc

SEQ ID NO: 2658946 - DNA, 25 bp, Homo sapien
acgtttgcgggagcaccaggtgtca

SEQ ID NO: 2658947 - DNA, 25 bp, Homo sapien
ctggctatggacgagagagaatgat

SEQ ID NO: 2658948 - DNA, 25 bp, Homo sapien
gtgtcagctggatctcttttaggat

SEQ ID NO: 2658949 - DNA, 25 bp, Homo sapien
ctaaagcgtctgttaagcaactgtc

SEQ ID NO: 2658950 - DNA, 25 bp, Homo sapien
tctttgcaagggcgcagtttgccag

SEQ ID NO: 2658951 - DNA, 25 bp, Homo sapien
ttgcaagggcgcagtttgccaggaa

SEQ ID NO: 2658952 - DNA, 25 bp, Homo sapien
cttctttgcaagggcgcagtttgcc

SEQ ID NO: 2658953 - DNA, 25 bp, Homo sapien
gagcagcaggcgtgttcccttgggg

SEQ ID NO: 2658954 - DNA, 25 bp, Homo sapien
tcagcgtatacagaagtaggcctgg

SEQ ID NO: 2658955 - DNA, 25 bp, Homo sapien
ctttggtcagcgtatacagaagtag

SEQ ID NO: 2658956 - DNA, 25 bp, Homo sapien
tggagatacatgtgggacctctttt

SEQ ID NO: 2658957 - DNA, 25 bp, Homo sapien
ttttggccgttctttggtcagcgta

SEQ ID NO: 2658958 - DNA, 25 bp, Homo sapien
attgctgccccaggattcggcagtc

SEQ ID NO: 2658959 - DNA, 25 bp, Homo sapien
tcatgtacgccctctacttcattct

SEQ ID NO: 2658960 - DNA, 25 bp, Homo sapien
tcagcacccgcttcatgtacgccct

SEQ ID NO: 2658961 - DNA, 25 bp, Homo sapien
acttcattctggtcgtcgtcctctg

SEQ ID NO: 2658962 - DNA, 25 bp, Homo sapien
cttttgaaaccgtctagggttgatg

SEQ ID NO: 2658963 - DNA, 25 bp, Homo sapien
tgaaaccgtctagggttgatggtca

SEQ ID NO: 2658964 - DNA, 25 bp, Homo sapien
tgtacattcatccttaggctcatgg

SEQ ID NO: 2658965 - DNA, 25 bp, Homo sapien
ccttaggctcatggattttgacagg

SEQ ID NO: 2658966 - DNA, 25 bp, Homo sapien
atggctgcaggcctttcccatccca

SEQ ID NO: 2658967 - DNA, 25 bp, Homo sapien
aagggtgtatggctgcaggcctttc

SEQ ID NO: 2658968 - DNA, 25 bp, Homo sapien
ctgcaggcctttcccatcccagcac

SEQ ID NO: 2658969 - DNA, 25 bp, Homo sapien
tggctgcaggcctttcccatcccag

SEQ ID NO: 2658970 - DNA, 25 bp, Homo sapien
gacaggagtgtggtgtgatgccacc

SEQ ID NO: 2658971 - DNA, 25 bp, Homo sapien
ctcttgcagggttgacaggagtgtg

SEQ ID NO: 2658972 - DNA, 25 bp, Homo sapien
caggagtgtggtgtgatgccaccat

SEQ ID NO: 2658973 - DNA, 25 bp, Homo sapien
cttgcagggttgacaggagtgtggt

SEQ ID NO: 2658974 - DNA, 25 bp, Homo sapien
ggggttaactcatcatgcttgcctg

SEQ ID NO: 2658975 - DNA, 25 bp, Homo sapien
ccttgctctggggttaactcatcat

SEQ ID NO: 2658976 - DNA, 25 bp, Homo sapien
tctggggttaactcatcatgcttgc

SEQ ID NO: 2658977 - DNA, 25 bp, Homo sapien
tgctctggggttaactcatcatgct

SEQ ID NO: 2658978 - DNA, 25 bp, Homo sapien
atacgggcatctagctggcactggg

SEQ ID NO: 2658979 - DNA, 25 bp, Homo sapien
catccccgagcatacgggcatctag

SEQ ID NO: 2658980 - DNA, 25 bp, Homo sapien
cgagcatacgggcatctagctggca

SEQ ID NO: 2658981 - DNA, 25 bp, Homo sapien
gtttccatccccgagcatacgggca

SEQ ID NO: 2658982 - DNA, 25 bp, Homo sapien
gcttcctccactcttggggggcttc

SEQ ID NO: 2658983 - DNA, 25 bp, Homo sapien
tgtcttttcgggtgttgctggtctc

SEQ ID NO: 2658984 - DNA, 25 bp, Homo sapien
tctgtcagcaccatcaaggctttgc

SEQ ID NO: 2658985 - DNA, 25 bp, Homo sapien
ttttaaggcagtatggaagtagcaa

SEQ ID NO: 2658986 - DNA, 25 bp, Homo sapien
gctgctcattgcactcatccagcag

SEQ ID NO: 2658987 - DNA, 25 bp, Homo sapien
tgtaggtgcatgcacctgttttagg

SEQ ID NO: 2658988 - DNA, 25 bp, Homo sapien
gcagcatccagtgggctcttctgac

SEQ ID NO: 2658989 - DNA, 25 bp, Homo sapien
gggcagcatccagtgggctcttctg

SEQ ID NO: 2658990 - DNA, 25 bp, Homo sapien
tcttctgactgctgtaggtgcatgc

SEQ ID NO: 2658991 - DNA, 25 bp, Homo sapien
gacaattaacgttctaagtgccttg

SEQ ID NO: 2658992 - DNA, 25 bp, Homo sapien
agagctggcaactaggtaaatctcc

SEQ ID NO: 2658993 - DNA, 25 bp, Homo sapien
tggccttccttttcgagcacactga

SEQ ID NO: 2658994 - DNA, 25 bp, Homo sapien
tgactaggtttagatcccagccctg

SEQ ID NO: 2658995 - DNA, 25 bp, Homo sapien
tcccaccatgtgagaggctgaggta

SEQ ID NO: 2658996 - DNA, 25 bp, Homo sapien
agaccagccgggcaaaacccagtct

SEQ ID NO: 2658997 - DNA, 25 bp, Homo sapien
ctgtaatcccaccatgtgagaggct

SEQ ID NO: 2658998 - DNA, 25 bp, Homo sapien
aatattagccaggttggtagtgtgc

SEQ ID NO: 2658999 - DNA, 25 bp, Homo sapien
tcatgcttggctaacttttttggta

SEQ ID NO: 2659000 - DNA, 25 bp, Homo sapien
gaccacaggagcatgccatcatgct

SEQ ID NO: 2659001 - DNA, 25 bp, Homo sapien
cacaggagcatgccatcatgcttgg

SEQ ID NO: 2659002 - DNA, 25 bp, Homo sapien
tcaggtaatcctcccttcttggcct

SEQ ID NO: 2659003 - DNA, 25 bp, Homo sapien
gttgctccgggtcctgcgttgccat

SEQ ID NO: 2659004 - DNA, 25 bp, Homo sapien
tttctgatgggcgtaatgcccgttg

SEQ ID NO: 2659005 - DNA, 25 bp, Homo sapien
taatgcccgttgctccgggtcctgc

SEQ ID NO: 2659006 - DNA, 25 bp, Homo sapien
gatgggcgtaatgcccgttgctccg

SEQ ID NO: 2659007 - DNA, 25 bp, Homo sapien
gaactgcacaatgaaaccacaggtc

SEQ ID NO: 2659008 - DNA, 25 bp, Homo sapien
aattaccacattaagcagaactgca

SEQ ID NO: 2659009 - DNA, 25 bp, Homo sapien
gagccctggaaatagttctgctaca

SEQ ID NO: 2659010 - DNA, 25 bp, Homo sapien
taaatactctacactagagccctgg

SEQ ID NO: 2659011 - DNA, 25 bp, Homo sapien
gagttgcttgatggttgctcattca

SEQ ID NO: 2659012 - DNA, 25 bp, Homo sapien
gacctgtccagctgacaaatagctt

SEQ ID NO: 2659013 - DNA, 25 bp, Homo sapien
gcaagtctgactttgtaggcacggt

SEQ ID NO: 2659014 - DNA, 25 bp, Homo sapien
tgaaggttgcactcttagttggaga

SEQ ID NO: 2659015 - DNA, 25 bp, Homo sapien
tcagtgctgtgtgatggtgatcaca

SEQ ID NO: 2659016 - DNA, 25 bp, Homo sapien
gtgatggtgatcacactgtgatttc

SEQ ID NO: 2659017 - DNA, 25 bp, Homo sapien
tgtgatggtgatcacactgtgattt

SEQ ID NO: 2659018 - DNA, 25 bp, Homo sapien
ctgtgtgatggtgatcacactgtga

SEQ ID NO: 2659019 - DNA, 25 bp, Homo sapien
ttaatggagtgttttcacgaacgaa

SEQ ID NO: 2659020 - DNA, 25 bp, Homo sapien
tcagcctttccacaatcgaggccag

SEQ ID NO: 2659021 - DNA, 25 bp, Homo sapien
cacgaacgaatcagactctagggag

SEQ ID NO: 2659022 - DNA, 25 bp, Homo sapien
cctggttcggggtgttcttgctgac

SEQ ID NO: 2659023 - DNA, 25 bp, Homo sapien
gccgaggctgatcttcgttcaagtg

SEQ ID NO: 2659024 - DNA, 25 bp, Homo sapien
gcctaggcgcttcgccgaggctgat

SEQ ID NO: 2659025 - DNA, 25 bp, Homo sapien
ggctgatcttcgttcaagtgtgagc

SEQ ID NO: 2659026 - DNA, 25 bp, Homo sapien
agcccagcgctcgaggcgcgaggca

SEQ ID NO: 2659027 - DNA, 25 bp, Homo sapien
gcggagaggcgctgcgctctcattt

SEQ ID NO: 2659028 - DNA, 25 bp, Homo sapien
accgggaagtgatcgcagcagccca

SEQ ID NO: 2659029 - DNA, 25 bp, Homo sapien
tttagaggcagcaacaagctctttc

SEQ ID NO: 2659030 - DNA, 25 bp, Homo sapien
tctcatttggcgagggcccgagcgc

SEQ ID NO: 2659031 - DNA, 25 bp, Homo sapien
tgcaggaaaggcaggaaccgcttac

SEQ ID NO: 2659032 - DNA, 25 bp, Homo sapien
tgtgcaggaaaggcaggaaccgctt

SEQ ID NO: 2659033 - DNA, 25 bp, Homo sapien
gtgcaggaaaggcaggaaccgctta

SEQ ID NO: 2659034 - DNA, 25 bp, Homo sapien
ctgtgcaggaaaggcaggaaccgct

SEQ ID NO: 2659035 - DNA, 25 bp, Homo sapien
cagaacagtcaagggcccagggatt

SEQ ID NO: 2659036 - DNA, 25 bp, Homo sapien
cccagggattcgaggaagcttggga

SEQ ID NO: 2659037 - DNA, 25 bp, Homo sapien
ggaacaaggatctcgtgggtgggct

SEQ ID NO: 2659038 - DNA, 25 bp, Homo sapien
cgcggagagcccaaaagttgaaagt

SEQ ID NO: 2659039 - DNA, 25 bp, Homo sapien
catttgtagatttcgcgccttccct

SEQ ID NO: 2659040 - DNA, 25 bp, Homo sapien
gcaaagaggcatcggagttccagct

SEQ ID NO: 2659041 - DNA, 25 bp, Homo sapien
gaaaggtcctcgagttccgagtcga

SEQ ID NO: 2659042 - DNA, 25 bp, Homo sapien
tcagggttcggagcgctggattcta

SEQ ID NO: 2659043 - DNA, 25 bp, Homo sapien
tatattgttaccagagtggggtcct

SEQ ID NO: 2659044 - DNA, 25 bp, Homo sapien
atgggctgctcaactaattatagtt

SEQ ID NO: 2659045 - DNA, 25 bp, Homo sapien
ttcatgagttttccgcgaaagggat

SEQ ID NO: 2659046 - DNA, 25 bp, Homo sapien
tatgcttacattcaacagagtatgg

SEQ ID NO: 2659047 - DNA, 25 bp, Homo sapien
cttctcgttctggatatcccctatt

SEQ ID NO: 2659048 - DNA, 25 bp, Homo sapien
tctggatatcccctattcccaccag

SEQ ID NO: 2659049 - DNA, 25 bp, Homo sapien
tcgttctggatatcccctattccca

SEQ ID NO: 2659050 - DNA, 25 bp, Homo sapien
tggatatcccctattcccaccaggt

SEQ ID NO: 2659051 - DNA, 25 bp, Homo sapien
ctccatttctcggtctctcaggctc

SEQ ID NO: 2659052 - DNA, 25 bp, Homo sapien
tccatttctcggtctctcaggctcc

SEQ ID NO: 2659053 - DNA, 25 bp, Homo sapien
cctccatttctcggtctctcaggct

SEQ ID NO: 2659054 - DNA, 25 bp, Homo sapien
caggcactgtccatagtacttgcga

SEQ ID NO: 2659055 - DNA, 25 bp, Homo sapien
tgcaggcactgtccatagtacttgc

SEQ ID NO: 2659056 - DNA, 25 bp, Homo sapien
ctgtccatagtacttgcgaagatct

SEQ ID NO: 2659057 - DNA, 25 bp, Homo sapien
gcactgtccatagtacttgcgaaga

SEQ ID NO: 2659058 - DNA, 25 bp, Homo sapien
gtcatcagtggtcttgcggagccca

SEQ ID NO: 2659059 - DNA, 25 bp, Homo sapien
gtgtcatcagtggtcttgcggagcc

SEQ ID NO: 2659060 - DNA, 25 bp, Homo sapien
tggtgtcatcagtggtcttgcggag

SEQ ID NO: 2659061 - DNA, 25 bp, Homo sapien
catcagtggtcttgcggagcccatg

SEQ ID NO: 2659062 - DNA, 25 bp, Homo sapien
cctctcggttcttctgagccaactt

SEQ ID NO: 2659063 - DNA, 25 bp, Homo sapien
ggttcttctgagccaacttgtcata

SEQ ID NO: 2659064 - DNA, 25 bp, Homo sapien
ctgagccaacttgtcatattgggca

SEQ ID NO: 2659065 - DNA, 25 bp, Homo sapien
gagccaacttgtcatattgggcacg

SEQ ID NO: 2659066 - DNA, 25 bp, Homo sapien
cagctccaacttcaagtgcagcaga

SEQ ID NO: 2659067 - DNA, 25 bp, Homo sapien
gcatcaccaggattgaagccctcct

SEQ ID NO: 2659068 - DNA, 25 bp, Homo sapien
aattcctggacctggtgttgcccct

SEQ ID NO: 2659069 - DNA, 25 bp, Homo sapien
tcagaagctccgatctcagcggact

SEQ ID NO: 2659070 - DNA, 25 bp, Homo sapien
cagactagaaatgctatatattgaa

SEQ ID NO: 2659071 - DNA, 25 bp, Homo sapien
aaacagactagaaatgctatatatt

SEQ ID NO: 2659072 - DNA, 25 bp, Homo sapien
ctagaaatggccaaactgtagggat

SEQ ID NO: 2659073 - DNA, 25 bp, Homo sapien
attctagaaatggccaaactgtagg

SEQ ID NO: 2659074 - DNA, 25 bp, Homo sapien
ctagctttgcgagcgatggtgtccc

SEQ ID NO: 2659075 - DNA, 25 bp, Homo sapien
ggctagctttgcgagcgatggtgtc

SEQ ID NO: 2659076 - DNA, 25 bp, Homo sapien
tgcaaggctagctttgcgagcgatg

SEQ ID NO: 2659077 - DNA, 25 bp, Homo sapien
caaggctagctttgcgagcgatggt

SEQ ID NO: 2659078 - DNA, 25 bp, Homo sapien
taaggttctcactacagatgcaaga

SEQ ID NO: 2659079 - DNA, 25 bp, Homo sapien
gggtgctgctaaggttctcactaca

SEQ ID NO: 2659080 - DNA, 25 bp, Homo sapien
gtctgtcttattgtggtagccaaga

SEQ ID NO: 2659081 - DNA, 25 bp, Homo sapien
ttactgggtgctgctaaggttctca

SEQ ID NO: 2659082 - DNA, 25 bp, Homo sapien
aacatacagaatctcctttccggag

SEQ ID NO: 2659083 - DNA, 25 bp, Homo sapien
aaaacatacagaatctcctttccgg

SEQ ID NO: 2659084 - DNA, 25 bp, Homo sapien
aaacatacagaatctcctttccgga

SEQ ID NO: 2659085 - DNA, 25 bp, Homo sapien
gagttgtacgtgattttattaccag

SEQ ID NO: 2659086 - DNA, 25 bp, Homo sapien
accagttttcatccgaatccaccgg

SEQ ID NO: 2659087 - DNA, 25 bp, Homo sapien
tcatccgaatccaccggggaatggg

SEQ ID NO: 2659088 - DNA, 25 bp, Homo sapien
cagttttcatccgaatccaccgggg

SEQ ID NO: 2659089 - DNA, 25 bp, Homo sapien
tgaccacttaaggacattgctgaga

SEQ ID NO: 2659090 - DNA, 25 bp, Homo sapien
tgttttgaccacttaaggacattgc

SEQ ID NO: 2659091 - DNA, 25 bp, Homo sapien
ctcaaccgcagcatgttttgaccac

SEQ ID NO: 2659092 - DNA, 25 bp, Homo sapien
tcaaccgcagcatgttttgaccact

SEQ ID NO: 2659093 - DNA, 25 bp, Homo sapien
ggaaggtggcatctcagacagcctt

SEQ ID NO: 2659094 - DNA, 25 bp, Homo sapien
gtcagagaccaaagttaaggattaa

SEQ ID NO: 2659095 - DNA, 25 bp, Homo sapien
agtcagagaccaaagttaaggatta

SEQ ID NO: 2659096 - DNA, 25 bp, Homo sapien
aaggtggcatctcagacagccttgt

SEQ ID NO: 2659097 - DNA, 25 bp, Homo sapien
ggtgatggtcctttgtgcaaatgtg

SEQ ID NO: 2659098 - DNA, 25 bp, Homo sapien
tcctttgtgcaaatgtgggtggaga

SEQ ID NO: 2659099 - DNA, 25 bp, Homo sapien
caggtgatggtcctttgtgcaaatg

SEQ ID NO: 2659100 - DNA, 25 bp, Homo sapien
gatggtcctttgtgcaaatgtgggt

SEQ ID NO: 2659101 - DNA, 25 bp, Homo sapien
cagctgacttagcagagctggccat

SEQ ID NO: 2659102 - DNA, 25 bp, Homo sapien
ctcagctgacttagcagagctggcc

SEQ ID NO: 2659103 - DNA, 25 bp, Homo sapien
tcagctgacttagcagagctggcca

SEQ ID NO: 2659104 - DNA, 25 bp, Homo sapien
cctcagtaatattggtttcctcaaa

SEQ ID NO: 2659105 - DNA, 25 bp, Homo sapien
gatccaatttcgaataaggcaatgg

SEQ ID NO: 2659106 - DNA, 25 bp, Homo sapien
cctagggtccagatattcttgatga

SEQ ID NO: 2659107 - DNA, 25 bp, Homo sapien
tgttctgtaacttgatggctgctat

SEQ ID NO: 2659108 - DNA, 25 bp, Homo sapien
cacatcctcagtaatattggtttcc

SEQ ID NO: 2659109 - DNA, 25 bp, Homo sapien
acacatcctcagtaatattggtttc

SEQ ID NO: 2659110 - DNA, 25 bp, Homo sapien
tgataacatttcattgattttgtca

SEQ ID NO: 2659111 - DNA, 25 bp, Homo sapien
catttcattgattttgtcaagtcct

SEQ ID NO: 2659112 - DNA, 25 bp, Homo sapien
ataacatttcattgattttgtcaag

SEQ ID NO: 2659113 - DNA, 25 bp, Homo sapien
tgttgataacatttcattgattttg

SEQ ID NO: 2659114 - DNA, 25 bp, Homo sapien
tgtgcggtgttctcagagttctggt

SEQ ID NO: 2659115 - DNA, 25 bp, Homo sapien
aaaacttgtgcggtgttctcagagt

SEQ ID NO: 2659116 - DNA, 25 bp, Homo sapien
tctaaacgatttaccaaatctcttg

SEQ ID NO: 2659117 - DNA, 25 bp, Homo sapien
aaatctcttgcaaaaacttgtgcgg

SEQ ID NO: 2659118 - DNA, 25 bp, Homo sapien
agtgttctgcttcctgtagtaactg

SEQ ID NO: 2659119 - DNA, 25 bp, Homo sapien
ttcctgtagtaactgctccatgttg

SEQ ID NO: 2659120 - DNA, 25 bp, Homo sapien
gcttcctgtagtaactgctccatgt

SEQ ID NO: 2659121 - DNA, 25 bp, Homo sapien
tctgcttcctgtagtaactgctcca

SEQ ID NO: 2659122 - DNA, 25 bp, Homo sapien
gagtttcacttatgtctttctgaga

SEQ ID NO: 2659123 - DNA, 25 bp, Homo sapien
atttccaagagtttcacttatgtct

SEQ ID NO: 2659124 - DNA, 25 bp, Homo sapien
ttggaaaccgactccattatttcca

SEQ ID NO: 2659125 - DNA, 25 bp, Homo sapien
gattttatcagtttactgagctcag

SEQ ID NO: 2659126 - DNA, 25 bp, Homo sapien
gcaaagctgccatcaactgcaatga

SEQ ID NO: 2659127 - DNA, 25 bp, Homo sapien
aataggtgtcatggctcagtttctt

SEQ ID NO: 2659128 - DNA, 25 bp, Homo sapien
tttggcattcattctctagcaaagc

SEQ ID NO: 2659129 - DNA, 25 bp, Homo sapien
gcaatgaataggtgtcatggctcag

SEQ ID NO: 2659130 - DNA, 25 bp, Homo sapien
catccaggcttctacaggatctgtc

SEQ ID NO: 2659131 - DNA, 25 bp, Homo sapien
tatcttaggctgctagctgacctca

SEQ ID NO: 2659132 - DNA, 25 bp, Homo sapien
gaactgggtattgcaagctttctta

SEQ ID NO: 2659133 - DNA, 25 bp, Homo sapien
tcttattaagacaaacatccaggct

SEQ ID NO: 2659134 - DNA, 25 bp, Homo sapien
aaacaagcagattgtaaaggtgaaa

SEQ ID NO: 2659135 - DNA, 25 bp, Homo sapien
ccaaggtttgatgattgatcatgac

SEQ ID NO: 2659136 - DNA, 25 bp, Homo sapien
ttatgaacttgatgtagacacaatg

SEQ ID NO: 2659137 - DNA, 25 bp, Homo sapien
ttgaaccagcagatctgcccaaggt

SEQ ID NO: 2659138 - DNA, 25 bp, Homo sapien
ccccagatgccggatgtcgtagtcc

SEQ ID NO: 2659139 - DNA, 25 bp, Homo sapien
gaagttacataaagctgttccaggc

SEQ ID NO: 2659140 - DNA, 25 bp, Homo sapien
tcgtttccgcgagctattactagaa

SEQ ID NO: 2659141 - DNA, 25 bp, Homo sapien
tgatcgtcatcatgcggagcctgtt

SEQ ID NO: 2659142 - DNA, 25 bp, Homo sapien
ctcaaaggcaatttggagaacatct

SEQ ID NO: 2659143 - DNA, 25 bp, Homo sapien
atccatttgtgccagttttagtgcc

SEQ ID NO: 2659144 - DNA, 25 bp, Homo sapien
acatcttcaattatatcagctcctt

SEQ ID NO: 2659145 - DNA, 25 bp, Homo sapien
caattgcttctcaaaggcaatttgg

SEQ ID NO: 2659146 - DNA, 25 bp, Homo sapien
aaatatgattttctgttgtaccttg

SEQ ID NO: 2659147 - DNA, 25 bp, Homo sapien
agcccacttctcaatatccacaaag

SEQ ID NO: 2659148 - DNA, 25 bp, Homo sapien
tgtggtcctcggactcggttctttc

SEQ ID NO: 2659149 - DNA, 25 bp, Homo sapien
aagcttcgcctttgcttttgcactc

SEQ ID NO: 2659150 - DNA, 25 bp, Homo sapien
ctggccgtcctgtcgtccctgtgtg

SEQ ID NO: 2659151 - DNA, 25 bp, Homo sapien
tttgcatgacgtgcaatttgcatcc

SEQ ID NO: 2659152 - DNA, 25 bp, Homo sapien
ttcccttctgactcacgttggcaga

SEQ ID NO: 2659153 - DNA, 25 bp, Homo sapien
ggtgtgcgttctctaccaaatcgag

SEQ ID NO: 2659154 - DNA, 25 bp, Homo sapien
cgttggcagataaactgtccccaga

SEQ ID NO: 2659155 - DNA, 25 bp, Homo sapien
tcgacacgacgtcgcgctgaggagt

SEQ ID NO: 2659156 - DNA, 25 bp, Homo sapien
tttgggaactcgacacgacgtcgcg

SEQ ID NO: 2659157 - DNA, 25 bp, Homo sapien
ctgcggagctttttgggaactcgac

SEQ ID NO: 2659158 - DNA, 25 bp, Homo sapien
ctgaggagtgaagagctaccccggc

SEQ ID NO: 2659159 - DNA, 25 bp, Homo sapien
aatttttgccactaagcatgcggtt

SEQ ID NO: 2659160 - DNA, 25 bp, Homo sapien
taaactcccgccaactcaagagacg

SEQ ID NO: 2659161 - DNA, 25 bp, Homo sapien
caagagacgacaagctcaagtgaat

SEQ ID NO: 2659162 - DNA, 25 bp, Homo sapien
catgcggtttaatatccaggagagg

SEQ ID NO: 2659163 - DNA, 25 bp, Homo sapien
gatagcacaacagactgaacagaag

SEQ ID NO: 2659164 - DNA, 25 bp, Homo sapien
aatatactgcagcattaggaaccaa

SEQ ID NO: 2659165 - DNA, 25 bp, Homo sapien
aatgccacgctcctcttctaagttt

SEQ ID NO: 2659166 - DNA, 25 bp, Homo sapien
gccagacattaaagtgattcgcaaa

SEQ ID NO: 2659167 - DNA, 25 bp, Homo sapien
gacaatatgtaccaatagcctgaga

SEQ ID NO: 2659168 - DNA, 25 bp, Homo sapien
taagatcctcgcttttcctgctacg

SEQ ID NO: 2659169 - DNA, 25 bp, Homo sapien
tagcacgcatacaccagaaaacatc

SEQ ID NO: 2659170 - DNA, 25 bp, Homo sapien
taacagcccaccaatccaaaaatgg

SEQ ID NO: 2659171 - DNA, 25 bp, Homo sapien
tgagaacatcctgggagagatatcc

SEQ ID NO: 2659172 - DNA, 25 bp, Homo sapien
agatagataaagatttgggaactgg

SEQ ID NO: 2659173 - DNA, 25 bp, Homo sapien
gaatataagaatctggaatgcagga

SEQ ID NO: 2659174 - DNA, 25 bp, Homo sapien
gaacatcctgggagagatatccaaa

SEQ ID NO: 2659175 - DNA, 25 bp, Homo sapien
taagcccgagaaacctcacaggaat

SEQ ID NO: 2659176 - DNA, 25 bp, Homo sapien
ggctgcagaacagtgaatgttgctg

SEQ ID NO: 2659177 - DNA, 25 bp, Homo sapien
tgtttacctgggtttcagcagcgga

SEQ ID NO: 2659178 - DNA, 25 bp, Homo sapien
gaggctgcagaacagtgaatgttgc

SEQ ID NO: 2659179 - DNA, 25 bp, Homo sapien
tacctgggtttcagcagcggaggct

SEQ ID NO: 2659180 - DNA, 25 bp, Homo sapien
atcggctactgaagcttgtgcattt

SEQ ID NO: 2659181 - DNA, 25 bp, Homo sapien
tcggctactgaagcttgtgcatttg

SEQ ID NO: 2659182 - DNA, 25 bp, Homo sapien
cggctactgaagcttgtgcatttgt

SEQ ID NO: 2659183 - DNA, 25 bp, Homo sapien
agacttattcagaatttaattcttg

SEQ ID NO: 2659184 - DNA, 25 bp, Homo sapien
acttattcagaatttaattcttgta

SEQ ID NO: 2659185 - DNA, 25 bp, Homo sapien
tattcagaatttaattcttgtatgc

SEQ ID NO: 2659186 - DNA, 25 bp, Homo sapien
ctgcagacttattcagaatttaatt

SEQ ID NO: 2659187 - DNA, 25 bp, Homo sapien
gtttgtccaagtcactgacagctgc

SEQ ID NO: 2659188 - DNA, 25 bp, Homo sapien
ggagtttgtccaagtcactgacagc

SEQ ID NO: 2659189 - DNA, 25 bp, Homo sapien
tttgtccaagtcactgacagctgct

SEQ ID NO: 2659190 - DNA, 25 bp, Homo sapien
aaggagtttgtccaagtcactgaca

SEQ ID NO: 2659191 - DNA, 25 bp, Homo sapien
gccacggtcggaggataacttgaga

SEQ ID NO: 2659192 - DNA, 25 bp, Homo sapien
cacggtcggaggataacttgagatc

SEQ ID NO: 2659193 - DNA, 25 bp, Homo sapien
gaagccacggtcggaggataacttg

SEQ ID NO: 2659194 - DNA, 25 bp, Homo sapien
agccacggtcggaggataacttgag

SEQ ID NO: 2659195 - DNA, 25 bp, Homo sapien
tcgctgtgaggaagccaactctgaa

SEQ ID NO: 2659196 - DNA, 25 bp, Homo sapien
ttttcattcagggaactctcatttg

SEQ ID NO: 2659197 - DNA, 25 bp, Homo sapien
tcttttgggagcaatgaagttcgct

SEQ ID NO: 2659198 - DNA, 25 bp, Homo sapien
ggcacaactattaacgcactcttgg

SEQ ID NO: 2659199 - DNA, 25 bp, Homo sapien
gatttcatctgaagtaccaccatcc

SEQ ID NO: 2659200 - DNA, 25 bp, Homo sapien
cagataggtttactacatcgtccca

SEQ ID NO: 2659201 - DNA, 25 bp, Homo sapien
tgtcacttatcagatcacagatagg

SEQ ID NO: 2659202 - DNA, 25 bp, Homo sapien
catcgtcccatatataacggctgga

SEQ ID NO: 2659203 - DNA, 25 bp, Homo sapien
tgggacatgagtgccagaaagcccc

SEQ ID NO: 2659204 - DNA, 25 bp, Homo sapien
ggacggcacatctttactggaaaca

SEQ ID NO: 2659205 - DNA, 25 bp, Homo sapien
gaagacaggacaatgaggacggcac

SEQ ID NO: 2659206 - DNA, 25 bp, Homo sapien
catttttcggaaggctgcaggtcaa

SEQ ID NO: 2659207 - DNA, 25 bp, Homo sapien
gttacgaaactagatccaccttcag

SEQ ID NO: 2659208 - DNA, 25 bp, Homo sapien
ttctgaatcaggaacccaagtaggc

SEQ ID NO: 2659209 - DNA, 25 bp, Homo sapien
gacttggcagttcatacagtttgga

SEQ ID NO: 2659210 - DNA, 25 bp, Homo sapien
tttcccacatgctcggcaatggtgt

SEQ ID NO: 2659211 - DNA, 25 bp, Homo sapien
aatagtttcatagcagactacacat

SEQ ID NO: 2659212 - DNA, 25 bp, Homo sapien
tcctattacaacagacaccacaaaa

SEQ ID NO: 2659213 - DNA, 25 bp, Homo sapien
tattgcagtttacacttcctattac

SEQ ID NO: 2659214 - DNA, 25 bp, Homo sapien
gcttccttttctagatattgcagtt

SEQ ID NO: 2659215 - DNA, 25 bp, Homo sapien
gataattcaacactaggtccttgcc

SEQ ID NO: 2659216 - DNA, 25 bp, Homo sapien
tgggatgtcccacctaagccagata

SEQ ID NO: 2659217 - DNA, 25 bp, Homo sapien
gatgattaacatgacaatgatgatg

SEQ ID NO: 2659218 - DNA, 25 bp, Homo sapien
cagcatttagggacttggtacctgt

SEQ ID NO: 2659219 - DNA, 25 bp, Homo sapien
tgatctgctatcaatgctgccactg

SEQ ID NO: 2659220 - DNA, 25 bp, Homo sapien
aataaggaacactgatagctctccc

SEQ ID NO: 2659221 - DNA, 25 bp, Homo sapien
aatactgctgagtgattcttcatcc

SEQ ID NO: 2659222 - DNA, 25 bp, Homo sapien
aacaatcttcctcaagtgccactga

SEQ ID NO: 2659223 - DNA, 25 bp, Homo sapien
caggctctttagttggcagcatgcc

SEQ ID NO: 2659224 - DNA, 25 bp, Homo sapien
tgttacaatggctcacaagacccaa

SEQ ID NO: 2659225 - DNA, 25 bp, Homo sapien
tttgcccttgtacccctagagtcta

SEQ ID NO: 2659226 - DNA, 25 bp, Homo sapien
gcatgccactttgataagctaccaa

SEQ ID NO: 2659227 - DNA, 25 bp, Homo sapien
ctgaggaggctggacagtagtacat

SEQ ID NO: 2659228 - DNA, 25 bp, Homo sapien
tatactggatgtttggttctcctga

SEQ ID NO: 2659229 - DNA, 25 bp, Homo sapien
caaagttgctggtgaaggtatactg

SEQ ID NO: 2659230 - DNA, 25 bp, Homo sapien
cttaagattagaaccagttggactc

SEQ ID NO: 2659231 - DNA, 25 bp, Homo sapien
cagactctcttgttactggctttgg

SEQ ID NO: 2659232 - DNA, 25 bp, Homo sapien
ctcaccctctacagtgggctcttgg

SEQ ID NO: 2659233 - DNA, 25 bp, Homo sapien
gaaagtgcaattcccagactctctt

SEQ ID NO: 2659234 - DNA, 25 bp, Homo sapien
ggaagtctggaaagtgcaattccca

SEQ ID NO: 2659235 - DNA, 25 bp, Homo sapien
tgcaacttcaccattgggcaatata

SEQ ID NO: 2659236 - DNA, 25 bp, Homo sapien
ttacttccagatgataattttgttg

SEQ ID NO: 2659237 - DNA, 25 bp, Homo sapien
ttttgttgtatctgcaacttcacca

SEQ ID NO: 2659238 - DNA, 25 bp, Homo sapien
caccattgggcaatataccatctgc

SEQ ID NO: 2659239 - DNA, 25 bp, Homo sapien
tacagattgacagtgcgtgctagct

SEQ ID NO: 2659240 - DNA, 25 bp, Homo sapien
gcagtgcgttagctatattccacaa

SEQ ID NO: 2659241 - DNA, 25 bp, Homo sapien
cacacagtgagcaagcttagttcaa

SEQ ID NO: 2659242 - DNA, 25 bp, Homo sapien
catgctcaggcaggtattaatgact

SEQ ID NO: 2659243 - DNA, 25 bp, Homo sapien
agaaataggactctgaattatctca

SEQ ID NO: 2659244 - DNA, 25 bp, Homo sapien
aatgggaatgatccactgtgtttac

SEQ ID NO: 2659245 - DNA, 25 bp, Homo sapien
tccactgatggaacctgagaaatag

SEQ ID NO: 2659246 - DNA, 25 bp, Homo sapien
tggcttttccactgtagtagaatgg

SEQ ID NO: 2659247 - DNA, 25 bp, Homo sapien
gctgttaactaagacaccagtagga

SEQ ID NO: 2659248 - DNA, 25 bp, Homo sapien
ccagtaggactagatggttcttcag

SEQ ID NO: 2659249 - DNA, 25 bp, Homo sapien
aaaacatcatcatctagtgtaaatg

SEQ ID NO: 2659250 - DNA, 25 bp, Homo sapien
tagcaataggtaaattgctgttaac

SEQ ID NO: 2659251 - DNA, 25 bp, Homo sapien
gacatacttgttaatatcacacagt

SEQ ID NO: 2659252 - DNA, 25 bp, Homo sapien
taatatcacacagtaacctataatc

SEQ ID NO: 2659253 - DNA, 25 bp, Homo sapien
gactaatcttattgcagacatactt

SEQ ID NO: 2659254 - DNA, 25 bp, Homo sapien
catcattaggtagaagactaatctt

SEQ ID NO: 2659255 - DNA, 25 bp, Homo sapien
cattcgaaattagtgggccagatgt

SEQ ID NO: 2659256 - DNA, 25 bp, Homo sapien
tgagcttccctcatagacttaatca

SEQ ID NO: 2659257 - DNA, 25 bp, Homo sapien
ggccagatgtgataaatggatcata

SEQ ID NO: 2659258 - DNA, 25 bp, Homo sapien
tcgggctaaaagtctatgagcttcc

SEQ ID NO: 2659259 - DNA, 25 bp, Homo sapien
caaaatgatctgctcatgagatgga

SEQ ID NO: 2659260 - DNA, 25 bp, Homo sapien
gaagcaaaatgatctgctcatgaga

SEQ ID NO: 2659261 - DNA, 25 bp, Homo sapien
caagaagcaaaatgatctgctcatg

SEQ ID NO: 2659262 - DNA, 25 bp, Homo sapien
gagatggatgttcttctactacagg

SEQ ID NO: 2659263 - DNA, 25 bp, Homo sapien
aggacaaatgtaacaggatgaaagc

SEQ ID NO: 2659264 - DNA, 25 bp, Homo sapien
tgacattcacgagtagattagcatt

SEQ ID NO: 2659265 - DNA, 25 bp, Homo sapien
aaatatgaatttgacattcacgagt

SEQ ID NO: 2659266 - DNA, 25 bp, Homo sapien
ggacaaatgtaacaggatgaaagct

SEQ ID NO: 2659267 - DNA, 25 bp, Homo sapien
tagagcatccttatatatggtgata

SEQ ID NO: 2659268 - DNA, 25 bp, Homo sapien
gaaaagtaccaatatttgtctgagg

SEQ ID NO: 2659269 - DNA, 25 bp, Homo sapien
tcttcatttggcaaacataacaata

SEQ ID NO: 2659270 - DNA, 25 bp, Homo sapien
cttttagagcatccttatatatggt

SEQ ID NO: 2659271 - DNA, 25 bp, Homo sapien
gattacttggtaatgagagatcatc

SEQ ID NO: 2659272 - DNA, 25 bp, Homo sapien
gaatcctccgtgatccttgctactg

SEQ ID NO: 2659273 - DNA, 25 bp, Homo sapien
gggaatctcaagcttctggataaga

SEQ ID NO: 2659274 - DNA, 25 bp, Homo sapien
acgcataggaaaaacctttgcccag

SEQ ID NO: 2659275 - DNA, 25 bp, Homo sapien
gatatggcatactcaacctgcactg

SEQ ID NO: 2659276 - DNA, 25 bp, Homo sapien
acctggtagtagaagagggttgtct

SEQ ID NO: 2659277 - DNA, 25 bp, Homo sapien
cacagttatctagaccaacctggta

SEQ ID NO: 2659278 - DNA, 25 bp, Homo sapien
caaatgccaacgtgatgctcaaaag

SEQ ID NO: 2659279 - DNA, 25 bp, Homo sapien
acatgaatgatacaggctctatcac

SEQ ID NO: 2659280 - DNA, 25 bp, Homo sapien
cacatgaatgatacaggctctatca

SEQ ID NO: 2659281 - DNA, 25 bp, Homo sapien
atacacatgaatgatacaggctcta

SEQ ID NO: 2659282 - DNA, 25 bp, Homo sapien
tacacatgaatgatacaggctctat

SEQ ID NO: 2659283 - DNA, 25 bp, Homo sapien
tactggtaacgcagcaggcactctg

SEQ ID NO: 2659284 - DNA, 25 bp, Homo sapien
tagatgctacattgaactgggaact

SEQ ID NO: 2659285 - DNA, 25 bp, Homo sapien
gggacatgaggtcggccacctaact

SEQ ID NO: 2659286 - DNA, 25 bp, Homo sapien
tatacagatagagtcagggaaacca

SEQ ID NO: 2659287 - DNA, 25 bp, Homo sapien
gatgcttgttagaggagcaggatat

SEQ ID NO: 2659288 - DNA, 25 bp, Homo sapien
ctctgatgcttgttagaggagcagg

SEQ ID NO: 2659289 - DNA, 25 bp, Homo sapien
caaaaagaggttttcggcctctgat

SEQ ID NO: 2659290 - DNA, 25 bp, Homo sapien
caagtaagttcataatagtgtgtcc

SEQ ID NO: 2659291 - DNA, 25 bp, Homo sapien
aactgagcactaatgttaaaataat

SEQ ID NO: 2659292 - DNA, 25 bp, Homo sapien
ctaaaaagcaattcgtcaaaaactg

SEQ ID NO: 2659293 - DNA, 25 bp, Homo sapien
gaatggtcattataccaaatatggc

SEQ ID NO: 2659294 - DNA, 25 bp, Homo sapien
tcgtcaaaaactgagcactaatgtt

SEQ ID NO: 2659295 - DNA, 25 bp, Homo sapien
ggtacacgtacatgaggagatagta

SEQ ID NO: 2659296 - DNA, 25 bp, Homo sapien
acttagaatcaggtacacgtacatg

SEQ ID NO: 2659297 - DNA, 25 bp, Homo sapien
cacgtacatgaggagatagtacgtt

SEQ ID NO: 2659298 - DNA, 25 bp, Homo sapien
gcacttagaatcaggtacacgtaca

SEQ ID NO: 2659299 - DNA, 25 bp, Homo sapien
cattctcaggaaaaactttgtagta

SEQ ID NO: 2659300 - DNA, 25 bp, Homo sapien
ttgctcaaaatcacaagactgactg

SEQ ID NO: 2659301 - DNA, 25 bp, Homo sapien
gaaaactaaggccataatttgctca

SEQ ID NO: 2659302 - DNA, 25 bp, Homo sapien
caaactaggcatggataaataaaag

SEQ ID NO: 2659303 - DNA, 25 bp, Homo sapien
tctatattatgcaaggtatactggt

SEQ ID NO: 2659304 - DNA, 25 bp, Homo sapien
atcactgtactttttccgtggtatt

SEQ ID NO: 2659305 - DNA, 25 bp, Homo sapien
caacagttgatctatattatgcaag

SEQ ID NO: 2659306 - DNA, 25 bp, Homo sapien
ccatttccatatgaatcaacagttg

SEQ ID NO: 2659307 - DNA, 25 bp, Homo sapien
gagccacgtttctggccagcttcat

SEQ ID NO: 2659308 - DNA, 25 bp, Homo sapien
ttcataattatcaagcttcggtctg

SEQ ID NO: 2659309 - DNA, 25 bp, Homo sapien
tgtgacacaattctaagggaactct

SEQ ID NO: 2659310 - DNA, 25 bp, Homo sapien
ttatatgcctattctaagagccacg

SEQ ID NO: 2659311 - DNA, 25 bp, Homo sapien
gcactgttggcctgtgtttcataaa

SEQ ID NO: 2659312 - DNA, 25 bp, Homo sapien
gatgagaatctgcttctgtactgaa

SEQ ID NO: 2659313 - DNA, 25 bp, Homo sapien
tctgtatacagactagatgagaatc

SEQ ID NO: 2659314 - DNA, 25 bp, Homo sapien
gaaacttgctccaatgctaatgaca

SEQ ID NO: 2659315 - DNA, 25 bp, Homo sapien
atcaatcttatccttatcaccctgt

SEQ ID NO: 2659316 - DNA, 25 bp, Homo sapien
acctcagcctcccaaagttctggga

SEQ ID NO: 2659317 - DNA, 25 bp, Homo sapien
tagccagtatggtctcaattcttga

SEQ ID NO: 2659318 - DNA, 25 bp, Homo sapien
agccagtatggtctcaattcttgac

SEQ ID NO: 2659319 - DNA, 25 bp, Homo sapien
cttgtgatccgctcacctcagcctc

SEQ ID NO: 2659320 - DNA, 25 bp, Homo sapien
ttttagagctccattgaataccaca

SEQ ID NO: 2659321 - DNA, 25 bp, Homo sapien
aagatgtttttagagctccattgaa

SEQ ID NO: 2659322 - DNA, 25 bp, Homo sapien
aataccacaaaacttgcacctgtca

SEQ ID NO: 2659323 - DNA, 25 bp, Homo sapien
tcaactatgctggacttagcaagaa

SEQ ID NO: 2659324 - DNA, 25 bp, Homo sapien
ggtggacacataggaccttcccagg

SEQ ID NO: 2659325 - DNA, 25 bp, Homo sapien
tgcatgtgaccccttaccgacaaag

SEQ ID NO: 2659326 - DNA, 25 bp, Homo sapien
tcaaggtcaatctgaggtggacaca

SEQ ID NO: 2659327 - DNA, 25 bp, Homo sapien
ttcaagtcaggcagtggacacctct

SEQ ID NO: 2659328 - DNA, 25 bp, Homo sapien
tggagttatttgtaccattaagcca

SEQ ID NO: 2659329 - DNA, 25 bp, Homo sapien
agtctttctgttctcgtaaagctag

SEQ ID NO: 2659330 - DNA, 25 bp, Homo sapien
tcagcatctacccagcagatatcca

SEQ ID NO: 2659331 - DNA, 25 bp, Homo sapien
tctcgtaaagctagccgcaagccat

SEQ ID NO: 2659332 - DNA, 25 bp, Homo sapien
gatatccacgtattctctcaggtct

SEQ ID NO: 2659333 - DNA, 25 bp, Homo sapien
acattttacaatcttctcatcggtt

SEQ ID NO: 2659334 - DNA, 25 bp, Homo sapien
aaatccttgtaatgatattccatcc

SEQ ID NO: 2659335 - DNA, 25 bp, Homo sapien
ctcggtacattttacaatcttctca

SEQ ID NO: 2659336 - DNA, 25 bp, Homo sapien
ggaaatccttgtaatgatattccat

SEQ ID NO: 2659337 - DNA, 25 bp, Homo sapien
gaaatgcgtatgtctcaaagtgtag

SEQ ID NO: 2659338 - DNA, 25 bp, Homo sapien
tacagtacaaagatggcaatgctgc

SEQ ID NO: 2659339 - DNA, 25 bp, Homo sapien
ggcaggcagtaccaccatttgatag

SEQ ID NO: 2659340 - DNA, 25 bp, Homo sapien
gatagcctgaactaaccctatggaa

SEQ ID NO: 2659341 - DNA, 25 bp, Homo sapien
ttctgtatcgatagcttgatctgta

SEQ ID NO: 2659342 - DNA, 25 bp, Homo sapien
cattagttgtgagaattctgtatcg

SEQ ID NO: 2659343 - DNA, 25 bp, Homo sapien
tgagaattctgtatcgatagcttga

SEQ ID NO: 2659344 - DNA, 25 bp, Homo sapien
gtaccatgaaaagcattagttgtga

SEQ ID NO: 2659345 - DNA, 25 bp, Homo sapien
agcgcagcactacaagccatggcta

SEQ ID NO: 2659346 - DNA, 25 bp, Homo sapien
gtccaattttattcatcccattact

SEQ ID NO: 2659347 - DNA, 25 bp, Homo sapien
tgtcaatggaaactctgagtccaat

SEQ ID NO: 2659348 - DNA, 25 bp, Homo sapien
agggcacagcgcagcactacaagcc

SEQ ID NO: 2659349 - DNA, 25 bp, Homo sapien
gatgatcatcactccttgttaagag

SEQ ID NO: 2659350 - DNA, 25 bp, Homo sapien
aatatatcctggctggagaaaagca

SEQ ID NO: 2659351 - DNA, 25 bp, Homo sapien
tagtgagtgcttccttgaaaagagg

SEQ ID NO: 2659352 - DNA, 25 bp, Homo sapien
gctttgaataactgccgacattact

SEQ ID NO: 2659353 - DNA, 25 bp, Homo sapien
gatcatttagataatgctgaggcag

SEQ ID NO: 2659354 - DNA, 25 bp, Homo sapien
aaaagatgttctataatgaaaaaca

SEQ ID NO: 2659355 - DNA, 25 bp, Homo sapien
taaactagagttggaggtcccacca

SEQ ID NO: 2659356 - DNA, 25 bp, Homo sapien
ccaccatggatcacaggtatcagag

SEQ ID NO: 2659357 - DNA, 25 bp, Homo sapien
caaaactggtttttgtgccactgaa

SEQ ID NO: 2659358 - DNA, 25 bp, Homo sapien
gaaaagatcattcctgcctaaagag

SEQ ID NO: 2659359 - DNA, 25 bp, Homo sapien
ggcccgtcgtcagtcactcttagaa

SEQ ID NO: 2659360 - DNA, 25 bp, Homo sapien
aaaaagtcctgaagcacccgcaatt

SEQ ID NO: 2659361 - DNA, 25 bp, Homo sapien
tccagaaggctgatattctcctcca

SEQ ID NO: 2659362 - DNA, 25 bp, Homo sapien
tgtttgaagtaaagaggaaagctct

SEQ ID NO: 2659363 - DNA, 25 bp, Homo sapien
cactggtgtcaatgaaaatatgcga

SEQ ID NO: 2659364 - DNA, 25 bp, Homo sapien
taaatgacaggactacaatatgccc

SEQ ID NO: 2659365 - DNA, 25 bp, Homo sapien
aacataaattgggtttgatatgcaa

SEQ ID NO: 2659366 - DNA, 25 bp, Homo sapien
caaatccaaagctgtcccatcatgg

SEQ ID NO: 2659367 - DNA, 25 bp, Homo sapien
catggcagaatacatacactatatt

SEQ ID NO: 2659368 - DNA, 25 bp, Homo sapien
tatgcaattgttttcatcttacacc

SEQ ID NO: 2659369 - DNA, 25 bp, Homo sapien
cagagtaagggtacatgcttgcttc

SEQ ID NO: 2659370 - DNA, 25 bp, Homo sapien
cagcctattgtgtggagggtctcct

SEQ ID NO: 2659371 - DNA, 25 bp, Homo sapien
taagcgcatactacttgtggcatgg

SEQ ID NO: 2659372 - DNA, 25 bp, Homo sapien
ggttcatcaccttatatgggccctg

SEQ ID NO: 2659373 - DNA, 25 bp, Homo sapien
gttcttccacctctgattcattatc

SEQ ID NO: 2659374 - DNA, 25 bp, Homo sapien
ttggttcttccacctctgattcatt

SEQ ID NO: 2659375 - DNA, 25 bp, Homo sapien
attggttcttccacctctgattcat

SEQ ID NO: 2659376 - DNA, 25 bp, Homo sapien
cttccacctctgattcattatcatc

SEQ ID NO: 2659377 - DNA, 25 bp, Homo sapien
gggcaattctaaacttgcctgttct

SEQ ID NO: 2659378 - DNA, 25 bp, Homo sapien
ggaggcattactagtgtgggaacac

SEQ ID NO: 2659379 - DNA, 25 bp, Homo sapien
gcttaagattctttagatcactggg

SEQ ID NO: 2659380 - DNA, 25 bp, Homo sapien
tgggaacaccttaaaggaagctcag

SEQ ID NO: 2659381 - DNA, 25 bp, Homo sapien
tctgaaacttggacagtggcctaca

SEQ ID NO: 2659382 - DNA, 25 bp, Homo sapien
taactagtttaacggccaggtgtgc

SEQ ID NO: 2659383 - DNA, 25 bp, Homo sapien
aatgtctgccactagtgcaccaggg

SEQ ID NO: 2659384 - DNA, 25 bp, Homo sapien
gagtgatacctctttactgctgcgg

SEQ ID NO: 2659385 - DNA, 25 bp, Homo sapien
gcggaggatggaactccgattgaaa

SEQ ID NO: 2659386 - DNA, 25 bp, Homo sapien
ttagggcatactgcggcggaggatg

SEQ ID NO: 2659387 - DNA, 25 bp, Homo sapien
atactgcggcggaggatggaactcc

SEQ ID NO: 2659388 - DNA, 25 bp, Homo sapien
ctgcgttagggcatactgcggcgga

SEQ ID NO: 2659389 - DNA, 25 bp, Homo sapien
gctggtggtagctctgaagataacg

SEQ ID NO: 2659390 - DNA, 25 bp, Homo sapien
gaagctggtggtagctctgaagata

SEQ ID NO: 2659391 - DNA, 25 bp, Homo sapien
cgtgcaggtggtggcgaagcgctcc

SEQ ID NO: 2659392 - DNA, 25 bp, Homo sapien
ctccgaaaggtttcggaagctggtg

SEQ ID NO: 2659393 - DNA, 25 bp, Homo sapien
gaaattcgactccacaaaccacagg

SEQ ID NO: 2659394 - DNA, 25 bp, Homo sapien
cacgcaggcgcaaaggctggcgttc

SEQ ID NO: 2659395 - DNA, 25 bp, Homo sapien
gccagcgaagcggaaccaaacggag

SEQ ID NO: 2659396 - DNA, 25 bp, Homo sapien
caaaggctggcgttcgaggttcgtt

SEQ ID NO: 2659397 - DNA, 25 bp, Homo sapien
ctgggcctccagcggatgctgccat

SEQ ID NO: 2659398 - DNA, 25 bp, Homo sapien
cttcagctctgcgaaattcccttgc

SEQ ID NO: 2659399 - DNA, 25 bp, Homo sapien
cacagcaggaaccttctctttctct

SEQ ID NO: 2659400 - DNA, 25 bp, Homo sapien
tgcgaaattcccttgctttttctta

SEQ ID NO: 2659401 - DNA, 25 bp, Homo sapien
tctctttctcttctacaccctccat

SEQ ID NO: 2659402 - DNA, 25 bp, Homo sapien
gctcacaccactgacacctctgatc

SEQ ID NO: 2659403 - DNA, 25 bp, Homo sapien
tcctgaggacaaatgccattttggg

SEQ ID NO: 2659404 - DNA, 25 bp, Homo sapien
accactgacacctctgatcctgagg

SEQ ID NO: 2659405 - DNA, 25 bp, Homo sapien
gatcctgaggacaaatgccattttg

SEQ ID NO: 2659406 - DNA, 25 bp, Homo sapien
aaaggttccactgaagatttgatga

SEQ ID NO: 2659407 - DNA, 25 bp, Homo sapien
ggttccactgaagatttgatgaagg

SEQ ID NO: 2659408 - DNA, 25 bp, Homo sapien
tccactgaagatttgatgaaggcga

SEQ ID NO: 2659409 - DNA, 25 bp, Homo sapien
actgaagatttgatgaaggcgaaga

SEQ ID NO: 2659410 - DNA, 25 bp, Homo sapien
agagatggaacaatcaaagtgttat

SEQ ID NO: 2659411 - DNA, 25 bp, Homo sapien
caagagatggaacaatcaaagtgtt

SEQ ID NO: 2659412 - DNA, 25 bp, Homo sapien
gtgttatctgttaaagcaattcgct

SEQ ID NO: 2659413 - DNA, 25 bp, Homo sapien
ggtacccccatgctatatatggctc

SEQ ID NO: 2659414 - DNA, 25 bp, Homo sapien
gatcctccatgcagaggatgccata

SEQ ID NO: 2659415 - DNA, 25 bp, Homo sapien
tcagatcctccatgcagaggatgcc

SEQ ID NO: 2659416 - DNA, 25 bp, Homo sapien
tccatgcagaggatgccatatttac

SEQ ID NO: 2659417 - DNA, 25 bp, Homo sapien
ctccatgcagaggatgccatattta

SEQ ID NO: 2659418 - DNA, 25 bp, Homo sapien
gttagctgcatgataccaggtgatc

SEQ ID NO: 2659419 - DNA, 25 bp, Homo sapien
tctgctgtaatctggctatttctca

SEQ ID NO: 2659420 - DNA, 25 bp, Homo sapien
atttgtttgtgccttgtggttagct

SEQ ID NO: 2659421 - DNA, 25 bp, Homo sapien
tgtggttagctgcatgataccaggt

SEQ ID NO: 2659422 - DNA, 25 bp, Homo sapien
gtttcaggcattaaggattcaacat

SEQ ID NO: 2659423 - DNA, 25 bp, Homo sapien
tatatgctacgcactgtttcaggca

SEQ ID NO: 2659424 - DNA, 25 bp, Homo sapien
aagaagctgagatatataatgaatt

SEQ ID NO: 2659425 - DNA, 25 bp, Homo sapien
cactgtgtagttattatatgctacg

SEQ ID NO: 2659426 - DNA, 25 bp, Homo sapien
gcttgtgaccatggccagactttgc

SEQ ID NO: 2659427 - DNA, 25 bp, Homo sapien
cctgttcagcatagcaaaagtaact

SEQ ID NO: 2659428 - DNA, 25 bp, Homo sapien
cacaggagctccagcttgtgaccat

SEQ ID NO: 2659429 - DNA, 25 bp, Homo sapien
ttcagcatagcaaaagtaacttttc

SEQ ID NO: 2659430 - DNA, 25 bp, Homo sapien
tgccatctcacgtgaccaatccact

SEQ ID NO: 2659431 - DNA, 25 bp, Homo sapien
catctcacgtgaccaatccactcat

SEQ ID NO: 2659432 - DNA, 25 bp, Homo sapien
gtcactgccatctcacgtgaccaat

SEQ ID NO: 2659433 - DNA, 25 bp, Homo sapien
ttgtcactgccatctcacgtgacca

SEQ ID NO: 2659434 - DNA, 25 bp, Homo sapien
ctctattgcaacctgaaactcttgg

SEQ ID NO: 2659435 - DNA, 25 bp, Homo sapien
tctattgcaacctgaaactcttggg

SEQ ID NO: 2659436 - DNA, 25 bp, Homo sapien
actctattgcaacctgaaactcttg

SEQ ID NO: 2659437 - DNA, 25 bp, Homo sapien
tgggccataattggctggctgtgtt

SEQ ID NO: 2659438 - DNA, 25 bp, Homo sapien
acttcagtcagccactcctgtagag

SEQ ID NO: 2659439 - DNA, 25 bp, Homo sapien
tctgatccatcacttggaagaagga

SEQ ID NO: 2659440 - DNA, 25 bp, Homo sapien
cttttgaaatccagcttgatgcctt

SEQ ID NO: 2659441 - DNA, 25 bp, Homo sapien
catacaggacgcttcagatgcctct

SEQ ID NO: 2659442 - DNA, 25 bp, Homo sapien
caacccagggaaaacgtcacgtctg

SEQ ID NO: 2659443 - DNA, 25 bp, Homo sapien
catggatggttctacaactgccaga

SEQ ID NO: 2659444 - DNA, 25 bp, Homo sapien
catttggaccaggaagaatatcggc

SEQ ID NO: 2659445 - DNA, 25 bp, Homo sapien
caagaaatacattattagaattatt

SEQ ID NO: 2659446 - DNA, 25 bp, Homo sapien
gaccaagaaatacattattagaatt

SEQ ID NO: 2659447 - DNA, 25 bp, Homo sapien
ttctttaacagccaaagtaactgag

SEQ ID NO: 2659448 - DNA, 25 bp, Homo sapien
tgctctgacagggaacgttacaggc

SEQ ID NO: 2659449 - DNA, 25 bp, Homo sapien
tattccatctctttcaccattgtcc

SEQ ID NO: 2659450 - DNA, 25 bp, Homo sapien
caagactgcctgactaatgctgctc

SEQ ID NO: 2659451 - DNA, 25 bp, Homo sapien
agtaagttaaggttcatcaaggagc

SEQ ID NO: 2659452 - DNA, 25 bp, Homo sapien
tccaatccggtgagggagtctgtgc

SEQ ID NO: 2659453 - DNA, 25 bp, Homo sapien
ttcatcaaggagctccaatccggtg

SEQ ID NO: 2659454 - DNA, 25 bp, Homo sapien
tgtgcgcttatatcatcagttttca

SEQ ID NO: 2659455 - DNA, 25 bp, Homo sapien
cattcatactgctgttgtctaaacg

SEQ ID NO: 2659456 - DNA, 25 bp, Homo sapien
tgctctatctgaattgcaggactgt

SEQ ID NO: 2659457 - DNA, 25 bp, Homo sapien
ctttcatcaagagggactagagaca

SEQ ID NO: 2659458 - DNA, 25 bp, Homo sapien
tatctctaactcaaatgcactcaga

SEQ ID NO: 2659459 - DNA, 25 bp, Homo sapien
ttgattccaatggcttgtttaaatt

SEQ ID NO: 2659460 - DNA, 25 bp, Homo sapien
gtaaatcttcaacggaatagttatc

SEQ ID NO: 2659461 - DNA, 25 bp, Homo sapien
caaaatggtctctaatgtaaagtaa

SEQ ID NO: 2659462 - DNA, 25 bp, Homo sapien
ttttttgtcaaaatggtctctaatg

SEQ ID NO: 2659463 - DNA, 25 bp, Homo sapien
aattattattagactaggccacgtg

SEQ ID NO: 2659464 - DNA, 25 bp, Homo sapien
gctgctgacccctgtgaaaattaaa

SEQ ID NO: 2659465 - DNA, 25 bp, Homo sapien
cataatctctgtaatgcaagtgcca

SEQ ID NO: 2659466 - DNA, 25 bp, Homo sapien
ctattataaggacatatgcccacag

SEQ ID NO: 2659467 - DNA, 25 bp, Homo sapien
tacaggacaataagctaccctttat

SEQ ID NO: 2659468 - DNA, 25 bp, Homo sapien
tggatgatatgtgatctcaacacca

SEQ ID NO: 2659469 - DNA, 25 bp, Homo sapien
caaattataccactcttacaggaca

SEQ ID NO: 2659470 - DNA, 25 bp, Homo sapien
tctaccactcttgagaaatagcctt

SEQ ID NO: 2659471 - DNA, 25 bp, Homo sapien
cctccttaggcacggccgtcgccag

SEQ ID NO: 2659472 - DNA, 25 bp, Homo sapien
gccactgtcctccttaggcacggcc

SEQ ID NO: 2659473 - DNA, 25 bp, Homo sapien
ctgtcctccttaggcacggccgtcg

SEQ ID NO: 2659474 - DNA, 25 bp, Homo sapien
cactgtcctccttaggcacggccgt

SEQ ID NO: 2659475 - DNA, 25 bp, Homo sapien
gacagaaaacttatccagggagaga

SEQ ID NO: 2659476 - DNA, 25 bp, Homo sapien
tatgtaactctgaatagctttgatt

SEQ ID NO: 2659477 - DNA, 25 bp, Homo sapien
tgggaaagatgcatgtaacaaatta

SEQ ID NO: 2659478 - DNA, 25 bp, Homo sapien
ttccttcagtaggaactgacagctg

SEQ ID NO: 2659479 - DNA, 25 bp, Homo sapien
gcccccatcggtgccctggagctgt

SEQ ID NO: 2659480 - DNA, 25 bp, Homo sapien
ccatcggtgccctggagctgtcgcc

SEQ ID NO: 2659481 - DNA, 25 bp, Homo sapien
atcggtgccctggagctgtcgcccc

SEQ ID NO: 2659482 - DNA, 25 bp, Homo sapien
ccccatcggtgccctggagctgtcg

SEQ ID NO: 2659483 - DNA, 25 bp, Homo sapien
tctctgcatcaggccccaatgccat

SEQ ID NO: 2659484 - DNA, 25 bp, Homo sapien
cataggccaattggccccctttaga

SEQ ID NO: 2659485 - DNA, 25 bp, Homo sapien
tcctctctgtcactggacctgtccc

SEQ ID NO: 2659486 - DNA, 25 bp, Homo sapien
ggtatctctactgtcctctctgtca

SEQ ID NO: 2659487 - DNA, 25 bp, Homo sapien
ccctttagaggtatctctactgtcc

SEQ ID NO: 2659488 - DNA, 25 bp, Homo sapien
ggtgccagccctaacatcatcagct

SEQ ID NO: 2659489 - DNA, 25 bp, Homo sapien
gacacttgtcaatatccactgacat

SEQ ID NO: 2659490 - DNA, 25 bp, Homo sapien
ttagtctgcaaagggtgccagccct

SEQ ID NO: 2659491 - DNA, 25 bp, Homo sapien
gcaaagggtgccagccctaacatca

SEQ ID NO: 2659492 - DNA, 25 bp, Homo sapien
tcaacaaggagcagtatgtacacag

SEQ ID NO: 2659493 - DNA, 25 bp, Homo sapien
gcaaataggatccaacacaggcaat

SEQ ID NO: 2659494 - DNA, 25 bp, Homo sapien
cacaggcaatattccagctatggag

SEQ ID NO: 2659495 - DNA, 25 bp, Homo sapien
tttttagacaagcaaagactcaggg

SEQ ID NO: 2659496 - DNA, 25 bp, Homo sapien
tcatcaattgaggtacggagaaact

SEQ ID NO: 2659497 - DNA, 25 bp, Homo sapien
aagcaatttaaagtcagcgagcagg

SEQ ID NO: 2659498 - DNA, 25 bp, Homo sapien
caactgagcagtttcactagtggaa

SEQ ID NO: 2659499 - DNA, 25 bp, Homo sapien
gataacaagctccatactgctgaga

SEQ ID NO: 2659500 - DNA, 25 bp, Homo sapien
tttgaagtatatgagaagaatgatt

SEQ ID NO: 2659501 - DNA, 25 bp, Homo sapien
aatttgaagtatatgagaagaatga

SEQ ID NO: 2659502 - DNA, 25 bp, Homo sapien
aaatttgaagtatatgagaagaatg

SEQ ID NO: 2659503 - DNA, 25 bp, Homo sapien
tgaagtatatgagaagaatgattaa

SEQ ID NO: 2659504 - DNA, 25 bp, Homo sapien
tgaaagtgacacgttttttccagaa

SEQ ID NO: 2659505 - DNA, 25 bp, Homo sapien
cataatatagcaaggactaacccct

SEQ ID NO: 2659506 - DNA, 25 bp, Homo sapien
aaccagacgagctacctaagaacag

SEQ ID NO: 2659507 - DNA, 25 bp, Homo sapien
cgcaatagatatagtaccgcaaggg

SEQ ID NO: 2659508 - DNA, 25 bp, Homo sapien
tataaccaagcataatatagcaagg

SEQ ID NO: 2659509 - DNA, 25 bp, Homo sapien
acttgaccgcgcgttctgctgtaac

SEQ ID NO: 2659510 - DNA, 25 bp, Homo sapien
ttctgctgtaacgagcgggctcgga

SEQ ID NO: 2659511 - DNA, 25 bp, Homo sapien
gggcggccacaatttcgcgccaaac

SEQ ID NO: 2659512 - DNA, 25 bp, Homo sapien
ggcctcgcctgcacaaatggggacg

SEQ ID NO: 2659513 - DNA, 25 bp, Homo sapien
gatttcaggcttcccgtagactgga

SEQ ID NO: 2659514 - DNA, 25 bp, Homo sapien
ctggtcggctgcacctgtggaggag

SEQ ID NO: 2659515 - DNA, 25 bp, Homo sapien
tagactggaagaatcggctcaaaac

SEQ ID NO: 2659516 - DNA, 25 bp, Homo sapien
gctcaaaaccgcttgcctcgcaggg

SEQ ID NO: 2659517 - DNA, 25 bp, Homo sapien
gcagccgctgcagcgccagggtcca

SEQ ID NO: 2659518 - DNA, 25 bp, Homo sapien
tgcagccgctgcagcgccagggtcc

SEQ ID NO: 2659519 - DNA, 25 bp, Homo sapien
gtgcggcggcagctggggcgggaag

SEQ ID NO: 2659520 - DNA, 25 bp, Homo sapien
cagctggggcgggaaggcgggagct

SEQ ID NO: 2659521 - DNA, 25 bp, Homo sapien
ttgcctatctcctcaaacggaagta

SEQ ID NO: 2659522 - DNA, 25 bp, Homo sapien
tttgcctatctcctcaaacggaagt

SEQ ID NO: 2659523 - DNA, 25 bp, Homo sapien
tgcctatctcctcaaacggaagtac

SEQ ID NO: 2659524 - DNA, 25 bp, Homo sapien
gcctatctcctcaaacggaagtact

SEQ ID NO: 2659525 - DNA, 25 bp, Homo sapien
caaatattgagccatgctgttgcag

SEQ ID NO: 2659526 - DNA, 25 bp, Homo sapien
taaaaactggagacctaagggcagc

SEQ ID NO: 2659527 - DNA, 25 bp, Homo sapien
cagtaaaactcttcgaccaccaagg

SEQ ID NO: 2659528 - DNA, 25 bp, Homo sapien
cctcatcagaatgggagtcaggaga

SEQ ID NO: 2659529 - DNA, 25 bp, Homo sapien
ttgaaggatggcaacaggaaggact

SEQ ID NO: 2659530 - DNA, 25 bp, Homo sapien
cacccttgggcttttcctgtggcag

SEQ ID NO: 2659531 - DNA, 25 bp, Homo sapien
tagtcacatctataccatcctaaga

SEQ ID NO: 2659532 - DNA, 25 bp, Homo sapien
caaacaaacgtacttattgcgttga

SEQ ID NO: 2659533 - DNA, 25 bp, Homo sapien
gacattcccagatcacttcctcctt

SEQ ID NO: 2659534 - DNA, 25 bp, Homo sapien
tttttaacaggcccatcattttcca

SEQ ID NO: 2659535 - DNA, 25 bp, Homo sapien
cagagttgccagacattcccagatc

SEQ ID NO: 2659536 - DNA, 25 bp, Homo sapien
actttctttttaacaggcccatcat

SEQ ID NO: 2659537 - DNA, 25 bp, Homo sapien
aaaactgcctggaatgaaagtggga

SEQ ID NO: 2659538 - DNA, 25 bp, Homo sapien
cctgatagctgctaaaacaacctgc

SEQ ID NO: 2659539 - DNA, 25 bp, Homo sapien
tccaagtaccaatgaaccttcgttc

SEQ ID NO: 2659540 - DNA, 25 bp, Homo sapien
tggctagttttacccattgcagtca

SEQ ID NO: 2659541 - DNA, 25 bp, Homo sapien
agcaaaaacactctgagggcaagag

SEQ ID NO: 2659542 - DNA, 25 bp, Homo sapien
aagcaaaaacactctgagggcaaga

SEQ ID NO: 2659543 - DNA, 25 bp, Homo sapien
gcaaaaacactctgagggcaagagt

SEQ ID NO: 2659544 - DNA, 25 bp, Homo sapien
aaagcaaaaacactctgagggcaag

SEQ ID NO: 2659545 - DNA, 25 bp, Homo sapien
tttgaaacattcctggtcctcagac

SEQ ID NO: 2659546 - DNA, 25 bp, Homo sapien
agattctgtctggactctactttga

SEQ ID NO: 2659547 - DNA, 25 bp, Homo sapien
ggaagggcagaatcgcagcagaatt

SEQ ID NO: 2659548 - DNA, 25 bp, Homo sapien
gcgtgtagaagactgatatcatcaa

SEQ ID NO: 2659549 - DNA, 25 bp, Homo sapien
tccaaactgactgagatcaaaaagt

SEQ ID NO: 2659550 - DNA, 25 bp, Homo sapien
tttcatgacttgtatttgatgatcc

SEQ ID NO: 2659551 - DNA, 25 bp, Homo sapien
actgactgagatcaaaaagtgttgt

SEQ ID NO: 2659552 - DNA, 25 bp, Homo sapien
tgtatttgatgatccaaactgactg

SEQ ID NO: 2659553 - DNA, 25 bp, Homo sapien
tatatccacattccacacacaaaac

SEQ ID NO: 2659554 - DNA, 25 bp, Homo sapien
aattctagcggcgtatagatgcttt

SEQ ID NO: 2659555 - DNA, 25 bp, Homo sapien
tattgtaattctagcggcgtataga

SEQ ID NO: 2659556 - DNA, 25 bp, Homo sapien
tctagcggcgtatagatgcttttgg

SEQ ID NO: 2659557 - DNA, 25 bp, Homo sapien
tatatccttttgccaccaggcggcg

SEQ ID NO: 2659558 - DNA, 25 bp, Homo sapien
accaggcggcgtacatgaacaaaca

SEQ ID NO: 2659559 - DNA, 25 bp, Homo sapien
tctgtgagtaggtatacttgctgtc

SEQ ID NO: 2659560 - DNA, 25 bp, Homo sapien
aagttgtgatctaaatggcaataaa

SEQ ID NO: 2659561 - DNA, 25 bp, Homo sapien
ccaataagtgtagattttgtataaa

SEQ ID NO: 2659562 - DNA, 25 bp, Homo sapien
tataaagggcagtcaatttccggga

SEQ ID NO: 2659563 - DNA, 25 bp, Homo sapien
cagtcaatttccgggaaaagagtga

SEQ ID NO: 2659564 - DNA, 25 bp, Homo sapien
cttctccaataagtgtagattttgt

SEQ ID NO: 2659565 - DNA, 25 bp, Homo sapien
cactacttccctcttgaatagcaca

SEQ ID NO: 2659566 - DNA, 25 bp, Homo sapien
taatcaagggttcaccttaatgcct

SEQ ID NO: 2659567 - DNA, 25 bp, Homo sapien
cttgctcttgaagtatgatgaactt

SEQ ID NO: 2659568 - DNA, 25 bp, Homo sapien
tgaagtatgatgaacttgccttcta

SEQ ID NO: 2659569 - DNA, 25 bp, Homo sapien
agaccctgaggagcttgtaggccct

SEQ ID NO: 2659570 - DNA, 25 bp, Homo sapien
taggccctaagcacctaactacttc

SEQ ID NO: 2659571 - DNA, 25 bp, Homo sapien
ctgaggagcttgtaggccctaagca

SEQ ID NO: 2659572 - DNA, 25 bp, Homo sapien
gcttgtaggccctaagcacctaact

SEQ ID NO: 2659573 - DNA, 25 bp, Homo sapien
cttaattctgacttcagccagttct

SEQ ID NO: 2659574 - DNA, 25 bp, Homo sapien
taactctgtcttaattctgacttca

SEQ ID NO: 2659575 - DNA, 25 bp, Homo sapien
tctgtcttaattctgacttcagcca

SEQ ID NO: 2659576 - DNA, 25 bp, Homo sapien
atttaactctgtcttaattctgact

SEQ ID NO: 2659577 - DNA, 25 bp, Homo sapien
tcatagttgcatgccttatctttcc

SEQ ID NO: 2659578 - DNA, 25 bp, Homo sapien
ttggatcatagttgcatgccttatc

SEQ ID NO: 2659579 - DNA, 25 bp, Homo sapien
gatcatagttgcatgccttatcttt

SEQ ID NO: 2659580 - DNA, 25 bp, Homo sapien
tggatcatagttgcatgccttatct

SEQ ID NO: 2659581 - DNA, 25 bp, Homo sapien
cagcatcatccagcttgattagggg

SEQ ID NO: 2659582 - DNA, 25 bp, Homo sapien
gcatcatccagcttgattaggggat

SEQ ID NO: 2659583 - DNA, 25 bp, Homo sapien
agcatcatccagcttgattagggga

SEQ ID NO: 2659584 - DNA, 25 bp, Homo sapien
gatagctggtagaagtatcagtcat

SEQ ID NO: 2659585 - DNA, 25 bp, Homo sapien
tctgaacgagaagcagagtcctgga

SEQ ID NO: 2659586 - DNA, 25 bp, Homo sapien
gacatccgggtttctagctctgaac

SEQ ID NO: 2659587 - DNA, 25 bp, Homo sapien
gatgagcgcctctgtttgctcggac

SEQ ID NO: 2659588 - DNA, 25 bp, Homo sapien
tcggacaaggccgaaggaagcagca

SEQ ID NO: 2659589 - DNA, 25 bp, Homo sapien
atgaagagatttgatgcaaaatttt

SEQ ID NO: 2659590 - DNA, 25 bp, Homo sapien
aatgaagagatttgatgcaaaattt

SEQ ID NO: 2659591 - DNA, 25 bp, Homo sapien
gcagctctccttacaagtttactgt

SEQ ID NO: 2659592 - DNA, 25 bp, Homo sapien
agcagctctccttacaagtttactg

SEQ ID NO: 2659593 - DNA, 25 bp, Homo sapien
gccttccttggctatgccagtgctc

SEQ ID NO: 2659594 - DNA, 25 bp, Homo sapien
gaggaagcacttatgtgttcaagca

SEQ ID NO: 2659595 - DNA, 25 bp, Homo sapien
tacacatctatctttgaggaagcac

SEQ ID NO: 2659596 - DNA, 25 bp, Homo sapien
caactattggcattctctaagctcc

SEQ ID NO: 2659597 - DNA, 25 bp, Homo sapien
gatagctaaagtcactgtggtacca

SEQ ID NO: 2659598 - DNA, 25 bp, Homo sapien
catgttagataatacttttggttaa

SEQ ID NO: 2659599 - DNA, 25 bp, Homo sapien
ctatgcctccgcataaagaatcatg

SEQ ID NO: 2659600 - DNA, 25 bp, Homo sapien
gacattcaggtggtactatgcctcc

SEQ ID NO: 2659601 - DNA, 25 bp, Homo sapien
tttcaaacacgtgtcaccataagtg

SEQ ID NO: 2659602 - DNA, 25 bp, Homo sapien
tacacccacatggtgtgttcaggat

SEQ ID NO: 2659603 - DNA, 25 bp, Homo sapien
agtacacccacatggtgtgttcagg

SEQ ID NO: 2659604 - DNA, 25 bp, Homo sapien
gtacacccacatggtgtgttcagga

SEQ ID NO: 2659605 - DNA, 25 bp, Homo sapien
ccagtacacccacatggtgtgttca

SEQ ID NO: 2659606 - DNA, 25 bp, Homo sapien
atgagctccacaatgtttttagaca

SEQ ID NO: 2659607 - DNA, 25 bp, Homo sapien
gagctccacaatgtttttagacaag

SEQ ID NO: 2659608 - DNA, 25 bp, Homo sapien
gctccacaatgtttttagacaagtt

SEQ ID NO: 2659609 - DNA, 25 bp, Homo sapien
ctccacaatgtttttagacaagttc

SEQ ID NO: 2659610 - DNA, 25 bp, Homo sapien
atcatctcagtgaaactttccccga

SEQ ID NO: 2659611 - DNA, 25 bp, Homo sapien
gctctgctcactaggatccatgagg

SEQ ID NO: 2659612 - DNA, 25 bp, Homo sapien
catgaggatgggaacttttgtcagt

SEQ ID NO: 2659613 - DNA, 25 bp, Homo sapien
aaactttccccgatcacctggtgtg

SEQ ID NO: 2659614 - DNA, 25 bp, Homo sapien
tttcgactcgaattctgtcatcctg

SEQ ID NO: 2659615 - DNA, 25 bp, Homo sapien
tcgactcgaattctgtcatcctgca

SEQ ID NO: 2659616 - DNA, 25 bp, Homo sapien
gactcgaattctgtcatcctgcaca

SEQ ID NO: 2659617 - DNA, 25 bp, Homo sapien
tgttatccatcctttcgactcgaat

SEQ ID NO: 2659618 - DNA, 25 bp, Homo sapien
tgaggactatcccactaagagcaac

SEQ ID NO: 2659619 - DNA, 25 bp, Homo sapien
taaatctggtaccacggataggtca

SEQ ID NO: 2659620 - DNA, 25 bp, Homo sapien
tggcgcttacgctcacttgatgtga

SEQ ID NO: 2659621 - DNA, 25 bp, Homo sapien
tgaacataagatgacctctcggtaa

SEQ ID NO: 2659622 - DNA, 25 bp, Homo sapien
aattctttgaggtattttatgatgg

SEQ ID NO: 2659623 - DNA, 25 bp, Homo sapien
tttgaggtattttatgatggcagcc

SEQ ID NO: 2659624 - DNA, 25 bp, Homo sapien
tgaggtattttatgatggcagccaa

SEQ ID NO: 2659625 - DNA, 25 bp, Homo sapien
caaagagcaaatcacaggcttctct

SEQ ID NO: 2659626 - DNA, 25 bp, Homo sapien
tcactagtaagtaaaggtaatcacc

SEQ ID NO: 2659627 - DNA, 25 bp, Homo sapien
gaagttgtgaccactccaatcttaa

SEQ ID NO: 2659628 - DNA, 25 bp, Homo sapien
gccattagatgtcatgagagtagct

SEQ ID NO: 2659629 - DNA, 25 bp, Homo sapien
gaacctcaagtgtgtcttaacaaaa

SEQ ID NO: 2659630 - DNA, 25 bp, Homo sapien
ccattttacttgatagctgtttaaa

SEQ ID NO: 2659631 - DNA, 25 bp, Homo sapien
tccattttacttgatagctgtttaa

SEQ ID NO: 2659632 - DNA, 25 bp, Homo sapien
cattttacttgatagctgtttaaaa

SEQ ID NO: 2659633 - DNA, 25 bp, Homo sapien
ggagtggctgggtcacccacttctt

SEQ ID NO: 2659634 - DNA, 25 bp, Homo sapien
tctttaacttccgtctcccaaatga

SEQ ID NO: 2659635 - DNA, 25 bp, Homo sapien
agtggctgggtcacccacttcttta

SEQ ID NO: 2659636 - DNA, 25 bp, Homo sapien
tggctgggtcacccacttctttaac

SEQ ID NO: 2659637 - DNA, 25 bp, Homo sapien
tctttcttcgaatctcagattcaga

SEQ ID NO: 2659638 - DNA, 25 bp, Homo sapien
tttcttcgaatctcagattcagacc

SEQ ID NO: 2659639 - DNA, 25 bp, Homo sapien
tttctttcttcgaatctcagattca

SEQ ID NO: 2659640 - DNA, 25 bp, Homo sapien
ttctttcttcgaatctcagattcag

SEQ ID NO: 2659641 - DNA, 25 bp, Homo sapien
ctcttagacctcagctcttctccca

SEQ ID NO: 2659642 - DNA, 25 bp, Homo sapien
aacacccggttgctggctcatggaa

SEQ ID NO: 2659643 - DNA, 25 bp, Homo sapien
gagtcactgcaagtgaacacccggt

SEQ ID NO: 2659644 - DNA, 25 bp, Homo sapien
tagattagaaattccctgacgctgg

SEQ ID NO: 2659645 - DNA, 25 bp, Homo sapien
tgggaaaccacaaagaatacagagg

SEQ ID NO: 2659646 - DNA, 25 bp, Homo sapien
ttcccatttccgagcagtaatgcat

SEQ ID NO: 2659647 - DNA, 25 bp, Homo sapien
cttcccatttccgagcagtaatgca

SEQ ID NO: 2659648 - DNA, 25 bp, Homo sapien
tcccttcccatttccgagcagtaat

SEQ ID NO: 2659649 - DNA, 25 bp, Homo sapien
cccttcccatttccgagcagtaatg

SEQ ID NO: 2659650 - DNA, 25 bp, Homo sapien
gagctcactgaaggtccgaatgttg

SEQ ID NO: 2659651 - DNA, 25 bp, Homo sapien
agcagaggccagctaaaagttcctg

SEQ ID NO: 2659652 - DNA, 25 bp, Homo sapien
cagtcgggacaaacagtaagaggca

SEQ ID NO: 2659653 - DNA, 25 bp, Homo sapien
tagttaatccctatgcactgacagt

SEQ ID NO: 2659654 - DNA, 25 bp, Homo sapien
ttaaatggacccaagaccctgtctc

SEQ ID NO: 2659655 - DNA, 25 bp, Homo sapien
actgaaaatctatgagggagggcct

SEQ ID NO: 2659656 - DNA, 25 bp, Homo sapien
tgccagaccacacagagtataaatt

SEQ ID NO: 2659657 - DNA, 25 bp, Homo sapien
tagaaacgttttcctcaggcaagaa

SEQ ID NO: 2659658 - DNA, 25 bp, Homo sapien
tcttagagacttgaaaggttaggcc

SEQ ID NO: 2659659 - DNA, 25 bp, Homo sapien
tataagacagcctacacaaatagct

SEQ ID NO: 2659660 - DNA, 25 bp, Homo sapien
tagactaagttgatgctacagatgg

SEQ ID NO: 2659661 - DNA, 25 bp, Homo sapien
tattttagtctagtgccaacacagg

SEQ ID NO: 2659662 - DNA, 25 bp, Homo sapien
tcatactcttgcatgcagaaggacc

SEQ ID NO: 2659663 - DNA, 25 bp, Homo sapien
agagctttgtacacacacgggctgg

SEQ ID NO: 2659664 - DNA, 25 bp, Homo sapien
gaaggaccatttgttagtacgatgc

SEQ ID NO: 2659665 - DNA, 25 bp, Homo sapien
tttgttagtacgatgcaggagagca

SEQ ID NO: 2659666 - DNA, 25 bp, Homo sapien
taaatgtatcatcaatgagatgtgg

SEQ ID NO: 2659667 - DNA, 25 bp, Homo sapien
aatctgatggactaaatgtatcatc

SEQ ID NO: 2659668 - DNA, 25 bp, Homo sapien
tggactaaatgtatcatcaatgaga

SEQ ID NO: 2659669 - DNA, 25 bp, Homo sapien
tcatcaatgagatgtggtccatgaa

SEQ ID NO: 2659670 - DNA, 25 bp, Homo sapien
agagtcccctctctatgtcgggcaa

SEQ ID NO: 2659671 - DNA, 25 bp, Homo sapien
gatacagcatcaagccgggcattta

SEQ ID NO: 2659672 - DNA, 25 bp, Homo sapien
gaccaaacacactagattctgaatg

SEQ ID NO: 2659673 - DNA, 25 bp, Homo sapien
tgtgataaatgctacagagtcccct

SEQ ID NO: 2659674 - DNA, 25 bp, Homo sapien
aataacggtccggagcaagtctgac

SEQ ID NO: 2659675 - DNA, 25 bp, Homo sapien
tgctccactggactgaggagttcag

SEQ ID NO: 2659676 - DNA, 25 bp, Homo sapien
gtatctttaagtaatgctccactgg

SEQ ID NO: 2659677 - DNA, 25 bp, Homo sapien
taggtgatataaagttttgacaatc

SEQ ID NO: 2659678 - DNA, 25 bp, Homo sapien
cctgtcctgatactgtcacatattg

SEQ ID NO: 2659679 - DNA, 25 bp, Homo sapien
tatttttcgtatttcttgcaaatgc

SEQ ID NO: 2659680 - DNA, 25 bp, Homo sapien
atctcgtcaataacaccttgaattt

SEQ ID NO: 2659681 - DNA, 25 bp, Homo sapien
tcacatattgtgcagaaggattttt

SEQ ID NO: 2659682 - DNA, 25 bp, Homo sapien
caattagttgatctccatgctgtac

SEQ ID NO: 2659683 - DNA, 25 bp, Homo sapien
tactttttaaacctcaatgccacac

SEQ ID NO: 2659684 - DNA, 25 bp, Homo sapien
ccgagtagcagggagcatagacaca

SEQ ID NO: 2659685 - DNA, 25 bp, Homo sapien
aaatgaatccaggaccgtctttcca

SEQ ID NO: 2659686 - DNA, 25 bp, Homo sapien
aacagagatttagataagtaaccat

SEQ ID NO: 2659687 - DNA, 25 bp, Homo sapien
taaacagagatttagataagtaacc

SEQ ID NO: 2659688 - DNA, 25 bp, Homo sapien
ataaacagagatttagataagtaac

SEQ ID NO: 2659689 - DNA, 25 bp, Homo sapien
cagagatttagataagtaaccatta

SEQ ID NO: 2659690 - DNA, 25 bp, Homo sapien
cctttacccaatcagttggtataca

SEQ ID NO: 2659691 - DNA, 25 bp, Homo sapien
tcagttggtatacaagatacagcag

SEQ ID NO: 2659692 - DNA, 25 bp, Homo sapien
caagatacagcagagttctttattt

SEQ ID NO: 2659693 - DNA, 25 bp, Homo sapien
cttccaacctttacccaatcagttg

SEQ ID NO: 2659694 - DNA, 25 bp, Homo sapien
agccattcagcactgcagtcaagga

SEQ ID NO: 2659695 - DNA, 25 bp, Homo sapien
agtcaaggactagctgctcccggag

SEQ ID NO: 2659696 - DNA, 25 bp, Homo sapien
gagtgaaagcggctcacagcttttg

SEQ ID NO: 2659697 - DNA, 25 bp, Homo sapien
acaataaaaggagagtgaaagcggc

SEQ ID NO: 2659698 - DNA, 25 bp, Homo sapien
gatatcaagagccaactgcatttgc

SEQ ID NO: 2659699 - DNA, 25 bp, Homo sapien
ggtattcaatcctctgatgtcaggt

SEQ ID NO: 2659700 - DNA, 25 bp, Homo sapien
tgatatcatagtcacaccatctggt

SEQ ID NO: 2659701 - DNA, 25 bp, Homo sapien
aacaatcaatgctgctctcaagtgg

SEQ ID NO: 2659702 - DNA, 25 bp, Homo sapien
gcctctctggacatgagtatcaaag

SEQ ID NO: 2659703 - DNA, 25 bp, Homo sapien
cagcagcttgacttgagggtagcta

SEQ ID NO: 2659704 - DNA, 25 bp, Homo sapien
tgttctaattactgacccatccggt

SEQ ID NO: 2659705 - DNA, 25 bp, Homo sapien
gagttaacacagctcttagtgggtc

SEQ ID NO: 2659706 - DNA, 25 bp, Homo sapien
aatctccttgcttagcgaccttggc

SEQ ID NO: 2659707 - DNA, 25 bp, Homo sapien
cacaaggagtgataatgttcactga

SEQ ID NO: 2659708 - DNA, 25 bp, Homo sapien
gctttacacaaggagtgataatgtt

SEQ ID NO: 2659709 - DNA, 25 bp, Homo sapien
gctaggtgatgcactgctttacaca

SEQ ID NO: 2659710 - DNA, 25 bp, Homo sapien
aatttactaggcatggaaatagcct

SEQ ID NO: 2659711 - DNA, 25 bp, Homo sapien
ttcaatttactaggcatggaaatag

SEQ ID NO: 2659712 - DNA, 25 bp, Homo sapien
aatatgtttcaatttactaggcatg

SEQ ID NO: 2659713 - DNA, 25 bp, Homo sapien
tgtttcaatttactaggcatggaaa

SEQ ID NO: 2659714 - DNA, 25 bp, Homo sapien
gggacatattgatcctgttctccca

SEQ ID NO: 2659715 - DNA, 25 bp, Homo sapien
gacatattgatcctgttctcccagc

SEQ ID NO: 2659716 - DNA, 25 bp, Homo sapien
atttgggacatattgatcctgttct

SEQ ID NO: 2659717 - DNA, 25 bp, Homo sapien
tcaatcacagggtgccttccatttt

SEQ ID NO: 2659718 - DNA, 25 bp, Homo sapien
gaagttaccccactagcatagtttc

SEQ ID NO: 2659719 - DNA, 25 bp, Homo sapien
cattttttgacccatcaccataccg

SEQ ID NO: 2659720 - DNA, 25 bp, Homo sapien
gccatacataagatcttgccatcaa

SEQ ID NO: 2659721 - DNA, 25 bp, Homo sapien
gatccctgttttcctctatggcata

SEQ ID NO: 2659722 - DNA, 25 bp, Homo sapien
ccctcaaggcaatggtattagaaga

SEQ ID NO: 2659723 - DNA, 25 bp, Homo sapien
tcggcctctcaaagacatagtcttc

SEQ ID NO: 2659724 - DNA, 25 bp, Homo sapien
cattgggtcttaggttgctatggta

SEQ ID NO: 2659725 - DNA, 25 bp, Homo sapien
tagctggaatcatagggaggcgcca

SEQ ID NO: 2659726 - DNA, 25 bp, Homo sapien
ttggtccggtaattatcattactct

SEQ ID NO: 2659727 - DNA, 25 bp, Homo sapien
ccggtaattatcattactctctctg

SEQ ID NO: 2659728 - DNA, 25 bp, Homo sapien
tggtccggtaattatcattactctc

SEQ ID NO: 2659729 - DNA, 25 bp, Homo sapien
gtccggtaattatcattactctctc

SEQ ID NO: 2659730 - DNA, 25 bp, Homo sapien
acataggagccaatctgagccatga

SEQ ID NO: 2659731 - DNA, 25 bp, Homo sapien
ctgcaggaacataggagccaatctg

SEQ ID NO: 2659732 - DNA, 25 bp, Homo sapien
tccacaatcccaattgtcgcttctt

SEQ ID NO: 2659733 - DNA, 25 bp, Homo sapien
cccaattgtcgcttcttctgcagga

SEQ ID NO: 2659734 - DNA, 25 bp, Homo sapien
ctaccccagaagacagagcagatct

SEQ ID NO: 2659735 - DNA, 25 bp, Homo sapien
taccccagaagacagagcagatctg

SEQ ID NO: 2659736 - DNA, 25 bp, Homo sapien
gctctacagagcctaacagccaagt

SEQ ID NO: 2659737 - DNA, 25 bp, Homo sapien
ggggaggatggacaagttttcagac

SEQ ID NO: 2659738 - DNA, 25 bp, Homo sapien
gtttcaggtctgcacctaaaatggg

SEQ ID NO: 2659739 - DNA, 25 bp, Homo sapien
gactgtgctctacagagcctaacag

SEQ ID NO: 2659740 - DNA, 25 bp, Homo sapien
gctggacaacaactcaagacactct

SEQ ID NO: 2659741 - DNA, 25 bp, Homo sapien
tacgaattctccttagtgaagccag

SEQ ID NO: 2659742 - DNA, 25 bp, Homo sapien
ggatcagaataacacctatttggtg

SEQ ID NO: 2659743 - DNA, 25 bp, Homo sapien
caaagcttgactatgcacagagact

SEQ ID NO: 2659744 - DNA, 25 bp, Homo sapien
atgagaccaccttccatgccagcca

SEQ ID NO: 2659745 - DNA, 25 bp, Homo sapien
cagaaggaaaggcactgccattatc

SEQ ID NO: 2659746 - DNA, 25 bp, Homo sapien
tctcaattctattatggccacagtg

SEQ ID NO: 2659747 - DNA, 25 bp, Homo sapien
gcctctaggttcctggattctcaat

SEQ ID NO: 2659748 - DNA, 25 bp, Homo sapien
gagccttgagtttagctcttgctgt

SEQ ID NO: 2659749 - DNA, 25 bp, Homo sapien
ctgagccttgagtttagctcttgct

SEQ ID NO: 2659750 - DNA, 25 bp, Homo sapien
tgagccttgagtttagctcttgctg

SEQ ID NO: 2659751 - DNA, 25 bp, Homo sapien
ttgtctgatggcacattctttgcca

SEQ ID NO: 2659752 - DNA, 25 bp, Homo sapien
caagctctctacatagaatttggtc

SEQ ID NO: 2659753 - DNA, 25 bp, Homo sapien
acagaagggaagagcttgtctgatg

SEQ ID NO: 2659754 - DNA, 25 bp, Homo sapien
tccaatggttcttctcttttgacag

SEQ ID NO: 2659755 - DNA, 25 bp, Homo sapien
ctacgggatggtctgacatagacaa

SEQ ID NO: 2659756 - DNA, 25 bp, Homo sapien
acttttcctacgggatggtctgaca

SEQ ID NO: 2659757 - DNA, 25 bp, Homo sapien
cctacgggatggtctgacatagaca

SEQ ID NO: 2659758 - DNA, 25 bp, Homo sapien
tacgggatggtctgacatagacaag

SEQ ID NO: 2659759 - DNA, 25 bp, Homo sapien
tgactgatcatggagcaaaaggatt

SEQ ID NO: 2659760 - DNA, 25 bp, Homo sapien
agtgttaagcagagtgtcttgcaca

SEQ ID NO: 2659761 - DNA, 25 bp, Homo sapien
tctgtagtcccctcaagtgttaagc

SEQ ID NO: 2659762 - DNA, 25 bp, Homo sapien
taaagactgtcacataacctccaca

SEQ ID NO: 2659763 - DNA, 25 bp, Homo sapien
tggaatcatcttcacccctctcttt

SEQ ID NO: 2659764 - DNA, 25 bp, Homo sapien
gaagccttatcatccttaagctgct

SEQ ID NO: 2659765 - DNA, 25 bp, Homo sapien
ctggaagccttatcatccttaagct

SEQ ID NO: 2659766 - DNA, 25 bp, Homo sapien
ggttccattatactggaatcatctt

SEQ ID NO: 2659767 - DNA, 25 bp, Homo sapien
tgtgacacacctttattcctctgtg

SEQ ID NO: 2659768 - DNA, 25 bp, Homo sapien
gtgacacacctttattcctctgtgt

SEQ ID NO: 2659769 - DNA, 25 bp, Homo sapien
tatatatattgtctgcagcacccat

SEQ ID NO: 2659770 - DNA, 25 bp, Homo sapien
gcaattccatcatgagtgctcgtcc

SEQ ID NO: 2659771 - DNA, 25 bp, Homo sapien
tgtagcataggcaatggcaattcca

SEQ ID NO: 2659772 - DNA, 25 bp, Homo sapien
ccaagataaccaaggactgtgatgt

SEQ ID NO: 2659773 - DNA, 25 bp, Homo sapien
tttctagttcacaaactggcggata

SEQ ID NO: 2659774 - DNA, 25 bp, Homo sapien
catgtggtaattccccacctggtgt

SEQ ID NO: 2659775 - DNA, 25 bp, Homo sapien
catcctcactgaccaagaatcccat

SEQ ID NO: 2659776 - DNA, 25 bp, Homo sapien
cggataatgggtgacaaacagggtt

SEQ ID NO: 2659777 - DNA, 25 bp, Homo sapien
tccgaatgaacctcctgaatgcaaa

SEQ ID NO: 2659778 - DNA, 25 bp, Homo sapien
tccaaggtggacaagagttacaaag

SEQ ID NO: 2659779 - DNA, 25 bp, Homo sapien
tgaagccttttgaccataacacagc

SEQ ID NO: 2659780 - DNA, 25 bp, Homo sapien
tgtgctgcagaaatgtccaaggtgg

SEQ ID NO: 2659781 - DNA, 25 bp, Homo sapien
tggtaaaggaaggtgacaaaatcag

SEQ ID NO: 2659782 - DNA, 25 bp, Homo sapien
ggaaggtgacaaaatcagggacttg

SEQ ID NO: 2659783 - DNA, 25 bp, Homo sapien
ggtgacaaaatcagggacttgttct

SEQ ID NO: 2659784 - DNA, 25 bp, Homo sapien
aaatcagggacttgttctgctgcgc

SEQ ID NO: 2659785 - DNA, 25 bp, Homo sapien
tcagagctgctactataatcaaggg

SEQ ID NO: 2659786 - DNA, 25 bp, Homo sapien
cagtgtcacccttccagtgaaagga

SEQ ID NO: 2659787 - DNA, 25 bp, Homo sapien
ggacccaggttaccaattgccacta

SEQ ID NO: 2659788 - DNA, 25 bp, Homo sapien
tataacacttgaataccgggcaggc

SEQ ID NO: 2659789 - DNA, 25 bp, Homo sapien
tcttgtgcattatgcatcgtccata

SEQ ID NO: 2659790 - DNA, 25 bp, Homo sapien
atgcatcgtccataactttgcaaaa

SEQ ID NO: 2659791 - DNA, 25 bp, Homo sapien
ggtcttgtgcattatgcatcgtcca

SEQ ID NO: 2659792 - DNA, 25 bp, Homo sapien
catcgtccataactttgcaaaatac

SEQ ID NO: 2659793 - DNA, 25 bp, Homo sapien
tacagttggtatttttaattctcca

SEQ ID NO: 2659794 - DNA, 25 bp, Homo sapien
ttttttgttcacaaatgtagtcttc

SEQ ID NO: 2659795 - DNA, 25 bp, Homo sapien
ccattttttgttcacaaatgtagtc

SEQ ID NO: 2659796 - DNA, 25 bp, Homo sapien
tttgttcacaaatgtagtcttcatt

SEQ ID NO: 2659797 - DNA, 25 bp, Homo sapien
ttatatcaccctccaaaagcttggg

SEQ ID NO: 2659798 - DNA, 25 bp, Homo sapien
agttcaatggatagattcctgccag

SEQ ID NO: 2659799 - DNA, 25 bp, Homo sapien
taaggctttactggacttactgtcc

SEQ ID NO: 2659800 - DNA, 25 bp, Homo sapien
caaagataggctgttactggagagt

SEQ ID NO: 2659801 - DNA, 25 bp, Homo sapien
ctatctttgaaatcttgttagaaaa

SEQ ID NO: 2659802 - DNA, 25 bp, Homo sapien
tacagttatatagagtattggaaca

SEQ ID NO: 2659803 - DNA, 25 bp, Homo sapien
ctctggcatgggcatgaaattcctg

SEQ ID NO: 2659804 - DNA, 25 bp, Homo sapien
tccagatgtccacctggacattacc

SEQ ID NO: 2659805 - DNA, 25 bp, Homo sapien
taaagttccacgttgtcagctgcca

SEQ ID NO: 2659806 - DNA, 25 bp, Homo sapien
ggacacaatgctcctggaaccccta

SEQ ID NO: 2659807 - DNA, 25 bp, Homo sapien
cctgtaaagttccacgttgtcagct

SEQ ID NO: 2659808 - DNA, 25 bp, Homo sapien
gttccacgttgtcagctgccagaca

SEQ ID NO: 2659809 - DNA, 25 bp, Homo sapien
ggaagacatttagcctgcaggctca

SEQ ID NO: 2659810 - DNA, 25 bp, Homo sapien
gatggctaaaaacggacaagtcact

SEQ ID NO: 2659811 - DNA, 25 bp, Homo sapien
catgcctatgcagtaccagagggaa

SEQ ID NO: 2659812 - DNA, 25 bp, Homo sapien
taactttagaattgcagccccaaga

SEQ ID NO: 2659813 - DNA, 25 bp, Homo sapien
ccatatccttggtgtgaaacatcaa

SEQ ID NO: 2659814 - DNA, 25 bp, Homo sapien
cttgaatccctagtgaaatggtgcc

SEQ ID NO: 2659815 - DNA, 25 bp, Homo sapien
tcaccatgatgacgacaggcacaaa

SEQ ID NO: 2659816 - DNA, 25 bp, Homo sapien
caggtatagaataggactccccaag

SEQ ID NO: 2659817 - DNA, 25 bp, Homo sapien
tatttatattcagcacggaggcctc

SEQ ID NO: 2659818 - DNA, 25 bp, Homo sapien
taggacaatttcagcaggcactaca

SEQ ID NO: 2659819 - DNA, 25 bp, Homo sapien
gacagaatttttcaacgtggccatg

SEQ ID NO: 2659820 - DNA, 25 bp, Homo sapien
gataacggcccatctttactcaagg

SEQ ID NO: 2659821 - DNA, 25 bp, Homo sapien
taaattataaggtcagggaagtcac

SEQ ID NO: 2659822 - DNA, 25 bp, Homo sapien
gaggcactccttggagggatgaaaa

SEQ ID NO: 2659823 - DNA, 25 bp, Homo sapien
tcccaagggtattgtgctaatggca

SEQ ID NO: 2659824 - DNA, 25 bp, Homo sapien
tctggacatcaggtgcaagctccaa

SEQ ID NO: 2659825 - DNA, 25 bp, Homo sapien
acggtcaggtttgcgtatgtgcagc

SEQ ID NO: 2659826 - DNA, 25 bp, Homo sapien
ctagggcatccaccgcttgaagtct

SEQ ID NO: 2659827 - DNA, 25 bp, Homo sapien
gacatctagatcctgccaagcacaa

SEQ ID NO: 2659828 - DNA, 25 bp, Homo sapien
agacaaatccatgcaacggtcaggt

SEQ ID NO: 2659829 - DNA, 25 bp, Homo sapien
tttttgattcataaccttcacaaat

SEQ ID NO: 2659830 - DNA, 25 bp, Homo sapien
atttttgattcataaccttcacaaa

SEQ ID NO: 2659831 - DNA, 25 bp, Homo sapien
taaccttcacaaatatacctcagag

SEQ ID NO: 2659832 - DNA, 25 bp, Homo sapien
cagacagactcctggggtgaagtga

SEQ ID NO: 2659833 - DNA, 25 bp, Homo sapien
ggacctaaaagtacacaccctcata

SEQ ID NO: 2659834 - DNA, 25 bp, Homo sapien
gcccaggatcgtctcagacagactc

SEQ ID NO: 2659835 - DNA, 25 bp, Homo sapien
cagccttccaaagcggtgtgatcac

SEQ ID NO: 2659836 - DNA, 25 bp, Homo sapien
ttttttttgagagagggaattgctc

SEQ ID NO: 2659837 - DNA, 25 bp, Homo sapien
ttttttgagagagggaattgctctg

SEQ ID NO: 2659838 - DNA, 25 bp, Homo sapien
tttttttgagagagggaattgctct

SEQ ID NO: 2659839 - DNA, 25 bp, Homo sapien
tcctgttgcctagggctttgcagaa

SEQ ID NO: 2659840 - DNA, 25 bp, Homo sapien
taataattaagggaggaaatattgc

SEQ ID NO: 2659841 - DNA, 25 bp, Homo sapien
tttgcagaagcattcaaagcaagct

SEQ ID NO: 2659842 - DNA, 25 bp, Homo sapien
gcaagctttttgctcttatagcata

SEQ ID NO: 2659843 - DNA, 25 bp, Homo sapien
agcattctttcttgtatcctcagga

SEQ ID NO: 2659844 - DNA, 25 bp, Homo sapien
ttgcaaagcagccctcttccagagc

SEQ ID NO: 2659845 - DNA, 25 bp, Homo sapien
aattatgtaacgatcagtgacctcc

SEQ ID NO: 2659846 - DNA, 25 bp, Homo sapien
aaagctctattgtagtcctcccagg

SEQ ID NO: 2659847 - DNA, 25 bp, Homo sapien
aaagcatagagttctattgttgaga

SEQ ID NO: 2659848 - DNA, 25 bp, Homo sapien
aagcatagagttctattgttgagaa

SEQ ID NO: 2659849 - DNA, 25 bp, Homo sapien
gaagctagtttaaactgtgggcaaa

SEQ ID NO: 2659850 - DNA, 25 bp, Homo sapien
tgagaagctagtttaaactgtgggc

SEQ ID NO: 2659851 - DNA, 25 bp, Homo sapien
acaaaaattagcattaagctttatg

SEQ ID NO: 2659852 - DNA, 25 bp, Homo sapien
aattagcattaagctttatgacagc

SEQ ID NO: 2659853 - DNA, 25 bp, Homo sapien
tagcattaagctttatgacagcagt

SEQ ID NO: 2659854 - DNA, 25 bp, Homo sapien
aaaaattagcattaagctttatgac

SEQ ID NO: 2659855 - DNA, 25 bp, Homo sapien
aaatattatcagcatctttgagcag

SEQ ID NO: 2659856 - DNA, 25 bp, Homo sapien
atattatcagcatctttgagcaggg

SEQ ID NO: 2659857 - DNA, 25 bp, Homo sapien
atttagctacatccacacacagata

SEQ ID NO: 2659858 - DNA, 25 bp, Homo sapien
taaaagaaatttagctacatccaca

SEQ ID NO: 2659859 - DNA, 25 bp, Homo sapien
gaccaacaatttgggccacttgcca

SEQ ID NO: 2659860 - DNA, 25 bp, Homo sapien
cttgccaatctgacttaacacctct

SEQ ID NO: 2659861 - DNA, 25 bp, Homo sapien
gggccacttgccaatctgacttaac

SEQ ID NO: 2659862 - DNA, 25 bp, Homo sapien
ccagagcctgaccaacaatttgggc

SEQ ID NO: 2659863 - DNA, 25 bp, Homo sapien
tctgaggtacagagcattttgtcac

SEQ ID NO: 2659864 - DNA, 25 bp, Homo sapien
tccagggagtagtaagcttcttaag

SEQ ID NO: 2659865 - DNA, 25 bp, Homo sapien
tttgttaatacaggcaaactcatgt

SEQ ID NO: 2659866 - DNA, 25 bp, Homo sapien
ctagtttatccagggagtagtaagc

SEQ ID NO: 2659867 - DNA, 25 bp, Homo sapien
tgcctcctggctgtaaggctgagtc

SEQ ID NO: 2659868 - DNA, 25 bp, Homo sapien
tcatatgtcccaggataggattctg

SEQ ID NO: 2659869 - DNA, 25 bp, Homo sapien
caggctcctcatcatatgtcccagg

SEQ ID NO: 2659870 - DNA, 25 bp, Homo sapien
ctgagtcataaagatggtacctggg

SEQ ID NO: 2659871 - DNA, 25 bp, Homo sapien
tagttattcaggttattacaggaat

SEQ ID NO: 2659872 - DNA, 25 bp, Homo sapien
tactgtagttattcaggttattaca

SEQ ID NO: 2659873 - DNA, 25 bp, Homo sapien
gtagttattcaggttattacaggaa

SEQ ID NO: 2659874 - DNA, 25 bp, Homo sapien
ctgtagttattcaggttattacagg

SEQ ID NO: 2659875 - DNA, 25 bp, Homo sapien
catgcaggcagcgtaggcctctgaa

SEQ ID NO: 2659876 - DNA, 25 bp, Homo sapien
gcagcatgcaggcagcgtaggcctc

SEQ ID NO: 2659877 - DNA, 25 bp, Homo sapien
ttcacacaagtctagaagtggcagc

SEQ ID NO: 2659878 - DNA, 25 bp, Homo sapien
ggattcacacaagtctagaagtggc

SEQ ID NO: 2659879 - DNA, 25 bp, Homo sapien
taatggccaagtaggatgaagaacc

SEQ ID NO: 2659880 - DNA, 25 bp, Homo sapien
tcttccagggtccattgcaggctgc

SEQ ID NO: 2659881 - DNA, 25 bp, Homo sapien
tttccttctagttggtagcctggcc

SEQ ID NO: 2659882 - DNA, 25 bp, Homo sapien
tcaaattggcctggtggatagctca

SEQ ID NO: 2659883 - DNA, 25 bp, Homo sapien
cagacattttcatgagccctcataa

SEQ ID NO: 2659884 - DNA, 25 bp, Homo sapien
gagatggcgaagttcctagactcaa

SEQ ID NO: 2659885 - DNA, 25 bp, Homo sapien
gggccatttagcagtaacatggaaa

SEQ ID NO: 2659886 - DNA, 25 bp, Homo sapien
gccggagaccttgtgcagacatttt

SEQ ID NO: 2659887 - DNA, 25 bp, Homo sapien
gaggattgcatgcaggtaattccag

SEQ ID NO: 2659888 - DNA, 25 bp, Homo sapien
cctggtaaagtcagtggtgctttcc

SEQ ID NO: 2659889 - DNA, 25 bp, Homo sapien
ctgaaggaggattgcatgcaggtaa

SEQ ID NO: 2659890 - DNA, 25 bp, Homo sapien
ggtgctttccttgccagtctctatt

SEQ ID NO: 2659891 - DNA, 25 bp, Homo sapien
tagaagttctactggcagtcagccc

SEQ ID NO: 2659892 - DNA, 25 bp, Homo sapien
ttaagtggcaaatacgcagagctgg

SEQ ID NO: 2659893 - DNA, 25 bp, Homo sapien
gattgttctccgcagaagacagcca

SEQ ID NO: 2659894 - DNA, 25 bp, Homo sapien
tcaagggagcatttggtctgagtcc

SEQ ID NO: 2659895 - DNA, 25 bp, Homo sapien
ttccacaaacccaaccgcatccttc

SEQ ID NO: 2659896 - DNA, 25 bp, Homo sapien
tccatcctaaccttctaattgtcat

SEQ ID NO: 2659897 - DNA, 25 bp, Homo sapien
aacagctgtgcctttagagtttcta

SEQ ID NO: 2659898 - DNA, 25 bp, Homo sapien
tagagtttctatagctgttccacaa

SEQ ID NO: 2659899 - DNA, 25 bp, Homo sapien
gtagagtcacagagtggctttgcat

SEQ ID NO: 2659900 - DNA, 25 bp, Homo sapien
cttgtacctgcattgtagtatttaa

SEQ ID NO: 2659901 - DNA, 25 bp, Homo sapien
tagcccgcatccttggcttttctgc

SEQ ID NO: 2659902 - DNA, 25 bp, Homo sapien
aaggttaaggagagtggcccaagtg

SEQ ID NO: 2659903 - DNA, 25 bp, Homo sapien
gctctgctcgccctcgaagtagaag

SEQ ID NO: 2659904 - DNA, 25 bp, Homo sapien
cattctggtagagggcgaaccactt

SEQ ID NO: 2659905 - DNA, 25 bp, Homo sapien
agggcgtgcccctcgttgtagcgca

SEQ ID NO: 2659906 - DNA, 25 bp, Homo sapien
ttcttactcaggaagccgcgcttgg

SEQ ID NO: 2659907 - DNA, 25 bp, Homo sapien
cttcataattacacccagcaggtca

SEQ ID NO: 2659908 - DNA, 25 bp, Homo sapien
ggccaactgaccgaaatcacaaaga

SEQ ID NO: 2659909 - DNA, 25 bp, Homo sapien
gtcaaatgttagcaaggccaactga

SEQ ID NO: 2659910 - DNA, 25 bp, Homo sapien
aacagaaagtgtctgtccggcttgg

SEQ ID NO: 2659911 - DNA, 25 bp, Homo sapien
catgtagaaggtacttgctaaatac

SEQ ID NO: 2659912 - DNA, 25 bp, Homo sapien
tagaaggtacttgctaaatacaact

SEQ ID NO: 2659913 - DNA, 25 bp, Homo sapien
gtagaaggtacttgctaaatacaac

SEQ ID NO: 2659914 - DNA, 25 bp, Homo sapien
gaaggtacttgctaaatacaacttc

SEQ ID NO: 2659915 - DNA, 25 bp, Homo sapien
gtctctgtcattgctgacgccagtc

SEQ ID NO: 2659916 - DNA, 25 bp, Homo sapien
cagcagagatcccaacatgttggta

SEQ ID NO: 2659917 - DNA, 25 bp, Homo sapien
agtccgtcgacattcagagggcaga

SEQ ID NO: 2659918 - DNA, 25 bp, Homo sapien
cccaacatgttggtattgacttgag

SEQ ID NO: 2659919 - DNA, 25 bp, Homo sapien
cagcaattcaacccatgggaaggaa

SEQ ID NO: 2659920 - DNA, 25 bp, Homo sapien
cagccagcaattcaacccatgggaa

SEQ ID NO: 2659921 - DNA, 25 bp, Homo sapien
gccagcaattcaacccatgggaagg

SEQ ID NO: 2659922 - DNA, 25 bp, Homo sapien
gccagccagcaattcaacccatggg

SEQ ID NO: 2659923 - DNA, 25 bp, Homo sapien
ccagatttacaccaaggaattccca

SEQ ID NO: 2659924 - DNA, 25 bp, Homo sapien
tattaaccagaaataaaggtggagc

SEQ ID NO: 2659925 - DNA, 25 bp, Homo sapien
tgaggcttatcctggaaccaactgt

SEQ ID NO: 2659926 - DNA, 25 bp, Homo sapien
tacactacattgagtaaacttgcag

SEQ ID NO: 2659927 - DNA, 25 bp, Homo sapien
caagtaagaacctgattgtatctcc

SEQ ID NO: 2659928 - DNA, 25 bp, Homo sapien
ggcagaatttccttaccttgaggaa

SEQ ID NO: 2659929 - DNA, 25 bp, Homo sapien
ctgggtttgacccacagcggccacc

SEQ ID NO: 2659930 - DNA, 25 bp, Homo sapien
tatgaagttatggaaagtgctaggg

SEQ ID NO: 2659931 - DNA, 25 bp, Homo sapien
ccttcttaaagtgtacttcgcaggg

SEQ ID NO: 2659932 - DNA, 25 bp, Homo sapien
taggcaatgttgtttcaagctctca

SEQ ID NO: 2659933 - DNA, 25 bp, Homo sapien
gggatctttctccaacactagaaag

SEQ ID NO: 2659934 - DNA, 25 bp, Homo sapien
caagctctcacatcagtgaatacaa

SEQ ID NO: 2659935 - DNA, 25 bp, Homo sapien
caggagagtccacaataccatatta

SEQ ID NO: 2659936 - DNA, 25 bp, Homo sapien
ctctcagggtataagggaagttcac

SEQ ID NO: 2659937 - DNA, 25 bp, Homo sapien
gcagttgatggctcctaccctctag

SEQ ID NO: 2659938 - DNA, 25 bp, Homo sapien
ccagcatagttttcaggtcacatga

SEQ ID NO: 2659939 - DNA, 25 bp, Homo sapien
caattttagcgactgagtggcccca

SEQ ID NO: 2659940 - DNA, 25 bp, Homo sapien
agcttctccccacttggataaattc

SEQ ID NO: 2659941 - DNA, 25 bp, Homo sapien
acagcttctccccacttggataaat

SEQ ID NO: 2659942 - DNA, 25 bp, Homo sapien
gtacagcttctccccacttggataa

SEQ ID NO: 2659943 - DNA, 25 bp, Homo sapien
gtggtacagcttctccccacttgga

SEQ ID NO: 2659944 - DNA, 25 bp, Homo sapien
tggcagatcaaattccaactcccca

SEQ ID NO: 2659945 - DNA, 25 bp, Homo sapien
gactggcagatcaaattccaactcc

SEQ ID NO: 2659946 - DNA, 25 bp, Homo sapien
ttgactggcagatcaaattccaact

SEQ ID NO: 2659947 - DNA, 25 bp, Homo sapien
gttgcagatattgccgatatagtca

SEQ ID NO: 2659948 - DNA, 25 bp, Homo sapien
accttcatggccaaaaagaacagta

SEQ ID NO: 2659949 - DNA, 25 bp, Homo sapien
catggccaaaaagaacagtaaagta

SEQ ID NO: 2659950 - DNA, 25 bp, Homo sapien
ctggcttggtgaatggcctccatcc

SEQ ID NO: 2659951 - DNA, 25 bp, Homo sapien
ggcttggtgaatggcctccatccac

SEQ ID NO: 2659952 - DNA, 25 bp, Homo sapien
taaggagcgaggaataaacagactg

SEQ ID NO: 2659953 - DNA, 25 bp, Homo sapien
gcctaggagagcaaccgaaccattt

SEQ ID NO: 2659954 - DNA, 25 bp, Homo sapien
catgtgcaagagaagacagtagcta

SEQ ID NO: 2659955 - DNA, 25 bp, Homo sapien
catttcttcaagaagccgggctgca

SEQ ID NO: 2659956 - DNA, 25 bp, Homo sapien
ccccagtccagcgaggtgtaagctt

SEQ ID NO: 2659957 - DNA, 25 bp, Homo sapien
gagggaacaggattctaaatcacgt

SEQ ID NO: 2659958 - DNA, 25 bp, Homo sapien
gatcaatagaaagtctcaggttttc

SEQ ID NO: 2659959 - DNA, 25 bp, Homo sapien
gctttgatcaaaggccttacaagat

SEQ ID NO: 2659960 - DNA, 25 bp, Homo sapien
ctcctctttgggaacttgggccatg

SEQ ID NO: 2659961 - DNA, 25 bp, Homo sapien
gggaacttgggccatggcaagccat

SEQ ID NO: 2659962 - DNA, 25 bp, Homo sapien
ttgggaacttgggccatggcaagcc

SEQ ID NO: 2659963 - DNA, 25 bp, Homo sapien
tctttgggaacttgggccatggcaa

SEQ ID NO: 2659964 - DNA, 25 bp, Homo sapien
tttgttcagctatctctacttgaca

SEQ ID NO: 2659965 - DNA, 25 bp, Homo sapien
acacagttagtcattgagatattgt

SEQ ID NO: 2659966 - DNA, 25 bp, Homo sapien
tgtttgttcagctatctctacttga

SEQ ID NO: 2659967 - DNA, 25 bp, Homo sapien
tattgttctactatatagagttcca

SEQ ID NO: 2659968 - DNA, 25 bp, Homo sapien
aatacttccctctcaatcaaaatgt

SEQ ID NO: 2659969 - DNA, 25 bp, Homo sapien
taatacttccctctcaatcaaaatg

SEQ ID NO: 2659970 - DNA, 25 bp, Homo sapien
ttctgtctctacgatctgaactaga

SEQ ID NO: 2659971 - DNA, 25 bp, Homo sapien
ttggttagctgcaattttttctgtc

SEQ ID NO: 2659972 - DNA, 25 bp, Homo sapien
cttcaagttgatgtcggagttggtt

SEQ ID NO: 2659973 - DNA, 25 bp, Homo sapien
tgaactagatgaatgtacttctgca

SEQ ID NO: 2659974 - DNA, 25 bp, Homo sapien
cattagattcatgtctaggtcaggc

SEQ ID NO: 2659975 - DNA, 25 bp, Homo sapien
gtcagcctgggattaaaatgttgcc

SEQ ID NO: 2659976 - DNA, 25 bp, Homo sapien
catgaggaaatgacggtaaacgtga

SEQ ID NO: 2659977 - DNA, 25 bp, Homo sapien
tcaggcccagccacgtatgtgttga

SEQ ID NO: 2659978 - DNA, 25 bp, Homo sapien
cactatctggggatgcaaggcctga

SEQ ID NO: 2659979 - DNA, 25 bp, Homo sapien
tggactctaaaaccgccttctgctc

SEQ ID NO: 2659980 - DNA, 25 bp, Homo sapien
tggctgtggactctaaaaccgcctt

SEQ ID NO: 2659981 - DNA, 25 bp, Homo sapien
ggatgcaaggcctgagaagttcaca

SEQ ID NO: 2659982 - DNA, 25 bp, Homo sapien
tggttctggccattggcctgtagtc

SEQ ID NO: 2659983 - DNA, 25 bp, Homo sapien
ggtccccacatgcagtgacactcag

SEQ ID NO: 2659984 - DNA, 25 bp, Homo sapien
ggccattggcctgtagtcttccaaa

SEQ ID NO: 2659985 - DNA, 25 bp, Homo sapien
ttggcctgtagtcttccaaaccaca

SEQ ID NO: 2659986 - DNA, 25 bp, Homo sapien
cccaagcatggtatcaccaatgaaa

SEQ ID NO: 2659987 - DNA, 25 bp, Homo sapien
aagtgactgtgtaaagtgtgaccgg

SEQ ID NO: 2659988 - DNA, 25 bp, Homo sapien
atgtccatcccctcgcctgaaggtg

SEQ ID NO: 2659989 - DNA, 25 bp, Homo sapien
gtgagcccgccaagaccttgtcagg

SEQ ID NO: 2659990 - DNA, 25 bp, Homo sapien
ccaatgagatcctcaggaaacaccc

SEQ ID NO: 2659991 - DNA, 25 bp, Homo sapien
ggaacacaaagttggtccatttcat

SEQ ID NO: 2659992 - DNA, 25 bp, Homo sapien
tctcttcctttggtgctgagatggg

SEQ ID NO: 2659993 - DNA, 25 bp, Homo sapien
gattatagccatacacacaggaagc

SEQ ID NO: 2659994 - DNA, 25 bp, Homo sapien
tggtaaggtcgcattcgttctttgg

SEQ ID NO: 2659995 - DNA, 25 bp, Homo sapien
tcttggttgctttggtaaggtcgca

SEQ ID NO: 2659996 - DNA, 25 bp, Homo sapien
gatgtctggatcttcgtcttcttgg

SEQ ID NO: 2659997 - DNA, 25 bp, Homo sapien
tctggatcttcgtcttcttggttgc

SEQ ID NO: 2659998 - DNA, 25 bp, Homo sapien
agctggtgaacgtactctgactctg

SEQ ID NO: 2659999 - DNA, 25 bp, Homo sapien
catggtgaacacaatctggtttctc

SEQ ID NO: 2660000 - DNA, 25 bp, Homo sapien
gtaatcctgcacgatggtcttccat

SEQ ID NO: 2660001 - DNA, 25 bp, Homo sapien
accatcctcgcatgaagctctgaac

SEQ ID NO: 2660002 - DNA, 25 bp, Homo sapien
aattaaagtgggccagtttgctatc

SEQ ID NO: 2660003 - DNA, 25 bp, Homo sapien
aaattaaagtgggccagtttgctat

SEQ ID NO: 2660004 - DNA, 25 bp, Homo sapien
ttaaagtgggccagtttgctatcct

SEQ ID NO: 2660005 - DNA, 25 bp, Homo sapien
attaaagtgggccagtttgctatcc

SEQ ID NO: 2660006 - DNA, 25 bp, Homo sapien
agcacttgactccagccccaaatta

SEQ ID NO: 2660007 - DNA, 25 bp, Homo sapien
gggcagcacttgactccagccccaa

SEQ ID NO: 2660008 - DNA, 25 bp, Homo sapien
gcacttgactccagccccaaattaa

SEQ ID NO: 2660009 - DNA, 25 bp, Homo sapien
gcagcacttgactccagccccaaat

SEQ ID NO: 2660010 - DNA, 25 bp, Homo sapien
cctacactgggcaggaatggcaaag

SEQ ID NO: 2660011 - DNA, 25 bp, Homo sapien
cttgttgcttggtaaattacctaca

SEQ ID NO: 2660012 - DNA, 25 bp, Homo sapien
gagccgcaaccctgatgcctgaatg

SEQ ID NO: 2660013 - DNA, 25 bp, Homo sapien
acacatgcatggagccgcaaccctg

SEQ ID NO: 2660014 - DNA, 25 bp, Homo sapien
ggctggattggcttcatactgtttt

SEQ ID NO: 2660015 - DNA, 25 bp, Homo sapien
caattggcgagaacttgcaggctgt

SEQ ID NO: 2660016 - DNA, 25 bp, Homo sapien
catgggataggtcaagaatgtctcc

SEQ ID NO: 2660017 - DNA, 25 bp, Homo sapien
caggctgtactggtgattacgcaca

SEQ ID NO: 2660018 - DNA, 25 bp, Homo sapien
agctcatggagtgtgatgatatatc

SEQ ID NO: 2660019 - DNA, 25 bp, Homo sapien
ggtgtgtgagcaaggagctcatgga

SEQ ID NO: 2660020 - DNA, 25 bp, Homo sapien
ctttccacatgctcatggggtgtgt

SEQ ID NO: 2660021 - DNA, 25 bp, Homo sapien
tccacatgctcatggggtgtgtgag

SEQ ID NO: 2660022 - DNA, 25 bp, Homo sapien
gcaagcttgtatcgattgaaccggg

SEQ ID NO: 2660023 - DNA, 25 bp, Homo sapien
ttccaggcttcaacaggtcatgacc

SEQ ID NO: 2660024 - DNA, 25 bp, Homo sapien
tagcatgtaggcaaagaagagctcc

SEQ ID NO: 2660025 - DNA, 25 bp, Homo sapien
cagacaggatcacagtaagagagat

SEQ ID NO: 2660026 - DNA, 25 bp, Homo sapien
cggatgaacgtttggctggtgtcca

SEQ ID NO: 2660027 - DNA, 25 bp, Homo sapien
tcagtgtcgctgacttcatcgtgca

SEQ ID NO: 2660028 - DNA, 25 bp, Homo sapien
cgatcattctttcgatggcaaggtt

SEQ ID NO: 2660029 - DNA, 25 bp, Homo sapien
gccctccacgatcattctttcgatg

SEQ ID NO: 2660030 - DNA, 25 bp, Homo sapien
ttgagcaacgcaagtttctcctggg

SEQ ID NO: 2660031 - DNA, 25 bp, Homo sapien
agctgcagagaatgtccgggccgct

SEQ ID NO: 2660032 - DNA, 25 bp, Homo sapien
ggaggagcgtccagtcagaatgtaa

SEQ ID NO: 2660033 - DNA, 25 bp, Homo sapien
tatcgtcagcacttggcactgccac

SEQ ID NO: 2660034 - DNA, 25 bp, Homo sapien
aattatatcgtgtggggcggatccg

SEQ ID NO: 2660035 - DNA, 25 bp, Homo sapien
tcaaattatatcgtgtggggcggat

SEQ ID NO: 2660036 - DNA, 25 bp, Homo sapien
gggcggatccggaagtgctgatgaa

SEQ ID NO: 2660037 - DNA, 25 bp, Homo sapien
cggatccggaagtgctgatgaaaaa

SEQ ID NO: 2660038 - DNA, 25 bp, Homo sapien
caaagcgtggcaagtgtccatcaga

SEQ ID NO: 2660039 - DNA, 25 bp, Homo sapien
tttcatctggcaacgggagttacca

SEQ ID NO: 2660040 - DNA, 25 bp, Homo sapien
taaaaggctccttcgaggtatctga

SEQ ID NO: 2660041 - DNA, 25 bp, Homo sapien
agagagaattccttaagtgctgccc

SEQ ID NO: 2660042 - DNA, 25 bp, Homo sapien
cagaagtgccttaaacatgtggtac

SEQ ID NO: 2660043 - DNA, 25 bp, Homo sapien
gaaatattcatagctgacagaagtg

SEQ ID NO: 2660044 - DNA, 25 bp, Homo sapien
catatgggcatgaataaagggagaa

SEQ ID NO: 2660045 - DNA, 25 bp, Homo sapien
cattcagtatttgaccttccagcat

SEQ ID NO: 2660046 - DNA, 25 bp, Homo sapien
tctataatatagtcttctgtatcct

SEQ ID NO: 2660047 - DNA, 25 bp, Homo sapien
tccaacagactaataatgggaaacc

SEQ ID NO: 2660048 - DNA, 25 bp, Homo sapien
aaaacattcaagagttgctgatgcc

SEQ ID NO: 2660049 - DNA, 25 bp, Homo sapien
tctttcagatgatctggatgacgta

SEQ ID NO: 2660050 - DNA, 25 bp, Homo sapien
caaagacaacgaacccaggcgaact

SEQ ID NO: 2660051 - DNA, 25 bp, Homo sapien
ccctctcaacggaaggtacttgaat

SEQ ID NO: 2660052 - DNA, 25 bp, Homo sapien
gaagcttccctcctgaacttcttgt

SEQ ID NO: 2660053 - DNA, 25 bp, Homo sapien
tgtaaataagaagcattgtctctct

SEQ ID NO: 2660054 - DNA, 25 bp, Homo sapien
ggaagtggcttaagcagtagaaagc

SEQ ID NO: 2660055 - DNA, 25 bp, Homo sapien
caggaagtggcttaagcagtagaaa

SEQ ID NO: 2660056 - DNA, 25 bp, Homo sapien
gaagtggcttaagcagtagaaagct

SEQ ID NO: 2660057 - DNA, 25 bp, Homo sapien
aagtggcttaagcagtagaaagctg

SEQ ID NO: 2660058 - DNA, 25 bp, Homo sapien
agtcatcatcgcttgcatctggctc

SEQ ID NO: 2660059 - DNA, 25 bp, Homo sapien
gcttgcatctggctcctcaatcaat

SEQ ID NO: 2660060 - DNA, 25 bp, Homo sapien
caatcaatgtgcagtctattagaga

SEQ ID NO: 2660061 - DNA, 25 bp, Homo sapien
tctattagagacagaaccccacctg

SEQ ID NO: 2660062 - DNA, 25 bp, Homo sapien
ccaaacacttgcccagaacctttag

SEQ ID NO: 2660063 - DNA, 25 bp, Homo sapien
ctttctcctggcgtgagggtgctaa

SEQ ID NO: 2660064 - DNA, 25 bp, Homo sapien
gactgatgtcactcatccaggcagc

SEQ ID NO: 2660065 - DNA, 25 bp, Homo sapien
cctggcgtgagggtgctaacaagac

SEQ ID NO: 2660066 - DNA, 25 bp, Homo sapien
ctgactgatgtcactcatccaggca

SEQ ID NO: 2660067 - DNA, 25 bp, Homo sapien
tgcacaatacctgacagcacatggt

SEQ ID NO: 2660068 - DNA, 25 bp, Homo sapien
gcaagaaccatggtcgtattcctgg

SEQ ID NO: 2660069 - DNA, 25 bp, Homo sapien
gccattgaagccatcctgagggtat

SEQ ID NO: 2660070 - DNA, 25 bp, Homo sapien
gagcctgcctattctccctgagagc

SEQ ID NO: 2660071 - DNA, 25 bp, Homo sapien
gattgtagcaatactcaggaaccac

SEQ ID NO: 2660072 - DNA, 25 bp, Homo sapien
ggttgagaccattagccacttgcac

SEQ ID NO: 2660073 - DNA, 25 bp, Homo sapien
cactttttgctagaggcgccaacag

SEQ ID NO: 2660074 - DNA, 25 bp, Homo sapien
tacaatacagtagcttagcaaggtg

SEQ ID NO: 2660075 - DNA, 25 bp, Homo sapien
tacgtatgttcacaaaagccccaag

SEQ ID NO: 2660076 - DNA, 25 bp, Homo sapien
caagtgttgcgagtgacttctccac

SEQ ID NO: 2660077 - DNA, 25 bp, Homo sapien
agaccagcggtctactgtgttgcca

SEQ ID NO: 2660078 - DNA, 25 bp, Homo sapien
gaagcagctggtctttggacaagtg

SEQ ID NO: 2660079 - DNA, 25 bp, Homo sapien
tcttaatcatctcactagctatggt

SEQ ID NO: 2660080 - DNA, 25 bp, Homo sapien
ccagaaatgtatattgggccttcta

SEQ ID NO: 2660081 - DNA, 25 bp, Homo sapien
tccatagttttacctcgacgtgtct

SEQ ID NO: 2660082 - DNA, 25 bp, Homo sapien
taatgagtatgtaatgttgtggtcc

SEQ ID NO: 2660083 - DNA, 25 bp, Homo sapien
ttaatcatatgtggcacagtgactt

SEQ ID NO: 2660084 - DNA, 25 bp, Homo sapien
tgtggcacagtgactttggaattct

SEQ ID NO: 2660085 - DNA, 25 bp, Homo sapien
ggaattctcttcaaacactatagtc

SEQ ID NO: 2660086 - DNA, 25 bp, Homo sapien
cattacatcgtatattgtccacaca

SEQ ID NO: 2660087 - DNA, 25 bp, Homo sapien
ctgtcagtcgttccaagaggcgctc

SEQ ID NO: 2660088 - DNA, 25 bp, Homo sapien
tatgtcggagagtttccccagcacc

SEQ ID NO: 2660089 - DNA, 25 bp, Homo sapien
tccacgctggcataacggatctggg

SEQ ID NO: 2660090 - DNA, 25 bp, Homo sapien
taagaaaccgcaagtctgtcagtcg

SEQ ID NO: 2660091 - DNA, 25 bp, Homo sapien
ggaagagaatttgcgacacagacgt

SEQ ID NO: 2660092 - DNA, 25 bp, Homo sapien
cggggaagagaatttgcgacacaga

SEQ ID NO: 2660093 - DNA, 25 bp, Homo sapien
agagaatttgcgacacagacgtggg

SEQ ID NO: 2660094 - DNA, 25 bp, Homo sapien
cgacacagacgtggggatttgccat

SEQ ID NO: 2660095 - DNA, 25 bp, Homo sapien
ctttgagttcaagggagaagtcaaa

SEQ ID NO: 2660096 - DNA, 25 bp, Homo sapien
gggagaagtcaaagacagctttctg

SEQ ID NO: 2660097 - DNA, 25 bp, Homo sapien
aagtcaaagacagctttctggccct

SEQ ID NO: 2660098 - DNA, 25 bp, Homo sapien
gagttcaagggagaagtcaaagaca

SEQ ID NO: 2660099 - DNA, 25 bp, Homo sapien
tgctggaagttgtcaggtccaatgc

SEQ ID NO: 2660100 - DNA, 25 bp, Homo sapien
gaagttgtcaggtccaatgctccta

SEQ ID NO: 2660101 - DNA, 25 bp, Homo sapien
agtgtgtggtggtggagacgcagcg

SEQ ID NO: 2660102 - DNA, 25 bp, Homo sapien
ctggaagttgtcaggtccaatgctc

SEQ ID NO: 2660103 - DNA, 25 bp, Homo sapien
tatcgacattctcttctaccgttcc

SEQ ID NO: 2660104 - DNA, 25 bp, Homo sapien
ccgttcccgggctttgctctggaga

SEQ ID NO: 2660105 - DNA, 25 bp, Homo sapien
gaatacttcgttttagcttgttaca

SEQ ID NO: 2660106 - DNA, 25 bp, Homo sapien
tgttacacagatccacgcgtgggtt

SEQ ID NO: 2660107 - DNA, 25 bp, Homo sapien
gtggaatctggatatctgagtctgg

SEQ ID NO: 2660108 - DNA, 25 bp, Homo sapien
tggaatctggatatctgagtctggc

SEQ ID NO: 2660109 - DNA, 25 bp, Homo sapien
tttttgttgagaacccatcactggg

SEQ ID NO: 2660110 - DNA, 25 bp, Homo sapien
aggtgaaagttctgtggtgtccgct

SEQ ID NO: 2660111 - DNA, 25 bp, Homo sapien
tccaggctgtcgatagcggaggtgc

SEQ ID NO: 2660112 - DNA, 25 bp, Homo sapien
tgagggggatctgcaaggtgaaagt

SEQ ID NO: 2660113 - DNA, 25 bp, Homo sapien
tccgctgcaggggagctttccactc

SEQ ID NO: 2660114 - DNA, 25 bp, Homo sapien
ttctgagtccctcttgagctcttac

SEQ ID NO: 2660115 - DNA, 25 bp, Homo sapien
atttctgagtccctcttgagctctt

SEQ ID NO: 2660116 - DNA, 25 bp, Homo sapien
ctatttctgagtccctcttgagctc

SEQ ID NO: 2660117 - DNA, 25 bp, Homo sapien
tttctgagtccctcttgagctctta

SEQ ID NO: 2660118 - DNA, 25 bp, Homo sapien
aaagcagaagccggtgaaacagagc

SEQ ID NO: 2660119 - DNA, 25 bp, Homo sapien
gcaaaagcagaagccggtgaaacag

SEQ ID NO: 2660120 - DNA, 25 bp, Homo sapien
gcagaagccggtgaaacagagcagt

SEQ ID NO: 2660121 - DNA, 25 bp, Homo sapien
cagtgggcattgtccgccgtctgtc

SEQ ID NO: 2660122 - DNA, 25 bp, Homo sapien
caggagccagctcgctgaagaaggg

SEQ ID NO: 2660123 - DNA, 25 bp, Homo sapien
ccagctcgctgaagaagggttttct

SEQ ID NO: 2660124 - DNA, 25 bp, Homo sapien
agccagctcgctgaagaagggtttt

SEQ ID NO: 2660125 - DNA, 25 bp, Homo sapien
accaggagccagctcgctgaagaag

SEQ ID NO: 2660126 - DNA, 25 bp, Homo sapien
ctggatgcatccgggctggcaattc

SEQ ID NO: 2660127 - DNA, 25 bp, Homo sapien
ctttgctgagaagagacagtaatag

SEQ ID NO: 2660128 - DNA, 25 bp, Homo sapien
gaagagacagtaatagaagagagca

SEQ ID NO: 2660129 - DNA, 25 bp, Homo sapien
cagtaatagaagagagcagcctgca

SEQ ID NO: 2660130 - DNA, 25 bp, Homo sapien
gctgagaagagacagtaatagaaga

SEQ ID NO: 2660131 - DNA, 25 bp, Homo sapien
caatccactaacaatttctcctatg

SEQ ID NO: 2660132 - DNA, 25 bp, Homo sapien
gctgaattacactgatacctttaca

SEQ ID NO: 2660133 - DNA, 25 bp, Homo sapien
tactgtactatcttgctaactgtag

SEQ ID NO: 2660134 - DNA, 25 bp, Homo sapien
tatgcatgtagccatccaatttccc

SEQ ID NO: 2660135 - DNA, 25 bp, Homo sapien
tttagtggaaaatggccgctcaatg

SEQ ID NO: 2660136 - DNA, 25 bp, Homo sapien
aaaatggccgctcaatgctcaatgt

SEQ ID NO: 2660137 - DNA, 25 bp, Homo sapien
agtgttaacaagtcgatttctatcg

SEQ ID NO: 2660138 - DNA, 25 bp, Homo sapien
gtcgatttctatcgttttagtggaa

SEQ ID NO: 2660139 - DNA, 25 bp, Homo sapien
cggattggctccgcctgtctttcat

SEQ ID NO: 2660140 - DNA, 25 bp, Homo sapien
gctgcggattggctccgcctgtctt

SEQ ID NO: 2660141 - DNA, 25 bp, Homo sapien
tggcaggctgcggattggctccgcc

SEQ ID NO: 2660142 - DNA, 25 bp, Homo sapien
ggaaccctccacactggcaggctgc

SEQ ID NO: 2660143 - DNA, 25 bp, Homo sapien
ggatcatcccgtctcttcactcggg

SEQ ID NO: 2660144 - DNA, 25 bp, Homo sapien
actccatactgccaggatcatcccg

SEQ ID NO: 2660145 - DNA, 25 bp, Homo sapien
aatggtgctaacagctcagtgtggt

SEQ ID NO: 2660146 - DNA, 25 bp, Homo sapien
tggtgctaacagctcagtgtggtga

SEQ ID NO: 2660147 - DNA, 25 bp, Homo sapien
ctttccatcagaacttgccagggga

SEQ ID NO: 2660148 - DNA, 25 bp, Homo sapien
tttccatcagaacttgccaggggag

SEQ ID NO: 2660149 - DNA, 25 bp, Homo sapien
ttccatcagaacttgccaggggagg

SEQ ID NO: 2660150 - DNA, 25 bp, Homo sapien
tccatcagaacttgccaggggaggc

SEQ ID NO: 2660151 - DNA, 25 bp, Homo sapien
ttttatgctcgtatagaaatgcaac

SEQ ID NO: 2660152 - DNA, 25 bp, Homo sapien
gtcatcagcttttatgctcgtatag

SEQ ID NO: 2660153 - DNA, 25 bp, Homo sapien
taattatcagccctcccatcgctgc

SEQ ID NO: 2660154 - DNA, 25 bp, Homo sapien
tgttcctgttggttctatgtaatta

SEQ ID NO: 2660155 - DNA, 25 bp, Homo sapien
atagaggaagtttctatccgagggc

SEQ ID NO: 2660156 - DNA, 25 bp, Homo sapien
tagaggaagtttctatccgagggcc

SEQ ID NO: 2660157 - DNA, 25 bp, Homo sapien
agggcccccaaacaaatccttgcat

SEQ ID NO: 2660158 - DNA, 25 bp, Homo sapien
aatccttgcattttgctgacataaa

SEQ ID NO: 2660159 - DNA, 25 bp, Homo sapien
catgttctctcggtgttgttaaagc

SEQ ID NO: 2660160 - DNA, 25 bp, Homo sapien
gacgttcagaactcgattggtagcc

SEQ ID NO: 2660161 - DNA, 25 bp, Homo sapien
tagccgttctccgtataataaactc

SEQ ID NO: 2660162 - DNA, 25 bp, Homo sapien
tgtgcgtgctttgagacccagtgac

SEQ ID NO: 2660163 - DNA, 25 bp, Homo sapien
ggtaacagcatttggcctgcttgaa

SEQ ID NO: 2660164 - DNA, 25 bp, Homo sapien
cctgcttgaaggtctgggtttggac

SEQ ID NO: 2660165 - DNA, 25 bp, Homo sapien
ggtttggaccagatgccgctttcac

SEQ ID NO: 2660166 - DNA, 25 bp, Homo sapien
caaggttatctctatcaagagcagc

SEQ ID NO: 2660167 - DNA, 25 bp, Homo sapien
tggaggagggatgtcgcctgcccat

SEQ ID NO: 2660168 - DNA, 25 bp, Homo sapien
aatcgaggcgcccacaagatggcgc

SEQ ID NO: 2660169 - DNA, 25 bp, Homo sapien
gctcccgggtcagcattggctctgg

SEQ ID NO: 2660170 - DNA, 25 bp, Homo sapien
ccttctcggaggcagcaatcgaggc

SEQ ID NO: 2660171 - DNA, 25 bp, Homo sapien
gacaagtcaggaaccataatctcat

SEQ ID NO: 2660172 - DNA, 25 bp, Homo sapien
ggaaccataatctcatggtctcccg

SEQ ID NO: 2660173 - DNA, 25 bp, Homo sapien
ccagcatcagacaagtcaggaacca

SEQ ID NO: 2660174 - DNA, 25 bp, Homo sapien
tcatggtctcccgtcacatatcggc

SEQ ID NO: 2660175 - DNA, 25 bp, Homo sapien
taaaacacgtgcaggcagcagagag

SEQ ID NO: 2660176 - DNA, 25 bp, Homo sapien
tcacaaattgtagacaatgcaagtc

SEQ ID NO: 2660177 - DNA, 25 bp, Homo sapien
ttttgtacctcagttgggtggcaga

SEQ ID NO: 2660178 - DNA, 25 bp, Homo sapien
cattgttaattgcaacgaatcaggt

SEQ ID NO: 2660179 - DNA, 25 bp, Homo sapien
actgtgacataccagtatctcaaag

SEQ ID NO: 2660180 - DNA, 25 bp, Homo sapien
ttctggaccatgagtaagatcagta

SEQ ID NO: 2660181 - DNA, 25 bp, Homo sapien
aagggccaatttaattgcctggctt

SEQ ID NO: 2660182 - DNA, 25 bp, Homo sapien
ggcttttttctggaccatgagtaag

SEQ ID NO: 2660183 - DNA, 25 bp, Homo sapien
gtctgggtctcgcaaaacttcttct

SEQ ID NO: 2660184 - DNA, 25 bp, Homo sapien
tattcgcggcggctttcctttcttg

SEQ ID NO: 2660185 - DNA, 25 bp, Homo sapien
ttagttcattgttgagttcgaaatc

SEQ ID NO: 2660186 - DNA, 25 bp, Homo sapien
tctagcaaatttaggacattcatct

SEQ ID NO: 2660187 - DNA, 25 bp, Homo sapien
ttgaattatatcctctaattttagg

SEQ ID NO: 2660188 - DNA, 25 bp, Homo sapien
tgaattatatcctctaattttaggt

SEQ ID NO: 2660189 - DNA, 25 bp, Homo sapien
ctgccagctccatggccgacaagga

SEQ ID NO: 2660190 - DNA, 25 bp, Homo sapien
gctccatggccgacaaggactcaaa

SEQ ID NO: 2660191 - DNA, 25 bp, Homo sapien
caaggactcaaagcattcggccttc

SEQ ID NO: 2660192 - DNA, 25 bp, Homo sapien
agcattcggccttcatgcagtcagt

SEQ ID NO: 2660193 - DNA, 25 bp, Homo sapien
agggcagcattcctgatcattcact

SEQ ID NO: 2660194 - DNA, 25 bp, Homo sapien
gcattcctgatcattcacttcattc

SEQ ID NO: 2660195 - DNA, 25 bp, Homo sapien
gggcagcattcctgatcattcactt

SEQ ID NO: 2660196 - DNA, 25 bp, Homo sapien
agcattcctgatcattcacttcatt

SEQ ID NO: 2660197 - DNA, 25 bp, Homo sapien
gttctttcgtttttatccagcttca

SEQ ID NO: 2660198 - DNA, 25 bp, Homo sapien
ttttcataatgtaaggagttctttc

SEQ ID NO: 2660199 - DNA, 25 bp, Homo sapien
tttcgtttttatccagcttcatcca

SEQ ID NO: 2660200 - DNA, 25 bp, Homo sapien
tcataatgtaaggagttctttcgtt

SEQ ID NO: 2660201 - DNA, 25 bp, Homo sapien
cataaacaggtaaatgccatgcagc

SEQ ID NO: 2660202 - DNA, 25 bp, Homo sapien
taaggcaatctgagcctaggtaggt

SEQ ID NO: 2660203 - DNA, 25 bp, Homo sapien
ggagggtcgcagatacataaacagg

SEQ ID NO: 2660204 - DNA, 25 bp, Homo sapien
tgccatgcagcgaaacacaaagttg

SEQ ID NO: 2660205 - DNA, 25 bp, Homo sapien
tccagcacgccgttgtagttgtgca

SEQ ID NO: 2660206 - DNA, 25 bp, Homo sapien
ccatttctcgatggcgttggcacgg

SEQ ID NO: 2660207 - DNA, 25 bp, Homo sapien
tgtttaaggccgaggtgatctccag

SEQ ID NO: 2660208 - DNA, 25 bp, Homo sapien
aggcatcggcagatgtccgccactg

SEQ ID NO: 2660209 - DNA, 25 bp, Homo sapien
gcagcctgtacccaatgaatcatca

SEQ ID NO: 2660210 - DNA, 25 bp, Homo sapien
tctgagtgaaaatgacaggcatagg

SEQ ID NO: 2660211 - DNA, 25 bp, Homo sapien
caggcataggcaagctgagattaat

SEQ ID NO: 2660212 - DNA, 25 bp, Homo sapien
ttttggccccacagagtttgcaccc

SEQ ID NO: 2660213 - DNA, 25 bp, Homo sapien
tggaggtggcactctgtagattccc

SEQ ID NO: 2660214 - DNA, 25 bp, Homo sapien
catacctagatcttccggtctggga

SEQ ID NO: 2660215 - DNA, 25 bp, Homo sapien
agacagtttttaggccatgtcagca

SEQ ID NO: 2660216 - DNA, 25 bp, Homo sapien
gacttaggcttggtttcctgccaca

SEQ ID NO: 2660217 - DNA, 25 bp, Homo sapien
gctgtacagcggatgttgtcatcaa

SEQ ID NO: 2660218 - DNA, 25 bp, Homo sapien
tgcagagaagggacagctgtacagc

SEQ ID NO: 2660219 - DNA, 25 bp, Homo sapien
catcaaaggtgtctgaagcagggta

SEQ ID NO: 2660220 - DNA, 25 bp, Homo sapien
gttccagagtgcagattatcaggcc

SEQ ID NO: 2660221 - DNA, 25 bp, Homo sapien
tactttgtctcacctggagaggagc

SEQ ID NO: 2660222 - DNA, 25 bp, Homo sapien
gatggcatgcttggtccagggctaa

SEQ ID NO: 2660223 - DNA, 25 bp, Homo sapien
tcctgagaggcaaagggctgtcttc

SEQ ID NO: 2660224 - DNA, 25 bp, Homo sapien
gaagaacttggaatgcccaggttga

SEQ ID NO: 2660225 - DNA, 25 bp, Homo sapien
agtcttttgaagtttgtccattaga

SEQ ID NO: 2660226 - DNA, 25 bp, Homo sapien
tcttttgaagtttgtccattagagc

SEQ ID NO: 2660227 - DNA, 25 bp, Homo sapien
cttttgaagtttgtccattagagct

SEQ ID NO: 2660228 - DNA, 25 bp, Homo sapien
ttgaagtttgtccattagagctttt

SEQ ID NO: 2660229 - DNA, 25 bp, Homo sapien
tttggagaaattgacaaggccttcc

SEQ ID NO: 2660230 - DNA, 25 bp, Homo sapien
gagaaattgacaaggccttcctcag

SEQ ID NO: 2660231 - DNA, 25 bp, Homo sapien
catcccaagataaggaactgcagga

SEQ ID NO: 2660232 - DNA, 25 bp, Homo sapien
caataaatgccaggtctgtcaagta

SEQ ID NO: 2660233 - DNA, 25 bp, Homo sapien
ggaactggcgtatctctctgatgat

SEQ ID NO: 2660234 - DNA, 25 bp, Homo sapien
ctttggctgatgatctattctgtag

SEQ ID NO: 2660235 - DNA, 25 bp, Homo sapien
tattctgtaggaagtctgctggaac

SEQ ID NO: 2660236 - DNA, 25 bp, Homo sapien
gtctgctggaactggcgtatctctc

SEQ ID NO: 2660237 - DNA, 25 bp, Homo sapien
ctttgtcaagcaagtactgtgcgac

SEQ ID NO: 2660238 - DNA, 25 bp, Homo sapien
gacagctcatatagcgtatcttcat

SEQ ID NO: 2660239 - DNA, 25 bp, Homo sapien
cagggagtcgaggttcaatttttag

SEQ ID NO: 2660240 - DNA, 25 bp, Homo sapien
cttcatctatgataaggtctttgtc

SEQ ID NO: 2660241 - DNA, 25 bp, Homo sapien
cctagaagattggtaggtgtgccca

SEQ ID NO: 2660242 - DNA, 25 bp, Homo sapien
gctgtaccgtgataggcaaggcata

SEQ ID NO: 2660243 - DNA, 25 bp, Homo sapien
tcccttatgtaaaacgtgccaccag

SEQ ID NO: 2660244 - DNA, 25 bp, Homo sapien
catctctgtagaggaagtgtcagct

SEQ ID NO: 2660245 - DNA, 25 bp, Homo sapien
taatgggacttggtatgagagccac

SEQ ID NO: 2660246 - DNA, 25 bp, Homo sapien
ttaaaagctgcccaatcgctgctgg

SEQ ID NO: 2660247 - DNA, 25 bp, Homo sapien
tgttaggatccaaacagcccatgct

SEQ ID NO: 2660248 - DNA, 25 bp, Homo sapien
tcagatgacctcatgtgcggacagc

SEQ ID NO: 2660249 - DNA, 25 bp, Homo sapien
cttgaagccggagcctcccacgtcc

SEQ ID NO: 2660250 - DNA, 25 bp, Homo sapien
tcccacgtcctgctgagcgcacaca

SEQ ID NO: 2660251 - DNA, 25 bp, Homo sapien
acgtcctgctgagcgcacacagcca

SEQ ID NO: 2660252 - DNA, 25 bp, Homo sapien
ccacgtcctgctgagcgcacacagc

SEQ ID NO: 2660253 - DNA, 25 bp, Homo sapien
gattcactaccaaaaagaggccctg

SEQ ID NO: 2660254 - DNA, 25 bp, Homo sapien
tggctttagcgagtcaccattgcct

SEQ ID NO: 2660255 - DNA, 25 bp, Homo sapien
caaacttagcgtcaaaatacagcct

SEQ ID NO: 2660256 - DNA, 25 bp, Homo sapien
tttaaactgggcctggctattgggc

SEQ ID NO: 2660257 - DNA, 25 bp, Homo sapien
taaaactgcctccacttacctggag

SEQ ID NO: 2660258 - DNA, 25 bp, Homo sapien
taggactgaatatgagcggttgcaa

SEQ ID NO: 2660259 - DNA, 25 bp, Homo sapien
atagtttgagaagcccagcactgcc

SEQ ID NO: 2660260 - DNA, 25 bp, Homo sapien
tacaaatgtgtgagtctgctatgga

SEQ ID NO: 2660261 - DNA, 25 bp, Homo sapien
agtgggtgaatgacactgatatgtt

SEQ ID NO: 2660262 - DNA, 25 bp, Homo sapien
cttccaggcggtcagcgggtcatgt

SEQ ID NO: 2660263 - DNA, 25 bp, Homo sapien
tacaggcttccaggcggtcagcggg

SEQ ID NO: 2660264 - DNA, 25 bp, Homo sapien
gacactgatatgtttcaggtaggga

SEQ ID NO: 2660265 - DNA, 25 bp, Homo sapien
gaagcagaaccaggggatggctctt

SEQ ID NO: 2660266 - DNA, 25 bp, Homo sapien
tcttggggccttccttcgcaggaac

SEQ ID NO: 2660267 - DNA, 25 bp, Homo sapien
cttccttcgcaggaacaccactcac

SEQ ID NO: 2660268 - DNA, 25 bp, Homo sapien
ggctcttggggccttccttcgcagg

SEQ ID NO: 2660269 - DNA, 25 bp, Homo sapien
ggaggactgtggatgccgtgtgccc

SEQ ID NO: 2660270 - DNA, 25 bp, Homo sapien
tttgtctcccaaggaatggagctgc

SEQ ID NO: 2660271 - DNA, 25 bp, Homo sapien
tggtctctcaggtatgctgagtgtt

SEQ ID NO: 2660272 - DNA, 25 bp, Homo sapien
gagagttccagctgcctcagatcct

SEQ ID NO: 2660273 - DNA, 25 bp, Homo sapien
caaggctccagtcgggtggacaatc

SEQ ID NO: 2660274 - DNA, 25 bp, Homo sapien
gcaaggctccagtcgggtggacaat

SEQ ID NO: 2660275 - DNA, 25 bp, Homo sapien
ctggaaggcacagtgtaagaagctt

SEQ ID NO: 2660276 - DNA, 25 bp, Homo sapien
cagtgtaagaagcttggcaaggctc

SEQ ID NO: 2660277 - DNA, 25 bp, Homo sapien
ttctggaattcacgaggagcaggaa

SEQ ID NO: 2660278 - DNA, 25 bp, Homo sapien
attctggaattcacgaggagcagga

SEQ ID NO: 2660279 - DNA, 25 bp, Homo sapien
cggcagacggttgacatctcccctg

SEQ ID NO: 2660280 - DNA, 25 bp, Homo sapien
agaaaacttcccagtcaccggcaga

SEQ ID NO: 2660281 - DNA, 25 bp, Homo sapien
ggcttgtgacttctgttagtgaaaa

SEQ ID NO: 2660282 - DNA, 25 bp, Homo sapien
tgtggaggacttgcagaaaacttcc

SEQ ID NO: 2660283 - DNA, 25 bp, Homo sapien
tggcaggtacgggtccacaaggacc

SEQ ID NO: 2660284 - DNA, 25 bp, Homo sapien
ggaccacacttccaatactggcagg

SEQ ID NO: 2660285 - DNA, 25 bp, Homo sapien
tatggtgagcagttcggtgagagga

SEQ ID NO: 2660286 - DNA, 25 bp, Homo sapien
tgtgggctccacttctgtagctaga

SEQ ID NO: 2660287 - DNA, 25 bp, Homo sapien
tcataacgtactgaactgttctgtt

SEQ ID NO: 2660288 - DNA, 25 bp, Homo sapien
tatcataacgtactgaactgttctg

SEQ ID NO: 2660289 - DNA, 25 bp, Homo sapien
gcattatcataacgtactgaactgt

SEQ ID NO: 2660290 - DNA, 25 bp, Homo sapien
ttctgagcattatcataacgtactg

SEQ ID NO: 2660291 - DNA, 25 bp, Homo sapien
aagcattgcggccagttagcaactt

SEQ ID NO: 2660292 - DNA, 25 bp, Homo sapien
gccagttagcaacttagaaaagata

SEQ ID NO: 2660293 - DNA, 25 bp, Homo sapien
cagcagagaagcattgcggccagtt

SEQ ID NO: 2660294 - DNA, 25 bp, Homo sapien
tgcggccagttagcaacttagaaaa

SEQ ID NO: 2660295 - DNA, 25 bp, Homo sapien
caggtacccggtggtcaggacactg

SEQ ID NO: 2660296 - DNA, 25 bp, Homo sapien
ggaaatagcctaggctgctcccgga

SEQ ID NO: 2660297 - DNA, 25 bp, Homo sapien
gcacacactttctgccggttcagca

SEQ ID NO: 2660298 - DNA, 25 bp, Homo sapien
cttggaggaaatagcctaggctgct

SEQ ID NO: 2660299 - DNA, 25 bp, Homo sapien
caccttgttgcgaagcttggcataa

SEQ ID NO: 2660300 - DNA, 25 bp, Homo sapien
ttgggtgtcaccttgttgcgaagct

SEQ ID NO: 2660301 - DNA, 25 bp, Homo sapien
cagcgtgtagccgttgggtgtcacc

SEQ ID NO: 2660302 - DNA, 25 bp, Homo sapien
tgaggcactcggccatgcagttgtt

SEQ ID NO: 2660303 - DNA, 25 bp, Homo sapien
ataggactcctcgtcaccagccacc

SEQ ID NO: 2660304 - DNA, 25 bp, Homo sapien
ctcataggactcctcgtcaccagcc

SEQ ID NO: 2660305 - DNA, 25 bp, Homo sapien
cctggaaccagcagccaatagtttt

SEQ ID NO: 2660306 - DNA, 25 bp, Homo sapien
tggaaccagcagccaatagttttac

SEQ ID NO: 2660307 - DNA, 25 bp, Homo sapien
ctggaaccagcagccaatagtttta

SEQ ID NO: 2660308 - DNA, 25 bp, Homo sapien
aggatgccgaggtcatgggatttat

SEQ ID NO: 2660309 - DNA, 25 bp, Homo sapien
gggatttatccaagagacttagtga

SEQ ID NO: 2660310 - DNA, 25 bp, Homo sapien
gacttagtgaattcagtagtctggg

SEQ ID NO: 2660311 - DNA, 25 bp, Homo sapien
tgttccagccgaccaccctgtgctt

SEQ ID NO: 2660312 - DNA, 25 bp, Homo sapien
gatgacggggtcaaaaaggtcagca

SEQ ID NO: 2660313 - DNA, 25 bp, Homo sapien
gggtcatagccgttgtgtcttagtt

SEQ ID NO: 2660314 - DNA, 25 bp, Homo sapien
gatccgttgtgtgcttcatcaccct

SEQ ID NO: 2660315 - DNA, 25 bp, Homo sapien
ctttgatgcatccagatccgttgtg

SEQ ID NO: 2660316 - DNA, 25 bp, Homo sapien
ctcaggagtgccagcttcgtgggga

SEQ ID NO: 2660317 - DNA, 25 bp, Homo sapien
ggctcaggagtgccagcttcgtggg

SEQ ID NO: 2660318 - DNA, 25 bp, Homo sapien
agtgccagcttcgtggggaaggaga

SEQ ID NO: 2660319 - DNA, 25 bp, Homo sapien
caggagtgccagcttcgtggggaag

SEQ ID NO: 2660320 - DNA, 25 bp, Homo sapien
actgtggccagcctcggaccatggt

SEQ ID NO: 2660321 - DNA, 25 bp, Homo sapien
ctgccaagcagactgtggggtcact

SEQ ID NO: 2660322 - DNA, 25 bp, Homo sapien
gtcactgtggccagcctcggaccat

SEQ ID NO: 2660323 - DNA, 25 bp, Homo sapien
ctgtggccagcctcggaccatggtc

SEQ ID NO: 2660324 - DNA, 25 bp, Homo sapien
acagcttgtagtagcggccagccag

SEQ ID NO: 2660325 - DNA, 25 bp, Homo sapien
agtgatggccacgttctctacctcc

SEQ ID NO: 2660326 - DNA, 25 bp, Homo sapien
taatgctcgtcgaactgcccttggg

SEQ ID NO: 2660327 - DNA, 25 bp, Homo sapien
gcacccgagaagacagcacgtaatg

SEQ ID NO: 2660328 - DNA, 25 bp, Homo sapien
cccagctagggtaaggactgagcag

SEQ ID NO: 2660329 - DNA, 25 bp, Homo sapien
aggccttcctgtgcgggtcagagcc

SEQ ID NO: 2660330 - DNA, 25 bp, Homo sapien
gcaagctcccagctagggtaaggac

SEQ ID NO: 2660331 - DNA, 25 bp, Homo sapien
agaggccttcctgtgcgggtcagag

SEQ ID NO: 2660332 - DNA, 25 bp, Homo sapien
tggaaaccatcttctggacacagac

SEQ ID NO: 2660333 - DNA, 25 bp, Homo sapien
tatcaacaagctaggagatcctcca

SEQ ID NO: 2660334 - DNA, 25 bp, Homo sapien
ggcttgctccacaagagtcagggca

SEQ ID NO: 2660335 - DNA, 25 bp, Homo sapien
caccaggaaatgcagaggcttgctc

SEQ ID NO: 2660336 - DNA, 25 bp, Homo sapien
ccaaaagggataaagcagagaggag

SEQ ID NO: 2660337 - DNA, 25 bp, Homo sapien
aataaaggggacactggcttatcaa

SEQ ID NO: 2660338 - DNA, 25 bp, Homo sapien
gcacatgttaataaaggggacactg

SEQ ID NO: 2660339 - DNA, 25 bp, Homo sapien
gtcacgggccatcccagcacatgtt

SEQ ID NO: 2660340 - DNA, 25 bp, Homo sapien
gcatctggccagtcacgggccatcc

SEQ ID NO: 2660341 - DNA, 25 bp, Homo sapien
agagagaaatatggtactgagtgtt

SEQ ID NO: 2660342 - DNA, 25 bp, Homo sapien
taatgaagagagaaatatggtactg

SEQ ID NO: 2660343 - DNA, 25 bp, Homo sapien
tgaagagagaaatatggtactgagt

SEQ ID NO: 2660344 - DNA, 25 bp, Homo sapien
ctaatgaagagagaaatatggtact

SEQ ID NO: 2660345 - DNA, 25 bp, Homo sapien
ggtgtgatcctcctcatttatccag

SEQ ID NO: 2660346 - DNA, 25 bp, Homo sapien
ttagtccacgacagaatcgctcaaa

SEQ ID NO: 2660347 - DNA, 25 bp, Homo sapien
ccattgagattaccctggtgtgatc

SEQ ID NO: 2660348 - DNA, 25 bp, Homo sapien
caaatactcgtttcatattgcctcc

SEQ ID NO: 2660349 - DNA, 25 bp, Homo sapien
tttaataaatatccagaaatctcag

SEQ ID NO: 2660350 - DNA, 25 bp, Homo sapien
tatccagaaatctcagataacatct

SEQ ID NO: 2660351 - DNA, 25 bp, Homo sapien
aaatatccagaaatctcagataaca

SEQ ID NO: 2660352 - DNA, 25 bp, Homo sapien
taaatatccagaaatctcagataac

SEQ ID NO: 2660353 - DNA, 25 bp, Homo sapien
tgttccaaggttcgaaggacaggtc

SEQ ID NO: 2660354 - DNA, 25 bp, Homo sapien
gtatcctaggcgctcattccacatg

SEQ ID NO: 2660355 - DNA, 25 bp, Homo sapien
gacaccagctcgtagtcctgttcca

SEQ ID NO: 2660356 - DNA, 25 bp, Homo sapien
gagctttgggatcctaacgtggaca

SEQ ID NO: 2660357 - DNA, 25 bp, Homo sapien
aaagcagtcgcatctgagctgatcc

SEQ ID NO: 2660358 - DNA, 25 bp, Homo sapien
agggccactgggcacataacagtac

SEQ ID NO: 2660359 - DNA, 25 bp, Homo sapien
tcctccacaaagcagtcgcatctga

SEQ ID NO: 2660360 - DNA, 25 bp, Homo sapien
tgatcctggcccatcagggccactg

SEQ ID NO: 2660361 - DNA, 25 bp, Homo sapien
tacacatctgcgaccgcggcagtgt

SEQ ID NO: 2660362 - DNA, 25 bp, Homo sapien
gatcgaccaattctatctatgttgg

SEQ ID NO: 2660363 - DNA, 25 bp, Homo sapien
tttccaggatcttagaaaagcgtgg

SEQ ID NO: 2660364 - DNA, 25 bp, Homo sapien
tgttggaaatgtcgtacacatctgc

SEQ ID NO: 2660365 - DNA, 25 bp, Homo sapien
tctcttaggctgattttgttagttc

SEQ ID NO: 2660366 - DNA, 25 bp, Homo sapien
tagttcatgttaggaaagtgagaga

SEQ ID NO: 2660367 - DNA, 25 bp, Homo sapien
tgaaaacggctaggctgtttgcttt

SEQ ID NO: 2660368 - DNA, 25 bp, Homo sapien
gaggaggtctcgaattttgtgaaaa

SEQ ID NO: 2660369 - DNA, 25 bp, Homo sapien
cacactggctgatctaattgttttg

SEQ ID NO: 2660370 - DNA, 25 bp, Homo sapien
agagctgatagcacactggctgatc

SEQ ID NO: 2660371 - DNA, 25 bp, Homo sapien
tcctcagtgtacttactggtaggga

SEQ ID NO: 2660372 - DNA, 25 bp, Homo sapien
tattgataggcagtgaaatattcaa

SEQ ID NO: 2660373 - DNA, 25 bp, Homo sapien
tgatcccttccagtgttggtgagag

SEQ ID NO: 2660374 - DNA, 25 bp, Homo sapien
cattgaatgttagctctcaggcatc

SEQ ID NO: 2660375 - DNA, 25 bp, Homo sapien
tatgcataaggaaacttaggcccca

SEQ ID NO: 2660376 - DNA, 25 bp, Homo sapien
cactgccagtaggactctatcttgg

SEQ ID NO: 2660377 - DNA, 25 bp, Homo sapien
gacaccctcgtgttattctttggcc

SEQ ID NO: 2660378 - DNA, 25 bp, Homo sapien
tgagaacttgccacttagatggact

SEQ ID NO: 2660379 - DNA, 25 bp, Homo sapien
gaaggcagagatataagggtttctc

SEQ ID NO: 2660380 - DNA, 25 bp, Homo sapien
ggatctgaattctgacctgccacta

SEQ ID NO: 2660381 - DNA, 25 bp, Homo sapien
cagggcattgattaacaggaacagc

SEQ ID NO: 2660382 - DNA, 25 bp, Homo sapien
ttaatttgaatagaagcatctgcag

SEQ ID NO: 2660383 - DNA, 25 bp, Homo sapien
agggcattgattaacaggaacagca

SEQ ID NO: 2660384 - DNA, 25 bp, Homo sapien
gattaatttgaatagaagcatctgc

SEQ ID NO: 2660385 - DNA, 25 bp, Homo sapien
ggtaattgactccatcgatgactat

SEQ ID NO: 2660386 - DNA, 25 bp, Homo sapien
ctccatcgatgactatctgaacaag

SEQ ID NO: 2660387 - DNA, 25 bp, Homo sapien
cacaatccaccaggtaattgactcc

SEQ ID NO: 2660388 - DNA, 25 bp, Homo sapien
tccaccaggtaattgactccatcga

SEQ ID NO: 2660389 - DNA, 25 bp, Homo sapien
ccaaactgaggcagagggggtggca

SEQ ID NO: 2660390 - DNA, 25 bp, Homo sapien
ttgccaaactgaggcagagggggtg

SEQ ID NO: 2660391 - DNA, 25 bp, Homo sapien
caaactgaggcagagggggtggcac

SEQ ID NO: 2660392 - DNA, 25 bp, Homo sapien
tttttgccaaactgaggcagagggg

SEQ ID NO: 2660393 - DNA, 25 bp, Homo sapien
tatgtctgtcgtaccagcagacaga

SEQ ID NO: 2660394 - DNA, 25 bp, Homo sapien
tgtcgtaccagcagacagattattt

SEQ ID NO: 2660395 - DNA, 25 bp, Homo sapien
tagagatttatgtctgtcgtaccag

SEQ ID NO: 2660396 - DNA, 25 bp, Homo sapien
cgtaccagcagacagattatttata

SEQ ID NO: 2660397 - DNA, 25 bp, Homo sapien
tggatatgtgattctgggctgaaaa

SEQ ID NO: 2660398 - DNA, 25 bp, Homo sapien
tttgtctaacgttgacagtgtggtg

SEQ ID NO: 2660399 - DNA, 25 bp, Homo sapien
gatttgtctaacgttgacagtgtgg

SEQ ID NO: 2660400 - DNA, 25 bp, Homo sapien
ttgatttgtctaacgttgacagtgt

SEQ ID NO: 2660401 - DNA, 25 bp, Homo sapien
aagggggagtcaattttgggagcag

SEQ ID NO: 2660402 - DNA, 25 bp, Homo sapien
tgaatgcagttagtgcctcatcagt

SEQ ID NO: 2660403 - DNA, 25 bp, Homo sapien
catcagtcctgatgagttccaagta

SEQ ID NO: 2660404 - DNA, 25 bp, Homo sapien
gatgagttccaagtaattcaggccc

SEQ ID NO: 2660405 - DNA, 25 bp, Homo sapien
ctgcagtgttcacaaattgtgtcta

SEQ ID NO: 2660406 - DNA, 25 bp, Homo sapien
ggaaatcataccagatacgggcctt

SEQ ID NO: 2660407 - DNA, 25 bp, Homo sapien
tcataccagatacgggccttagact

SEQ ID NO: 2660408 - DNA, 25 bp, Homo sapien
agatacgggccttagactgtccatt

SEQ ID NO: 2660409 - DNA, 25 bp, Homo sapien
gaacaatgagaggtcttgcagttac

SEQ ID NO: 2660410 - DNA, 25 bp, Homo sapien
aacaagtggcaagatttgcaagctc

SEQ ID NO: 2660411 - DNA, 25 bp, Homo sapien
gcaagatttgcaagctctcctttat

SEQ ID NO: 2660412 - DNA, 25 bp, Homo sapien
caagtggcaagatttgcaagctctc

SEQ ID NO: 2660413 - DNA, 25 bp, Homo sapien
gtggcaagatttgcaagctctcctt

SEQ ID NO: 2660414 - DNA, 25 bp, Homo sapien
gattcttctgcctcagccgcccaag

SEQ ID NO: 2660415 - DNA, 25 bp, Homo sapien
agaaggagtttggctcttgtcgccc

SEQ ID NO: 2660416 - DNA, 25 bp, Homo sapien
tgagaaggagtttggctcttgtcgc

SEQ ID NO: 2660417 - DNA, 25 bp, Homo sapien
cgattcttctgcctcagccgcccaa

SEQ ID NO: 2660418 - DNA, 25 bp, Homo sapien
actcgtgggcgtcaatactgggctg

SEQ ID NO: 2660419 - DNA, 25 bp, Homo sapien
gaagagttcaatccgtgctgtctga

SEQ ID NO: 2660420 - DNA, 25 bp, Homo sapien
gcaggacgccgacacgaaaagatga

SEQ ID NO: 2660421 - DNA, 25 bp, Homo sapien
ttggagaccggaagcacatagtgcc

SEQ ID NO: 2660422 - DNA, 25 bp, Homo sapien
gggacccagcggctaagccttctgt

SEQ ID NO: 2660423 - DNA, 25 bp, Homo sapien
gctcagggacccagcggctaagcct

SEQ ID NO: 2660424 - DNA, 25 bp, Homo sapien
cacgcaagttccgccaggccagagg

SEQ ID NO: 2660425 - DNA, 25 bp, Homo sapien
cgaacgacgagaccctgcagctttg

SEQ ID NO: 2660426 - DNA, 25 bp, Homo sapien
cagcgcactcttcgctgaagtttat

SEQ ID NO: 2660427 - DNA, 25 bp, Homo sapien
gaagtttatgcgactgtcatagtgg

SEQ ID NO: 2660428 - DNA, 25 bp, Homo sapien
gaccgaagctgttcaaaaggaagta

SEQ ID NO: 2660429 - DNA, 25 bp, Homo sapien
cccacaggcggattccagggcggct

SEQ ID NO: 2660430 - DNA, 25 bp, Homo sapien
tgatgctcctgacccggtgtaggca

SEQ ID NO: 2660431 - DNA, 25 bp, Homo sapien
taacatttaggtcaacagcgactgc

SEQ ID NO: 2660432 - DNA, 25 bp, Homo sapien
taagacaagcatgggtggttagcca

SEQ ID NO: 2660433 - DNA, 25 bp, Homo sapien
gagtaacaggctatcccatacggcc

SEQ ID NO: 2660434 - DNA, 25 bp, Homo sapien
tatatgtggtactaactcgggccca

SEQ ID NO: 2660435 - DNA, 25 bp, Homo sapien
caggcaagggtctcttgttatatgt

SEQ ID NO: 2660436 - DNA, 25 bp, Homo sapien
cccatgatgttgcaggcaagggtct

SEQ ID NO: 2660437 - DNA, 25 bp, Homo sapien
tcttgttatatgtggtactaactcg

SEQ ID NO: 2660438 - DNA, 25 bp, Homo sapien
catttttgagggatagcctattggc

SEQ ID NO: 2660439 - DNA, 25 bp, Homo sapien
gcccattgtgaaccatctgtgaatt

SEQ ID NO: 2660440 - DNA, 25 bp, Homo sapien
gcttcaagttgtttacgctttggta

SEQ ID NO: 2660441 - DNA, 25 bp, Homo sapien
tctgtcttaggtattccatgaatcc

SEQ ID NO: 2660442 - DNA, 25 bp, Homo sapien
tctgctactagctaagtggcttcca

SEQ ID NO: 2660443 - DNA, 25 bp, Homo sapien
ccagagctggctaaggtatatatgt

SEQ ID NO: 2660444 - DNA, 25 bp, Homo sapien
taacgtaggttttgaagtcaggctg

SEQ ID NO: 2660445 - DNA, 25 bp, Homo sapien
ggccctggctcgtctttaattcctg

SEQ ID NO: 2660446 - DNA, 25 bp, Homo sapien
gaggacgaactctcgttttgtcacc

SEQ ID NO: 2660447 - DNA, 25 bp, Homo sapien
gcagcggttgatcacatggttcact

SEQ ID NO: 2660448 - DNA, 25 bp, Homo sapien
ctattggaaggtgaggataggtttt

SEQ ID NO: 2660449 - DNA, 25 bp, Homo sapien
tttccaagtaatagggacccacaca

SEQ ID NO: 2660450 - DNA, 25 bp, Homo sapien
taaggaccgatgcttagtataaggt

SEQ ID NO: 2660451 - DNA, 25 bp, Homo sapien
ttaacaacaggtcataacaagccat

SEQ ID NO: 2660452 - DNA, 25 bp, Homo sapien
tcttaagcggtcataacagtaaatg

SEQ ID NO: 2660453 - DNA, 25 bp, Homo sapien
tctatcctgataccaacagaaatgt

SEQ ID NO: 2660454 - DNA, 25 bp, Homo sapien
ttgggtcagacatttccattcaaat

SEQ ID NO: 2660455 - DNA, 25 bp, Homo sapien
gattcaaaccataagatagatagat

SEQ ID NO: 2660456 - DNA, 25 bp, Homo sapien
tatttcatagcaaaaagtatatcct

SEQ ID NO: 2660457 - DNA, 25 bp, Homo sapien
cctggccataagatatatttcatag

SEQ ID NO: 2660458 - DNA, 25 bp, Homo sapien
gcggcggggcaatctgcaattccat

SEQ ID NO: 2660459 - DNA, 25 bp, Homo sapien
tggacccacacctgtaacatatccc

SEQ ID NO: 2660460 - DNA, 25 bp, Homo sapien
gtaacatatcccagtgcccatgtct

SEQ ID NO: 2660461 - DNA, 25 bp, Homo sapien
ggcggggcaatctgcaattccatga

SEQ ID NO: 2660462 - DNA, 25 bp, Homo sapien
caagagccgggtctactttagcctt

SEQ ID NO: 2660463 - DNA, 25 bp, Homo sapien
caacagttcctattcagttgacaat

SEQ ID NO: 2660464 - DNA, 25 bp, Homo sapien
aatactaagtggcacactcgtaaca

SEQ ID NO: 2660465 - DNA, 25 bp, Homo sapien
ggcacactcgtaacaaattgtgtta

SEQ ID NO: 2660466 - DNA, 25 bp, Homo sapien
tcctattcagttgacaatacatatg

SEQ ID NO: 2660467 - DNA, 25 bp, Homo sapien
tccacaaacaaaacattttgcaaaa

SEQ ID NO: 2660468 - DNA, 25 bp, Homo sapien
cacaaacaaaacattttgcaaaagg

SEQ ID NO: 2660469 - DNA, 25 bp, Homo sapien
ttctccacaaacaaaacattttgca

SEQ ID NO: 2660470 - DNA, 25 bp, Homo sapien
tctccacaaacaaaacattttgcaa

SEQ ID NO: 2660471 - DNA, 25 bp, Homo sapien
caggacaagatctagacaggtgccc

SEQ ID NO: 2660472 - DNA, 25 bp, Homo sapien
catcagcatagagtcctttgggatt

SEQ ID NO: 2660473 - DNA, 25 bp, Homo sapien
cagcatagagtcctttgggattatc

SEQ ID NO: 2660474 - DNA, 25 bp, Homo sapien
gacaagatctagacaggtgccccat

SEQ ID NO: 2660475 - DNA, 25 bp, Homo sapien
ttaaatcacaactgcacgatgactc

SEQ ID NO: 2660476 - DNA, 25 bp, Homo sapien
caactgcacgatgactcaccatttc

SEQ ID NO: 2660477 - DNA, 25 bp, Homo sapien
tgctatatgagggtaacagtactta

SEQ ID NO: 2660478 - DNA, 25 bp, Homo sapien
gaactgtgattgagtgtaaattaaa

SEQ ID NO: 2660479 - DNA, 25 bp, Homo sapien
caagaaacgtctagagcctgatggc

SEQ ID NO: 2660480 - DNA, 25 bp, Homo sapien
gcagtgctggcgctgtaacccaagt

SEQ ID NO: 2660481 - DNA, 25 bp, Homo sapien
tatatgggacccaccaacggtaaga

SEQ ID NO: 2660482 - DNA, 25 bp, Homo sapien
gagggaaacccaggacatgacacaa

SEQ ID NO: 2660483 - DNA, 25 bp, Homo sapien
aaaatgtatccagtgtttctattgc

SEQ ID NO: 2660484 - DNA, 25 bp, Homo sapien
ccaacataatgctttacctcttaaa

SEQ ID NO: 2660485 - DNA, 25 bp, Homo sapien
ctaaattaaaacaaatcgcagaaag

SEQ ID NO: 2660486 - DNA, 25 bp, Homo sapien
tgcaaatgtggaaacccaccctact

SEQ ID NO: 2660487 - DNA, 25 bp, Homo sapien
tcttgatcatgctcgaaatgttaag

SEQ ID NO: 2660488 - DNA, 25 bp, Homo sapien
cattatcttgatcatgctcgaaatg

SEQ ID NO: 2660489 - DNA, 25 bp, Homo sapien
aatgacctaatcagatacaaatctg

SEQ ID NO: 2660490 - DNA, 25 bp, Homo sapien
gatcatgctcgaaatgttaagtgac

SEQ ID NO: 2660491 - DNA, 25 bp, Homo sapien
cagaagcctggatcttaacaatgct

SEQ ID NO: 2660492 - DNA, 25 bp, Homo sapien
agcagatgcactttcctgaatagca

SEQ ID NO: 2660493 - DNA, 25 bp, Homo sapien
tgttctactgtacagatcagatggg

SEQ ID NO: 2660494 - DNA, 25 bp, Homo sapien
gattctcaaacagtcaatggcccaa

SEQ ID NO: 2660495 - DNA, 25 bp, Homo sapien
gaataccatctcatacttgcaaggg

SEQ ID NO: 2660496 - DNA, 25 bp, Homo sapien
aagagcaaagccactgaataccatc

SEQ ID NO: 2660497 - DNA, 25 bp, Homo sapien
tgtaaaggtagctagaccaggatca

SEQ ID NO: 2660498 - DNA, 25 bp, Homo sapien
accaggatcatagggaggtgccact

SEQ ID NO: 2660499 - DNA, 25 bp, Homo sapien
ctttcagggcaatctttctttaaat

SEQ ID NO: 2660500 - DNA, 25 bp, Homo sapien
caatgcacgaactgatgagaaagct

SEQ ID NO: 2660501 - DNA, 25 bp, Homo sapien
tagggaaatgcagcaactactttgc

SEQ ID NO: 2660502 - DNA, 25 bp, Homo sapien
tgaataatcacaaggagggaagact

SEQ ID NO: 2660503 - DNA, 25 bp, Homo sapien
tgatttcagagtaccacaggcaatt

SEQ ID NO: 2660504 - DNA, 25 bp, Homo sapien
cagcgaccaactgtgaccattcgct

SEQ ID NO: 2660505 - DNA, 25 bp, Homo sapien
ctttgcccagcgaccaactgtgacc

SEQ ID NO: 2660506 - DNA, 25 bp, Homo sapien
cccagcgaccaactgtgaccattcg

SEQ ID NO: 2660507 - DNA, 25 bp, Homo sapien
ttgcccagcgaccaactgtgaccat

SEQ ID NO: 2660508 - DNA, 25 bp, Homo sapien
ctgatatctacagcatagtcctggc

SEQ ID NO: 2660509 - DNA, 25 bp, Homo sapien
tcaactctaactcgtgaagcgggcc

SEQ ID NO: 2660510 - DNA, 25 bp, Homo sapien
tctccaaacagtggtagaagtacta

SEQ ID NO: 2660511 - DNA, 25 bp, Homo sapien
ttggccacacccagatcatactgat

SEQ ID NO: 2660512 - DNA, 25 bp, Homo sapien
tccaatgggattgttacatggatat

SEQ ID NO: 2660513 - DNA, 25 bp, Homo sapien
caatcgagaatcaagtattcagaaa

SEQ ID NO: 2660514 - DNA, 25 bp, Homo sapien
ttacatggatattaacgaacaatgg

SEQ ID NO: 2660515 - DNA, 25 bp, Homo sapien
taacgaacaatggatatttcaatcg

SEQ ID NO: 2660516 - DNA, 25 bp, Homo sapien
aaaatcaagaaccagaacaagccag

SEQ ID NO: 2660517 - DNA, 25 bp, Homo sapien
aatcaagaaccagaacaagccagtc

SEQ ID NO: 2660518 - DNA, 25 bp, Homo sapien
ttagggttttccacttctgctggta

SEQ ID NO: 2660519 - DNA, 25 bp, Homo sapien
tgctggtatgaagggcaatcaaaat

SEQ ID NO: 2660520 - DNA, 25 bp, Homo sapien
tagtgcctctgtcttgtgatggaga

SEQ ID NO: 2660521 - DNA, 25 bp, Homo sapien
gttccagccaggtgatcgggtcgct

SEQ ID NO: 2660522 - DNA, 25 bp, Homo sapien
ttatcggctcctatcacctcagctg

SEQ ID NO: 2660523 - DNA, 25 bp, Homo sapien
tcgggtcgcttatcggctcctatca

SEQ ID NO: 2660524 - DNA, 25 bp, Homo sapien
gctgcttgctccacttctccgggtt

SEQ ID NO: 2660525 - DNA, 25 bp, Homo sapien
gcaagactggtggtacactgctatc

SEQ ID NO: 2660526 - DNA, 25 bp, Homo sapien
tacgtgaattcagtctggtacccag

SEQ ID NO: 2660527 - DNA, 25 bp, Homo sapien
ggcagctacttgacctcatggcaga

SEQ ID NO: 2660528 - DNA, 25 bp, Homo sapien
tggtacccagatgctaataggcagc

SEQ ID NO: 2660529 - DNA, 25 bp, Homo sapien
tgagataaagctccagctgaaagct

SEQ ID NO: 2660530 - DNA, 25 bp, Homo sapien
tgaagtacttgaactagcaaaccct

SEQ ID NO: 2660531 - DNA, 25 bp, Homo sapien
tatctcccacaatggaaaggctccc

SEQ ID NO: 2660532 - DNA, 25 bp, Homo sapien
caagttcatctctgtatgaagtact

SEQ ID NO: 2660533 - DNA, 25 bp, Homo sapien
ttttcctgcagcttgacaacctgca

SEQ ID NO: 2660534 - DNA, 25 bp, Homo sapien
tttcctgcagcttgacaacctgcat

SEQ ID NO: 2660535 - DNA, 25 bp, Homo sapien
gttgcagaattacatggtcatagga

SEQ ID NO: 2660536 - DNA, 25 bp, Homo sapien
agaaattgtcatcttgccggaagat

SEQ ID NO: 2660537 - DNA, 25 bp, Homo sapien
tgccggaagatatctggttgcagaa

SEQ ID NO: 2660538 - DNA, 25 bp, Homo sapien
tctggttgcagaattacatggtcat

SEQ ID NO: 2660539 - DNA, 25 bp, Homo sapien
actaaatatgttgcgtgtacctgtg

SEQ ID NO: 2660540 - DNA, 25 bp, Homo sapien
taagcatgtgtaaaggtctccctgg

SEQ ID NO: 2660541 - DNA, 25 bp, Homo sapien
aatggtacccaatcttaagcatgtg

SEQ ID NO: 2660542 - DNA, 25 bp, Homo sapien
tattgtttgctatgaggagccagag

SEQ ID NO: 2660543 - DNA, 25 bp, Homo sapien
tgtacaatagagttggccctccata

SEQ ID NO: 2660544 - DNA, 25 bp, Homo sapien
ttcaatcaactcctgataaaaaata

SEQ ID NO: 2660545 - DNA, 25 bp, Homo sapien
caatcaactcctgataaaaaatatt

SEQ ID NO: 2660546 - DNA, 25 bp, Homo sapien
aatcaactcctgataaaaaatattg

SEQ ID NO: 2660547 - DNA, 25 bp, Homo sapien
gaggagaaaattgtatccaagaaac

SEQ ID NO: 2660548 - DNA, 25 bp, Homo sapien
gattttgaatcatttaacccttatc

SEQ ID NO: 2660549 - DNA, 25 bp, Homo sapien
tgaatggaagacagtatatctgtat

SEQ ID NO: 2660550 - DNA, 25 bp, Homo sapien
cagaatgtaaggatacttgattttt

SEQ ID NO: 2660551 - DNA, 25 bp, Homo sapien
ttcaaagtccctcttaggtctctag

SEQ ID NO: 2660552 - DNA, 25 bp, Homo sapien
tcttaggtctctagccacagctcta

SEQ ID NO: 2660553 - DNA, 25 bp, Homo sapien
cggccatcgcctggtaattttcaaa

SEQ ID NO: 2660554 - DNA, 25 bp, Homo sapien
cacagctctatagttctccagttaa

SEQ ID NO: 2660555 - DNA, 25 bp, Homo sapien
tggctctgggctctaagctggccga

SEQ ID NO: 2660556 - DNA, 25 bp, Homo sapien
gatagtaccattagtgcctgttgca

SEQ ID NO: 2660557 - DNA, 25 bp, Homo sapien
gctggccgacccctgggtgatagta

SEQ ID NO: 2660558 - DNA, 25 bp, Homo sapien
tagcatcgtgcacattgtatacccc

SEQ ID NO: 2660559 - DNA, 25 bp, Homo sapien
gacactgaatcctataggtaaaatc

SEQ ID NO: 2660560 - DNA, 25 bp, Homo sapien
cttagattctgtccattaggacact

SEQ ID NO: 2660561 - DNA, 25 bp, Homo sapien
ggacactgaatcctataggtaaaat

SEQ ID NO: 2660562 - DNA, 25 bp, Homo sapien
ttagattctgtccattaggacactg

SEQ ID NO: 2660563 - DNA, 25 bp, Homo sapien
ttgccaggacatggcgggtgtgggg

SEQ ID NO: 2660564 - DNA, 25 bp, Homo sapien
cttctctgcattgccaggacatggc

SEQ ID NO: 2660565 - DNA, 25 bp, Homo sapien
tctgcattgccaggacatggcgggt

SEQ ID NO: 2660566 - DNA, 25 bp, Homo sapien
cattgccaggacatggcgggtgtgg

SEQ ID NO: 2660567 - DNA, 25 bp, Homo sapien
aaaagcatagccttgatcttcagta

SEQ ID NO: 2660568 - DNA, 25 bp, Homo sapien
taaaagcatagccttgatcttcagt

SEQ ID NO: 2660569 - DNA, 25 bp, Homo sapien
tttaaaagcatagccttgatcttca

SEQ ID NO: 2660570 - DNA, 25 bp, Homo sapien
ttttttaaaagcatagccttgatct

SEQ ID NO: 2660571 - DNA, 25 bp, Homo sapien
tctaagatactgagctgagaaagtc

SEQ ID NO: 2660572 - DNA, 25 bp, Homo sapien
tctggtacccgtaaaacatggagaa

SEQ ID NO: 2660573 - DNA, 25 bp, Homo sapien
tgaagattcacattggcaacgacca

SEQ ID NO: 2660574 - DNA, 25 bp, Homo sapien
tgagaaagtctttctggtacccgta

SEQ ID NO: 2660575 - DNA, 25 bp, Homo sapien
taagaatattcttaggcgttccaga

SEQ ID NO: 2660576 - DNA, 25 bp, Homo sapien
tattcttaggcgttccagagctgct

SEQ ID NO: 2660577 - DNA, 25 bp, Homo sapien
taatctgtttcaaatgcacctttac

SEQ ID NO: 2660578 - DNA, 25 bp, Homo sapien
tgcacctttacaaaatctaagaata

SEQ ID NO: 2660579 - DNA, 25 bp, Homo sapien
cttagaactaacatagaaaaccagt

SEQ ID NO: 2660580 - DNA, 25 bp, Homo sapien
gcagataaaagcaataaaacctggg

SEQ ID NO: 2660581 - DNA, 25 bp, Homo sapien
aacatggattctccactgtcaagga

SEQ ID NO: 2660582 - DNA, 25 bp, Homo sapien
ctgtttcttctacccacgagtacag

SEQ ID NO: 2660583 - DNA, 25 bp, Homo sapien
tacgaggctttttgctcttccttta

SEQ ID NO: 2660584 - DNA, 25 bp, Homo sapien
acttttctcaaagtagctatttgtc

SEQ ID NO: 2660585 - DNA, 25 bp, Homo sapien
cttttctcaaagtagctatttgtca

SEQ ID NO: 2660586 - DNA, 25 bp, Homo sapien
agctacgaggctttttgctcttcct

SEQ ID NO: 2660587 - DNA, 25 bp, Homo sapien
taggatcagcggactgtgactactg

SEQ ID NO: 2660588 - DNA, 25 bp, Homo sapien
tgtgactactgtctgttgtttccaa

SEQ ID NO: 2660589 - DNA, 25 bp, Homo sapien
tctaggatcagcggactgtgactac

SEQ ID NO: 2660590 - DNA, 25 bp, Homo sapien
tgactactgtctgttgtttccaagc

SEQ ID NO: 2660591 - DNA, 25 bp, Homo sapien
ttttaaccttagctgtcagacggtg

SEQ ID NO: 2660592 - DNA, 25 bp, Homo sapien
tacactgtagatgtttggtaataac

SEQ ID NO: 2660593 - DNA, 25 bp, Homo sapien
ctgacttggatcagtgggttaacaa

SEQ ID NO: 2660594 - DNA, 25 bp, Homo sapien
caaagtgacgattttaagagtgttc

SEQ ID NO: 2660595 - DNA, 25 bp, Homo sapien
taaggtgatagtacaatctacaggg

SEQ ID NO: 2660596 - DNA, 25 bp, Homo sapien
gcatacatgccaggaagttggactt

SEQ ID NO: 2660597 - DNA, 25 bp, Homo sapien
tcctgtataccatggggcttctgtc

SEQ ID NO: 2660598 - DNA, 25 bp, Homo sapien
acatgaagacctttgcatacatgcc

SEQ ID NO: 2660599 - DNA, 25 bp, Homo sapien
ggccttgaccgttctgaagtctgtt

SEQ ID NO: 2660600 - DNA, 25 bp, Homo sapien
gtaccctggccttgaccgttctgaa

SEQ ID NO: 2660601 - DNA, 25 bp, Homo sapien
cagatgtaccctggccttgaccgtt

SEQ ID NO: 2660602 - DNA, 25 bp, Homo sapien
acagccacagatgtaccctggcctt

SEQ ID NO: 2660603 - DNA, 25 bp, Homo sapien
gcatcgttggttaacagggttctga

SEQ ID NO: 2660604 - DNA, 25 bp, Homo sapien
caggagtttctttaggtgccaagga

SEQ ID NO: 2660605 - DNA, 25 bp, Homo sapien
tcagataggtttatggtatggtgca

SEQ ID NO: 2660606 - DNA, 25 bp, Homo sapien
ttggcacatagtacaggtgcacctt

SEQ ID NO: 2660607 - DNA, 25 bp, Homo sapien
caagggactaaagcagcagtaaagc

SEQ ID NO: 2660608 - DNA, 25 bp, Homo sapien
acagtaatgatgatgtgactgttcc

SEQ ID NO: 2660609 - DNA, 25 bp, Homo sapien
cattggttgggtaacacaaatgcca

SEQ ID NO: 2660610 - DNA, 25 bp, Homo sapien
atgatgatgtgactgttccacgtgg

SEQ ID NO: 2660611 - DNA, 25 bp, Homo sapien
ccagtggaacctggacagtaatgat

SEQ ID NO: 2660612 - DNA, 25 bp, Homo sapien
tcaggaataagatgagggagctaaa

SEQ ID NO: 2660613 - DNA, 25 bp, Homo sapien
gctaaaggaaggacttgacttccaa

SEQ ID NO: 2660614 - DNA, 25 bp, Homo sapien
aataagatgagggagctaaaggaag

SEQ ID NO: 2660615 - DNA, 25 bp, Homo sapien
aggaaggacttgacttccaaagatt

SEQ ID NO: 2660616 - DNA, 25 bp, Homo sapien
tgggacacattgcccatacatacag

SEQ ID NO: 2660617 - DNA, 25 bp, Homo sapien
aattgggacacattgcccatacata

SEQ ID NO: 2660618 - DNA, 25 bp, Homo sapien
tcaattgggacacattgcccataca

SEQ ID NO: 2660619 - DNA, 25 bp, Homo sapien
ttgggacacattgcccatacataca

SEQ ID NO: 2660620 - DNA, 25 bp, Homo sapien
cttcctccacgcgaatccgatttcc

SEQ ID NO: 2660621 - DNA, 25 bp, Homo sapien
ttcctccacgcgaatccgatttccc

SEQ ID NO: 2660622 - DNA, 25 bp, Homo sapien
ctccacgcgaatccgatttccctct

SEQ ID NO: 2660623 - DNA, 25 bp, Homo sapien
tcctccacgcgaatccgatttccct

SEQ ID NO: 2660624 - DNA, 25 bp, Homo sapien
atagtagtgaaaatcggaggaaatg

SEQ ID NO: 2660625 - DNA, 25 bp, Homo sapien
agtagtgaaaatcggaggaaatgat

SEQ ID NO: 2660626 - DNA, 25 bp, Homo sapien
tagtgaaaatcggaggaaatgatgg

SEQ ID NO: 2660627 - DNA, 25 bp, Homo sapien
gtgaaaatcggaggaaatgatggac

SEQ ID NO: 2660628 - DNA, 25 bp, Homo sapien
aatgcttgggtccacccgtctgtgt

SEQ ID NO: 2660629 - DNA, 25 bp, Homo sapien
tgcttgggtccacccgtctgtgtct

SEQ ID NO: 2660630 - DNA, 25 bp, Homo sapien
ctcaatgcttgggtccacccgtctg

SEQ ID NO: 2660631 - DNA, 25 bp, Homo sapien
gccctcaatgcttgggtccacccgt

SEQ ID NO: 2660632 - DNA, 25 bp, Homo sapien
tcctgagaagaacaattggaaacca

SEQ ID NO: 2660633 - DNA, 25 bp, Homo sapien
ctgagaagaacaattggaaaccagt

SEQ ID NO: 2660634 - DNA, 25 bp, Homo sapien
cctgagaagaacaattggaaaccag

SEQ ID NO: 2660635 - DNA, 25 bp, Homo sapien
gaaagcagcgtctggttttcatcct

SEQ ID NO: 2660636 - DNA, 25 bp, Homo sapien
tcagtagaagtctgttatatgcagc

SEQ ID NO: 2660637 - DNA, 25 bp, Homo sapien
tgcagcaatgggtattagaggtgcc

SEQ ID NO: 2660638 - DNA, 25 bp, Homo sapien
ccttcgtgatccacgcgtcttcagt

SEQ ID NO: 2660639 - DNA, 25 bp, Homo sapien
aggaatacaggatgaggcaatttgc

SEQ ID NO: 2660640 - DNA, 25 bp, Homo sapien
gtgagcaagtcccacattgatgggt

SEQ ID NO: 2660641 - DNA, 25 bp, Homo sapien
tgttacgagaatgagcagactccca

SEQ ID NO: 2660642 - DNA, 25 bp, Homo sapien
ccacattgatgggttcaggaactgt

SEQ ID NO: 2660643 - DNA, 25 bp, Homo sapien
gactcccactgcctattgtctctgg

SEQ ID NO: 2660644 - DNA, 25 bp, Homo sapien
cctttacggttgaggatgggatagt

SEQ ID NO: 2660645 - DNA, 25 bp, Homo sapien
ctgtcctcgtacttctctttcggtt

SEQ ID NO: 2660646 - DNA, 25 bp, Homo sapien
gttctctcctgatagactctctcaa

SEQ ID NO: 2660647 - DNA, 25 bp, Homo sapien
tctggctcctttacggttgaggatg

SEQ ID NO: 2660648 - DNA, 25 bp, Homo sapien
ctctaaagaagcatctggcaatgac

SEQ ID NO: 2660649 - DNA, 25 bp, Homo sapien
gctctaaagaagcatctggcaatga

SEQ ID NO: 2660650 - DNA, 25 bp, Homo sapien
tctccattgccttccgcctgctcat

SEQ ID NO: 2660651 - DNA, 25 bp, Homo sapien
attgccttccgcctgctcatcagca

SEQ ID NO: 2660652 - DNA, 25 bp, Homo sapien
ttgccttccgcctgctcatcagcat

SEQ ID NO: 2660653 - DNA, 25 bp, Homo sapien
tccattgccttccgcctgctcatca

SEQ ID NO: 2660654 - DNA, 25 bp, Homo sapien
ccttttttctggaaatctgcttctt

SEQ ID NO: 2660655 - DNA, 25 bp, Homo sapien
tctgcttcttctcttattgctcctc

SEQ ID NO: 2660656 - DNA, 25 bp, Homo sapien
tccttttttctggaaatctgcttct

SEQ ID NO: 2660657 - DNA, 25 bp, Homo sapien
cttctcttattgctcctctctgtac

SEQ ID NO: 2660658 - DNA, 25 bp, Homo sapien
gagtcccagcatacacatctcctgt

SEQ ID NO: 2660659 - DNA, 25 bp, Homo sapien
ttcaggcaagagatatttagcttcc

SEQ ID NO: 2660660 - DNA, 25 bp, Homo sapien
aggtctgccgactgccaccagctgt

SEQ ID NO: 2660661 - DNA, 25 bp, Homo sapien
gtctccaacatcaaaggtctgccga

SEQ ID NO: 2660662 - DNA, 25 bp, Homo sapien
aatccagacaattcattgcaatctg

SEQ ID NO: 2660663 - DNA, 25 bp, Homo sapien
gcaatctggaatcacccaagctagt

SEQ ID NO: 2660664 - DNA, 25 bp, Homo sapien
tgatgactctgggatgcttcgaatt

SEQ ID NO: 2660665 - DNA, 25 bp, Homo sapien
gggatgcttcgaatttgaacccatt

SEQ ID NO: 2660666 - DNA, 25 bp, Homo sapien
tctttccctcatccctcccatgtgt

SEQ ID NO: 2660667 - DNA, 25 bp, Homo sapien
ctttatctcccagataccagctctt

SEQ ID NO: 2660668 - DNA, 25 bp, Homo sapien
ttatctcccagataccagctctttc

SEQ ID NO: 2660669 - DNA, 25 bp, Homo sapien
gataccagctctttccctcatccct

SEQ ID NO: 2660670 - DNA, 25 bp, Homo sapien
ggcatgactgacagcagctgttgaa

SEQ ID NO: 2660671 - DNA, 25 bp, Homo sapien
taaagggcatgactgacagcagctg

SEQ ID NO: 2660672 - DNA, 25 bp, Homo sapien
ctggtaaagggcatgactgacagca

SEQ ID NO: 2660673 - DNA, 25 bp, Homo sapien
aagggcatgactgacagcagctgtt

SEQ ID NO: 2660674 - DNA, 25 bp, Homo sapien
aggttcagtgagcaccactgacctt

SEQ ID NO: 2660675 - DNA, 25 bp, Homo sapien
agtgagcaccactgaccttcccagg

SEQ ID NO: 2660676 - DNA, 25 bp, Homo sapien
catcaatgagctcagcctgtaagat

SEQ ID NO: 2660677 - DNA, 25 bp, Homo sapien
tcatcaatgagctcagcctgtaaga

SEQ ID NO: 2660678 - DNA, 25 bp, Homo sapien
aatgattcccatgtgtccttctgaa

SEQ ID NO: 2660679 - DNA, 25 bp, Homo sapien
ggcctggttaaatgattcccatgtg

SEQ ID NO: 2660680 - DNA, 25 bp, Homo sapien
gattcccatgtgtccttctgaaact

SEQ ID NO: 2660681 - DNA, 25 bp, Homo sapien
ggttaaatgattcccatgtgtcctt

SEQ ID NO: 2660682 - DNA, 25 bp, Homo sapien
tgaagcaagggctatgtcttccggg

SEQ ID NO: 2660683 - DNA, 25 bp, Homo sapien
gacagtgaagcaagggctatgtctt

SEQ ID NO: 2660684 - DNA, 25 bp, Homo sapien
ctctccttcagacagtgaagcaagg

SEQ ID NO: 2660685 - DNA, 25 bp, Homo sapien
tccttcagacagtgaagcaagggct

SEQ ID NO: 2660686 - DNA, 25 bp, Homo sapien
tgatgtcatctaagcccacactctt

SEQ ID NO: 2660687 - DNA, 25 bp, Homo sapien
caaaatatgtgaagagataaggcca

SEQ ID NO: 2660688 - DNA, 25 bp, Homo sapien
tccaacaggcttttggccactgact

SEQ ID NO: 2660689 - DNA, 25 bp, Homo sapien
taaaactgtatgtcttgatgtcatc

SEQ ID NO: 2660690 - DNA, 25 bp, Homo sapien
tcctctaagtagaatataggcttgt

SEQ ID NO: 2660691 - DNA, 25 bp, Homo sapien
ctgtaatgactgttcagggaactcc

SEQ ID NO: 2660692 - DNA, 25 bp, Homo sapien
gaatataggcttgtctaattttact

SEQ ID NO: 2660693 - DNA, 25 bp, Homo sapien
ctcccagggacaataccttcttcct

SEQ ID NO: 2660694 - DNA, 25 bp, Homo sapien
ggtccactttcagactcccccaata

SEQ ID NO: 2660695 - DNA, 25 bp, Homo sapien
aatactctctttgcccagctcccag

SEQ ID NO: 2660696 - DNA, 25 bp, Homo sapien
tctttgcaaagtgttccagcacacc

SEQ ID NO: 2660697 - DNA, 25 bp, Homo sapien
gctcccagaggccactacttttgct

SEQ ID NO: 2660698 - DNA, 25 bp, Homo sapien
caggctgcgtggtaactgcaaacat

SEQ ID NO: 2660699 - DNA, 25 bp, Homo sapien
gccaagacaaagtgagaggcactgc

SEQ ID NO: 2660700 - DNA, 25 bp, Homo sapien
tctttgggcggtcgccctggaacca

SEQ ID NO: 2660701 - DNA, 25 bp, Homo sapien
acttcgtctgatggttgtgccctgc

SEQ ID NO: 2660702 - DNA, 25 bp, Homo sapien
aaaagaccacaacatcacgggcagg

SEQ ID NO: 2660703 - DNA, 25 bp, Homo sapien
caacttccgggataatgagagctgc

SEQ ID NO: 2660704 - DNA, 25 bp, Homo sapien
acttgaactaaacgccgagacctgg

SEQ ID NO: 2660705 - DNA, 25 bp, Homo sapien
cgaaagatgccgtgagatgtctgca

SEQ ID NO: 2660706 - DNA, 25 bp, Homo sapien
atcatctgagcaggattgaccctgt

SEQ ID NO: 2660707 - DNA, 25 bp, Homo sapien
tctgagcaggattgaccctgtccgg

SEQ ID NO: 2660708 - DNA, 25 bp, Homo sapien
atcagagtccccaggcgctggtgga

SEQ ID NO: 2660709 - DNA, 25 bp, Homo sapien
gcaggattgaccctgtccgggtaaa

SEQ ID NO: 2660710 - DNA, 25 bp, Homo sapien
taaggactgcctgctctataactgt

SEQ ID NO: 2660711 - DNA, 25 bp, Homo sapien
gctggccccttaagactgatacaat

SEQ ID NO: 2660712 - DNA, 25 bp, Homo sapien
ctgtgtctcaactctgcaaggccga

SEQ ID NO: 2660713 - DNA, 25 bp, Homo sapien
tgcagtactagtggctttccgaagc

SEQ ID NO: 2660714 - DNA, 25 bp, Homo sapien
aataccacccgaagaacaggagtct

SEQ ID NO: 2660715 - DNA, 25 bp, Homo sapien
tacaataccttgttctgcgaaaggc

SEQ ID NO: 2660716 - DNA, 25 bp, Homo sapien
aagggaaatttttgaggcatggcca

SEQ ID NO: 2660717 - DNA, 25 bp, Homo sapien
tgtaaataagcccaaccataggaag

SEQ ID NO: 2660718 - DNA, 25 bp, Homo sapien
ttgaggaaattgtaagggcaacgct

SEQ ID NO: 2660719 - DNA, 25 bp, Homo sapien
tagaaatgctgtgggcgttgaggaa

SEQ ID NO: 2660720 - DNA, 25 bp, Homo sapien
aaattgtaagggcaacgctgaagtg

SEQ ID NO: 2660721 - DNA, 25 bp, Homo sapien
taagggcaacgctgaagtgattgcc

SEQ ID NO: 2660722 - DNA, 25 bp, Homo sapien
gtctctccccgcaagggctggacaa

SEQ ID NO: 2660723 - DNA, 25 bp, Homo sapien
ctctgtcctccaagtaaatctgtgg

SEQ ID NO: 2660724 - DNA, 25 bp, Homo sapien
cctccaagtaaatctgtggtacaga

SEQ ID NO: 2660725 - DNA, 25 bp, Homo sapien
tgtcctccaagtaaatctgtggtac

SEQ ID NO: 2660726 - DNA, 25 bp, Homo sapien
tgtgatctggagtttaccttggtag

SEQ ID NO: 2660727 - DNA, 25 bp, Homo sapien
gacctgaaagatattaggactccct

SEQ ID NO: 2660728 - DNA, 25 bp, Homo sapien
tggatcctgccgacaagactgcttg

SEQ ID NO: 2660729 - DNA, 25 bp, Homo sapien
cttgtgaggtgaggaaacgccacat

SEQ ID NO: 2660730 - DNA, 25 bp, Homo sapien
tggtctggtacggtcctggatttta

SEQ ID NO: 2660731 - DNA, 25 bp, Homo sapien
tatccccattatcttgcttaaattc

SEQ ID NO: 2660732 - DNA, 25 bp, Homo sapien
aattatctcagattcaatagcgaac

SEQ ID NO: 2660733 - DNA, 25 bp, Homo sapien
tagcgaacccttgaccattatacgt

SEQ ID NO: 2660734 - DNA, 25 bp, Homo sapien
tgcattgtcacacataccccagcaa

SEQ ID NO: 2660735 - DNA, 25 bp, Homo sapien
ggtgtctttcaggaccctcataaac

SEQ ID NO: 2660736 - DNA, 25 bp, Homo sapien
gcccacctccagttggactcaattt

SEQ ID NO: 2660737 - DNA, 25 bp, Homo sapien
ccagcaatgtgttcaaacaaagcca

SEQ ID NO: 2660738 - DNA, 25 bp, Homo sapien
gtaactgattagagaagtcatcctc

SEQ ID NO: 2660739 - DNA, 25 bp, Homo sapien
taagtctaccggctgctttttctct

SEQ ID NO: 2660740 - DNA, 25 bp, Homo sapien
agtcatcctctacattgtcatcatc

SEQ ID NO: 2660741 - DNA, 25 bp, Homo sapien
caattatcctcccagacatgtgcat

SEQ ID NO: 2660742 - DNA, 25 bp, Homo sapien
tattaagcaggtcaagtttaggtta

SEQ ID NO: 2660743 - DNA, 25 bp, Homo sapien
gaagtctccatcttataaccatgtt

SEQ ID NO: 2660744 - DNA, 25 bp, Homo sapien
taggttacttcaacacttcttctgg

SEQ ID NO: 2660745 - DNA, 25 bp, Homo sapien
ctatgaagtctccatcttataacca

SEQ ID NO: 2660746 - DNA, 25 bp, Homo sapien
gagcataagcttctatgccaaaacc

SEQ ID NO: 2660747 - DNA, 25 bp, Homo sapien
tgagcataagcttctatgccaaaac

SEQ ID NO: 2660748 - DNA, 25 bp, Homo sapien
aatgagcataagcttctatgccaaa

SEQ ID NO: 2660749 - DNA, 25 bp, Homo sapien
gcataagcttctatgccaaaaccaa

SEQ ID NO: 2660750 - DNA, 25 bp, Homo sapien
gtagctttccactgcctcagagaag

SEQ ID NO: 2660751 - DNA, 25 bp, Homo sapien
aaagaggtagctttccactgcctca

SEQ ID NO: 2660752 - DNA, 25 bp, Homo sapien
gaggtagctttccactgcctcagag

SEQ ID NO: 2660753 - DNA, 25 bp, Homo sapien
gctcctcgagcccactctgcacctg

SEQ ID NO: 2660754 - DNA, 25 bp, Homo sapien
tagagatattgggtcttctgtcttc

SEQ ID NO: 2660755 - DNA, 25 bp, Homo sapien
tgtcttctccttgaataaagcctct

SEQ ID NO: 2660756 - DNA, 25 bp, Homo sapien
cttgaataaagcctctggttcctta

SEQ ID NO: 2660757 - DNA, 25 bp, Homo sapien
cattagagatattgggtcttctgtc

SEQ ID NO: 2660758 - DNA, 25 bp, Homo sapien
tttgaccaggaactgtccaaggcag

SEQ ID NO: 2660759 - DNA, 25 bp, Homo sapien
ttatctagacgtaccctcagctgcc

SEQ ID NO: 2660760 - DNA, 25 bp, Homo sapien
caagtccccagtttgaccaggaact

SEQ ID NO: 2660761 - DNA, 25 bp, Homo sapien
tccaaggcaggaaactgcactgtag

SEQ ID NO: 2660762 - DNA, 25 bp, Homo sapien
ccagctgttttcccttgagtaccat

SEQ ID NO: 2660763 - DNA, 25 bp, Homo sapien
gctgttttcccttgagtaccatcac

SEQ ID NO: 2660764 - DNA, 25 bp, Homo sapien
tagccagctgttttcccttgagtac

SEQ ID NO: 2660765 - DNA, 25 bp, Homo sapien
ttagccagctgttttcccttgagta

SEQ ID NO: 2660766 - DNA, 25 bp, Homo sapien
tcaggtccgccacggccgagtcgga

SEQ ID NO: 2660767 - DNA, 25 bp, Homo sapien
ctcgagggcggaggaagagccgagc

SEQ ID NO: 2660768 - DNA, 25 bp, Homo sapien
tggcctccttcagtcaggtccgcgg

SEQ ID NO: 2660769 - DNA, 25 bp, Homo sapien
cctacggaactgaatgatgggactg

SEQ ID NO: 2660770 - DNA, 25 bp, Homo sapien
tccccgaggagggagtgtcctcgcc

SEQ ID NO: 2660771 - DNA, 25 bp, Homo sapien
ggagacaaccggcaagggctgtggg

SEQ ID NO: 2660772 - DNA, 25 bp, Homo sapien
tgtgctggtgacaccgtgtgcgcga

SEQ ID NO: 2660773 - DNA, 25 bp, Homo sapien
agcacaggcctgcagttaccggcgg

SEQ ID NO: 2660774 - DNA, 25 bp, Homo sapien
ttaataactgtacaacaggccgggc

SEQ ID NO: 2660775 - DNA, 25 bp, Homo sapien
taataactgtacaacaggccgggcg

SEQ ID NO: 2660776 - DNA, 25 bp, Homo sapien
ctttaataactgtacaacaggccgg

SEQ ID NO: 2660777 - DNA, 25 bp, Homo sapien
ctgcacaataacgttggaatgtttt

SEQ ID NO: 2660778 - DNA, 25 bp, Homo sapien
tgatggtctccattcccaactatca

SEQ ID NO: 2660779 - DNA, 25 bp, Homo sapien
aactatcacctatctgttgtgaatg

SEQ ID NO: 2660780 - DNA, 25 bp, Homo sapien
cattcccaactatcacctatctgtt

SEQ ID NO: 2660781 - DNA, 25 bp, Homo sapien
gatggtctccattcccaactatcac

SEQ ID NO: 2660782 - DNA, 25 bp, Homo sapien
gacatctgttgtaagacattcttca

SEQ ID NO: 2660783 - DNA, 25 bp, Homo sapien
tctattaaattaagcaggttacgta

SEQ ID NO: 2660784 - DNA, 25 bp, Homo sapien
taggattgatgatttgaagcaccac

SEQ ID NO: 2660785 - DNA, 25 bp, Homo sapien
ttatggaggttttacctgtcaacaa

SEQ ID NO: 2660786 - DNA, 25 bp, Homo sapien
tctggccccacaaggttatgaacct

SEQ ID NO: 2660787 - DNA, 25 bp, Homo sapien
caaagtccttcgttgggcggtggca

SEQ ID NO: 2660788 - DNA, 25 bp, Homo sapien
ggtattgggccctcagctttgttct

SEQ ID NO: 2660789 - DNA, 25 bp, Homo sapien
cagtgggatctgtgttcatttgcac

SEQ ID NO: 2660790 - DNA, 25 bp, Homo sapien
ggctgtaaacttccctcttatcact

SEQ ID NO: 2660791 - DNA, 25 bp, Homo sapien
aaaaaccaattcttagatttgctga

SEQ ID NO: 2660792 - DNA, 25 bp, Homo sapien
tctagttgggatgttaggttgttta

SEQ ID NO: 2660793 - DNA, 25 bp, Homo sapien
agttcctctagttgggatgttaggt

SEQ ID NO: 2660794 - DNA, 25 bp, Homo sapien
aaccacagcagtaacatgctcatga

SEQ ID NO: 2660795 - DNA, 25 bp, Homo sapien
ctaaaaccacagcagtaacatgctc

SEQ ID NO: 2660796 - DNA, 25 bp, Homo sapien
ccacagcagtaacatgctcatgacc

SEQ ID NO: 2660797 - DNA, 25 bp, Homo sapien
acagcagtaacatgctcatgacccc

SEQ ID NO: 2660798 - DNA, 25 bp, Homo sapien
tgactgcatgggcgcttcagaggcg

SEQ ID NO: 2660799 - DNA, 25 bp, Homo sapien
actgcatgggcgcttcagaggcgcc

SEQ ID NO: 2660800 - DNA, 25 bp, Homo sapien
ctgcatgggcgcttcagaggcgcct

SEQ ID NO: 2660801 - DNA, 25 bp, Homo sapien
gggtgactgcatgggcgcttcagag

SEQ ID NO: 2660802 - DNA, 25 bp, Homo sapien
gttgtcaatatctctccacgtggca

SEQ ID NO: 2660803 - DNA, 25 bp, Homo sapien
ccctcactacttctaggagcccatg

SEQ ID NO: 2660804 - DNA, 25 bp, Homo sapien
gcatgctcttactcagaaaagcctc

SEQ ID NO: 2660805 - DNA, 25 bp, Homo sapien
taaaaactggaaggagggacatcga

SEQ ID NO: 2660806 - DNA, 25 bp, Homo sapien
caatattattcgatcttaaaaaaga

SEQ ID NO: 2660807 - DNA, 25 bp, Homo sapien
tacatatgttctaagtcagcaaaac

SEQ ID NO: 2660808 - DNA, 25 bp, Homo sapien
tatgagttaccgaaagtagtcaaat

SEQ ID NO: 2660809 - DNA, 25 bp, Homo sapien
tagcaacacctagtatcagaaagtg

SEQ ID NO: 2660810 - DNA, 25 bp, Homo sapien
ttttgtagtgaggtgccagtgcagt

SEQ ID NO: 2660811 - DNA, 25 bp, Homo sapien
ttggcaccttgtcttcaactcgtaa

SEQ ID NO: 2660812 - DNA, 25 bp, Homo sapien
tagtgaggtgccagtgcagtttgct

SEQ ID NO: 2660813 - DNA, 25 bp, Homo sapien
ggcaccttgtcttcaactcgtaact

SEQ ID NO: 2660814 - DNA, 25 bp, Homo sapien
gaaacacccaagtcacagtccgtga

SEQ ID NO: 2660815 - DNA, 25 bp, Homo sapien
aactgcgatgaagcccagaaacacc

SEQ ID NO: 2660816 - DNA, 25 bp, Homo sapien
ttcagctttcccacaaacaactgcg

SEQ ID NO: 2660817 - DNA, 25 bp, Homo sapien
gaggccctactgtatgtagcatcca

SEQ ID NO: 2660818 - DNA, 25 bp, Homo sapien
ctgtgaccctgccattctggctgtg

SEQ ID NO: 2660819 - DNA, 25 bp, Homo sapien
cacttaactccgcactcatacagta

SEQ ID NO: 2660820 - DNA, 25 bp, Homo sapien
attccacacttaactccgcactcat

SEQ ID NO: 2660821 - DNA, 25 bp, Homo sapien
actccgcactcatacagtacatgtg

SEQ ID NO: 2660822 - DNA, 25 bp, Homo sapien
tcaatagagcatagtgagctgtgag

SEQ ID NO: 2660823 - DNA, 25 bp, Homo sapien
tggactaatacagaccaggacatga

SEQ ID NO: 2660824 - DNA, 25 bp, Homo sapien
ttaacaggagattagggactgcaga

SEQ ID NO: 2660825 - DNA, 25 bp, Homo sapien
gaaactatccgaaatgaaacagacc

SEQ ID NO: 2660826 - DNA, 25 bp, Homo sapien
tgacatcacagacccattcttaatt

SEQ ID NO: 2660827 - DNA, 25 bp, Homo sapien
tgcacatgtagccatcagaacagtc

SEQ ID NO: 2660828 - DNA, 25 bp, Homo sapien
ctccatgggaagacatgtctgtcca

SEQ ID NO: 2660829 - DNA, 25 bp, Homo sapien
catgggtagatgctcctagatgtga

SEQ ID NO: 2660830 - DNA, 25 bp, Homo sapien
gccaggatcggttgataggttcata

SEQ ID NO: 2660831 - DNA, 25 bp, Homo sapien
gccagattccaaccatgtgttttta

SEQ ID NO: 2660832 - DNA, 25 bp, Homo sapien
tcagtctgacttatcaggatgcctg

SEQ ID NO: 2660833 - DNA, 25 bp, Homo sapien
taggttcataaggtagacagaggga

SEQ ID NO: 2660834 - DNA, 25 bp, Homo sapien
gcaaagacacccagttgacatagtg

SEQ ID NO: 2660835 - DNA, 25 bp, Homo sapien
ggctccatctcactactggttagca

SEQ ID NO: 2660836 - DNA, 25 bp, Homo sapien
aacttagcaaagacacccagttgac

SEQ ID NO: 2660837 - DNA, 25 bp, Homo sapien
aggctccatctcactactggttagc

SEQ ID NO: 2660838 - DNA, 25 bp, Homo sapien
ttctgagtaccctgaaggcatttaa

SEQ ID NO: 2660839 - DNA, 25 bp, Homo sapien
tggttacactaatgttatgcagatc

SEQ ID NO: 2660840 - DNA, 25 bp, Homo sapien
gctgaaagaaccttttctatactgc

SEQ ID NO: 2660841 - DNA, 25 bp, Homo sapien
tgtgttcctaaacagagttattctg

SEQ ID NO: 2660842 - DNA, 25 bp, Homo sapien
tgaagataagaaaccacagctagag

SEQ ID NO: 2660843 - DNA, 25 bp, Homo sapien
agcatctgcagagttctgaagataa

SEQ ID NO: 2660844 - DNA, 25 bp, Homo sapien
catctgcagagttctgaagataaga

SEQ ID NO: 2660845 - DNA, 25 bp, Homo sapien
gataagaaaccacagctagagagca

SEQ ID NO: 2660846 - DNA, 25 bp, Homo sapien
aagccactgcaactttcatgaccag

SEQ ID NO: 2660847 - DNA, 25 bp, Homo sapien
cactgcaactttcatgaccagagaa

SEQ ID NO: 2660848 - DNA, 25 bp, Homo sapien
agaaccatcagtccagcctcacaag

SEQ ID NO: 2660849 - DNA, 25 bp, Homo sapien
aaaactgagaaccatcagtccagcc

SEQ ID NO: 2660850 - DNA, 25 bp, Homo sapien
ctgaggcggatggattacttgatgt

SEQ ID NO: 2660851 - DNA, 25 bp, Homo sapien
acttttattttaagctcagggccag

SEQ ID NO: 2660852 - DNA, 25 bp, Homo sapien
ccaggtgtagtggtgaacccctgta

SEQ ID NO: 2660853 - DNA, 25 bp, Homo sapien
tttattttaagctcagggccaggca

SEQ ID NO: 2660854 - DNA, 25 bp, Homo sapien
gctagagaatgatgcagatgcccaa

SEQ ID NO: 2660855 - DNA, 25 bp, Homo sapien
taacccaagggctgtaatctgctga

SEQ ID NO: 2660856 - DNA, 25 bp, Homo sapien
tgagtgccttacagaccaatcctgc

SEQ ID NO: 2660857 - DNA, 25 bp, Homo sapien
tttgaagaggagtcaacacctggag

SEQ ID NO: 2660858 - DNA, 25 bp, Homo sapien
cggacgctgctgcagtttcaatcac

SEQ ID NO: 2660859 - DNA, 25 bp, Homo sapien
atcatccaagggtagctcgaaagcc

SEQ ID NO: 2660860 - DNA, 25 bp, Homo sapien
atttaatcacttcggacgctgctgc

SEQ ID NO: 2660861 - DNA, 25 bp, Homo sapien
catccaagggtagctcgaaagcctc

SEQ ID NO: 2660862 - DNA, 25 bp, Homo sapien
taaagtacaggcacttggtagctac

SEQ ID NO: 2660863 - DNA, 25 bp, Homo sapien
ccctaaagtaaagtacaggcacttg

SEQ ID NO: 2660864 - DNA, 25 bp, Homo sapien
ggcacttggtagctacaggaatata

SEQ ID NO: 2660865 - DNA, 25 bp, Homo sapien
agcttgccctaaagtaaagtacagg

SEQ ID NO: 2660866 - DNA, 25 bp, Homo sapien
acttttagcttcagacatgttctta

SEQ ID NO: 2660867 - DNA, 25 bp, Homo sapien
tacttttagcttcagacatgttctt

SEQ ID NO: 2660868 - DNA, 25 bp, Homo sapien
cttttagcttcagacatgttcttac

SEQ ID NO: 2660869 - DNA, 25 bp, Homo sapien
tatctcttccataatttgacctcaa

SEQ ID NO: 2660870 - DNA, 25 bp, Homo sapien
caactatttcttccgtaagtcatcc

SEQ ID NO: 2660871 - DNA, 25 bp, Homo sapien
taagtcatcctaagttagcccctac

SEQ ID NO: 2660872 - DNA, 25 bp, Homo sapien
tactccaaactggtccttcactgtt

SEQ ID NO: 2660873 - DNA, 25 bp, Homo sapien
gcaataatacatctttccccgaaaa

SEQ ID NO: 2660874 - DNA, 25 bp, Homo sapien
cttgcaataatacatctttccccga

SEQ ID NO: 2660875 - DNA, 25 bp, Homo sapien
tacttgcaataatacatctttcccc

SEQ ID NO: 2660876 - DNA, 25 bp, Homo sapien
cgtacttgcaataatacatctttcc

SEQ ID NO: 2660877 - DNA, 25 bp, Homo sapien
actatctaactctagtgcaagcacg

SEQ ID NO: 2660878 - DNA, 25 bp, Homo sapien
caagcacgctggagtcacctttatc

SEQ ID NO: 2660879 - DNA, 25 bp, Homo sapien
tcatgagccaataacagcatgagat

SEQ ID NO: 2660880 - DNA, 25 bp, Homo sapien
cacctttatccttattgtgcacggt

SEQ ID NO: 2660881 - DNA, 25 bp, Homo sapien
gatactcaatcgcaccaattttaac

SEQ ID NO: 2660882 - DNA, 25 bp, Homo sapien
gaggctgtgtagctcagtaaaatct

SEQ ID NO: 2660883 - DNA, 25 bp, Homo sapien
gaaatttcattagtcacattgaggc

SEQ ID NO: 2660884 - DNA, 25 bp, Homo sapien
acaactccttcgtttcagatccaag

SEQ ID NO: 2660885 - DNA, 25 bp, Homo sapien
cataacggctatctcaagggccact

SEQ ID NO: 2660886 - DNA, 25 bp, Homo sapien
aagggccactgcagtctctttagca

SEQ ID NO: 2660887 - DNA, 25 bp, Homo sapien
ctttagcacctattgaagttctgtg

SEQ ID NO: 2660888 - DNA, 25 bp, Homo sapien
ctgcttcttctaggcccataacggc

SEQ ID NO: 2660889 - DNA, 25 bp, Homo sapien
gatctcaggactcaccaatgctctt

SEQ ID NO: 2660890 - DNA, 25 bp, Homo sapien
ggcagccaaggtcttacgaaatatg

SEQ ID NO: 2660891 - DNA, 25 bp, Homo sapien
caaaagtatgcagccggttcatgac

SEQ ID NO: 2660892 - DNA, 25 bp, Homo sapien
gcagaggcactgcaaatgctttaca

SEQ ID NO: 2660893 - DNA, 25 bp, Homo sapien
ttatacacaaggtaagtaaagtgga

SEQ ID NO: 2660894 - DNA, 25 bp, Homo sapien
attatacacaaggtaagtaaagtgg

SEQ ID NO: 2660895 - DNA, 25 bp, Homo sapien
tatacacaaggtaagtaaagtggaa

SEQ ID NO: 2660896 - DNA, 25 bp, Homo sapien
ctgttgcgtaatagtgtcccatggt

SEQ ID NO: 2660897 - DNA, 25 bp, Homo sapien
ttatagcactcatgaactccttccc

SEQ ID NO: 2660898 - DNA, 25 bp, Homo sapien
tgcgtaatagtgtcccatggtccct

SEQ ID NO: 2660899 - DNA, 25 bp, Homo sapien
gtccctgtagcagtcgcatcttata

SEQ ID NO: 2660900 - DNA, 25 bp, Homo sapien
gaataaaagagacatggtctgccta

SEQ ID NO: 2660901 - DNA, 25 bp, Homo sapien
taagtactgttttggtgctgcatgt

SEQ ID NO: 2660902 - DNA, 25 bp, Homo sapien
cagtcccagacttaggatggtccag

SEQ ID NO: 2660903 - DNA, 25 bp, Homo sapien
ggtctgcctatatgagagctcacag

SEQ ID NO: 2660904 - DNA, 25 bp, Homo sapien
gacttttctgagcatagaaggactg

SEQ ID NO: 2660905 - DNA, 25 bp, Homo sapien
ggactgcagacagccacctgatgtt

SEQ ID NO: 2660906 - DNA, 25 bp, Homo sapien
aggactgcagacagccacctgatgt

SEQ ID NO: 2660907 - DNA, 25 bp, Homo sapien
aaggactgcagacagccacctgatg

SEQ ID NO: 2660908 - DNA, 25 bp, Homo sapien
tcacgggaatatcactcatgtctgc

SEQ ID NO: 2660909 - DNA, 25 bp, Homo sapien
aaatgctctaaagacttcacgggaa

SEQ ID NO: 2660910 - DNA, 25 bp, Homo sapien
ggttcagagacatgccactcagata

SEQ ID NO: 2660911 - DNA, 25 bp, Homo sapien
gagtctagtataagtctggccccta

SEQ ID NO: 2660912 - DNA, 25 bp, Homo sapien
tcctttgatatacatgccatctagc

SEQ ID NO: 2660913 - DNA, 25 bp, Homo sapien
ctgttgcttactatgtttgcctctc

SEQ ID NO: 2660914 - DNA, 25 bp, Homo sapien
catgccatctagctataataccttc

SEQ ID NO: 2660915 - DNA, 25 bp, Homo sapien
ttctgttgcttactatgtttgcctc

SEQ ID NO: 2660916 - DNA, 25 bp, Homo sapien
gagaatgattattggcctgggccat

SEQ ID NO: 2660917 - DNA, 25 bp, Homo sapien
gagagccaaagttcagttgacgaca

SEQ ID NO: 2660918 - DNA, 25 bp, Homo sapien
tataagtacccaggcgtgtagggct

SEQ ID NO: 2660919 - DNA, 25 bp, Homo sapien
gagaatgtagggaacctttccacca

SEQ ID NO: 2660920 - DNA, 25 bp, Homo sapien
atcaagctgttctttagttttatag

SEQ ID NO: 2660921 - DNA, 25 bp, Homo sapien
catcaagctgttctttagttttata

SEQ ID NO: 2660922 - DNA, 25 bp, Homo sapien
ccagatgtgatgatctgcaaacagc

SEQ ID NO: 2660923 - DNA, 25 bp, Homo sapien
gatgtgatgatctgcaaacagctgg

SEQ ID NO: 2660924 - DNA, 25 bp, Homo sapien
atgtgatgatctgcaaacagctggg

SEQ ID NO: 2660925 - DNA, 25 bp, Homo sapien
cagatgtgatgatctgcaaacagct

SEQ ID NO: 2660926 - DNA, 25 bp, Homo sapien
tgtggaaatcggcaaggaaggcacc

SEQ ID NO: 2660927 - DNA, 25 bp, Homo sapien
gcatttataatgttgaccaccagag

SEQ ID NO: 2660928 - DNA, 25 bp, Homo sapien
aagggctttggcatcggttaaggca

SEQ ID NO: 2660929 - DNA, 25 bp, Homo sapien
ccggtaggcacagagacactcctta

SEQ ID NO: 2660930 - DNA, 25 bp, Homo sapien
gcactgctgatacttcacagggtga

SEQ ID NO: 2660931 - DNA, 25 bp, Homo sapien
tcctggattagagagcagtgtctga

SEQ ID NO: 2660932 - DNA, 25 bp, Homo sapien
tgcataaatctacaaagggctccct

SEQ ID NO: 2660933 - DNA, 25 bp, Homo sapien
gactattaatatgccagaactccga

SEQ ID NO: 2660934 - DNA, 25 bp, Homo sapien
tacattgcagaagtcccaacataag

SEQ ID NO: 2660935 - DNA, 25 bp, Homo sapien
tatttgtgtggagggcacccatagc

SEQ ID NO: 2660936 - DNA, 25 bp, Homo sapien
tatgttacccagactaagaagcgga

SEQ ID NO: 2660937 - DNA, 25 bp, Homo sapien
taccattgtggaaaattgatgcacc

SEQ ID NO: 2660938 - DNA, 25 bp, Homo sapien
tccttctgaacacctcttggtgaag

SEQ ID NO: 2660939 - DNA, 25 bp, Homo sapien
agcattcattctgggataatattct

SEQ ID NO: 2660940 - DNA, 25 bp, Homo sapien
tcattctgggataatattctttgtc

SEQ ID NO: 2660941 - DNA, 25 bp, Homo sapien
tgggataatattctttgtcactgaa

SEQ ID NO: 2660942 - DNA, 25 bp, Homo sapien
attgactaagcgtaggattaaaaat

SEQ ID NO: 2660943 - DNA, 25 bp, Homo sapien
attaatacattcctaaacatttagt

SEQ ID NO: 2660944 - DNA, 25 bp, Homo sapien
ttgaaaaattacatactattaatac

SEQ ID NO: 2660945 - DNA, 25 bp, Homo sapien
ggattgactaagcgtaggattaaaa

SEQ ID NO: 2660946 - DNA, 25 bp, Homo sapien
ctgcagctctgctcatttgatgctg

SEQ ID NO: 2660947 - DNA, 25 bp, Homo sapien
aagacatggactttacttctataag

SEQ ID NO: 2660948 - DNA, 25 bp, Homo sapien
agtcttaggaccatggcacactgca

SEQ ID NO: 2660949 - DNA, 25 bp, Homo sapien
gatgctgctttgtaaagacatggac

SEQ ID NO: 2660950 - DNA, 25 bp, Homo sapien
agggttgcccaagtattggatgttc

SEQ ID NO: 2660951 - DNA, 25 bp, Homo sapien
aaagggttgcccaagtattggatgt

SEQ ID NO: 2660952 - DNA, 25 bp, Homo sapien
aagggttgcccaagtattggatgtt

SEQ ID NO: 2660953 - DNA, 25 bp, Homo sapien
atcagagtagaagccaatgtatctt

SEQ ID NO: 2660954 - DNA, 25 bp, Homo sapien
aaatcagagtagaagccaatgtatc

SEQ ID NO: 2660955 - DNA, 25 bp, Homo sapien
ttaaaatcagagtagaagccaatgt

SEQ ID NO: 2660956 - DNA, 25 bp, Homo sapien
cagagtagaagccaatgtatcttga

SEQ ID NO: 2660957 - DNA, 25 bp, Homo sapien
gaggtagattcagcccaacaactgg

SEQ ID NO: 2660958 - DNA, 25 bp, Homo sapien
taagggacatttcgttcatcctgag

SEQ ID NO: 2660959 - DNA, 25 bp, Homo sapien
agacgttgctttggcataactcaga

SEQ ID NO: 2660960 - DNA, 25 bp, Homo sapien
ccatgatgtgatatagttgacattc

SEQ ID NO: 2660961 - DNA, 25 bp, Homo sapien
agacttatttaagaatatcagtact

SEQ ID NO: 2660962 - DNA, 25 bp, Homo sapien
cttatttaagaatatcagtactaaa

SEQ ID NO: 2660963 - DNA, 25 bp, Homo sapien
acttatttaagaatatcagtactaa

SEQ ID NO: 2660964 - DNA, 25 bp, Homo sapien
agaaaaataactgagcagtaaagac

SEQ ID NO: 2660965 - DNA, 25 bp, Homo sapien
cctcaaagagtacagcagagcagct

SEQ ID NO: 2660966 - DNA, 25 bp, Homo sapien
cagggctggccaggtaaactcttgg

SEQ ID NO: 2660967 - DNA, 25 bp, Homo sapien
tatcagtcctattaaagccagggct

SEQ ID NO: 2660968 - DNA, 25 bp, Homo sapien
ccagtttcagggacaggtaaatcca

SEQ ID NO: 2660969 - DNA, 25 bp, Homo sapien
tacttaactggctatgaaacttatt

SEQ ID NO: 2660970 - DNA, 25 bp, Homo sapien
taactggctatgaaacttatttaca

SEQ ID NO: 2660971 - DNA, 25 bp, Homo sapien
cttaatacttaactggctatgaaac

SEQ ID NO: 2660972 - DNA, 25 bp, Homo sapien
gctatgaaacttatttacagcctta

SEQ ID NO: 2660973 - DNA, 25 bp, Homo sapien
gatccactggtgaatgatgtcctca

SEQ ID NO: 2660974 - DNA, 25 bp, Homo sapien
ttaagccggctctcatcctagcatg

SEQ ID NO: 2660975 - DNA, 25 bp, Homo sapien
tcctagcatgaatatgggcagctca

SEQ ID NO: 2660976 - DNA, 25 bp, Homo sapien
gctcttaatctgcagacgtggactg

SEQ ID NO: 2660977 - DNA, 25 bp, Homo sapien
tctcagaatctgttagcaaaggata

SEQ ID NO: 2660978 - DNA, 25 bp, Homo sapien
ggctccaaactgatagactctcatc

SEQ ID NO: 2660979 - DNA, 25 bp, Homo sapien
gaaaggcctccccagtctacaggag

SEQ ID NO: 2660980 - DNA, 25 bp, Homo sapien
caaaggataactaatgtttgcagac

SEQ ID NO: 2660981 - DNA, 25 bp, Homo sapien
tgaagtgccgcagaaacaataattg

SEQ ID NO: 2660982 - DNA, 25 bp, Homo sapien
gacctggtggtcactaaaatcactt

SEQ ID NO: 2660983 - DNA, 25 bp, Homo sapien
tgtaaaaatccagaggagtagcttc

SEQ ID NO: 2660984 - DNA, 25 bp, Homo sapien
cagctccaatggtctagaatgcaag

SEQ ID NO: 2660985 - DNA, 25 bp, Homo sapien
tagggcagtatgctggataccagaa

SEQ ID NO: 2660986 - DNA, 25 bp, Homo sapien
tgacaataaaaggaaggatcgtacg

SEQ ID NO: 2660987 - DNA, 25 bp, Homo sapien
ccagtgatcactagggattcagaat

SEQ ID NO: 2660988 - DNA, 25 bp, Homo sapien
caacttctatgaatttctagggcag

SEQ ID NO: 2660989 - DNA, 25 bp, Homo sapien
caaacataggtcaggtgcaaagtaa

SEQ ID NO: 2660990 - DNA, 25 bp, Homo sapien
aacataggtcaggtgcaaagtaagc

SEQ ID NO: 2660991 - DNA, 25 bp, Homo sapien
acaaacaaacataggtcaggtgcaa

SEQ ID NO: 2660992 - DNA, 25 bp, Homo sapien
aacaaacataggtcaggtgcaaagt

SEQ ID NO: 2660993 - DNA, 25 bp, Homo sapien
tcaacttacgacttagaacctgatg

SEQ ID NO: 2660994 - DNA, 25 bp, Homo sapien
tgtaccagtgcatgaaacccctgtc

SEQ ID NO: 2660995 - DNA, 25 bp, Homo sapien
gaacctgatgttatccgtagattcc

SEQ ID NO: 2660996 - DNA, 25 bp, Homo sapien
gcaaagtcatacactcttgagggaa

SEQ ID NO: 2660997 - DNA, 25 bp, Homo sapien
gactatctttacaacctaggcgtag

SEQ ID NO: 2660998 - DNA, 25 bp, Homo sapien
cataaataatctccggcgcctcaga

SEQ ID NO: 2660999 - DNA, 25 bp, Homo sapien
tgctaagcagtcctacctgaggccc

SEQ ID NO: 2661000 - DNA, 25 bp, Homo sapien
gacattcagaagtatggccaacgga

SEQ ID NO: 2661001 - DNA, 25 bp, Homo sapien
tccgtaggatcaagagcagaacctt

SEQ ID NO: 2661002 - DNA, 25 bp, Homo sapien
tttcctaacgtgtagctgcagtcag

SEQ ID NO: 2661003 - DNA, 25 bp, Homo sapien
tcaacagatgctttcggatgagcct

SEQ ID NO: 2661004 - DNA, 25 bp, Homo sapien
ttgggttccatatccagcctcagga

SEQ ID NO: 2661005 - DNA, 25 bp, Homo sapien
tctgatgcaagggagtttcctcaca

SEQ ID NO: 2661006 - DNA, 25 bp, Homo sapien
gttgcttgaactttattgaggtgag

SEQ ID NO: 2661007 - DNA, 25 bp, Homo sapien
tgaggtgagtatttcaactctatcg

SEQ ID NO: 2661008 - DNA, 25 bp, Homo sapien
ctctatcgtaccttctgttcttggg

SEQ ID NO: 2661009 - DNA, 25 bp, Homo sapien
aggacttcagctcagccatttgagg

SEQ ID NO: 2661010 - DNA, 25 bp, Homo sapien
ttaagactggcagaaaactaggttg

SEQ ID NO: 2661011 - DNA, 25 bp, Homo sapien
cagtgctgtgccttttgtatttcag

SEQ ID NO: 2661012 - DNA, 25 bp, Homo sapien
gctggccatcttgacgttctaggca

SEQ ID NO: 2661013 - DNA, 25 bp, Homo sapien
tactgctaggaagctccgtagtcac

SEQ ID NO: 2661014 - DNA, 25 bp, Homo sapien
gacgagaccagaagtggcatgataa

SEQ ID NO: 2661015 - DNA, 25 bp, Homo sapien
catgcaaaaggaatcgtgctggaaa

SEQ ID NO: 2661016 - DNA, 25 bp, Homo sapien
gcttctcatgcaaaaggaatcgtgc

SEQ ID NO: 2661017 - DNA, 25 bp, Homo sapien
taattttccagactactcggaggac

SEQ ID NO: 2661018 - DNA, 25 bp, Homo sapien
ccacaaagattcagctcagcgactc

SEQ ID NO: 2661019 - DNA, 25 bp, Homo sapien
tatgaattaaggctcagaagtctaa

SEQ ID NO: 2661020 - DNA, 25 bp, Homo sapien
tgactcgccagtcaaaataaacggc

SEQ ID NO: 2661021 - DNA, 25 bp, Homo sapien
catgttcctgtgtaactctcagacc

SEQ ID NO: 2661022 - DNA, 25 bp, Homo sapien
gagatgtcaccttaaactaccctat

SEQ ID NO: 2661023 - DNA, 25 bp, Homo sapien
ctagcccattctacatctgcacaga

SEQ ID NO: 2661024 - DNA, 25 bp, Homo sapien
tcaacagccagagtaaccccataaa

SEQ ID NO: 2661025 - DNA, 25 bp, Homo sapien
tcctacagttaactcctccacttgg

SEQ ID NO: 2661026 - DNA, 25 bp, Homo sapien
ttgcagctgtacctgtcactctact

SEQ ID NO: 2661027 - DNA, 25 bp, Homo sapien
acataaactgttattgttcctacag

SEQ ID NO: 2661028 - DNA, 25 bp, Homo sapien
cctgtcactctactaccatacataa

SEQ ID NO: 2661029 - DNA, 25 bp, Homo sapien
ctctttctcttcactgatggccttg

SEQ ID NO: 2661030 - DNA, 25 bp, Homo sapien
tctctcctcaaacctttttctccca

SEQ ID NO: 2661031 - DNA, 25 bp, Homo sapien
cactctttctcttcactgatggcct

SEQ ID NO: 2661032 - DNA, 25 bp, Homo sapien
ttctcccactctttctcttcactga

SEQ ID NO: 2661033 - DNA, 25 bp, Homo sapien
tcaaatgggctctcagaactgctca

SEQ ID NO: 2661034 - DNA, 25 bp, Homo sapien
cctaccattctagattaggaggcag

SEQ ID NO: 2661035 - DNA, 25 bp, Homo sapien
aaaattatcgttatctgtccctcag

SEQ ID NO: 2661036 - DNA, 25 bp, Homo sapien
caactggagtcaccatgttattcaa

SEQ ID NO: 2661037 - DNA, 25 bp, Homo sapien
atcctgaatacaggatgcagaagac

SEQ ID NO: 2661038 - DNA, 25 bp, Homo sapien
cagaagacctgaatagctctatcaa

SEQ ID NO: 2661039 - DNA, 25 bp, Homo sapien
cacttaatgtcgctatcatcctgaa

SEQ ID NO: 2661040 - DNA, 25 bp, Homo sapien
tctatcaaccatcttgggccagtta

SEQ ID NO: 2661041 - DNA, 25 bp, Homo sapien
tgatccaccatccaaatatgatcct

SEQ ID NO: 2661042 - DNA, 25 bp, Homo sapien
tactgaaagccataatccaacatcc

SEQ ID NO: 2661043 - DNA, 25 bp, Homo sapien
ggctcataacacactctgaccattg

SEQ ID NO: 2661044 - DNA, 25 bp, Homo sapien
tgaccattggttcatgccttatttg

SEQ ID NO: 2661045 - DNA, 25 bp, Homo sapien
tcctggcaaatatatggtccaaggt

SEQ ID NO: 2661046 - DNA, 25 bp, Homo sapien
caaatatatggtccaaggttagtga

SEQ ID NO: 2661047 - DNA, 25 bp, Homo sapien
aaatatatggtccaaggttagtgaa

SEQ ID NO: 2661048 - DNA, 25 bp, Homo sapien
ttcctggcaaatatatggtccaagg

SEQ ID NO: 2661049 - DNA, 25 bp, Homo sapien
ttttctacaattgcgtataaatgga

SEQ ID NO: 2661050 - DNA, 25 bp, Homo sapien
tttctacaattgcgtataaatggaa

SEQ ID NO: 2661051 - DNA, 25 bp, Homo sapien
ttctacaattgcgtataaatggaat

SEQ ID NO: 2661052 - DNA, 25 bp, Homo sapien
aaccacttctttatttgaagatgtt

SEQ ID NO: 2661053 - DNA, 25 bp, Homo sapien
acttctttatttgaagatgttggag

SEQ ID NO: 2661054 - DNA, 25 bp, Homo sapien
ttctttatttgaagatgttggagaa

SEQ ID NO: 2661055 - DNA, 25 bp, Homo sapien
ccacttctttatttgaagatgttgg

SEQ ID NO: 2661056 - DNA, 25 bp, Homo sapien
gattggtattgttgtgaaattctgg

SEQ ID NO: 2661057 - DNA, 25 bp, Homo sapien
attggtattgttgtgaaattctgga

SEQ ID NO: 2661058 - DNA, 25 bp, Homo sapien
tggctgaatgcattccaaggttctt

SEQ ID NO: 2661059 - DNA, 25 bp, Homo sapien
ttgatggagacattaactgggccat

SEQ ID NO: 2661060 - DNA, 25 bp, Homo sapien
tggagacattaactgggccatgatg

SEQ ID NO: 2661061 - DNA, 25 bp, Homo sapien
gcccagaagagaatgcaaggaattc

SEQ ID NO: 2661062 - DNA, 25 bp, Homo sapien
ttctgaccaaatggctcgtctgtaa

SEQ ID NO: 2661063 - DNA, 25 bp, Homo sapien
caaatggctcgtctgtaaggtccag

SEQ ID NO: 2661064 - DNA, 25 bp, Homo sapien
gggtccacagttaccttctgaccaa

SEQ ID NO: 2661065 - DNA, 25 bp, Homo sapien
gtaaggtccagccaggtttgattct

SEQ ID NO: 2661066 - DNA, 25 bp, Homo sapien
ttaacagaacgcaatagccctaggg

SEQ ID NO: 2661067 - DNA, 25 bp, Homo sapien
gggcttcctcaaactgagagatcaa

SEQ ID NO: 2661068 - DNA, 25 bp, Homo sapien
tgcagagttaacagaacgcaatagc

SEQ ID NO: 2661069 - DNA, 25 bp, Homo sapien
aaaaagttgaatgcagagttaacag

SEQ ID NO: 2661070 - DNA, 25 bp, Homo sapien
tcagggtcctatacaaaggagccta

SEQ ID NO: 2661071 - DNA, 25 bp, Homo sapien
agggtcctatacaaaggagcctact

SEQ ID NO: 2661072 - DNA, 25 bp, Homo sapien
cagggtcctatacaaaggagcctac

SEQ ID NO: 2661073 - DNA, 25 bp, Homo sapien
tcaaaacgagtttgagaacccttgc

SEQ ID NO: 2661074 - DNA, 25 bp, Homo sapien
caagttattccgacaattagcaaaa

SEQ ID NO: 2661075 - DNA, 25 bp, Homo sapien
tcattttctacaagttattccgaca

SEQ ID NO: 2661076 - DNA, 25 bp, Homo sapien
tcagaagaaaactgccgggaaaata

SEQ ID NO: 2661077 - DNA, 25 bp, Homo sapien
tccaagagctaaaacgtggtcacct

SEQ ID NO: 2661078 - DNA, 25 bp, Homo sapien
tgtgagacccgaagcttactgaaga

SEQ ID NO: 2661079 - DNA, 25 bp, Homo sapien
tcacaaccttgtcagatagggccaa

SEQ ID NO: 2661080 - DNA, 25 bp, Homo sapien
ttcacaggaatcagccactaggtct

SEQ ID NO: 2661081 - DNA, 25 bp, Homo sapien
tgcttaggaccattagacattcgga

SEQ ID NO: 2661082 - DNA, 25 bp, Homo sapien
gaagcaaatcgctcaccataaggag

SEQ ID NO: 2661083 - DNA, 25 bp, Homo sapien
taacccctggaacgtctctatggcc

SEQ ID NO: 2661084 - DNA, 25 bp, Homo sapien
tacctcaaggtggatcacgtaacac

SEQ ID NO: 2661085 - DNA, 25 bp, Homo sapien
cttatagcaagacttctggggtttc

SEQ ID NO: 2661086 - DNA, 25 bp, Homo sapien
aagacttctggggtttccagcatca

SEQ ID NO: 2661087 - DNA, 25 bp, Homo sapien
tttccagcatcaccaagcttcaaag

SEQ ID NO: 2661088 - DNA, 25 bp, Homo sapien
ggtttccagcatcaccaagcttcaa

SEQ ID NO: 2661089 - DNA, 25 bp, Homo sapien
tattcaggggagtttagtcattcaa

SEQ ID NO: 2661090 - DNA, 25 bp, Homo sapien
taaaagaggtacattattaagccag

SEQ ID NO: 2661091 - DNA, 25 bp, Homo sapien
ggagtttagtcattcaaaatacgta

SEQ ID NO: 2661092 - DNA, 25 bp, Homo sapien
aaggcagctaaaagaggtacattat

SEQ ID NO: 2661093 - DNA, 25 bp, Homo sapien
tgggcttcaaatccaatcttaactc

SEQ ID NO: 2661094 - DNA, 25 bp, Homo sapien
cattagtagtgattacaaatggtgt

SEQ ID NO: 2661095 - DNA, 25 bp, Homo sapien
ttgaataagctcacttggagagtaa

SEQ ID NO: 2661096 - DNA, 25 bp, Homo sapien
aataagctcacttggagagtaagtg

SEQ ID NO: 2661097 - DNA, 25 bp, Homo sapien
caatggcgccctcttttgtcaggcg

SEQ ID NO: 2661098 - DNA, 25 bp, Homo sapien
tatgaacagtacaatggcgccctct

SEQ ID NO: 2661099 - DNA, 25 bp, Homo sapien
gcaaggcatcgtctatgaacagtac

SEQ ID NO: 2661100 - DNA, 25 bp, Homo sapien
cctcttttgtcaggcggcagaacgg

SEQ ID NO: 2661101 - DNA, 25 bp, Homo sapien
ctgaaaatggttataaaaacagcat

SEQ ID NO: 2661102 - DNA, 25 bp, Homo sapien
tcatccgtgtcgctgggcagcaaga

SEQ ID NO: 2661103 - DNA, 25 bp, Homo sapien
ataaaagtgacctcccacaggctcg

SEQ ID NO: 2661104 - DNA, 25 bp, Homo sapien
tgttggaaatgatctcgactcggcg

SEQ ID NO: 2661105 - DNA, 25 bp, Homo sapien
tcggcgcaaactaaaccaactctgg

SEQ ID NO: 2661106 - DNA, 25 bp, Homo sapien
cacacgacacttctctaagcttggg

SEQ ID NO: 2661107 - DNA, 25 bp, Homo sapien
aaagctgtcactcacactgccgatg

SEQ ID NO: 2661108 - DNA, 25 bp, Homo sapien
gaaaaggttggaatgtgcccataag

SEQ ID NO: 2661109 - DNA, 25 bp, Homo sapien
ttcactagggcttagatggctggca

SEQ ID NO: 2661110 - DNA, 25 bp, Homo sapien
aaggagctgaagtgatacatccctt

SEQ ID NO: 2661111 - DNA, 25 bp, Homo sapien
ggagctgaagtgatacatcccttct

SEQ ID NO: 2661112 - DNA, 25 bp, Homo sapien
ctgaagtgatacatcccttctctcc

SEQ ID NO: 2661113 - DNA, 25 bp, Homo sapien
atcccttctctcctaggatctactt

SEQ ID NO: 2661114 - DNA, 25 bp, Homo sapien
cagtcttgggctttggtaaatcgtc

SEQ ID NO: 2661115 - DNA, 25 bp, Homo sapien
cgagaaggaggaggcgcagtcttgg

SEQ ID NO: 2661116 - DNA, 25 bp, Homo sapien
gcagcaggatcagggacattgccag

SEQ ID NO: 2661117 - DNA, 25 bp, Homo sapien
cgatcagaaaagctggcgagaagga

SEQ ID NO: 2661118 - DNA, 25 bp, Homo sapien
gataccgcaggtagatgagcatgtg

SEQ ID NO: 2661119 - DNA, 25 bp, Homo sapien
caggagaggcgatgagatcatattg

SEQ ID NO: 2661120 - DNA, 25 bp, Homo sapien
ctgtgtctcgagctttcagctgcga

SEQ ID NO: 2661121 - DNA, 25 bp, Homo sapien
catattgttggtccagataccgcag

SEQ ID NO: 2661122 - DNA, 25 bp, Homo sapien
agacaactttcggagcccactgtgg

SEQ ID NO: 2661123 - DNA, 25 bp, Homo sapien
tgctttcagggtactttgaggcaac

SEQ ID NO: 2661124 - DNA, 25 bp, Homo sapien
tgagatgccttttttgattgcccca

SEQ ID NO: 2661125 - DNA, 25 bp, Homo sapien
gattgccccaagtctacctaagtag

SEQ ID NO: 2661126 - DNA, 25 bp, Homo sapien
tgggactagacagcagactcatcgt

SEQ ID NO: 2661127 - DNA, 25 bp, Homo sapien
caggattcttcactgcagactacag

SEQ ID NO: 2661128 - DNA, 25 bp, Homo sapien
acagaattctgagagggccagaacc

SEQ ID NO: 2661129 - DNA, 25 bp, Homo sapien
tactgcttaccacctaggatgggac

SEQ ID NO: 2661130 - DNA, 25 bp, Homo sapien
tcactgattgcagagcttgacacca

SEQ ID NO: 2661131 - DNA, 25 bp, Homo sapien
ctgttttctcactgattgcagagct

SEQ ID NO: 2661132 - DNA, 25 bp, Homo sapien
tgattgcagagcttgacaccaccat

SEQ ID NO: 2661133 - DNA, 25 bp, Homo sapien
tttctcactgattgcagagcttgac

SEQ ID NO: 2661134 - DNA, 25 bp, Homo sapien
cagctgctctcataactgagagcca

SEQ ID NO: 2661135 - DNA, 25 bp, Homo sapien
catgccaacatcatgcagctgctct

SEQ ID NO: 2661136 - DNA, 25 bp, Homo sapien
gaaggtgaagccaccagcaaagtaa

SEQ ID NO: 2661137 - DNA, 25 bp, Homo sapien
tcataactgagagccaggggagaag

SEQ ID NO: 2661138 - DNA, 25 bp, Homo sapien
tgggcataggtcttttgattccacc

SEQ ID NO: 2661139 - DNA, 25 bp, Homo sapien
gattccctgtaaggacaaaaccaca

SEQ ID NO: 2661140 - DNA, 25 bp, Homo sapien
gaagaacaacttgactgcatgtgga

SEQ ID NO: 2661141 - DNA, 25 bp, Homo sapien
tcaggaccacgacatttgggcatag

SEQ ID NO: 2661142 - DNA, 25 bp, Homo sapien
gaaacagtgcaggagcctaattcgt

SEQ ID NO: 2661143 - DNA, 25 bp, Homo sapien
ccttgtgaagagtgtatcatggaga

SEQ ID NO: 2661144 - DNA, 25 bp, Homo sapien
tcctgactacaaaggaaccatctgg

SEQ ID NO: 2661145 - DNA, 25 bp, Homo sapien
tgtctcaatgggcatgtcacaaggc

SEQ ID NO: 2661146 - DNA, 25 bp, Homo sapien
tggcaacataatctcctaccctgga

SEQ ID NO: 2661147 - DNA, 25 bp, Homo sapien
tttggcaacataatctcctaccctg

SEQ ID NO: 2661148 - DNA, 25 bp, Homo sapien
aatgtttggcaacataatctcctac

SEQ ID NO: 2661149 - DNA, 25 bp, Homo sapien
ggaaatgtttggcaacataatctcc

SEQ ID NO: 2661150 - DNA, 25 bp, Homo sapien
cacctggaaactagggtgtgaagaa

SEQ ID NO: 2661151 - DNA, 25 bp, Homo sapien
ttcactggtacgtaacacctggaaa

SEQ ID NO: 2661152 - DNA, 25 bp, Homo sapien
ggctaccagtaattaccacataaaa

SEQ ID NO: 2661153 - DNA, 25 bp, Homo sapien
tccttctaactgttggaggctacca

SEQ ID NO: 2661154 - DNA, 25 bp, Homo sapien
tgttcaaactcgaagctttttcctc

SEQ ID NO: 2661155 - DNA, 25 bp, Homo sapien
gaactttcatgcagggtactagtcc

SEQ ID NO: 2661156 - DNA, 25 bp, Homo sapien
tcatgcagggtactagtccaagtgc

SEQ ID NO: 2661157 - DNA, 25 bp, Homo sapien
tttcatgcagggtactagtccaagt

SEQ ID NO: 2661158 - DNA, 25 bp, Homo sapien
agacacacctgccagcttattgctg

SEQ ID NO: 2661159 - DNA, 25 bp, Homo sapien
tatgtttgtagatccacgaggctgg

SEQ ID NO: 2661160 - DNA, 25 bp, Homo sapien
caagattgtcatctggcccattaca

SEQ ID NO: 2661161 - DNA, 25 bp, Homo sapien
cagagtgggaagacacaagattgtc

SEQ ID NO: 2661162 - DNA, 25 bp, Homo sapien
catttgtatatgcaagtccaaatct

SEQ ID NO: 2661163 - DNA, 25 bp, Homo sapien
gacagctgccatttgtatatgcaag

SEQ ID NO: 2661164 - DNA, 25 bp, Homo sapien
gagacagctgccatttgtatatgca

SEQ ID NO: 2661165 - DNA, 25 bp, Homo sapien
gctgccatttgtatatgcaagtcca

SEQ ID NO: 2661166 - DNA, 25 bp, Homo sapien
gttggagaccagcattggcaacttt

SEQ ID NO: 2661167 - DNA, 25 bp, Homo sapien
attggcaactttgggagaccccagc

SEQ ID NO: 2661168 - DNA, 25 bp, Homo sapien
tctcatcttataagaatcatctggg

SEQ ID NO: 2661169 - DNA, 25 bp, Homo sapien
ttataagaatcatctgggctgggca

SEQ ID NO: 2661170 - DNA, 25 bp, Homo sapien
tcaacaaccagagaatcaacccatg

SEQ ID NO: 2661171 - DNA, 25 bp, Homo sapien
tgctctcagccagacaatgtccggc

SEQ ID NO: 2661172 - DNA, 25 bp, Homo sapien
ggagcatagcgctgaagagagcaca

SEQ ID NO: 2661173 - DNA, 25 bp, Homo sapien
aacccatgtttgctgatcacctctg

SEQ ID NO: 2661174 - DNA, 25 bp, Homo sapien
acactgagttccaggacccggtcac

SEQ ID NO: 2661175 - DNA, 25 bp, Homo sapien
agcctgaaagaccaaaaccataggg

SEQ ID NO: 2661176 - DNA, 25 bp, Homo sapien
taaagcgtgactggggcacactgag

SEQ ID NO: 2661177 - DNA, 25 bp, Homo sapien
tcacactgtaaagcgtgactggggc

SEQ ID NO: 2661178 - DNA, 25 bp, Homo sapien
ccaatagcagcattcaagtcccatg

SEQ ID NO: 2661179 - DNA, 25 bp, Homo sapien
tgtgcaccaatagcagcattcaagt

SEQ ID NO: 2661180 - DNA, 25 bp, Homo sapien
cagaaatgtgcaccaatagcagcat

SEQ ID NO: 2661181 - DNA, 25 bp, Homo sapien
gacacgtctgcagaaatgtgcacca

SEQ ID NO: 2661182 - DNA, 25 bp, Homo sapien
atgcccactgcggatgaagcctttc

SEQ ID NO: 2661183 - DNA, 25 bp, Homo sapien
tgcccactgcggatgaagcctttct

SEQ ID NO: 2661184 - DNA, 25 bp, Homo sapien
attcaattccaagaccatgaataga

SEQ ID NO: 2661185 - DNA, 25 bp, Homo sapien
caagaccatgaatagatgtttatga

SEQ ID NO: 2661186 - DNA, 25 bp, Homo sapien
caaggtcttatcagccaacttgtaa

SEQ ID NO: 2661187 - DNA, 25 bp, Homo sapien
aagcagaaattcagagcccctctag

SEQ ID NO: 2661188 - DNA, 25 bp, Homo sapien
gccacttgcaggcacaaactgtcct

SEQ ID NO: 2661189 - DNA, 25 bp, Homo sapien
taaattgtctttcagctcagaggac

SEQ ID NO: 2661190 - DNA, 25 bp, Homo sapien
ccagttccaagagctccattaggac

SEQ ID NO: 2661191 - DNA, 25 bp, Homo sapien
gactgatactagcaccagagtgtcc

SEQ ID NO: 2661192 - DNA, 25 bp, Homo sapien
ccattaggacttgcattaggaccag

SEQ ID NO: 2661193 - DNA, 25 bp, Homo sapien
tgggctggtccacgtcttgtgatca

SEQ ID NO: 2661194 - DNA, 25 bp, Homo sapien
gaaagtcttcgatatcatagacaaa

SEQ ID NO: 2661195 - DNA, 25 bp, Homo sapien
tgccattctggacaatgagctgcca

SEQ ID NO: 2661196 - DNA, 25 bp, Homo sapien
agacaaagatcccattgtgtaagca

SEQ ID NO: 2661197 - DNA, 25 bp, Homo sapien
tgagctgccattgaaagtcttcgat

SEQ ID NO: 2661198 - DNA, 25 bp, Homo sapien
tttcagaaaatgaaagcttttccaa

SEQ ID NO: 2661199 - DNA, 25 bp, Homo sapien
ttatttcagaaaatgaaagcttttc

SEQ ID NO: 2661200 - DNA, 25 bp, Homo sapien
cagaaaatgaaagcttttccaagaa

SEQ ID NO: 2661201 - DNA, 25 bp, Homo sapien
tatttcagaaaatgaaagcttttcc

SEQ ID NO: 2661202 - DNA, 25 bp, Homo sapien
gatggtctgagaatgccctctggtg

SEQ ID NO: 2661203 - DNA, 25 bp, Homo sapien
gccgaagtggagaattgttttgtac

SEQ ID NO: 2661204 - DNA, 25 bp, Homo sapien
tttcatccaaaactggccgaagtgg

SEQ ID NO: 2661205 - DNA, 25 bp, Homo sapien
tggtgccttcctactgtgtcttcaa

SEQ ID NO: 2661206 - DNA, 25 bp, Homo sapien
gattattagatccaactgactcacg

SEQ ID NO: 2661207 - DNA, 25 bp, Homo sapien
tatgagtccaaaacctactactttg

SEQ ID NO: 2661208 - DNA, 25 bp, Homo sapien
tcacaattagcccaactcagagtca

SEQ ID NO: 2661209 - DNA, 25 bp, Homo sapien
tgtaggcaatgttaaccagttcttc

SEQ ID NO: 2661210 - DNA, 25 bp, Homo sapien
tcactaaagtacgagtaggcacaag

SEQ ID NO: 2661211 - DNA, 25 bp, Homo sapien
gaattgcagtgtaaccttggtcctc

SEQ ID NO: 2661212 - DNA, 25 bp, Homo sapien
tatttacaaagcttgccacccaggc

SEQ ID NO: 2661213 - DNA, 25 bp, Homo sapien
caaagtgtggcaaggtgtcatcaaa

SEQ ID NO: 2661214 - DNA, 25 bp, Homo sapien
atcatgtggacgttttcagatggcc

SEQ ID NO: 2661215 - DNA, 25 bp, Homo sapien
tttcagagtaaagcatggtctggca

SEQ ID NO: 2661216 - DNA, 25 bp, Homo sapien
tctggcatcatgtggacgttttcag

SEQ ID NO: 2661217 - DNA, 25 bp, Homo sapien
taaagcatggtctggcatcatgtgg

SEQ ID NO: 2661218 - DNA, 25 bp, Homo sapien
gaaactaaatctgctagggaaggct

SEQ ID NO: 2661219 - DNA, 25 bp, Homo sapien
tgtacttcaaagatgcaggagccaa

SEQ ID NO: 2661220 - DNA, 25 bp, Homo sapien
gaccctggccttccctacaatgtgg

SEQ ID NO: 2661221 - DNA, 25 bp, Homo sapien
gatacggagctaacaaagaggctgc

SEQ ID NO: 2661222 - DNA, 25 bp, Homo sapien
tgaatggattcagcatgacccggca

SEQ ID NO: 2661223 - DNA, 25 bp, Homo sapien
taaaataggccagggacaactgtct

SEQ ID NO: 2661224 - DNA, 25 bp, Homo sapien
tcattacaaggaggctacaaaccat

SEQ ID NO: 2661225 - DNA, 25 bp, Homo sapien
tgtctggtagactctagaaaacccg

SEQ ID NO: 2661226 - DNA, 25 bp, Homo sapien
tctaaaactataaaccaagctgacc

SEQ ID NO: 2661227 - DNA, 25 bp, Homo sapien
ccttctaaaactataaaccaagctg

SEQ ID NO: 2661228 - DNA, 25 bp, Homo sapien
aaactataaaccaagctgacctcat

SEQ ID NO: 2661229 - DNA, 25 bp, Homo sapien
taaaactataaaccaagctgacctc

SEQ ID NO: 2661230 - DNA, 25 bp, Homo sapien
ctttctgaatggctggagttgctag

SEQ ID NO: 2661231 - DNA, 25 bp, Homo sapien
catccaggtcttctttctgaatggc

SEQ ID NO: 2661232 - DNA, 25 bp, Homo sapien
ttatctccctgcatccaggtcttct

SEQ ID NO: 2661233 - DNA, 25 bp, Homo sapien
tctgaatggctggagttgctagagt

SEQ ID NO: 2661234 - DNA, 25 bp, Homo sapien
caggttctggaagtcttaggaatcc

SEQ ID NO: 2661235 - DNA, 25 bp, Homo sapien
tgaccggaagaatggacacgctatt

SEQ ID NO: 2661236 - DNA, 25 bp, Homo sapien
ggatctgcagatgccagtgtattct

SEQ ID NO: 2661237 - DNA, 25 bp, Homo sapien
ggaatgcttagatttccaaatgtgg

SEQ ID NO: 2661238 - DNA, 25 bp, Homo sapien
tgacatcactttatgccttgatcat

SEQ ID NO: 2661239 - DNA, 25 bp, Homo sapien
gacatcactttatgccttgatcatt

SEQ ID NO: 2661240 - DNA, 25 bp, Homo sapien
acatcactttatgccttgatcattt

SEQ ID NO: 2661241 - DNA, 25 bp, Homo sapien
gcagacagcttgtgtggccatggat

SEQ ID NO: 2661242 - DNA, 25 bp, Homo sapien
tgtgcccttgtttcagatatatctg

SEQ ID NO: 2661243 - DNA, 25 bp, Homo sapien
tatggttaatgactaccactgtgcc

SEQ ID NO: 2661244 - DNA, 25 bp, Homo sapien
tactgtaattgagagcctagctaat

SEQ ID NO: 2661245 - DNA, 25 bp, Homo sapien
ttcaccagctcctgctgttgccccc

SEQ ID NO: 2661246 - DNA, 25 bp, Homo sapien
tttcaccagctcctgctgttgcccc

SEQ ID NO: 2661247 - DNA, 25 bp, Homo sapien
ctttcaccagctcctgctgttgccc

SEQ ID NO: 2661248 - DNA, 25 bp, Homo sapien
caccagctcctgctgttgcccccat

SEQ ID NO: 2661249 - DNA, 25 bp, Homo sapien
ctttgtagcgtcaagattcgatgtg

SEQ ID NO: 2661250 - DNA, 25 bp, Homo sapien
cgtcaagattcgatgtgagatgata

SEQ ID NO: 2661251 - DNA, 25 bp, Homo sapien
tataaagcaactggattcgtttcgc

SEQ ID NO: 2661252 - DNA, 25 bp, Homo sapien
gattcgtttcgcaaacacagattct

SEQ ID NO: 2661253 - DNA, 25 bp, Homo sapien
tgaacgccaggagtaaaattgcaac

SEQ ID NO: 2661254 - DNA, 25 bp, Homo sapien
agctaagtactcagtgaacgccagg

SEQ ID NO: 2661255 - DNA, 25 bp, Homo sapien
aatattgttcatctactggagctaa

SEQ ID NO: 2661256 - DNA, 25 bp, Homo sapien
tcatctactggagctaagtactcag

SEQ ID NO: 2661257 - DNA, 25 bp, Homo sapien
caactctcgatgaagacttgcctag

SEQ ID NO: 2661258 - DNA, 25 bp, Homo sapien
gatacaacccgaagaatcacaccca

SEQ ID NO: 2661259 - DNA, 25 bp, Homo sapien
tctacataactgcttggaccagagc

SEQ ID NO: 2661260 - DNA, 25 bp, Homo sapien
caagctgcacagtaaggccttgagg

SEQ ID NO: 2661261 - DNA, 25 bp, Homo sapien
gcctgtcatgccagagagtacattt

SEQ ID NO: 2661262 - DNA, 25 bp, Homo sapien
tgcatgaggcaagggttttccatct

SEQ ID NO: 2661263 - DNA, 25 bp, Homo sapien
caatctaagacgcttctccctggga

SEQ ID NO: 2661264 - DNA, 25 bp, Homo sapien
tggcttaagggcataggcaatctaa

SEQ ID NO: 2661265 - DNA, 25 bp, Homo sapien
agcaataccttcagagggagagttt

SEQ ID NO: 2661266 - DNA, 25 bp, Homo sapien
aataccttcagagggagagtttgct

SEQ ID NO: 2661267 - DNA, 25 bp, Homo sapien
gtgtttcttttctgttaggaagata

SEQ ID NO: 2661268 - DNA, 25 bp, Homo sapien
agaagcaataccttcagagggagag

SEQ ID NO: 2661269 - DNA, 25 bp, Homo sapien
tacacatgtgcagacctggaactat

SEQ ID NO: 2661270 - DNA, 25 bp, Homo sapien
tatgagagggttaccacccagtggg

SEQ ID NO: 2661271 - DNA, 25 bp, Homo sapien
ggctcctgtgggaacttgctcagca

SEQ ID NO: 2661272 - DNA, 25 bp, Homo sapien
ccttgaccagtgaagggtaggagcc

SEQ ID NO: 2661273 - DNA, 25 bp, Homo sapien
ttttggctgccaagtattaagtgag

SEQ ID NO: 2661274 - DNA, 25 bp, Homo sapien
taatggccctaagcaaacattttgg

SEQ ID NO: 2661275 - DNA, 25 bp, Homo sapien
ctttggataactacccactagtgga

SEQ ID NO: 2661276 - DNA, 25 bp, Homo sapien
catcgatgaatacataggttgattc

SEQ ID NO: 2661277 - DNA, 25 bp, Homo sapien
ggcgcccgccacctcaccaggttag

SEQ ID NO: 2661278 - DNA, 25 bp, Homo sapien
gcgcccgccacctcaccaggttagt

SEQ ID NO: 2661279 - DNA, 25 bp, Homo sapien
cgcccgccacctcaccaggttagtt

SEQ ID NO: 2661280 - DNA, 25 bp, Homo sapien
taactgcttttgagaacgtcttcaa

SEQ ID NO: 2661281 - DNA, 25 bp, Homo sapien
acttctccaggttgtcataactgct

SEQ ID NO: 2661282 - DNA, 25 bp, Homo sapien
ttcaacagcaactagtgacccagca

SEQ ID NO: 2661283 - DNA, 25 bp, Homo sapien
aacacatcatttcccgcagcttgca

SEQ ID NO: 2661284 - DNA, 25 bp, Homo sapien
cacagttgtcagtgtggtagcagga

SEQ ID NO: 2661285 - DNA, 25 bp, Homo sapien
cagaactgtggccagtaggctgagc

SEQ ID NO: 2661286 - DNA, 25 bp, Homo sapien
aagaggtttgggctacatgggccat

SEQ ID NO: 2661287 - DNA, 25 bp, Homo sapien
tagcaggagctctacagaaagtatc

SEQ ID NO: 2661288 - DNA, 25 bp, Homo sapien
gactgctgtagttttggcaaggtct

SEQ ID NO: 2661289 - DNA, 25 bp, Homo sapien
cccctttagtttgctgacatgtgat

SEQ ID NO: 2661290 - DNA, 25 bp, Homo sapien
tccccttgcccctttagtttgctga

SEQ ID NO: 2661291 - DNA, 25 bp, Homo sapien
gagattgcagatgccaagatctgca

SEQ ID NO: 2661292 - DNA, 25 bp, Homo sapien
gtcagttttggaaatctgaaacctg

SEQ ID NO: 2661293 - DNA, 25 bp, Homo sapien
aggatgttagggaatgatgggatgt

SEQ ID NO: 2661294 - DNA, 25 bp, Homo sapien
ttcaggatgttagggaatgatggga

SEQ ID NO: 2661295 - DNA, 25 bp, Homo sapien
caggatgttagggaatgatgggatg

SEQ ID NO: 2661296 - DNA, 25 bp, Homo sapien
ggatgttagggaatgatgggatgta

SEQ ID NO: 2661297 - DNA, 25 bp, Homo sapien
catatgtggaactctactctccagc

SEQ ID NO: 2661298 - DNA, 25 bp, Homo sapien
gtctccaaaggcaagaagcagtaat

SEQ ID NO: 2661299 - DNA, 25 bp, Homo sapien
tccaaaggcaagaagcagtaatgcc

SEQ ID NO: 2661300 - DNA, 25 bp, Homo sapien
aggcaagaagcagtaatgccaaacc

SEQ ID NO: 2661301 - DNA, 25 bp, Homo sapien
tccctctgaaacacttgcaggtgtg

SEQ ID NO: 2661302 - DNA, 25 bp, Homo sapien
tcctcgctcatcagggaaacatgac

SEQ ID NO: 2661303 - DNA, 25 bp, Homo sapien
tctgtgagtctcctcgctcatcagg

SEQ ID NO: 2661304 - DNA, 25 bp, Homo sapien
acatgactctccagtccctctgaaa

SEQ ID NO: 2661305 - DNA, 25 bp, Homo sapien
cactgtcatgagaacgcagctctgg

SEQ ID NO: 2661306 - DNA, 25 bp, Homo sapien
tagttgtttcctggtggtgccactc

SEQ ID NO: 2661307 - DNA, 25 bp, Homo sapien
tcagtgtcgctctagtgcccttgag

SEQ ID NO: 2661308 - DNA, 25 bp, Homo sapien
cactcgcctagcagtccctggtgaa

SEQ ID NO: 2661309 - DNA, 25 bp, Homo sapien
tatctgtctcttacctaatgtggcc

SEQ ID NO: 2661310 - DNA, 25 bp, Homo sapien
tcacagtcaactcctcagtcagatg

SEQ ID NO: 2661311 - DNA, 25 bp, Homo sapien
tcagatggcgacaatagctaacacg

SEQ ID NO: 2661312 - DNA, 25 bp, Homo sapien
cagtactttcgctgacaatgcacaa

SEQ ID NO: 2661313 - DNA, 25 bp, Homo sapien
aggcccaacgctccattactgtgag

SEQ ID NO: 2661314 - DNA, 25 bp, Homo sapien
catgaaggcccaacgctccattact

SEQ ID NO: 2661315 - DNA, 25 bp, Homo sapien
gaaggcccaacgctccattactgtg

SEQ ID NO: 2661316 - DNA, 25 bp, Homo sapien
tttctctagccccatgaaggcccaa

SEQ ID NO: 2661317 - DNA, 25 bp, Homo sapien
gagccccgatagagggctacactgc

SEQ ID NO: 2661318 - DNA, 25 bp, Homo sapien
cctggagccccgatagagggctaca

SEQ ID NO: 2661319 - DNA, 25 bp, Homo sapien
ccgatagagggctacactgccacac

SEQ ID NO: 2661320 - DNA, 25 bp, Homo sapien
gagggctacactgccacactacaac

SEQ ID NO: 2661321 - DNA, 25 bp, Homo sapien
tacagaagccttcctagtgaagcag

SEQ ID NO: 2661322 - DNA, 25 bp, Homo sapien
taggttggcgaggagcacatcgcat

SEQ ID NO: 2661323 - DNA, 25 bp, Homo sapien
gaagtggcctgattactgggcagaa

SEQ ID NO: 2661324 - DNA, 25 bp, Homo sapien
tagcagacacccagagatggaagtg

SEQ ID NO: 2661325 - DNA, 25 bp, Homo sapien
aaagcccaatttagtcatggcccgt

SEQ ID NO: 2661326 - DNA, 25 bp, Homo sapien
gtcatggcccgtgcacagctccagt

SEQ ID NO: 2661327 - DNA, 25 bp, Homo sapien
caatttagtcatggcccgtgcacag

SEQ ID NO: 2661328 - DNA, 25 bp, Homo sapien
gcccaatttagtcatggcccgtgca

SEQ ID NO: 2661329 - DNA, 25 bp, Homo sapien
cctcagttccgatccagatgttggg

SEQ ID NO: 2661330 - DNA, 25 bp, Homo sapien
tcccacctcagttccgatccagatg

SEQ ID NO: 2661331 - DNA, 25 bp, Homo sapien
ggctgagtgacggtaaaagctccct

SEQ ID NO: 2661332 - DNA, 25 bp, Homo sapien
ccttttccacgcaagccttccttct

SEQ ID NO: 2661333 - DNA, 25 bp, Homo sapien
ggacttatcctccttccatactcat

SEQ ID NO: 2661334 - DNA, 25 bp, Homo sapien
caaaattgcaaatagccttagccct

SEQ ID NO: 2661335 - DNA, 25 bp, Homo sapien
aaattgcaaatagccttagccctgg

SEQ ID NO: 2661336 - DNA, 25 bp, Homo sapien
tcacacgtacactggacttatcctc

SEQ ID NO: 2661337 - DNA, 25 bp, Homo sapien
ttaggcttgtgctcttaatgaggaa

SEQ ID NO: 2661338 - DNA, 25 bp, Homo sapien
cttaggcttgtgctcttaatgagga

SEQ ID NO: 2661339 - DNA, 25 bp, Homo sapien
agtgagtttgatcgcgggccacatt

SEQ ID NO: 2661340 - DNA, 25 bp, Homo sapien
gaggaagtgagtttgatcgcgggcc

SEQ ID NO: 2661341 - DNA, 25 bp, Homo sapien
tctggggacccgtggcagagttcac

SEQ ID NO: 2661342 - DNA, 25 bp, Homo sapien
ctgctgtggtacctggtttcttacg

SEQ ID NO: 2661343 - DNA, 25 bp, Homo sapien
atttaattgcaagttcagaacagag

SEQ ID NO: 2661344 - DNA, 25 bp, Homo sapien
tggtttcttacgatttaattgcaag

SEQ ID NO: 2661345 - DNA, 25 bp, Homo sapien
ctttgtcagtagcatgagaatggac

SEQ ID NO: 2661346 - DNA, 25 bp, Homo sapien
ctcaggcatgtctttgtcagtagca

SEQ ID NO: 2661347 - DNA, 25 bp, Homo sapien
catgtctttgtcagtagcatgagaa

SEQ ID NO: 2661348 - DNA, 25 bp, Homo sapien
caggcatgtctttgtcagtagcatg

SEQ ID NO: 2661349 - DNA, 25 bp, Homo sapien
tattgttggcgtgtatttcctgttt

SEQ ID NO: 2661350 - DNA, 25 bp, Homo sapien
tcagttcccactccttgcgtcagga

SEQ ID NO: 2661351 - DNA, 25 bp, Homo sapien
ctcattgctgaaattttggatgttc

SEQ ID NO: 2661352 - DNA, 25 bp, Homo sapien
aaactatggctaactgacctcgtga

SEQ ID NO: 2661353 - DNA, 25 bp, Homo sapien
tctctatcagtaaggtcagcatgtc

SEQ ID NO: 2661354 - DNA, 25 bp, Homo sapien
tatcgatgtgccagtgtctcaagca

SEQ ID NO: 2661355 - DNA, 25 bp, Homo sapien
gaaaatgcttcgtgaggtatcgatg

SEQ ID NO: 2661356 - DNA, 25 bp, Homo sapien
tgtctgtggtcaaagcatcttcaat

SEQ ID NO: 2661357 - DNA, 25 bp, Homo sapien
agctgatttgagtcactttaaccat

SEQ ID NO: 2661358 - DNA, 25 bp, Homo sapien
ggagtatatggagctgatttgagtc

SEQ ID NO: 2661359 - DNA, 25 bp, Homo sapien
gagaaactccttcgtaggcaaggaa

SEQ ID NO: 2661360 - DNA, 25 bp, Homo sapien
aggcaaggaagtactcccggtccat

SEQ ID NO: 2661361 - DNA, 25 bp, Homo sapien
gtactcccggtccatcacagggctg

SEQ ID NO: 2661362 - DNA, 25 bp, Homo sapien
gtagagaaactccttcgtaggcaag

SEQ ID NO: 2661363 - DNA, 25 bp, Homo sapien
ctgctcaggcccacagaggcaaatc

SEQ ID NO: 2661364 - DNA, 25 bp, Homo sapien
tcaggcccacagaggcaaatcagct

SEQ ID NO: 2661365 - DNA, 25 bp, Homo sapien
cccacagaggcaaatcagctgctct

SEQ ID NO: 2661366 - DNA, 25 bp, Homo sapien
gcaaatcagctgctctgcggacaca

SEQ ID NO: 2661367 - DNA, 25 bp, Homo sapien
tggcttgtagcctacatgtaccggg

SEQ ID NO: 2661368 - DNA, 25 bp, Homo sapien
tcaagcctccctcgacctttgtcct

SEQ ID NO: 2661369 - DNA, 25 bp, Homo sapien
catgtaccggggtgggatataagtc

SEQ ID NO: 2661370 - DNA, 25 bp, Homo sapien
cttccagggtggcttgtagcctaca

SEQ ID NO: 2661371 - DNA, 25 bp, Homo sapien
cataagatatgacttttcttaaggg

SEQ ID NO: 2661372 - DNA, 25 bp, Homo sapien
tcataagatatgacttttcttaagg

SEQ ID NO: 2661373 - DNA, 25 bp, Homo sapien
ataagatatgacttttcttaagggt

SEQ ID NO: 2661374 - DNA, 25 bp, Homo sapien
ctaagtatctcaggaaagtggaatc

SEQ ID NO: 2661375 - DNA, 25 bp, Homo sapien
ttcacctagtgtagtgaccctaagg

SEQ ID NO: 2661376 - DNA, 25 bp, Homo sapien
tcttaacctttatcaactgtacagc

SEQ ID NO: 2661377 - DNA, 25 bp, Homo sapien
gcaccattttactctatgtctataa

SEQ ID NO: 2661378 - DNA, 25 bp, Homo sapien
gctgagatacagaaaaatgtttctc

SEQ ID NO: 2661379 - DNA, 25 bp, Homo sapien
gagctgagatacagaaaaatgtttc

SEQ ID NO: 2661380 - DNA, 25 bp, Homo sapien
tgagatacagaaaaatgtttctcta

SEQ ID NO: 2661381 - DNA, 25 bp, Homo sapien
ctttgatagagctgagatacagaaa

SEQ ID NO: 2661382 - DNA, 25 bp, Homo sapien
cctggagcccataatgacatgtggg

SEQ ID NO: 2661383 - DNA, 25 bp, Homo sapien
catgtgggccttgaagcacgtgggc

SEQ ID NO: 2661384 - DNA, 25 bp, Homo sapien
aatatccctgtttgttgcaagacct

SEQ ID NO: 2661385 - DNA, 25 bp, Homo sapien
cacccagatttgttagtggctgcca

SEQ ID NO: 2661386 - DNA, 25 bp, Homo sapien
atggctgagcacagaaagtgcagct

SEQ ID NO: 2661387 - DNA, 25 bp, Homo sapien
tggctgagcacagaaagtgcagctc

SEQ ID NO: 2661388 - DNA, 25 bp, Homo sapien
tgcagctctggtgcaaactggcagc

SEQ ID NO: 2661389 - DNA, 25 bp, Homo sapien
ggctgagcacagaaagtgcagctct

SEQ ID NO: 2661390 - DNA, 25 bp, Homo sapien
tgggcctaaaaatctagggcttgtg

SEQ ID NO: 2661391 - DNA, 25 bp, Homo sapien
tgcatgcctaagatcctacagttaa

SEQ ID NO: 2661392 - DNA, 25 bp, Homo sapien
cttgtctatagcagataatgtggca

SEQ ID NO: 2661393 - DNA, 25 bp, Homo sapien
tgttaaagacgaaattgcatgccta

SEQ ID NO: 2661394 - DNA, 25 bp, Homo sapien
aaatctaggtcaccagctcgaacag

SEQ ID NO: 2661395 - DNA, 25 bp, Homo sapien
tcttgctcctcaaatctaggtcacc

SEQ ID NO: 2661396 - DNA, 25 bp, Homo sapien
taggtcaccagctcgaacagaccct

SEQ ID NO: 2661397 - DNA, 25 bp, Homo sapien
cctcaaatctaggtcaccagctcga

SEQ ID NO: 2661398 - DNA, 25 bp, Homo sapien
gaaacctgaggagatcctgagtgct

SEQ ID NO: 2661399 - DNA, 25 bp, Homo sapien
cagacaggtcatgggtggacatgca

SEQ ID NO: 2661400 - DNA, 25 bp, Homo sapien
acctccagaagtgggtcaggcctct

SEQ ID NO: 2661401 - DNA, 25 bp, Homo sapien
gctgtgatgggcctaggacctccag

SEQ ID NO: 2661402 - DNA, 25 bp, Homo sapien
tagggaacatatcacaccaaaaggc

SEQ ID NO: 2661403 - DNA, 25 bp, Homo sapien
acattaagtagtatagcaggtttgc

SEQ ID NO: 2661404 - DNA, 25 bp, Homo sapien
aattgttggtttctcggattgaaca

SEQ ID NO: 2661405 - DNA, 25 bp, Homo sapien
gaacattaagtagtatagcaggttt

SEQ ID NO: 2661406 - DNA, 25 bp, Homo sapien
ttgaacattaagtagtatagcaggt

SEQ ID NO: 2661407 - DNA, 25 bp, Homo sapien
tgaaaagcatcagcctcaaggttac

SEQ ID NO: 2661408 - DNA, 25 bp, Homo sapien
agcctcaaggttactgaataatgta

SEQ ID NO: 2661409 - DNA, 25 bp, Homo sapien
tgtaagagtgaaaagcatcagcctc

SEQ ID NO: 2661410 - DNA, 25 bp, Homo sapien
gaataatgtatggttgcctgtttgt

SEQ ID NO: 2661411 - DNA, 25 bp, Homo sapien
cctggagataaacatctgaggattc

SEQ ID NO: 2661412 - DNA, 25 bp, Homo sapien
ggcccctggagataaacatctgagg

SEQ ID NO: 2661413 - DNA, 25 bp, Homo sapien
tgcataaggtccttaatgggtgttt

SEQ ID NO: 2661414 - DNA, 25 bp, Homo sapien
ctgaggattctgcataaggtcctta

SEQ ID NO: 2661415 - DNA, 25 bp, Homo sapien
tcaaaggatttacccggtgcagaga

SEQ ID NO: 2661416 - DNA, 25 bp, Homo sapien
gcccctggtattctggttcacttga

SEQ ID NO: 2661417 - DNA, 25 bp, Homo sapien
tgaatgagacggctgtcagcaagcc

SEQ ID NO: 2661418 - DNA, 25 bp, Homo sapien
tgctctcagagctatacccgggagg

SEQ ID NO: 2661419 - DNA, 25 bp, Homo sapien
ggtacaattagtcaagctgtccttt

SEQ ID NO: 2661420 - DNA, 25 bp, Homo sapien
tgatggtacaattagtcaagctgtc

SEQ ID NO: 2661421 - DNA, 25 bp, Homo sapien
caattagtcaagctgtcctttagca

SEQ ID NO: 2661422 - DNA, 25 bp, Homo sapien
gaagacagaaggaatgatggtacaa

SEQ ID NO: 2661423 - DNA, 25 bp, Homo sapien
gacgggctctttgtcagccctggtc

SEQ ID NO: 2661424 - DNA, 25 bp, Homo sapien
gttggtgacgggctctttgtcagcc

SEQ ID NO: 2661425 - DNA, 25 bp, Homo sapien
cagacaaagggcggtaactgttggt

SEQ ID NO: 2661426 - DNA, 25 bp, Homo sapien
cggtaactgttggtgacgggctctt

SEQ ID NO: 2661427 - DNA, 25 bp, Homo sapien
tgtcagcgctctcgacattggacat

SEQ ID NO: 2661428 - DNA, 25 bp, Homo sapien
catcaagctgttaggcaccaggagt

SEQ ID NO: 2661429 - DNA, 25 bp, Homo sapien
cagctgtggctggatgtcagcgctc

SEQ ID NO: 2661430 - DNA, 25 bp, Homo sapien
tagtggaagcagagtttgctgcagc

SEQ ID NO: 2661431 - DNA, 25 bp, Homo sapien
gtaagtcttcagtgaaacagaatga

SEQ ID NO: 2661432 - DNA, 25 bp, Homo sapien
gggtggcaacaagagccttcatgga

SEQ ID NO: 2661433 - DNA, 25 bp, Homo sapien
gcagaagctgtattcatgctggcag

SEQ ID NO: 2661434 - DNA, 25 bp, Homo sapien
caatgggtgtagatcctgtgtgatc

SEQ ID NO: 2661435 - DNA, 25 bp, Homo sapien
acaagagccttcatggacccagtga

SEQ ID NO: 2661436 - DNA, 25 bp, Homo sapien
aagccatgaccagacagccacagtt

SEQ ID NO: 2661437 - DNA, 25 bp, Homo sapien
cttggtggaatggtcttgagaagca

SEQ ID NO: 2661438 - DNA, 25 bp, Homo sapien
ggaaggcactgctccatgagatgag

SEQ ID NO: 2661439 - DNA, 25 bp, Homo sapien
atgagaagccatgaccagacagcca

SEQ ID NO: 2661440 - DNA, 25 bp, Homo sapien
tgtaagggcatcacaactgagcagc

SEQ ID NO: 2661441 - DNA, 25 bp, Homo sapien
catcttgagagtttgcagctttaca

SEQ ID NO: 2661442 - DNA, 25 bp, Homo sapien
aaaggactgattgtttgtttcagca

SEQ ID NO: 2661443 - DNA, 25 bp, Homo sapien
tcttcctgcgggtacactgatggct

SEQ ID NO: 2661444 - DNA, 25 bp, Homo sapien
ctggagtcagggagatctgcctcct

SEQ ID NO: 2661445 - DNA, 25 bp, Homo sapien
tggagtcagggagatctgcctccta

SEQ ID NO: 2661446 - DNA, 25 bp, Homo sapien
agaatggtcagatctggcttacaca

SEQ ID NO: 2661447 - DNA, 25 bp, Homo sapien
aatggtcagatctggcttacacatt

SEQ ID NO: 2661448 - DNA, 25 bp, Homo sapien
gcagaatggtcagatctggcttaca

SEQ ID NO: 2661449 - DNA, 25 bp, Homo sapien
tgcagaatggtcagatctggcttac

SEQ ID NO: 2661450 - DNA, 25 bp, Homo sapien
catttagctttctgagtagcaggtg

SEQ ID NO: 2661451 - DNA, 25 bp, Homo sapien
tgagtagcaggtggtactttacccc

SEQ ID NO: 2661452 - DNA, 25 bp, Homo sapien
tctgagtagcaggtggtactttacc

SEQ ID NO: 2661453 - DNA, 25 bp, Homo sapien
gctttctgagtagcaggtggtactt

SEQ ID NO: 2661454 - DNA, 25 bp, Homo sapien
aaatggccaagcaaggattcagcct

SEQ ID NO: 2661455 - DNA, 25 bp, Homo sapien
tctgcagttcaccatcacttagggc

SEQ ID NO: 2661456 - DNA, 25 bp, Homo sapien
ggccaagcaaggattcagcctgatg

SEQ ID NO: 2661457 - DNA, 25 bp, Homo sapien
aagcaaggattcagcctgatggcat

SEQ ID NO: 2661458 - DNA, 25 bp, Homo sapien
agatagcagcgtttggctcctgtaa

SEQ ID NO: 2661459 - DNA, 25 bp, Homo sapien
atagcagcgtttggctcctgtaatt

SEQ ID NO: 2661460 - DNA, 25 bp, Homo sapien
agcagcgtttggctcctgtaatttg

SEQ ID NO: 2661461 - DNA, 25 bp, Homo sapien
gatagcagcgtttggctcctgtaat

SEQ ID NO: 2661462 - DNA, 25 bp, Homo sapien
gcaattttctgtgccctaggttgaa

SEQ ID NO: 2661463 - DNA, 25 bp, Homo sapien
gcaaaggcaagatcatgtgctgctt

SEQ ID NO: 2661464 - DNA, 25 bp, Homo sapien
tacaggcaaaggcaagatcatgtgc

SEQ ID NO: 2661465 - DNA, 25 bp, Homo sapien
caggcaaaggcaagatcatgtgctg

SEQ ID NO: 2661466 - DNA, 25 bp, Homo sapien
tggaaggccaccataacctctggac

SEQ ID NO: 2661467 - DNA, 25 bp, Homo sapien
ggccaccataacctctggaccctgc

SEQ ID NO: 2661468 - DNA, 25 bp, Homo sapien
accataacctctggaccctgcatgg

SEQ ID NO: 2661469 - DNA, 25 bp, Homo sapien
cataacctctggaccctgcatggct

SEQ ID NO: 2661470 - DNA, 25 bp, Homo sapien
tttggctgacaatttactgataaga

SEQ ID NO: 2661471 - DNA, 25 bp, Homo sapien
aaatttggctgacaatttactgata

SEQ ID NO: 2661472 - DNA, 25 bp, Homo sapien
tggctgacaatttactgataagatt

SEQ ID NO: 2661473 - DNA, 25 bp, Homo sapien
tccaaatttggctgacaatttactg

SEQ ID NO: 2661474 - DNA, 25 bp, Homo sapien
tggagatctaaaacagtcgtctagc

SEQ ID NO: 2661475 - DNA, 25 bp, Homo sapien
gcatgataaatctctgcactctgca

SEQ ID NO: 2661476 - DNA, 25 bp, Homo sapien
tattcgtgaagaccacactgactga

SEQ ID NO: 2661477 - DNA, 25 bp, Homo sapien
gcactctgcattgttgaggcagaca

SEQ ID NO: 2661478 - DNA, 25 bp, Homo sapien
ggccttaatccttcagttgttggat

SEQ ID NO: 2661479 - DNA, 25 bp, Homo sapien
tagaagacgggaggaagatccccaa

SEQ ID NO: 2661480 - DNA, 25 bp, Homo sapien
cagttgttggatcatgcggaggtcc

SEQ ID NO: 2661481 - DNA, 25 bp, Homo sapien
atgcggaggtccctggattcccagg

SEQ ID NO: 2661482 - DNA, 25 bp, Homo sapien
tccaaaggagtaccacctgcctgag

SEQ ID NO: 2661483 - DNA, 25 bp, Homo sapien
taaacatcccttggtgctggttatt

SEQ ID NO: 2661484 - DNA, 25 bp, Homo sapien
cctgcctgagggcattcaataaaca

SEQ ID NO: 2661485 - DNA, 25 bp, Homo sapien
taaactgttctacaattcctaggac

SEQ ID NO: 2661486 - DNA, 25 bp, Homo sapien
tgtttattgaattcccatggaggga

SEQ ID NO: 2661487 - DNA, 25 bp, Homo sapien
cggtcagtcagacctgctaatggtc

SEQ ID NO: 2661488 - DNA, 25 bp, Homo sapien
gggcccattttcgttttccacagca

SEQ ID NO: 2661489 - DNA, 25 bp, Homo sapien
gagcgccttgatcccgagagtctgt

SEQ ID NO: 2661490 - DNA, 25 bp, Homo sapien
tcaatattatcatctgcttaacagg

SEQ ID NO: 2661491 - DNA, 25 bp, Homo sapien
caatattatcatctgcttaacagga

SEQ ID NO: 2661492 - DNA, 25 bp, Homo sapien
ttactgctcgagagggaagcttgtc

SEQ ID NO: 2661493 - DNA, 25 bp, Homo sapien
ccatgtaaattactgctcgagaggg

SEQ ID NO: 2661494 - DNA, 25 bp, Homo sapien
taaaattgacaacaccttctgttcc

SEQ ID NO: 2661495 - DNA, 25 bp, Homo sapien
aattgacaacaccttctgttcctag

SEQ ID NO: 2661496 - DNA, 25 bp, Homo sapien
aatgtcatggccttgcacagcttca

SEQ ID NO: 2661497 - DNA, 25 bp, Homo sapien
cagtggttttatttccgattgatcc

SEQ ID NO: 2661498 - DNA, 25 bp, Homo sapien
atcctgagtgtatagcagggtgccc

SEQ ID NO: 2661499 - DNA, 25 bp, Homo sapien
gctctgtgccttccgctggggctct

SEQ ID NO: 2661500 - DNA, 25 bp, Homo sapien
gtgctccactgccaagctatgctaa

SEQ ID NO: 2661501 - DNA, 25 bp, Homo sapien
tcaaatgagggtaggaacagagtag

SEQ ID NO: 2661502 - DNA, 25 bp, Homo sapien
taaagcttcgttgggtgtgctccac

SEQ ID NO: 2661503 - DNA, 25 bp, Homo sapien
gctatgctaaagaagtagtcctgga

SEQ ID NO: 2661504 - DNA, 25 bp, Homo sapien
gacaggcccgtaatgagcacatttt

SEQ ID NO: 2661505 - DNA, 25 bp, Homo sapien
aaaagtctcccttttgtagctgaca

SEQ ID NO: 2661506 - DNA, 25 bp, Homo sapien
tttgtagctgacaggcccgtaatga

SEQ ID NO: 2661507 - DNA, 25 bp, Homo sapien
tcccttttgtagctgacaggcccgt

SEQ ID NO: 2661508 - DNA, 25 bp, Homo sapien
tcattttccatatgaggagattttc

SEQ ID NO: 2661509 - DNA, 25 bp, Homo sapien
attttccatatgaggagattttctt

SEQ ID NO: 2661510 - DNA, 25 bp, Homo sapien
cattttccatatgaggagattttct

SEQ ID NO: 2661511 - DNA, 25 bp, Homo sapien
gttttccacgtaattgtcacgatgg

SEQ ID NO: 2661512 - DNA, 25 bp, Homo sapien
taattgtcacgatggtttactttgg

SEQ ID NO: 2661513 - DNA, 25 bp, Homo sapien
tttgttgttttccacgtaattgtca

SEQ ID NO: 2661514 - DNA, 25 bp, Homo sapien
cacgatggtttactttggttgactt

SEQ ID NO: 2661515 - DNA, 25 bp, Homo sapien
aagcagccctgattgttaaagcaca

SEQ ID NO: 2661516 - DNA, 25 bp, Homo sapien
tacagtagtatactttccgaagact

SEQ ID NO: 2661517 - DNA, 25 bp, Homo sapien
tatataaggtggaggcaactgacta

SEQ ID NO: 2661518 - DNA, 25 bp, Homo sapien
tactcttgataccaaaagcagccct

SEQ ID NO: 2661519 - DNA, 25 bp, Homo sapien
taaaaggtggtcaatcaaaaggcca

SEQ ID NO: 2661520 - DNA, 25 bp, Homo sapien
tcaaaatcgctctttcataccaggg

SEQ ID NO: 2661521 - DNA, 25 bp, Homo sapien
ctgtgctaataggaagggcgttgtc

SEQ ID NO: 2661522 - DNA, 25 bp, Homo sapien
tagggtgtgaacttccagaggagca

SEQ ID NO: 2661523 - DNA, 25 bp, Homo sapien
ttaagcatcagatagactatccctt

SEQ ID NO: 2661524 - DNA, 25 bp, Homo sapien
gatgcagaaggttattaaagatcaa

SEQ ID NO: 2661525 - DNA, 25 bp, Homo sapien
tggtgggatgcagaaggttattaaa

SEQ ID NO: 2661526 - DNA, 25 bp, Homo sapien
catgtcaagtggttttgttgtacag

SEQ ID NO: 2661527 - DNA, 25 bp, Homo sapien
gtcaactaattttttatatgctaag

SEQ ID NO: 2661528 - DNA, 25 bp, Homo sapien
taattttttatatgctaagacaaat

SEQ ID NO: 2661529 - DNA, 25 bp, Homo sapien
caactaattttttatatgctaagac

SEQ ID NO: 2661530 - DNA, 25 bp, Homo sapien
actaattttttatatgctaagacaa

SEQ ID NO: 2661531 - DNA, 25 bp, Homo sapien
ctgccaactggactttccgaaagcc

SEQ ID NO: 2661532 - DNA, 25 bp, Homo sapien
gccaactggactttccgaaagccat

SEQ ID NO: 2661533 - DNA, 25 bp, Homo sapien
gctgccaactggactttccgaaagc

SEQ ID NO: 2661534 - DNA, 25 bp, Homo sapien
tgccaactggactttccgaaagcca

SEQ ID NO: 2661535 - DNA, 25 bp, Homo sapien
ccacttggaatggattctaggaaac

SEQ ID NO: 2661536 - DNA, 25 bp, Homo sapien
catgtctatggcagttaaaagtggt

SEQ ID NO: 2661537 - DNA, 25 bp, Homo sapien
ggattcttgtcagtgtatgcatgct

SEQ ID NO: 2661538 - DNA, 25 bp, Homo sapien
catcttaagcttgtgtgttgcctgt

SEQ ID NO: 2661539 - DNA, 25 bp, Homo sapien
tgaactggaatctcttttgttactt

SEQ ID NO: 2661540 - DNA, 25 bp, Homo sapien
tgtggcacaagtatctttgaacttt

SEQ ID NO: 2661541 - DNA, 25 bp, Homo sapien
tgtcaacttgaactggaatctcttt

SEQ ID NO: 2661542 - DNA, 25 bp, Homo sapien
gatttgtatactgtggcacaagtat

SEQ ID NO: 2661543 - DNA, 25 bp, Homo sapien
gaatgtagttgccatcagatttgat

SEQ ID NO: 2661544 - DNA, 25 bp, Homo sapien
gaaaatgccagaatgtagttgccat

SEQ ID NO: 2661545 - DNA, 25 bp, Homo sapien
aaatgccagaatgtagttgccatca

SEQ ID NO: 2661546 - DNA, 25 bp, Homo sapien
agatttgattgtgaacaaggactga

SEQ ID NO: 2661547 - DNA, 25 bp, Homo sapien
ggtgaacggaagagtccttatgttg

SEQ ID NO: 2661548 - DNA, 25 bp, Homo sapien
tcacattacagcaactgttttacat

SEQ ID NO: 2661549 - DNA, 25 bp, Homo sapien
cgctttcacagatcaaggttttgca

SEQ ID NO: 2661550 - DNA, 25 bp, Homo sapien
gtatcttccaaaacgcccgctttca

SEQ ID NO: 2661551 - DNA, 25 bp, Homo sapien
ccggcctgcgggacgtgatctaaat

SEQ ID NO: 2661552 - DNA, 25 bp, Homo sapien
gagagtatcagctacttccgccggc

SEQ ID NO: 2661553 - DNA, 25 bp, Homo sapien
tcagatttttgttatttaaagaggc

SEQ ID NO: 2661554 - DNA, 25 bp, Homo sapien
tgttatttaaagaggcagccccact

SEQ ID NO: 2661555 - DNA, 25 bp, Homo sapien
tttgttatttaaagaggcagcccca

SEQ ID NO: 2661556 - DNA, 25 bp, Homo sapien
gatttttgttatttaaagaggcagc

SEQ ID NO: 2661557 - DNA, 25 bp, Homo sapien
aattgtccagggctatacaatgcat

SEQ ID NO: 2661558 - DNA, 25 bp, Homo sapien
ggcagcttccgcaataacaaggagc

SEQ ID NO: 2661559 - DNA, 25 bp, Homo sapien
caaattgtccagggctatacaatgc

SEQ ID NO: 2661560 - DNA, 25 bp, Homo sapien
agcaaattgtccagggctatacaat

SEQ ID NO: 2661561 - DNA, 25 bp, Homo sapien
tatcctgcccatgtagagaactgct

SEQ ID NO: 2661562 - DNA, 25 bp, Homo sapien
tcatatatctgagtcaccaaggcag

SEQ ID NO: 2661563 - DNA, 25 bp, Homo sapien
tgggatgggattgccaccctctatc

SEQ ID NO: 2661564 - DNA, 25 bp, Homo sapien
tcttggctacagcacttctgtccgg

SEQ ID NO: 2661565 - DNA, 25 bp, Homo sapien
cagaaacaaggtggattctgcttat

SEQ ID NO: 2661566 - DNA, 25 bp, Homo sapien
ccagtgttttctcccaagatacttg

SEQ ID NO: 2661567 - DNA, 25 bp, Homo sapien
gaatgaccatcagtaagtgtaataa

SEQ ID NO: 2661568 - DNA, 25 bp, Homo sapien
aatgagttatactgggttcagaaac

SEQ ID NO: 2661569 - DNA, 25 bp, Homo sapien
ggtcctgctcctgacaacaatgctt

SEQ ID NO: 2661570 - DNA, 25 bp, Homo sapien
tttccattgccatgtcatcagcttc

SEQ ID NO: 2661571 - DNA, 25 bp, Homo sapien
gctcctgacaacaatgcttttctca

SEQ ID NO: 2661572 - DNA, 25 bp, Homo sapien
gcttttctcagttcaccaacatatt

SEQ ID NO: 2661573 - DNA, 25 bp, Homo sapien
taagacctgtcacgatggcctaaaa

SEQ ID NO: 2661574 - DNA, 25 bp, Homo sapien
tggcctaaaacttctgatctcacct

SEQ ID NO: 2661575 - DNA, 25 bp, Homo sapien
tctgggaataatatagtagtcactt

SEQ ID NO: 2661576 - DNA, 25 bp, Homo sapien
acttttttcaataagacctgtcacg

SEQ ID NO: 2661577 - DNA, 25 bp, Homo sapien
tatgcatttttcaatttcaaatata

SEQ ID NO: 2661578 - DNA, 25 bp, Homo sapien
atgcatttttcaatttcaaatatac

SEQ ID NO: 2661579 - DNA, 25 bp, Homo sapien
tgcatttttcaatttcaaatatact

SEQ ID NO: 2661580 - DNA, 25 bp, Homo sapien
tactgttaaatgaagagcactaagg

SEQ ID NO: 2661581 - DNA, 25 bp, Homo sapien
agcactaaggcaggaagggtcacat

SEQ ID NO: 2661582 - DNA, 25 bp, Homo sapien
tcaaccagaacaatctactgttaaa

SEQ ID NO: 2661583 - DNA, 25 bp, Homo sapien
caggaagggtcacatgggttcgcac

SEQ ID NO: 2661584 - DNA, 25 bp, Homo sapien
caccatgttattcagactggttgtg

SEQ ID NO: 2661585 - DNA, 25 bp, Homo sapien
acgcccagcccacataactcaactt

SEQ ID NO: 2661586 - DNA, 25 bp, Homo sapien
cacataactcaacttaaagggtaag

SEQ ID NO: 2661587 - DNA, 25 bp, Homo sapien
tgttattcagactggttgtgaactc

SEQ ID NO: 2661588 - DNA, 25 bp, Homo sapien
gcttggctacataaaagggttggat

SEQ ID NO: 2661589 - DNA, 25 bp, Homo sapien
gaaagttgacatatccctaaatggc

SEQ ID NO: 2661590 - DNA, 25 bp, Homo sapien
actcaaatacccatacattggaggg

SEQ ID NO: 2661591 - DNA, 25 bp, Homo sapien
taaaccagaaactaatgagcttggc

SEQ ID NO: 2661592 - DNA, 25 bp, Homo sapien
gtcaggctgagtctcgaatccctga

SEQ ID NO: 2661593 - DNA, 25 bp, Homo sapien
caattatacctacatatatcattaa

SEQ ID NO: 2661594 - DNA, 25 bp, Homo sapien
ggtcaggctgagtctcgaatccctg

SEQ ID NO: 2661595 - DNA, 25 bp, Homo sapien
cgtgccaggcctgaagttctatttc

SEQ ID NO: 2661596 - DNA, 25 bp, Homo sapien
tatgtggatgaatagacaacccgcc

SEQ ID NO: 2661597 - DNA, 25 bp, Homo sapien
tgcttacatgtggtcttctccctga

SEQ ID NO: 2661598 - DNA, 25 bp, Homo sapien
caattccctgtcatagactcgtagg

SEQ ID NO: 2661599 - DNA, 25 bp, Homo sapien
caagatctttgacatggtgggtgga

SEQ ID NO: 2661600 - DNA, 25 bp, Homo sapien
cagtgactgttgttagaacacaagt

SEQ ID NO: 2661601 - DNA, 25 bp, Homo sapien
catcagtgagtaacctagaggaacc

SEQ ID NO: 2661602 - DNA, 25 bp, Homo sapien
agagagcaatgatgcaaatttttcc

SEQ ID NO: 2661603 - DNA, 25 bp, Homo sapien
gaaccaccctgtcttgaattaaatg

SEQ ID NO: 2661604 - DNA, 25 bp, Homo sapien
ggtgctagcacatttggcatctgga

SEQ ID NO: 2661605 - DNA, 25 bp, Homo sapien
gttctaggagctaggaagtctaaga

SEQ ID NO: 2661606 - DNA, 25 bp, Homo sapien
atcaaggtgctagcacatttggcat

SEQ ID NO: 2661607 - DNA, 25 bp, Homo sapien
gctagcacatttggcatctggagag

SEQ ID NO: 2661608 - DNA, 25 bp, Homo sapien
cagaatgatgttcccccaaagatgt

SEQ ID NO: 2661609 - DNA, 25 bp, Homo sapien
ctttgagatgagagattattcttca

SEQ ID NO: 2661610 - DNA, 25 bp, Homo sapien
ttaaaattagagacacgttcctggc

SEQ ID NO: 2661611 - DNA, 25 bp, Homo sapien
tctttctatgcttgaataggtcaaa

SEQ ID NO: 2661612 - DNA, 25 bp, Homo sapien
gcaataacaaataagttctctaatg

SEQ ID NO: 2661613 - DNA, 25 bp, Homo sapien
tctgcaatggtgtccaagcaataac

SEQ ID NO: 2661614 - DNA, 25 bp, Homo sapien
ttctgcaggtgctcatttttggctt

SEQ ID NO: 2661615 - DNA, 25 bp, Homo sapien
tctttctgcaggtgctcatttttgg

SEQ ID NO: 2661616 - DNA, 25 bp, Homo sapien
taaagctgtaaatcctttccagcat

SEQ ID NO: 2661617 - DNA, 25 bp, Homo sapien
tttccagcatgcaaaggctctagtg

SEQ ID NO: 2661618 - DNA, 25 bp, Homo sapien
gccatgatcaagatgtatttacagc

SEQ ID NO: 2661619 - DNA, 25 bp, Homo sapien
tgagggaacactaagaaactgctgc

SEQ ID NO: 2661620 - DNA, 25 bp, Homo sapien
tgaaacctcatgtggggcattttac

SEQ ID NO: 2661621 - DNA, 25 bp, Homo sapien
agatacaaggcaccgggcaatgcag

SEQ ID NO: 2661622 - DNA, 25 bp, Homo sapien
ggccagtgggtccagatacaaggca

SEQ ID NO: 2661623 - DNA, 25 bp, Homo sapien
ttactaggggccagtgggtccagat

SEQ ID NO: 2661624 - DNA, 25 bp, Homo sapien
aatagagaaatcaatggtccaggcc

SEQ ID NO: 2661625 - DNA, 25 bp, Homo sapien
atagagaaatcaatggtccaggcca

SEQ ID NO: 2661626 - DNA, 25 bp, Homo sapien
tagagaaatcaatggtccaggccat

SEQ ID NO: 2661627 - DNA, 25 bp, Homo sapien
cgcttataaagatcagtctccaaag

SEQ ID NO: 2661628 - DNA, 25 bp, Homo sapien
aaccgcttataaagatcagtctcca

SEQ ID NO: 2661629 - DNA, 25 bp, Homo sapien
tgatgtccttttctcgttcttgagc

SEQ ID NO: 2661630 - DNA, 25 bp, Homo sapien
ttgatgtccttttctcgttcttgag

SEQ ID NO: 2661631 - DNA, 25 bp, Homo sapien
tcatccaaaaacaagatagcgaaaa

SEQ ID NO: 2661632 - DNA, 25 bp, Homo sapien
tccaaaaacaagatagcgaaaatac

SEQ ID NO: 2661633 - DNA, 25 bp, Homo sapien
catccaaaaacaagatagcgaaaat

SEQ ID NO: 2661634 - DNA, 25 bp, Homo sapien
atccaaaaacaagatagcgaaaata

SEQ ID NO: 2661635 - DNA, 25 bp, Homo sapien
ttaatattaaatcagtttcttatca

SEQ ID NO: 2661636 - DNA, 25 bp, Homo sapien
aatattaaatcagtttcttatcagg

SEQ ID NO: 2661637 - DNA, 25 bp, Homo sapien
ctaattttaatctgaatttagtact

SEQ ID NO: 2661638 - DNA, 25 bp, Homo sapien
attaaatcagtttcttatcaggtac

SEQ ID NO: 2661639 - DNA, 25 bp, Homo sapien
gtcatttcagaacagattgcagttt

SEQ ID NO: 2661640 - DNA, 25 bp, Homo sapien
agcagtcatttcagaacagattgca

SEQ ID NO: 2661641 - DNA, 25 bp, Homo sapien
cagtactctcatcatagactggatc

SEQ ID NO: 2661642 - DNA, 25 bp, Homo sapien
gactggatctcggtcagcagtcatt

SEQ ID NO: 2661643 - DNA, 25 bp, Homo sapien
tattacatctcacttgttgcaatct

SEQ ID NO: 2661644 - DNA, 25 bp, Homo sapien
taggtactttgtactaaactgccat

SEQ ID NO: 2661645 - DNA, 25 bp, Homo sapien
cctctattacatctcacttgttgca

SEQ ID NO: 2661646 - DNA, 25 bp, Homo sapien
tgatccaaaggactgagtaagtcat

SEQ ID NO: 2661647 - DNA, 25 bp, Homo sapien
atctgctccttgctcatcgcctctc

SEQ ID NO: 2661648 - DNA, 25 bp, Homo sapien
tgctgcctctaagcacacctagaat

SEQ ID NO: 2661649 - DNA, 25 bp, Homo sapien
ccttctcagtcttatttgctcagtc

SEQ ID NO: 2661650 - DNA, 25 bp, Homo sapien
tctccatcactctggtctaagccag

SEQ ID NO: 2661651 - DNA, 25 bp, Homo sapien
gaaatatctcaagatgatcaaatgc

SEQ ID NO: 2661652 - DNA, 25 bp, Homo sapien
gagctacccgacctcacaattggtt

SEQ ID NO: 2661653 - DNA, 25 bp, Homo sapien
tgtacaacgatcacctcaatcagtt

SEQ ID NO: 2661654 - DNA, 25 bp, Homo sapien
ttatacttgtacaacgatcacctca

SEQ ID NO: 2661655 - DNA, 25 bp, Homo sapien
gatcatggcatacatcagtgcccca

SEQ ID NO: 2661656 - DNA, 25 bp, Homo sapien
tgttcatatcacaaaccatttccag

SEQ ID NO: 2661657 - DNA, 25 bp, Homo sapien
ctacctccagtaataagtagtggaa

SEQ ID NO: 2661658 - DNA, 25 bp, Homo sapien
cacaatgcctgagaggatcatggca

SEQ ID NO: 2661659 - DNA, 25 bp, Homo sapien
caaataatctttgcccagacaaatg

SEQ ID NO: 2661660 - DNA, 25 bp, Homo sapien
gttttgtaactctggatacagagtt

SEQ ID NO: 2661661 - DNA, 25 bp, Homo sapien
tgtgtgttttgtaactctggataca

SEQ ID NO: 2661662 - DNA, 25 bp, Homo sapien
gtaactctggatacagagttccaag

SEQ ID NO: 2661663 - DNA, 25 bp, Homo sapien
ctctggatacagagttccaagtgtt

SEQ ID NO: 2661664 - DNA, 25 bp, Homo sapien
atgggaatgccagggtaaagacctt

SEQ ID NO: 2661665 - DNA, 25 bp, Homo sapien
ctatcttgaggtagtaaatttctaa

SEQ ID NO: 2661666 - DNA, 25 bp, Homo sapien
tatcttgaggtagtaaatttctaat

SEQ ID NO: 2661667 - DNA, 25 bp, Homo sapien
atggaatcatctttacttacagcag

SEQ ID NO: 2661668 - DNA, 25 bp, Homo sapien
acttggtgcaatatcagtgacatca

SEQ ID NO: 2661669 - DNA, 25 bp, Homo sapien
tggtgcaatatcagtgacatcaaga

SEQ ID NO: 2661670 - DNA, 25 bp, Homo sapien
ctacttggtgcaatatcagtgacat

SEQ ID NO: 2661671 - DNA, 25 bp, Homo sapien
cttggtgcaatatcagtgacatcaa

SEQ ID NO: 2661672 - DNA, 25 bp, Homo sapien
cttgaagctgattctcctgaggagc

SEQ ID NO: 2661673 - DNA, 25 bp, Homo sapien
ctgaggagccattttaggttctgtc

SEQ ID NO: 2661674 - DNA, 25 bp, Homo sapien
tcttgaagctgattctcctgaggag

SEQ ID NO: 2661675 - DNA, 25 bp, Homo sapien
gccattttaggttctgtcccaagat

SEQ ID NO: 2661676 - DNA, 25 bp, Homo sapien
cttggcaaagaataaaatgacttac

SEQ ID NO: 2661677 - DNA, 25 bp, Homo sapien
tcttggcaaagaataaaatgactta

SEQ ID NO: 2661678 - DNA, 25 bp, Homo sapien
ttcttggcaaagaataaaatgactt

SEQ ID NO: 2661679 - DNA, 25 bp, Homo sapien
taaaattgagctaagagcccagggt

SEQ ID NO: 2661680 - DNA, 25 bp, Homo sapien
cagggtggaatcacctgggtatcaa

SEQ ID NO: 2661681 - DNA, 25 bp, Homo sapien
ttaggaaccatccacacattgctga

SEQ ID NO: 2661682 - DNA, 25 bp, Homo sapien
tgtaccacatatcgctagtccagga

SEQ ID NO: 2661683 - DNA, 25 bp, Homo sapien
tagtgggagtgaagactaccgcttc

SEQ ID NO: 2661684 - DNA, 25 bp, Homo sapien
tccatcatgggaagacatagcattt

SEQ ID NO: 2661685 - DNA, 25 bp, Homo sapien
tatctataaatgacccagactgtgg

SEQ ID NO: 2661686 - DNA, 25 bp, Homo sapien
aattaacagagccagacaacaagtc

SEQ ID NO: 2661687 - DNA, 25 bp, Homo sapien
gcactcattgtcatgccaagcaact

SEQ ID NO: 2661688 - DNA, 25 bp, Homo sapien
caaaccatttgccataggagtcatc

SEQ ID NO: 2661689 - DNA, 25 bp, Homo sapien
accccaattgtagcatttgaatcag

SEQ ID NO: 2661690 - DNA, 25 bp, Homo sapien
tgctatttaatggtaactaacccca

SEQ ID NO: 2661691 - DNA, 25 bp, Homo sapien
cccttgaccgatattaattagttgc

SEQ ID NO: 2661692 - DNA, 25 bp, Homo sapien
tagttgcacaatatggcaccatggc

SEQ ID NO: 2661693 - DNA, 25 bp, Homo sapien
caaccagtaggttacaacaagacat

SEQ ID NO: 2661694 - DNA, 25 bp, Homo sapien
taccagtgctattgtcaatgaaaca

SEQ ID NO: 2661695 - DNA, 25 bp, Homo sapien
tataagattaagacttaacttcttc

SEQ ID NO: 2661696 - DNA, 25 bp, Homo sapien
catctataagattaagacttaactt

SEQ ID NO: 2661697 - DNA, 25 bp, Homo sapien
tctataagattaagacttaacttct

SEQ ID NO: 2661698 - DNA, 25 bp, Homo sapien
ataagattaagacttaacttcttct

SEQ ID NO: 2661699 - DNA, 25 bp, Homo sapien
tattgaggtagacagaatttgctgc

SEQ ID NO: 2661700 - DNA, 25 bp, Homo sapien
tgctgctaatggcaatctgcaacca

SEQ ID NO: 2661701 - DNA, 25 bp, Homo sapien
caccgaagtttaactgacagtcatg

SEQ ID NO: 2661702 - DNA, 25 bp, Homo sapien
gacagtcatgagtaattggagcaca

SEQ ID NO: 2661703 - DNA, 25 bp, Homo sapien
gtttcctatatttgaagagtctgca

SEQ ID NO: 2661704 - DNA, 25 bp, Homo sapien
gaaaacatgttccatactggtagtg

SEQ ID NO: 2661705 - DNA, 25 bp, Homo sapien
agtgatgttcagttaaaaagtggtc

SEQ ID NO: 2661706 - DNA, 25 bp, Homo sapien
gaaagtgctgctcactatatgtccc

SEQ ID NO: 2661707 - DNA, 25 bp, Homo sapien
ttctctgaagtctccttcttcctcc

SEQ ID NO: 2661708 - DNA, 25 bp, Homo sapien
ctctgaagtctccttcttcctccct

SEQ ID NO: 2661709 - DNA, 25 bp, Homo sapien
tcacacggcctctttctctgaagtc

SEQ ID NO: 2661710 - DNA, 25 bp, Homo sapien
acacggcctctttctctgaagtctc

SEQ ID NO: 2661711 - DNA, 25 bp, Homo sapien
gttcctccttattcaaaggcagcag

SEQ ID NO: 2661712 - DNA, 25 bp, Homo sapien
ctcacgttcctccttattcaaaggc

SEQ ID NO: 2661713 - DNA, 25 bp, Homo sapien
ggctcgaagggaagatcagtttcct

SEQ ID NO: 2661714 - DNA, 25 bp, Homo sapien
tggcagggctacactccctccggag

SEQ ID NO: 2661715 - DNA, 25 bp, Homo sapien
tgtgcaactgggactttattagaag

SEQ ID NO: 2661716 - DNA, 25 bp, Homo sapien
tgtgaaccagatgcttccatgtaaa

SEQ ID NO: 2661717 - DNA, 25 bp, Homo sapien
gaagaatacagatgtcagtcaccac

SEQ ID NO: 2661718 - DNA, 25 bp, Homo sapien
taaccactggacacatgtgaaccag

SEQ ID NO: 2661719 - DNA, 25 bp, Homo sapien
tacgtggtctaacatattctcaggt

SEQ ID NO: 2661720 - DNA, 25 bp, Homo sapien
ttttaaggtctgctgattttcaacc

SEQ ID NO: 2661721 - DNA, 25 bp, Homo sapien
gaattaagacgtagacatctctggg

SEQ ID NO: 2661722 - DNA, 25 bp, Homo sapien
gcttgcttagtcttatctcttcctc

SEQ ID NO: 2661723 - DNA, 25 bp, Homo sapien
tgagatgtgctcctttttagacgtc

SEQ ID NO: 2661724 - DNA, 25 bp, Homo sapien
tttttagacgtctcaggtagtgaag

SEQ ID NO: 2661725 - DNA, 25 bp, Homo sapien
cgtctcaggtagtgaagaatcaggc

SEQ ID NO: 2661726 - DNA, 25 bp, Homo sapien
aagacatgttttcagctgagatgtg

SEQ ID NO: 2661727 - DNA, 25 bp, Homo sapien
tgtaagatacggtaatagcggctgc

SEQ ID NO: 2661728 - DNA, 25 bp, Homo sapien
gacaggatgttggacagctatcaca

SEQ ID NO: 2661729 - DNA, 25 bp, Homo sapien
catagtctagtgaacatcaaagtat

SEQ ID NO: 2661730 - DNA, 25 bp, Homo sapien
tgcacaatggtttcaattcactgtg

SEQ ID NO: 2661731 - DNA, 25 bp, Homo sapien
cctctgagtgcaactctcaggagct

SEQ ID NO: 2661732 - DNA, 25 bp, Homo sapien
gaactcccatcgaatggcctctgag

SEQ ID NO: 2661733 - DNA, 25 bp, Homo sapien
cctgaggtaacggaactcccatcga

SEQ ID NO: 2661734 - DNA, 25 bp, Homo sapien
ggcctctgagtgcaactctcaggag

SEQ ID NO: 2661735 - DNA, 25 bp, Homo sapien
tacagacccctcacaataaattctg

SEQ ID NO: 2661736 - DNA, 25 bp, Homo sapien
gggcctggggcacatctgctagtct

SEQ ID NO: 2661737 - DNA, 25 bp, Homo sapien
tgcttttatcatcacgtccctcaca

SEQ ID NO: 2661738 - DNA, 25 bp, Homo sapien
ttgggaacctcggagtaggacaggc

SEQ ID NO: 2661739 - DNA, 25 bp, Homo sapien
gctagttctctttacatgctagtga

SEQ ID NO: 2661740 - DNA, 25 bp, Homo sapien
tgggccaggcaatgactggtaactt

SEQ ID NO: 2661741 - DNA, 25 bp, Homo sapien
tttcttactggaatttgttgctgca

SEQ ID NO: 2661742 - DNA, 25 bp, Homo sapien
gagctgacggagtagatgtttccac

SEQ ID NO: 2661743 - DNA, 25 bp, Homo sapien
caggttcttaaccatgactgcatat

SEQ ID NO: 2661744 - DNA, 25 bp, Homo sapien
cactattacagaaacgtggtattca

SEQ ID NO: 2661745 - DNA, 25 bp, Homo sapien
tggtctgcagacgacacatttgagt

SEQ ID NO: 2661746 - DNA, 25 bp, Homo sapien
cactattattctagatcacaggttc

SEQ ID NO: 2661747 - DNA, 25 bp, Homo sapien
aaattacaaccaatatcattaatga

SEQ ID NO: 2661748 - DNA, 25 bp, Homo sapien
aaaattacaaccaatatcattaatg

SEQ ID NO: 2661749 - DNA, 25 bp, Homo sapien
atatcattaatgattgcctggtgac

SEQ ID NO: 2661750 - DNA, 25 bp, Homo sapien
aattacaaccaatatcattaatgat

SEQ ID NO: 2661751 - DNA, 25 bp, Homo sapien
taatcggtccaattccaggtagccc

SEQ ID NO: 2661752 - DNA, 25 bp, Homo sapien
gtccaattccaggtagccctctggg

SEQ ID NO: 2661753 - DNA, 25 bp, Homo sapien
ctataatcggtccaattccaggtag

SEQ ID NO: 2661754 - DNA, 25 bp, Homo sapien
tcggtccaattccaggtagccctct

SEQ ID NO: 2661755 - DNA, 25 bp, Homo sapien
aggtgtgttagtgacaggacataga

SEQ ID NO: 2661756 - DNA, 25 bp, Homo sapien
gacaggacatagactcaggggctcc

SEQ ID NO: 2661757 - DNA, 25 bp, Homo sapien
ccaggtgtgttagtgacaggacata

SEQ ID NO: 2661758 - DNA, 25 bp, Homo sapien
ggacatagactcaggggctccagac

SEQ ID NO: 2661759 - DNA, 25 bp, Homo sapien
caaagcgccctcttgttccggtggg

SEQ ID NO: 2661760 - DNA, 25 bp, Homo sapien
ggaacgcactgcctaggaatgtatc

SEQ ID NO: 2661761 - DNA, 25 bp, Homo sapien
ccactaggtggcgtttcatctccag

SEQ ID NO: 2661762 - DNA, 25 bp, Homo sapien
gatttgtcctgtcgttcaaaaacca

SEQ ID NO: 2661763 - DNA, 25 bp, Homo sapien
tcagttttacgcaagaacatggaaa

SEQ ID NO: 2661764 - DNA, 25 bp, Homo sapien
atcattcagttttacgcaagaacat

SEQ ID NO: 2661765 - DNA, 25 bp, Homo sapien
cagttttacgcaagaacatggaaaa

SEQ ID NO: 2661766 - DNA, 25 bp, Homo sapien
attcagttttacgcaagaacatgga

SEQ ID NO: 2661767 - DNA, 25 bp, Homo sapien
cacatgcgcactttcctaaaatgca

SEQ ID NO: 2661768 - DNA, 25 bp, Homo sapien
gatgcttccctggataacagtgtca

SEQ ID NO: 2661769 - DNA, 25 bp, Homo sapien
agtgtcacagccaatgctgctagtg

SEQ ID NO: 2661770 - DNA, 25 bp, Homo sapien
gctgctgcaatccactttagaatta

SEQ ID NO: 2661771 - DNA, 25 bp, Homo sapien
tggcagatggcccagtgttgttcac

SEQ ID NO: 2661772 - DNA, 25 bp, Homo sapien
aggctcctcttgagcccctgttcca

SEQ ID NO: 2661773 - DNA, 25 bp, Homo sapien
cacgaaagtctcttttccctttgca

SEQ ID NO: 2661774 - DNA, 25 bp, Homo sapien
tgttccagggaccacgaaagtctct

SEQ ID NO: 2661775 - DNA, 25 bp, Homo sapien
cctttgcagctgagggaggtaaagc

SEQ ID NO: 2661776 - DNA, 25 bp, Homo sapien
tccaccaggatcatccctactgcta

SEQ ID NO: 2661777 - DNA, 25 bp, Homo sapien
caccaggatcatccctactgctacc

SEQ ID NO: 2661778 - DNA, 25 bp, Homo sapien
gatgttggagattaatgtgaactct

SEQ ID NO: 2661779 - DNA, 25 bp, Homo sapien
ttggagattaatgtgaactcttcca

SEQ ID NO: 2661780 - DNA, 25 bp, Homo sapien
actgtaccgtcagagccgaggagga

SEQ ID NO: 2661781 - DNA, 25 bp, Homo sapien
ccgaggaggagactcagcgagaaga

SEQ ID NO: 2661782 - DNA, 25 bp, Homo sapien
tgcaagttcaaatgcgggttgtgac

SEQ ID NO: 2661783 - DNA, 25 bp, Homo sapien
gacacccatcatcattatatcactg

SEQ ID NO: 2661784 - DNA, 25 bp, Homo sapien
gggctggccgaagatcttggtccca

SEQ ID NO: 2661785 - DNA, 25 bp, Homo sapien
cccaggcgggtcacataggaagcgt

SEQ ID NO: 2661786 - DNA, 25 bp, Homo sapien
tgtccacaacacctaatgttctcgg

SEQ ID NO: 2661787 - DNA, 25 bp, Homo sapien
tgcgcgactgggttcggcgttgccc

SEQ ID NO: 2661788 - DNA, 25 bp, Homo sapien
ggaaggcggcttattgcagtttggg

SEQ ID NO: 2661789 - DNA, 25 bp, Homo sapien
aaggcggcttattgcagtttggggg

SEQ ID NO: 2661790 - DNA, 25 bp, Homo sapien
gcggcttattgcagtttggggggaa

SEQ ID NO: 2661791 - DNA, 25 bp, Homo sapien
ggcggcttattgcagtttgggggga

SEQ ID NO: 2661792 - DNA, 25 bp, Homo sapien
cgctgtctggatggaactcgggtca

SEQ ID NO: 2661793 - DNA, 25 bp, Homo sapien
gaaaaattgttgcacatccctgccg

SEQ ID NO: 2661794 - DNA, 25 bp, Homo sapien
caagtcgtcaaagagacacggcggg

SEQ ID NO: 2661795 - DNA, 25 bp, Homo sapien
tccaggcgccgtgtagatttctccc

SEQ ID NO: 2661796 - DNA, 25 bp, Homo sapien
tactgcgggcagacaatacaattct

SEQ ID NO: 2661797 - DNA, 25 bp, Homo sapien
tacaaactgggaaccgcttctatct

SEQ ID NO: 2661798 - DNA, 25 bp, Homo sapien
caatatgcagcaaaatgggaggact

SEQ ID NO: 2661799 - DNA, 25 bp, Homo sapien
ggtccccgctaaggttcctcattga

SEQ ID NO: 2661800 - DNA, 25 bp, Homo sapien
tctgtcactacttagttgtgaaaat

SEQ ID NO: 2661801 - DNA, 25 bp, Homo sapien
gcaagttctgcattctctacttata

SEQ ID NO: 2661802 - DNA, 25 bp, Homo sapien
cttaccgaagtgatcataggaattg

SEQ ID NO: 2661803 - DNA, 25 bp, Homo sapien
taacatagtttcatatcactaagag

SEQ ID NO: 2661804 - DNA, 25 bp, Homo sapien
gaacacatccataagatgctcttta

SEQ ID NO: 2661805 - DNA, 25 bp, Homo sapien
ggttgaacacatccataagatgctc

SEQ ID NO: 2661806 - DNA, 25 bp, Homo sapien
ggttactattaaggttgaacacatc

SEQ ID NO: 2661807 - DNA, 25 bp, Homo sapien
ctttatgtagcgcatgggttactat

SEQ ID NO: 2661808 - DNA, 25 bp, Homo sapien
ccacattgccatttcatcctccagc

SEQ ID NO: 2661809 - DNA, 25 bp, Homo sapien
aaaacagttcctggatcatagggag

SEQ ID NO: 2661810 - DNA, 25 bp, Homo sapien
tatgggcgttcgagcaagctgctta

SEQ ID NO: 2661811 - DNA, 25 bp, Homo sapien
agctgcttagcctctcttggtacca

SEQ ID NO: 2661812 - DNA, 25 bp, Homo sapien
gagcacacactcctatgaattggtt

SEQ ID NO: 2661813 - DNA, 25 bp, Homo sapien
aatgacaaggtaggctgacttttcc

SEQ ID NO: 2661814 - DNA, 25 bp, Homo sapien
aaaatgacaaggtaggctgactttt

SEQ ID NO: 2661815 - DNA, 25 bp, Homo sapien
atgacaaggtaggctgacttttcca

SEQ ID NO: 2661816 - DNA, 25 bp, Homo sapien
aaatgacaaggtaggctgacttttc

SEQ ID NO: 2661817 - DNA, 25 bp, Homo sapien
cttagaccatttgatgcggagaaat

SEQ ID NO: 2661818 - DNA, 25 bp, Homo sapien
cggagaaattcactggtgttgtaac

SEQ ID NO: 2661819 - DNA, 25 bp, Homo sapien
accacagtgagggaggcatcgccca

SEQ ID NO: 2661820 - DNA, 25 bp, Homo sapien
ttgtaactgggtggcaaagtaggca

SEQ ID NO: 2661821 - DNA, 25 bp, Homo sapien
caatcccgtacatgacgtcacagcg

SEQ ID NO: 2661822 - DNA, 25 bp, Homo sapien
cttgtgtgtcttcaatcccgtacat

SEQ ID NO: 2661823 - DNA, 25 bp, Homo sapien
gtcacagcggtaaagacccgcatca

SEQ ID NO: 2661824 - DNA, 25 bp, Homo sapien
catgacgtcacagcggtaaagaccc

SEQ ID NO: 2661825 - DNA, 25 bp, Homo sapien
tgtgtacctgctggttgccgccctg

SEQ ID NO: 2661826 - DNA, 25 bp, Homo sapien
ccaacgtccaaacaagccttctgag

SEQ ID NO: 2661827 - DNA, 25 bp, Homo sapien
aaacaagccttctgagcagcctcaa

SEQ ID NO: 2661828 - DNA, 25 bp, Homo sapien
tgctctggagttgctatgactgccc

SEQ ID NO: 2661829 - DNA, 25 bp, Homo sapien
cctactctgggagcccggatgggat

SEQ ID NO: 2661830 - DNA, 25 bp, Homo sapien
aacaatacacatcgtaagtttcctg

SEQ ID NO: 2661831 - DNA, 25 bp, Homo sapien
tggggagaacggaatccataagtcc

SEQ ID NO: 2661832 - DNA, 25 bp, Homo sapien
tccagatgatccacataacaataca

SEQ ID NO: 2661833 - DNA, 25 bp, Homo sapien
cagttttctcagttcatacgaagat

SEQ ID NO: 2661834 - DNA, 25 bp, Homo sapien
gaatccaaacaagcacgaagacttg

SEQ ID NO: 2661835 - DNA, 25 bp, Homo sapien
cgtataaacaaaatgccaccgtttg

SEQ ID NO: 2661836 - DNA, 25 bp, Homo sapien
caaaatgccaccgtttggaatccaa

SEQ ID NO: 2661837 - DNA, 25 bp, Homo sapien
tatgatactatgagcagactgtggg

SEQ ID NO: 2661838 - DNA, 25 bp, Homo sapien
ggagatatgcatacatcctcagagc

SEQ ID NO: 2661839 - DNA, 25 bp, Homo sapien
gaaggactcccaccactaagacttg

SEQ ID NO: 2661840 - DNA, 25 bp, Homo sapien
aagacagtgtggctaggaaatccct

SEQ ID NO: 2661841 - DNA, 25 bp, Homo sapien
taaatgccttgttactttgctgaca

SEQ ID NO: 2661842 - DNA, 25 bp, Homo sapien
gccatggtctgtacttcaaaaggga

SEQ ID NO: 2661843 - DNA, 25 bp, Homo sapien
gatttgatacttagtccaagagcca

SEQ ID NO: 2661844 - DNA, 25 bp, Homo sapien
ttgtaaacatgctgaatatcctcca

SEQ ID NO: 2661845 - DNA, 25 bp, Homo sapien
gtcactacactgtataaggacatca

SEQ ID NO: 2661846 - DNA, 25 bp, Homo sapien
cactacactgtataaggacatcatc

SEQ ID NO: 2661847 - DNA, 25 bp, Homo sapien
tcactacactgtataaggacatcat

SEQ ID NO: 2661848 - DNA, 25 bp, Homo sapien
actacactgtataaggacatcatct

SEQ ID NO: 2661849 - DNA, 25 bp, Homo sapien
gaatcacaaagtccatcagctgcac

SEQ ID NO: 2661850 - DNA, 25 bp, Homo sapien
aatgacaagaaaactctagggctgc

SEQ ID NO: 2661851 - DNA, 25 bp, Homo sapien
cagctgcacatggattggttaacat

SEQ ID NO: 2661852 - DNA, 25 bp, Homo sapien
tcaaggtgatagcaacaattcaaca

SEQ ID NO: 2661853 - DNA, 25 bp, Homo sapien
ggtttcttgtaattcagatgaaaaa

SEQ ID NO: 2661854 - DNA, 25 bp, Homo sapien
agatttaaccagaatcaattgagtt

SEQ ID NO: 2661855 - DNA, 25 bp, Homo sapien
cattgggtttcttgtaattcagatg

SEQ ID NO: 2661856 - DNA, 25 bp, Homo sapien
taaccagaatcaattgagtttactt

SEQ ID NO: 2661857 - DNA, 25 bp, Homo sapien
taatcgcactggtcaaagccgttcc

SEQ ID NO: 2661858 - DNA, 25 bp, Homo sapien
tacagggttctcaccccaagtagac

SEQ ID NO: 2661859 - DNA, 25 bp, Homo sapien
gtaggcatcaaatctgctatcaggg

SEQ ID NO: 2661860 - DNA, 25 bp, Homo sapien
gaagcctgtctggttctcaaaacga

SEQ ID NO: 2661861 - DNA, 25 bp, Homo sapien
aatgctctgtggctctggacacaac

SEQ ID NO: 2661862 - DNA, 25 bp, Homo sapien
tggaatccactccaacggctagttg

SEQ ID NO: 2661863 - DNA, 25 bp, Homo sapien
taaggatttaactcagcctcagttg

SEQ ID NO: 2661864 - DNA, 25 bp, Homo sapien
gaactgtttccattccgtgcacaca

SEQ ID NO: 2661865 - DNA, 25 bp, Homo sapien
gagcagaggcttcttagctaggaga

SEQ ID NO: 2661866 - DNA, 25 bp, Homo sapien
tacagtctttatggagcgaccagct

SEQ ID NO: 2661867 - DNA, 25 bp, Homo sapien
tggcaagctaatacagaacacatgg

SEQ ID NO: 2661868 - DNA, 25 bp, Homo sapien
gaacacatggctttaacactcagaa

SEQ ID NO: 2661869 - DNA, 25 bp, Homo sapien
ccttaattatatcagtcacgtaatg

SEQ ID NO: 2661870 - DNA, 25 bp, Homo sapien
ttcctgaaaatgattaaggaagaat

SEQ ID NO: 2661871 - DNA, 25 bp, Homo sapien
tagagataaggtttatgctattgtt

SEQ ID NO: 2661872 - DNA, 25 bp, Homo sapien
tgtgacaatgtagcttaaaggaatg

SEQ ID NO: 2661873 - DNA, 25 bp, Homo sapien
tatcaaataaggaagtcaggctgga

SEQ ID NO: 2661874 - DNA, 25 bp, Homo sapien
atatcaaataaggaagtcaggctgg

SEQ ID NO: 2661875 - DNA, 25 bp, Homo sapien
aaagcacaagaaaatatcaaataag

SEQ ID NO: 2661876 - DNA, 25 bp, Homo sapien
tctttgtggctacagacaggctttg

SEQ ID NO: 2661877 - DNA, 25 bp, Homo sapien
tctatatggctaaatgcttttaacc

SEQ ID NO: 2661878 - DNA, 25 bp, Homo sapien
aatctagccacatgcttaggtggga

SEQ ID NO: 2661879 - DNA, 25 bp, Homo sapien
ccttctacgcactaaatgaattctg

SEQ ID NO: 2661880 - DNA, 25 bp, Homo sapien
cacatatacactaaaaaattttttg

SEQ ID NO: 2661881 - DNA, 25 bp, Homo sapien
actatgtgggaaaggtggacatcaa

SEQ ID NO: 2661882 - DNA, 25 bp, Homo sapien
gtcactacttgactatgtgggaaag

SEQ ID NO: 2661883 - DNA, 25 bp, Homo sapien
agtcactacttgactatgtgggaaa

SEQ ID NO: 2661884 - DNA, 25 bp, Homo sapien
gaaaggtggacatcaattaagtcat

SEQ ID NO: 2661885 - DNA, 25 bp, Homo sapien
gaaatcactttggaactgtagctga

SEQ ID NO: 2661886 - DNA, 25 bp, Homo sapien
cactttctacgtttggtagaagcaa

SEQ ID NO: 2661887 - DNA, 25 bp, Homo sapien
taaattcctctacataaccagccag

SEQ ID NO: 2661888 - DNA, 25 bp, Homo sapien
gccagctgtatatctctgaaatcac

SEQ ID NO: 2661889 - DNA, 25 bp, Homo sapien
gaagggcaggcaaattttaacagtg

SEQ ID NO: 2661890 - DNA, 25 bp, Homo sapien
aaggttagttttggcacatgtggtc

SEQ ID NO: 2661891 - DNA, 25 bp, Homo sapien
taatttagccttctctggaccacca

SEQ ID NO: 2661892 - DNA, 25 bp, Homo sapien
tcagattatgaactagggcacacac

SEQ ID NO: 2661893 - DNA, 25 bp, Homo sapien
caagtatgtcttgagagggttcacc

SEQ ID NO: 2661894 - DNA, 25 bp, Homo sapien
aactgacaatatttcccacgggagg

SEQ ID NO: 2661895 - DNA, 25 bp, Homo sapien
tccaagaggtcctgaagcagaaggt

SEQ ID NO: 2661896 - DNA, 25 bp, Homo sapien
tccgtagcataatgagagacgccag

SEQ ID NO: 2661897 - DNA, 25 bp, Homo sapien
cgtagaaagcgcctgaggtccaaag

SEQ ID NO: 2661898 - DNA, 25 bp, Homo sapien
tccacagtgggtggtcttgttggct

SEQ ID NO: 2661899 - DNA, 25 bp, Homo sapien
ggacttgaagtcgtgaaatactctc

SEQ ID NO: 2661900 - DNA, 25 bp, Homo sapien
tactctctatcaatatcggtttctg

SEQ ID NO: 2661901 - DNA, 25 bp, Homo sapien
actacagttgccctctagctagagc

SEQ ID NO: 2661902 - DNA, 25 bp, Homo sapien
cataaaaaggttggttctccaggca

SEQ ID NO: 2661903 - DNA, 25 bp, Homo sapien
caccgtaagttgctattaagatcca

SEQ ID NO: 2661904 - DNA, 25 bp, Homo sapien
ggagaacagcatatacagaacacac

SEQ ID NO: 2661905 - DNA, 25 bp, Homo sapien
taaatatgggtatctgcccagatgg

SEQ ID NO: 2661906 - DNA, 25 bp, Homo sapien
taacaagacagcatcaagcaggcct

SEQ ID NO: 2661907 - DNA, 25 bp, Homo sapien
gatgactctgcaatcaatgatgtaa

SEQ ID NO: 2661908 - DNA, 25 bp, Homo sapien
cacacatacatttgggtagatacaa

SEQ ID NO: 2661909 - DNA, 25 bp, Homo sapien
caggaattgacagacagggcagtac

SEQ ID NO: 2661910 - DNA, 25 bp, Homo sapien
tgaagagcatgcatactgccccata

SEQ ID NO: 2661911 - DNA, 25 bp, Homo sapien
tctgaaagtatgaagcccgaagtgt

SEQ ID NO: 2661912 - DNA, 25 bp, Homo sapien
caatgccaagaatgtcagactcagt

SEQ ID NO: 2661913 - DNA, 25 bp, Homo sapien
tggtcaaatcagaggatgcagaatt

SEQ ID NO: 2661914 - DNA, 25 bp, Homo sapien
ggagaaagagtatgtgtcagagctt

SEQ ID NO: 2661915 - DNA, 25 bp, Homo sapien
aaggctctttctatcacaataactg

SEQ ID NO: 2661916 - DNA, 25 bp, Homo sapien
tgcctcttccatgtatcctacaaag

SEQ ID NO: 2661917 - DNA, 25 bp, Homo sapien
caagtttgggtataccacagtgaca

SEQ ID NO: 2661918 - DNA, 25 bp, Homo sapien
tgagacaccagggagactgtactac

SEQ ID NO: 2661919 - DNA, 25 bp, Homo sapien
tactatgtgaagcatatggccaaag

SEQ ID NO: 2661920 - DNA, 25 bp, Homo sapien
aaacctccagaaacctactatgtga

SEQ ID NO: 2661921 - DNA, 25 bp, Homo sapien
gaaatcattatgacggagccaaccc

SEQ ID NO: 2661922 - DNA, 25 bp, Homo sapien
tgtgcctgtggatatactgacccat

SEQ ID NO: 2661923 - DNA, 25 bp, Homo sapien
cacacatgcataggccaaacctgag

SEQ ID NO: 2661924 - DNA, 25 bp, Homo sapien
tctgaggtctcatcatagaggcatt

SEQ ID NO: 2661925 - DNA, 25 bp, Homo sapien
tgccatatggtaccaaccactaagc

SEQ ID NO: 2661926 - DNA, 25 bp, Homo sapien
tagcattcctcgaaaagtatgtatc

SEQ ID NO: 2661927 - DNA, 25 bp, Homo sapien
caaccactaagctcaatggcctttt

SEQ ID NO: 2661928 - DNA, 25 bp, Homo sapien
aatatttcccagattgtaaattgcc

SEQ ID NO: 2661929 - DNA, 25 bp, Homo sapien
aatggcatcctctacctactgtggc

SEQ ID NO: 2661930 - DNA, 25 bp, Homo sapien
gaagctctggataggcgggctctat

SEQ ID NO: 2661931 - DNA, 25 bp, Homo sapien
gggatgtgacccagattaggctgat

SEQ ID NO: 2661932 - DNA, 25 bp, Homo sapien
ggcactgagacatgagcttaaccac

SEQ ID NO: 2661933 - DNA, 25 bp, Homo sapien
tctgtttcttcactacaaggttcat

SEQ ID NO: 2661934 - DNA, 25 bp, Homo sapien
tacaaggttcatcttctttagattc

SEQ ID NO: 2661935 - DNA, 25 bp, Homo sapien
attctgaatctattggatgaccaat

SEQ ID NO: 2661936 - DNA, 25 bp, Homo sapien
aattacactcaaatcactcattcga

SEQ ID NO: 2661937 - DNA, 25 bp, Homo sapien
aaatttcagccattagatcatgcac

SEQ ID NO: 2661938 - DNA, 25 bp, Homo sapien
ttcactgtggtataggtctatttca

SEQ ID NO: 2661939 - DNA, 25 bp, Homo sapien
ttcttcactgtggtataggtctatt

SEQ ID NO: 2661940 - DNA, 25 bp, Homo sapien
cacatcagtagcatttgcacactct

SEQ ID NO: 2661941 - DNA, 25 bp, Homo sapien
cacagtggtaacgagatgcttccca

SEQ ID NO: 2661942 - DNA, 25 bp, Homo sapien
aacactttcaaactggccacgccta

SEQ ID NO: 2661943 - DNA, 25 bp, Homo sapien
gatgtttcagggtaagtctcaggct

SEQ ID NO: 2661944 - DNA, 25 bp, Homo sapien
tgcacagcagtagacaattccgttt

SEQ ID NO: 2661945 - DNA, 25 bp, Homo sapien
tggaatcgaagaactccctgagagc

SEQ ID NO: 2661946 - DNA, 25 bp, Homo sapien
tgaaccccaggttgatggatactgc

SEQ ID NO: 2661947 - DNA, 25 bp, Homo sapien
tttccacatgcggagacaaagtgcc

SEQ ID NO: 2661948 - DNA, 25 bp, Homo sapien
cctcaaatgtagaagccgtacctgt

SEQ ID NO: 2661949 - DNA, 25 bp, Homo sapien
gccctcagctgaggatgtaaactct

SEQ ID NO: 2661950 - DNA, 25 bp, Homo sapien
ctgagccctcagctgaggatgtaaa

SEQ ID NO: 2661951 - DNA, 25 bp, Homo sapien
agctgaggatgtaaactcttcccag

SEQ ID NO: 2661952 - DNA, 25 bp, Homo sapien
ctgaggatgtaaactcttcccaggg

SEQ ID NO: 2661953 - DNA, 25 bp, Homo sapien
cagggttgacttcttgcctagacca

SEQ ID NO: 2661954 - DNA, 25 bp, Homo sapien
agcactgggaagcactggaacaaca

SEQ ID NO: 2661955 - DNA, 25 bp, Homo sapien
caatccttcgtcgataatggaggaa

SEQ ID NO: 2661956 - DNA, 25 bp, Homo sapien
gctgctgactgtgaccagttgctca

SEQ ID NO: 2661957 - DNA, 25 bp, Homo sapien
gatcccagttgtgaagtgaaagccc

SEQ ID NO: 2661958 - DNA, 25 bp, Homo sapien
gatgctgctatcgtggaatcctgcc

SEQ ID NO: 2661959 - DNA, 25 bp, Homo sapien
tcttggaaactaccgtctgtggacc

SEQ ID NO: 2661960 - DNA, 25 bp, Homo sapien
tctattcctggcagagcactgggct

SEQ ID NO: 2661961 - DNA, 25 bp, Homo sapien
gcaacacatggattaaactctactg

SEQ ID NO: 2661962 - DNA, 25 bp, Homo sapien
gttcatgtgaaatggctggatacac

SEQ ID NO: 2661963 - DNA, 25 bp, Homo sapien
caaataaaaccgacactcctgggag

SEQ ID NO: 2661964 - DNA, 25 bp, Homo sapien
ttcgaaagtgtgcactgaagtctct

SEQ ID NO: 2661965 - DNA, 25 bp, Homo sapien
taggctcgtctctaatgtttgcgtg

SEQ ID NO: 2661966 - DNA, 25 bp, Homo sapien
aacattaactttactctctggagtg

SEQ ID NO: 2661967 - DNA, 25 bp, Homo sapien
aggctttaccatagcaatttagagt

SEQ ID NO: 2661968 - DNA, 25 bp, Homo sapien
ttttagcataaaacgccccatattg

SEQ ID NO: 2661969 - DNA, 25 bp, Homo sapien
tcagtaggataacaggtgcctccgt

SEQ ID NO: 2661970 - DNA, 25 bp, Homo sapien
cacgggttcattttgcagcgatcag

SEQ ID NO: 2661971 - DNA, 25 bp, Homo sapien
gcacacaggtgcatacgtaggaagt

SEQ ID NO: 2661972 - DNA, 25 bp, Homo sapien
actggtctccgctgtatcctggcac

SEQ ID NO: 2661973 - DNA, 25 bp, Homo sapien
acagctccctgaggccgaggcacgt

SEQ ID NO: 2661974 - DNA, 25 bp, Homo sapien
tcagggaagggtctttcccattcca

SEQ ID NO: 2661975 - DNA, 25 bp, Homo sapien
tatcccaaaactaaggacaaagctc

SEQ ID NO: 2661976 - DNA, 25 bp, Homo sapien
ggatgcctaaataagaatatgggag

SEQ ID NO: 2661977 - DNA, 25 bp, Homo sapien
gatgcatgctaaggtctcagaatca

SEQ ID NO: 2661978 - DNA, 25 bp, Homo sapien
gactgtcagggctttctagacccaa

SEQ ID NO: 2661979 - DNA, 25 bp, Homo sapien
tcagagtagggccattgtctccatt

SEQ ID NO: 2661980 - DNA, 25 bp, Homo sapien
cagggcagcagtcttcaacgtgagc

SEQ ID NO: 2661981 - DNA, 25 bp, Homo sapien
cacaagtggctccattacgacaggg

SEQ ID NO: 2661982 - DNA, 25 bp, Homo sapien
taaaaccatcaacacaagtggctcc

SEQ ID NO: 2661983 - DNA, 25 bp, Homo sapien
aaagtgcaccaacataacttggaag

SEQ ID NO: 2661984 - DNA, 25 bp, Homo sapien
cagggattagagtgacattcatcaa

SEQ ID NO: 2661985 - DNA, 25 bp, Homo sapien
caaacatttgttcttcgtgagacag

SEQ ID NO: 2661986 - DNA, 25 bp, Homo sapien
caggatgcttgtgagatgggcaccc

SEQ ID NO: 2661987 - DNA, 25 bp, Homo sapien
ccatgtgcgtcgatgggcaaagtat

SEQ ID NO: 2661988 - DNA, 25 bp, Homo sapien
gcaaagtatttgtagcactgccctt

SEQ ID NO: 2661989 - DNA, 25 bp, Homo sapien
gctcaaacatcttgtcattgaggcc

SEQ ID NO: 2661990 - DNA, 25 bp, Homo sapien
tgccatcagtccaacggaagtcatg

SEQ ID NO: 2661991 - DNA, 25 bp, Homo sapien
gaagtcatgctcaaacatcttgtca

SEQ ID NO: 2661992 - DNA, 25 bp, Homo sapien
gaggcctatccactgataatcatgg

SEQ ID NO: 2661993 - DNA, 25 bp, Homo sapien
caaggtgcgatgctcactaatttac

SEQ ID NO: 2661994 - DNA, 25 bp, Homo sapien
gaggccctcagtgcattctccataa

SEQ ID NO: 2661995 - DNA, 25 bp, Homo sapien
gaatcaagctcacctgtatggcact

SEQ ID NO: 2661996 - DNA, 25 bp, Homo sapien
tagctgccagatataggccaatatg

SEQ ID NO: 2661997 - DNA, 25 bp, Homo sapien
cctgtttgaaacatatgccgataag

SEQ ID NO: 2661998 - DNA, 25 bp, Homo sapien
gataaccaccgaagtaggaaagcaa

SEQ ID NO: 2661999 - DNA, 25 bp, Homo sapien
tgcgcaaactcttttcatcacctgg

SEQ ID NO: 2662000 - DNA, 25 bp, Homo sapien
taccaagggcaagcagataaccacc

SEQ ID NO: 2662001 - DNA, 25 bp, Homo sapien
aatggagggagaaggtaactacttg

SEQ ID NO: 2662002 - DNA, 25 bp, Homo sapien
gctggttgggtctccaattctcgta

SEQ ID NO: 2662003 - DNA, 25 bp, Homo sapien
tgattacaacacagtcttctccagc

SEQ ID NO: 2662004 - DNA, 25 bp, Homo sapien
tgttcctttcttgcacgtataggtg

SEQ ID NO: 2662005 - DNA, 25 bp, Homo sapien
cactggccattctcatgccaaatga

SEQ ID NO: 2662006 - DNA, 25 bp, Homo sapien
gtggttctcagctctagtacttcaa

SEQ ID NO: 2662007 - DNA, 25 bp, Homo sapien
caaaggaaggactcaatgaggactg

SEQ ID NO: 2662008 - DNA, 25 bp, Homo sapien
ggaaggactcaatgaggactgcaat

SEQ ID NO: 2662009 - DNA, 25 bp, Homo sapien
tagtacttcaaaccaccgacaaatc

SEQ ID NO: 2662010 - DNA, 25 bp, Homo sapien
tctggaagggccactattctgacaa

SEQ ID NO: 2662011 - DNA, 25 bp, Homo sapien
taaaaacgtacaatctacaggccag

SEQ ID NO: 2662012 - DNA, 25 bp, Homo sapien
actgtcttcatcaccgtccctaagt

SEQ ID NO: 2662013 - DNA, 25 bp, Homo sapien
ttaccttcacttgggacaataatga

SEQ ID NO: 2662014 - DNA, 25 bp, Homo sapien
catgcaggtaattttaggtatagcc

SEQ ID NO: 2662015 - DNA, 25 bp, Homo sapien
tgcagtggtatctaatcagggagtt

SEQ ID NO: 2662016 - DNA, 25 bp, Homo sapien
cagggagttgatttcataacgaggt

SEQ ID NO: 2662017 - DNA, 25 bp, Homo sapien
tcctaagcaccggatagttggaagg

SEQ ID NO: 2662018 - DNA, 25 bp, Homo sapien
tagtccattctttctaaaggaccac

SEQ ID NO: 2662019 - DNA, 25 bp, Homo sapien
cacggtagtccattctttctaaagg

SEQ ID NO: 2662020 - DNA, 25 bp, Homo sapien
gttgttatagcacggtagtccattc

SEQ ID NO: 2662021 - DNA, 25 bp, Homo sapien
tagtagttgttatagcacggtagtc

SEQ ID NO: 2662022 - DNA, 25 bp, Homo sapien
ctaaactgccgataccacagccgta

SEQ ID NO: 2662023 - DNA, 25 bp, Homo sapien
ttgctccataccctaaactgccgat

SEQ ID NO: 2662024 - DNA, 25 bp, Homo sapien
ataccctaaactgccgataccacag

SEQ ID NO: 2662025 - DNA, 25 bp, Homo sapien
aactgccgataccacagccgtaaaa

SEQ ID NO: 2662026 - DNA, 25 bp, Homo sapien
tggatgtatttattgaattgtcctt

SEQ ID NO: 2662027 - DNA, 25 bp, Homo sapien
caacgatgatcatgtttggatgtat

SEQ ID NO: 2662028 - DNA, 25 bp, Homo sapien
tttcatagaataagtcctttggtat

SEQ ID NO: 2662029 - DNA, 25 bp, Homo sapien
acctccggctccaacgatgatcatg

SEQ ID NO: 2662030 - DNA, 25 bp, Homo sapien
aatgttttgggagcacggcaaccca

SEQ ID NO: 2662031 - DNA, 25 bp, Homo sapien
tatttacatggccatcggtgctgaa

SEQ ID NO: 2662032 - DNA, 25 bp, Homo sapien
gataattacttctcgaggtgatagg

SEQ ID NO: 2662033 - DNA, 25 bp, Homo sapien
cccaaaatgactgaacggtggtcca

SEQ ID NO: 2662034 - DNA, 25 bp, Homo sapien
caaagaagagttcgacattggagtc

SEQ ID NO: 2662035 - DNA, 25 bp, Homo sapien
gagccctaggtctatatccgtatga

SEQ ID NO: 2662036 - DNA, 25 bp, Homo sapien
ggatcccattcgcagcctttagcat

SEQ ID NO: 2662037 - DNA, 25 bp, Homo sapien
gaagcaaactgcacctatggctgag

SEQ ID NO: 2662038 - DNA, 25 bp, Homo sapien
tgtgaggaaagtaaaaggctaacac

SEQ ID NO: 2662039 - DNA, 25 bp, Homo sapien
tcatttcttagaatgggcaaacacc

SEQ ID NO: 2662040 - DNA, 25 bp, Homo sapien
tatttaatcagggacaaagtaccta

SEQ ID NO: 2662041 - DNA, 25 bp, Homo sapien
tacactccacctaacaggaagaaat

SEQ ID NO: 2662042 - DNA, 25 bp, Homo sapien
aatattgggccaatccctttgtgcc

SEQ ID NO: 2662043 - DNA, 25 bp, Homo sapien
gaaacctactagatcaacacagtgt

SEQ ID NO: 2662044 - DNA, 25 bp, Homo sapien
taatgcaacaaccaagggaacctgc

SEQ ID NO: 2662045 - DNA, 25 bp, Homo sapien
tagagtcattccttctaagccaaag

SEQ ID NO: 2662046 - DNA, 25 bp, Homo sapien
gatttccgggcaaatagcttgtggc

SEQ ID NO: 2662047 - DNA, 25 bp, Homo sapien
tctttagtaatacagctaccctgga

SEQ ID NO: 2662048 - DNA, 25 bp, Homo sapien
agcttgtggctaattcagttcctac

SEQ ID NO: 2662049 - DNA, 25 bp, Homo sapien
tagatccaccaataatctcagaagg

SEQ ID NO: 2662050 - DNA, 25 bp, Homo sapien
gccatgccacattctagttttaagg

SEQ ID NO: 2662051 - DNA, 25 bp, Homo sapien
gaatgatgtaagaggtcaaaccact

SEQ ID NO: 2662052 - DNA, 25 bp, Homo sapien
ggaaaaacagccctaatcatctcat

SEQ ID NO: 2662053 - DNA, 25 bp, Homo sapien
catttgatggactcagacagaactc

SEQ ID NO: 2662054 - DNA, 25 bp, Homo sapien
cccgaagtatgagcttggtcttaaa

SEQ ID NO: 2662055 - DNA, 25 bp, Homo sapien
taaatttgtgtaacttgaagacgtc

SEQ ID NO: 2662056 - DNA, 25 bp, Homo sapien
atacttctatccaaagaaacgaaat

SEQ ID NO: 2662057 - DNA, 25 bp, Homo sapien
ttttaccaattcatcccgaagtatg

SEQ ID NO: 2662058 - DNA, 25 bp, Homo sapien
cagtggcattcaggatattcaaggg

SEQ ID NO: 2662059 - DNA, 25 bp, Homo sapien
tatttcgagtgtaagtaaccagttc

SEQ ID NO: 2662060 - DNA, 25 bp, Homo sapien
tcaactcggcatctttcagtggcat

SEQ ID NO: 2662061 - DNA, 25 bp, Homo sapien
tgtggtctgacaatcctgccttgcc

SEQ ID NO: 2662062 - DNA, 25 bp, Homo sapien
tcaggcccatctgctttctaccaca

SEQ ID NO: 2662063 - DNA, 25 bp, Homo sapien
caggcccatctgctttctaccacac

SEQ ID NO: 2662064 - DNA, 25 bp, Homo sapien
tggcttctccaatgatactggttga

SEQ ID NO: 2662065 - DNA, 25 bp, Homo sapien
aggataataatctgtaatgggaggc

SEQ ID NO: 2662066 - DNA, 25 bp, Homo sapien
tctgtaatgggaggcatcttcagtt

SEQ ID NO: 2662067 - DNA, 25 bp, Homo sapien
gaagagggtgtaatgaggataataa

SEQ ID NO: 2662068 - DNA, 25 bp, Homo sapien
acttactgtaaagagtcattttcat

SEQ ID NO: 2662069 - DNA, 25 bp, Homo sapien
tatgaactcatgcaagttaccaaaa

SEQ ID NO: 2662070 - DNA, 25 bp, Homo sapien
gcaagttaccaaaactgtgataacc

SEQ ID NO: 2662071 - DNA, 25 bp, Homo sapien
aacacttgggtctgaccagaaatcc

SEQ ID NO: 2662072 - DNA, 25 bp, Homo sapien
catagctagaatgtcctggatacca

SEQ ID NO: 2662073 - DNA, 25 bp, Homo sapien
gggtctgaccagaaatcctgaaagt

SEQ ID NO: 2662074 - DNA, 25 bp, Homo sapien
ctgaaagtgtagatgcatgcatagc

SEQ ID NO: 2662075 - DNA, 25 bp, Homo sapien
attttagtgtgtgtgctactcaagc

SEQ ID NO: 2662076 - DNA, 25 bp, Homo sapien
tttagtgtgtgtgctactcaagcaa

SEQ ID NO: 2662077 - DNA, 25 bp, Homo sapien
ttttagtgtgtgtgctactcaagca

SEQ ID NO: 2662078 - DNA, 25 bp, Homo sapien
caccggccacctgcattgtcggcca

SEQ ID NO: 2662079 - DNA, 25 bp, Homo sapien
ggccacctgcattgtcggccagagc

SEQ ID NO: 2662080 - DNA, 25 bp, Homo sapien
ccggccacctgcattgtcggccaga

SEQ ID NO: 2662081 - DNA, 25 bp, Homo sapien
cacctgcattgtcggccagagcccc

SEQ ID NO: 2662082 - DNA, 25 bp, Homo sapien
ctcggatcgggcatcccggcggccg

SEQ ID NO: 2662083 - DNA, 25 bp, Homo sapien
aagacaatagcgccgctcgccgcca

SEQ ID NO: 2662084 - DNA, 25 bp, Homo sapien
taagacaatagcgccgctcgccgcc

SEQ ID NO: 2662085 - DNA, 25 bp, Homo sapien
ttaagacaatagcgccgctcgccgc

SEQ ID NO: 2662086 - DNA, 25 bp, Homo sapien
cagaagacgcgggaagaagcctttt

SEQ ID NO: 2662087 - DNA, 25 bp, Homo sapien
aaatctctcagaagacgcgggaaga

SEQ ID NO: 2662088 - DNA, 25 bp, Homo sapien
gaggcagtccccgtggcttaggctt

SEQ ID NO: 2662089 - DNA, 25 bp, Homo sapien
cagtccccgtggcttaggctttatc

SEQ ID NO: 2662090 - DNA, 25 bp, Homo sapien
tagccactagattagggacataaaa

SEQ ID NO: 2662091 - DNA, 25 bp, Homo sapien
cactagattagggacataaaactgc

SEQ ID NO: 2662092 - DNA, 25 bp, Homo sapien
tcaatagccactagattagggacat

SEQ ID NO: 2662093 - DNA, 25 bp, Homo sapien
ctagattagggacataaaactgcaa

SEQ ID NO: 2662094 - DNA, 25 bp, Homo sapien
gattgattgtcatcaataagggaac

SEQ ID NO: 2662095 - DNA, 25 bp, Homo sapien
tgattgtcatcaataagggaaccat

SEQ ID NO: 2662096 - DNA, 25 bp, Homo sapien
ttggattgattgtcatcaataaggg

SEQ ID NO: 2662097 - DNA, 25 bp, Homo sapien
ttgattgtcatcaataagggaacca

SEQ ID NO: 2662098 - DNA, 25 bp, Homo sapien
tacggttttaacatgattcagctca

SEQ ID NO: 2662099 - DNA, 25 bp, Homo sapien
ctacctctacttgaataaagcactg

SEQ ID NO: 2662100 - DNA, 25 bp, Homo sapien
gataaacctggacatctgacttgaa

SEQ ID NO: 2662101 - DNA, 25 bp, Homo sapien
aaagcactgtgcttgggatgagttg

SEQ ID NO: 2662102 - DNA, 25 bp, Homo sapien
ccaaaacagtcctctcatcaaaaca

SEQ ID NO: 2662103 - DNA, 25 bp, Homo sapien
gcatcttctggcgtactgtgcaagg

SEQ ID NO: 2662104 - DNA, 25 bp, Homo sapien
tggcgtactgtgcaaggcatgctgc

SEQ ID NO: 2662105 - DNA, 25 bp, Homo sapien
ttctggcgtactgtgcaaggcatgc

SEQ ID NO: 2662106 - DNA, 25 bp, Homo sapien
tcttctggcgtactgtgcaaggcat

SEQ ID NO: 2662107 - DNA, 25 bp, Homo sapien
gccggaaggcggtggtcgtaagctg

SEQ ID NO: 2662108 - DNA, 25 bp, Homo sapien
ggcggtggtcgtaagctgcgaaggc

SEQ ID NO: 2662109 - DNA, 25 bp, Homo sapien
cggaaggcggtggtcgtaagctgcg

SEQ ID NO: 2662110 - DNA, 25 bp, Homo sapien
gaaggcggtggtcgtaagctgcgaa

SEQ ID NO: 2662111 - DNA, 25 bp, Homo sapien
cacacaaacatgtagatgtgaatca

SEQ ID NO: 2662112 - DNA, 25 bp, Homo sapien
aggacattttccgtcttccaagccg

SEQ ID NO: 2662113 - DNA, 25 bp, Homo sapien
tagtgaactcttccatttgtgcctc

SEQ ID NO: 2662114 - DNA, 25 bp, Homo sapien
ccaagccggcacacaaacatgtaga

SEQ ID NO: 2662115 - DNA, 25 bp, Homo sapien
ttaaaagaacgtaggataggacaga

SEQ ID NO: 2662116 - DNA, 25 bp, Homo sapien
gtaggataggacagaggagccaaac

SEQ ID NO: 2662117 - DNA, 25 bp, Homo sapien
ccacttcttggtctgtccaaagtta

SEQ ID NO: 2662118 - DNA, 25 bp, Homo sapien
cacttcttggtctgtccaaagttaa

SEQ ID NO: 2662119 - DNA, 25 bp, Homo sapien
tcctcataggtggtctccttgctgc

SEQ ID NO: 2662120 - DNA, 25 bp, Homo sapien
gctgtaatactcaggactgaacttc

SEQ ID NO: 2662121 - DNA, 25 bp, Homo sapien
acagcttctaagcaatcatctgaaa

SEQ ID NO: 2662122 - DNA, 25 bp, Homo sapien
cttttaaagctgtaatactcaggac

SEQ ID NO: 2662123 - DNA, 25 bp, Homo sapien
tatatttcaatagtcgtactgggaa

SEQ ID NO: 2662124 - DNA, 25 bp, Homo sapien
gttggtcataatactgccactgagc

SEQ ID NO: 2662125 - DNA, 25 bp, Homo sapien
tcatgcctcagatggagctcgttgg

SEQ ID NO: 2662126 - DNA, 25 bp, Homo sapien
aaaatgccaatctaaactatatttc

SEQ ID NO: 2662127 - DNA, 25 bp, Homo sapien
aaatggccatatcgtccaaagtgat

SEQ ID NO: 2662128 - DNA, 25 bp, Homo sapien
aatggccatatcgtccaaagtgatt

SEQ ID NO: 2662129 - DNA, 25 bp, Homo sapien
atggccatatcgtccaaagtgattt

SEQ ID NO: 2662130 - DNA, 25 bp, Homo sapien
tgtaatctctgttgaagaagaaatc

SEQ ID NO: 2662131 - DNA, 25 bp, Homo sapien
actgaaaacagtatgccagccaact

SEQ ID NO: 2662132 - DNA, 25 bp, Homo sapien
gaaaacagtatgccagccaacttcc

SEQ ID NO: 2662133 - DNA, 25 bp, Homo sapien
gtaatctctgttgaagaagaaatca

SEQ ID NO: 2662134 - DNA, 25 bp, Homo sapien
gatggctgggttcagcccacacaga

SEQ ID NO: 2662135 - DNA, 25 bp, Homo sapien
cacagagttataaactacaccggtg

SEQ ID NO: 2662136 - DNA, 25 bp, Homo sapien
tcagctagatatacattccacagtg

SEQ ID NO: 2662137 - DNA, 25 bp, Homo sapien
tattccatgattgtaagtccaagga

SEQ ID NO: 2662138 - DNA, 25 bp, Homo sapien
tagcctgagaatccaatctgatacc

SEQ ID NO: 2662139 - DNA, 25 bp, Homo sapien
gacctggtaaagagtccagctgact

SEQ ID NO: 2662140 - DNA, 25 bp, Homo sapien
cctttcctttcattccaactatggc

SEQ ID NO: 2662141 - DNA, 25 bp, Homo sapien
ttcattccaactatggcatttttag

SEQ ID NO: 2662142 - DNA, 25 bp, Homo sapien
cattgttttatggtcttcttgtcta

SEQ ID NO: 2662143 - DNA, 25 bp, Homo sapien
cttcttgtctatatttaacagaaag

SEQ ID NO: 2662144 - DNA, 25 bp, Homo sapien
ccattgttttatggtcttcttgtct

SEQ ID NO: 2662145 - DNA, 25 bp, Homo sapien
cttgtctatatttaacagaaagttt

SEQ ID NO: 2662146 - DNA, 25 bp, Homo sapien
aacaaagaaacacattctagttcta

SEQ ID NO: 2662147 - DNA, 25 bp, Homo sapien
aaacaaagaaacacattctagttct

SEQ ID NO: 2662148 - DNA, 25 bp, Homo sapien
acaaagaaacacattctagttctac

SEQ ID NO: 2662149 - DNA, 25 bp, Homo sapien
caataacccctgtactgccatgagt

SEQ ID NO: 2662150 - DNA, 25 bp, Homo sapien
ccggtaatgtgctgagtgtggaacc

SEQ ID NO: 2662151 - DNA, 25 bp, Homo sapien
agagttcccaataacccctgtactg

SEQ ID NO: 2662152 - DNA, 25 bp, Homo sapien
ctgccatgagtgaggccggtaatgt

SEQ ID NO: 2662153 - DNA, 25 bp, Homo sapien
ggtccatggtgggtactcccagaga

SEQ ID NO: 2662154 - DNA, 25 bp, Homo sapien
gggaagaagaacacgagtccttctc

SEQ ID NO: 2662155 - DNA, 25 bp, Homo sapien
cagggaagaagaacacgagtccttc

SEQ ID NO: 2662156 - DNA, 25 bp, Homo sapien
ccatggtgggtactcccagagagtc

SEQ ID NO: 2662157 - DNA, 25 bp, Homo sapien
tctgatctaatgttagtccctttcc

SEQ ID NO: 2662158 - DNA, 25 bp, Homo sapien
ttcttctgatctaatgttagtccct

SEQ ID NO: 2662159 - DNA, 25 bp, Homo sapien
gatctaatgttagtccctttccttc

SEQ ID NO: 2662160 - DNA, 25 bp, Homo sapien
tcttctgatctaatgttagtccctt

SEQ ID NO: 2662161 - DNA, 25 bp, Homo sapien
tcccgacacttgtccacataacctg

SEQ ID NO: 2662162 - DNA, 25 bp, Homo sapien
acattattgaggattttagcaacat

SEQ ID NO: 2662163 - DNA, 25 bp, Homo sapien
ttctcctcctgggaaacattattga

SEQ ID NO: 2662164 - DNA, 25 bp, Homo sapien
aacattattgaggattttagcaaca

SEQ ID NO: 2662165 - DNA, 25 bp, Homo sapien
gcagagcgtcatctcaggagaaatc

SEQ ID NO: 2662166 - DNA, 25 bp, Homo sapien
cactgaatacagctttgcttgatgc

SEQ ID NO: 2662167 - DNA, 25 bp, Homo sapien
ttgtgttgtcgatggtgagttgcca

SEQ ID NO: 2662168 - DNA, 25 bp, Homo sapien
tggtgagttgccagcagagcgtcat

SEQ ID NO: 2662169 - DNA, 25 bp, Homo sapien
tggcagtgagcgcttctttggatgt

SEQ ID NO: 2662170 - DNA, 25 bp, Homo sapien
gaagattcactagagtacagtccat

SEQ ID NO: 2662171 - DNA, 25 bp, Homo sapien
tctttggatgtctgggaagattcac

SEQ ID NO: 2662172 - DNA, 25 bp, Homo sapien
tgggaagattcactagagtacagtc

SEQ ID NO: 2662173 - DNA, 25 bp, Homo sapien
tgttccttgcccatatgctttctac

SEQ ID NO: 2662174 - DNA, 25 bp, Homo sapien
tggctaaattttaaagtcgtgacaa

SEQ ID NO: 2662175 - DNA, 25 bp, Homo sapien
gatgtatatatggagtggtcttcaa

SEQ ID NO: 2662176 - DNA, 25 bp, Homo sapien
ttcaaggtttactgtcccatcagat

SEQ ID NO: 2662177 - DNA, 25 bp, Homo sapien
ttatccgtcaaatctcttaagtaac

SEQ ID NO: 2662178 - DNA, 25 bp, Homo sapien
agtagccttctttttatagcaagag

SEQ ID NO: 2662179 - DNA, 25 bp, Homo sapien
tcctgaattattcgcattggtagaa

SEQ ID NO: 2662180 - DNA, 25 bp, Homo sapien
caaattatggtaggcaactaacggt

SEQ ID NO: 2662181 - DNA, 25 bp, Homo sapien
cattactactctttgaatctgggga

SEQ ID NO: 2662182 - DNA, 25 bp, Homo sapien
actactctttgaatctggggacctt

SEQ ID NO: 2662183 - DNA, 25 bp, Homo sapien
agtttttggttctcattactactct

SEQ ID NO: 2662184 - DNA, 25 bp, Homo sapien
gagtttttggttctcattactactc

SEQ ID NO: 2662185 - DNA, 25 bp, Homo sapien
gctttagggagataggtgcctctca

SEQ ID NO: 2662186 - DNA, 25 bp, Homo sapien
aacgtagacggcaaataggttcatc

SEQ ID NO: 2662187 - DNA, 25 bp, Homo sapien
taggttcatcaagacagaggatctg

SEQ ID NO: 2662188 - DNA, 25 bp, Homo sapien
tctcaccaaggtagcaggaggaaaa

SEQ ID NO: 2662189 - DNA, 25 bp, Homo sapien
cagcagtatcttggataggcactaa

SEQ ID NO: 2662190 - DNA, 25 bp, Homo sapien
cgcaggtacttcagcagtatcttgg

SEQ ID NO: 2662191 - DNA, 25 bp, Homo sapien
tatttaggtaagttgaatcttcctc

SEQ ID NO: 2662192 - DNA, 25 bp, Homo sapien
tagcaacttgtacttccgcaggtac

SEQ ID NO: 2662193 - DNA, 25 bp, Homo sapien
ggtctcgagtcatccatttctccat

SEQ ID NO: 2662194 - DNA, 25 bp, Homo sapien
tctccattataaaggctcagtgtga

SEQ ID NO: 2662195 - DNA, 25 bp, Homo sapien
cttctggtctcgagtcatccatttc

SEQ ID NO: 2662196 - DNA, 25 bp, Homo sapien
tataaaggctcagtgtgatgtttgt

SEQ ID NO: 2662197 - DNA, 25 bp, Homo sapien
tgaatttactttgtactgggtgaag

SEQ ID NO: 2662198 - DNA, 25 bp, Homo sapien
tgtactgggtgaagtctaggtctgt

SEQ ID NO: 2662199 - DNA, 25 bp, Homo sapien
gaagtctaggtctgttttccagaag

SEQ ID NO: 2662200 - DNA, 25 bp, Homo sapien
ggtgaatttactttgtactgggtga

SEQ ID NO: 2662201 - DNA, 25 bp, Homo sapien
ctactggaccctttttctaatgtga

SEQ ID NO: 2662202 - DNA, 25 bp, Homo sapien
tttctaatgtgaacatcaacatttc

SEQ ID NO: 2662203 - DNA, 25 bp, Homo sapien
tactggaccctttttctaatgtgaa

SEQ ID NO: 2662204 - DNA, 25 bp, Homo sapien
ctttttctaatgtgaacatcaacat

SEQ ID NO: 2662205 - DNA, 25 bp, Homo sapien
ttgtcctgtctcgagaacaagtatg

SEQ ID NO: 2662206 - DNA, 25 bp, Homo sapien
tcctgtctcgagaacaagtatgctt

SEQ ID NO: 2662207 - DNA, 25 bp, Homo sapien
tgtctcgagaacaagtatgcttttc

SEQ ID NO: 2662208 - DNA, 25 bp, Homo sapien
gaacaagtatgcttttcaaatacta

SEQ ID NO: 2662209 - DNA, 25 bp, Homo sapien
tactctttggctttacactccagct

SEQ ID NO: 2662210 - DNA, 25 bp, Homo sapien
tgaaaatggactaatgtatctactc

SEQ ID NO: 2662211 - DNA, 25 bp, Homo sapien
taattggttgtttctcggcagccca

SEQ ID NO: 2662212 - DNA, 25 bp, Homo sapien
tcttttgcctccactgtgattgtga

SEQ ID NO: 2662213 - DNA, 25 bp, Homo sapien
agggcagagggtacaacactcaggc

SEQ ID NO: 2662214 - DNA, 25 bp, Homo sapien
aggcctgctagtgcctgcagactcc

SEQ ID NO: 2662215 - DNA, 25 bp, Homo sapien
tcatcactctgatttacctccttag

SEQ ID NO: 2662216 - DNA, 25 bp, Homo sapien
ttagtccataacctgtgatgtggag

SEQ ID NO: 2662217 - DNA, 25 bp, Homo sapien
gcccttcagaaacaggtggaaattc

SEQ ID NO: 2662218 - DNA, 25 bp, Homo sapien
tgaaatggttatacctggccccgac

SEQ ID NO: 2662219 - DNA, 25 bp, Homo sapien
tgaagaaactctaacagctggtacc

SEQ ID NO: 2662220 - DNA, 25 bp, Homo sapien
tacaatatagtggaagcccttcaga

SEQ ID NO: 2662221 - DNA, 25 bp, Homo sapien
gtgacaagtgcaaagatctctcctg

SEQ ID NO: 2662222 - DNA, 25 bp, Homo sapien
cactttggcaaagcatttgttcctc

SEQ ID NO: 2662223 - DNA, 25 bp, Homo sapien
caatttgttgtttatgcgtcttttc

SEQ ID NO: 2662224 - DNA, 25 bp, Homo sapien
catgcatctagcatagtgtttggac

SEQ ID NO: 2662225 - DNA, 25 bp, Homo sapien
ctaaaagatgaaggagccgtgaaca

SEQ ID NO: 2662226 - DNA, 25 bp, Homo sapien
gattatcgagagagccatttgcctc

SEQ ID NO: 2662227 - DNA, 25 bp, Homo sapien
aaagatgaaggagccgtgaacagtg

SEQ ID NO: 2662228 - DNA, 25 bp, Homo sapien
cagtgctttccatcaagattatcga

SEQ ID NO: 2662229 - DNA, 25 bp, Homo sapien
tccttttaagagcacattttcttct

SEQ ID NO: 2662230 - DNA, 25 bp, Homo sapien
cttttcaagaaaagagggctgatct

SEQ ID NO: 2662231 - DNA, 25 bp, Homo sapien
tgattccttttaagagcacattttc

SEQ ID NO: 2662232 - DNA, 25 bp, Homo sapien
aaaagagggctgatctgggagccca

SEQ ID NO: 2662233 - DNA, 25 bp, Homo sapien
gtgactttgggagcatcttgtactt

SEQ ID NO: 2662234 - DNA, 25 bp, Homo sapien
tgactttgggagcatcttgtacttt

SEQ ID NO: 2662235 - DNA, 25 bp, Homo sapien
tttgtcagcgagagctgtatccaag

SEQ ID NO: 2662236 - DNA, 25 bp, Homo sapien
ctggatttgtcagcgagagctgtat

SEQ ID NO: 2662237 - DNA, 25 bp, Homo sapien
gctgagtgcctgaaaaactactgcc

SEQ ID NO: 2662238 - DNA, 25 bp, Homo sapien
agcaagcccaactctaaacaatagt

SEQ ID NO: 2662239 - DNA, 25 bp, Homo sapien
tggatgaagattaaccccaggaaat

SEQ ID NO: 2662240 - DNA, 25 bp, Homo sapien
gacatcaactactgtgccacaatga

SEQ ID NO: 2662241 - DNA, 25 bp, Homo sapien
ttgacataattccttacttccttgt

SEQ ID NO: 2662242 - DNA, 25 bp, Homo sapien
taggaaccatactaatattctctgt

SEQ ID NO: 2662243 - DNA, 25 bp, Homo sapien
tccttgtgtaggaaccatactaata

SEQ ID NO: 2662244 - DNA, 25 bp, Homo sapien
ccttacttccttgtgtaggaaccat

SEQ ID NO: 2662245 - DNA, 25 bp, Homo sapien
atccaagccctgtgctctatcctgg

SEQ ID NO: 2662246 - DNA, 25 bp, Homo sapien
tttgttggtatgctccatccaagcc

SEQ ID NO: 2662247 - DNA, 25 bp, Homo sapien
ttctcttcttgcttagaaatctgca

SEQ ID NO: 2662248 - DNA, 25 bp, Homo sapien
tctatcctggtctctatgtttctct

SEQ ID NO: 2662249 - DNA, 25 bp, Homo sapien
tttctttctttccctggatcatacc

SEQ ID NO: 2662250 - DNA, 25 bp, Homo sapien
ctttctttctttccctggatcatac

SEQ ID NO: 2662251 - DNA, 25 bp, Homo sapien
ttctttctttccctggatcataccc

SEQ ID NO: 2662252 - DNA, 25 bp, Homo sapien
ctgtatgacttagtcctgttaaggg

SEQ ID NO: 2662253 - DNA, 25 bp, Homo sapien
taaggggttcattcaacatcagttg

SEQ ID NO: 2662254 - DNA, 25 bp, Homo sapien
tgttaaggggttcattcaacatcag

SEQ ID NO: 2662255 - DNA, 25 bp, Homo sapien
gttcattcaacatcagttgggtcat

SEQ ID NO: 2662256 - DNA, 25 bp, Homo sapien
gatcccagaatctccacgaatttct

SEQ ID NO: 2662257 - DNA, 25 bp, Homo sapien
ctgtaacccgtattgatttctcact

SEQ ID NO: 2662258 - DNA, 25 bp, Homo sapien
ttcctgtaacccgtattgatttctc

SEQ ID NO: 2662259 - DNA, 25 bp, Homo sapien
ctctggtcttagatcttgtgtttcc

SEQ ID NO: 2662260 - DNA, 25 bp, Homo sapien
actttgcaattctcacttgtgtatc

SEQ ID NO: 2662261 - DNA, 25 bp, Homo sapien
tcaagcaagttgtcgtacttttaaa

SEQ ID NO: 2662262 - DNA, 25 bp, Homo sapien
ttatcatactaaggggcatagccat

SEQ ID NO: 2662263 - DNA, 25 bp, Homo sapien
attatcatactaaggggcatagcca

SEQ ID NO: 2662264 - DNA, 25 bp, Homo sapien
tttccatataaagcactggcactga

SEQ ID NO: 2662265 - DNA, 25 bp, Homo sapien
tgccactgacagaatagtcaccatg

SEQ ID NO: 2662266 - DNA, 25 bp, Homo sapien
tgtgctctgcgtgtttccccatttc

SEQ ID NO: 2662267 - DNA, 25 bp, Homo sapien
aactttctatctgaggcgttccaca

SEQ ID NO: 2662268 - DNA, 25 bp, Homo sapien
ggtgacaggacgatgtgaagccctc

SEQ ID NO: 2662269 - DNA, 25 bp, Homo sapien
tgatcagtgttcctaaggaaggcca

SEQ ID NO: 2662270 - DNA, 25 bp, Homo sapien
tgaagccctctgagtacagttgata

SEQ ID NO: 2662271 - DNA, 25 bp, Homo sapien
tgaatttcagttggtcagggcctgc

SEQ ID NO: 2662272 - DNA, 25 bp, Homo sapien
ttttttggatgctgccatacttcat

SEQ ID NO: 2662273 - DNA, 25 bp, Homo sapien
ccagcaagtaagtcgatgatactat

SEQ ID NO: 2662274 - DNA, 25 bp, Homo sapien
tccacattctactttgattgaatac

SEQ ID NO: 2662275 - DNA, 25 bp, Homo sapien
tctactttgattgaatactttagtt

SEQ ID NO: 2662276 - DNA, 25 bp, Homo sapien
caaatcaccagcaagtaagtcgatg

SEQ ID NO: 2662277 - DNA, 25 bp, Homo sapien
attcagggaaacttccctagtaatg

SEQ ID NO: 2662278 - DNA, 25 bp, Homo sapien
ttcggtgctctacacattcagggaa

SEQ ID NO: 2662279 - DNA, 25 bp, Homo sapien
tacacattcagggaaacttccctag

SEQ ID NO: 2662280 - DNA, 25 bp, Homo sapien
gctctacacattcagggaaacttcc

SEQ ID NO: 2662281 - DNA, 25 bp, Homo sapien
aactccattactttttggtaatgca

SEQ ID NO: 2662282 - DNA, 25 bp, Homo sapien
tcatgctcaaccttacaacttcttc

SEQ ID NO: 2662283 - DNA, 25 bp, Homo sapien
cttcataacatgctttacttcctca

SEQ ID NO: 2662284 - DNA, 25 bp, Homo sapien
agtggcttcagaaccttgtttcttc

SEQ ID NO: 2662285 - DNA, 25 bp, Homo sapien
cataacatgctttacttcctcagtg

SEQ ID NO: 2662286 - DNA, 25 bp, Homo sapien
cctcagtggcttcagaaccttgttt

SEQ ID NO: 2662287 - DNA, 25 bp, Homo sapien
aagctgcttctaagtgatttttccc

SEQ ID NO: 2662288 - DNA, 25 bp, Homo sapien
ggtgcaaggttctgacatttctgac

SEQ ID NO: 2662289 - DNA, 25 bp, Homo sapien
catttctgactaaatttgattttgg

SEQ ID NO: 2662290 - DNA, 25 bp, Homo sapien
tttttaggtgcaaggttctgacatt

SEQ ID NO: 2662291 - DNA, 25 bp, Homo sapien
agatgtcaggataatcaacgaagat

SEQ ID NO: 2662292 - DNA, 25 bp, Homo sapien
cagatgtcaggataatcaacgaaga

SEQ ID NO: 2662293 - DNA, 25 bp, Homo sapien
tccgccagacaagccaaccatggag

SEQ ID NO: 2662294 - DNA, 25 bp, Homo sapien
cgagggcacagcttactccgccaga

SEQ ID NO: 2662295 - DNA, 25 bp, Homo sapien
ggcacagcttactccgccagacaag

SEQ ID NO: 2662296 - DNA, 25 bp, Homo sapien
cgcgccgagggcacagcttactccg

SEQ ID NO: 2662297 - DNA, 25 bp, Homo sapien
caagtggaaagctgagtgaactaca

SEQ ID NO: 2662298 - DNA, 25 bp, Homo sapien
ctgcaggcagcttcaagtggaaagc

SEQ ID NO: 2662299 - DNA, 25 bp, Homo sapien
actacagggttttaaatgctgtgcc

SEQ ID NO: 2662300 - DNA, 25 bp, Homo sapien
gagtgaactacagggttttaaatgc

SEQ ID NO: 2662301 - DNA, 25 bp, Homo sapien
ctgaagtagtcgccggaaaagggca

SEQ ID NO: 2662302 - DNA, 25 bp, Homo sapien
tgcgggcggccccttgtgagggatc

SEQ ID NO: 2662303 - DNA, 25 bp, Homo sapien
agggatccgcgggtaatagaatcct

SEQ ID NO: 2662304 - DNA, 25 bp, Homo sapien
actcctgcgctcacagatgcgggcg

SEQ ID NO: 2662305 - DNA, 25 bp, Homo sapien
tcggccactgggtctcggcgcaaac

SEQ ID NO: 2662306 - DNA, 25 bp, Homo sapien
cgatgctgactgcagacgtcgggca

SEQ ID NO: 2662307 - DNA, 25 bp, Homo sapien
tgcgcccgggcgtcagctagttgat

SEQ ID NO: 2662308 - DNA, 25 bp, Homo sapien
ctccctaggcagtgcgggcgatgct

SEQ ID NO: 2662309 - DNA, 25 bp, Homo sapien
gatcatgaagcgctcggtagccgtc

SEQ ID NO: 2662310 - DNA, 25 bp, Homo sapien
tgggtgccccgagaaagtgcttgta

SEQ ID NO: 2662311 - DNA, 25 bp, Homo sapien
cacgtccgggagacgggatcatgaa

SEQ ID NO: 2662312 - DNA, 25 bp, Homo sapien
ccagttcggcaaaggtaaggcgtcg

SEQ ID NO: 2662313 - DNA, 25 bp, Homo sapien
ccacccgcagcggagggctgagccc

SEQ ID NO: 2662314 - DNA, 25 bp, Homo sapien
cggcggctccccggagctcacccac

SEQ ID NO: 2662315 - DNA, 25 bp, Homo sapien
tctgccgggacccacccgcagcgga

SEQ ID NO: 2662316 - DNA, 25 bp, Homo sapien
gggacccacccgcagcggagggctg

SEQ ID NO: 2662317 - DNA, 25 bp, Homo sapien
tttgtacacagtgcgctcccggcgg

SEQ ID NO: 2662318 - DNA, 25 bp, Homo sapien
tgtttgtacacagtgcgctcccggc

SEQ ID NO: 2662319 - DNA, 25 bp, Homo sapien
tctgtttgtacacagtgcgctcccg

SEQ ID NO: 2662320 - DNA, 25 bp, Homo sapien
gtacacagtgcgctcccggcggccc

SEQ ID NO: 2662321 - DNA, 25 bp, Homo sapien
tgtcctgcttaacgagatgcatgtc

SEQ ID NO: 2662322 - DNA, 25 bp, Homo sapien
gatgtcctgcttaacgagatgcatg

SEQ ID NO: 2662323 - DNA, 25 bp, Homo sapien
catgtctcctactcacttccaccct

SEQ ID NO: 2662324 - DNA, 25 bp, Homo sapien
atgtctcctactcacttccaccctt

SEQ ID NO: 2662325 - DNA, 25 bp, Homo sapien
ctttatgttcttgcacagttcccaa

SEQ ID NO: 2662326 - DNA, 25 bp, Homo sapien
tatgttcttgcacagttcccaaact

SEQ ID NO: 2662327 - DNA, 25 bp, Homo sapien
gcctttatgttcttgcacagttccc

SEQ ID NO: 2662328 - DNA, 25 bp, Homo sapien
cttagtgatgcttcaagggtctgtc

SEQ ID NO: 2662329 - DNA, 25 bp, Homo sapien
tccatttattttggcggatagaaag

SEQ ID NO: 2662330 - DNA, 25 bp, Homo sapien
gtaagccatgagctgtatttttggt

SEQ ID NO: 2662331 - DNA, 25 bp, Homo sapien
gagaagaaagcacaattgtaagcca

SEQ ID NO: 2662332 - DNA, 25 bp, Homo sapien
tggttcaatcacttccactgcaaaa

SEQ ID NO: 2662333 - DNA, 25 bp, Homo sapien
gaattggatccatgtacaataagca

SEQ ID NO: 2662334 - DNA, 25 bp, Homo sapien
aactgctggaattggatccatgtac

SEQ ID NO: 2662335 - DNA, 25 bp, Homo sapien
ggatccatgtacaataagcaatcat

SEQ ID NO: 2662336 - DNA, 25 bp, Homo sapien
ctgtaactgctggaattggatccat

SEQ ID NO: 2662337 - DNA, 25 bp, Homo sapien
gtagattcacctttcaactctttgc

SEQ ID NO: 2662338 - DNA, 25 bp, Homo sapien
gatgtagttccatggctaattgcac

SEQ ID NO: 2662339 - DNA, 25 bp, Homo sapien
ctttgccttcgagaatgtttctctt

SEQ ID NO: 2662340 - DNA, 25 bp, Homo sapien
cagatggagatgtagttccatggct

SEQ ID NO: 2662341 - DNA, 25 bp, Homo sapien
ttgtcttcacatagcagagggcaga

SEQ ID NO: 2662342 - DNA, 25 bp, Homo sapien
gagaaagatcacttccttggtgtct

SEQ ID NO: 2662343 - DNA, 25 bp, Homo sapien
catggcccaattccttccaaaggct

SEQ ID NO: 2662344 - DNA, 25 bp, Homo sapien
attcatgagggctcttctcatggcc

SEQ ID NO: 2662345 - DNA, 25 bp, Homo sapien
gcttcttggttcatagctgtcttct

SEQ ID NO: 2662346 - DNA, 25 bp, Homo sapien
tgcttcttggttcatagctgtcttc

SEQ ID NO: 2662347 - DNA, 25 bp, Homo sapien
tccttgtgctgtgccttggaggtca

SEQ ID NO: 2662348 - DNA, 25 bp, Homo sapien
gaaaatggctgtagtgcatgcactg

SEQ ID NO: 2662349 - DNA, 25 bp, Homo sapien
gcatgaaaattcgaagaggaggtaa

SEQ ID NO: 2662350 - DNA, 25 bp, Homo sapien
ggtcccattagagtgaaaaatagtc

SEQ ID NO: 2662351 - DNA, 25 bp, Homo sapien
aggcatctaagtttatcaagtacaa

SEQ ID NO: 2662352 - DNA, 25 bp, Homo sapien
tcaagaagctaataggcagagacgc

SEQ ID NO: 2662353 - DNA, 25 bp, Homo sapien
tcaaattgacctgcataattgaagc

SEQ ID NO: 2662354 - DNA, 25 bp, Homo sapien
tgaagcaaacccaagtttcaatggg

SEQ ID NO: 2662355 - DNA, 25 bp, Homo sapien
tgacaggaagatcatcaacaacaac

SEQ ID NO: 2662356 - DNA, 25 bp, Homo sapien
gtctatgacaggaagatcatcaaca

SEQ ID NO: 2662357 - DNA, 25 bp, Homo sapien
tagtctgtttgttacagcattgtct

SEQ ID NO: 2662358 - DNA, 25 bp, Homo sapien
ttacagcattgtctatgacaggaag

SEQ ID NO: 2662359 - DNA, 25 bp, Homo sapien
gcttcatcacgatttagctcaaaaa

SEQ ID NO: 2662360 - DNA, 25 bp, Homo sapien
tagcaggcgagcctcagattatcat

SEQ ID NO: 2662361 - DNA, 25 bp, Homo sapien
atctgcttcatcacgatttagctca

SEQ ID NO: 2662362 - DNA, 25 bp, Homo sapien
ttttcacaatatagcaggcgagcct

SEQ ID NO: 2662363 - DNA, 25 bp, Homo sapien
caagacatgttcttatggcagaagg

SEQ ID NO: 2662364 - DNA, 25 bp, Homo sapien
ctaagcctcaggtcaagttgagaca

SEQ ID NO: 2662365 - DNA, 25 bp, Homo sapien
taagcaattgcaaaatctcactggt

SEQ ID NO: 2662366 - DNA, 25 bp, Homo sapien
tcttccttgggctataagcggtcca

SEQ ID NO: 2662367 - DNA, 25 bp, Homo sapien
ttgacttatttacaggtactttgac

SEQ ID NO: 2662368 - DNA, 25 bp, Homo sapien
ggaacattattctagtggccaagga

SEQ ID NO: 2662369 - DNA, 25 bp, Homo sapien
ggtagcattacacaacgcacaagga

SEQ ID NO: 2662370 - DNA, 25 bp, Homo sapien
ggacttctgaaaggtccacggccca

SEQ ID NO: 2662371 - DNA, 25 bp, Homo sapien
gaactaccctgagatccctattggg

SEQ ID NO: 2662372 - DNA, 25 bp, Homo sapien
caggtgactgaggatttattgtagc

SEQ ID NO: 2662373 - DNA, 25 bp, Homo sapien
ggtatataggtagtctccacaaagg

SEQ ID NO: 2662374 - DNA, 25 bp, Homo sapien
ttgtagcccaagtacttctgatctg

SEQ ID NO: 2662375 - DNA, 25 bp, Homo sapien
tgtgccatttgatgtacgggatggc

SEQ ID NO: 2662376 - DNA, 25 bp, Homo sapien
ataagagtgttaattcgggaagaag

SEQ ID NO: 2662377 - DNA, 25 bp, Homo sapien
gagggtctatgtcccgttgtgtacg

SEQ ID NO: 2662378 - DNA, 25 bp, Homo sapien
cgttgtgtacgcattgtcttgataa

SEQ ID NO: 2662379 - DNA, 25 bp, Homo sapien
gattacaaggtgaaggcaaaattag

SEQ ID NO: 2662380 - DNA, 25 bp, Homo sapien
tatgtcccgttgtgtacgcattgtc

SEQ ID NO: 2662381 - DNA, 25 bp, Homo sapien
tcatattgttactgatgttgtacta

SEQ ID NO: 2662382 - DNA, 25 bp, Homo sapien
tactgatgttgtactagcattggtg

SEQ ID NO: 2662383 - DNA, 25 bp, Homo sapien
gtactagcattggtgttgatattga

SEQ ID NO: 2662384 - DNA, 25 bp, Homo sapien
gatgttgtactagcattggtgttga

SEQ ID NO: 2662385 - DNA, 25 bp, Homo sapien
ctggattaagaaaatgtggcacata

SEQ ID NO: 2662386 - DNA, 25 bp, Homo sapien
cacacgtttgtttattgtggcatta

SEQ ID NO: 2662387 - DNA, 25 bp, Homo sapien
aagccaaatgtccaacaatgataga

SEQ ID NO: 2662388 - DNA, 25 bp, Homo sapien
ttcacaatagcaaagacttggaacc

SEQ ID NO: 2662389 - DNA, 25 bp, Homo sapien
caagaagttaatatgtcagctgaag

SEQ ID NO: 2662390 - DNA, 25 bp, Homo sapien
cacagaataccctgtagtgaaggtg

SEQ ID NO: 2662391 - DNA, 25 bp, Homo sapien
tcagctgaagtgttagcgagacaca

SEQ ID NO: 2662392 - DNA, 25 bp, Homo sapien
tcttcctaccactgtaacggctcag

SEQ ID NO: 2662393 - DNA, 25 bp, Homo sapien
attgctagagtctttttaaactcca

SEQ ID NO: 2662394 - DNA, 25 bp, Homo sapien
tctgtgcaccaaaacacagtcctta

SEQ ID NO: 2662395 - DNA, 25 bp, Homo sapien
cagtggtcaaatggtacattgctag

SEQ ID NO: 2662396 - DNA, 25 bp, Homo sapien
taaactccataaacatggttctata

SEQ ID NO: 2662397 - DNA, 25 bp, Homo sapien
ggaatacttctgtgaacacataagc

SEQ ID NO: 2662398 - DNA, 25 bp, Homo sapien
ctgcttgtcgaatatctttccagga

SEQ ID NO: 2662399 - DNA, 25 bp, Homo sapien
tcttccctgcttgtcgaatatcttt

SEQ ID NO: 2662400 - DNA, 25 bp, Homo sapien
gaacacataagcatgtatcaatatg

SEQ ID NO: 2662401 - DNA, 25 bp, Homo sapien
taagtttgggactaaatgtgtatca

SEQ ID NO: 2662402 - DNA, 25 bp, Homo sapien
ctggagacattgatgctaattggac

SEQ ID NO: 2662403 - DNA, 25 bp, Homo sapien
gcatctaatcacaaataagtttggg

SEQ ID NO: 2662404 - DNA, 25 bp, Homo sapien
ttgtaataatatgaggcaacttcct

SEQ ID NO: 2662405 - DNA, 25 bp, Homo sapien
catgtcttgggtatgaagtttagat

SEQ ID NO: 2662406 - DNA, 25 bp, Homo sapien
tgtatcttgcatgtcttgggtatga

SEQ ID NO: 2662407 - DNA, 25 bp, Homo sapien
tgcatgtcttgggtatgaagtttag

SEQ ID NO: 2662408 - DNA, 25 bp, Homo sapien
tatcttgcatgtcttgggtatgaag

SEQ ID NO: 2662409 - DNA, 25 bp, Homo sapien
cagccaacaacttgccaaccatttt

SEQ ID NO: 2662410 - DNA, 25 bp, Homo sapien
agccaacaacttgccaaccattttc

SEQ ID NO: 2662411 - DNA, 25 bp, Homo sapien
gaaaataccaatgccagtagttgtg

SEQ ID NO: 2662412 - DNA, 25 bp, Homo sapien
tcagaaaataccaatgccagtagtt

SEQ ID NO: 2662413 - DNA, 25 bp, Homo sapien
taccaatgccagtagttgtgtgtgc

SEQ ID NO: 2662414 - DNA, 25 bp, Homo sapien
tgccagtagttgtgtgtgctgatgt

SEQ ID NO: 2662415 - DNA, 25 bp, Homo sapien
cataggaggagagatattgccactg

SEQ ID NO: 2662416 - DNA, 25 bp, Homo sapien
gaggagagatattgccactggagga

SEQ ID NO: 2662417 - DNA, 25 bp, Homo sapien
gagagatattgccactggaggaaca

SEQ ID NO: 2662418 - DNA, 25 bp, Homo sapien
taggaggagagatattgccactgga

SEQ ID NO: 2662419 - DNA, 25 bp, Homo sapien
ctgtggccttgacacatttgccaat

SEQ ID NO: 2662420 - DNA, 25 bp, Homo sapien
tctgtggccttgacacatttgccaa

SEQ ID NO: 2662421 - DNA, 25 bp, Homo sapien
ctctgtggccttgacacatttgcca

SEQ ID NO: 2662422 - DNA, 25 bp, Homo sapien
tgtggccttgacacatttgccaatt

SEQ ID NO: 2662423 - DNA, 25 bp, Homo sapien
gagtttcaattgcaagatcttgctg

SEQ ID NO: 2662424 - DNA, 25 bp, Homo sapien
aagttttctgtttgaagctgcatga

SEQ ID NO: 2662425 - DNA, 25 bp, Homo sapien
cacttaacattggatctgccatcca

SEQ ID NO: 2662426 - DNA, 25 bp, Homo sapien
ctatgttagttccaaacaaaattga

SEQ ID NO: 2662427 - DNA, 25 bp, Homo sapien
gaaaacatcccattacagatgctgg

SEQ ID NO: 2662428 - DNA, 25 bp, Homo sapien
gagggaacaggatcttatgcacaag

SEQ ID NO: 2662429 - DNA, 25 bp, Homo sapien
taatatccttgattaggctggaggg

SEQ ID NO: 2662430 - DNA, 25 bp, Homo sapien
accttggtgtggcatggagagtcca

SEQ ID NO: 2662431 - DNA, 25 bp, Homo sapien
gcttctcatgacttttagaggctgc

SEQ ID NO: 2662432 - DNA, 25 bp, Homo sapien
ttagaaacacctctctggtccagcc

SEQ ID NO: 2662433 - DNA, 25 bp, Homo sapien
agaaacacctctctggtccagccag

SEQ ID NO: 2662434 - DNA, 25 bp, Homo sapien
ccatgaggttttgattggcttctca

SEQ ID NO: 2662435 - DNA, 25 bp, Homo sapien
taggttggggacaactctgtggaac

SEQ ID NO: 2662436 - DNA, 25 bp, Homo sapien
gaacaggttctcctaaggctggaga

SEQ ID NO: 2662437 - DNA, 25 bp, Homo sapien
tgccaagggctgaagttgaacaggt

SEQ ID NO: 2662438 - DNA, 25 bp, Homo sapien
gagactggttgtgagtacgggttct

SEQ ID NO: 2662439 - DNA, 25 bp, Homo sapien
tcagtcaagaactaaaggcgacttc

SEQ ID NO: 2662440 - DNA, 25 bp, Homo sapien
gacttcactaaatttaacgtgacac

SEQ ID NO: 2662441 - DNA, 25 bp, Homo sapien
agaactaaaggcgacttcactaaat

SEQ ID NO: 2662442 - DNA, 25 bp, Homo sapien
aggcgacttcactaaatttaacgtg

SEQ ID NO: 2662443 - DNA, 25 bp, Homo sapien
agccccagtatcattttgagttaac

SEQ ID NO: 2662444 - DNA, 25 bp, Homo sapien
gccccagtatcattttgagttaact

SEQ ID NO: 2662445 - DNA, 25 bp, Homo sapien
gaagtagaaagcaagcgcctatgaa

SEQ ID NO: 2662446 - DNA, 25 bp, Homo sapien
ccaaccctcaaaaactatgtgagat

SEQ ID NO: 2662447 - DNA, 25 bp, Homo sapien
aactcttgtgactaaatgactcatg

SEQ ID NO: 2662448 - DNA, 25 bp, Homo sapien
acttaagtacagttttacgtgtgtg

SEQ ID NO: 2662449 - DNA, 25 bp, Homo sapien
cacagccatgattttgcctgtcaac

SEQ ID NO: 2662450 - DNA, 25 bp, Homo sapien
tcatgaagacacagccatgattttg

SEQ ID NO: 2662451 - DNA, 25 bp, Homo sapien
catgaagacacagccatgattttgc

SEQ ID NO: 2662452 - DNA, 25 bp, Homo sapien
agacacagccatgattttgcctgtc

SEQ ID NO: 2662453 - DNA, 25 bp, Homo sapien
gaaataatagctactggcactctct

SEQ ID NO: 2662454 - DNA, 25 bp, Homo sapien
taagggatagtcagtcagctagctg

SEQ ID NO: 2662455 - DNA, 25 bp, Homo sapien
tggactccagaacatgcatcagcag

SEQ ID NO: 2662456 - DNA, 25 bp, Homo sapien
cgtgggcaagcaccatataattggt

SEQ ID NO: 2662457 - DNA, 25 bp, Homo sapien
cttgtaggcctcgacaacccttttg

SEQ ID NO: 2662458 - DNA, 25 bp, Homo sapien
gtggccaaaaccttgtaggcctcga

SEQ ID NO: 2662459 - DNA, 25 bp, Homo sapien
gccaaaaccttgtaggcctcgacaa

SEQ ID NO: 2662460 - DNA, 25 bp, Homo sapien
taggcctcgacaacccttttgtcca

SEQ ID NO: 2662461 - DNA, 25 bp, Homo sapien
gccaagaacaggaataagggtacat

SEQ ID NO: 2662462 - DNA, 25 bp, Homo sapien
taagggtacattgatctgagaactg

SEQ ID NO: 2662463 - DNA, 25 bp, Homo sapien
aacaaccagaattaagaggccaaga

SEQ ID NO: 2662464 - DNA, 25 bp, Homo sapien
ccttttggaaaccacatgcgtctgc

SEQ ID NO: 2662465 - DNA, 25 bp, Homo sapien
gcaaattgctcctggtggttaagca

SEQ ID NO: 2662466 - DNA, 25 bp, Homo sapien
tcctggtggttaagcagccgagtgc

SEQ ID NO: 2662467 - DNA, 25 bp, Homo sapien
cttctaacactctagaatctatcat

SEQ ID NO: 2662468 - DNA, 25 bp, Homo sapien
taagcagccgagtgccttctaacac

SEQ ID NO: 2662469 - DNA, 25 bp, Homo sapien
cttcagtcttctcaagggtaagccc

SEQ ID NO: 2662470 - DNA, 25 bp, Homo sapien
tcttctcaagggtaagccctgtgtc

SEQ ID NO: 2662471 - DNA, 25 bp, Homo sapien
caagggtaagccctgtgtccgagct

SEQ ID NO: 2662472 - DNA, 25 bp, Homo sapien
aagggtaagccctgtgtccgagctt

SEQ ID NO: 2662473 - DNA, 25 bp, Homo sapien
ctgaaatctgctaccgttacgacca

SEQ ID NO: 2662474 - DNA, 25 bp, Homo sapien
aaatctgctaccgttacgaccactc

SEQ ID NO: 2662475 - DNA, 25 bp, Homo sapien
atctgctaccgttacgaccactcat

SEQ ID NO: 2662476 - DNA, 25 bp, Homo sapien
tgaaatctgctaccgttacgaccac

SEQ ID NO: 2662477 - DNA, 25 bp, Homo sapien
ttctactttccaattgttatcttct

SEQ ID NO: 2662478 - DNA, 25 bp, Homo sapien
aatttctactttccaattgttatct

SEQ ID NO: 2662479 - DNA, 25 bp, Homo sapien
gaatttctactttccaattgttatc

SEQ ID NO: 2662480 - DNA, 25 bp, Homo sapien
tttctactttccaattgttatcttc

SEQ ID NO: 2662481 - DNA, 25 bp, Homo sapien
caccttaggtaccagtatggccaca

SEQ ID NO: 2662482 - DNA, 25 bp, Homo sapien
tgaagaacccttaggccctgaacaa

SEQ ID NO: 2662483 - DNA, 25 bp, Homo sapien
gccaggcagcatttaacacaagtag

SEQ ID NO: 2662484 - DNA, 25 bp, Homo sapien
aagtagacataagtaccttgggcct

SEQ ID NO: 2662485 - DNA, 25 bp, Homo sapien
gcattgcaacacattcagataactg

SEQ ID NO: 2662486 - DNA, 25 bp, Homo sapien
acccagatctgaccaaatccatcaa

SEQ ID NO: 2662487 - DNA, 25 bp, Homo sapien
tgtgacaggattaaccatatttctc

SEQ ID NO: 2662488 - DNA, 25 bp, Homo sapien
gaccaaatccatcaaaacttgggct

SEQ ID NO: 2662489 - DNA, 25 bp, Homo sapien
aactgtgacaggattaaccatattt

SEQ ID NO: 2662490 - DNA, 25 bp, Homo sapien
ttcaacatcgccgtagacggcgaga

SEQ ID NO: 2662491 - DNA, 25 bp, Homo sapien
cgtagacggcgagaacttgggccgt

SEQ ID NO: 2662492 - DNA, 25 bp, Homo sapien
ttcttcaacatcgccgtagacggcg

SEQ ID NO: 2662493 - DNA, 25 bp, Homo sapien
catcgccgtagacggcgagaacttg

SEQ ID NO: 2662494 - DNA, 25 bp, Homo sapien
agaagaaattcttcaacagtaaagt

SEQ ID NO: 2662495 - DNA, 25 bp, Homo sapien
tgatttttgggtcaatggttgacat

SEQ ID NO: 2662496 - DNA, 25 bp, Homo sapien
ggagaagaaattcttcaacagtaaa

SEQ ID NO: 2662497 - DNA, 25 bp, Homo sapien
ttcaatgatttttgggtcaatggtt

SEQ ID NO: 2662498 - DNA, 25 bp, Homo sapien
agtgaaatagatctgtgctaataag

SEQ ID NO: 2662499 - DNA, 25 bp, Homo sapien
tctgtgctaataagtgttccttcat

SEQ ID NO: 2662500 - DNA, 25 bp, Homo sapien
gatctgtgctaataagtgttccttc

SEQ ID NO: 2662501 - DNA, 25 bp, Homo sapien
aatagatctgtgctaataagtgttc

SEQ ID NO: 2662502 - DNA, 25 bp, Homo sapien
tgcccaaagttggtgatgggtttta

SEQ ID NO: 2662503 - DNA, 25 bp, Homo sapien
tcaaaaaccctttgacattatcaaa

SEQ ID NO: 2662504 - DNA, 25 bp, Homo sapien
taatatctcgactacctcaaaaacc

SEQ ID NO: 2662505 - DNA, 25 bp, Homo sapien
aaagtcaggagttggtctgcctcaa

SEQ ID NO: 2662506 - DNA, 25 bp, Homo sapien
catgatgcacctgatccttcaccag

SEQ ID NO: 2662507 - DNA, 25 bp, Homo sapien
ccagctgtagatttataacaacata

SEQ ID NO: 2662508 - DNA, 25 bp, Homo sapien
acagagcatgatgcacctgatcctt

SEQ ID NO: 2662509 - DNA, 25 bp, Homo sapien
accagctgtagatttataacaacat

SEQ ID NO: 2662510 - DNA, 25 bp, Homo sapien
ttaacaaattatagagcaggttgtt

SEQ ID NO: 2662511 - DNA, 25 bp, Homo sapien
aacaaattatagagcaggttgttat

SEQ ID NO: 2662512 - DNA, 25 bp, Homo sapien
atattaacaaattatagagcaggtt

SEQ ID NO: 2662513 - DNA, 25 bp, Homo sapien
tattaacaaattatagagcaggttg

SEQ ID NO: 2662514 - DNA, 25 bp, Homo sapien
cactggttgttacttttctttccat

SEQ ID NO: 2662515 - DNA, 25 bp, Homo sapien
ctggttgttacttttctttccatag

SEQ ID NO: 2662516 - DNA, 25 bp, Homo sapien
gacaggccgctcctttcaaatgcat

SEQ ID NO: 2662517 - DNA, 25 bp, Homo sapien
gccagaaagccggtcccaattgtaa

SEQ ID NO: 2662518 - DNA, 25 bp, Homo sapien
gacaggtggcctaagtctcctttgg

SEQ ID NO: 2662519 - DNA, 25 bp, Homo sapien
cattgcactagggtaaggagacagg

SEQ ID NO: 2662520 - DNA, 25 bp, Homo sapien
tatacggattgagagacagcccaca

SEQ ID NO: 2662521 - DNA, 25 bp, Homo sapien
cacttatacggattgagagacagcc

SEQ ID NO: 2662522 - DNA, 25 bp, Homo sapien
cttacacttatacggattgagagac

SEQ ID NO: 2662523 - DNA, 25 bp, Homo sapien
cttcttacacttatacggattgaga

SEQ ID NO: 2662524 - DNA, 25 bp, Homo sapien
tgctcctgaggcgagggtatcatca

SEQ ID NO: 2662525 - DNA, 25 bp, Homo sapien
gtataactctcttcataaggctgtg

SEQ ID NO: 2662526 - DNA, 25 bp, Homo sapien
aactctacaaccctttggtgacaag

SEQ ID NO: 2662527 - DNA, 25 bp, Homo sapien
actagtgaaatggaagtgagagtaa

SEQ ID NO: 2662528 - DNA, 25 bp, Homo sapien
tactcttcatctttgcgggtataag

SEQ ID NO: 2662529 - DNA, 25 bp, Homo sapien
tgctaagatactccaaatgctcctg

SEQ ID NO: 2662530 - DNA, 25 bp, Homo sapien
tgtttgtctgacagttagcttctgg

SEQ ID NO: 2662531 - DNA, 25 bp, Homo sapien
tgcatgaaacccctggaaaggtctt

SEQ ID NO: 2662532 - DNA, 25 bp, Homo sapien
tgtcactaacattagagatcaggct

SEQ ID NO: 2662533 - DNA, 25 bp, Homo sapien
taacattagagatcaggctgtttac

SEQ ID NO: 2662534 - DNA, 25 bp, Homo sapien
tagagatcaggctgtttactgacag

SEQ ID NO: 2662535 - DNA, 25 bp, Homo sapien
caggctgtttactgacagctgctct

SEQ ID NO: 2662536 - DNA, 25 bp, Homo sapien
tgttatctggtatggaataacagcc

SEQ ID NO: 2662537 - DNA, 25 bp, Homo sapien
tcttgcttctgttatctggtatgga

SEQ ID NO: 2662538 - DNA, 25 bp, Homo sapien
tatggaataacagcccgtacataca

SEQ ID NO: 2662539 - DNA, 25 bp, Homo sapien
tctggtatggaataacagcccgtac

SEQ ID NO: 2662540 - DNA, 25 bp, Homo sapien
gatggaaactgacctcgtcacactc

SEQ ID NO: 2662541 - DNA, 25 bp, Homo sapien
agcaaagccggaagtgggttgtcca

SEQ ID NO: 2662542 - DNA, 25 bp, Homo sapien
caggctgtttctctatcccgtggaa

SEQ ID NO: 2662543 - DNA, 25 bp, Homo sapien
ggagcctgagcatatttataactgg

SEQ ID NO: 2662544 - DNA, 25 bp, Homo sapien
aaagccagctgaacctgcttatgtc

SEQ ID NO: 2662545 - DNA, 25 bp, Homo sapien
catatttctgggtataaaccccaag

SEQ ID NO: 2662546 - DNA, 25 bp, Homo sapien
ggtataaaccccaagcaaagccagc

SEQ ID NO: 2662547 - DNA, 25 bp, Homo sapien
ctccaaaccatatgttttccttcca

SEQ ID NO: 2662548 - DNA, 25 bp, Homo sapien
caaagaagggagattccaacaagga

SEQ ID NO: 2662549 - DNA, 25 bp, Homo sapien
tggcaaagaagggagattccaacaa

SEQ ID NO: 2662550 - DNA, 25 bp, Homo sapien
gaagggagattccaacaaggaaata

SEQ ID NO: 2662551 - DNA, 25 bp, Homo sapien
gggagattccaacaaggaaatatgc

SEQ ID NO: 2662552 - DNA, 25 bp, Homo sapien
caagttttcaaaaggcaaatcgaag

SEQ ID NO: 2662553 - DNA, 25 bp, Homo sapien
tctaagccataaccacaagttttca

SEQ ID NO: 2662554 - DNA, 25 bp, Homo sapien
caaaaggcaaatcgaagcaatgttc

SEQ ID NO: 2662555 - DNA, 25 bp, Homo sapien
caccagatgtatctaagccataacc

SEQ ID NO: 2662556 - DNA, 25 bp, Homo sapien
ttttgcattctaccaaccttcaggg

SEQ ID NO: 2662557 - DNA, 25 bp, Homo sapien
ctaggatggctggagtgctgaaacc

SEQ ID NO: 2662558 - DNA, 25 bp, Homo sapien
tagctgagccttcctaagagagtga

SEQ ID NO: 2662559 - DNA, 25 bp, Homo sapien
tatctgaccctatagctaggatggc

SEQ ID NO: 2662560 - DNA, 25 bp, Homo sapien
gagataatcacttatctttaattct

SEQ ID NO: 2662561 - DNA, 25 bp, Homo sapien
gtggagataatcacttatctttaat

SEQ ID NO: 2662562 - DNA, 25 bp, Homo sapien
cagaagtggagataatcacttatct

SEQ ID NO: 2662563 - DNA, 25 bp, Homo sapien
ggagataatcacttatctttaattc

SEQ ID NO: 2662564 - DNA, 25 bp, Homo sapien
tgtatctccaagcatgtccaagcac

SEQ ID NO: 2662565 - DNA, 25 bp, Homo sapien
agcatgtccaagcacagaaatcagt

SEQ ID NO: 2662566 - DNA, 25 bp, Homo sapien
ttttgtcctgtatctccaagcatgt

SEQ ID NO: 2662567 - DNA, 25 bp, Homo sapien
ccaagcatgtccaagcacagaaatc

SEQ ID NO: 2662568 - DNA, 25 bp, Homo sapien
ttgtatgcatatgatgcgcagacta

SEQ ID NO: 2662569 - DNA, 25 bp, Homo sapien
ttggcagtttgtatgcatatgatgc

SEQ ID NO: 2662570 - DNA, 25 bp, Homo sapien
gcagtttgtatgcatatgatgcgca

SEQ ID NO: 2662571 - DNA, 25 bp, Homo sapien
ctgtccaatacactgcagcataatt

SEQ ID NO: 2662572 - DNA, 25 bp, Homo sapien
tccattaagtagtgtatgtactctg

SEQ ID NO: 2662573 - DNA, 25 bp, Homo sapien
tatgtactctgcaacattctggtcc

SEQ ID NO: 2662574 - DNA, 25 bp, Homo sapien
gggacagacaagcttccattgacag

SEQ ID NO: 2662575 - DNA, 25 bp, Homo sapien
tggtccatgatgtgcttcctctgta

SEQ ID NO: 2662576 - DNA, 25 bp, Homo sapien
cttcttttgagctaccccatctttc

SEQ ID NO: 2662577 - DNA, 25 bp, Homo sapien
cagcctgcatctgagctctgaggaa

SEQ ID NO: 2662578 - DNA, 25 bp, Homo sapien
ttagctctcagcagcctgcatctga

SEQ ID NO: 2662579 - DNA, 25 bp, Homo sapien
cttgccttcttttgagctaccccat

SEQ ID NO: 2662580 - DNA, 25 bp, Homo sapien
gcatgcagctgcgcttcaatctcct

SEQ ID NO: 2662581 - DNA, 25 bp, Homo sapien
catgcagctgcgcttcaatctcctc

SEQ ID NO: 2662582 - DNA, 25 bp, Homo sapien
atgcagctgcgcttcaatctcctca

SEQ ID NO: 2662583 - DNA, 25 bp, Homo sapien
tctgagcccttcgacgcctttgcac

SEQ ID NO: 2662584 - DNA, 25 bp, Homo sapien
gtctctgagcccttcgacgcctttg

SEQ ID NO: 2662585 - DNA, 25 bp, Homo sapien
gatgtctctgagcccttcgacgcct

SEQ ID NO: 2662586 - DNA, 25 bp, Homo sapien
tgtctctgagcccttcgacgccttt

SEQ ID NO: 2662587 - DNA, 25 bp, Homo sapien
ccggcatctcctcccacgggttgcg

SEQ ID NO: 2662588 - DNA, 25 bp, Homo sapien
acagggtgggcgagacacagcagag

SEQ ID NO: 2662589 - DNA, 25 bp, Homo sapien
agcagaggtcctggcagcgcggccc

SEQ ID NO: 2662590 - DNA, 25 bp, Homo sapien
ccgtgaggggctgttgcagcggcgc

SEQ ID NO: 2662591 - DNA, 25 bp, Homo sapien
tgtccagctggatttgtcccacagg

SEQ ID NO: 2662592 - DNA, 25 bp, Homo sapien
gattaagaccctatattcggtgact

SEQ ID NO: 2662593 - DNA, 25 bp, Homo sapien
gagaagtgcaagttcctcacacgca

SEQ ID NO: 2662594 - DNA, 25 bp, Homo sapien
cacgaggtgacacagtgaaggccaa

SEQ ID NO: 2662595 - DNA, 25 bp, Homo sapien
ctttggctaatccctttccatttat

SEQ ID NO: 2662596 - DNA, 25 bp, Homo sapien
ctggaaaatcacaccggtatgagcc

SEQ ID NO: 2662597 - DNA, 25 bp, Homo sapien
tggaaaatcacaccggtatgagcca

SEQ ID NO: 2662598 - DNA, 25 bp, Homo sapien
ggaaaatcacaccggtatgagccat

SEQ ID NO: 2662599 - DNA, 25 bp, Homo sapien
tcaaacttcagtggacatgagattc

SEQ ID NO: 2662600 - DNA, 25 bp, Homo sapien
catgagattcaactgacggagatga

SEQ ID NO: 2662601 - DNA, 25 bp, Homo sapien
gcattggttagaccctaatcctgca

SEQ ID NO: 2662602 - DNA, 25 bp, Homo sapien
gaagtaccgcctcctagcaatgtca

SEQ ID NO: 2662603 - DNA, 25 bp, Homo sapien
cactgcttcctgcattcactttacc

SEQ ID NO: 2662604 - DNA, 25 bp, Homo sapien
actgcttcctgcattcactttaccc

SEQ ID NO: 2662605 - DNA, 25 bp, Homo sapien
taggctgtgagcttagaagctgatc

SEQ ID NO: 2662606 - DNA, 25 bp, Homo sapien
ttagcagccccaactctgatctctg

SEQ ID NO: 2662607 - DNA, 25 bp, Homo sapien
ttatatccaagccacgttagcagcc

SEQ ID NO: 2662608 - DNA, 25 bp, Homo sapien
tgctgctgagcttctagctgacttc

SEQ ID NO: 2662609 - DNA, 25 bp, Homo sapien
acgatggtgaccaggagccactctt

SEQ ID NO: 2662610 - DNA, 25 bp, Homo sapien
gttcttggcattgcctctacccggg

SEQ ID NO: 2662611 - DNA, 25 bp, Homo sapien
aggagccactctttgttcttggcat

SEQ ID NO: 2662612 - DNA, 25 bp, Homo sapien
gaccaggcagcccacgatggtgacc

SEQ ID NO: 2662613 - DNA, 25 bp, Homo sapien
gaggatctacttttgcaggacataa

SEQ ID NO: 2662614 - DNA, 25 bp, Homo sapien
tgaacacaaaggtcaatgtggccat

SEQ ID NO: 2662615 - DNA, 25 bp, Homo sapien
gaacctggtctactggccaatgagg

SEQ ID NO: 2662616 - DNA, 25 bp, Homo sapien
tgccaccggaaaagagtcaatgacc

SEQ ID NO: 2662617 - DNA, 25 bp, Homo sapien
ggccaagatgtagcagtcaaccata

SEQ ID NO: 2662618 - DNA, 25 bp, Homo sapien
gaagcagaatagcagctggtcacct

SEQ ID NO: 2662619 - DNA, 25 bp, Homo sapien
ggataatggagaccctaggcaggat

SEQ ID NO: 2662620 - DNA, 25 bp, Homo sapien
tggagttgtccatggtgaccagtgc

SEQ ID NO: 2662621 - DNA, 25 bp, Homo sapien
ccatttgtcagttaagagatagtct

SEQ ID NO: 2662622 - DNA, 25 bp, Homo sapien
tagcacatacaccaataaagttcaa

SEQ ID NO: 2662623 - DNA, 25 bp, Homo sapien
gatctgtaccgatacgacgaagaaa

SEQ ID NO: 2662624 - DNA, 25 bp, Homo sapien
cacagagaatatttaacttggtatt

SEQ ID NO: 2662625 - DNA, 25 bp, Homo sapien
gagctttgctggtgccggtacttga

SEQ ID NO: 2662626 - DNA, 25 bp, Homo sapien
gctgccattgcaaagagatcataca

SEQ ID NO: 2662627 - DNA, 25 bp, Homo sapien
tacttgatactgcaagcagccagac

SEQ ID NO: 2662628 - DNA, 25 bp, Homo sapien
tctaggccaagttgccaaatggaag

SEQ ID NO: 2662629 - DNA, 25 bp, Homo sapien
caactcttccaaggcaaaaaacctg

SEQ ID NO: 2662630 - DNA, 25 bp, Homo sapien
gaagtctaccagactccaactcttc

SEQ ID NO: 2662631 - DNA, 25 bp, Homo sapien
aaacctgtcaataattctggatgtc

SEQ ID NO: 2662632 - DNA, 25 bp, Homo sapien
caagaagtctaccagactccaactc

SEQ ID NO: 2662633 - DNA, 25 bp, Homo sapien
tttgtccccataaatcccgtccaca

SEQ ID NO: 2662634 - DNA, 25 bp, Homo sapien
aaatcccgtccacatcgcattctga

SEQ ID NO: 2662635 - DNA, 25 bp, Homo sapien
ccataaatcccgtccacatcgcatt

SEQ ID NO: 2662636 - DNA, 25 bp, Homo sapien
gtccccataaatcccgtccacatcg

SEQ ID NO: 2662637 - DNA, 25 bp, Homo sapien
taagtgttaggtcacaccaagaagg

SEQ ID NO: 2662638 - DNA, 25 bp, Homo sapien
ttgagacagtatagctaattctaca

SEQ ID NO: 2662639 - DNA, 25 bp, Homo sapien
gacagtatagctaattctacacaga

SEQ ID NO: 2662640 - DNA, 25 bp, Homo sapien
tattcctccgtttgagttctacatt

SEQ ID NO: 2662641 - DNA, 25 bp, Homo sapien
tggtacacttgctacatctctgagc

SEQ ID NO: 2662642 - DNA, 25 bp, Homo sapien
tttacccttcttaatctctcttaga

SEQ ID NO: 2662643 - DNA, 25 bp, Homo sapien
tctgagctttagtggaaccaagttt

SEQ ID NO: 2662644 - DNA, 25 bp, Homo sapien
tgatagagtaaattgactggcctgg

SEQ ID NO: 2662645 - DNA, 25 bp, Homo sapien
gcaacagctgattcacagaaaacga

SEQ ID NO: 2662646 - DNA, 25 bp, Homo sapien
tattctggtgcataggaaatcatgg

SEQ ID NO: 2662647 - DNA, 25 bp, Homo sapien
taaaaaggcttgttatgcctaagga

SEQ ID NO: 2662648 - DNA, 25 bp, Homo sapien
tgcctaaggattatagaagtcatga

SEQ ID NO: 2662649 - DNA, 25 bp, Homo sapien
tttcctccacgttcaatactagctt

SEQ ID NO: 2662650 - DNA, 25 bp, Homo sapien
ctagcttcacgtcatcttgttgcat

SEQ ID NO: 2662651 - DNA, 25 bp, Homo sapien
cacgttcaatactagcttcacgtca

SEQ ID NO: 2662652 - DNA, 25 bp, Homo sapien
gttcaatactagcttcacgtcatct

SEQ ID NO: 2662653 - DNA, 25 bp, Homo sapien
tctcggagatttcattctaatcaga

SEQ ID NO: 2662654 - DNA, 25 bp, Homo sapien
gaactatattttctaccaagatccc

SEQ ID NO: 2662655 - DNA, 25 bp, Homo sapien
tattcattttgttagtggaatatac

SEQ ID NO: 2662656 - DNA, 25 bp, Homo sapien
tactatgcttgcactattagttagt

SEQ ID NO: 2662657 - DNA, 25 bp, Homo sapien
tctgaataccagtttgttcgttctg

SEQ ID NO: 2662658 - DNA, 25 bp, Homo sapien
acattaactctatcttctcaaaatt

SEQ ID NO: 2662659 - DNA, 25 bp, Homo sapien
ttctgaataccagtttgttcgttct

SEQ ID NO: 2662660 - DNA, 25 bp, Homo sapien
tcacattaactctatcttctcaaaa

SEQ ID NO: 2662661 - DNA, 25 bp, Homo sapien
gttcctcaagatgtgatgttaggtc

SEQ ID NO: 2662662 - DNA, 25 bp, Homo sapien
gaggttgacctggagtgctataaac

SEQ ID NO: 2662663 - DNA, 25 bp, Homo sapien
cttttgctgcatccttgggatatta

SEQ ID NO: 2662664 - DNA, 25 bp, Homo sapien
tcattaatttgagaccttcctagct

SEQ ID NO: 2662665 - DNA, 25 bp, Homo sapien
agaagtaggaatctaggggtcacct

SEQ ID NO: 2662666 - DNA, 25 bp, Homo sapien
actccggacatgaggggtaagaaca

SEQ ID NO: 2662667 - DNA, 25 bp, Homo sapien
gtcacctgaattctaaggggtgaag

SEQ ID NO: 2662668 - DNA, 25 bp, Homo sapien
gaaactccggacatgaggggtaaga

SEQ ID NO: 2662669 - DNA, 25 bp, Homo sapien
gataattcgccgacccgatactgtt

SEQ ID NO: 2662670 - DNA, 25 bp, Homo sapien
tcgccgacccgatactgttattttc

SEQ ID NO: 2662671 - DNA, 25 bp, Homo sapien
gaattgataattcgccgacccgata

SEQ ID NO: 2662672 - DNA, 25 bp, Homo sapien
ctgaattgataattcgccgacccga

SEQ ID NO: 2662673 - DNA, 25 bp, Homo sapien
cactaggaagtgaagttccatatca

SEQ ID NO: 2662674 - DNA, 25 bp, Homo sapien
tatcacatatcctaccatcaattct

SEQ ID NO: 2662675 - DNA, 25 bp, Homo sapien
catccacaaaatgtgagggcccctt

SEQ ID NO: 2662676 - DNA, 25 bp, Homo sapien
tgtctctcacggcaatcatgtccat

SEQ ID NO: 2662677 - DNA, 25 bp, Homo sapien
acagaatatgcacacttgtttcatt

SEQ ID NO: 2662678 - DNA, 25 bp, Homo sapien
cttttgtagaattaatcttaacagt

SEQ ID NO: 2662679 - DNA, 25 bp, Homo sapien
tacagaatatgcacacttgtttcat

SEQ ID NO: 2662680 - DNA, 25 bp, Homo sapien
ttgtagaattaatcttaacagtgta

SEQ ID NO: 2662681 - DNA, 25 bp, Homo sapien
ctaggcattactagaaggtgctgca

SEQ ID NO: 2662682 - DNA, 25 bp, Homo sapien
gaaggtgctgcatagcctctggtta

SEQ ID NO: 2662683 - DNA, 25 bp, Homo sapien
cattactagaaggtgctgcatagcc

SEQ ID NO: 2662684 - DNA, 25 bp, Homo sapien
agcctctggttagacagtttttgtc

SEQ ID NO: 2662685 - DNA, 25 bp, Homo sapien
cctcccattcgatgtggatcagtaa

SEQ ID NO: 2662686 - DNA, 25 bp, Homo sapien
cagtaaaggaccaaatgctacattt

SEQ ID NO: 2662687 - DNA, 25 bp, Homo sapien
ttctactcctcccattcgatgtgga

SEQ ID NO: 2662688 - DNA, 25 bp, Homo sapien
tgtggatcagtaaaggaccaaatgc

SEQ ID NO: 2662689 - DNA, 25 bp, Homo sapien
cagtgaattaatctctacttcatta

SEQ ID NO: 2662690 - DNA, 25 bp, Homo sapien
gatgagggttgactctcagtgaatt

SEQ ID NO: 2662691 - DNA, 25 bp, Homo sapien
gaattaatctctacttcattacttc

SEQ ID NO: 2662692 - DNA, 25 bp, Homo sapien
tcttcccattggatgagggttgact

SEQ ID NO: 2662693 - DNA, 25 bp, Homo sapien
aaccagtcatcaacaatctagttgg

SEQ ID NO: 2662694 - DNA, 25 bp, Homo sapien
gtgacttccacaggagtcaagccat

SEQ ID NO: 2662695 - DNA, 25 bp, Homo sapien
gataccttcctctccacaagagtag

SEQ ID NO: 2662696 - DNA, 25 bp, Homo sapien
aaggccaattgagaacatggatacc

SEQ ID NO: 2662697 - DNA, 25 bp, Homo sapien
gagcagtctttagcagtcctgcatt

SEQ ID NO: 2662698 - DNA, 25 bp, Homo sapien
gacagggaagtgtatagcttgagca

SEQ ID NO: 2662699 - DNA, 25 bp, Homo sapien
taaagttggagataatcaatgtgca

SEQ ID NO: 2662700 - DNA, 25 bp, Homo sapien
tttcgaatcctgtgtcaaagacatt

SEQ ID NO: 2662701 - DNA, 25 bp, Homo sapien
ccagggcaactgcatatgtctagca

SEQ ID NO: 2662702 - DNA, 25 bp, Homo sapien
cagggcaactgcatatgtctagcat

SEQ ID NO: 2662703 - DNA, 25 bp, Homo sapien
caacagatgcatgtatggaatacag

SEQ ID NO: 2662704 - DNA, 25 bp, Homo sapien
ggaatacagttctgggaagtagtac

SEQ ID NO: 2662705 - DNA, 25 bp, Homo sapien
tctgtttttgttagtgagtacagcc

SEQ ID NO: 2662706 - DNA, 25 bp, Homo sapien
aggcaacactgactggatcctgaat

SEQ ID NO: 2662707 - DNA, 25 bp, Homo sapien
agacacccagagcagttgccgctaa

SEQ ID NO: 2662708 - DNA, 25 bp, Homo sapien
tgcctctaggctttgcagaatctgc

SEQ ID NO: 2662709 - DNA, 25 bp, Homo sapien
gggaagagtttgacatgtttcttga

SEQ ID NO: 2662710 - DNA, 25 bp, Homo sapien
gagatctatcctgatgtcagaaatc

SEQ ID NO: 2662711 - DNA, 25 bp, Homo sapien
cactagtggaaaggtaatgcttctt

SEQ ID NO: 2662712 - DNA, 25 bp, Homo sapien
atattaccatatttgatgattacac

SEQ ID NO: 2662713 - DNA, 25 bp, Homo sapien
ttttccataagttctagagttatat

SEQ ID NO: 2662714 - DNA, 25 bp, Homo sapien
cataagttctagagttatattacca

SEQ ID NO: 2662715 - DNA, 25 bp, Homo sapien
aaaaggatatgtcacagttaggaac

SEQ ID NO: 2662716 - DNA, 25 bp, Homo sapien
gttaggaacagtcaactcatcaaga

SEQ ID NO: 2662717 - DNA, 25 bp, Homo sapien
gatatgtcacagttaggaacagtca

SEQ ID NO: 2662718 - DNA, 25 bp, Homo sapien
tgtcacagttaggaacagtcaactc

SEQ ID NO: 2662719 - DNA, 25 bp, Homo sapien
gataatgtttaaaggtaaagaggca

SEQ ID NO: 2662720 - DNA, 25 bp, Homo sapien
cccatttatcaggttgcttctgttt

SEQ ID NO: 2662721 - DNA, 25 bp, Homo sapien
cctgtctcccatttatcaggttgct

SEQ ID NO: 2662722 - DNA, 25 bp, Homo sapien
ggatggggagtggagataatgttta

SEQ ID NO: 2662723 - DNA, 25 bp, Homo sapien
tttgtgtacatgctttggatttcaa

SEQ ID NO: 2662724 - DNA, 25 bp, Homo sapien
catgctttggatttcaaagggaaga

SEQ ID NO: 2662725 - DNA, 25 bp, Homo sapien
tgtacatgctttggatttcaaaggg

SEQ ID NO: 2662726 - DNA, 25 bp, Homo sapien
tacatgctttggatttcaaagggaa

SEQ ID NO: 2662727 - DNA, 25 bp, Homo sapien
cacccatgagggtaactgaccgtta

SEQ ID NO: 2662728 - DNA, 25 bp, Homo sapien
atgagggtaactgaccgttacaaag

SEQ ID NO: 2662729 - DNA, 25 bp, Homo sapien
cccatgagggtaactgaccgttaca

SEQ ID NO: 2662730 - DNA, 25 bp, Homo sapien
taactgaccgttacaaaggctgtta

SEQ ID NO: 2662731 - DNA, 25 bp, Homo sapien
agtccagagcagtgaaagctctcag

SEQ ID NO: 2662732 - DNA, 25 bp, Homo sapien
ccagagcagtgaaagctctcaggaa

SEQ ID NO: 2662733 - DNA, 25 bp, Homo sapien
gtccagagcagtgaaagctctcagg

SEQ ID NO: 2662734 - DNA, 25 bp, Homo sapien
tccagagcagtgaaagctctcagga

SEQ ID NO: 2662735 - DNA, 25 bp, Homo sapien
tgaaccatttccatgcactgtccaa

SEQ ID NO: 2662736 - DNA, 25 bp, Homo sapien
cagtgatctgggctcttcccaaagc

SEQ ID NO: 2662737 - DNA, 25 bp, Homo sapien
ttccatgcactgtccaattccatca

SEQ ID NO: 2662738 - DNA, 25 bp, Homo sapien
aattccatcagtgatctgggctctt

SEQ ID NO: 2662739 - DNA, 25 bp, Homo sapien
ggaattgttaacttatggttgagaa

SEQ ID NO: 2662740 - DNA, 25 bp, Homo sapien
tgagcgaggtagcagccagcatgcc

SEQ ID NO: 2662741 - DNA, 25 bp, Homo sapien
tcaattaggtttaatcaggactgag

SEQ ID NO: 2662742 - DNA, 25 bp, Homo sapien
aattactggaattgttaacttatgg

SEQ ID NO: 2662743 - DNA, 25 bp, Homo sapien
ctggggagaagaaacccaaacacat

SEQ ID NO: 2662744 - DNA, 25 bp, Homo sapien
ttgtggcagaagaggtagagccagg

SEQ ID NO: 2662745 - DNA, 25 bp, Homo sapien
gtggcagaagaggtagagccaggga

SEQ ID NO: 2662746 - DNA, 25 bp, Homo sapien
gtttgtggcagaagaggtagagcca

SEQ ID NO: 2662747 - DNA, 25 bp, Homo sapien
gctgacgtttgtggcagaagaggta

SEQ ID NO: 2662748 - DNA, 25 bp, Homo sapien
gcttgagatataaggaatttctctt

SEQ ID NO: 2662749 - DNA, 25 bp, Homo sapien
agtaggcagtagcttgagatataag

SEQ ID NO: 2662750 - DNA, 25 bp, Homo sapien
tgccagctgggagcgcaattcctgg

SEQ ID NO: 2662751 - DNA, 25 bp, Homo sapien
ggaactgctgattgctctctgccag

SEQ ID NO: 2662752 - DNA, 25 bp, Homo sapien
cagtttctgttaggagcagtctcct

SEQ ID NO: 2662753 - DNA, 25 bp, Homo sapien
tcacagtttctgttaggagcagtct

SEQ ID NO: 2662754 - DNA, 25 bp, Homo sapien
agctccttagagtgggtactctgta

SEQ ID NO: 2662755 - DNA, 25 bp, Homo sapien
gggtactctgtacagttgccatttt

SEQ ID NO: 2662756 - DNA, 25 bp, Homo sapien
ctccacaatgtcttatgtgccatct

SEQ ID NO: 2662757 - DNA, 25 bp, Homo sapien
gaagtcactaggtttgctttcctga

SEQ ID NO: 2662758 - DNA, 25 bp, Homo sapien
tctgatactccccaactcagggata

SEQ ID NO: 2662759 - DNA, 25 bp, Homo sapien
tcccaaggacgaaagcagctccagt

SEQ ID NO: 2662760 - DNA, 25 bp, Homo sapien
gacaagatgattcacctggaagaag

SEQ ID NO: 2662761 - DNA, 25 bp, Homo sapien
ttgtcctttcacctcttcaagatca

SEQ ID NO: 2662762 - DNA, 25 bp, Homo sapien
cttgtcctttcacctcttcaagatc

SEQ ID NO: 2662763 - DNA, 25 bp, Homo sapien
catacttgtctactctcagtggtcc

SEQ ID NO: 2662764 - DNA, 25 bp, Homo sapien
acttgtctactctcagtggtcccct

SEQ ID NO: 2662765 - DNA, 25 bp, Homo sapien
atttcatacttgtctactctcagtg

SEQ ID NO: 2662766 - DNA, 25 bp, Homo sapien
tcatacttgtctactctcagtggtc

SEQ ID NO: 2662767 - DNA, 25 bp, Homo sapien
gtctacctgggacaccaattggaga

SEQ ID NO: 2662768 - DNA, 25 bp, Homo sapien
ctcagtccagccagggatgtgaagt

SEQ ID NO: 2662769 - DNA, 25 bp, Homo sapien
gagatttatcatgttcacaatggag

SEQ ID NO: 2662770 - DNA, 25 bp, Homo sapien
gtccagccagggatgtgaagtgcaa

SEQ ID NO: 2662771 - DNA, 25 bp, Homo sapien
ttttgatgctgatgcaaatcatcct

SEQ ID NO: 2662772 - DNA, 25 bp, Homo sapien
ttgatgctgatgcaaatcatcctgt

SEQ ID NO: 2662773 - DNA, 25 bp, Homo sapien
tgcttccaacttgatttttgatgct

SEQ ID NO: 2662774 - DNA, 25 bp, Homo sapien
ctgtgcttccaacttgatttttgat

SEQ ID NO: 2662775 - DNA, 25 bp, Homo sapien
tcttctacctcctcttgatcctttt

SEQ ID NO: 2662776 - DNA, 25 bp, Homo sapien
ctacctcctcttgatcctttttaat

SEQ ID NO: 2662777 - DNA, 25 bp, Homo sapien
gtgggctttggtcttctacctcctc

SEQ ID NO: 2662778 - DNA, 25 bp, Homo sapien
ggtcttctacctcctcttgatcctt

SEQ ID NO: 2662779 - DNA, 25 bp, Homo sapien
gtgaactgagggagtcaagtaaact

SEQ ID NO: 2662780 - DNA, 25 bp, Homo sapien
cttggggacaggccgcctcggtggg

SEQ ID NO: 2662781 - DNA, 25 bp, Homo sapien
cctgtgaaatttgaacctctgaccg

SEQ ID NO: 2662782 - DNA, 25 bp, Homo sapien
tgtgaaatttgaacctctgaccggt

SEQ ID NO: 2662783 - DNA, 25 bp, Homo sapien
ctgtgaaatttgaacctctgaccgg

SEQ ID NO: 2662784 - DNA, 25 bp, Homo sapien
gcctgtgaaatttgaacctctgacc

SEQ ID NO: 2662785 - DNA, 25 bp, Homo sapien
ttagagcttcatgacgccgtttcct

SEQ ID NO: 2662786 - DNA, 25 bp, Homo sapien
agagcttcatgacgccgtttccttc

SEQ ID NO: 2662787 - DNA, 25 bp, Homo sapien
gcttcatgacgccgtttccttccct

SEQ ID NO: 2662788 - DNA, 25 bp, Homo sapien
ttcatgacgccgtttccttccctac

SEQ ID NO: 2662789 - DNA, 25 bp, Homo sapien
tccagctggggagggttcttcatcc

SEQ ID NO: 2662790 - DNA, 25 bp, Homo sapien
atcttccagctggggagggttcttc

SEQ ID NO: 2662791 - DNA, 25 bp, Homo sapien
tcatcttccagctggggagggttct

SEQ ID NO: 2662792 - DNA, 25 bp, Homo sapien
cttccagctggggagggttcttcat

SEQ ID NO: 2662793 - DNA, 25 bp, Homo sapien
gaatccggccagtgacttgacgccc

SEQ ID NO: 2662794 - DNA, 25 bp, Homo sapien
gggccagcgaatctgaatgccagtc

SEQ ID NO: 2662795 - DNA, 25 bp, Homo sapien
agcatgcgggccagcgaatctgaat

SEQ ID NO: 2662796 - DNA, 25 bp, Homo sapien
cgcccttgtgtgttgcttgctgagc

SEQ ID NO: 2662797 - DNA, 25 bp, Homo sapien
gcagtattgtgttgggacttgaact

SEQ ID NO: 2662798 - DNA, 25 bp, Homo sapien
gaaggacccctgcagtattgtgttg

SEQ ID NO: 2662799 - DNA, 25 bp, Homo sapien
gacttgaacttgctttgcgttttag

SEQ ID NO: 2662800 - DNA, 25 bp, Homo sapien
tttcatcctatcatcctttgcatcc

SEQ ID NO: 2662801 - DNA, 25 bp, Homo sapien
caaaggagcatagtggcttgaagtc

SEQ ID NO: 2662802 - DNA, 25 bp, Homo sapien
ggaattgagaaacagggctaacgcc

SEQ ID NO: 2662803 - DNA, 25 bp, Homo sapien
tccatctgggcattggtctccctag

SEQ ID NO: 2662804 - DNA, 25 bp, Homo sapien
aagtgaccatcctagtatcaccgca

SEQ ID NO: 2662805 - DNA, 25 bp, Homo sapien
tgtgatgaagctctcacacaaggta

SEQ ID NO: 2662806 - DNA, 25 bp, Homo sapien
tgatgaagctctcacacaaggtaat

SEQ ID NO: 2662807 - DNA, 25 bp, Homo sapien
tgaagctctcacacaaggtaatcat

SEQ ID NO: 2662808 - DNA, 25 bp, Homo sapien
ctttgtgatgaagctctcacacaag

SEQ ID NO: 2662809 - DNA, 25 bp, Homo sapien
ggaaacatgtctattacactgaata

SEQ ID NO: 2662810 - DNA, 25 bp, Homo sapien
acactacttgtagcctcaataactg

SEQ ID NO: 2662811 - DNA, 25 bp, Homo sapien
tctcacactacttgtagcctcaata

SEQ ID NO: 2662812 - DNA, 25 bp, Homo sapien
tacttgtagcctcaataactgcggt

SEQ ID NO: 2662813 - DNA, 25 bp, Homo sapien
cttctcacactacttgtagcctcaa

SEQ ID NO: 2662814 - DNA, 25 bp, Homo sapien
gttagatcggtggactctgttctca

SEQ ID NO: 2662815 - DNA, 25 bp, Homo sapien
gttctcagtttgcagtctagtgcac

SEQ ID NO: 2662816 - DNA, 25 bp, Homo sapien
gacccactggggttgactccttgaa

SEQ ID NO: 2662817 - DNA, 25 bp, Homo sapien
actccttgaaggcttttgtcgataa

SEQ ID NO: 2662818 - DNA, 25 bp, Homo sapien
tagctgatccgtgcatgcttcctca

SEQ ID NO: 2662819 - DNA, 25 bp, Homo sapien
aaaagtatagctgatccgtgcatgc

SEQ ID NO: 2662820 - DNA, 25 bp, Homo sapien
ggcaaaagtatagctgatccgtgca

SEQ ID NO: 2662821 - DNA, 25 bp, Homo sapien
ctgtagggcaaaagtatagctgatc

SEQ ID NO: 2662822 - DNA, 25 bp, Homo sapien
cagctaggaagtcttggttctggta

SEQ ID NO: 2662823 - DNA, 25 bp, Homo sapien
gcttagtccagctaggaagtcttgg

SEQ ID NO: 2662824 - DNA, 25 bp, Homo sapien
aaggcggcaggtagcgagtttaatc

SEQ ID NO: 2662825 - DNA, 25 bp, Homo sapien
gagtttaatcaattgcttagtccag

SEQ ID NO: 2662826 - DNA, 25 bp, Homo sapien
tggaagccatcttgtggtcttgaga

SEQ ID NO: 2662827 - DNA, 25 bp, Homo sapien
tctagagatgacattatggaacatc

SEQ ID NO: 2662828 - DNA, 25 bp, Homo sapien
gaagccatcttgtggtcttgagatg

SEQ ID NO: 2662829 - DNA, 25 bp, Homo sapien
ttatttacgttgaatttgcttagtc

SEQ ID NO: 2662830 - DNA, 25 bp, Homo sapien
gactgaagtcttgaagggtggtcac

SEQ ID NO: 2662831 - DNA, 25 bp, Homo sapien
gagtcaataatgtccttcaagctcc

SEQ ID NO: 2662832 - DNA, 25 bp, Homo sapien
aagatttgattgacagactgaagtc

SEQ ID NO: 2662833 - DNA, 25 bp, Homo sapien
tggtcacttagtccttgccagaagg

SEQ ID NO: 2662834 - DNA, 25 bp, Homo sapien
gatgggctatactatctttaaagtc

SEQ ID NO: 2662835 - DNA, 25 bp, Homo sapien
tctttaaagtccaggctctcaaacg

SEQ ID NO: 2662836 - DNA, 25 bp, Homo sapien
ttaactttctggagatgggctatac

SEQ ID NO: 2662837 - DNA, 25 bp, Homo sapien
cgaagtattctcactgttgtaggtg

SEQ ID NO: 2662838 - DNA, 25 bp, Homo sapien
cataaagcaccttgtaggcatgatt

SEQ ID NO: 2662839 - DNA, 25 bp, Homo sapien
aggtaactgagcattcacactggga

SEQ ID NO: 2662840 - DNA, 25 bp, Homo sapien
ctgcaaaccataaagcaccttgtag

SEQ ID NO: 2662841 - DNA, 25 bp, Homo sapien
catgatttataaggtaactgagcat

SEQ ID NO: 2662842 - DNA, 25 bp, Homo sapien
gtcatattgttaatgccaaaacgaa

SEQ ID NO: 2662843 - DNA, 25 bp, Homo sapien
tattgttaatgccaaaacgaaaata

SEQ ID NO: 2662844 - DNA, 25 bp, Homo sapien
attgttaatgccaaaacgaaaatat

SEQ ID NO: 2662845 - DNA, 25 bp, Homo sapien
catattgttaatgccaaaacgaaaa

SEQ ID NO: 2662846 - DNA, 25 bp, Homo sapien
aattgtcaaaagttccattgaccat

SEQ ID NO: 2662847 - DNA, 25 bp, Homo sapien
aaattgtcaaaagttccattgacca

SEQ ID NO: 2662848 - DNA, 25 bp, Homo sapien
tcatggggttaaaattggcaggtcc

SEQ ID NO: 2662849 - DNA, 25 bp, Homo sapien
tgttggaagtggtcaccgagataga

SEQ ID NO: 2662850 - DNA, 25 bp, Homo sapien
gaagtggtcaccgagatagataatt

SEQ ID NO: 2662851 - DNA, 25 bp, Homo sapien
aaattggcaggtccgatgtgttgga

SEQ ID NO: 2662852 - DNA, 25 bp, Homo sapien
gattgaatttcagtagcttgctcaa

SEQ ID NO: 2662853 - DNA, 25 bp, Homo sapien
ttgattgaatttcagtagcttgctc

SEQ ID NO: 2662854 - DNA, 25 bp, Homo sapien
aatttcagtagcttgctcaaattca

SEQ ID NO: 2662855 - DNA, 25 bp, Homo sapien
tttcagtagcttgctcaaattcaga

SEQ ID NO: 2662856 - DNA, 25 bp, Homo sapien
ttctggaattccgatcagaaacaag

SEQ ID NO: 2662857 - DNA, 25 bp, Homo sapien
ttcttttcgattttgagctcaatat

SEQ ID NO: 2662858 - DNA, 25 bp, Homo sapien
acaagatagatcctccgctaaatct

SEQ ID NO: 2662859 - DNA, 25 bp, Homo sapien
ggaattccgatcagaaacaagatag

SEQ ID NO: 2662860 - DNA, 25 bp, Homo sapien
taaaggagtgtcaggcttataggca

SEQ ID NO: 2662861 - DNA, 25 bp, Homo sapien
gagggccataggcaaaaacttgatt

SEQ ID NO: 2662862 - DNA, 25 bp, Homo sapien
gttattcttagaacgtgcatttgca

SEQ ID NO: 2662863 - DNA, 25 bp, Homo sapien
gcatctgactcagaggagggccata

SEQ ID NO: 2662864 - DNA, 25 bp, Homo sapien
gctatatttcagcagaacatctgga

SEQ ID NO: 2662865 - DNA, 25 bp, Homo sapien
gatcttcacctgtttaggagacata

SEQ ID NO: 2662866 - DNA, 25 bp, Homo sapien
ggacttcttgtgtttgtgatcttca

SEQ ID NO: 2662867 - DNA, 25 bp, Homo sapien
ccaacctaacttggatctgcagttt

SEQ ID NO: 2662868 - DNA, 25 bp, Homo sapien
ccatttcatctgagtttaacaagtt

SEQ ID NO: 2662869 - DNA, 25 bp, Homo sapien
atttcatctgagtttaacaagttct

SEQ ID NO: 2662870 - DNA, 25 bp, Homo sapien
catttcatctgagtttaacaagttc

SEQ ID NO: 2662871 - DNA, 25 bp, Homo sapien
aagagatggtcaacacagttgacaa

SEQ ID NO: 2662872 - DNA, 25 bp, Homo sapien
cagcattttgaaagggtacagaact

SEQ ID NO: 2662873 - DNA, 25 bp, Homo sapien
gatggtcaacacagttgacaaatag

SEQ ID NO: 2662874 - DNA, 25 bp, Homo sapien
gaaagggtacagaactgaagagatg

SEQ ID NO: 2662875 - DNA, 25 bp, Homo sapien
ctttgcttgtactgttaccagccag

SEQ ID NO: 2662876 - DNA, 25 bp, Homo sapien
gagtcgaaacaccaatgattcaaga

SEQ ID NO: 2662877 - DNA, 25 bp, Homo sapien
cccttccatagagtcgaaacaccaa

SEQ ID NO: 2662878 - DNA, 25 bp, Homo sapien
gatggcttctttatggtatggttcc

SEQ ID NO: 2662879 - DNA, 25 bp, Homo sapien
ggtatggttccacccttccatagag

SEQ ID NO: 2662880 - DNA, 25 bp, Homo sapien
accttgatccttttggctttgacat

SEQ ID NO: 2662881 - DNA, 25 bp, Homo sapien
gggaccttgatccttttggctttga

SEQ ID NO: 2662882 - DNA, 25 bp, Homo sapien
caggggaccttgatccttttggctt

SEQ ID NO: 2662883 - DNA, 25 bp, Homo sapien
tcaggggaccttgatccttttggct

SEQ ID NO: 2662884 - DNA, 25 bp, Homo sapien
cagaagtccctgcttcttgtacctc

SEQ ID NO: 2662885 - DNA, 25 bp, Homo sapien
agaagtccctgcttcttgtacctcc

SEQ ID NO: 2662886 - DNA, 25 bp, Homo sapien
tacctccactacctgactgtgccat

SEQ ID NO: 2662887 - DNA, 25 bp, Homo sapien
ttgtacctccactacctgactgtgc

SEQ ID NO: 2662888 - DNA, 25 bp, Homo sapien
taaaatgtaaattgtcctgtcaccc

SEQ ID NO: 2662889 - DNA, 25 bp, Homo sapien
catctttgttaaaaccactattgtc

SEQ ID NO: 2662890 - DNA, 25 bp, Homo sapien
tattttccagcttagtccctttcaa

SEQ ID NO: 2662891 - DNA, 25 bp, Homo sapien
ggagccaggaggatctattttaaaa

SEQ ID NO: 2662892 - DNA, 25 bp, Homo sapien
tccaaaaggcctcgctgtgtgttgt

SEQ ID NO: 2662893 - DNA, 25 bp, Homo sapien
gttgttccctctatggatccctgcg

SEQ ID NO: 2662894 - DNA, 25 bp, Homo sapien
gatccctgcgttctttatcattcag

SEQ ID NO: 2662895 - DNA, 25 bp, Homo sapien
cacctaggtattaaggccagtactc

SEQ ID NO: 2662896 - DNA, 25 bp, Homo sapien
tgcctgatcaattggttctgttgtt

SEQ ID NO: 2662897 - DNA, 25 bp, Homo sapien
ttgtcttggggctatcacttttccc

SEQ ID NO: 2662898 - DNA, 25 bp, Homo sapien
gtgattacgacatggcttttctgcc

SEQ ID NO: 2662899 - DNA, 25 bp, Homo sapien
aagcctgctgtagctctatcttaca

SEQ ID NO: 2662900 - DNA, 25 bp, Homo sapien
taaatcagcagcactattggagtct

SEQ ID NO: 2662901 - DNA, 25 bp, Homo sapien
gccttctagttcactttctgatctg

SEQ ID NO: 2662902 - DNA, 25 bp, Homo sapien
ttgccttctagttcactttctgatc

SEQ ID NO: 2662903 - DNA, 25 bp, Homo sapien
tgccttctagttcactttctgatct

SEQ ID NO: 2662904 - DNA, 25 bp, Homo sapien
cactttctgatctgtcagggttgga

SEQ ID NO: 2662905 - DNA, 25 bp, Homo sapien
tgtcatccgaaaatgcaacgcggaa

SEQ ID NO: 2662906 - DNA, 25 bp, Homo sapien
caaatgtctgagagaattcggtttc

SEQ ID NO: 2662907 - DNA, 25 bp, Homo sapien
tcggtttctttaccggtgcctgtca

SEQ ID NO: 2662908 - DNA, 25 bp, Homo sapien
caacgcggaatcaaatatggaaggg

SEQ ID NO: 2662909 - DNA, 25 bp, Homo sapien
cattcgtcagtcaaaggtgtatatc

SEQ ID NO: 2662910 - DNA, 25 bp, Homo sapien
aaactgtttgacattcgtcagtcaa

SEQ ID NO: 2662911 - DNA, 25 bp, Homo sapien
cagtcaaaggtgtatatccattcat

SEQ ID NO: 2662912 - DNA, 25 bp, Homo sapien
gtttgacattcgtcagtcaaaggtg

SEQ ID NO: 2662913 - DNA, 25 bp, Homo sapien
gattgcagagagaattagagttgga

SEQ ID NO: 2662914 - DNA, 25 bp, Homo sapien
gcagagagaattagagttggactgt

SEQ ID NO: 2662915 - DNA, 25 bp, Homo sapien
gctgaacagatctctcagattgcag

SEQ ID NO: 2662916 - DNA, 25 bp, Homo sapien
gaacagatctctcagattgcagaga

SEQ ID NO: 2662917 - DNA, 25 bp, Homo sapien
taaatgaattgcttggaagacgggt

SEQ ID NO: 2662918 - DNA, 25 bp, Homo sapien
aaatgaattgcttggaagacgggtt

SEQ ID NO: 2662919 - DNA, 25 bp, Homo sapien
ctaaatgaattgcttggaagacggg

SEQ ID NO: 2662920 - DNA, 25 bp, Homo sapien
ttcacgaccttgttccccggtgcgc

SEQ ID NO: 2662921 - DNA, 25 bp, Homo sapien
aaaggcgcagagaatgaggacagat

SEQ ID NO: 2662922 - DNA, 25 bp, Homo sapien
agctctgcgaaaggcgcagagaatg

SEQ ID NO: 2662923 - DNA, 25 bp, Homo sapien
cccggtgcgcaaggactgaaaagaa

SEQ ID NO: 2662924 - DNA, 25 bp, Homo sapien
agggccctcctcatagtggctccta

SEQ ID NO: 2662925 - DNA, 25 bp, Homo sapien
tagtggctcctacggaccacagagg

SEQ ID NO: 2662926 - DNA, 25 bp, Homo sapien
tacggaccacagaggttgtgaacct

SEQ ID NO: 2662927 - DNA, 25 bp, Homo sapien
acagaggttgtgaacctccggatgc

SEQ ID NO: 2662928 - DNA, 25 bp, Homo sapien
ggctacgcgctaggatgcccagctt

SEQ ID NO: 2662929 - DNA, 25 bp, Homo sapien
taagtggaatgctagtctgcgtctc

SEQ ID NO: 2662930 - DNA, 25 bp, Homo sapien
tgcccattcctttagcggctacgcg

SEQ ID NO: 2662931 - DNA, 25 bp, Homo sapien
ttgcaggtgcgcgagtcacagccaa

SEQ ID NO: 2662932 - DNA, 25 bp, Homo sapien
gctagtaacgaccacttgttttcca

SEQ ID NO: 2662933 - DNA, 25 bp, Homo sapien
tcttagctagtaacgaccacttgtt

SEQ ID NO: 2662934 - DNA, 25 bp, Homo sapien
caaacacatcttagctagtaacgac

SEQ ID NO: 2662935 - DNA, 25 bp, Homo sapien
cagatccaaagtacaaacacatctt

SEQ ID NO: 2662936 - DNA, 25 bp, Homo sapien
ctgttaaatggaggaactgaaacat

SEQ ID NO: 2662937 - DNA, 25 bp, Homo sapien
tgccacatctacacataacctcagg

SEQ ID NO: 2662938 - DNA, 25 bp, Homo sapien
taaagtgtacctgataagcagtagt

SEQ ID NO: 2662939 - DNA, 25 bp, Homo sapien
ggaatcagccctacacaacaatgta

SEQ ID NO: 2662940 - DNA, 25 bp, Homo sapien
ggtttacaactagtctccaccaatg

SEQ ID NO: 2662941 - DNA, 25 bp, Homo sapien
tgagatgttgaacaacttaacatct

SEQ ID NO: 2662942 - DNA, 25 bp, Homo sapien
gggttactatcatccgcctcacaag

SEQ ID NO: 2662943 - DNA, 25 bp, Homo sapien
gcaagagtcctggtccaccattata

SEQ ID NO: 2662944 - DNA, 25 bp, Homo sapien
gcaacaagaaactgcctgggcaaga

SEQ ID NO: 2662945 - DNA, 25 bp, Homo sapien
caaggagcactagaagggttttatc

SEQ ID NO: 2662946 - DNA, 25 bp, Homo sapien
caacctttccgcattagtagcttgg

SEQ ID NO: 2662947 - DNA, 25 bp, Homo sapien
aagtttgagtttcccaacatggctg

SEQ ID NO: 2662948 - DNA, 25 bp, Homo sapien
ctgggacttatgtatcaaggagcac

SEQ ID NO: 2662949 - DNA, 25 bp, Homo sapien
gacaaacatatctagtatggcatat

SEQ ID NO: 2662950 - DNA, 25 bp, Homo sapien
gaggctgcacctcttaaaatgctct

SEQ ID NO: 2662951 - DNA, 25 bp, Homo sapien
catatctagtatggcatatgagttc

SEQ ID NO: 2662952 - DNA, 25 bp, Homo sapien
gtatggcatatgagttctagtttga

SEQ ID NO: 2662953 - DNA, 25 bp, Homo sapien
aaatcctgacctgggaatcaaaaat

SEQ ID NO: 2662954 - DNA, 25 bp, Homo sapien
agagtaatactggaatgttacccaa

SEQ ID NO: 2662955 - DNA, 25 bp, Homo sapien
taagctaaatcacagagagtaatac

SEQ ID NO: 2662956 - DNA, 25 bp, Homo sapien
gcaaatggccaattattacattccc

SEQ ID NO: 2662957 - DNA, 25 bp, Homo sapien
tggcaaggacacagtgctcaaatat

SEQ ID NO: 2662958 - DNA, 25 bp, Homo sapien
caaagactgaccacaaggaggtcct

SEQ ID NO: 2662959 - DNA, 25 bp, Homo sapien
ggaggaattctgacagcgactgcct

SEQ ID NO: 2662960 - DNA, 25 bp, Homo sapien
gcccgcgggcatacccatattttca

SEQ ID NO: 2662961 - DNA, 25 bp, Homo sapien
tttcagagccaccagattcacgtag

SEQ ID NO: 2662962 - DNA, 25 bp, Homo sapien
ttattcattgccgaaaagccaaatt

SEQ ID NO: 2662963 - DNA, 25 bp, Homo sapien
ttcattgccgaaaagccaaatttca

SEQ ID NO: 2662964 - DNA, 25 bp, Homo sapien
caccagattcacgtagcctcatctt

SEQ ID NO: 2662965 - DNA, 25 bp, Homo sapien
ctccttccttgagagtggcattatc

SEQ ID NO: 2662966 - DNA, 25 bp, Homo sapien
tcatgtaatgttagtgatcagaaat

SEQ ID NO: 2662967 - DNA, 25 bp, Homo sapien
gagagtggcattatcctccctatta

SEQ ID NO: 2662968 - DNA, 25 bp, Homo sapien
tatcctccctattaatagagttctg

SEQ ID NO: 2662969 - DNA, 25 bp, Homo sapien
tcctttagtaagaaagtggccacat

SEQ ID NO: 2662970 - DNA, 25 bp, Homo sapien
cctttagtaagaaagtggccacatt

SEQ ID NO: 2662971 - DNA, 25 bp, Homo sapien
tagtacctaacaagtataaccatgt

SEQ ID NO: 2662972 - DNA, 25 bp, Homo sapien
tgaaggaagagatcatgacctgttt

SEQ ID NO: 2662973 - DNA, 25 bp, Homo sapien
tgactgtaagacacatgaaggaaga

SEQ ID NO: 2662974 - DNA, 25 bp, Homo sapien
tacagagcatttatgtgccaaacat

SEQ ID NO: 2662975 - DNA, 25 bp, Homo sapien
aagatcaactttctagatgtctcca

SEQ ID NO: 2662976 - DNA, 25 bp, Homo sapien
cccagagttacatttcaataaccaa

SEQ ID NO: 2662977 - DNA, 25 bp, Homo sapien
ttaacttttgacatctaagttggcg

SEQ ID NO: 2662978 - DNA, 25 bp, Homo sapien
aagttggcgagcctttttattgata

SEQ ID NO: 2662979 - DNA, 25 bp, Homo sapien
ctcttcgaagagctaataagtgcat

SEQ ID NO: 2662980 - DNA, 25 bp, Homo sapien
gaatcttgtgtttttgtatcgactc

SEQ ID NO: 2662981 - DNA, 25 bp, Homo sapien
tttcatagatgtttgaatcttgtgt

SEQ ID NO: 2662982 - DNA, 25 bp, Homo sapien
ttttgtatcgactcttcgaagagct

SEQ ID NO: 2662983 - DNA, 25 bp, Homo sapien
ctgcttttctttcaactttctccac

SEQ ID NO: 2662984 - DNA, 25 bp, Homo sapien
tgcttttctttcaactttctccact

SEQ ID NO: 2662985 - DNA, 25 bp, Homo sapien
cattgtgagcatacaaagcatcttc

SEQ ID NO: 2662986 - DNA, 25 bp, Homo sapien
caaggtcattgtgagcatacaaagc

SEQ ID NO: 2662987 - DNA, 25 bp, Homo sapien
agtgaaaacctgagagaatccgcaa

SEQ ID NO: 2662988 - DNA, 25 bp, Homo sapien
gaatccgcaacgatcaacacaaggt

SEQ ID NO: 2662989 - DNA, 25 bp, Homo sapien
ccagctgatcctgcaatgcctttga

SEQ ID NO: 2662990 - DNA, 25 bp, Homo sapien
tagtccagctgatcctgcaatgcct

SEQ ID NO: 2662991 - DNA, 25 bp, Homo sapien
ctgcatagtccagctgatcctgcaa

SEQ ID NO: 2662992 - DNA, 25 bp, Homo sapien
gcatagtccagctgatcctgcaatg

SEQ ID NO: 2662993 - DNA, 25 bp, Homo sapien
gactcaagttgctccccagtgttcc

SEQ ID NO: 2662994 - DNA, 25 bp, Homo sapien
cagtgttccagcccgttttgggtga

SEQ ID NO: 2662995 - DNA, 25 bp, Homo sapien
tatctctctttactgatagcgtcct

SEQ ID NO: 2662996 - DNA, 25 bp, Homo sapien
cactgtggcctttccaactttgagc

SEQ ID NO: 2662997 - DNA, 25 bp, Homo sapien
aaccattcagactcaacaaagacat

SEQ ID NO: 2662998 - DNA, 25 bp, Homo sapien
cagccgccgggatgagctgtccttt

SEQ ID NO: 2662999 - DNA, 25 bp, Homo sapien
ggctcctcaccataacaagtcttgg

SEQ ID NO: 2663000 - DNA, 25 bp, Homo sapien
tatgtacgccttctatagatcctgt

SEQ ID NO: 2663001 - DNA, 25 bp, Homo sapien
ggatgcctgtaaccaccctgtgagc

SEQ ID NO: 2663002 - DNA, 25 bp, Homo sapien
gattgtcagctatctgcagaccaag

SEQ ID NO: 2663003 - DNA, 25 bp, Homo sapien
gaatcttgctattctcacgtggctg

SEQ ID NO: 2663004 - DNA, 25 bp, Homo sapien
cagtcttatgaccagccagcaatca

SEQ ID NO: 2663005 - DNA, 25 bp, Homo sapien
ggagtgtatttcttgaccttcttga

SEQ ID NO: 2663006 - DNA, 25 bp, Homo sapien
gagtgtatttcttgaccttcttgaa

SEQ ID NO: 2663007 - DNA, 25 bp, Homo sapien
ctagaaatattagacagtctatatt

SEQ ID NO: 2663008 - DNA, 25 bp, Homo sapien
ttccctgagaagttggcggagggca

SEQ ID NO: 2663009 - DNA, 25 bp, Homo sapien
gaaatattagacagtctatattact

SEQ ID NO: 2663010 - DNA, 25 bp, Homo sapien
gagaagttggcggagggcacatctt

SEQ ID NO: 2663011 - DNA, 25 bp, Homo sapien
gccaaagtccaaatcagctaagctg

SEQ ID NO: 2663012 - DNA, 25 bp, Homo sapien
taaaattgcttggagtgttggcctc

SEQ ID NO: 2663013 - DNA, 25 bp, Homo sapien
tccaggttgggccaaagacccagta

SEQ ID NO: 2663014 - DNA, 25 bp, Homo sapien
gactttgaggttctaagcatcagga

SEQ ID NO: 2663015 - DNA, 25 bp, Homo sapien
acaggctcatagatcccgtgggtct

SEQ ID NO: 2663016 - DNA, 25 bp, Homo sapien
catagatcccgtgggtctgcttcac

SEQ ID NO: 2663017 - DNA, 25 bp, Homo sapien
gtctgcttcacctttataagtgatg

SEQ ID NO: 2663018 - DNA, 25 bp, Homo sapien
gcttcacctttataagtgatgctga

SEQ ID NO: 2663019 - DNA, 25 bp, Homo sapien
cttctggagttaagttgccggacat

SEQ ID NO: 2663020 - DNA, 25 bp, Homo sapien
ctcttctggagttaagttgccggac

SEQ ID NO: 2663021 - DNA, 25 bp, Homo sapien
tcttctggagttaagttgccggaca

SEQ ID NO: 2663022 - DNA, 25 bp, Homo sapien
catatctaagatccagccattctag

SEQ ID NO: 2663023 - DNA, 25 bp, Homo sapien
taagatccagccattctagtttgca

SEQ ID NO: 2663024 - DNA, 25 bp, Homo sapien
tttccaatatcatatctaagatcca

SEQ ID NO: 2663025 - DNA, 25 bp, Homo sapien
caatatcatatctaagatccagcca

SEQ ID NO: 2663026 - DNA, 25 bp, Homo sapien
tctaccatgtgtgagcataaaacag

SEQ ID NO: 2663027 - DNA, 25 bp, Homo sapien
catataatgaggaaagacatcttcc

SEQ ID NO: 2663028 - DNA, 25 bp, Homo sapien
cataggcttctgtagcctcgggttc

SEQ ID NO: 2663029 - DNA, 25 bp, Homo sapien
tccagcaaggcatcacttaagccat

SEQ ID NO: 2663030 - DNA, 25 bp, Homo sapien
gtaaccttcaggtctgagaatttgg

SEQ ID NO: 2663031 - DNA, 25 bp, Homo sapien
cttttcagagttcacagtaaccttc

SEQ ID NO: 2663032 - DNA, 25 bp, Homo sapien
tcacagtaaccttcaggtctgagaa

SEQ ID NO: 2663033 - DNA, 25 bp, Homo sapien
gatacggagaatccgaagagtagcc

SEQ ID NO: 2663034 - DNA, 25 bp, Homo sapien
agagtagcctgatgcatcattggga

SEQ ID NO: 2663035 - DNA, 25 bp, Homo sapien
atgcatcattgggattttgggaagg

SEQ ID NO: 2663036 - DNA, 25 bp, Homo sapien
tctttcatgtgatacggagaatccg

SEQ ID NO: 2663037 - DNA, 25 bp, Homo sapien
tcaacactgattgtaaactgaaaca

SEQ ID NO: 2663038 - DNA, 25 bp, Homo sapien
gaaagcctatatgactagaaatgag

SEQ ID NO: 2663039 - DNA, 25 bp, Homo sapien
caaaagttttccatggttgcactac

SEQ ID NO: 2663040 - DNA, 25 bp, Homo sapien
gcataacaatgaggagagcaaaagt

SEQ ID NO: 2663041 - DNA, 25 bp, Homo sapien
gaacaacagaggagtgtatcacaca

SEQ ID NO: 2663042 - DNA, 25 bp, Homo sapien
gaatttcctcaatgtgggaagaaga

SEQ ID NO: 2663043 - DNA, 25 bp, Homo sapien
agctggaggctctttgaggagcaat

SEQ ID NO: 2663044 - DNA, 25 bp, Homo sapien
tcctagacaagtagagccatctgac

SEQ ID NO: 2663045 - DNA, 25 bp, Homo sapien
tctgtcagcaatggtagggtggaac

SEQ ID NO: 2663046 - DNA, 25 bp, Homo sapien
ggtggaacattgacagaagccttgg

SEQ ID NO: 2663047 - DNA, 25 bp, Homo sapien
tgaaaactataaaacctgtgtgacc

SEQ ID NO: 2663048 - DNA, 25 bp, Homo sapien
tacagggctttaactggcagctttc

SEQ ID NO: 2663049 - DNA, 25 bp, Homo sapien
cacttccatgccaagtagatgttgg

SEQ ID NO: 2663050 - DNA, 25 bp, Homo sapien
caaatttcaaagagccaaactattg

SEQ ID NO: 2663051 - DNA, 25 bp, Homo sapien
ttatatccctgaagctaattccact

SEQ ID NO: 2663052 - DNA, 25 bp, Homo sapien
gaatttttccgttgactattacaca

SEQ ID NO: 2663053 - DNA, 25 bp, Homo sapien
caaagtaactgggtgtcccattggt

SEQ ID NO: 2663054 - DNA, 25 bp, Homo sapien
ccaaaattagtgtttggcatactgt

SEQ ID NO: 2663055 - DNA, 25 bp, Homo sapien
tactcagggactataccaagtttaa

SEQ ID NO: 2663056 - DNA, 25 bp, Homo sapien
tactattatatgatcacaactggga

SEQ ID NO: 2663057 - DNA, 25 bp, Homo sapien
tcttacctacacctcagaaaggaag

SEQ ID NO: 2663058 - DNA, 25 bp, Homo sapien
gaaaggaagcacttacaaggtgagg

SEQ ID NO: 2663059 - DNA, 25 bp, Homo sapien
aactgctgggtttgtctcgtgcgga

SEQ ID NO: 2663060 - DNA, 25 bp, Homo sapien
gtcttgactgctccgaactgctggg

SEQ ID NO: 2663061 - DNA, 25 bp, Homo sapien
tacgtttcatagtccatggccgact

SEQ ID NO: 2663062 - DNA, 25 bp, Homo sapien
catggccgactgtcagaagagtggt

SEQ ID NO: 2663063 - DNA, 25 bp, Homo sapien
gaaatacgtttcatagtccatggcc

SEQ ID NO: 2663064 - DNA, 25 bp, Homo sapien
ctgaaatacgtttcatagtccatgg

SEQ ID NO: 2663065 - DNA, 25 bp, Homo sapien
gactcataagcttggaaagtcgaaa

SEQ ID NO: 2663066 - DNA, 25 bp, Homo sapien
gccgaagatctagacatgactcata

SEQ ID NO: 2663067 - DNA, 25 bp, Homo sapien
tcttgcttcaacataagggtggtaa

SEQ ID NO: 2663068 - DNA, 25 bp, Homo sapien
tattgccatgtagtggtaaccactg

SEQ ID NO: 2663069 - DNA, 25 bp, Homo sapien
tcattacccatggacccagctggct

SEQ ID NO: 2663070 - DNA, 25 bp, Homo sapien
catcatcaatcaagtgttcttttcc

SEQ ID NO: 2663071 - DNA, 25 bp, Homo sapien
tcatcatcatcaatcaagtgttctt

SEQ ID NO: 2663072 - DNA, 25 bp, Homo sapien
ggacccagctggctgtccatcagga

SEQ ID NO: 2663073 - DNA, 25 bp, Homo sapien
gaattggggtcccatctttactctc

SEQ ID NO: 2663074 - DNA, 25 bp, Homo sapien
actttgtatttggcaaaactaagct

SEQ ID NO: 2663075 - DNA, 25 bp, Homo sapien
ttggggtcccatctttactctcctg

SEQ ID NO: 2663076 - DNA, 25 bp, Homo sapien
ctttgtatttggcaaaactaagctt

SEQ ID NO: 2663077 - DNA, 25 bp, Homo sapien
gcttggttcaattctctccgtcact

SEQ ID NO: 2663078 - DNA, 25 bp, Homo sapien
cttcttgtttcatcttattcatttg

SEQ ID NO: 2663079 - DNA, 25 bp, Homo sapien
catcatgtagttctcacgtcatggt

SEQ ID NO: 2663080 - DNA, 25 bp, Homo sapien
ctcttcttgtttcatcttattcatt

SEQ ID NO: 2663081 - DNA, 25 bp, Homo sapien
gaaactggtaacatgacctccttcc

SEQ ID NO: 2663082 - DNA, 25 bp, Homo sapien
attccacctgtactgtgattccagc

SEQ ID NO: 2663083 - DNA, 25 bp, Homo sapien
ttccattccacctgtactgtgattc

SEQ ID NO: 2663084 - DNA, 25 bp, Homo sapien
atgaccccaagccttagaaactggt

SEQ ID NO: 2663085 - DNA, 25 bp, Homo sapien
aaagttgagtagtttgtagattgag

SEQ ID NO: 2663086 - DNA, 25 bp, Homo sapien
ctcttgattgctctgacctcatttg

SEQ ID NO: 2663087 - DNA, 25 bp, Homo sapien
tccagataagtaggacttccttggc

SEQ ID NO: 2663088 - DNA, 25 bp, Homo sapien
ttgtgcagcagaaccgaccgccctg

SEQ ID NO: 2663089 - DNA, 25 bp, Homo sapien
gatttatttttaattgctcacttgc

SEQ ID NO: 2663090 - DNA, 25 bp, Homo sapien
aaagatttatttttaattgctcact

SEQ ID NO: 2663091 - DNA, 25 bp, Homo sapien
agatttatttttaattgctcacttg

SEQ ID NO: 2663092 - DNA, 25 bp, Homo sapien
tgaaagatttatttttaattgctca

SEQ ID NO: 2663093 - DNA, 25 bp, Homo sapien
taagacatttgtaccgttctttcca

SEQ ID NO: 2663094 - DNA, 25 bp, Homo sapien
tgtgtactgcttagccagtccagct

SEQ ID NO: 2663095 - DNA, 25 bp, Homo sapien
caggtgattgtgtactgcttagcca

SEQ ID NO: 2663096 - DNA, 25 bp, Homo sapien
atgtgatggcatgattgggcctgta

SEQ ID NO: 2663097 - DNA, 25 bp, Homo sapien
tcagcaacagcaacggtagctctat

SEQ ID NO: 2663098 - DNA, 25 bp, Homo sapien
aagtctcaacgtatagcctttgtga

SEQ ID NO: 2663099 - DNA, 25 bp, Homo sapien
tacagatataaagttggccgcaaag

SEQ ID NO: 2663100 - DNA, 25 bp, Homo sapien
caatttcgttatgcattctctcagc

SEQ ID NO: 2663101 - DNA, 25 bp, Homo sapien
cacaaagaactcactattcctctta

SEQ ID NO: 2663102 - DNA, 25 bp, Homo sapien
ttatagggttgcttgggtcactcgg

SEQ ID NO: 2663103 - DNA, 25 bp, Homo sapien
tttggcaaatggatagatattgaga

SEQ ID NO: 2663104 - DNA, 25 bp, Homo sapien
ggtcactcggggctcttttggcaaa

SEQ ID NO: 2663105 - DNA, 25 bp, Homo sapien
ttgatcagattgtctcagctggtaa

SEQ ID NO: 2663106 - DNA, 25 bp, Homo sapien
gaacttttgagttccaagtgtatgc

SEQ ID NO: 2663107 - DNA, 25 bp, Homo sapien
gatcagattgtctcagctggtaata

SEQ ID NO: 2663108 - DNA, 25 bp, Homo sapien
ccaagtgtatgctcctggtgagcca

SEQ ID NO: 2663109 - DNA, 25 bp, Homo sapien
ccagggatcagagttctaagccaca

SEQ ID NO: 2663110 - DNA, 25 bp, Homo sapien
agggatcagagttctaagccacatc

SEQ ID NO: 2663111 - DNA, 25 bp, Homo sapien
cagggatcagagttctaagccacat

SEQ ID NO: 2663112 - DNA, 25 bp, Homo sapien
gacggtcacttcctttgctaacatt

SEQ ID NO: 2663113 - DNA, 25 bp, Homo sapien
aaagtctgactcattaatagagcat

SEQ ID NO: 2663114 - DNA, 25 bp, Homo sapien
tcattaatagagcatttttcctgaa

SEQ ID NO: 2663115 - DNA, 25 bp, Homo sapien
cacgcattgacggtcacttcctttg

SEQ ID NO: 2663116 - DNA, 25 bp, Homo sapien
tgggcagttgcagtacttgccaaca

SEQ ID NO: 2663117 - DNA, 25 bp, Homo sapien
ctggggtgggcagttgcagtacttg

SEQ ID NO: 2663118 - DNA, 25 bp, Homo sapien
gggtgggcagttgcagtacttgcca

SEQ ID NO: 2663119 - DNA, 25 bp, Homo sapien
gggcagttgcagtacttgccaacag

SEQ ID NO: 2663120 - DNA, 25 bp, Homo sapien
ggccttgtagccagcatccttgctg

SEQ ID NO: 2663121 - DNA, 25 bp, Homo sapien
tgctgctttgcctatagcctcctgg

SEQ ID NO: 2663122 - DNA, 25 bp, Homo sapien
tggcccaccctgaaggtcagctgtg

SEQ ID NO: 2663123 - DNA, 25 bp, Homo sapien
agtgtgtaaggccttgtagccagca

SEQ ID NO: 2663124 - DNA, 25 bp, Homo sapien
aggtcaagggtttgaaaccagcgtg

SEQ ID NO: 2663125 - DNA, 25 bp, Homo sapien
agcgtggccaacatgacaaaaaccc

SEQ ID NO: 2663126 - DNA, 25 bp, Homo sapien
attagccaggagtgatggcgggcac

SEQ ID NO: 2663127 - DNA, 25 bp, Homo sapien
tcaagggtttgaaaccagcgtggcc

SEQ ID NO: 2663128 - DNA, 25 bp, Homo sapien
gacttgaaaccaaccagtttatcaa

SEQ ID NO: 2663129 - DNA, 25 bp, Homo sapien
tattacagcactatttgcaataaca

SEQ ID NO: 2663130 - DNA, 25 bp, Homo sapien
ttacagcactatttgcaataacaaa

SEQ ID NO: 2663131 - DNA, 25 bp, Homo sapien
cttgaaaccaaccagtttatcaatg

SEQ ID NO: 2663132 - DNA, 25 bp, Homo sapien
tgcagaaaactgaaactggacccct

SEQ ID NO: 2663133 - DNA, 25 bp, Homo sapien
atgggcaaagacttcatgactaaaa

SEQ ID NO: 2663134 - DNA, 25 bp, Homo sapien
catatgcagaaaactgaaactggac

SEQ ID NO: 2663135 - DNA, 25 bp, Homo sapien
ggcatgggcaaagacttcatgacta

SEQ ID NO: 2663136 - DNA, 25 bp, Homo sapien
tctttggctcatgggtctcgttctc

SEQ ID NO: 2663137 - DNA, 25 bp, Homo sapien
ttaaaatcacggtgtcaggaatgct

SEQ ID NO: 2663138 - DNA, 25 bp, Homo sapien
cccgggaaattgataagaaggcaca

SEQ ID NO: 2663139 - DNA, 25 bp, Homo sapien
tagttagaagttcgaacgggtctca

SEQ ID NO: 2663140 - DNA, 25 bp, Homo sapien
aacttatttgcccaaccaccagcaa

SEQ ID NO: 2663141 - DNA, 25 bp, Homo sapien
cagagctctttaagtagtgattcca

SEQ ID NO: 2663142 - DNA, 25 bp, Homo sapien
tacattctcctgacaatagaggcct

SEQ ID NO: 2663143 - DNA, 25 bp, Homo sapien
gtctcaaatttgttgtgtcccaaac

SEQ ID NO: 2663144 - DNA, 25 bp, Homo sapien
tttcaaactgtatgccagacctggc

SEQ ID NO: 2663145 - DNA, 25 bp, Homo sapien
tctgggagcaaagagtttactcgcc

SEQ ID NO: 2663146 - DNA, 25 bp, Homo sapien
tctccaccagaagttcgggattgca

SEQ ID NO: 2663147 - DNA, 25 bp, Homo sapien
cgggattgcaaaatgggactctggc

SEQ ID NO: 2663148 - DNA, 25 bp, Homo sapien
cattaagatgaaatccagccagtgg

SEQ ID NO: 2663149 - DNA, 25 bp, Homo sapien
tcgctgcagttaggtatgaattccc

SEQ ID NO: 2663150 - DNA, 25 bp, Homo sapien
tttcgcttgttggatgttgatgccc

SEQ ID NO: 2663151 - DNA, 25 bp, Homo sapien
tgtgtatgcaagtcagcagtctcct

SEQ ID NO: 2663152 - DNA, 25 bp, Homo sapien
gaccttgtccacaatatggcagttc

SEQ ID NO: 2663153 - DNA, 25 bp, Homo sapien
tcttctgaacgtgtcatatgcttct

SEQ ID NO: 2663154 - DNA, 25 bp, Homo sapien
ctgggggttgctcttagcttctaga

SEQ ID NO: 2663155 - DNA, 25 bp, Homo sapien
attccctgccatgtgaccttgtcca

SEQ ID NO: 2663156 - DNA, 25 bp, Homo sapien
gggatttccttactctcttgcaagc

SEQ ID NO: 2663157 - DNA, 25 bp, Homo sapien
tttgtcttcacgtttgacctctggg

SEQ ID NO: 2663158 - DNA, 25 bp, Homo sapien
tccatctttttgtagagggcctcag

SEQ ID NO: 2663159 - DNA, 25 bp, Homo sapien
ttgccctaccctaagacaagtccag

SEQ ID NO: 2663160 - DNA, 25 bp, Homo sapien
cctggagctctcagtgagtgaaacg

SEQ ID NO: 2663161 - DNA, 25 bp, Homo sapien
cgactgaactgctcactacctggag

SEQ ID NO: 2663162 - DNA, 25 bp, Homo sapien
aaaacttcctcgctgcactaaagag

SEQ ID NO: 2663163 - DNA, 25 bp, Homo sapien
agctgcctgggttacgggaagccaa

SEQ ID NO: 2663164 - DNA, 25 bp, Homo sapien
ggctgccacaggcagggccgcgggt

SEQ ID NO: 2663165 - DNA, 25 bp, Homo sapien
acactgcgggataggcactggagcc

SEQ ID NO: 2663166 - DNA, 25 bp, Homo sapien
ctccagctccggctgttaccgggcc

SEQ ID NO: 2663167 - DNA, 25 bp, Homo sapien
gcgggtatcttcacccgacacactg

SEQ ID NO: 2663168 - DNA, 25 bp, Homo sapien
caccagctacgccagcagcagtacc

SEQ ID NO: 2663169 - DNA, 25 bp, Homo sapien
agctacgccagcagcagtacctccc

SEQ ID NO: 2663170 - DNA, 25 bp, Homo sapien
agcagcagtacctccccctgtcagt

SEQ ID NO: 2663171 - DNA, 25 bp, Homo sapien
agtacctccccctgtcagtccagct

SEQ ID NO: 2663172 - DNA, 25 bp, Homo sapien
cagtttggtgagagccatgtctcca

SEQ ID NO: 2663173 - DNA, 25 bp, Homo sapien
caagcaacgaagtgggcagtttggt

SEQ ID NO: 2663174 - DNA, 25 bp, Homo sapien
cgagagtctcagcaagcaacgaagt

SEQ ID NO: 2663175 - DNA, 25 bp, Homo sapien
gcctggcccgagagtctcagcaagc

SEQ ID NO: 2663176 - DNA, 25 bp, Homo sapien
ggtcaacggtatggccacctcttcc

SEQ ID NO: 2663177 - DNA, 25 bp, Homo sapien
ccatccagagagtcaccttcgtcca

SEQ ID NO: 2663178 - DNA, 25 bp, Homo sapien
tggttagttggaggagcggtcaacg

SEQ ID NO: 2663179 - DNA, 25 bp, Homo sapien
tcctcgtattctggtccatccagag

SEQ ID NO: 2663180 - DNA, 25 bp, Homo sapien
cccaaattcctgaacagcagtctta

SEQ ID NO: 2663181 - DNA, 25 bp, Homo sapien
ttcctgaacagcagtcttaacttac

SEQ ID NO: 2663182 - DNA, 25 bp, Homo sapien
ttcccaaattcctgaacagcagtct

SEQ ID NO: 2663183 - DNA, 25 bp, Homo sapien
aaattcctgaacagcagtcttaact

SEQ ID NO: 2663184 - DNA, 25 bp, Homo sapien
gataagtgatcagattaaattccta

SEQ ID NO: 2663185 - DNA, 25 bp, Homo sapien
cttttcctaacaaaccacagatgaa

SEQ ID NO: 2663186 - DNA, 25 bp, Homo sapien
ctaacaaaccacagatgaaaaggac

SEQ ID NO: 2663187 - DNA, 25 bp, Homo sapien
aggaagataagtgatcagattaaat

SEQ ID NO: 2663188 - DNA, 25 bp, Homo sapien
aagactttacactttcccagaggag

SEQ ID NO: 2663189 - DNA, 25 bp, Homo sapien
cactatgactgccttggtagccgca

SEQ ID NO: 2663190 - DNA, 25 bp, Homo sapien
gatacattgttggaatataggctct

SEQ ID NO: 2663191 - DNA, 25 bp, Homo sapien
tagaatactatactggccaccaaca

SEQ ID NO: 2663192 - DNA, 25 bp, Homo sapien
tgacccaagttctcattaagtgacc

SEQ ID NO: 2663193 - DNA, 25 bp, Homo sapien
gccacttgtggactcaatcctgtga

SEQ ID NO: 2663194 - DNA, 25 bp, Homo sapien
gttgaactaacttcctgaccatgga

SEQ ID NO: 2663195 - DNA, 25 bp, Homo sapien
ggaacactcgagtaacaagccactt

SEQ ID NO: 2663196 - DNA, 25 bp, Homo sapien
gactaatgattcaccacgtacacag

SEQ ID NO: 2663197 - DNA, 25 bp, Homo sapien
gaaatcttcctattggccgcgaggt

SEQ ID NO: 2663198 - DNA, 25 bp, Homo sapien
ggttcagcataagatccaggccaga

SEQ ID NO: 2663199 - DNA, 25 bp, Homo sapien
taaaagggtcaaccgctactcagct

SEQ ID NO: 2663200 - DNA, 25 bp, Homo sapien
tggcaatctagtctcaagcaggaat

SEQ ID NO: 2663201 - DNA, 25 bp, Homo sapien
tacaagcctactaagtgggaagcca

SEQ ID NO: 2663202 - DNA, 25 bp, Homo sapien
gcaaaagtcaagatgactgctccag

SEQ ID NO: 2663203 - DNA, 25 bp, Homo sapien
tgggaagccaaactgtaatcctaag

SEQ ID NO: 2663204 - DNA, 25 bp, Homo sapien
taagattccctaatgaagattgcca

SEQ ID NO: 2663205 - DNA, 25 bp, Homo sapien
gaaaacctatagaatgtacaatgcc

SEQ ID NO: 2663206 - DNA, 25 bp, Homo sapien
gaacactgggtgacaataatatgct

SEQ ID NO: 2663207 - DNA, 25 bp, Homo sapien
gctaatgtaagttcaccactggaaa

SEQ ID NO: 2663208 - DNA, 25 bp, Homo sapien
acaccacaatgtgggatacatgtca

SEQ ID NO: 2663209 - DNA, 25 bp, Homo sapien
tggccataactacagatctagagga

SEQ ID NO: 2663210 - DNA, 25 bp, Homo sapien
aatgctgacaagaatgtagagcaac

SEQ ID NO: 2663211 - DNA, 25 bp, Homo sapien
tatcactatacaccttttacaatgg

SEQ ID NO: 2663212 - DNA, 25 bp, Homo sapien
ggaactctcactcactacaggtggg

SEQ ID NO: 2663213 - DNA, 25 bp, Homo sapien
tccaagagcacaggcccaaaatgca

SEQ ID NO: 2663214 - DNA, 25 bp, Homo sapien
tattaatgactcataggactcctgt

SEQ ID NO: 2663215 - DNA, 25 bp, Homo sapien
gctgacacttgttaactggctagta

SEQ ID NO: 2663216 - DNA, 25 bp, Homo sapien
caatttaggaagtgttatgccatgc

SEQ ID NO: 2663217 - DNA, 25 bp, Homo sapien
ttgctattactatgtttctcaaaac

SEQ ID NO: 2663218 - DNA, 25 bp, Homo sapien
tattactatgtttctcaaaacacgc

SEQ ID NO: 2663219 - DNA, 25 bp, Homo sapien
gctattactatgtttctcaaaacac

SEQ ID NO: 2663220 - DNA, 25 bp, Homo sapien
attactatgtttctcaaaacacgcc

SEQ ID NO: 2663221 - DNA, 25 bp, Homo sapien
acaatcatgaggaacttaaattaac

SEQ ID NO: 2663222 - DNA, 25 bp, Homo sapien
aacttttccaatatagtgattcact

SEQ ID NO: 2663223 - DNA, 25 bp, Homo sapien
gaacaccaggtagatagaaacttaa

SEQ ID NO: 2663224 - DNA, 25 bp, Homo sapien
catcactgtgaattagaaatggaga

SEQ ID NO: 2663225 - DNA, 25 bp, Homo sapien
agtataactccttagcactgttgcc

SEQ ID NO: 2663226 - DNA, 25 bp, Homo sapien
tgttaacacaccattcccttgcata

SEQ ID NO: 2663227 - DNA, 25 bp, Homo sapien
gactcctggaacaattcacatcaac

SEQ ID NO: 2663228 - DNA, 25 bp, Homo sapien
gttgctcggtttggtctctaactcc

SEQ ID NO: 2663229 - DNA, 25 bp, Homo sapien
attccatgtctctgctaccgtgaag

SEQ ID NO: 2663230 - DNA, 25 bp, Homo sapien
tcatgggagtctattgtacagatca

SEQ ID NO: 2663231 - DNA, 25 bp, Homo sapien
cccctctatgtgttcagatcattca

SEQ ID NO: 2663232 - DNA, 25 bp, Homo sapien
tctctgctaccgtgaagagtgctgc

SEQ ID NO: 2663233 - DNA, 25 bp, Homo sapien
ttcgataacctctagcccagaaaga

SEQ ID NO: 2663234 - DNA, 25 bp, Homo sapien
ttgctggcccctaaagaacttctgt

SEQ ID NO: 2663235 - DNA, 25 bp, Homo sapien
gaaaaggtctctaggcccgttcaga

SEQ ID NO: 2663236 - DNA, 25 bp, Homo sapien
gattcatggtagcattcacatcccc

SEQ ID NO: 2663237 - DNA, 25 bp, Homo sapien
caatccagatacccaagctatgagc

SEQ ID NO: 2663238 - DNA, 25 bp, Homo sapien
aatccagatacccaagctatgagct

SEQ ID NO: 2663239 - DNA, 25 bp, Homo sapien
tccagatacccaagctatgagctga

SEQ ID NO: 2663240 - DNA, 25 bp, Homo sapien
atccagatacccaagctatgagctg

SEQ ID NO: 2663241 - DNA, 25 bp, Homo sapien
tcctctctctcctgtttctcatctt

SEQ ID NO: 2663242 - DNA, 25 bp, Homo sapien
cctgtttctcatctttacttgccat

SEQ ID NO: 2663243 - DNA, 25 bp, Homo sapien
tctcctgtttctcatctttacttgc

SEQ ID NO: 2663244 - DNA, 25 bp, Homo sapien
tctctctcctgtttctcatctttac

SEQ ID NO: 2663245 - DNA, 25 bp, Homo sapien
tgctggaacacatccgaagggcctt

SEQ ID NO: 2663246 - DNA, 25 bp, Homo sapien
aacacatccgaagggccttagaggg

SEQ ID NO: 2663247 - DNA, 25 bp, Homo sapien
tcaagcctgaagtgagacaagattg

SEQ ID NO: 2663248 - DNA, 25 bp, Homo sapien
ccgggaagtcaagcctgaagtgaga

SEQ ID NO: 2663249 - DNA, 25 bp, Homo sapien
attaaattatccagccatcagcttg

SEQ ID NO: 2663250 - DNA, 25 bp, Homo sapien
gccaccacaccgagtcgatttttta

SEQ ID NO: 2663251 - DNA, 25 bp, Homo sapien
gatttgattcagacaccttacagat

SEQ ID NO: 2663252 - DNA, 25 bp, Homo sapien
caaaaggtcgtaagcttcaaacaca

SEQ ID NO: 2663253 - DNA, 25 bp, Homo sapien
tctgtcaagttttccgtgataccac

SEQ ID NO: 2663254 - DNA, 25 bp, Homo sapien
gaggcgttcttctgctatcgttctg

SEQ ID NO: 2663255 - DNA, 25 bp, Homo sapien
ggttgacaacattcatctggctaag

SEQ ID NO: 2663256 - DNA, 25 bp, Homo sapien
tgaaagtacaaaggaccctggcctc

SEQ ID NO: 2663257 - DNA, 25 bp, Homo sapien
tgcgaagagttttagaatagtgaag

SEQ ID NO: 2663258 - DNA, 25 bp, Homo sapien
cactgaagtgcatgtctgcgaagag

SEQ ID NO: 2663259 - DNA, 25 bp, Homo sapien
tgcatgtctgcgaagagttttagaa

SEQ ID NO: 2663260 - DNA, 25 bp, Homo sapien
ctgtttcactgaagtgcatgtctgc

SEQ ID NO: 2663261 - DNA, 25 bp, Homo sapien
taacctattaggtctgacagtgaag

SEQ ID NO: 2663262 - DNA, 25 bp, Homo sapien
gaaacatgactgtaataacctatta

SEQ ID NO: 2663263 - DNA, 25 bp, Homo sapien
aagcaaacaagaaacatgactgtaa

SEQ ID NO: 2663264 - DNA, 25 bp, Homo sapien
tgtagtaatctccacacatagcaat

SEQ ID NO: 2663265 - DNA, 25 bp, Homo sapien
cttttgtgtaaggtagaatagctcg

SEQ ID NO: 2663266 - DNA, 25 bp, Homo sapien
gctcgtacacgccttctatcttcta

SEQ ID NO: 2663267 - DNA, 25 bp, Homo sapien
ggtagaatagctcgtacacgccttc

SEQ ID NO: 2663268 - DNA, 25 bp, Homo sapien
ctggtacttttgtgtaaggtagaat

SEQ ID NO: 2663269 - DNA, 25 bp, Homo sapien
caacatgcgttgaccttttagaaaa

SEQ ID NO: 2663270 - DNA, 25 bp, Homo sapien
caccaaaaactcaacgagtggtact

SEQ ID NO: 2663271 - DNA, 25 bp, Homo sapien
tctggcttcacctaagaatgtagtt

SEQ ID NO: 2663272 - DNA, 25 bp, Homo sapien
aaaacctctcattcttggccagcca

SEQ ID NO: 2663273 - DNA, 25 bp, Homo sapien
actaggtcttcaacaataaggcctt

SEQ ID NO: 2663274 - DNA, 25 bp, Homo sapien
ctaggtcttcaacaataaggccttg

SEQ ID NO: 2663275 - DNA, 25 bp, Homo sapien
tagtaagatgcttcagtacgaatac

SEQ ID NO: 2663276 - DNA, 25 bp, Homo sapien
cgaatactgtttgcctatatggagt

SEQ ID NO: 2663277 - DNA, 25 bp, Homo sapien
tctatggatcaagatttggttgcca

SEQ ID NO: 2663278 - DNA, 25 bp, Homo sapien
tatgagtatggactgtatcacacca

SEQ ID NO: 2663279 - DNA, 25 bp, Homo sapien
tacaaggcaatctatcagggcaaga

SEQ ID NO: 2663280 - DNA, 25 bp, Homo sapien
caattttgcctaagagactccagaa

SEQ ID NO: 2663281 - DNA, 25 bp, Homo sapien
tgttactatatccaagggagtaggc

SEQ ID NO: 2663282 - DNA, 25 bp, Homo sapien
taaccactaactgaatgcccgaaac

SEQ ID NO: 2663283 - DNA, 25 bp, Homo sapien
ttgttgccattaccctaactcaggc

SEQ ID NO: 2663284 - DNA, 25 bp, Homo sapien
taaccaatctgggaaggaactatct

SEQ ID NO: 2663285 - DNA, 25 bp, Homo sapien
gcaactgaagtcgtttaccacagga

SEQ ID NO: 2663286 - DNA, 25 bp, Homo sapien
cattctgagcccgtaaaaagtgaac

SEQ ID NO: 2663287 - DNA, 25 bp, Homo sapien
cttcatgtggatcttcttcccggcc

SEQ ID NO: 2663288 - DNA, 25 bp, Homo sapien
ttttccttcatgtggatcttcttcc

SEQ ID NO: 2663289 - DNA, 25 bp, Homo sapien
tccttcatgtggatcttcttcccgg

SEQ ID NO: 2663290 - DNA, 25 bp, Homo sapien
ttccttcatgtggatcttcttcccg

SEQ ID NO: 2663291 - DNA, 25 bp, Homo sapien
tagggagctggaaagaaattcaacc

SEQ ID NO: 2663292 - DNA, 25 bp, Homo sapien
gaatttaaagtactgcgacagtccc

SEQ ID NO: 2663293 - DNA, 25 bp, Homo sapien
caccgtgagtgaatattagttgcca

SEQ ID NO: 2663294 - DNA, 25 bp, Homo sapien
catgtaccttgatctctagcaacga

SEQ ID NO: 2663295 - DNA, 25 bp, Homo sapien
tgtattaggcatattcaaattccac

SEQ ID NO: 2663296 - DNA, 25 bp, Homo sapien
taagtgctaggagtagtaaacgaca

SEQ ID NO: 2663297 - DNA, 25 bp, Homo sapien
taggctctgctaaggtaaaggtgga

SEQ ID NO: 2663298 - DNA, 25 bp, Homo sapien
cgacaaaataaccagataacagatc

SEQ ID NO: 2663299 - DNA, 25 bp, Homo sapien
gaggtgaactatgatagcactactg

SEQ ID NO: 2663300 - DNA, 25 bp, Homo sapien
gaaggacttagtgttctcaactcta

SEQ ID NO: 2663301 - DNA, 25 bp, Homo sapien
gaatgagtggatagcaccatcaaga

SEQ ID NO: 2663302 - DNA, 25 bp, Homo sapien
tagtacagatagagcctactccaga

SEQ ID NO: 2663303 - DNA, 25 bp, Homo sapien
caactctatttgagctaacagccta

SEQ ID NO: 2663304 - DNA, 25 bp, Homo sapien
atcatatgatcaaaattaaacaacc

SEQ ID NO: 2663305 - DNA, 25 bp, Homo sapien
gctgttatcatatgatcaaaattaa

SEQ ID NO: 2663306 - DNA, 25 bp, Homo sapien
gatcaaaattaaacaaccaatatag

SEQ ID NO: 2663307 - DNA, 25 bp, Homo sapien
aaagtcctttttgctgttatcatat

SEQ ID NO: 2663308 - DNA, 25 bp, Homo sapien
agcttcctgtttggaaatcttccca

SEQ ID NO: 2663309 - DNA, 25 bp, Homo sapien
tgtcattagtaaattataagcttcc

SEQ ID NO: 2663310 - DNA, 25 bp, Homo sapien
tagtaaattataagcttcctgtttg

SEQ ID NO: 2663311 - DNA, 25 bp, Homo sapien
tcctgtttggaaatcttcccatgga

SEQ ID NO: 2663312 - DNA, 25 bp, Homo sapien
ttaaatagacattagaaaagcaagt

SEQ ID NO: 2663313 - DNA, 25 bp, Homo sapien
caaaagtacctcaagtacttggtgg

SEQ ID NO: 2663314 - DNA, 25 bp, Homo sapien
caccagatcctcaaaagagcacatg

SEQ ID NO: 2663315 - DNA, 25 bp, Homo sapien
aaatcccaccagatcctcaaaagag

SEQ ID NO: 2663316 - DNA, 25 bp, Homo sapien
gagaaaatcccaccagatcctcaaa

SEQ ID NO: 2663317 - DNA, 25 bp, Homo sapien
tagttccaatcatccaatcaaggca

SEQ ID NO: 2663318 - DNA, 25 bp, Homo sapien
ttcaataggtatgctcctgaaagga

SEQ ID NO: 2663319 - DNA, 25 bp, Homo sapien
tactgacaagaatccaagatactct

SEQ ID NO: 2663320 - DNA, 25 bp, Homo sapien
ctcataatacatagatgctctgcct

SEQ ID NO: 2663321 - DNA, 25 bp, Homo sapien
tggtcagtaatatctacacctgtcc

SEQ ID NO: 2663322 - DNA, 25 bp, Homo sapien
aatagagagcagaaattttgcagca

SEQ ID NO: 2663323 - DNA, 25 bp, Homo sapien
taatttggaaggaacctaagcatag

SEQ ID NO: 2663324 - DNA, 25 bp, Homo sapien
gggaatactggctaaaactgctaaa

SEQ ID NO: 2663325 - DNA, 25 bp, Homo sapien
gatgttaagtagtattattacaaag

SEQ ID NO: 2663326 - DNA, 25 bp, Homo sapien
aaagatgttaagtagtattattaca

SEQ ID NO: 2663327 - DNA, 25 bp, Homo sapien
gttaagtagtattattacaaagtgc

SEQ ID NO: 2663328 - DNA, 25 bp, Homo sapien
gaaaagatgttaagtagtattatta

SEQ ID NO: 2663329 - DNA, 25 bp, Homo sapien
ctgtaagaattaagctgttagtttt

SEQ ID NO: 2663330 - DNA, 25 bp, Homo sapien
aactgattgtttggcgttggacata

SEQ ID NO: 2663331 - DNA, 25 bp, Homo sapien
taccggcctcccatcataaactgat

SEQ ID NO: 2663332 - DNA, 25 bp, Homo sapien
taaagtgaataatcgccaggagtat

SEQ ID NO: 2663333 - DNA, 25 bp, Homo sapien
ttatctgagggcctcacaagaaaac

SEQ ID NO: 2663334 - DNA, 25 bp, Homo sapien
aaaagatagctaaaaaattatgatt

SEQ ID NO: 2663335 - DNA, 25 bp, Homo sapien
ttttgcgaaaagtaaaagatagcta

SEQ ID NO: 2663336 - DNA, 25 bp, Homo sapien
agatagctaaaaaattatgatttac

SEQ ID NO: 2663337 - DNA, 25 bp, Homo sapien
tttgcgaaaagtaaaagatagctaa

SEQ ID NO: 2663338 - DNA, 25 bp, Homo sapien
tcagataaacaagctacagaatctc

SEQ ID NO: 2663339 - DNA, 25 bp, Homo sapien
tcctacagataacacatggatttag

SEQ ID NO: 2663340 - DNA, 25 bp, Homo sapien
tagagaatactgctgtggtactgag

SEQ ID NO: 2663341 - DNA, 25 bp, Homo sapien
gattatgccagcctctgaaatagga

SEQ ID NO: 2663342 - DNA, 25 bp, Homo sapien
gatagtgatctatgatgtccccaat

SEQ ID NO: 2663343 - DNA, 25 bp, Homo sapien
ctgttcttttcgatagtgatctatg

SEQ ID NO: 2663344 - DNA, 25 bp, Homo sapien
gtacaggttccttaagataatatcc

SEQ ID NO: 2663345 - DNA, 25 bp, Homo sapien
gataatatccttcaacaatctgttc

SEQ ID NO: 2663346 - DNA, 25 bp, Homo sapien
ccatccacagctggtgttataacca

SEQ ID NO: 2663347 - DNA, 25 bp, Homo sapien
ccatccatccacagctggtgttata

SEQ ID NO: 2663348 - DNA, 25 bp, Homo sapien
gatttcagataatcctcctctgcca

SEQ ID NO: 2663349 - DNA, 25 bp, Homo sapien
tgatttcagataatcctcctctgcc

SEQ ID NO: 2663350 - DNA, 25 bp, Homo sapien
tgtcattgagtacttgttcttgatc

SEQ ID NO: 2663351 - DNA, 25 bp, Homo sapien
aggcatcctttgttttacgacggat

SEQ ID NO: 2663352 - DNA, 25 bp, Homo sapien
tgttttacgacggatggtattatag

SEQ ID NO: 2663353 - DNA, 25 bp, Homo sapien
ttccttgccatccactgtgtcattg

SEQ ID NO: 2663354 - DNA, 25 bp, Homo sapien
tttctcttagccaaacaattgtgaa

SEQ ID NO: 2663355 - DNA, 25 bp, Homo sapien
aaaatgtcgttatgtcaaattgagg

SEQ ID NO: 2663356 - DNA, 25 bp, Homo sapien
gagaaaatgcctataacaaatctgt

SEQ ID NO: 2663357 - DNA, 25 bp, Homo sapien
gaataccttaactatatcttcagag

SEQ ID NO: 2663358 - DNA, 25 bp, Homo sapien
gaacgacatagacagaacatacact

SEQ ID NO: 2663359 - DNA, 25 bp, Homo sapien
aataaataagttgggcatcactacc

SEQ ID NO: 2663360 - DNA, 25 bp, Homo sapien
tggtagctcgtttttcgctttcaaa

SEQ ID NO: 2663361 - DNA, 25 bp, Homo sapien
gccaaagagactatcatgaacgaca

SEQ ID NO: 2663362 - DNA, 25 bp, Homo sapien
tgtttgtactattttattattaaga

SEQ ID NO: 2663363 - DNA, 25 bp, Homo sapien
tattttattattaagacaattccga

SEQ ID NO: 2663364 - DNA, 25 bp, Homo sapien
tattattaagacaattccgaaagaa

SEQ ID NO: 2663365 - DNA, 25 bp, Homo sapien
tactattttattattaagacaattc

SEQ ID NO: 2663366 - DNA, 25 bp, Homo sapien
gagatccagctatgaaaagatggtg

SEQ ID NO: 2663367 - DNA, 25 bp, Homo sapien
taattaccacatggatagtcactag

SEQ ID NO: 2663368 - DNA, 25 bp, Homo sapien
gctgtgcaactaaagccatgcaaga

SEQ ID NO: 2663369 - DNA, 25 bp, Homo sapien
gcattgccatccaacattcgttcag

SEQ ID NO: 2663370 - DNA, 25 bp, Homo sapien
ttaggaggccatagcaaaaatacac

SEQ ID NO: 2663371 - DNA, 25 bp, Homo sapien
tacacagaggacaagcttaacactt

SEQ ID NO: 2663372 - DNA, 25 bp, Homo sapien
tgaactgctagaactgcacacagct

SEQ ID NO: 2663373 - DNA, 25 bp, Homo sapien
tatatcatgctaatgttaggaggcc

SEQ ID NO: 2663374 - DNA, 25 bp, Homo sapien
gcaaaatatttataccagcttccaa

SEQ ID NO: 2663375 - DNA, 25 bp, Homo sapien
atgtaatgttcttcactaaagtgct

SEQ ID NO: 2663376 - DNA, 25 bp, Homo sapien
tcaaccagtgaagaataatgcttgt

SEQ ID NO: 2663377 - DNA, 25 bp, Homo sapien
taactggcttacctttggattatac

SEQ ID NO: 2663378 - DNA, 25 bp, Homo sapien
gagcattctcagttggcctcaacat

SEQ ID NO: 2663379 - DNA, 25 bp, Homo sapien
tgacctataacctttatgcagagag

SEQ ID NO: 2663380 - DNA, 25 bp, Homo sapien
atagaagagaataaccagagacccc

SEQ ID NO: 2663381 - DNA, 25 bp, Homo sapien
caactgataatgtgatgaccgatcc

SEQ ID NO: 2663382 - DNA, 25 bp, Homo sapien
ggagagtgctgattgtaaaaccaac

SEQ ID NO: 2663383 - DNA, 25 bp, Homo sapien
tgaccgatcccatgacaagcatatt

SEQ ID NO: 2663384 - DNA, 25 bp, Homo sapien
gaaggcgtttattggatgtccctgg

SEQ ID NO: 2663385 - DNA, 25 bp, Homo sapien
aggcgtttattggatgtccctggac

SEQ ID NO: 2663386 - DNA, 25 bp, Homo sapien
tacttttccgtaaattgcaaaatgc

SEQ ID NO: 2663387 - DNA, 25 bp, Homo sapien
gatgtccctggactacttttccgta

SEQ ID NO: 2663388 - DNA, 25 bp, Homo sapien
gaaagcctagcttaactctccacaa

SEQ ID NO: 2663389 - DNA, 25 bp, Homo sapien
ccagactttgggttacagggactat

SEQ ID NO: 2663390 - DNA, 25 bp, Homo sapien
cagatattcgcacaaagagaacagg

SEQ ID NO: 2663391 - DNA, 25 bp, Homo sapien
tctccacaaatctcaaagtataggg

SEQ ID NO: 2663392 - DNA, 25 bp, Homo sapien
cttcaatatgtaaaacaaggctgct

SEQ ID NO: 2663393 - DNA, 25 bp, Homo sapien
ttcaatatgtaaaacaaggctgctg

SEQ ID NO: 2663394 - DNA, 25 bp, Homo sapien
tcaatatgtaaaacaaggctgctga

SEQ ID NO: 2663395 - DNA, 25 bp, Homo sapien
caatatgtaaaacaaggctgctgac

SEQ ID NO: 2663396 - DNA, 25 bp, Homo sapien
cttctgaccatactgggttttgccc

SEQ ID NO: 2663397 - DNA, 25 bp, Homo sapien
cttggacactattcaggtagatgtt

SEQ ID NO: 2663398 - DNA, 25 bp, Homo sapien
atgttttactgggagtttatgggct

SEQ ID NO: 2663399 - DNA, 25 bp, Homo sapien
tgcatgagtttttgctacttggaca

SEQ ID NO: 2663400 - DNA, 25 bp, Homo sapien
aatctattgatgtcaggaggaagat

SEQ ID NO: 2663401 - DNA, 25 bp, Homo sapien
ggaaggagctgtgctgctgaggaca

SEQ ID NO: 2663402 - DNA, 25 bp, Homo sapien
gcagcaggatggaaggagctgtgct

SEQ ID NO: 2663403 - DNA, 25 bp, Homo sapien
tgtcaactgttttagcagcaggatg

SEQ ID NO: 2663404 - DNA, 25 bp, Homo sapien
caactgttttagcagcaggatggaa

SEQ ID NO: 2663405 - DNA, 25 bp, Homo sapien
cgcagggaccctggttcaatacctt

SEQ ID NO: 2663406 - DNA, 25 bp, Homo sapien
aaaccattcatctgtggcatgccct

SEQ ID NO: 2663407 - DNA, 25 bp, Homo sapien
tttttccatagagtatcgtgctcga

SEQ ID NO: 2663408 - DNA, 25 bp, Homo sapien
cttttaatggtatatgggagctgag

SEQ ID NO: 2663409 - DNA, 25 bp, Homo sapien
ggccagtagtgttcggtcttgtcca

SEQ ID NO: 2663410 - DNA, 25 bp, Homo sapien
tcctcagtaggatgctggccagtag

SEQ ID NO: 2663411 - DNA, 25 bp, Homo sapien
ttagtgtgcataacaacaacgattc

SEQ ID NO: 2663412 - DNA, 25 bp, Homo sapien
caacgattcaagcttttcgtgaaga

SEQ ID NO: 2663413 - DNA, 25 bp, Homo sapien
caaagcatgatgaacaaactgtgta

SEQ ID NO: 2663414 - DNA, 25 bp, Homo sapien
catatactgctccatcaaggtgctt

SEQ ID NO: 2663415 - DNA, 25 bp, Homo sapien
gctcgaaatagggtagtggcttcat

SEQ ID NO: 2663416 - DNA, 25 bp, Homo sapien
aaggtgcttgcaagtgttgtggctc

SEQ ID NO: 2663417 - DNA, 25 bp, Homo sapien
tgttcaataggtgtgttaaattagt

SEQ ID NO: 2663418 - DNA, 25 bp, Homo sapien
caataggtgtgttaaattagtgttc

SEQ ID NO: 2663419 - DNA, 25 bp, Homo sapien
gtgttaaattagtgttcacatcttc

SEQ ID NO: 2663420 - DNA, 25 bp, Homo sapien
tgaaagtatgttcaataggtgtgtt

SEQ ID NO: 2663421 - DNA, 25 bp, Homo sapien
gccacttatgctgaacagatttctg

SEQ ID NO: 2663422 - DNA, 25 bp, Homo sapien
tttgtaggccacttatgctgaacag

SEQ ID NO: 2663423 - DNA, 25 bp, Homo sapien
taggccacttatgctgaacagattt

SEQ ID NO: 2663424 - DNA, 25 bp, Homo sapien
tgctgaacagatttctgtaaacacc

SEQ ID NO: 2663425 - DNA, 25 bp, Homo sapien
gaaaatatgcaacagggctttgaca

SEQ ID NO: 2663426 - DNA, 25 bp, Homo sapien
tatggtacaatgagcagactgaaac

SEQ ID NO: 2663427 - DNA, 25 bp, Homo sapien
tgcaaacggcagctaaatctcacag

SEQ ID NO: 2663428 - DNA, 25 bp, Homo sapien
tatctaaatcggtcaattactgccc

SEQ ID NO: 2663429 - DNA, 25 bp, Homo sapien
tacatctcacacgtaactgtgctgg

SEQ ID NO: 2663430 - DNA, 25 bp, Homo sapien
tatacatagtaggtctatgagcctg

SEQ ID NO: 2663431 - DNA, 25 bp, Homo sapien
tatgagcctgaaacctaaccttggc

SEQ ID NO: 2663432 - DNA, 25 bp, Homo sapien
aaaacaccctcttgcacgaaacagt

SEQ ID NO: 2663433 - DNA, 25 bp, Homo sapien
cactggtagggaggatatgttgtca

SEQ ID NO: 2663434 - DNA, 25 bp, Homo sapien
gttaaaagcttgcatagatactcct

SEQ ID NO: 2663435 - DNA, 25 bp, Homo sapien
tattcccaaaataatgagttacgca

SEQ ID NO: 2663436 - DNA, 25 bp, Homo sapien
gagaaagtagtatcctcaggaatct

SEQ ID NO: 2663437 - DNA, 25 bp, Homo sapien
caggacagatgagtcgaagaaaaac

SEQ ID NO: 2663438 - DNA, 25 bp, Homo sapien
atgatattgaacatccgtggattca

SEQ ID NO: 2663439 - DNA, 25 bp, Homo sapien
ggcaggacagatgagtcgaagaaaa

SEQ ID NO: 2663440 - DNA, 25 bp, Homo sapien
tccgtggattcaggatggcaggaca

SEQ ID NO: 2663441 - DNA, 25 bp, Homo sapien
gatcttgaagatctagctggcagca

SEQ ID NO: 2663442 - DNA, 25 bp, Homo sapien
cagagatgtgatggctatatagaag

SEQ ID NO: 2663443 - DNA, 25 bp, Homo sapien
catctcaaaatggatatatgggtaa

SEQ ID NO: 2663444 - DNA, 25 bp, Homo sapien
tctctaacgggaggaaccaggactg

SEQ ID NO: 2663445 - DNA, 25 bp, Homo sapien
ctgtaacagaattgggcacagctaa

SEQ ID NO: 2663446 - DNA, 25 bp, Homo sapien
gtaacagaattgggcacagctaatg

SEQ ID NO: 2663447 - DNA, 25 bp, Homo sapien
gcacagctaatgacaccaagtccaa

SEQ ID NO: 2663448 - DNA, 25 bp, Homo sapien
gggcacagctaatgacaccaagtcc

SEQ ID NO: 2663449 - DNA, 25 bp, Homo sapien
ttcttgcagcaataggagatggaga

SEQ ID NO: 2663450 - DNA, 25 bp, Homo sapien
aaattccacaagatttgctaagttc

SEQ ID NO: 2663451 - DNA, 25 bp, Homo sapien
tatcagtgttcttgcagcaatagga

SEQ ID NO: 2663452 - DNA, 25 bp, Homo sapien
tctgcacagatttagccactaatat

SEQ ID NO: 2663453 - DNA, 25 bp, Homo sapien
ttttgatgaatggattgacaccttc

SEQ ID NO: 2663454 - DNA, 25 bp, Homo sapien
tacgatgtttgttgcttttgatgaa

SEQ ID NO: 2663455 - DNA, 25 bp, Homo sapien
tttgatgaatggattgacaccttcc

SEQ ID NO: 2663456 - DNA, 25 bp, Homo sapien
gttcatctaaaaacatgatcatacg

SEQ ID NO: 2663457 - DNA, 25 bp, Homo sapien
gccacaataatgtatgctttggtgt

SEQ ID NO: 2663458 - DNA, 25 bp, Homo sapien
tcatggcagtcagatgtgatagctt

SEQ ID NO: 2663459 - DNA, 25 bp, Homo sapien
gctttggtgtaaactatttagtgta

SEQ ID NO: 2663460 - DNA, 25 bp, Homo sapien
taaggaggcaacagaatgtcatggc

SEQ ID NO: 2663461 - DNA, 25 bp, Homo sapien
tgcttcacgccccacatagtagcag

SEQ ID NO: 2663462 - DNA, 25 bp, Homo sapien
cctggtcagaactgtgtcatcgtct

SEQ ID NO: 2663463 - DNA, 25 bp, Homo sapien
ccgaatccacgtcttttattcctag

SEQ ID NO: 2663464 - DNA, 25 bp, Homo sapien
cacactgaatgaagtgtaacaccga

SEQ ID NO: 2663465 - DNA, 25 bp, Homo sapien
gacagaacatggacacctcaatctc

SEQ ID NO: 2663466 - DNA, 25 bp, Homo sapien
actagtgactcaacggcattcctga

SEQ ID NO: 2663467 - DNA, 25 bp, Homo sapien
cacatgtacatgcaccttcctggtt

SEQ ID NO: 2663468 - DNA, 25 bp, Homo sapien
tacctgaggttgcaaactagtgact

SEQ ID NO: 2663469 - DNA, 25 bp, Homo sapien
taacaagggcttggattaccagtaa

SEQ ID NO: 2663470 - DNA, 25 bp, Homo sapien
tgtggactatgctcagaatacttgc

SEQ ID NO: 2663471 - DNA, 25 bp, Homo sapien
ttatctatgggacagagaaacacag

SEQ ID NO: 2663472 - DNA, 25 bp, Homo sapien
gaaaatgcaatgagaacctgtcagg

SEQ ID NO: 2663473 - DNA, 25 bp, Homo sapien
gacagatgtgtacaatattattgct

SEQ ID NO: 2663474 - DNA, 25 bp, Homo sapien
aatctttctctgtagtctcatgtga

SEQ ID NO: 2663475 - DNA, 25 bp, Homo sapien
ttttttccgtagcatgacagatgtg

SEQ ID NO: 2663476 - DNA, 25 bp, Homo sapien
tattcagtattaatgatggtaaaat

SEQ ID NO: 2663477 - DNA, 25 bp, Homo sapien
cgcaaatctcatgcaatgctgctaa

SEQ ID NO: 2663478 - DNA, 25 bp, Homo sapien
tgctgtgcaccacgctcattactga

SEQ ID NO: 2663479 - DNA, 25 bp, Homo sapien
tactgagcgttcgaagttcatctga

SEQ ID NO: 2663480 - DNA, 25 bp, Homo sapien
gctgctaaatcacgggacaggtccg

SEQ ID NO: 2663481 - DNA, 25 bp, Homo sapien
gaaaataaatgaaagctcggtcagc

SEQ ID NO: 2663482 - DNA, 25 bp, Homo sapien
ggccagaactatcacactatcacat

SEQ ID NO: 2663483 - DNA, 25 bp, Homo sapien
cggtcagcaatttcaggatgggaac

SEQ ID NO: 2663484 - DNA, 25 bp, Homo sapien
cacatgttgtcagaagcagtttatc

SEQ ID NO: 2663485 - DNA, 25 bp, Homo sapien
ttctgttatagccagaagctttttc

SEQ ID NO: 2663486 - DNA, 25 bp, Homo sapien
cagttctgttatagccagaagcttt

SEQ ID NO: 2663487 - DNA, 25 bp, Homo sapien
gaagcagttctgttatagccagaag

SEQ ID NO: 2663488 - DNA, 25 bp, Homo sapien
aagcagttctgttatagccagaagc

SEQ ID NO: 2663489 - DNA, 25 bp, Homo sapien
aaactttggcaactgggtgtactga

SEQ ID NO: 2663490 - DNA, 25 bp, Homo sapien
tatcctgcacagatagcttacaagg

SEQ ID NO: 2663491 - DNA, 25 bp, Homo sapien
ggtggtctgtacaccaaggctcaga

SEQ ID NO: 2663492 - DNA, 25 bp, Homo sapien
tccagcagatacaacaagtagtcag

SEQ ID NO: 2663493 - DNA, 25 bp, Homo sapien
tataaatcctccatcgcagtcctag

SEQ ID NO: 2663494 - DNA, 25 bp, Homo sapien
aatatattgctgctaggctctagac

SEQ ID NO: 2663495 - DNA, 25 bp, Homo sapien
taaacggtgattgaagccacatagg

SEQ ID NO: 2663496 - DNA, 25 bp, Homo sapien
gagaccacctgggatactatgttgg

SEQ ID NO: 2663497 - DNA, 25 bp, Homo sapien
taattctttacactgtaggcttgag

SEQ ID NO: 2663498 - DNA, 25 bp, Homo sapien
aattctttacactgtaggcttgagt

SEQ ID NO: 2663499 - DNA, 25 bp, Homo sapien
catattcatctctctaacaataatt

SEQ ID NO: 2663500 - DNA, 25 bp, Homo sapien
attcatctctctaacaataattctt

SEQ ID NO: 2663501 - DNA, 25 bp, Homo sapien
tgtggacgtctgtttaccaagccag

SEQ ID NO: 2663502 - DNA, 25 bp, Homo sapien
aaaactggcttgaaggaattccgag

SEQ ID NO: 2663503 - DNA, 25 bp, Homo sapien
tactgaaagccagtcgtctgggtaa

SEQ ID NO: 2663504 - DNA, 25 bp, Homo sapien
taagtgccagtttcccacactgaaa

SEQ ID NO: 2663505 - DNA, 25 bp, Homo sapien
gatttcattcactcctcggtttcag

SEQ ID NO: 2663506 - DNA, 25 bp, Homo sapien
accaggcatatccagcccattagcg

SEQ ID NO: 2663507 - DNA, 25 bp, Homo sapien
tataggtataacgacaaagcatgtt

SEQ ID NO: 2663508 - DNA, 25 bp, Homo sapien
ggcaaactgttacctaccaggcata

SEQ ID NO: 2663509 - DNA, 25 bp, Homo sapien
taggctttcgtaacattcccagaga

SEQ ID NO: 2663510 - DNA, 25 bp, Homo sapien
tgtcatagtctggataatgcctcag

SEQ ID NO: 2663511 - DNA, 25 bp, Homo sapien
cagagactagacattgggccttttt

SEQ ID NO: 2663512 - DNA, 25 bp, Homo sapien
aaagcccctgtgctgttgtcatagt

SEQ ID NO: 2663513 - DNA, 25 bp, Homo sapien
gcgcggagtgcgtttttctatcaaa

SEQ ID NO: 2663514 - DNA, 25 bp, Homo sapien
caaaataagcgagcaccttgccagg

SEQ ID NO: 2663515 - DNA, 25 bp, Homo sapien
taaccagtctttgtaacgtagtgaa

SEQ ID NO: 2663516 - DNA, 25 bp, Homo sapien
gggtacaaagacgaacaacgccatc

SEQ ID NO: 2663517 - DNA, 25 bp, Homo sapien
gaagtcctgttggaaccctaggagc

SEQ ID NO: 2663518 - DNA, 25 bp, Homo sapien
taaacagcaaagtaagagtctgcct

SEQ ID NO: 2663519 - DNA, 25 bp, Homo sapien
ccctaggagcaggttatgacagcat

SEQ ID NO: 2663520 - DNA, 25 bp, Homo sapien
taatgtcagcctgcacacctaagca

SEQ ID NO: 2663521 - DNA, 25 bp, Homo sapien
caggtgaaggcaacagtctttgtca

SEQ ID NO: 2663522 - DNA, 25 bp, Homo sapien
actaggaatgatcagctgtgcttgc

SEQ ID NO: 2663523 - DNA, 25 bp, Homo sapien
gatgctgagtaaaacaagtgtggtc

SEQ ID NO: 2663524 - DNA, 25 bp, Homo sapien
tatgccatgccaaggtgataaagga

SEQ ID NO: 2663525 - DNA, 25 bp, Homo sapien
tgagaactatcagctggataccagc

SEQ ID NO: 2663526 - DNA, 25 bp, Homo sapien
ctgtgagaactatcagctggatacc

SEQ ID NO: 2663527 - DNA, 25 bp, Homo sapien
actatcagctggataccagcctctt

SEQ ID NO: 2663528 - DNA, 25 bp, Homo sapien
gaactatcagctggataccagcctc

SEQ ID NO: 2663529 - DNA, 25 bp, Homo sapien
tgcagctgtgactaaaagttccagt

SEQ ID NO: 2663530 - DNA, 25 bp, Homo sapien
cagctggtttttgcttataacactg

SEQ ID NO: 2663531 - DNA, 25 bp, Homo sapien
cttataacactgtaaggtaacatac

SEQ ID NO: 2663532 - DNA, 25 bp, Homo sapien
catactgtgatttggaagtgcagct

SEQ ID NO: 2663533 - DNA, 25 bp, Homo sapien
gccgctgggctaccttaggcagtgt

SEQ ID NO: 2663534 - DNA, 25 bp, Homo sapien
ccagccgctgggctaccttaggcag

SEQ ID NO: 2663535 - DNA, 25 bp, Homo sapien
tgggctaccttaggcagtgtcaatt

SEQ ID NO: 2663536 - DNA, 25 bp, Homo sapien
gctgggctaccttaggcagtgtcaa

SEQ ID NO: 2663537 - DNA, 25 bp, Homo sapien
cctttcatcttttgacttagtttgc

SEQ ID NO: 2663538 - DNA, 25 bp, Homo sapien
tttttctcatgagtgctgtatctcc

SEQ ID NO: 2663539 - DNA, 25 bp, Homo sapien
aataccctgtatcatattgaggaag

SEQ ID NO: 2663540 - DNA, 25 bp, Homo sapien
gctgtatctccttaagtgatttggt

SEQ ID NO: 2663541 - DNA, 25 bp, Homo sapien
aataatccctgaaagtgtagtcttt

SEQ ID NO: 2663542 - DNA, 25 bp, Homo sapien
agaaatttctctaggaatgaactat

SEQ ID NO: 2663543 - DNA, 25 bp, Homo sapien
acatgttcagagaaatttctctagg

SEQ ID NO: 2663544 - DNA, 25 bp, Homo sapien
tagtttttcatgctctacatgttca

SEQ ID NO: 2663545 - DNA, 25 bp, Homo sapien
ggcaggtcttaatcacttttccagg

SEQ ID NO: 2663546 - DNA, 25 bp, Homo sapien
ttgtagtggcaggtcttaatcactt

SEQ ID NO: 2663547 - DNA, 25 bp, Homo sapien
atgttttgtagtggcaggtcttaat

SEQ ID NO: 2663548 - DNA, 25 bp, Homo sapien
tagtggcaggtcttaatcacttttc

SEQ ID NO: 2663549 - DNA, 25 bp, Homo sapien
ttcagaagctttgccatagtctttc

SEQ ID NO: 2663550 - DNA, 25 bp, Homo sapien
cagaagctttgccatagtctttctc

SEQ ID NO: 2663551 - DNA, 25 bp, Homo sapien
tattcagaagctttgccatagtctt

SEQ ID NO: 2663552 - DNA, 25 bp, Homo sapien
agctttgccatagtctttctctatc

SEQ ID NO: 2663553 - DNA, 25 bp, Homo sapien
gatatgtagatttgttcccagaaag

SEQ ID NO: 2663554 - DNA, 25 bp, Homo sapien
tggatatgtagatttgttcccagaa

SEQ ID NO: 2663555 - DNA, 25 bp, Homo sapien
gatctggatatgtagatttgttccc

SEQ ID NO: 2663556 - DNA, 25 bp, Homo sapien
tggatctggatatgtagatttgttc

SEQ ID NO: 2663557 - DNA, 25 bp, Homo sapien
gaaagaagttttggctgcgcttagt

SEQ ID NO: 2663558 - DNA, 25 bp, Homo sapien
gttttggctgcgcttagtcctctaa

SEQ ID NO: 2663559 - DNA, 25 bp, Homo sapien
gaagttttggctgcgcttagtcctc

SEQ ID NO: 2663560 - DNA, 25 bp, Homo sapien
gctgcgcttagtcctctaagtgcca

SEQ ID NO: 2663561 - DNA, 25 bp, Homo sapien
tgtctccctcaaatttacaccacag

SEQ ID NO: 2663562 - DNA, 25 bp, Homo sapien
tttctatcaggaggaatttgcagcc

SEQ ID NO: 2663563 - DNA, 25 bp, Homo sapien
tcctttctatcaggaggaatttgca

SEQ ID NO: 2663564 - DNA, 25 bp, Homo sapien
tgcagccatcatagaatataatagc

SEQ ID NO: 2663565 - DNA, 25 bp, Homo sapien
gacaacgtattgacatctgccagaa

SEQ ID NO: 2663566 - DNA, 25 bp, Homo sapien
aagacaacgtattgacatctgccag

SEQ ID NO: 2663567 - DNA, 25 bp, Homo sapien
ggaggaagacaacgtattgacatct

SEQ ID NO: 2663568 - DNA, 25 bp, Homo sapien
ggaagacaacgtattgacatctgcc

SEQ ID NO: 2663569 - DNA, 25 bp, Homo sapien
cagcatgcagtttggctttattggg

SEQ ID NO: 2663570 - DNA, 25 bp, Homo sapien
ctaagtcagagataatcgtgggttc

SEQ ID NO: 2663571 - DNA, 25 bp, Homo sapien
ttctgatgctgattcgaatcaacct

SEQ ID NO: 2663572 - DNA, 25 bp, Homo sapien
caaccttatgatcctcagcatgcag

SEQ ID NO: 2663573 - DNA, 25 bp, Homo sapien
atctgggggagtgctaaattttaag

SEQ ID NO: 2663574 - DNA, 25 bp, Homo sapien
aagactgttttaaatccactggcca

SEQ ID NO: 2663575 - DNA, 25 bp, Homo sapien
cctgcaggtatctgaatttgtgacc

SEQ ID NO: 2663576 - DNA, 25 bp, Homo sapien
tctctcctttatgctactcctgcag

SEQ ID NO: 2663577 - DNA, 25 bp, Homo sapien
aaccaaatccaaactgctgtaggcc

SEQ ID NO: 2663578 - DNA, 25 bp, Homo sapien
aactctgaggtatttctgacaactt

SEQ ID NO: 2663579 - DNA, 25 bp, Homo sapien
ggttgcctcagacctcttatcctgt

SEQ ID NO: 2663580 - DNA, 25 bp, Homo sapien
tgtaggccatggttgcctcagacct

SEQ ID NO: 2663581 - DNA, 25 bp, Homo sapien
ctggttagtttgtagggccttcaga

SEQ ID NO: 2663582 - DNA, 25 bp, Homo sapien
gccttcagattttctggatgaaata

SEQ ID NO: 2663583 - DNA, 25 bp, Homo sapien
tagggccttcagattttctggatga

SEQ ID NO: 2663584 - DNA, 25 bp, Homo sapien
ttgtagggccttcagattttctgga

SEQ ID NO: 2663585 - DNA, 25 bp, Homo sapien
cttggaatttattgggtgagaggct

SEQ ID NO: 2663586 - DNA, 25 bp, Homo sapien
tgagaggctcttggctagttcatcc

SEQ ID NO: 2663587 - DNA, 25 bp, Homo sapien
ggaatttattgggtgagaggctctt

SEQ ID NO: 2663588 - DNA, 25 bp, Homo sapien
agaggctcttggctagttcatccat

SEQ ID NO: 2663589 - DNA, 25 bp, Homo sapien
tagtattcacaatcggccttcagtt

SEQ ID NO: 2663590 - DNA, 25 bp, Homo sapien
gaagctcccggtggatagtattcac

SEQ ID NO: 2663591 - DNA, 25 bp, Homo sapien
gaaagtagcactccttgaggtcaga

SEQ ID NO: 2663592 - DNA, 25 bp, Homo sapien
gagtaccctgaatcactagcgacat

SEQ ID NO: 2663593 - DNA, 25 bp, Homo sapien
ttctgttaattcccagtcattatca

SEQ ID NO: 2663594 - DNA, 25 bp, Homo sapien
tatttaatgctaaagccacagcgat

SEQ ID NO: 2663595 - DNA, 25 bp, Homo sapien
gcataacagtgttcagatcttataa

SEQ ID NO: 2663596 - DNA, 25 bp, Homo sapien
gaggacagaggcaaatagccatttt

SEQ ID NO: 2663597 - DNA, 25 bp, Homo sapien
tattattttactctctatgcccatg

SEQ ID NO: 2663598 - DNA, 25 bp, Homo sapien
gaaatgcagtgctaaagtattaaaa

SEQ ID NO: 2663599 - DNA, 25 bp, Homo sapien
tatattgtgtggtggtaaagcctgg

SEQ ID NO: 2663600 - DNA, 25 bp, Homo sapien
tataccagcaggttcattactacta

SEQ ID NO: 2663601 - DNA, 25 bp, Homo sapien
ccaccagaattcaaatctcgggagt

SEQ ID NO: 2663602 - DNA, 25 bp, Homo sapien
gagatgaaggtcctcagttctcgcc

SEQ ID NO: 2663603 - DNA, 25 bp, Homo sapien
tcgccctgcaggattgggcagctga

SEQ ID NO: 2663604 - DNA, 25 bp, Homo sapien
tatggccgagtgcaaagctgcccat

SEQ ID NO: 2663605 - DNA, 25 bp, Homo sapien
cttgacgctcaacattcctccacag

SEQ ID NO: 2663606 - DNA, 25 bp, Homo sapien
aatgccttgacgctcaacattcctc

SEQ ID NO: 2663607 - DNA, 25 bp, Homo sapien
tacaaaatgccttgacgctcaacat

SEQ ID NO: 2663608 - DNA, 25 bp, Homo sapien
ttgacgctcaacattcctccacagt

SEQ ID NO: 2663609 - DNA, 25 bp, Homo sapien
taagtacaggcggtcaccaccagga

SEQ ID NO: 2663610 - DNA, 25 bp, Homo sapien
atcgaagtaagtacaggcggtcacc

SEQ ID NO: 2663611 - DNA, 25 bp, Homo sapien
cgaagtaagtacaggcggtcaccac

SEQ ID NO: 2663612 - DNA, 25 bp, Homo sapien
gtacaggcggtcaccaccaggataa

SEQ ID NO: 2663613 - DNA, 25 bp, Homo sapien
gtcagcaacgaagatcgcacaactc

SEQ ID NO: 2663614 - DNA, 25 bp, Homo sapien
gaggaaccacctgaagcaggagaca

SEQ ID NO: 2663615 - DNA, 25 bp, Homo sapien
cattgatggtgtcagggttgtcatc

SEQ ID NO: 2663616 - DNA, 25 bp, Homo sapien
ccaaaacaatgattaggcatttccc

SEQ ID NO: 2663617 - DNA, 25 bp, Homo sapien
gtggaacgaacttctgaactggaag

SEQ ID NO: 2663618 - DNA, 25 bp, Homo sapien
ttagaaatggattgtgggaaatcca

SEQ ID NO: 2663619 - DNA, 25 bp, Homo sapien
ttgtgggaaatccaatgagtggaac

SEQ ID NO: 2663620 - DNA, 25 bp, Homo sapien
ggtgacttaaagacaggcctgcaat

SEQ ID NO: 2663621 - DNA, 25 bp, Homo sapien
ctggagatatgggagccatgacata

SEQ ID NO: 2663622 - DNA, 25 bp, Homo sapien
gccatgacatagaggaatttaggtg

SEQ ID NO: 2663623 - DNA, 25 bp, Homo sapien
ccatgacatagaggaatttaggtgg

SEQ ID NO: 2663624 - DNA, 25 bp, Homo sapien
catgacatagaggaatttaggtggt

SEQ ID NO: 2663625 - DNA, 25 bp, Homo sapien
gcagccctttgtgaaatctgccaag

SEQ ID NO: 2663626 - DNA, 25 bp, Homo sapien
tgggtaatggagaaagatggcttca

SEQ ID NO: 2663627 - DNA, 25 bp, Homo sapien
ttcgtctcccggtgtgcagcccttt

SEQ ID NO: 2663628 - DNA, 25 bp, Homo sapien
ccaaggaacagtagatgctgatgtt

SEQ ID NO: 2663629 - DNA, 25 bp, Homo sapien
gtccacgttgcctcatgaatgggtg

SEQ ID NO: 2663630 - DNA, 25 bp, Homo sapien
attcatgctcagcttgaaaaggcaa

SEQ ID NO: 2663631 - DNA, 25 bp, Homo sapien
gatcagttgtccacgttgcctcatg

SEQ ID NO: 2663632 - DNA, 25 bp, Homo sapien
cttttctgatcagttgtccacgttg

SEQ ID NO: 2663633 - DNA, 25 bp, Homo sapien
tagagaaataacttgagtttttctc

SEQ ID NO: 2663634 - DNA, 25 bp, Homo sapien
cttctgtagagaaataacttgagtt

SEQ ID NO: 2663635 - DNA, 25 bp, Homo sapien
aggtttcttctgtagagaaataact

SEQ ID NO: 2663636 - DNA, 25 bp, Homo sapien
catttaggtttcttctgtagagaaa

SEQ ID NO: 2663637 - DNA, 25 bp, Homo sapien
ccatatggtgccactatgaacttat

SEQ ID NO: 2663638 - DNA, 25 bp, Homo sapien
gattaactgatctctgcatttggga

SEQ ID NO: 2663639 - DNA, 25 bp, Homo sapien
gattgatgggctaactactgctcca

SEQ ID NO: 2663640 - DNA, 25 bp, Homo sapien
tgaacttattagctgacggattaac

SEQ ID NO: 2663641 - DNA, 25 bp, Homo sapien
tccgacgagaatagccccaggatgg

SEQ ID NO: 2663642 - DNA, 25 bp, Homo sapien
gctgacaacacatctactgtccact

SEQ ID NO: 2663643 - DNA, 25 bp, Homo sapien
ctggtcctttaatcagtgtccaacc

SEQ ID NO: 2663644 - DNA, 25 bp, Homo sapien
tgtccaacctatccgacgagaatag

SEQ ID NO: 2663645 - DNA, 25 bp, Homo sapien
ggctttgagatgttcttgactgtac

SEQ ID NO: 2663646 - DNA, 25 bp, Homo sapien
tccttctggctttgagatgttcttg

SEQ ID NO: 2663647 - DNA, 25 bp, Homo sapien
tggctttgagatgttcttgactgta

SEQ ID NO: 2663648 - DNA, 25 bp, Homo sapien
tgattccttctggctttgagatgtt

SEQ ID NO: 2663649 - DNA, 25 bp, Homo sapien
cccttctaaggagagttctatactt

SEQ ID NO: 2663650 - DNA, 25 bp, Homo sapien
cctatgcttccatggaactttatcc

SEQ ID NO: 2663651 - DNA, 25 bp, Homo sapien
taaggagagttctatacttccttcc

SEQ ID NO: 2663652 - DNA, 25 bp, Homo sapien
tacttccttccctatgcttccatgg

SEQ ID NO: 2663653 - DNA, 25 bp, Homo sapien
tctggacaacctctgcgtaacctct

SEQ ID NO: 2663654 - DNA, 25 bp, Homo sapien
ggtcatccaccctggaaccatcaat

SEQ ID NO: 2663655 - DNA, 25 bp, Homo sapien
gcagtctcattagagcatgcaacaa

SEQ ID NO: 2663656 - DNA, 25 bp, Homo sapien
gattgtggactggaacgggatcctt

SEQ ID NO: 2663657 - DNA, 25 bp, Homo sapien
agatctctccaatcctcttcaccgt

SEQ ID NO: 2663658 - DNA, 25 bp, Homo sapien
tccaatcctcttcaccgttgcccat

SEQ ID NO: 2663659 - DNA, 25 bp, Homo sapien
tctctccaatcctcttcaccgttgc

SEQ ID NO: 2663660 - DNA, 25 bp, Homo sapien
tgctctctcagatctctccaatcct

SEQ ID NO: 2663661 - DNA, 25 bp, Homo sapien
atgcatcacgtgaacctcggaaccg

SEQ ID NO: 2663662 - DNA, 25 bp, Homo sapien
tcacgtgaacctcggaaccgaactg

SEQ ID NO: 2663663 - DNA, 25 bp, Homo sapien
tcagaccttctttgaatggggtaca

SEQ ID NO: 2663664 - DNA, 25 bp, Homo sapien
agataaatgcatcacgtgaacctcg

SEQ ID NO: 2663665 - DNA, 25 bp, Homo sapien
acaaaaactgccattgtcactgttc

SEQ ID NO: 2663666 - DNA, 25 bp, Homo sapien
tgttggttgacttggttgaaaaaca

SEQ ID NO: 2663667 - DNA, 25 bp, Homo sapien
cttcctttgttggttgacttggttg

SEQ ID NO: 2663668 - DNA, 25 bp, Homo sapien
aaaaactgccattgtcactgttcat

SEQ ID NO: 2663669 - DNA, 25 bp, Homo sapien
cagcctcgtctacatgtcaaatcca

SEQ ID NO: 2663670 - DNA, 25 bp, Homo sapien
ttaacagcctcgtctacatgtcaaa

SEQ ID NO: 2663671 - DNA, 25 bp, Homo sapien
gagagtatccaccattgaaatcacc

SEQ ID NO: 2663672 - DNA, 25 bp, Homo sapien
gaaatcacccagtgtgccttctcac

SEQ ID NO: 2663673 - DNA, 25 bp, Homo sapien
attgtccctttctaaatagccctga

SEQ ID NO: 2663674 - DNA, 25 bp, Homo sapien
catgcaaagtagacaataccagcat

SEQ ID NO: 2663675 - DNA, 25 bp, Homo sapien
taaatagccctgactggacacagga

SEQ ID NO: 2663676 - DNA, 25 bp, Homo sapien
aagtagacaataccagcattgtccc

SEQ ID NO: 2663677 - DNA, 25 bp, Homo sapien
tttaatattcagaagtgaatcaaga

SEQ ID NO: 2663678 - DNA, 25 bp, Homo sapien
cattaaaataaaaggcactaaccat

SEQ ID NO: 2663679 - DNA, 25 bp, Homo sapien
ctttaatattcagaagtgaatcaag

SEQ ID NO: 2663680 - DNA, 25 bp, Homo sapien
tgaatcaagagattcattaaaataa

SEQ ID NO: 2663681 - DNA, 25 bp, Homo sapien
gcctttcttggcttattcgtggact

SEQ ID NO: 2663682 - DNA, 25 bp, Homo sapien
ttgttcttccactcaaccttgcggc

SEQ ID NO: 2663683 - DNA, 25 bp, Homo sapien
tggcttattcgtggactcttccctt

SEQ ID NO: 2663684 - DNA, 25 bp, Homo sapien
ctccatggcaggcatacgtcttctg

SEQ ID NO: 2663685 - DNA, 25 bp, Homo sapien
ttttatcgctaacagaggacaaaga

SEQ ID NO: 2663686 - DNA, 25 bp, Homo sapien
gttcgttacctccttgacaccaatg

SEQ ID NO: 2663687 - DNA, 25 bp, Homo sapien
tcatgtcggtgattccacagttcgt

SEQ ID NO: 2663688 - DNA, 25 bp, Homo sapien
gctgccatggtatttggaactctgt

SEQ ID NO: 2663689 - DNA, 25 bp, Homo sapien
gcctctagaattgccttaggtcaag

SEQ ID NO: 2663690 - DNA, 25 bp, Homo sapien
gggaccctgatgaccaaagctccat

SEQ ID NO: 2663691 - DNA, 25 bp, Homo sapien
catagcatgcaaagcgaccactgga

SEQ ID NO: 2663692 - DNA, 25 bp, Homo sapien
taatgagtcatagaggcagcctttg

SEQ ID NO: 2663693 - DNA, 25 bp, Homo sapien
tggtgtgacaattgcgtggtgctcc

SEQ ID NO: 2663694 - DNA, 25 bp, Homo sapien
tgacaattgcgtggtgctccctcct

SEQ ID NO: 2663695 - DNA, 25 bp, Homo sapien
agtaatggtgtgacaattgcgtggt

SEQ ID NO: 2663696 - DNA, 25 bp, Homo sapien
aattgcgtggtgctccctcctctct

SEQ ID NO: 2663697 - DNA, 25 bp, Homo sapien
tctctgaacgctttaggcctaaaac

SEQ ID NO: 2663698 - DNA, 25 bp, Homo sapien
taaaaatcgttgacaatgggaatgg

SEQ ID NO: 2663699 - DNA, 25 bp, Homo sapien
taagttgaatcaacatcgtagaact

SEQ ID NO: 2663700 - DNA, 25 bp, Homo sapien
cgttgacaatgggaatgggatagta

SEQ ID NO: 2663701 - DNA, 25 bp, Homo sapien
agaacaaagataggccatcgcgccc

SEQ ID NO: 2663702 - DNA, 25 bp, Homo sapien
gcgcccccttgcggacaggctgcat

SEQ ID NO: 2663703 - DNA, 25 bp, Homo sapien
catcgcgcccccttgcggacaggct

SEQ ID NO: 2663704 - DNA, 25 bp, Homo sapien
cagaacaaagataggccatcgcgcc

SEQ ID NO: 2663705 - DNA, 25 bp, Homo sapien
ttattgatgtgataatctgaaatga

SEQ ID NO: 2663706 - DNA, 25 bp, Homo sapien
gcaaagtgccttttttattcctcga

SEQ ID NO: 2663707 - DNA, 25 bp, Homo sapien
gaagagaaaggagtgttcatctttc

SEQ ID NO: 2663708 - DNA, 25 bp, Homo sapien
ggcagagccagttgactggatcaca

SEQ ID NO: 2663709 - DNA, 25 bp, Homo sapien
caaggaaggacgttgttttctctgg

SEQ ID NO: 2663710 - DNA, 25 bp, Homo sapien
gccattcttcccgattggacaagga

SEQ ID NO: 2663711 - DNA, 25 bp, Homo sapien
aggcaatgccattcttcccgattgg

SEQ ID NO: 2663712 - DNA, 25 bp, Homo sapien
cccgattggacaaggaaggacgttg

SEQ ID NO: 2663713 - DNA, 25 bp, Homo sapien
aatgatgtactgtgccactaaacat

SEQ ID NO: 2663714 - DNA, 25 bp, Homo sapien
gattttctaggtaatcattcctggg

SEQ ID NO: 2663715 - DNA, 25 bp, Homo sapien
tactgatgaggccagatagtctcta

SEQ ID NO: 2663716 - DNA, 25 bp, Homo sapien
gcttggtaattagttactcttcaaa

SEQ ID NO: 2663717 - DNA, 25 bp, Homo sapien
tctgaaatggtgtccttccgttatg

SEQ ID NO: 2663718 - DNA, 25 bp, Homo sapien
tttatctggcaaatgagtctgtgca

SEQ ID NO: 2663719 - DNA, 25 bp, Homo sapien
gccaagggtggtctagtcactacat

SEQ ID NO: 2663720 - DNA, 25 bp, Homo sapien
tatgcatccattctaccgtcatgtt

SEQ ID NO: 2663721 - DNA, 25 bp, Homo sapien
gaagttgctttagaggacgtcctgc

SEQ ID NO: 2663722 - DNA, 25 bp, Homo sapien
gacgtcctgcgtatcttcacctctg

SEQ ID NO: 2663723 - DNA, 25 bp, Homo sapien
tatcttcacctctgcgtggcgtggg

SEQ ID NO: 2663724 - DNA, 25 bp, Homo sapien
acctggcacccacggaagttgcttt

SEQ ID NO: 2663725 - DNA, 25 bp, Homo sapien
atctacctcagggtcctcgcaagcg

SEQ ID NO: 2663726 - DNA, 25 bp, Homo sapien
tgaaaccacccaatctacctcaggg

SEQ ID NO: 2663727 - DNA, 25 bp, Homo sapien
ctcagacagtggatgcgttcctgtt

SEQ ID NO: 2663728 - DNA, 25 bp, Homo sapien
gatgcgttcctgttgaaaccaccca

SEQ ID NO: 2663729 - DNA, 25 bp, Homo sapien
cccgctccccacaccaacgtgtgcc

SEQ ID NO: 2663730 - DNA, 25 bp, Homo sapien
gctccccacaccaacgtgtgcctcc

SEQ ID NO: 2663731 - DNA, 25 bp, Homo sapien
tccccacaccaacgtgtgcctccgt

SEQ ID NO: 2663732 - DNA, 25 bp, Homo sapien
ccacaccaacgtgtgcctccgtcac

SEQ ID NO: 2663733 - DNA, 25 bp, Homo sapien
gagtcaggaaaactagagggtaaca

SEQ ID NO: 2663734 - DNA, 25 bp, Homo sapien
ccaaaggtggtctttactctctcta

SEQ ID NO: 2663735 - DNA, 25 bp, Homo sapien
agggcgtcagttaagctgagacaaa

SEQ ID NO: 2663736 - DNA, 25 bp, Homo sapien
ctgagacaaaatgacggccaaaggt

SEQ ID NO: 2663737 - DNA, 25 bp, Homo sapien
ttccattgcccggaaggagggtaga

SEQ ID NO: 2663738 - DNA, 25 bp, Homo sapien
gtgaagaaacttctcactatgagat

SEQ ID NO: 2663739 - DNA, 25 bp, Homo sapien
ctgtgaatagtgaagaaacttctca

SEQ ID NO: 2663740 - DNA, 25 bp, Homo sapien
cactatgagattccattgcccggaa

SEQ ID NO: 2663741 - DNA, 25 bp, Homo sapien
aggtgtccaggaccgtcagatccca

SEQ ID NO: 2663742 - DNA, 25 bp, Homo sapien
gtggccagagcaaaagtgaaccgca

SEQ ID NO: 2663743 - DNA, 25 bp, Homo sapien
gtgaaccgcaggctaggcaaagacc

SEQ ID NO: 2663744 - DNA, 25 bp, Homo sapien
catattggaacgtattaaagaggca

SEQ ID NO: 2663745 - DNA, 25 bp, Homo sapien
gcctgcctccagtacgatgtctcat

SEQ ID NO: 2663746 - DNA, 25 bp, Homo sapien
taatatctataacaacgcctgccta

SEQ ID NO: 2663747 - DNA, 25 bp, Homo sapien
gatggctgagaaccccgatatatcg

SEQ ID NO: 2663748 - DNA, 25 bp, Homo sapien
taaggaccccaagtcgtgagacaaa

SEQ ID NO: 2663749 - DNA, 25 bp, Homo sapien
cctttgggccatttacagcttggat

SEQ ID NO: 2663750 - DNA, 25 bp, Homo sapien
aaataactggccctgtgcatgcttc

SEQ ID NO: 2663751 - DNA, 25 bp, Homo sapien
gatggctgagaaccccgattccttt

SEQ ID NO: 2663752 - DNA, 25 bp, Homo sapien
tcatacactcagtctgtgtcccctt

SEQ ID NO: 2663753 - DNA, 25 bp, Homo sapien
gctgttcgtcccctcacaaaatcaa

SEQ ID NO: 2663754 - DNA, 25 bp, Homo sapien
ttttaattgtcacgctgttcgtccc

SEQ ID NO: 2663755 - DNA, 25 bp, Homo sapien
tgttcgtcccctcacaaaatcaagt

SEQ ID NO: 2663756 - DNA, 25 bp, Homo sapien
tcttcttttaattgtcacgctgttc

SEQ ID NO: 2663757 - DNA, 25 bp, Homo sapien
ttcacaaactattctccagtcccac

SEQ ID NO: 2663758 - DNA, 25 bp, Homo sapien
caaactattctccagtcccaccttc

SEQ ID NO: 2663759 - DNA, 25 bp, Homo sapien
cacaaactattctccagtcccacct

SEQ ID NO: 2663760 - DNA, 25 bp, Homo sapien
tcacaaactattctccagtcccacc

SEQ ID NO: 2663761 - DNA, 25 bp, Homo sapien
tctctgacaggttgatagccactta

SEQ ID NO: 2663762 - DNA, 25 bp, Homo sapien
tttgcgaacctcaatgactgccagg

SEQ ID NO: 2663763 - DNA, 25 bp, Homo sapien
taaggaacactgcactctgtgatct

SEQ ID NO: 2663764 - DNA, 25 bp, Homo sapien
tacacagcagaagcggaacccttca

SEQ ID NO: 2663765 - DNA, 25 bp, Homo sapien
cacaaagcccgaatggtaagcaacc

SEQ ID NO: 2663766 - DNA, 25 bp, Homo sapien
tactgtacttcaaggcaggcaacca

SEQ ID NO: 2663767 - DNA, 25 bp, Homo sapien
caaaaaatatggactgaactgcgaa

SEQ ID NO: 2663768 - DNA, 25 bp, Homo sapien
tgaaagcatacgacacttaaccttg

SEQ ID NO: 2663769 - DNA, 25 bp, Homo sapien
gtctaatggctctttagaacagcta

SEQ ID NO: 2663770 - DNA, 25 bp, Homo sapien
cactaagcatatataacaattgatc

SEQ ID NO: 2663771 - DNA, 25 bp, Homo sapien
caatcttatcgtctgtaagactgca

SEQ ID NO: 2663772 - DNA, 25 bp, Homo sapien
gactgcaacaaactttttaccatta

SEQ ID NO: 2663773 - DNA, 25 bp, Homo sapien
catgagtcactatggtcagcaaaaa

SEQ ID NO: 2663774 - DNA, 25 bp, Homo sapien
gaagttagagaagagtgccagcatg

SEQ ID NO: 2663775 - DNA, 25 bp, Homo sapien
tcatgtcaaagcaatcatactggcc

SEQ ID NO: 2663776 - DNA, 25 bp, Homo sapien
tggaagcaagctgtctagggtctct

SEQ ID NO: 2663777 - DNA, 25 bp, Homo sapien
cagagttgttgaatccagcatttac

SEQ ID NO: 2663778 - DNA, 25 bp, Homo sapien
tttacattagcttttcctctggagt

SEQ ID NO: 2663779 - DNA, 25 bp, Homo sapien
ggaaaaaacagagttgttgaatcca

SEQ ID NO: 2663780 - DNA, 25 bp, Homo sapien
tctgacagcattagagacaatgaaa

SEQ ID NO: 2663781 - DNA, 25 bp, Homo sapien
cattgtgtagtggagaactgccatc

SEQ ID NO: 2663782 - DNA, 25 bp, Homo sapien
gggagaggtaccacacaattctaaa

SEQ ID NO: 2663783 - DNA, 25 bp, Homo sapien
tactaaaccacgaatgagaaaccca

SEQ ID NO: 2663784 - DNA, 25 bp, Homo sapien
tataatgctggctaggatctccaac

SEQ ID NO: 2663785 - DNA, 25 bp, Homo sapien
tgcaatgccatctctgacataagtc

SEQ ID NO: 2663786 - DNA, 25 bp, Homo sapien
taaccgctattctgagggtttatgg

SEQ ID NO: 2663787 - DNA, 25 bp, Homo sapien
tgttaggtagggaggaccaatttca

SEQ ID NO: 2663788 - DNA, 25 bp, Homo sapien
aatgatctagctttccctgctggta

SEQ ID NO: 2663789 - DNA, 25 bp, Homo sapien
gagagaccatcaaagtaaggactgt

SEQ ID NO: 2663790 - DNA, 25 bp, Homo sapien
gagaccatcaaagtaaggactgtta

SEQ ID NO: 2663791 - DNA, 25 bp, Homo sapien
ccatcaaagtaaggactgttaaaca

SEQ ID NO: 2663792 - DNA, 25 bp, Homo sapien
gaagagagaccatcaaagtaaggac

SEQ ID NO: 2663793 - DNA, 25 bp, Homo sapien
gacccacaggttggctacatatctg

SEQ ID NO: 2663794 - DNA, 25 bp, Homo sapien
cagaagagaaggggagcagcatatc

SEQ ID NO: 2663795 - DNA, 25 bp, Homo sapien
tcatgaaccaaacacctatcaccag

SEQ ID NO: 2663796 - DNA, 25 bp, Homo sapien
ccaaaccgtatcagtgacccacagg

SEQ ID NO: 2663797 - DNA, 25 bp, Homo sapien
ctgtagaagcacggcaccagcatct

SEQ ID NO: 2663798 - DNA, 25 bp, Homo sapien
gtagaagcacggcaccagcatctgc

SEQ ID NO: 2663799 - DNA, 25 bp, Homo sapien
tagaagcacggcaccagcatctgct

SEQ ID NO: 2663800 - DNA, 25 bp, Homo sapien
tgtagaagcacggcaccagcatctg

SEQ ID NO: 2663801 - DNA, 25 bp, Homo sapien
aatttggatatgcgaaagagaagct

SEQ ID NO: 2663802 - DNA, 25 bp, Homo sapien
ctggcaatttggatatgcgaaagag

SEQ ID NO: 2663803 - DNA, 25 bp, Homo sapien
tggatatgcgaaagagaagctgtaa

SEQ ID NO: 2663804 - DNA, 25 bp, Homo sapien
tggcaatttggatatgcgaaagaga

SEQ ID NO: 2663805 - DNA, 25 bp, Homo sapien
tggttatcagatcaagtgtagcagt

SEQ ID NO: 2663806 - DNA, 25 bp, Homo sapien
tatcagatcaagtgtagcagtatca

SEQ ID NO: 2663807 - DNA, 25 bp, Homo sapien
ggcttggagtgcaagagcggtgatg

SEQ ID NO: 2663808 - DNA, 25 bp, Homo sapien
ataatggcttggagtgcaagagcgg

SEQ ID NO: 2663809 - DNA, 25 bp, Homo sapien
ttaaattgcacatcattttgagcag

SEQ ID NO: 2663810 - DNA, 25 bp, Homo sapien
aattgcacatcattttgagcagcat

SEQ ID NO: 2663811 - DNA, 25 bp, Homo sapien
ttttaaattgcacatcattttgagc

SEQ ID NO: 2663812 - DNA, 25 bp, Homo sapien
tagttttaaattgcacatcattttg

SEQ ID NO: 2663813 - DNA, 25 bp, Homo sapien
tatctatgggtttgctttccatggt

SEQ ID NO: 2663814 - DNA, 25 bp, Homo sapien
tttagttaactgcagtcacctcatg

SEQ ID NO: 2663815 - DNA, 25 bp, Homo sapien
taactgcagtcacctcatgtccaaa

SEQ ID NO: 2663816 - DNA, 25 bp, Homo sapien
tccctttatctatgggtttgctttc

SEQ ID NO: 2663817 - DNA, 25 bp, Homo sapien
gaattgtagtggttctttacacagt

SEQ ID NO: 2663818 - DNA, 25 bp, Homo sapien
cacagtgtgaatactaatcctttcg

SEQ ID NO: 2663819 - DNA, 25 bp, Homo sapien
tatatcaattcatactccaaccagc

SEQ ID NO: 2663820 - DNA, 25 bp, Homo sapien
catttttgttcatctggtgggtgtg

SEQ ID NO: 2663821 - DNA, 25 bp, Homo sapien
tagtctgatgtcacactgcttgggt

SEQ ID NO: 2663822 - DNA, 25 bp, Homo sapien
tgggttcaaattctgcgctgtcaca

SEQ ID NO: 2663823 - DNA, 25 bp, Homo sapien
ggcaatcagcaaaccagaactgtgc

SEQ ID NO: 2663824 - DNA, 25 bp, Homo sapien
tctgtagctagaggaaatcactgcc

SEQ ID NO: 2663825 - DNA, 25 bp, Homo sapien
tatactgagggcattgttatcaaca

SEQ ID NO: 2663826 - DNA, 25 bp, Homo sapien
taaaacttttaatgtggtccagcta

SEQ ID NO: 2663827 - DNA, 25 bp, Homo sapien
tgttagcctccactaaagttcgcca

SEQ ID NO: 2663828 - DNA, 25 bp, Homo sapien
aataagaccataaagtagagggcca

SEQ ID NO: 2663829 - DNA, 25 bp, Homo sapien
ggtcagaattaggttcccagttgct

SEQ ID NO: 2663830 - DNA, 25 bp, Homo sapien
tcttataattatccttggtatgcgg

SEQ ID NO: 2663831 - DNA, 25 bp, Homo sapien
tccaattagccaaacaattcctcct

SEQ ID NO: 2663832 - DNA, 25 bp, Homo sapien
tgcggttgctttctcccaaggtttc

SEQ ID NO: 2663833 - DNA, 25 bp, Homo sapien
acctgaaggccgatgttttcccatg

SEQ ID NO: 2663834 - DNA, 25 bp, Homo sapien
ttttgcaagtctcacctcatttggg

SEQ ID NO: 2663835 - DNA, 25 bp, Homo sapien
ttgacactatcctttagggcccatg

SEQ ID NO: 2663836 - DNA, 25 bp, Homo sapien
tatcacgctgattaaaactggcctg

SEQ ID NO: 2663837 - DNA, 25 bp, Homo sapien
tgaatacatgtcattgactttacag

SEQ ID NO: 2663838 - DNA, 25 bp, Homo sapien
gactttacagtccaccagataatcc

SEQ ID NO: 2663839 - DNA, 25 bp, Homo sapien
aggaggaaggcttaccttttgcagg

SEQ ID NO: 2663840 - DNA, 25 bp, Homo sapien
catccacgattctaggattaggagg

SEQ ID NO: 2663841 - DNA, 25 bp, Homo sapien
tatgatcacattactccattctctg

SEQ ID NO: 2663842 - DNA, 25 bp, Homo sapien
tacgggaggattgaatatctgtcct

SEQ ID NO: 2663843 - DNA, 25 bp, Homo sapien
ccttctccagctttagtggctgtca

SEQ ID NO: 2663844 - DNA, 25 bp, Homo sapien
aatcaatgcattagcagggctgtac

SEQ ID NO: 2663845 - DNA, 25 bp, Homo sapien
ttcatttaccggaaatagctccagt

SEQ ID NO: 2663846 - DNA, 25 bp, Homo sapien
taaaccagaagttgtttcggagctc

SEQ ID NO: 2663847 - DNA, 25 bp, Homo sapien
cctcttggaaagtccctagctacat

SEQ ID NO: 2663848 - DNA, 25 bp, Homo sapien
caaatcgggcaactctaaaccagaa

SEQ ID NO: 2663849 - DNA, 25 bp, Homo sapien
cagggtggtttatttcaactgataa

SEQ ID NO: 2663850 - DNA, 25 bp, Homo sapien
tgtctggtgatatatctcattgagg

SEQ ID NO: 2663851 - DNA, 25 bp, Homo sapien
aatgaatatccagtaggtgtattac

SEQ ID NO: 2663852 - DNA, 25 bp, Homo sapien
tgctttacacttacatcatgtcttg

SEQ ID NO: 2663853 - DNA, 25 bp, Homo sapien
tatcagcacttaatatcatcagtac

SEQ ID NO: 2663854 - DNA, 25 bp, Homo sapien
gatacaaatttccatgctttccaga

SEQ ID NO: 2663855 - DNA, 25 bp, Homo sapien
gaagatacaaatttccatgctttcc

SEQ ID NO: 2663856 - DNA, 25 bp, Homo sapien
aacatgaaaagagtccatgaaaaca

SEQ ID NO: 2663857 - DNA, 25 bp, Homo sapien
acatgaaaagagtccatgaaaacaa

SEQ ID NO: 2663858 - DNA, 25 bp, Homo sapien
ctggacaacacagcaggactccgtc

SEQ ID NO: 2663859 - DNA, 25 bp, Homo sapien
ccaaggagaaagatcgtttgagtcc

SEQ ID NO: 2663860 - DNA, 25 bp, Homo sapien
aggggttcaagaccagcctggacaa

SEQ ID NO: 2663861 - DNA, 25 bp, Homo sapien
ggccaaggagaaagatcgtttgagt

SEQ ID NO: 2663862 - DNA, 25 bp, Homo sapien
tgcacctggccaatagctgtactaa

SEQ ID NO: 2663863 - DNA, 25 bp, Homo sapien
attctcaccaacagcgtatgtttct

SEQ ID NO: 2663864 - DNA, 25 bp, Homo sapien
tcaccaacagcgtatgtttcttttt

SEQ ID NO: 2663865 - DNA, 25 bp, Homo sapien
ctctgaatcctggtcagcatttatt

SEQ ID NO: 2663866 - DNA, 25 bp, Homo sapien
ccatgaacagagcttgcagtactgg

SEQ ID NO: 2663867 - DNA, 25 bp, Homo sapien
gaatgctctaagcaattgtaacaca

SEQ ID NO: 2663868 - DNA, 25 bp, Homo sapien
gtacacctgtctagggcacttccat

SEQ ID NO: 2663869 - DNA, 25 bp, Homo sapien
acacaatgggaagtactttggtatc

SEQ ID NO: 2663870 - DNA, 25 bp, Homo sapien
taaaaatagaccactttgagtgggc

SEQ ID NO: 2663871 - DNA, 25 bp, Homo sapien
tgtgccacccagcaaaaattcctct

SEQ ID NO: 2663872 - DNA, 25 bp, Homo sapien
tagcaaggcatggatagtctcttca

SEQ ID NO: 2663873 - DNA, 25 bp, Homo sapien
cctagaaaagtaattgtaagctcct

SEQ ID NO: 2663874 - DNA, 25 bp, Homo sapien
cactactacttctatacattgttgg

SEQ ID NO: 2663875 - DNA, 25 bp, Homo sapien
aagagagtgagcaatgatctacaga

SEQ ID NO: 2663876 - DNA, 25 bp, Homo sapien
catcagggaactgacaattaaaacc

SEQ ID NO: 2663877 - DNA, 25 bp, Homo sapien
aactattgacatatgacttgtaccc

SEQ ID NO: 2663878 - DNA, 25 bp, Homo sapien
taaatcttcgatcacatggcaccag

SEQ ID NO: 2663879 - DNA, 25 bp, Homo sapien
tcttcactgcttaccaaattatggg

SEQ ID NO: 2663880 - DNA, 25 bp, Homo sapien
tacatgtgccttagagtgcagtaga

SEQ ID NO: 2663881 - DNA, 25 bp, Homo sapien
gaactgtctaccactgcatgcctac

SEQ ID NO: 2663882 - DNA, 25 bp, Homo sapien
tatatgtattttatacctatttcca

SEQ ID NO: 2663883 - DNA, 25 bp, Homo sapien
tgctatatgtattttatacctattt

SEQ ID NO: 2663884 - DNA, 25 bp, Homo sapien
tgtattttatacctatttccataca

SEQ ID NO: 2663885 - DNA, 25 bp, Homo sapien
gtattttatacctatttccatacat

SEQ ID NO: 2663886 - DNA, 25 bp, Homo sapien
tctctttgcacctctcttgaagcac

SEQ ID NO: 2663887 - DNA, 25 bp, Homo sapien
tgcacctctcttgaagcactagcat

SEQ ID NO: 2663888 - DNA, 25 bp, Homo sapien
gtgccaaggtgaacacaaccactcc

SEQ ID NO: 2663889 - DNA, 25 bp, Homo sapien
cctttatcaggtgccaaggtgaaca

SEQ ID NO: 2663890 - DNA, 25 bp, Homo sapien
tgaacaaaattgcacaacgaacccc

SEQ ID NO: 2663891 - DNA, 25 bp, Homo sapien
tgtgatacgtaagatataggactgc

SEQ ID NO: 2663892 - DNA, 25 bp, Homo sapien
acctcggcttatcaaaagagtgctc

SEQ ID NO: 2663893 - DNA, 25 bp, Homo sapien
tgtcaaggactatctcaaatgccac

SEQ ID NO: 2663894 - DNA, 25 bp, Homo sapien
tccatgtgagtaaatctgaagtttc

SEQ ID NO: 2663895 - DNA, 25 bp, Homo sapien
cagcaattttatgttcggtgatctg

SEQ ID NO: 2663896 - DNA, 25 bp, Homo sapien
gatctgttccatgtgagtaaatctg

SEQ ID NO: 2663897 - DNA, 25 bp, Homo sapien
tatgttcggtgatctgttccatgtg

SEQ ID NO: 2663898 - DNA, 25 bp, Homo sapien
agaaatatgatatggcagacctggg

SEQ ID NO: 2663899 - DNA, 25 bp, Homo sapien
tgactgagatccactagttgtgacc

SEQ ID NO: 2663900 - DNA, 25 bp, Homo sapien
tataagacatttagagtaagaccct

SEQ ID NO: 2663901 - DNA, 25 bp, Homo sapien
gaaaccgtgagagtgacagaacaga

SEQ ID NO: 2663902 - DNA, 25 bp, Homo sapien
aaagttggtgtagtcattattttga

SEQ ID NO: 2663903 - DNA, 25 bp, Homo sapien
ccatactttaagtttgtcctatcac

SEQ ID NO: 2663904 - DNA, 25 bp, Homo sapien
tctttgtactaaacatatgagtagt

SEQ ID NO: 2663905 - DNA, 25 bp, Homo sapien
tctgataggagagtttagtctgttt

SEQ ID NO: 2663906 - DNA, 25 bp, Homo sapien
gatttcatgtatccaagtatttgag

SEQ ID NO: 2663907 - DNA, 25 bp, Homo sapien
ttttatagtgaagaataaggtctcc

SEQ ID NO: 2663908 - DNA, 25 bp, Homo sapien
tctttgtagtctatttatgatcacc

SEQ ID NO: 2663909 - DNA, 25 bp, Homo sapien
ggattcctgaacaatttgtcctttg

SEQ ID NO: 2663910 - DNA, 25 bp, Homo sapien
gagaaaccgtttctgacttctgtga

SEQ ID NO: 2663911 - DNA, 25 bp, Homo sapien
ttttcccctgtgaagatggacaact

SEQ ID NO: 2663912 - DNA, 25 bp, Homo sapien
aaccgtttctgacttctgtgagtaa

SEQ ID NO: 2663913 - DNA, 25 bp, Homo sapien
tggacaactggcctgagaaaccgtt

SEQ ID NO: 2663914 - DNA, 25 bp, Homo sapien
gactgagagggctgatcacattggg

SEQ ID NO: 2663915 - DNA, 25 bp, Homo sapien
cctcataaccctgatccctcataga

SEQ ID NO: 2663916 - DNA, 25 bp, Homo sapien
gggaacagggttgtgttcctgcctg

SEQ ID NO: 2663917 - DNA, 25 bp, Homo sapien
ttatcccaatcagaggactgagagg

SEQ ID NO: 2663918 - DNA, 25 bp, Homo sapien
tgtggttcgtatcaactggaaagag

SEQ ID NO: 2663919 - DNA, 25 bp, Homo sapien
cttgtggttcgtatcaactggaaag

SEQ ID NO: 2663920 - DNA, 25 bp, Homo sapien
cgtatcaactggaaagagccatcat

SEQ ID NO: 2663921 - DNA, 25 bp, Homo sapien
ggttcgtatcaactggaaagagcca

SEQ ID NO: 2663922 - DNA, 25 bp, Homo sapien
catgcacgaggatgttttacagggt

SEQ ID NO: 2663923 - DNA, 25 bp, Homo sapien
taagagtgtgattggtctgtctcag

SEQ ID NO: 2663924 - DNA, 25 bp, Homo sapien
catgttcagttgtctgagcagtcac

SEQ ID NO: 2663925 - DNA, 25 bp, Homo sapien
catgataattgtgtggtctcagtcc

SEQ ID NO: 2663926 - DNA, 25 bp, Homo sapien
ggtcatcaggtgcaattcttgttcc

SEQ ID NO: 2663927 - DNA, 25 bp, Homo sapien
ctccttatactgaccatagcaggtg

SEQ ID NO: 2663928 - DNA, 25 bp, Homo sapien
cccttaaggtcatcaggtgcaattc

SEQ ID NO: 2663929 - DNA, 25 bp, Homo sapien
ttcttgttccttgaatcctagtgtc

SEQ ID NO: 2663930 - DNA, 25 bp, Homo sapien
tgagcttcagtcatggtctaccatt

SEQ ID NO: 2663931 - DNA, 25 bp, Homo sapien
cagtcatggtctaccattttttgac

SEQ ID NO: 2663932 - DNA, 25 bp, Homo sapien
aactgaccaagcaaataaccatcgg

SEQ ID NO: 2663933 - DNA, 25 bp, Homo sapien
gtaatcagctagtttattctaaatg

SEQ ID NO: 2663934 - DNA, 25 bp, Homo sapien
ggtcttctgtatctgattgttgcat

SEQ ID NO: 2663935 - DNA, 25 bp, Homo sapien
gaggtcttctgtatctgattgttgc

SEQ ID NO: 2663936 - DNA, 25 bp, Homo sapien
ctccttctgaatttgacagacctgt

SEQ ID NO: 2663937 - DNA, 25 bp, Homo sapien
ccttctgaatttgacagacctgttg

SEQ ID NO: 2663938 - DNA, 25 bp, Homo sapien
tgcacttctgtgtttatgatttcca

SEQ ID NO: 2663939 - DNA, 25 bp, Homo sapien
gcacttctgtgtttatgatttccat

SEQ ID NO: 2663940 - DNA, 25 bp, Homo sapien
ctgcacttctgtgtttatgatttcc

SEQ ID NO: 2663941 - DNA, 25 bp, Homo sapien
acttcatcatgaaactctattagtt

SEQ ID NO: 2663942 - DNA, 25 bp, Homo sapien
aacaactaacttcatcatgaaactc

SEQ ID NO: 2663943 - DNA, 25 bp, Homo sapien
catgaaactctattagttttcccaa

SEQ ID NO: 2663944 - DNA, 25 bp, Homo sapien
gcttttccagaacaactaacttcat

SEQ ID NO: 2663945 - DNA, 25 bp, Homo sapien
ctcggtcaactcaattggctgcaga

SEQ ID NO: 2663946 - DNA, 25 bp, Homo sapien
ggaggaaaagagctcggtcaactca

SEQ ID NO: 2663947 - DNA, 25 bp, Homo sapien
agctcggtcaactcaattggctgca

SEQ ID NO: 2663948 - DNA, 25 bp, Homo sapien
aaagagctcggtcaactcaattggc

SEQ ID NO: 2663949 - DNA, 25 bp, Homo sapien
cttttccaaacacgtgtgcagactt

SEQ ID NO: 2663950 - DNA, 25 bp, Homo sapien
ttccaaacacgtgtgcagacttccc

SEQ ID NO: 2663951 - DNA, 25 bp, Homo sapien
caaacacgtgtgcagacttcccctg

SEQ ID NO: 2663952 - DNA, 25 bp, Homo sapien
tttccaaacacgtgtgcagacttcc

SEQ ID NO: 2663953 - DNA, 25 bp, Homo sapien
gtctctcggtggtgtctggacaacc

SEQ ID NO: 2663954 - DNA, 25 bp, Homo sapien
ccctgtgtctctcggtggtgtctgg

SEQ ID NO: 2663955 - DNA, 25 bp, Homo sapien
tgaacgctaaaaagccctgtgtctc

SEQ ID NO: 2663956 - DNA, 25 bp, Homo sapien
agtgaaaatacagtgaacgctaaaa

SEQ ID NO: 2663957 - DNA, 25 bp, Homo sapien
ctacaatcagagcctcgcgagtgtg

SEQ ID NO: 2663958 - DNA, 25 bp, Homo sapien
tcagagcctcgcgagtgtgaggcct

SEQ ID NO: 2663959 - DNA, 25 bp, Homo sapien
tacaatcagagcctcgcgagtgtga

SEQ ID NO: 2663960 - DNA, 25 bp, Homo sapien
caatcagagcctcgcgagtgtgagg

SEQ ID NO: 2663961 - DNA, 25 bp, Homo sapien
taatgtagggctgagattgccacgc

SEQ ID NO: 2663962 - DNA, 25 bp, Homo sapien
gtggattcctgattccccgtgctaa

SEQ ID NO: 2663963 - DNA, 25 bp, Homo sapien
aactcggtgattgtgtcaggtgcag

SEQ ID NO: 2663964 - DNA, 25 bp, Homo sapien
ggtgcagttctgtatgctctagcag

SEQ ID NO: 2663965 - DNA, 25 bp, Homo sapien
ggatgggatcgtcgttctgagtttc

SEQ ID NO: 2663966 - DNA, 25 bp, Homo sapien
tttgttttggcggttcccagcataa

SEQ ID NO: 2663967 - DNA, 25 bp, Homo sapien
ctggcccttctctatggttgctgct

SEQ ID NO: 2663968 - DNA, 25 bp, Homo sapien
ggttcccagcataaataggctgaag

SEQ ID NO: 2663969 - DNA, 25 bp, Homo sapien
acatcagcttctagtcttctgttgt

SEQ ID NO: 2663970 - DNA, 25 bp, Homo sapien
tcagcttctagtcttctgttgtttc

SEQ ID NO: 2663971 - DNA, 25 bp, Homo sapien
ctggttgatattgccacgtcacatc

SEQ ID NO: 2663972 - DNA, 25 bp, Homo sapien
tggttgatattgccacgtcacatca

SEQ ID NO: 2663973 - DNA, 25 bp, Homo sapien
taaatagataataagtagacaaggt

SEQ ID NO: 2663974 - DNA, 25 bp, Homo sapien
cctccactccaacaagagacaggct

SEQ ID NO: 2663975 - DNA, 25 bp, Homo sapien
gataataagtagacaaggtgataag

SEQ ID NO: 2663976 - DNA, 25 bp, Homo sapien
gagacaggcttcaataaatagataa

SEQ ID NO: 2663977 - DNA, 25 bp, Homo sapien
tccaagtgggctgaggattgaagta

SEQ ID NO: 2663978 - DNA, 25 bp, Homo sapien
atccaagtgggctgaggattgaagt

SEQ ID NO: 2663979 - DNA, 25 bp, Homo sapien
ccaagtgggctgaggattgaagtat

SEQ ID NO: 2663980 - DNA, 25 bp, Homo sapien
aagtgggctgaggattgaagtattt

SEQ ID NO: 2663981 - DNA, 25 bp, Homo sapien
gagccacaagggaagagctacccaa

SEQ ID NO: 2663982 - DNA, 25 bp, Homo sapien
cagcctcgagacatggcactctgca

SEQ ID NO: 2663983 - DNA, 25 bp, Homo sapien
ggaatgggaacattgcctgtacccc

SEQ ID NO: 2663984 - DNA, 25 bp, Homo sapien
catggagcacctctgtactagggca

SEQ ID NO: 2663985 - DNA, 25 bp, Homo sapien
agagggtttcacaaactagcattga

SEQ ID NO: 2663986 - DNA, 25 bp, Homo sapien
aagaatggctatagctcttgccctg

SEQ ID NO: 2663987 - DNA, 25 bp, Homo sapien
tctgggccatgtgcactgaaagaat

SEQ ID NO: 2663988 - DNA, 25 bp, Homo sapien
tccccttgctaaaagtacacagatt

SEQ ID NO: 2663989 - DNA, 25 bp, Homo sapien
cacatatccagaactcgagatgggt

SEQ ID NO: 2663990 - DNA, 25 bp, Homo sapien
gatgtcattacgcaagagtttcaac

SEQ ID NO: 2663991 - DNA, 25 bp, Homo sapien
aattggcatggcatctctcagagct

SEQ ID NO: 2663992 - DNA, 25 bp, Homo sapien
aataaagaccctgccttgaattggc

SEQ ID NO: 2663993 - DNA, 25 bp, Homo sapien
gcagcaattcaaagcggaaaataga

SEQ ID NO: 2663994 - DNA, 25 bp, Homo sapien
gagctaacattgactgatggttgca

SEQ ID NO: 2663995 - DNA, 25 bp, Homo sapien
acaatgcggctgcatggagctaaca

SEQ ID NO: 2663996 - DNA, 25 bp, Homo sapien
gctttagagcgcacagggaacaatg

SEQ ID NO: 2663997 - DNA, 25 bp, Homo sapien
aattccttcgatgttagctttgcca

SEQ ID NO: 2663998 - DNA, 25 bp, Homo sapien
tccgtgctagcccatctctataggg

SEQ ID NO: 2663999 - DNA, 25 bp, Homo sapien
gctttgccaactgagaaatgagaac

SEQ ID NO: 2664000 - DNA, 25 bp, Homo sapien
agcagttactaaaggtgtttcgaat

SEQ ID NO: 2664001 - DNA, 25 bp, Homo sapien
ccatagcattggctaaaatcttgaa

SEQ ID NO: 2664002 - DNA, 25 bp, Homo sapien
tcagatacagccatagcattggcta

SEQ ID NO: 2664003 - DNA, 25 bp, Homo sapien
tttccataatagttgctaaatagcc

SEQ ID NO: 2664004 - DNA, 25 bp, Homo sapien
tagccacgacctgtgttcctacaag

SEQ ID NO: 2664005 - DNA, 25 bp, Homo sapien
cttgactctgcttgtagtttaagat

SEQ ID NO: 2664006 - DNA, 25 bp, Homo sapien
tgactctgcttgtagtttaagattc

SEQ ID NO: 2664007 - DNA, 25 bp, Homo sapien
gcttgactctgcttgtagtttaaga

SEQ ID NO: 2664008 - DNA, 25 bp, Homo sapien
gactctgcttgtagtttaagattcc

SEQ ID NO: 2664009 - DNA, 25 bp, Homo sapien
gaaagatagaggtggccagaaaata

SEQ ID NO: 2664010 - DNA, 25 bp, Homo sapien
cttggttccattctatggtcttctc

SEQ ID NO: 2664011 - DNA, 25 bp, Homo sapien
tgcagggtgttgaagctggcactca

SEQ ID NO: 2664012 - DNA, 25 bp, Homo sapien
tccattctatggtcttctcagagca

SEQ ID NO: 2664013 - DNA, 25 bp, Homo sapien
ggccgtaatgaagcgtgtgcactcc

SEQ ID NO: 2664014 - DNA, 25 bp, Homo sapien
ggaagaccgatgacttctattcctc

SEQ ID NO: 2664015 - DNA, 25 bp, Homo sapien
cagaggaagaccgatgacttctatt

SEQ ID NO: 2664016 - DNA, 25 bp, Homo sapien
tttgccaaggccgtaatgaagcgtg

SEQ ID NO: 2664017 - DNA, 25 bp, Homo sapien
gattttaggattagacaactctgtt

SEQ ID NO: 2664018 - DNA, 25 bp, Homo sapien
cagaagtagatttgaaaaggaagat

SEQ ID NO: 2664019 - DNA, 25 bp, Homo sapien
aagattttaggattagacaactctg

SEQ ID NO: 2664020 - DNA, 25 bp, Homo sapien
ccacaaattccagaagtagatttga

SEQ ID NO: 2664021 - DNA, 25 bp, Homo sapien
ccagttgaagttgccaggctacatt

SEQ ID NO: 2664022 - DNA, 25 bp, Homo sapien
ggcaacaacatactggtccttgggt

SEQ ID NO: 2664023 - DNA, 25 bp, Homo sapien
aaagcagagccatttgttatcatat

SEQ ID NO: 2664024 - DNA, 25 bp, Homo sapien
gcatacataattgaggccctccgaa

SEQ ID NO: 2664025 - DNA, 25 bp, Homo sapien
tgtacaataacagaaggacatttgc

SEQ ID NO: 2664026 - DNA, 25 bp, Homo sapien
tacttatcttgtaggtttcccactc

SEQ ID NO: 2664027 - DNA, 25 bp, Homo sapien
tagcatatgaatacttgacacatca

SEQ ID NO: 2664028 - DNA, 25 bp, Homo sapien
gaaactgtaccgttattagcatatg

SEQ ID NO: 2664029 - DNA, 25 bp, Homo sapien
tgcagacgacacaagtaatagggta

SEQ ID NO: 2664030 - DNA, 25 bp, Homo sapien
gagtagcacacccatgcagacataa

SEQ ID NO: 2664031 - DNA, 25 bp, Homo sapien
gacataagcctcattgaagcaggat

SEQ ID NO: 2664032 - DNA, 25 bp, Homo sapien
ggtattaaatttgtcacgggcttca

SEQ ID NO: 2664033 - DNA, 25 bp, Homo sapien
gtttgccagccgctcttatccaact

SEQ ID NO: 2664034 - DNA, 25 bp, Homo sapien
tctgattcgttacttacagtgggaa

SEQ ID NO: 2664035 - DNA, 25 bp, Homo sapien
ccagctctctgattcgttacttaca

SEQ ID NO: 2664036 - DNA, 25 bp, Homo sapien
atttatttaaatagattcgaccgct

SEQ ID NO: 2664037 - DNA, 25 bp, Homo sapien
cgcggcttcgtgcagtttgaagcta

SEQ ID NO: 2664038 - DNA, 25 bp, Homo sapien
taaggctccagtaactgagccggcc

SEQ ID NO: 2664039 - DNA, 25 bp, Homo sapien
tgggaacgtctggaagtccatggct

SEQ ID NO: 2664040 - DNA, 25 bp, Homo sapien
aagctaattgttttcgtcaggatgg

SEQ ID NO: 2664041 - DNA, 25 bp, Homo sapien
acttcaaattcactccctggaatga

SEQ ID NO: 2664042 - DNA, 25 bp, Homo sapien
tcacctttatattgcctcacttcaa

SEQ ID NO: 2664043 - DNA, 25 bp, Homo sapien
tatattgcctcacttcaaattcact

SEQ ID NO: 2664044 - DNA, 25 bp, Homo sapien
cctttgctcctagagaacattgaag

SEQ ID NO: 2664045 - DNA, 25 bp, Homo sapien
cactgatgcatattagcagggtcta

SEQ ID NO: 2664046 - DNA, 25 bp, Homo sapien
gaaattgtcacttaagtgcttggaa

SEQ ID NO: 2664047 - DNA, 25 bp, Homo sapien
aggcaatgccgaaggtccggctcca

SEQ ID NO: 2664048 - DNA, 25 bp, Homo sapien
cagggtctagcaatgtggtgaaatt

SEQ ID NO: 2664049 - DNA, 25 bp, Homo sapien
caaagtccagaatgaaaacatcatc

SEQ ID NO: 2664050 - DNA, 25 bp, Homo sapien
aatgggtagactgaggagcttcaaa

SEQ ID NO: 2664051 - DNA, 25 bp, Homo sapien
tcaaagtccagaatgaaaacatcat

SEQ ID NO: 2664052 - DNA, 25 bp, Homo sapien
ttcaaagtccagaatgaaaacatca

SEQ ID NO: 2664053 - DNA, 25 bp, Homo sapien
tcctttggagtctctctgtggcttc

SEQ ID NO: 2664054 - DNA, 25 bp, Homo sapien
gttcctttggagtctctctgtggct

SEQ ID NO: 2664055 - DNA, 25 bp, Homo sapien
ctttggagtctctctgtggcttcat

SEQ ID NO: 2664056 - DNA, 25 bp, Homo sapien
ctgttcctttggagtctctctgtgg

SEQ ID NO: 2664057 - DNA, 25 bp, Homo sapien
catggaggacagtgggggtgacaat

SEQ ID NO: 2664058 - DNA, 25 bp, Homo sapien
aggcatggaggacagtgggggtgac

SEQ ID NO: 2664059 - DNA, 25 bp, Homo sapien
tggaggacagtgggggtgacaatga

SEQ ID NO: 2664060 - DNA, 25 bp, Homo sapien
ggcatggaggacagtgggggtgaca

SEQ ID NO: 2664061 - DNA, 25 bp, Homo sapien
taatctggtcttgttgtaataagga

SEQ ID NO: 2664062 - DNA, 25 bp, Homo sapien
gtatctttctgtgttcttatgacgg

SEQ ID NO: 2664063 - DNA, 25 bp, Homo sapien
gacggtaactaatgcaataatctgg

SEQ ID NO: 2664064 - DNA, 25 bp, Homo sapien
ctgtagagccagaattcggtaactt

SEQ ID NO: 2664065 - DNA, 25 bp, Homo sapien
ttggctcttatctcagcaggaattc

SEQ ID NO: 2664066 - DNA, 25 bp, Homo sapien
gttttggctcttatctcagcaggaa

SEQ ID NO: 2664067 - DNA, 25 bp, Homo sapien
tttggctcttatctcagcaggaatt

SEQ ID NO: 2664068 - DNA, 25 bp, Homo sapien
gctagcattagagggcgacggcggc

SEQ ID NO: 2664069 - DNA, 25 bp, Homo sapien
gagaggcggcgctagcattagaggg

SEQ ID NO: 2664070 - DNA, 25 bp, Homo sapien
cacccgtggatttgcgtgcagtccg

SEQ ID NO: 2664071 - DNA, 25 bp, Homo sapien
ttgcaggcaccacggtatgaagacc

SEQ ID NO: 2664072 - DNA, 25 bp, Homo sapien
agccagttgcttcccgggtgcttta

SEQ ID NO: 2664073 - DNA, 25 bp, Homo sapien
gtagccagttgcttcccgggtgctt

SEQ ID NO: 2664074 - DNA, 25 bp, Homo sapien
tcttgcaaaaggcttttgtagccag

SEQ ID NO: 2664075 - DNA, 25 bp, Homo sapien
ttgtagccagttgcttcccgggtgc

SEQ ID NO: 2664076 - DNA, 25 bp, Homo sapien
aatgaagcttattcgcccgtccagt

SEQ ID NO: 2664077 - DNA, 25 bp, Homo sapien
gaagtttgcgaatcgtgcctcacta

SEQ ID NO: 2664078 - DNA, 25 bp, Homo sapien
gcctcactacgaggcctgtaacaat

SEQ ID NO: 2664079 - DNA, 25 bp, Homo sapien
ggcctgtaacaatgaagcttattcg

SEQ ID NO: 2664080 - DNA, 25 bp, Homo sapien
taagcacgttctccatgtgctagca

SEQ ID NO: 2664081 - DNA, 25 bp, Homo sapien
tctccatgtgctagcatgtgtgcgg

SEQ ID NO: 2664082 - DNA, 25 bp, Homo sapien
cacgttctccatgtgctagcatgtg

SEQ ID NO: 2664083 - DNA, 25 bp, Homo sapien
tgtgctagcatgtgtgcggcatgct

SEQ ID NO: 2664084 - DNA, 25 bp, Homo sapien
taatgtgttttcatagtaaacttac

SEQ ID NO: 2664085 - DNA, 25 bp, Homo sapien
agtacaactcagaaacatttggtga

SEQ ID NO: 2664086 - DNA, 25 bp, Homo sapien
cttgcatgtagtacaactcagaaac

SEQ ID NO: 2664087 - DNA, 25 bp, Homo sapien
aatgtgttttcatagtaaacttaca

SEQ ID NO: 2664088 - DNA, 25 bp, Homo sapien
caagctcaggtgaagtcgtgggact

SEQ ID NO: 2664089 - DNA, 25 bp, Homo sapien
ccgaagggcactggccaacatgtca

SEQ ID NO: 2664090 - DNA, 25 bp, Homo sapien
tgagcttcagtgacaccgaagggca

SEQ ID NO: 2664091 - DNA, 25 bp, Homo sapien
aaccaaagggcgcacaaggtctatt

SEQ ID NO: 2664092 - DNA, 25 bp, Homo sapien
gccccgatccttactgcgggtgacg

SEQ ID NO: 2664093 - DNA, 25 bp, Homo sapien
tccttactgcgggtgacggtcactg

SEQ ID NO: 2664094 - DNA, 25 bp, Homo sapien
tcttggaaagagggccgaaactggc

SEQ ID NO: 2664095 - DNA, 25 bp, Homo sapien
gaaagagcgccttggaaagaggtct

SEQ ID NO: 2664096 - DNA, 25 bp, Homo sapien
ccggtctgcggttgcttgggaatcc

SEQ ID NO: 2664097 - DNA, 25 bp, Homo sapien
cacctccggtctgcggttgcttggg

SEQ ID NO: 2664098 - DNA, 25 bp, Homo sapien
tctgcgccacctccggtctgcggtt

SEQ ID NO: 2664099 - DNA, 25 bp, Homo sapien
taatcagcgacctcggtcactgcct

SEQ ID NO: 2664100 - DNA, 25 bp, Homo sapien
acgcctcccggtgaccgccaactgc

SEQ ID NO: 2664101 - DNA, 25 bp, Homo sapien
cccggtgaccgccaactgcccgagt

SEQ ID NO: 2664102 - DNA, 25 bp, Homo sapien
cccgccgcggggcaggacgacgcct

SEQ ID NO: 2664103 - DNA, 25 bp, Homo sapien
ggacgacgcctcccggtgaccgcca

SEQ ID NO: 2664104 - DNA, 25 bp, Homo sapien
acttggttttagttgagcgcgggca

SEQ ID NO: 2664105 - DNA, 25 bp, Homo sapien
cgggcatagcgcattctggagatct

SEQ ID NO: 2664106 - DNA, 25 bp, Homo sapien
cagggaaatacggagttttgagcca

SEQ ID NO: 2664107 - DNA, 25 bp, Homo sapien
gcagataatcgactttattcaggga

SEQ ID NO: 2664108 - DNA, 25 bp, Homo sapien
gatgatcaggtctatccaggaaaca

SEQ ID NO: 2664109 - DNA, 25 bp, Homo sapien
taattaggacgtatatagacctgac

SEQ ID NO: 2664110 - DNA, 25 bp, Homo sapien
tgcctaattgattccgctaaacgga

SEQ ID NO: 2664111 - DNA, 25 bp, Homo sapien
ggcatcccaaactgaaataattagg

SEQ ID NO: 2664112 - DNA, 25 bp, Homo sapien
gccgttggctttatacatctctata

SEQ ID NO: 2664113 - DNA, 25 bp, Homo sapien
cttgcgtgagaaagaagcaatttac

SEQ ID NO: 2664114 - DNA, 25 bp, Homo sapien
aagggacggatgctgctgctcactc

SEQ ID NO: 2664115 - DNA, 25 bp, Homo sapien
agagaggctaaagagtcttgcgtga

SEQ ID NO: 2664116 - DNA, 25 bp, Homo sapien
taaaaagccatggtgcctaaccaaa

SEQ ID NO: 2664117 - DNA, 25 bp, Homo sapien
tcaggaacagatccttgaatcagct

SEQ ID NO: 2664118 - DNA, 25 bp, Homo sapien
cacacaagatatgtgcaatcaagct

SEQ ID NO: 2664119 - DNA, 25 bp, Homo sapien
gctgccaccgcttggtaaaaagcca

SEQ ID NO: 2664120 - DNA, 25 bp, Homo sapien
tagaagccctgtgaaatcgaggatc

SEQ ID NO: 2664121 - DNA, 25 bp, Homo sapien
cctagaagccctgtgaaatcgagga

SEQ ID NO: 2664122 - DNA, 25 bp, Homo sapien
tcccagcctagaagccctgtgaaat

SEQ ID NO: 2664123 - DNA, 25 bp, Homo sapien
agcctagaagccctgtgaaatcgag

SEQ ID NO: 2664124 - DNA, 25 bp, Homo sapien
ccacaatttggcagtgaaagcccct

SEQ ID NO: 2664125 - DNA, 25 bp, Homo sapien
tccttctttcagaccgggggcagca

SEQ ID NO: 2664126 - DNA, 25 bp, Homo sapien
gaccttgccgggctggtccacaatt

SEQ ID NO: 2664127 - DNA, 25 bp, Homo sapien
gaaagcccctccaatgatggccctt

SEQ ID NO: 2664128 - DNA, 25 bp, Homo sapien
gattgagaaaatagggattgttgca

SEQ ID NO: 2664129 - DNA, 25 bp, Homo sapien
tgatgcatatcaataaccatgtact

SEQ ID NO: 2664130 - DNA, 25 bp, Homo sapien
gggcagttggctgatcactgatgca

SEQ ID NO: 2664131 - DNA, 25 bp, Homo sapien
gattgttgcaatgctgccgctactg

SEQ ID NO: 2664132 - DNA, 25 bp, Homo sapien
cactagcacggaggaggtaaaaggc

SEQ ID NO: 2664133 - DNA, 25 bp, Homo sapien
tggatactagaacgatctacactag

SEQ ID NO: 2664134 - DNA, 25 bp, Homo sapien
tagaacgatctacactagcacggag

SEQ ID NO: 2664135 - DNA, 25 bp, Homo sapien
tagagagagatttcttccagtcttt

SEQ ID NO: 2664136 - DNA, 25 bp, Homo sapien
taaaaaccacgatgaagtccgcttg

SEQ ID NO: 2664137 - DNA, 25 bp, Homo sapien
gaaaagcagttcataaggttcaccc

SEQ ID NO: 2664138 - DNA, 25 bp, Homo sapien
caaaggctcaggattttcattacag

SEQ ID NO: 2664139 - DNA, 25 bp, Homo sapien
ggcaaagacgttccccagatctgaa

SEQ ID NO: 2664140 - DNA, 25 bp, Homo sapien
caatactctcactcttccaaggcgg

SEQ ID NO: 2664141 - DNA, 25 bp, Homo sapien
gctaggaatctttagggctacacaa

SEQ ID NO: 2664142 - DNA, 25 bp, Homo sapien
tatgttgtgaccagctagttcgaga

SEQ ID NO: 2664143 - DNA, 25 bp, Homo sapien
taatgtctaaggtggaatgtgcctc

SEQ ID NO: 2664144 - DNA, 25 bp, Homo sapien
tctccgcttgtgttgcaggaagccc

SEQ ID NO: 2664145 - DNA, 25 bp, Homo sapien
gcactcggcgggacggattcctgca

SEQ ID NO: 2664146 - DNA, 25 bp, Homo sapien
cctgacagcctctccgcttgtgttg

SEQ ID NO: 2664147 - DNA, 25 bp, Homo sapien
acgcgcgcaggctcggaactaccac

SEQ ID NO: 2664148 - DNA, 25 bp, Homo sapien
gggctctcccgccaaggacacgcat

SEQ ID NO: 2664149 - DNA, 25 bp, Homo sapien
ggtgggggctctcccgccaaggaca

SEQ ID NO: 2664150 - DNA, 25 bp, Homo sapien
tctcccgccaaggacacgcatggct

SEQ ID NO: 2664151 - DNA, 25 bp, Homo sapien
ccgccaaggacacgcatggctgtct

SEQ ID NO: 2664152 - DNA, 25 bp, Homo sapien
tgttttcctgacatgttcgtggcca

SEQ ID NO: 2664153 - DNA, 25 bp, Homo sapien
tgacatgttcgtggccattgggccc

SEQ ID NO: 2664154 - DNA, 25 bp, Homo sapien
tcctgacatgttcgtggccattggg

SEQ ID NO: 2664155 - DNA, 25 bp, Homo sapien
tgttcgtggccattgggccccacgc

SEQ ID NO: 2664156 - DNA, 25 bp, Homo sapien
cccatcggattgtttgaggaaggag

SEQ ID NO: 2664157 - DNA, 25 bp, Homo sapien
gggcagatctacgagcaggcaagaa

SEQ ID NO: 2664158 - DNA, 25 bp, Homo sapien
tttgcacttgaaactcagcggcctc

SEQ ID NO: 2664159 - DNA, 25 bp, Homo sapien
gggcagctaagaaatggtcctcggc

SEQ ID NO: 2664160 - DNA, 25 bp, Homo sapien
gtacttggacttgtttaattgaata

SEQ ID NO: 2664161 - DNA, 25 bp, Homo sapien
ctgtgcatgtacttggacttgttta

SEQ ID NO: 2664162 - DNA, 25 bp, Homo sapien
gcatgtacttggacttgtttaattg

SEQ ID NO: 2664163 - DNA, 25 bp, Homo sapien
gtgcatgtacttggacttgtttaat

SEQ ID NO: 2664164 - DNA, 25 bp, Homo sapien
gaaattccataagagttaagggtgc

SEQ ID NO: 2664165 - DNA, 25 bp, Homo sapien
tgtcatacgtgtagccatctgacca

SEQ ID NO: 2664166 - DNA, 25 bp, Homo sapien
tggatagtccagcatgaaagatggc

SEQ ID NO: 2664167 - DNA, 25 bp, Homo sapien
gacatatcatatgagcactttggtg

SEQ ID NO: 2664168 - DNA, 25 bp, Homo sapien
aacgtggccggtgtgtttgtcctga

SEQ ID NO: 2664169 - DNA, 25 bp, Homo sapien
acacatgcatgctcagccgtacacg

SEQ ID NO: 2664170 - DNA, 25 bp, Homo sapien
tacacgcacgcgttccttgctactg

SEQ ID NO: 2664171 - DNA, 25 bp, Homo sapien
tgtgttccttgtcacatagcgcgcg

SEQ ID NO: 2664172 - DNA, 25 bp, Homo sapien
acagcgcgcacacggcagcgacggt

SEQ ID NO: 2664173 - DNA, 25 bp, Homo sapien
gggtaagccacagcgcgcacacggc

SEQ ID NO: 2664174 - DNA, 25 bp, Homo sapien
acacggcagcgacggtgacggttca

SEQ ID NO: 2664175 - DNA, 25 bp, Homo sapien
gtgacggttcacacgctttgggtta

SEQ ID NO: 2664176 - DNA, 25 bp, Homo sapien
gaggacatggttggacaactgccga

SEQ ID NO: 2664177 - DNA, 25 bp, Homo sapien
gccgagtcgttaaggcaagccttaa

SEQ ID NO: 2664178 - DNA, 25 bp, Homo sapien
tggacaactgccgagtcgttaaggc

SEQ ID NO: 2664179 - DNA, 25 bp, Homo sapien
atttttaccgtgaggtagccaacat

SEQ ID NO: 2664180 - DNA, 25 bp, Homo sapien
ctggtaaaatccgaagaggggagat

SEQ ID NO: 2664181 - DNA, 25 bp, Homo sapien
taaaatccgaagaggggagattcaa

SEQ ID NO: 2664182 - DNA, 25 bp, Homo sapien
ttcacgtgccatgggcggcggtggg

SEQ ID NO: 2664183 - DNA, 25 bp, Homo sapien
gagattcaaccggggttccatatgg

SEQ ID NO: 2664184 - DNA, 25 bp, Homo sapien
aacatgggccccgacggaagcggct

SEQ ID NO: 2664185 - DNA, 25 bp, Homo sapien
tctgttggggcgaaacatgggcccc

SEQ ID NO: 2664186 - DNA, 25 bp, Homo sapien
ggcttctctcgtggctcccaactct

SEQ ID NO: 2664187 - DNA, 25 bp, Homo sapien
ggaagcggctccgagccggcttctc

SEQ ID NO: 2664188 - DNA, 25 bp, Homo sapien
ggctaccaccgtagcgacactgccg

SEQ ID NO: 2664189 - DNA, 25 bp, Homo sapien
cgacactgccggcctaaggaagtac

SEQ ID NO: 2664190 - DNA, 25 bp, Homo sapien
accgtagcgacactgccggcctaag

SEQ ID NO: 2664191 - DNA, 25 bp, Homo sapien
ctggctaccaccgtagcgacactgc

SEQ ID NO: 2664192 - DNA, 25 bp, Homo sapien
gagagagggccgctctacccgcccc

SEQ ID NO: 2664193 - DNA, 25 bp, Homo sapien
gcaggttcgcagacccaccggagct

SEQ ID NO: 2664194 - DNA, 25 bp, Homo sapien
gcgccactcagccttccgctcccgg

SEQ ID NO: 2664195 - DNA, 25 bp, Homo sapien
ttccgctcccggcaggttcgcagac

SEQ ID NO: 2664196 - DNA, 25 bp, Homo sapien
ttctccagggcggacgagtcctaga

SEQ ID NO: 2664197 - DNA, 25 bp, Homo sapien
tgcatctgagggtttatccggttcc

SEQ ID NO: 2664198 - DNA, 25 bp, Homo sapien
agagcagtccgcagagccttcggtg

SEQ ID NO: 2664199 - DNA, 25 bp, Homo sapien
gggtctccagaaagcgtggctttgt

SEQ ID NO: 2664200 - DNA, 25 bp, Homo sapien
tgaactgggaaaggcggtgaagagg

SEQ ID NO: 2664201 - DNA, 25 bp, Homo sapien
tgggaaaggcggtgaagaggcctgg

SEQ ID NO: 2664202 - DNA, 25 bp, Homo sapien
tcagtgctgaactgggaaaggcggt

SEQ ID NO: 2664203 - DNA, 25 bp, Homo sapien
gtgctgaactgggaaaggcggtgaa

SEQ ID NO: 2664204 - DNA, 25 bp, Homo sapien
aatttgcctttatttcaggagtaat

SEQ ID NO: 2664205 - DNA, 25 bp, Homo sapien
atatcaccagtagcccaaatttgcc

SEQ ID NO: 2664206 - DNA, 25 bp, Homo sapien
atttcactccctggcggcagtctca

SEQ ID NO: 2664207 - DNA, 25 bp, Homo sapien
agtctcagggcgcactaaaggtgcc

SEQ ID NO: 2664208 - DNA, 25 bp, Homo sapien
cgataccccagtgtttcgaggaaag

SEQ ID NO: 2664209 - DNA, 25 bp, Homo sapien
gaatgaaattagctccgatacccca

SEQ ID NO: 2664210 - DNA, 25 bp, Homo sapien
tcagccaggtttcttaggcccaagt

SEQ ID NO: 2664211 - DNA, 25 bp, Homo sapien
gtataagaatcacactcagccaggt

SEQ ID NO: 2664212 - DNA, 25 bp, Homo sapien
tctctaacaacgcccgcactacctt

SEQ ID NO: 2664213 - DNA, 25 bp, Homo sapien
ctccttctctaacaacgcccgcact

SEQ ID NO: 2664214 - DNA, 25 bp, Homo sapien
cttctctaacaacgcccgcactacc

SEQ ID NO: 2664215 - DNA, 25 bp, Homo sapien
tccttctctaacaacgcccgcacta

SEQ ID NO: 2664216 - DNA, 25 bp, Homo sapien
caatttattcctcgccgtcccatcc

SEQ ID NO: 2664217 - DNA, 25 bp, Homo sapien
gcgtcgcaccgcagctgggtgggga

SEQ ID NO: 2664218 - DNA, 25 bp, Homo sapien
gagcaatttattcctcgccgtccca

SEQ ID NO: 2664219 - DNA, 25 bp, Homo sapien
atttattcctcgccgtcccatccca

SEQ ID NO: 2664220 - DNA, 25 bp, Homo sapien
cagttgaaatgatccggtgaacccc

SEQ ID NO: 2664221 - DNA, 25 bp, Homo sapien
tccaatgtgaacagagacgcagggt

SEQ ID NO: 2664222 - DNA, 25 bp, Homo sapien
cgggctcccgggcataaaatcaaag

SEQ ID NO: 2664223 - DNA, 25 bp, Homo sapien
tggagctcttagacagcgacgcttg

SEQ ID NO: 2664224 - DNA, 25 bp, Homo sapien
taatgtcgcacaggtcagcaaggaa

SEQ ID NO: 2664225 - DNA, 25 bp, Homo sapien
tgtagcgatccaccgagaacgaact

SEQ ID NO: 2664226 - DNA, 25 bp, Homo sapien
ttaatacagtgcgtaaccggctcgt

SEQ ID NO: 2664227 - DNA, 25 bp, Homo sapien
gagtctcaaacagggcgaattcatg

SEQ ID NO: 2664228 - DNA, 25 bp, Homo sapien
agcccccacacgcagccgtctgttc

SEQ ID NO: 2664229 - DNA, 25 bp, Homo sapien
ctgggtagggaccagcccccacacg

SEQ ID NO: 2664230 - DNA, 25 bp, Homo sapien
gaccagcccccacacgcagccgtct

SEQ ID NO: 2664231 - DNA, 25 bp, Homo sapien
gggtagggaccagcccccacacgca

SEQ ID NO: 2664232 - DNA, 25 bp, Homo sapien
gagtttcttcgtgaattccatttgc

SEQ ID NO: 2664233 - DNA, 25 bp, Homo sapien
tgccagctgaagatcctgtactgat

SEQ ID NO: 2664234 - DNA, 25 bp, Homo sapien
ttccaaacgcacatgagtttcttcg

SEQ ID NO: 2664235 - DNA, 25 bp, Homo sapien
gatctcgtctgccagctgaagatcc

SEQ ID NO: 2664236 - DNA, 25 bp, Homo sapien
gcctccgccaagcagttctctaaaa

SEQ ID NO: 2664237 - DNA, 25 bp, Homo sapien
ccgaaccccttctaagctgcaagac

SEQ ID NO: 2664238 - DNA, 25 bp, Homo sapien
cccttctaagctgcaagaccacggg

SEQ ID NO: 2664239 - DNA, 25 bp, Homo sapien
gccaagcagttctctaaaaattagc

SEQ ID NO: 2664240 - DNA, 25 bp, Homo sapien
tcgccttcggcttgggcgctactga

SEQ ID NO: 2664241 - DNA, 25 bp, Homo sapien
cagaacctgatctagctccagggca

SEQ ID NO: 2664242 - DNA, 25 bp, Homo sapien
ttgggcgctactgagccggcgttcc

SEQ ID NO: 2664243 - DNA, 25 bp, Homo sapien
gcgttccaggttggagcagtcgcca

SEQ ID NO: 2664244 - DNA, 25 bp, Homo sapien
tggtgacggggtcggagggggcatc

SEQ ID NO: 2664245 - DNA, 25 bp, Homo sapien
ctggtgacggggtcggagggggcat

SEQ ID NO: 2664246 - DNA, 25 bp, Homo sapien
aggtccgcatcaatagcacccaggg

SEQ ID NO: 2664247 - DNA, 25 bp, Homo sapien
ggagtgagagcttccggcagccccg

SEQ ID NO: 2664248 - DNA, 25 bp, Homo sapien
ggcagccccgcggcagatgagtcct

SEQ ID NO: 2664249 - DNA, 25 bp, Homo sapien
gggctggcgggagtgagagcttccg

SEQ ID NO: 2664250 - DNA, 25 bp, Homo sapien
gccttcaggcgaaagcagcagccgg

SEQ ID NO: 2664251 - DNA, 25 bp, Homo sapien
aataaagccattgtccgccttcagg

SEQ ID NO: 2664252 - DNA, 25 bp, Homo sapien
taatgatggccgattaataaagcca

SEQ ID NO: 2664253 - DNA, 25 bp, Homo sapien
ttatgggccgcgtccacgtgttagg

SEQ ID NO: 2664254 - DNA, 25 bp, Homo sapien
tggtgcggaccccaaagatcgggac

SEQ ID NO: 2664255 - DNA, 25 bp, Homo sapien
tgggatcattggtgcggaccccaaa

SEQ ID NO: 2664256 - DNA, 25 bp, Homo sapien
tttcatgggatcattggtgcggacc

SEQ ID NO: 2664257 - DNA, 25 bp, Homo sapien
tgtttttcatgggatcattggtgcg

SEQ ID NO: 2664258 - DNA, 25 bp, Homo sapien
ggggaagaggggcgcaggtccacac

SEQ ID NO: 2664259 - DNA, 25 bp, Homo sapien
tacggggaagaggggcgcaggtcca

SEQ ID NO: 2664260 - DNA, 25 bp, Homo sapien
ggaagaggggcgcaggtccacaccg

SEQ ID NO: 2664261 - DNA, 25 bp, Homo sapien
aagaggggcgcaggtccacaccgtc

SEQ ID NO: 2664262 - DNA, 25 bp, Homo sapien
cgagcgagtttctccaacacggtcg

SEQ ID NO: 2664263 - DNA, 25 bp, Homo sapien
agcacactggtcctccgagcgagtt

SEQ ID NO: 2664264 - DNA, 25 bp, Homo sapien
gggcaaggtatagtgcaatcacgct

SEQ ID NO: 2664265 - DNA, 25 bp, Homo sapien
agataacattctctgcgagcgcagg

SEQ ID NO: 2664266 - DNA, 25 bp, Homo sapien
tccaaacttcatactgtccaccagg

SEQ ID NO: 2664267 - DNA, 25 bp, Homo sapien
gctgtccctcactaacgcggtggtc

SEQ ID NO: 2664268 - DNA, 25 bp, Homo sapien
tactgtccaccaggggagactgccc

SEQ ID NO: 2664269 - DNA, 25 bp, Homo sapien
ccgactcggctgtccctcactaacg

SEQ ID NO: 2664270 - DNA, 25 bp, Homo sapien
gacctctgctaactcccaggccatt

SEQ ID NO: 2664271 - DNA, 25 bp, Homo sapien
aggccatttcagaaggcgcaaaggg

SEQ ID NO: 2664272 - DNA, 25 bp, Homo sapien
agcagcttcccgacctctgctaact

SEQ ID NO: 2664273 - DNA, 25 bp, Homo sapien
agagcaaacgttgctctctagcctc

SEQ ID NO: 2664274 - DNA, 25 bp, Homo sapien
gaatgcgacatcaagggtaaactag

SEQ ID NO: 2664275 - DNA, 25 bp, Homo sapien
agttcatgccgtttgattcccaaga

SEQ ID NO: 2664276 - DNA, 25 bp, Homo sapien
gaaggctccattcccgaagactgag

SEQ ID NO: 2664277 - DNA, 25 bp, Homo sapien
aagacttctccaagccgcactgtag

SEQ ID NO: 2664278 - DNA, 25 bp, Homo sapien
gcatcctaagcgtgtctttgaaccg

SEQ ID NO: 2664279 - DNA, 25 bp, Homo sapien
gaaccgcactgtggagtttcactcc

SEQ ID NO: 2664280 - DNA, 25 bp, Homo sapien
gaaagtccttcttacagagcaactc

SEQ ID NO: 2664281 - DNA, 25 bp, Homo sapien
tggagtttcactccgaaagtccttc

SEQ ID NO: 2664282 - DNA, 25 bp, Homo sapien
tactcgtccacgcttacagggtggg

SEQ ID NO: 2664283 - DNA, 25 bp, Homo sapien
ggaattccagtccaagctcagtcct

SEQ ID NO: 2664284 - DNA, 25 bp, Homo sapien
ctcacaagccctcgtctgttccagg

SEQ ID NO: 2664285 - DNA, 25 bp, Homo sapien
cccagatgcccttgtcgggaagagt

SEQ ID NO: 2664286 - DNA, 25 bp, Homo sapien
taatgggcaaccaagtaccataggt

SEQ ID NO: 2664287 - DNA, 25 bp, Homo sapien
tcacttgaaaactcggctgacctct

SEQ ID NO: 2664288 - DNA, 25 bp, Homo sapien
taccataggttgaagggctactctt

SEQ ID NO: 2664289 - DNA, 25 bp, Homo sapien
tactcttcagcagttatagcctcac

SEQ ID NO: 2664290 - DNA, 25 bp, Homo sapien
tatgttggcatgattggtctattac

SEQ ID NO: 2664291 - DNA, 25 bp, Homo sapien
tctagatcagaactaacaagatgaa

SEQ ID NO: 2664292 - DNA, 25 bp, Homo sapien
tgtgttccacaattctaatctcaga

SEQ ID NO: 2664293 - DNA, 25 bp, Homo sapien
caaccttcaaggagctaactctttt

SEQ ID NO: 2664294 - DNA, 25 bp, Homo sapien
cagaaacggggtttcgccatgttgc

SEQ ID NO: 2664295 - DNA, 25 bp, Homo sapien
gctaatttttgagttttagcagaaa

SEQ ID NO: 2664296 - DNA, 25 bp, Homo sapien
tgacctcaagcgatccacatgcttc

SEQ ID NO: 2664297 - DNA, 25 bp, Homo sapien
cctcaagcgatccacatgcttcggc

SEQ ID NO: 2664298 - DNA, 25 bp, Homo sapien
cattttgtagactctgagaatagaa

SEQ ID NO: 2664299 - DNA, 25 bp, Homo sapien
ttttgtagactctgagaatagaaga

SEQ ID NO: 2664300 - DNA, 25 bp, Homo sapien
tttgtagactctgagaatagaagag

SEQ ID NO: 2664301 - DNA, 25 bp, Homo sapien
attttgtagactctgagaatagaag

SEQ ID NO: 2664302 - DNA, 25 bp, Homo sapien
tccataacaatcagctgaaattgca

SEQ ID NO: 2664303 - DNA, 25 bp, Homo sapien
ccataacaatcagctgaaattgcat

SEQ ID NO: 2664304 - DNA, 25 bp, Homo sapien
tgtgtccataacaatcagctgaaat

SEQ ID NO: 2664305 - DNA, 25 bp, Homo sapien
tgtccataacaatcagctgaaattg

SEQ ID NO: 2664306 - DNA, 25 bp, Homo sapien
tccaccaagggagagccaatgcctg

SEQ ID NO: 2664307 - DNA, 25 bp, Homo sapien
caatgcctgggaggttgcaatggta

SEQ ID NO: 2664308 - DNA, 25 bp, Homo sapien
gccagaaatgtacgggccttggtag

SEQ ID NO: 2664309 - DNA, 25 bp, Homo sapien
agtttccttgacacgctccaccaag

SEQ ID NO: 2664310 - DNA, 25 bp, Homo sapien
ttcgagcaaagtagacctgggtcac

SEQ ID NO: 2664311 - DNA, 25 bp, Homo sapien
gacctgggtcactgtaggcatagga

SEQ ID NO: 2664312 - DNA, 25 bp, Homo sapien
cagtgttctcttcgagcaaagtaga

SEQ ID NO: 2664313 - DNA, 25 bp, Homo sapien
ggacttggattgcttcagatggttt

SEQ ID NO: 2664314 - DNA, 25 bp, Homo sapien
ggctgttgcctaagcatggcatact

SEQ ID NO: 2664315 - DNA, 25 bp, Homo sapien
gttctcatttgtgccatctgccgtg

SEQ ID NO: 2664316 - DNA, 25 bp, Homo sapien
ggcgttaatttcctgccactacaga

SEQ ID NO: 2664317 - DNA, 25 bp, Homo sapien
taaccaaagatgtggagcaatccaa

SEQ ID NO: 2664318 - DNA, 25 bp, Homo sapien
gaacaatcccggtgtgtcaggaccc

SEQ ID NO: 2664319 - DNA, 25 bp, Homo sapien
gcagaagccaagagaccttattaac

SEQ ID NO: 2664320 - DNA, 25 bp, Homo sapien
ccctttaataagtgagtgccataag

SEQ ID NO: 2664321 - DNA, 25 bp, Homo sapien
aaatgtcacttctgcataaagcatg

SEQ ID NO: 2664322 - DNA, 25 bp, Homo sapien
gcaaatatggccctagaaacaagtg

SEQ ID NO: 2664323 - DNA, 25 bp, Homo sapien
gtaagtgcatatcctaacttgccca

SEQ ID NO: 2664324 - DNA, 25 bp, Homo sapien
taaatcatctggttggttttcagcc

SEQ ID NO: 2664325 - DNA, 25 bp, Homo sapien
gaaatatgcccagaatagaaaagct

SEQ ID NO: 2664326 - DNA, 25 bp, Homo sapien
taaggtcagctgtcaaaaggataac

SEQ ID NO: 2664327 - DNA, 25 bp, Homo sapien
gcttgtgtatagctttctaatatat

SEQ ID NO: 2664328 - DNA, 25 bp, Homo sapien
ggtaatagcagaagttttgttatct

SEQ ID NO: 2664329 - DNA, 25 bp, Homo sapien
tgtgcagttgcacatttgagtaact

SEQ ID NO: 2664330 - DNA, 25 bp, Homo sapien
caaacctgcaggcatatcattggcg

SEQ ID NO: 2664331 - DNA, 25 bp, Homo sapien
ggtcacctgacatcccaagaatgct

SEQ ID NO: 2664332 - DNA, 25 bp, Homo sapien
tgtatagatgcttggacagacccgg

SEQ ID NO: 2664333 - DNA, 25 bp, Homo sapien
gatcagagaccattaaaagaggacc

SEQ ID NO: 2664334 - DNA, 25 bp, Homo sapien
attggactcaccagaccttcgccgg

SEQ ID NO: 2664335 - DNA, 25 bp, Homo sapien
gaggatcaccggaacgaattccact

SEQ ID NO: 2664336 - DNA, 25 bp, Homo sapien
tagcagttcgtacgacgggagcgac

SEQ ID NO: 2664337 - DNA, 25 bp, Homo sapien
gggaaagtccctcagtcaagcgcat

SEQ ID NO: 2664338 - DNA, 25 bp, Homo sapien
tagctccaaatataaacaggtgttt

SEQ ID NO: 2664339 - DNA, 25 bp, Homo sapien
tagtgaaatggtctttcttagagcc

SEQ ID NO: 2664340 - DNA, 25 bp, Homo sapien
tagttgtgtgattcatagcagaagc

SEQ ID NO: 2664341 - DNA, 25 bp, Homo sapien
ttgaaatacaggtgttccctctccc

SEQ ID NO: 2664342 - DNA, 25 bp, Homo sapien
gaagtgtcatcatggttcaaaatat

SEQ ID NO: 2664343 - DNA, 25 bp, Homo sapien
tattatacggctccaaaatgctagc

SEQ ID NO: 2664344 - DNA, 25 bp, Homo sapien
gctagctggcacaatatgctaaaaa

SEQ ID NO: 2664345 - DNA, 25 bp, Homo sapien
ggtttaggatccacagtcttgcatt

SEQ ID NO: 2664346 - DNA, 25 bp, Homo sapien
aggcaccagtgcaggtaagcccaga

SEQ ID NO: 2664347 - DNA, 25 bp, Homo sapien
tgttctgtgggcctttagcctttct

SEQ ID NO: 2664348 - DNA, 25 bp, Homo sapien
ggagacctcacgtctggtgcaggca

SEQ ID NO: 2664349 - DNA, 25 bp, Homo sapien
agaggacaaaatactgaggttgctg

SEQ ID NO: 2664350 - DNA, 25 bp, Homo sapien
ctttttcacactctgaagattttca

SEQ ID NO: 2664351 - DNA, 25 bp, Homo sapien
ctttgtaatggatgcagaccacaag

SEQ ID NO: 2664352 - DNA, 25 bp, Homo sapien
tggatgcagaccacaagtgattcct

SEQ ID NO: 2664353 - DNA, 25 bp, Homo sapien
gatgcagaccacaagtgattccttt

SEQ ID NO: 2664354 - DNA, 25 bp, Homo sapien
tgtaatggatgcagaccacaagtga

SEQ ID NO: 2664355 - DNA, 25 bp, Homo sapien
ttttgtcgtcttgcatgttggcccc

SEQ ID NO: 2664356 - DNA, 25 bp, Homo sapien
tatctgtgtacatcgactcttctgg

SEQ ID NO: 2664357 - DNA, 25 bp, Homo sapien
taaatcattgctagaagaatcaagg

SEQ ID NO: 2664358 - DNA, 25 bp, Homo sapien
gacgataattgatggaaagaggctt

SEQ ID NO: 2664359 - DNA, 25 bp, Homo sapien
tgagcattgttatgttcagttcctg

SEQ ID NO: 2664360 - DNA, 25 bp, Homo sapien
gttcctgtaatgctgctggtgataa

SEQ ID NO: 2664361 - DNA, 25 bp, Homo sapien
cctgtaatgctgctggtgataagac

SEQ ID NO: 2664362 - DNA, 25 bp, Homo sapien
catagggttatacgagtctgagcat

SEQ ID NO: 2664363 - DNA, 25 bp, Homo sapien
aagtcaaatactgaatagaccaata

SEQ ID NO: 2664364 - DNA, 25 bp, Homo sapien
gaagaagtcaaatactgaatagacc

SEQ ID NO: 2664365 - DNA, 25 bp, Homo sapien
taggctaccaaccaaaagaagtcca

SEQ ID NO: 2664366 - DNA, 25 bp, Homo sapien
aggaagaagtcaaatactgaataga

SEQ ID NO: 2664367 - DNA, 25 bp, Homo sapien
tgtgtagaggcacccgtaacctggg

SEQ ID NO: 2664368 - DNA, 25 bp, Homo sapien
gactgtccagtagaacctcatgcaa

SEQ ID NO: 2664369 - DNA, 25 bp, Homo sapien
tgaagctgccccactgtagactgtc

SEQ ID NO: 2664370 - DNA, 25 bp, Homo sapien
tcataatggaagtagggaacagctc

SEQ ID NO: 2664371 - DNA, 25 bp, Homo sapien
tatccttccctgaccagtctgtgtg

SEQ ID NO: 2664372 - DNA, 25 bp, Homo sapien
tacaccttttattgttcgtggttgc

SEQ ID NO: 2664373 - DNA, 25 bp, Homo sapien
gtggttgctgacatcatatccttcc

SEQ ID NO: 2664374 - DNA, 25 bp, Homo sapien
accagtctgtgtgcgtgtttcctgc

SEQ ID NO: 2664375 - DNA, 25 bp, Homo sapien
tttgatgaggttcaattgcaatcat

SEQ ID NO: 2664376 - DNA, 25 bp, Homo sapien
gtagcaggaactattttaacataat

SEQ ID NO: 2664377 - DNA, 25 bp, Homo sapien
ttaacataatggcattacggggcca

SEQ ID NO: 2664378 - DNA, 25 bp, Homo sapien
cagtgcccggccctaagatcatttc

SEQ ID NO: 2664379 - DNA, 25 bp, Homo sapien
cattacggggccataggctgttagt

SEQ ID NO: 2664380 - DNA, 25 bp, Homo sapien
tagaacccacgcttaatttcaagga

SEQ ID NO: 2664381 - DNA, 25 bp, Homo sapien
ctctccagtccagacatttcactgt

SEQ ID NO: 2664382 - DNA, 25 bp, Homo sapien
tcactgttccagaatagaacccacg

SEQ ID NO: 2664383 - DNA, 25 bp, Homo sapien
gcatcatcacgtgccctctccagtc

SEQ ID NO: 2664384 - DNA, 25 bp, Homo sapien
gttgcttctacgtcatatttcaatg

SEQ ID NO: 2664385 - DNA, 25 bp, Homo sapien
gttgacaacagcaattataggcacc

SEQ ID NO: 2664386 - DNA, 25 bp, Homo sapien
tataggcaccattgacacgggagga

SEQ ID NO: 2664387 - DNA, 25 bp, Homo sapien
gacagttgcagttaagcgttcgtta

SEQ ID NO: 2664388 - DNA, 25 bp, Homo sapien
gccaatatgtctacactctcacatt

SEQ ID NO: 2664389 - DNA, 25 bp, Homo sapien
aaaagccaatatgtctacactctca

SEQ ID NO: 2664390 - DNA, 25 bp, Homo sapien
tattcaaaagccaatatgtctacac

SEQ ID NO: 2664391 - DNA, 25 bp, Homo sapien
tcaaaagccaatatgtctacactct

SEQ ID NO: 2664392 - DNA, 25 bp, Homo sapien
gcatttgtgatccaagtcattacca

SEQ ID NO: 2664393 - DNA, 25 bp, Homo sapien
tagattggtgtctgatgttgtatcc

SEQ ID NO: 2664394 - DNA, 25 bp, Homo sapien
tatgcccaatcgctagttgtaagca

SEQ ID NO: 2664395 - DNA, 25 bp, Homo sapien
gcatagttgtaagcgtgctgaatga

SEQ ID NO: 2664396 - DNA, 25 bp, Homo sapien
actggatttgctaatttctggaagt

SEQ ID NO: 2664397 - DNA, 25 bp, Homo sapien
gaagtttctgcatttcgaaatattg

SEQ ID NO: 2664398 - DNA, 25 bp, Homo sapien
cgaaatattgattaacgatagataa

SEQ ID NO: 2664399 - DNA, 25 bp, Homo sapien
gatttgctaatttctggaagtttct

SEQ ID NO: 2664400 - DNA, 25 bp, Homo sapien
tgtgaaacatagggtttcacaggca

SEQ ID NO: 2664401 - DNA, 25 bp, Homo sapien
ctgtgaaacatagggtttcacaggc

SEQ ID NO: 2664402 - DNA, 25 bp, Homo sapien
gtgaaacatagggtttcacaggcat

SEQ ID NO: 2664403 - DNA, 25 bp, Homo sapien
ccagtttctaaattatcggcatttc

SEQ ID NO: 2664404 - DNA, 25 bp, Homo sapien
ccagaggccaacagttgttaaattc

SEQ ID NO: 2664405 - DNA, 25 bp, Homo sapien
agtttgggtattagccagaggccaa

SEQ ID NO: 2664406 - DNA, 25 bp, Homo sapien
tctgtgagaccagccgcatcattcc

SEQ ID NO: 2664407 - DNA, 25 bp, Homo sapien
gctttatgcaatattaagtcccatt

SEQ ID NO: 2664408 - DNA, 25 bp, Homo sapien
agtcccattggtaacactcagtgtt

SEQ ID NO: 2664409 - DNA, 25 bp, Homo sapien
gcaatattaagtcccattggtaaca

SEQ ID NO: 2664410 - DNA, 25 bp, Homo sapien
taagtcccattggtaacactcagtg

SEQ ID NO: 2664411 - DNA, 25 bp, Homo sapien
tcataaaagtattgccgtactgctg

SEQ ID NO: 2664412 - DNA, 25 bp, Homo sapien
cataaaagtattgccgtactgctga

SEQ ID NO: 2664413 - DNA, 25 bp, Homo sapien
gcatcgacatatgttgaccagttgg

SEQ ID NO: 2664414 - DNA, 25 bp, Homo sapien
gaaatccatcaaagagtctcgctgc

SEQ ID NO: 2664415 - DNA, 25 bp, Homo sapien
cacgcgtaatgataggttggactgc

SEQ ID NO: 2664416 - DNA, 25 bp, Homo sapien
tggtggttgaaagtaggactgatct

SEQ ID NO: 2664417 - DNA, 25 bp, Homo sapien
gagggcttattcattatgaccacag

SEQ ID NO: 2664418 - DNA, 25 bp, Homo sapien
tgaccacagcttatcaactttgaga

SEQ ID NO: 2664419 - DNA, 25 bp, Homo sapien
caggtaatattgatgagacatgccc

SEQ ID NO: 2664420 - DNA, 25 bp, Homo sapien
caagaactcttgcatataataggta

SEQ ID NO: 2664421 - DNA, 25 bp, Homo sapien
gagaaactgatgtggttcatcacag

SEQ ID NO: 2664422 - DNA, 25 bp, Homo sapien
agaaactgatgtggttcatcacagc

SEQ ID NO: 2664423 - DNA, 25 bp, Homo sapien
gaagttcacttagactctatatagg

SEQ ID NO: 2664424 - DNA, 25 bp, Homo sapien
gactctattagaggttcgcctagta

SEQ ID NO: 2664425 - DNA, 25 bp, Homo sapien
cgcctagtaagtaattctctggtca

SEQ ID NO: 2664426 - DNA, 25 bp, Homo sapien
catccatatttgaggagccttatta

SEQ ID NO: 2664427 - DNA, 25 bp, Homo sapien
tataggcgcgtggactgtcttgcac

SEQ ID NO: 2664428 - DNA, 25 bp, Homo sapien
tccatcagtatgctgcatgtggaaa

SEQ ID NO: 2664429 - DNA, 25 bp, Homo sapien
ttaagatccccgtccttagcactgt

SEQ ID NO: 2664430 - DNA, 25 bp, Homo sapien
taaagcttgactgttcaccgagatc

SEQ ID NO: 2664431 - DNA, 25 bp, Homo sapien
tgaatcaggtggagaagcacttcaa

SEQ ID NO: 2664432 - DNA, 25 bp, Homo sapien
gtttgaatcaggtggagaagcactt

SEQ ID NO: 2664433 - DNA, 25 bp, Homo sapien
tttgaatcaggtggagaagcacttc

SEQ ID NO: 2664434 - DNA, 25 bp, Homo sapien
aatcaggtggagaagcacttcaacg

SEQ ID NO: 2664435 - DNA, 25 bp, Homo sapien
cgggctgctattggattgactttga

SEQ ID NO: 2664436 - DNA, 25 bp, Homo sapien
gacatcttcgggctgctattggatt

SEQ ID NO: 2664437 - DNA, 25 bp, Homo sapien
ttctgtgtgggtcgccgtggctgca

SEQ ID NO: 2664438 - DNA, 25 bp, Homo sapien
gctattggattgactttgaaggttc

SEQ ID NO: 2664439 - DNA, 25 bp, Homo sapien
tcacagacacttgagcacacgcgta

SEQ ID NO: 2664440 - DNA, 25 bp, Homo sapien
gcagtcacagacacttgagcacacg

SEQ ID NO: 2664441 - DNA, 25 bp, Homo sapien
tgctcgctctgctcgcagtcacaga

SEQ ID NO: 2664442 - DNA, 25 bp, Homo sapien
agtcacagacacttgagcacacgcg

SEQ ID NO: 2664443 - DNA, 25 bp, Homo sapien
caaacgctgtgagctgttctccttt

SEQ ID NO: 2664444 - DNA, 25 bp, Homo sapien
gcgatgtttcaaacgctgtgagctg

SEQ ID NO: 2664445 - DNA, 25 bp, Homo sapien
tctggacgagtctggttacttttaa

SEQ ID NO: 2664446 - DNA, 25 bp, Homo sapien
tttcccattcgtcttctgtcacttc

SEQ ID NO: 2664447 - DNA, 25 bp, Homo sapien
gccgcagcgggagactaggttctct

SEQ ID NO: 2664448 - DNA, 25 bp, Homo sapien
tattggtcagaggaaagatcccgac

SEQ ID NO: 2664449 - DNA, 25 bp, Homo sapien
gcaactattagggtcgcgctcctat

SEQ ID NO: 2664450 - DNA, 25 bp, Homo sapien
agggagccgcagctcgccgtgttgt

SEQ ID NO: 2664451 - DNA, 25 bp, Homo sapien
tacgcgtgagtaacggaggagcgca

SEQ ID NO: 2664452 - DNA, 25 bp, Homo sapien
ttacgcgtgagtaacggaggagcgc

SEQ ID NO: 2664453 - DNA, 25 bp, Homo sapien
acgcgtgagtaacggaggagcgcac

SEQ ID NO: 2664454 - DNA, 25 bp, Homo sapien
gctggaatcgagtgctgcagacatc

SEQ ID NO: 2664455 - DNA, 25 bp, Homo sapien
ctggaatcgagtgctgcagacatcc

SEQ ID NO: 2664456 - DNA, 25 bp, Homo sapien
tgaagtcatcagctatcggctaggg

SEQ ID NO: 2664457 - DNA, 25 bp, Homo sapien
ctagggtagcctaatgcatttggga

SEQ ID NO: 2664458 - DNA, 25 bp, Homo sapien
gaagtccagtaaggtgtggaaaaga

SEQ ID NO: 2664459 - DNA, 25 bp, Homo sapien
catgttaatgacctggatgaagtcc

SEQ ID NO: 2664460 - DNA, 25 bp, Homo sapien
ggtttttgctttgtgacagtttgtg

SEQ ID NO: 2664461 - DNA, 25 bp, Homo sapien
gctttgtgacagtttgtgatgcatt

SEQ ID NO: 2664462 - DNA, 25 bp, Homo sapien
tcagatggtttttgctttgtgacag

SEQ ID NO: 2664463 - DNA, 25 bp, Homo sapien
tttgctttgtgacagtttgtgatgc

SEQ ID NO: 2664464 - DNA, 25 bp, Homo sapien
cttcagctccgtcggccgggagaaa

SEQ ID NO: 2664465 - DNA, 25 bp, Homo sapien
gagctctagaaacactccaaggaag

SEQ ID NO: 2664466 - DNA, 25 bp, Homo sapien
agcagcctccgagctctagaaacac

SEQ ID NO: 2664467 - DNA, 25 bp, Homo sapien
tctagaaacactccaaggaaggaac

SEQ ID NO: 2664468 - DNA, 25 bp, Homo sapien
tgagcccatcccgagctcttttgga

SEQ ID NO: 2664469 - DNA, 25 bp, Homo sapien
ttttggatcgcatttctccagccca

SEQ ID NO: 2664470 - DNA, 25 bp, Homo sapien
cctggtattttcgtgggtcgctctg

SEQ ID NO: 2664471 - DNA, 25 bp, Homo sapien
aaaccagaccagcaggacaactacc

SEQ ID NO: 2664472 - DNA, 25 bp, Homo sapien
ggagacaatctgagcggactctgac

SEQ ID NO: 2664473 - DNA, 25 bp, Homo sapien
aggcttttgcccaacccagttgcca

SEQ ID NO: 2664474 - DNA, 25 bp, Homo sapien
tgaacagaacgctccattaggcatt

SEQ ID NO: 2664475 - DNA, 25 bp, Homo sapien
cagacacttggaatgacatcaggag

SEQ ID NO: 2664476 - DNA, 25 bp, Homo sapien
tcaagaaatggtacagtcccctaac

SEQ ID NO: 2664477 - DNA, 25 bp, Homo sapien
tatgcttcccctcaccttaagagag

SEQ ID NO: 2664478 - DNA, 25 bp, Homo sapien
tcctgagattgcagctaagtgggcc

SEQ ID NO: 2664479 - DNA, 25 bp, Homo sapien
caggttttgcagaggtatcaggacc

SEQ ID NO: 2664480 - DNA, 25 bp, Homo sapien
tggattttaacatgcacctgggtga

SEQ ID NO: 2664481 - DNA, 25 bp, Homo sapien
agggtttggacaacaaagccctcag

SEQ ID NO: 2664482 - DNA, 25 bp, Homo sapien
acgatcaagggggcaaagcctcggt

SEQ ID NO: 2664483 - DNA, 25 bp, Homo sapien
gcttgacgatcaagggggcaaagcc

SEQ ID NO: 2664484 - DNA, 25 bp, Homo sapien
ttgacgatcaagggggcaaagcctc

SEQ ID NO: 2664485 - DNA, 25 bp, Homo sapien
ggcttgacgatcaagggggcaaagc

SEQ ID NO: 2664486 - DNA, 25 bp, Homo sapien
ctggatgatgccattcaggtctatg

SEQ ID NO: 2664487 - DNA, 25 bp, Homo sapien
tatgtttttatctgaaagtggtgcc

SEQ ID NO: 2664488 - DNA, 25 bp, Homo sapien
tcaggtctatgtttttatctgaaag

SEQ ID NO: 2664489 - DNA, 25 bp, Homo sapien
ggatgatgccattcaggtctatgtt

SEQ ID NO: 2664490 - DNA, 25 bp, Homo sapien
ctcacctgctcactcttcaagcaag

SEQ ID NO: 2664491 - DNA, 25 bp, Homo sapien
tcacctgctcactcttcaagcaagc

SEQ ID NO: 2664492 - DNA, 25 bp, Homo sapien
ctgcagaaggaacactcagtagctt

SEQ ID NO: 2664493 - DNA, 25 bp, Homo sapien
gaatcctattgtttcgctgcagaag

SEQ ID NO: 2664494 - DNA, 25 bp, Homo sapien
gcatgtgactgctatacttccaaca

SEQ ID NO: 2664495 - DNA, 25 bp, Homo sapien
ttgtccaaggttctgccaaaggaag

SEQ ID NO: 2664496 - DNA, 25 bp, Homo sapien
tatatcgatcacctgttgatataat

SEQ ID NO: 2664497 - DNA, 25 bp, Homo sapien
ccatagttttatatcgatcacctgt

SEQ ID NO: 2664498 - DNA, 25 bp, Homo sapien
tgtaaaatacgtccatagttttata

SEQ ID NO: 2664499 - DNA, 25 bp, Homo sapien
gtcaatcagttatgtcaggacactc

SEQ ID NO: 2664500 - DNA, 25 bp, Homo sapien
taagaacacccttgtctcagtccca

SEQ ID NO: 2664501 - DNA, 25 bp, Homo sapien
tcagacctcgtcatggaagatcata

SEQ ID NO: 2664502 - DNA, 25 bp, Homo sapien
gataattgactaaatcagtggctct

SEQ ID NO: 2664503 - DNA, 25 bp, Homo sapien
gcatacctcaacagaattgcctgca

SEQ ID NO: 2664504 - DNA, 25 bp, Homo sapien
aatggatgtgtgctctatgggttct

SEQ ID NO: 2664505 - DNA, 25 bp, Homo sapien
gcagtcagcaccctatacattaggg

SEQ ID NO: 2664506 - DNA, 25 bp, Homo sapien
gacaaagacgaacatgagacatgag

SEQ ID NO: 2664507 - DNA, 25 bp, Homo sapien
gacactactgcagagtaatgccaat

SEQ ID NO: 2664508 - DNA, 25 bp, Homo sapien
cagagtaatgccaatctcccgagcg

SEQ ID NO: 2664509 - DNA, 25 bp, Homo sapien
gaagaggcattaaatgactgcgggc

SEQ ID NO: 2664510 - DNA, 25 bp, Homo sapien
gactgcgggctgtgacactactgca

SEQ ID NO: 2664511 - DNA, 25 bp, Homo sapien
gactccgtgttattgcgcatttctg

SEQ ID NO: 2664512 - DNA, 25 bp, Homo sapien
taaagtgcacaacatgcgataatgc

SEQ ID NO: 2664513 - DNA, 25 bp, Homo sapien
tctccatgatgacaaaaggaagcca

SEQ ID NO: 2664514 - DNA, 25 bp, Homo sapien
taaagtgacacacttgaatgaactg

SEQ ID NO: 2664515 - DNA, 25 bp, Homo sapien
ttccagtggtgtgtctacataccag

SEQ ID NO: 2664516 - DNA, 25 bp, Homo sapien
gccctgctgattagagcatcaatac

SEQ ID NO: 2664517 - DNA, 25 bp, Homo sapien
tgtgtacagaacacatgggtcccag

SEQ ID NO: 2664518 - DNA, 25 bp, Homo sapien
taagaatcaggtactcgatgtcaga

SEQ ID NO: 2664519 - DNA, 25 bp, Homo sapien
caacattgacagtacagagtaaagc

SEQ ID NO: 2664520 - DNA, 25 bp, Homo sapien
aaacaactgtcaacgttgtcaagtt

SEQ ID NO: 2664521 - DNA, 25 bp, Homo sapien
tgtgcacaaggacatcaacattgac

SEQ ID NO: 2664522 - DNA, 25 bp, Homo sapien
ggaacctcttataatgtgatttgta

SEQ ID NO: 2664523 - DNA, 25 bp, Homo sapien
taggatggtatgtatttaacagaac

SEQ ID NO: 2664524 - DNA, 25 bp, Homo sapien
tatgtatttaacagaacagattcca

SEQ ID NO: 2664525 - DNA, 25 bp, Homo sapien
gatggtatgtatttaacagaacaga

SEQ ID NO: 2664526 - DNA, 25 bp, Homo sapien
aataggatggtatgtatttaacaga

SEQ ID NO: 2664527 - DNA, 25 bp, Homo sapien
acagcttttgcggtaatctttcctg

SEQ ID NO: 2664528 - DNA, 25 bp, Homo sapien
aagccattgtcagtctgggaatttc

SEQ ID NO: 2664529 - DNA, 25 bp, Homo sapien
aaattctacagcttttgcggtaatc

SEQ ID NO: 2664530 - DNA, 25 bp, Homo sapien
gcggtaatctttcctgttcctcgag

SEQ ID NO: 2664531 - DNA, 25 bp, Homo sapien
gctattcaggagaccgtaaacccag

SEQ ID NO: 2664532 - DNA, 25 bp, Homo sapien
tctatatttaatgacagggcctggg

SEQ ID NO: 2664533 - DNA, 25 bp, Homo sapien
tgccaggcacaacaacagaagaggt

SEQ ID NO: 2664534 - DNA, 25 bp, Homo sapien
taatcccctgatgaatgaagcactc

SEQ ID NO: 2664535 - DNA, 25 bp, Homo sapien
gtcacttttgcagaaaggacatgtc

SEQ ID NO: 2664536 - DNA, 25 bp, Homo sapien
tgcctttgctatggcttcaccatca

SEQ ID NO: 2664537 - DNA, 25 bp, Homo sapien
tgttgtcacttttgcagaaaggaca

SEQ ID NO: 2664538 - DNA, 25 bp, Homo sapien
tttgcagaaaggacatgtctctgcc

SEQ ID NO: 2664539 - DNA, 25 bp, Homo sapien
caaagattgttcagagggctgagtc

SEQ ID NO: 2664540 - DNA, 25 bp, Homo sapien
taaattactgcaaggccttacagga

SEQ ID NO: 2664541 - DNA, 25 bp, Homo sapien
tgtaatctacaagtcctgaccacct

SEQ ID NO: 2664542 - DNA, 25 bp, Homo sapien
gctagacttaactatcccacagtgt

SEQ ID NO: 2664543 - DNA, 25 bp, Homo sapien
ctgtgcctgtgtctaataacatttc

SEQ ID NO: 2664544 - DNA, 25 bp, Homo sapien
gcctgtgtctaataacatttcgcat

SEQ ID NO: 2664545 - DNA, 25 bp, Homo sapien
gtgcctgtgtctaataacatttcgc

SEQ ID NO: 2664546 - DNA, 25 bp, Homo sapien
tgtgtctaataacatttcgcattct

SEQ ID NO: 2664547 - DNA, 25 bp, Homo sapien
tgccctttaagttggttgctttctc

SEQ ID NO: 2664548 - DNA, 25 bp, Homo sapien
tttcagttccaagttctcagttaag

SEQ ID NO: 2664549 - DNA, 25 bp, Homo sapien
tgaatacccactgctgtgttacata

SEQ ID NO: 2664550 - DNA, 25 bp, Homo sapien
tacataaccatgtgtcttgtctgcc

SEQ ID NO: 2664551 - DNA, 25 bp, Homo sapien
tcacctcattaacgagatgtgcccc

SEQ ID NO: 2664552 - DNA, 25 bp, Homo sapien
gagaatggatgaggactgccttcag

SEQ ID NO: 2664553 - DNA, 25 bp, Homo sapien
ccccaggcatgcactttccaaataa

SEQ ID NO: 2664554 - DNA, 25 bp, Homo sapien
aatgtggtgaggctataagaagaac

SEQ ID NO: 2664555 - DNA, 25 bp, Homo sapien
caggggccactgactgacagtgtgt

SEQ ID NO: 2664556 - DNA, 25 bp, Homo sapien
gtcaggggccactgactgacagtgt

SEQ ID NO: 2664557 - DNA, 25 bp, Homo sapien
tcaggggccactgactgacagtgtg

SEQ ID NO: 2664558 - DNA, 25 bp, Homo sapien
gagtcaggggccactgactgacagt

SEQ ID NO: 2664559 - DNA, 25 bp, Homo sapien
tctgttgcagctcattagctggtta

SEQ ID NO: 2664560 - DNA, 25 bp, Homo sapien
acagccagaccacaattcctatgag

SEQ ID NO: 2664561 - DNA, 25 bp, Homo sapien
caattcctatgagggatgaacttaa

SEQ ID NO: 2664562 - DNA, 25 bp, Homo sapien
cagctcattagctggttacagacac

SEQ ID NO: 2664563 - DNA, 25 bp, Homo sapien
taaagccaccaagctacgatgtgca

SEQ ID NO: 2664564 - DNA, 25 bp, Homo sapien
gaaggtgagaatgagcagtccagtc

SEQ ID NO: 2664565 - DNA, 25 bp, Homo sapien
gagaagcaagacttccccaggtcct

SEQ ID NO: 2664566 - DNA, 25 bp, Homo sapien
tgttgcacaatctccaataccagag

SEQ ID NO: 2664567 - DNA, 25 bp, Homo sapien
tactgggcgacttcattaattaagg

SEQ ID NO: 2664568 - DNA, 25 bp, Homo sapien
taagggagccaaatagctgcttggg

SEQ ID NO: 2664569 - DNA, 25 bp, Homo sapien
cattaattaagggagccaaatagct

SEQ ID NO: 2664570 - DNA, 25 bp, Homo sapien
tgaattatccatactgggcgacttc

SEQ ID NO: 2664571 - DNA, 25 bp, Homo sapien
tcaggtgtagtaccattcacactag

SEQ ID NO: 2664572 - DNA, 25 bp, Homo sapien
gtagaatggaacttgacacctccac

SEQ ID NO: 2664573 - DNA, 25 bp, Homo sapien
tcctaaaggaaaagtacacgtgaga

SEQ ID NO: 2664574 - DNA, 25 bp, Homo sapien
gctgcttgtactgcaaaagcagaga

SEQ ID NO: 2664575 - DNA, 25 bp, Homo sapien
tctgacctaatttccttgttgcaaa

SEQ ID NO: 2664576 - DNA, 25 bp, Homo sapien
gggacatctctgtaaggtgttgacc

SEQ ID NO: 2664577 - DNA, 25 bp, Homo sapien
gcaaaaggaattcggtgcagccagc

SEQ ID NO: 2664578 - DNA, 25 bp, Homo sapien
ttctgtgtggaatgttttaagttct

SEQ ID NO: 2664579 - DNA, 25 bp, Homo sapien
attgtatttcttttgagaaccattt

SEQ ID NO: 2664580 - DNA, 25 bp, Homo sapien
tcttttgagaaccatttttacacat

SEQ ID NO: 2664581 - DNA, 25 bp, Homo sapien
ttcttttgagaaccatttttacaca

SEQ ID NO: 2664582 - DNA, 25 bp, Homo sapien
tttattgtatttcttttgagaacca

SEQ ID NO: 2664583 - DNA, 25 bp, Homo sapien
cttaggatccgtttttttcacatgg

SEQ ID NO: 2664584 - DNA, 25 bp, Homo sapien
caagaaatccctgcagcatggccga

SEQ ID NO: 2664585 - DNA, 25 bp, Homo sapien
gagcacctggtactgtgactggaac

SEQ ID NO: 2664586 - DNA, 25 bp, Homo sapien
gaacgtgctgctggcttctagtaaa

SEQ ID NO: 2664587 - DNA, 25 bp, Homo sapien
tgagaggttcaaagcgtccaagtcc

SEQ ID NO: 2664588 - DNA, 25 bp, Homo sapien
gaagccagaccctccagactgtgtt

SEQ ID NO: 2664589 - DNA, 25 bp, Homo sapien
tgagagtctatgtggttaggaagca

SEQ ID NO: 2664590 - DNA, 25 bp, Homo sapien
gacactctaatatcactgccccagt

SEQ ID NO: 2664591 - DNA, 25 bp, Homo sapien
cagtgaatgcacaatgactatacaa

SEQ ID NO: 2664592 - DNA, 25 bp, Homo sapien
tcctttgtctggagaacggggtctc

SEQ ID NO: 2664593 - DNA, 25 bp, Homo sapien
ccgcctcttggcctccctgagagct

SEQ ID NO: 2664594 - DNA, 25 bp, Homo sapien
tcccgcctcttggcctccctgagag

SEQ ID NO: 2664595 - DNA, 25 bp, Homo sapien
cctcccgcctcttggcctccctgag

SEQ ID NO: 2664596 - DNA, 25 bp, Homo sapien
tagcacccaccaaacatatcatgat

SEQ ID NO: 2664597 - DNA, 25 bp, Homo sapien
gaaagagttgtctctacttcctgaa

SEQ ID NO: 2664598 - DNA, 25 bp, Homo sapien
aagtactttgacctcatagcaccca

SEQ ID NO: 2664599 - DNA, 25 bp, Homo sapien
ggaatgtcccactcctcagatgtca

SEQ ID NO: 2664600 - DNA, 25 bp, Homo sapien
tttacttctgaactcaaaacaaatg

SEQ ID NO: 2664601 - DNA, 25 bp, Homo sapien
ctgttttacttctgaactcaaaaca

SEQ ID NO: 2664602 - DNA, 25 bp, Homo sapien
tcaaaacaaatgatcaggcttctgc

SEQ ID NO: 2664603 - DNA, 25 bp, Homo sapien
ctggttctcctaaagtgtttccact

SEQ ID NO: 2664604 - DNA, 25 bp, Homo sapien
tagcttcatgtggacacatcctgag

SEQ ID NO: 2664605 - DNA, 25 bp, Homo sapien
caacattacacttgaggatgagtct

SEQ ID NO: 2664606 - DNA, 25 bp, Homo sapien
tcctgagctaggatatcatgagggt

SEQ ID NO: 2664607 - DNA, 25 bp, Homo sapien
gctaagacacaattgcccaggttgc

SEQ ID NO: 2664608 - DNA, 25 bp, Homo sapien
tggtcattgacatgtggatgtgctc

SEQ ID NO: 2664609 - DNA, 25 bp, Homo sapien
aattgtgcatatcctaaaaagtgtc

SEQ ID NO: 2664610 - DNA, 25 bp, Homo sapien
tggaattggtcattgacatgtggat

SEQ ID NO: 2664611 - DNA, 25 bp, Homo sapien
tttcctaattgtgcatatcctaaaa

SEQ ID NO: 2664612 - DNA, 25 bp, Homo sapien
tcagactgtaaggtaatcggaggca

SEQ ID NO: 2664613 - DNA, 25 bp, Homo sapien
tacagacctttgctaacttgaggct

SEQ ID NO: 2664614 - DNA, 25 bp, Homo sapien
tgtcattcagctataccaggtgctg

SEQ ID NO: 2664615 - DNA, 25 bp, Homo sapien
catgtaagcctgagataacaccgta

SEQ ID NO: 2664616 - DNA, 25 bp, Homo sapien
ttctaaatttctactattgaactct

SEQ ID NO: 2664617 - DNA, 25 bp, Homo sapien
gaggtccacagtctttcatggttca

SEQ ID NO: 2664618 - DNA, 25 bp, Homo sapien
cttcagttgaggtccacagtctttc

SEQ ID NO: 2664619 - DNA, 25 bp, Homo sapien
tctgttctaaatttctactattgaa

SEQ ID NO: 2664620 - DNA, 25 bp, Homo sapien
gcagcttgatcctccagtagacttg

SEQ ID NO: 2664621 - DNA, 25 bp, Homo sapien
gactctctattggaaaaatcagttg

SEQ ID NO: 2664622 - DNA, 25 bp, Homo sapien
cacatgggcatgagtatccattctc

SEQ ID NO: 2664623 - DNA, 25 bp, Homo sapien
ggctatagctattgaaacctgcagc

SEQ ID NO: 2664624 - DNA, 25 bp, Homo sapien
gctcccggtacacagtgatggctgt

SEQ ID NO: 2664625 - DNA, 25 bp, Homo sapien
gcttgccagagtcataggcttctaa

SEQ ID NO: 2664626 - DNA, 25 bp, Homo sapien
gggaatcccatactggctcccggta

SEQ ID NO: 2664627 - DNA, 25 bp, Homo sapien
tgaaagccagggttccgaacaaatg

SEQ ID NO: 2664628 - DNA, 25 bp, Homo sapien
gatggagactggaaggaactgtccc

SEQ ID NO: 2664629 - DNA, 25 bp, Homo sapien
caaagggagcgttcatggctttcaa

SEQ ID NO: 2664630 - DNA, 25 bp, Homo sapien
tggaaggaactgtcccatcaaaggg

SEQ ID NO: 2664631 - DNA, 25 bp, Homo sapien
aagtataaatgcctaagatggagac

SEQ ID NO: 2664632 - DNA, 25 bp, Homo sapien
cgagcaaggtataactctttctgct

SEQ ID NO: 2664633 - DNA, 25 bp, Homo sapien
cttctgagtatgaacgagcaaggta

SEQ ID NO: 2664634 - DNA, 25 bp, Homo sapien
tgagtatgaacgagcaaggtataac

SEQ ID NO: 2664635 - DNA, 25 bp, Homo sapien
tatgaacgagcaaggtataactctt

SEQ ID NO: 2664636 - DNA, 25 bp, Homo sapien
gattttcctgtcatcagtggactta

SEQ ID NO: 2664637 - DNA, 25 bp, Homo sapien
ctctctggaaccatagaagattttc

SEQ ID NO: 2664638 - DNA, 25 bp, Homo sapien
ttttcctgtcatcagtggacttaaa

SEQ ID NO: 2664639 - DNA, 25 bp, Homo sapien
ttctctctggaaccatagaagattt

SEQ ID NO: 2664640 - DNA, 25 bp, Homo sapien
cagggtatcactcttgtaattagtt

SEQ ID NO: 2664641 - DNA, 25 bp, Homo sapien
tcagggtatcactcttgtaattagt

SEQ ID NO: 2664642 - DNA, 25 bp, Homo sapien
gggtatcactcttgtaattagttta

SEQ ID NO: 2664643 - DNA, 25 bp, Homo sapien
ggtatcactcttgtaattagtttac

SEQ ID NO: 2664644 - DNA, 25 bp, Homo sapien
gaccaagtggacatctgccttttct

SEQ ID NO: 2664645 - DNA, 25 bp, Homo sapien
tggttcggaccagtaaattcaagga

SEQ ID NO: 2664646 - DNA, 25 bp, Homo sapien
gtaaagcgatatctgtacttcaatc

SEQ ID NO: 2664647 - DNA, 25 bp, Homo sapien
ccagtaaattcaaggataatgacca

SEQ ID NO: 2664648 - DNA, 25 bp, Homo sapien
ctcttgatggtcaggactagatctc

SEQ ID NO: 2664649 - DNA, 25 bp, Homo sapien
ccctcttgatggtcaggactagatc

SEQ ID NO: 2664650 - DNA, 25 bp, Homo sapien
cctcttgatggtcaggactagatct

SEQ ID NO: 2664651 - DNA, 25 bp, Homo sapien
tccctcttgatggtcaggactagat

SEQ ID NO: 2664652 - DNA, 25 bp, Homo sapien
catgggccagcagatttctgcctct

SEQ ID NO: 2664653 - DNA, 25 bp, Homo sapien
cagatttctgcctcttgagcaggaa

SEQ ID NO: 2664654 - DNA, 25 bp, Homo sapien
atttctgcctcttgagcaggaagca

SEQ ID NO: 2664655 - DNA, 25 bp, Homo sapien
cagcagatttctgcctcttgagcag

SEQ ID NO: 2664656 - DNA, 25 bp, Homo sapien
ctactgagcttggatgtgcttaagg

SEQ ID NO: 2664657 - DNA, 25 bp, Homo sapien
tgcttaaggcgaagacaaagagact

SEQ ID NO: 2664658 - DNA, 25 bp, Homo sapien
cttggatgtgcttaaggcgaagaca

SEQ ID NO: 2664659 - DNA, 25 bp, Homo sapien
tgagcttggatgtgcttaaggcgaa

SEQ ID NO: 2664660 - DNA, 25 bp, Homo sapien
acactgagcttgattacaatgtgtg

SEQ ID NO: 2664661 - DNA, 25 bp, Homo sapien
tttacaacactgagcttgattacaa

SEQ ID NO: 2664662 - DNA, 25 bp, Homo sapien
aacactgagcttgattacaatgtgt

SEQ ID NO: 2664663 - DNA, 25 bp, Homo sapien
cattctttacaacactgagcttgat

SEQ ID NO: 2664664 - DNA, 25 bp, Homo sapien
gtcatgtgcctctacatgtgtgttt

SEQ ID NO: 2664665 - DNA, 25 bp, Homo sapien
tctgtttaggaattcatgtcgctgt

SEQ ID NO: 2664666 - DNA, 25 bp, Homo sapien
tgcctctacatgtgtgtttcttggt

SEQ ID NO: 2664667 - DNA, 25 bp, Homo sapien
catgtcgctgtttggcatttatgta

SEQ ID NO: 2664668 - DNA, 25 bp, Homo sapien
tcagcgcttactcatataacagtcc

SEQ ID NO: 2664669 - DNA, 25 bp, Homo sapien
tcgaagctacaccacatcatagggc

SEQ ID NO: 2664670 - DNA, 25 bp, Homo sapien
taacctaagaaataacttcagcgct

SEQ ID NO: 2664671 - DNA, 25 bp, Homo sapien
tgttctgcacaatgattcagggatc

SEQ ID NO: 2664672 - DNA, 25 bp, Homo sapien
tgtgcgatggattaatagattcaac

SEQ ID NO: 2664673 - DNA, 25 bp, Homo sapien
ttttgttgcctgtacatctgagtaa

SEQ ID NO: 2664674 - DNA, 25 bp, Homo sapien
ctgagtaagtatgattcagaagaaa

SEQ ID NO: 2664675 - DNA, 25 bp, Homo sapien
ctttgctggctcctactatctttag

SEQ ID NO: 2664676 - DNA, 25 bp, Homo sapien
ataaatcaggcctccagatgttcaa

SEQ ID NO: 2664677 - DNA, 25 bp, Homo sapien
aatcaggcctccagatgttcaaaac

SEQ ID NO: 2664678 - DNA, 25 bp, Homo sapien
caggcctccagatgttcaaaactgc

SEQ ID NO: 2664679 - DNA, 25 bp, Homo sapien
cagctatgttacactgtacatttgc

SEQ ID NO: 2664680 - DNA, 25 bp, Homo sapien
taatgagggcaccaaagatatccat

SEQ ID NO: 2664681 - DNA, 25 bp, Homo sapien
gggatgtaatgagggcaccaaagat

SEQ ID NO: 2664682 - DNA, 25 bp, Homo sapien
catgaaatgcaattgtggccacaag

SEQ ID NO: 2664683 - DNA, 25 bp, Homo sapien
ggccacaagcatatgtggccaaggg

SEQ ID NO: 2664684 - DNA, 25 bp, Homo sapien
tgaccacatgacctgttacaggaag

SEQ ID NO: 2664685 - DNA, 25 bp, Homo sapien
agtactaggcatggcccagaccctt

SEQ ID NO: 2664686 - DNA, 25 bp, Homo sapien
caacacaattcaggcagtactaggc

SEQ ID NO: 2664687 - DNA, 25 bp, Homo sapien
gaatacaggaaatcccttaggccat

SEQ ID NO: 2664688 - DNA, 25 bp, Homo sapien
gtagattgctttggatgatacgaac

SEQ ID NO: 2664689 - DNA, 25 bp, Homo sapien
ctgtttaaggtaatgcctaggtatt

SEQ ID NO: 2664690 - DNA, 25 bp, Homo sapien
tgctttggatgatacgaacatttta

SEQ ID NO: 2664691 - DNA, 25 bp, Homo sapien
tctgtggtcccatataaactttaag

SEQ ID NO: 2664692 - DNA, 25 bp, Homo sapien
gtgcaaaatcccctttcatggctgc

SEQ ID NO: 2664693 - DNA, 25 bp, Homo sapien
tgcaaaatcccctttcatggctgct

SEQ ID NO: 2664694 - DNA, 25 bp, Homo sapien
cattaagggcttttggttggctgat

SEQ ID NO: 2664695 - DNA, 25 bp, Homo sapien
gaatctcattgtgaaacggcctaca

SEQ ID NO: 2664696 - DNA, 25 bp, Homo sapien
gcttttttggcaatttggaatctca

SEQ ID NO: 2664697 - DNA, 25 bp, Homo sapien
gcagttgccagccaaatataattcg

SEQ ID NO: 2664698 - DNA, 25 bp, Homo sapien
tgttgccaactaccacttcttttca

SEQ ID NO: 2664699 - DNA, 25 bp, Homo sapien
tgatcccacattaaacagatccaag

SEQ ID NO: 2664700 - DNA, 25 bp, Homo sapien
aggatgtttaggctttgatcccaca

SEQ ID NO: 2664701 - DNA, 25 bp, Homo sapien
ccagggaagcttgagaaacaacagc

SEQ ID NO: 2664702 - DNA, 25 bp, Homo sapien
gtcaatcactgagtattcaacttcc

SEQ ID NO: 2664703 - DNA, 25 bp, Homo sapien
gcacagtcaatcactgagtattcaa

SEQ ID NO: 2664704 - DNA, 25 bp, Homo sapien
cagtcaatcactgagtattcaactt

SEQ ID NO: 2664705 - DNA, 25 bp, Homo sapien
caatcactgagtattcaacttcctt

SEQ ID NO: 2664706 - DNA, 25 bp, Homo sapien
tgaatttttggcatgcaagaaacaa

SEQ ID NO: 2664707 - DNA, 25 bp, Homo sapien
gctccatttaattcggattagtctc

SEQ ID NO: 2664708 - DNA, 25 bp, Homo sapien
ttttggcatgcaagaaacaagttct

SEQ ID NO: 2664709 - DNA, 25 bp, Homo sapien
ggcatgcaagaaacaagttctttca

SEQ ID NO: 2664710 - DNA, 25 bp, Homo sapien
aacagccttaattagtgtcaatgca

SEQ ID NO: 2664711 - DNA, 25 bp, Homo sapien
tctgttgagcagtgtagcagttacc

SEQ ID NO: 2664712 - DNA, 25 bp, Homo sapien
gcagttacccttgcatctttgtgga

SEQ ID NO: 2664713 - DNA, 25 bp, Homo sapien
tcttttcttgtatagcacatgttaa

SEQ ID NO: 2664714 - DNA, 25 bp, Homo sapien
tggtttgtccaagcttttcatagct

SEQ ID NO: 2664715 - DNA, 25 bp, Homo sapien
actcatagttctcaaccagaaagac

SEQ ID NO: 2664716 - DNA, 25 bp, Homo sapien
aactcatagttctcaaccagaaaga

SEQ ID NO: 2664717 - DNA, 25 bp, Homo sapien
tccaaactcatagttctcaaccaga

SEQ ID NO: 2664718 - DNA, 25 bp, Homo sapien
gacagcattgacaatcctgatcttc

SEQ ID NO: 2664719 - DNA, 25 bp, Homo sapien
agcattgacaatcctgatcttctcg

SEQ ID NO: 2664720 - DNA, 25 bp, Homo sapien
atgacagcattgacaatcctgatct

SEQ ID NO: 2664721 - DNA, 25 bp, Homo sapien
cagcattgacaatcctgatcttctc

SEQ ID NO: 2664722 - DNA, 25 bp, Homo sapien
cacatgtgaatgttaattgatagca

SEQ ID NO: 2664723 - DNA, 25 bp, Homo sapien
ctaccacatgtgaatgttaattgat

SEQ ID NO: 2664724 - DNA, 25 bp, Homo sapien
aattgatagcatttgcttctttgtc

SEQ ID NO: 2664725 - DNA, 25 bp, Homo sapien
tgatagcatttgcttctttgtctct

SEQ ID NO: 2664726 - DNA, 25 bp, Homo sapien
aacatgatggttgaatgaatctttt

SEQ ID NO: 2664727 - DNA, 25 bp, Homo sapien
ttaatccaatttccctgactacttc

SEQ ID NO: 2664728 - DNA, 25 bp, Homo sapien
tctatcaggtcgttttttccccaga

SEQ ID NO: 2664729 - DNA, 25 bp, Homo sapien
tcatgggaagacaatctatcaggtc

SEQ ID NO: 2664730 - DNA, 25 bp, Homo sapien
tgaccatggcgatcatcaactaagc

SEQ ID NO: 2664731 - DNA, 25 bp, Homo sapien
gataggttccctacaaaaccagtga

SEQ ID NO: 2664732 - DNA, 25 bp, Homo sapien
cactctgaagtgcactgagttctga

SEQ ID NO: 2664733 - DNA, 25 bp, Homo sapien
gagttctgaattcatgggatctgca

SEQ ID NO: 2664734 - DNA, 25 bp, Homo sapien
tcattttcacactctcaaagttggt

SEQ ID NO: 2664735 - DNA, 25 bp, Homo sapien
tggcaagttgcagctgagaataaat

SEQ ID NO: 2664736 - DNA, 25 bp, Homo sapien
ccagtgtttgcaacaagtccaactg

SEQ ID NO: 2664737 - DNA, 25 bp, Homo sapien
caaagttggtcagagagtagcttag

SEQ ID NO: 2664738 - DNA, 25 bp, Homo sapien
taattactaggataagatttagaag

SEQ ID NO: 2664739 - DNA, 25 bp, Homo sapien
gtttacaaggatgagtacttcttgg

SEQ ID NO: 2664740 - DNA, 25 bp, Homo sapien
tgtaatccaagcgacgtgggggact

SEQ ID NO: 2664741 - DNA, 25 bp, Homo sapien
ccaagatcaacataccgttgcattg

SEQ ID NO: 2664742 - DNA, 25 bp, Homo sapien
tgtcaactgtctaagggccaagact

SEQ ID NO: 2664743 - DNA, 25 bp, Homo sapien
ccaagactgtgcgttggccactact

SEQ ID NO: 2664744 - DNA, 25 bp, Homo sapien
atagcactgtccacaataagtttat

SEQ ID NO: 2664745 - DNA, 25 bp, Homo sapien
tcttcatcataaaagcacttgttct

SEQ ID NO: 2664746 - DNA, 25 bp, Homo sapien
taaagtgaacgagcttttatctgaa

SEQ ID NO: 2664747 - DNA, 25 bp, Homo sapien
acaatataaagtgaacgagctttta

SEQ ID NO: 2664748 - DNA, 25 bp, Homo sapien
aagatctatctgaggctctaatgca

SEQ ID NO: 2664749 - DNA, 25 bp, Homo sapien
gaggctctaatgcatccacaatata

SEQ ID NO: 2664750 - DNA, 25 bp, Homo sapien
tttttagtgcttagatcctgttata

SEQ ID NO: 2664751 - DNA, 25 bp, Homo sapien
acctaagaatacatcaatgatcaga

SEQ ID NO: 2664752 - DNA, 25 bp, Homo sapien
agatggacaggaccactcttaagtg

SEQ ID NO: 2664753 - DNA, 25 bp, Homo sapien
gcttagatcctgttatattatacaa

SEQ ID NO: 2664754 - DNA, 25 bp, Homo sapien
tctagcagctgccaaatgaaaatca

SEQ ID NO: 2664755 - DNA, 25 bp, Homo sapien
agcagctgccaaatgaaaatcaact

SEQ ID NO: 2664756 - DNA, 25 bp, Homo sapien
aatgaaaatcaactctcagccccat

SEQ ID NO: 2664757 - DNA, 25 bp, Homo sapien
gtctagcagctgccaaatgaaaatc

SEQ ID NO: 2664758 - DNA, 25 bp, Homo sapien
tggccaggaataccttgagagtcca

SEQ ID NO: 2664759 - DNA, 25 bp, Homo sapien
gccaggaataccttgagagtccaag

SEQ ID NO: 2664760 - DNA, 25 bp, Homo sapien
ggccaggaataccttgagagtccaa

SEQ ID NO: 2664761 - DNA, 25 bp, Homo sapien
gtggccaggaataccttgagagtcc

SEQ ID NO: 2664762 - DNA, 25 bp, Homo sapien
cacacattgtggtatcaatgcaaca

SEQ ID NO: 2664763 - DNA, 25 bp, Homo sapien
tgaggttgggctctactgtagttaa

SEQ ID NO: 2664764 - DNA, 25 bp, Homo sapien
gctgaaacctccgtagaaatgtgag

SEQ ID NO: 2664765 - DNA, 25 bp, Homo sapien
gggattgtcatatttgtggcttgca

SEQ ID NO: 2664766 - DNA, 25 bp, Homo sapien
aagtgatcccaaacatgatagttgt

SEQ ID NO: 2664767 - DNA, 25 bp, Homo sapien
atgtcatgtctttcagaaacctcct

SEQ ID NO: 2664768 - DNA, 25 bp, Homo sapien
tctttcagaaacctccttgttggaa

SEQ ID NO: 2664769 - DNA, 25 bp, Homo sapien
gatcccaaacatgatagttgtcttt

SEQ ID NO: 2664770 - DNA, 25 bp, Homo sapien
tcaactttagaagcatggagacact

SEQ ID NO: 2664771 - DNA, 25 bp, Homo sapien
taaagggagcctataagctgaagcc

SEQ ID NO: 2664772 - DNA, 25 bp, Homo sapien
gaacacagacttaagaaaagcacct

SEQ ID NO: 2664773 - DNA, 25 bp, Homo sapien
aaagcaggtagcaatttggcagctc

SEQ ID NO: 2664774 - DNA, 25 bp, Homo sapien
gaatgcctctttattatcctgaaca

SEQ ID NO: 2664775 - DNA, 25 bp, Homo sapien
gcctctttattatcctgaacaattt

SEQ ID NO: 2664776 - DNA, 25 bp, Homo sapien
aatgcctctttattatcctgaacaa

SEQ ID NO: 2664777 - DNA, 25 bp, Homo sapien
tctttattatcctgaacaatttcaa

SEQ ID NO: 2664778 - DNA, 25 bp, Homo sapien
cttccttgtttatgtcatcttcatg

SEQ ID NO: 2664779 - DNA, 25 bp, Homo sapien
ttatgtcatcttcatgtggcttcca

SEQ ID NO: 2664780 - DNA, 25 bp, Homo sapien
cttgtttatgtcatcttcatgtggc

SEQ ID NO: 2664781 - DNA, 25 bp, Homo sapien
gtggcttccaggttatagcctccat

SEQ ID NO: 2664782 - DNA, 25 bp, Homo sapien
cttgccatagcttaattcacctcca

SEQ ID NO: 2664783 - DNA, 25 bp, Homo sapien
tcttgccatagcttaattcacctcc

SEQ ID NO: 2664784 - DNA, 25 bp, Homo sapien
ttcttgccatagcttaattcacctc

SEQ ID NO: 2664785 - DNA, 25 bp, Homo sapien
tcagaagcaaagactgtcagactag

SEQ ID NO: 2664786 - DNA, 25 bp, Homo sapien
caagaaatggttggagagcagaaca

SEQ ID NO: 2664787 - DNA, 25 bp, Homo sapien
gagaaggtggagaatatttccccac

SEQ ID NO: 2664788 - DNA, 25 bp, Homo sapien
cagtactgctttgtggtctgcataa

SEQ ID NO: 2664789 - DNA, 25 bp, Homo sapien
aaaagagcgcaccatgtgatttccc

SEQ ID NO: 2664790 - DNA, 25 bp, Homo sapien
gtagaggaaaaagagcgcaccatgt

SEQ ID NO: 2664791 - DNA, 25 bp, Homo sapien
agaggaaaaagagcgcaccatgtga

SEQ ID NO: 2664792 - DNA, 25 bp, Homo sapien
ggaaaaagagcgcaccatgtgattt

SEQ ID NO: 2664793 - DNA, 25 bp, Homo sapien
tctgattgacataccagtagtgcag

SEQ ID NO: 2664794 - DNA, 25 bp, Homo sapien
aattgatgctatcactctgattgac

SEQ ID NO: 2664795 - DNA, 25 bp, Homo sapien
tacctaataatgttttggaaagaca

SEQ ID NO: 2664796 - DNA, 25 bp, Homo sapien
tgctgtctgactacattttaccagg

SEQ ID NO: 2664797 - DNA, 25 bp, Homo sapien
taagtaaaatggaacgtccaacaga

SEQ ID NO: 2664798 - DNA, 25 bp, Homo sapien
taaaatggaacgtccaacagatggc

SEQ ID NO: 2664799 - DNA, 25 bp, Homo sapien
aacagctgctaagtaaaatggaacg

SEQ ID NO: 2664800 - DNA, 25 bp, Homo sapien
gctgctaagtaaaatggaacgtcca

SEQ ID NO: 2664801 - DNA, 25 bp, Homo sapien
cgtgctccctgtcgttctctttctg

SEQ ID NO: 2664802 - DNA, 25 bp, Homo sapien
ctacacgtgctccctgtcgttctct

SEQ ID NO: 2664803 - DNA, 25 bp, Homo sapien
acacgtgctccctgtcgttctcttt

SEQ ID NO: 2664804 - DNA, 25 bp, Homo sapien
acgtgctccctgtcgttctctttct

SEQ ID NO: 2664805 - DNA, 25 bp, Homo sapien
ccggaccccatctgtgaatcctact

SEQ ID NO: 2664806 - DNA, 25 bp, Homo sapien
ttaaagccccggaccccatctgtga

SEQ ID NO: 2664807 - DNA, 25 bp, Homo sapien
cattctctgagtcgttcagttgctt

SEQ ID NO: 2664808 - DNA, 25 bp, Homo sapien
tccattctctgagtcgttcagttgc

SEQ ID NO: 2664809 - DNA, 25 bp, Homo sapien
ggctccaggatcattagaaaaccag

SEQ ID NO: 2664810 - DNA, 25 bp, Homo sapien
ccagaagtaggcagtctagaactaa

SEQ ID NO: 2664811 - DNA, 25 bp, Homo sapien
tagtcacattgcacgtcttgctgca

SEQ ID NO: 2664812 - DNA, 25 bp, Homo sapien
gcaaatcttgctactctgggaaatg

SEQ ID NO: 2664813 - DNA, 25 bp, Homo sapien
gaaacagttttcgaatcccagaaca

SEQ ID NO: 2664814 - DNA, 25 bp, Homo sapien
tatggcatatcttggccacctgtcc

SEQ ID NO: 2664815 - DNA, 25 bp, Homo sapien
ttgggactgtggtatccctcatgaa

SEQ ID NO: 2664816 - DNA, 25 bp, Homo sapien
cacattagctttagatcattgcaga

SEQ ID NO: 2664817 - DNA, 25 bp, Homo sapien
caaataattgtatcaggagcactgt

SEQ ID NO: 2664818 - DNA, 25 bp, Homo sapien
ggtttatactctttgtggcatggca

SEQ ID NO: 2664819 - DNA, 25 bp, Homo sapien
gaggtttatgactccatgcagcagc

SEQ ID NO: 2664820 - DNA, 25 bp, Homo sapien
tgccatacacaagggttacatatac

SEQ ID NO: 2664821 - DNA, 25 bp, Homo sapien
acagccttactccttatcactgggt

SEQ ID NO: 2664822 - DNA, 25 bp, Homo sapien
accctccctcattcatactattaat

SEQ ID NO: 2664823 - DNA, 25 bp, Homo sapien
tgtggttaagatttcacagccttac

SEQ ID NO: 2664824 - DNA, 25 bp, Homo sapien
ttactccttatcactgggtcaccct

SEQ ID NO: 2664825 - DNA, 25 bp, Homo sapien
tgacagagctagttaggctgccaga

SEQ ID NO: 2664826 - DNA, 25 bp, Homo sapien
gcagtatccacagattgacagagct

SEQ ID NO: 2664827 - DNA, 25 bp, Homo sapien
cattcctgcgctctatatcaacggc

SEQ ID NO: 2664828 - DNA, 25 bp, Homo sapien
ggctgccagatgcacagaatgttgt

SEQ ID NO: 2664829 - DNA, 25 bp, Homo sapien
ctggatgagggcctccaactgccat

SEQ ID NO: 2664830 - DNA, 25 bp, Homo sapien
tcactcaggtaagtcgctctacttc

SEQ ID NO: 2664831 - DNA, 25 bp, Homo sapien
ttatcactcaggtaagtcgctctac

SEQ ID NO: 2664832 - DNA, 25 bp, Homo sapien
tatcactcaggtaagtcgctctact

SEQ ID NO: 2664833 - DNA, 25 bp, Homo sapien
actcaggtaagtcgctctacttcca

SEQ ID NO: 2664834 - DNA, 25 bp, Homo sapien
ttcttaaggcttgaactaattctga

SEQ ID NO: 2664835 - DNA, 25 bp, Homo sapien
tccttgaagttaactccattattaa

SEQ ID NO: 2664836 - DNA, 25 bp, Homo sapien
ggcttgaactaattctgacactcat

SEQ ID NO: 2664837 - DNA, 25 bp, Homo sapien
ttaaggcttgaactaattctgacac

SEQ ID NO: 2664838 - DNA, 25 bp, Homo sapien
acattgtaatgatcaatgcaatgtg

SEQ ID NO: 2664839 - DNA, 25 bp, Homo sapien
tagtaaagatccagattgtaaaaaa

SEQ ID NO: 2664840 - DNA, 25 bp, Homo sapien
cagaaggaggtccttttttgtactg

SEQ ID NO: 2664841 - DNA, 25 bp, Homo sapien
atatagtaaagatccagattgtaaa

SEQ ID NO: 2664842 - DNA, 25 bp, Homo sapien
tatagtaaagatccagattgtaaaa

SEQ ID NO: 2664843 - DNA, 25 bp, Homo sapien
cgtgcctctcaataggtagattatt

SEQ ID NO: 2664844 - DNA, 25 bp, Homo sapien
gtgcctctcaataggtagattattt

SEQ ID NO: 2664845 - DNA, 25 bp, Homo sapien
tgcctctcaataggtagattatttt

SEQ ID NO: 2664846 - DNA, 25 bp, Homo sapien
ccattaacttcaaaactgtttctat

SEQ ID NO: 2664847 - DNA, 25 bp, Homo sapien
tcaaaactgtttctattaatttaca

SEQ ID NO: 2664848 - DNA, 25 bp, Homo sapien
ctattaatttacaaacaactttatg

SEQ ID NO: 2664849 - DNA, 25 bp, Homo sapien
ttaatttacaaacaactttatgcat

SEQ ID NO: 2664850 - DNA, 25 bp, Homo sapien
gaagcctgagtgaaggttctgtgta

SEQ ID NO: 2664851 - DNA, 25 bp, Homo sapien
aagcctgagtgaaggttctgtgtaa

SEQ ID NO: 2664852 - DNA, 25 bp, Homo sapien
agcctgagtgaaggttctgtgtaag

SEQ ID NO: 2664853 - DNA, 25 bp, Homo sapien
gcctgagtgaaggttctgtgtaagt

SEQ ID NO: 2664854 - DNA, 25 bp, Homo sapien
caaaaacatccattgacgttgagac

SEQ ID NO: 2664855 - DNA, 25 bp, Homo sapien
tcattcatcagatggcccaaaaaca

SEQ ID NO: 2664856 - DNA, 25 bp, Homo sapien
gatggcccaaaaacatccattgacg

SEQ ID NO: 2664857 - DNA, 25 bp, Homo sapien
catcagatggcccaaaaacatccat

SEQ ID NO: 2664858 - DNA, 25 bp, Homo sapien
tgcctcctccagactgacaaaggct

SEQ ID NO: 2664859 - DNA, 25 bp, Homo sapien
ggccatctgtcctcaccgtactaaa

SEQ ID NO: 2664860 - DNA, 25 bp, Homo sapien
ctaagagaaatgacccaacagcagt

SEQ ID NO: 2664861 - DNA, 25 bp, Homo sapien
caaaggctctttagtatagctaaga

SEQ ID NO: 2664862 - DNA, 25 bp, Homo sapien
tcctcatcactgtgcgtgtaggaca

SEQ ID NO: 2664863 - DNA, 25 bp, Homo sapien
tgtgcgtgtaggacatataatgtgt

SEQ ID NO: 2664864 - DNA, 25 bp, Homo sapien
tataatgtgtgtgtaggacatacac

SEQ ID NO: 2664865 - DNA, 25 bp, Homo sapien
ctgataaagaggattctggagtctt

SEQ ID NO: 2664866 - DNA, 25 bp, Homo sapien
tgtatgctccatcactccctgtagt

SEQ ID NO: 2664867 - DNA, 25 bp, Homo sapien
tagttattggccaacatcatcccag

SEQ ID NO: 2664868 - DNA, 25 bp, Homo sapien
gaagccaagcgaaagggaagatctg

SEQ ID NO: 2664869 - DNA, 25 bp, Homo sapien
tgaagtcagctggagcgtgctaagc

SEQ ID NO: 2664870 - DNA, 25 bp, Homo sapien
gggcagacggtctttgccctgttgc

SEQ ID NO: 2664871 - DNA, 25 bp, Homo sapien
caatgtctagcacagaacaaactct

SEQ ID NO: 2664872 - DNA, 25 bp, Homo sapien
ggttgtagacatatacattaccgta

SEQ ID NO: 2664873 - DNA, 25 bp, Homo sapien
ctggaaatgactgcaattactatta

SEQ ID NO: 2664874 - DNA, 25 bp, Homo sapien
tccaggtgtgtcaactggcaccatg

SEQ ID NO: 2664875 - DNA, 25 bp, Homo sapien
tctgaatggctgttagcgctccagt

SEQ ID NO: 2664876 - DNA, 25 bp, Homo sapien
taatgttgcctcatgatctgaatgg

SEQ ID NO: 2664877 - DNA, 25 bp, Homo sapien
caagagagtcagaagtaggcagtcc

SEQ ID NO: 2664878 - DNA, 25 bp, Homo sapien
cttctgccagggtacacacttcagg

SEQ ID NO: 2664879 - DNA, 25 bp, Homo sapien
gtccagcagcggattcttctgccag

SEQ ID NO: 2664880 - DNA, 25 bp, Homo sapien
ttcaggatccgctgaacctgaagct

SEQ ID NO: 2664881 - DNA, 25 bp, Homo sapien
tgttctgctagatttgagattctgt

SEQ ID NO: 2664882 - DNA, 25 bp, Homo sapien
aaaataatgctccaagcttttgaaa

SEQ ID NO: 2664883 - DNA, 25 bp, Homo sapien
gttcctctgattagtctctcctcaa

SEQ ID NO: 2664884 - DNA, 25 bp, Homo sapien
tttcattagaatcaggctgatactt

SEQ ID NO: 2664885 - DNA, 25 bp, Homo sapien
gaatcaggctgatacttttccttaa

SEQ ID NO: 2664886 - DNA, 25 bp, Homo sapien
tcctctgtacttctattccacttac

SEQ ID NO: 2664887 - DNA, 25 bp, Homo sapien
ctattccacttacaggctttatctt

SEQ ID NO: 2664888 - DNA, 25 bp, Homo sapien
tattccacttacaggctttatcttc

SEQ ID NO: 2664889 - DNA, 25 bp, Homo sapien
gtcagttgtatccaggacctcaaat

SEQ ID NO: 2664890 - DNA, 25 bp, Homo sapien
tgtggtttgtcttcggctccacggt

SEQ ID NO: 2664891 - DNA, 25 bp, Homo sapien
ggctccacggtcagttgtatccagg

SEQ ID NO: 2664892 - DNA, 25 bp, Homo sapien
tcttcggctccacggtcagttgtat

SEQ ID NO: 2664893 - DNA, 25 bp, Homo sapien
tgcttacattaatttaggaagaccc

SEQ ID NO: 2664894 - DNA, 25 bp, Homo sapien
cttagttcgcagtgggcccattcat

SEQ ID NO: 2664895 - DNA, 25 bp, Homo sapien
gaagagcagctgcattaatgtagct

SEQ ID NO: 2664896 - DNA, 25 bp, Homo sapien
tttaggaagaccctacgatctagct

SEQ ID NO: 2664897 - DNA, 25 bp, Homo sapien
catagtaagtgttgatctgcataac

SEQ ID NO: 2664898 - DNA, 25 bp, Homo sapien
tcgcaagtgctgattaccaaaactg

SEQ ID NO: 2664899 - DNA, 25 bp, Homo sapien
tattcagctgtgctaaattaatgac

SEQ ID NO: 2664900 - DNA, 25 bp, Homo sapien
aaccatatgatcatcgcaagtgctg

SEQ ID NO: 2664901 - DNA, 25 bp, Homo sapien
gttgaaaaggatgagtaacacaggt

SEQ ID NO: 2664902 - DNA, 25 bp, Homo sapien
tgagtaacacaggtttattcactga

SEQ ID NO: 2664903 - DNA, 25 bp, Homo sapien
ggatgagtaacacaggtttattcac

SEQ ID NO: 2664904 - DNA, 25 bp, Homo sapien
gaaaaggatgagtaacacaggttta

SEQ ID NO: 2664905 - DNA, 25 bp, Homo sapien
gtaccttttgactgacatctattca

SEQ ID NO: 2664906 - DNA, 25 bp, Homo sapien
ttgtaccttttgactgacatctatt

SEQ ID NO: 2664907 - DNA, 25 bp, Homo sapien
taccttttgactgacatctattcac

SEQ ID NO: 2664908 - DNA, 25 bp, Homo sapien
cttttgactgacatctattcacttc

SEQ ID NO: 2664909 - DNA, 25 bp, Homo sapien
agaagtccgaaggcctcaaccttct

SEQ ID NO: 2664910 - DNA, 25 bp, Homo sapien
agagaagtccgaaggcctcaacctt

SEQ ID NO: 2664911 - DNA, 25 bp, Homo sapien
agtccgaaggcctcaaccttcttca

SEQ ID NO: 2664912 - DNA, 25 bp, Homo sapien
cagagaagtccgaaggcctcaacct

SEQ ID NO: 2664913 - DNA, 25 bp, Homo sapien
tgctgagccaaagaacccggatgag

SEQ ID NO: 2664914 - DNA, 25 bp, Homo sapien
gctgagccaaagaacccggatgagg

SEQ ID NO: 2664915 - DNA, 25 bp, Homo sapien
cactgctggttaaccaagggtccaa

SEQ ID NO: 2664916 - DNA, 25 bp, Homo sapien
ccctcgatgtagtgcctggttgtca

SEQ ID NO: 2664917 - DNA, 25 bp, Homo sapien
gaatctggagtctcactagaagcca

SEQ ID NO: 2664918 - DNA, 25 bp, Homo sapien
gccaggaagtctcagaggttcactc

SEQ ID NO: 2664919 - DNA, 25 bp, Homo sapien
aggactgtcttcacctaatttaaag

SEQ ID NO: 2664920 - DNA, 25 bp, Homo sapien
gtcaggactgtcttcacctaattta

SEQ ID NO: 2664921 - DNA, 25 bp, Homo sapien
caaatgactttaggtcaggactgtc

SEQ ID NO: 2664922 - DNA, 25 bp, Homo sapien
ctgtcttcacctaatttaaagttct

SEQ ID NO: 2664923 - DNA, 25 bp, Homo sapien
tctcttagctcttgacccacaattt

SEQ ID NO: 2664924 - DNA, 25 bp, Homo sapien
cctgctttcaaaattagcagtattc

SEQ ID NO: 2664925 - DNA, 25 bp, Homo sapien
ttttctcttagctcttgacccacaa

SEQ ID NO: 2664926 - DNA, 25 bp, Homo sapien
tcaaaattagcagtattcctaaata

SEQ ID NO: 2664927 - DNA, 25 bp, Homo sapien
gtgaaactgtgtcccctgaaaccat

SEQ ID NO: 2664928 - DNA, 25 bp, Homo sapien
tggtgaaactgtgtcccctgaaacc

SEQ ID NO: 2664929 - DNA, 25 bp, Homo sapien
ctctggtgaaactgtgtcccctgaa

SEQ ID NO: 2664930 - DNA, 25 bp, Homo sapien
tctggtgaaactgtgtcccctgaaa

SEQ ID NO: 2664931 - DNA, 25 bp, Homo sapien
tatttgcttgctctattccacttcc

SEQ ID NO: 2664932 - DNA, 25 bp, Homo sapien
ccccagtgttctcatgatagggcaa

SEQ ID NO: 2664933 - DNA, 25 bp, Homo sapien
ccagtgttctcatgatagggcaaag

SEQ ID NO: 2664934 - DNA, 25 bp, Homo sapien
ccacttccgtaagcatgaggatgca

SEQ ID NO: 2664935 - DNA, 25 bp, Homo sapien
acaagcctggctttctattcagtca

SEQ ID NO: 2664936 - DNA, 25 bp, Homo sapien
ttcaaacaagtagataataaaggtg

SEQ ID NO: 2664937 - DNA, 25 bp, Homo sapien
tcaacattaaacacgtaagctagac

SEQ ID NO: 2664938 - DNA, 25 bp, Homo sapien
tcagtcacttgttttaatgtatgca

SEQ ID NO: 2664939 - DNA, 25 bp, Homo sapien
ctgcagccttttcaatcctgatatt

SEQ ID NO: 2664940 - DNA, 25 bp, Homo sapien
gacatctgcttgcaaacttctgcag

SEQ ID NO: 2664941 - DNA, 25 bp, Homo sapien
tcaatcctgatattcacttgtttca

SEQ ID NO: 2664942 - DNA, 25 bp, Homo sapien
ttgacatctgcttgcaaacttctgc

SEQ ID NO: 2664943 - DNA, 25 bp, Homo sapien
agcaagcagacttctgaggatgatc

SEQ ID NO: 2664944 - DNA, 25 bp, Homo sapien
cagcaagcagacttctgaggatgat

SEQ ID NO: 2664945 - DNA, 25 bp, Homo sapien
gcaagcagacttctgaggatgatct

SEQ ID NO: 2664946 - DNA, 25 bp, Homo sapien
ttttcttgagatttggaatgctttt

SEQ ID NO: 2664947 - DNA, 25 bp, Homo sapien
aaacttattgaatctccacatcaaa

SEQ ID NO: 2664948 - DNA, 25 bp, Homo sapien
tttttcttgagatttggaatgcttt

SEQ ID NO: 2664949 - DNA, 25 bp, Homo sapien
gacagaattatgtaaccagcctcac

SEQ ID NO: 2664950 - DNA, 25 bp, Homo sapien
gggtaatcctatcccagcaatgctt

SEQ ID NO: 2664951 - DNA, 25 bp, Homo sapien
cagggtacaaatctctcagcggata

SEQ ID NO: 2664952 - DNA, 25 bp, Homo sapien
gggtatgcacacaaataggcttaac

SEQ ID NO: 2664953 - DNA, 25 bp, Homo sapien
ttagaatccgctaactcacgatgcg

SEQ ID NO: 2664954 - DNA, 25 bp, Homo sapien
gaatatgaattcagacataggcaga

SEQ ID NO: 2664955 - DNA, 25 bp, Homo sapien
cgatgcttccgtgaaattctgtctc

SEQ ID NO: 2664956 - DNA, 25 bp, Homo sapien
tcaatcacaagtggagaggcttctc

SEQ ID NO: 2664957 - DNA, 25 bp, Homo sapien
tctgaataaatagatgtgctcaaaa

SEQ ID NO: 2664958 - DNA, 25 bp, Homo sapien
catagtgcctatgtgccatctgctc

SEQ ID NO: 2664959 - DNA, 25 bp, Homo sapien
taccatctccctactcagagactga

SEQ ID NO: 2664960 - DNA, 25 bp, Homo sapien
cagcagcctttaccatctccctact

SEQ ID NO: 2664961 - DNA, 25 bp, Homo sapien
cctccacagcatgtcgtgtacaggg

SEQ ID NO: 2664962 - DNA, 25 bp, Homo sapien
caaaactttcttagctcctccacag

SEQ ID NO: 2664963 - DNA, 25 bp, Homo sapien
tagttgcaacccagcttactccttg

SEQ ID NO: 2664964 - DNA, 25 bp, Homo sapien
tcttcagtgatacgataacattgca

SEQ ID NO: 2664965 - DNA, 25 bp, Homo sapien
tattttataccgtgatttctttgca

SEQ ID NO: 2664966 - DNA, 25 bp, Homo sapien
ggcaaagatatgataatcaagttca

SEQ ID NO: 2664967 - DNA, 25 bp, Homo sapien
agactttgagctctcagagttttag

SEQ ID NO: 2664968 - DNA, 25 bp, Homo sapien
tataataagatagggctttttacca

SEQ ID NO: 2664969 - DNA, 25 bp, Homo sapien
tgaagctgccaagagataaacacat

SEQ ID NO: 2664970 - DNA, 25 bp, Homo sapien
gccagtttagatgcactttgtaggt

SEQ ID NO: 2664971 - DNA, 25 bp, Homo sapien
ttatcgtgctattcttggcctcaaa

SEQ ID NO: 2664972 - DNA, 25 bp, Homo sapien
ttgtccctcccagcttgcaagtaaa

SEQ ID NO: 2664973 - DNA, 25 bp, Homo sapien
tgacatcaagggagtcatcattaag

SEQ ID NO: 2664974 - DNA, 25 bp, Homo sapien
caagggagtcatcattaagttaggg

SEQ ID NO: 2664975 - DNA, 25 bp, Homo sapien
atcattaagttagggggagcacagg

SEQ ID NO: 2664976 - DNA, 25 bp, Homo sapien
catcaagggagtcatcattaagtta

SEQ ID NO: 2664977 - DNA, 25 bp, Homo sapien
tctctaactctctgttgcataacag

SEQ ID NO: 2664978 - DNA, 25 bp, Homo sapien
gatgtttctctaactctctgttgca

SEQ ID NO: 2664979 - DNA, 25 bp, Homo sapien
gctttacaaagtgaagatgtttctc

SEQ ID NO: 2664980 - DNA, 25 bp, Homo sapien
gcaagaaattttaatagctttacaa

SEQ ID NO: 2664981 - DNA, 25 bp, Homo sapien
gcccacccgcactgcagaatgccat

SEQ ID NO: 2664982 - DNA, 25 bp, Homo sapien
tgcggcatggacagtcagcaggcca

SEQ ID NO: 2664983 - DNA, 25 bp, Homo sapien
cgaggctccactttgagagtgcagc

SEQ ID NO: 2664984 - DNA, 25 bp, Homo sapien
ccgaggctccactttgagagtgcag

SEQ ID NO: 2664985 - DNA, 25 bp, Homo sapien
tcagctgggaattttagcgtcccta

SEQ ID NO: 2664986 - DNA, 25 bp, Homo sapien
tctgacgtgccctttagtaccaggt

SEQ ID NO: 2664987 - DNA, 25 bp, Homo sapien
actaccttgaggaagattaattcca

SEQ ID NO: 2664988 - DNA, 25 bp, Homo sapien
tagtaccaggtctgagcaaactacc

SEQ ID NO: 2664989 - DNA, 25 bp, Homo sapien
caaagacaatctgaccatgcccact

SEQ ID NO: 2664990 - DNA, 25 bp, Homo sapien
tatgtgagtacaatccggaagtcca

SEQ ID NO: 2664991 - DNA, 25 bp, Homo sapien
gctgatactgacatataagacccca

SEQ ID NO: 2664992 - DNA, 25 bp, Homo sapien
acgtggccagttctgtttgagctcc

SEQ ID NO: 2664993 - DNA, 25 bp, Homo sapien
agcactaacgagtggagtgggtgga

SEQ ID NO: 2664994 - DNA, 25 bp, Homo sapien
actaacgagtggagtgggtggatga

SEQ ID NO: 2664995 - DNA, 25 bp, Homo sapien
gtgggtggatgaatcagacatatct

SEQ ID NO: 2664996 - DNA, 25 bp, Homo sapien
agtgggtggatgaatcagacatatc

SEQ ID NO: 2664997 - DNA, 25 bp, Homo sapien
cagaagtgttaagagcactgctcaa

SEQ ID NO: 2664998 - DNA, 25 bp, Homo sapien
gggcagtacactctacagctatttg

SEQ ID NO: 2664999 - DNA, 25 bp, Homo sapien
agcaaagccagtattccagagcaga

SEQ ID NO: 2665000 - DNA, 25 bp, Homo sapien
tgcccattctgctctactatttcct

SEQ ID NO: 2665001 - DNA, 25 bp, Homo sapien
tacttccagagggtgtccgtagggc

SEQ ID NO: 2665002 - DNA, 25 bp, Homo sapien
acttccagagggtgtccgtagggct

SEQ ID NO: 2665003 - DNA, 25 bp, Homo sapien
cttccagagggtgtccgtagggctt

SEQ ID NO: 2665004 - DNA, 25 bp, Homo sapien
gaccaagtgtgacctgagtacggta

SEQ ID NO: 2665005 - DNA, 25 bp, Homo sapien
acggtatagtaccttcagtcttaca

SEQ ID NO: 2665006 - DNA, 25 bp, Homo sapien
ggctgctctaccaggaactcttccc

SEQ ID NO: 2665007 - DNA, 25 bp, Homo sapien
tctaccaggaactcttccccttgag

SEQ ID NO: 2665008 - DNA, 25 bp, Homo sapien
gcttctgtcgtctcaatgccaggca

SEQ ID NO: 2665009 - DNA, 25 bp, Homo sapien
tgaactaaaattggctgcttctggg

SEQ ID NO: 2665010 - DNA, 25 bp, Homo sapien
caaattggctctgccatgaagaggc

SEQ ID NO: 2665011 - DNA, 25 bp, Homo sapien
tgggacatccctgccaatggatggg

SEQ ID NO: 2665012 - DNA, 25 bp, Homo sapien
tgattggccaatattctgtggtccc

SEQ ID NO: 2665013 - DNA, 25 bp, Homo sapien
tcaattctaattggtgacagccatg

SEQ ID NO: 2665014 - DNA, 25 bp, Homo sapien
cactacatgtgggatgaagcacggg

SEQ ID NO: 2665015 - DNA, 25 bp, Homo sapien
gtagctctctctcaggatcatcaaa

SEQ ID NO: 2665016 - DNA, 25 bp, Homo sapien
tcatgaatatgacctatcaacacca

SEQ ID NO: 2665017 - DNA, 25 bp, Homo sapien
taagctctaatacgccagcattttc

SEQ ID NO: 2665018 - DNA, 25 bp, Homo sapien
gacttcttcaagaaccacttaagct

SEQ ID NO: 2665019 - DNA, 25 bp, Homo sapien
tttcattgtaatacccacgattgag

SEQ ID NO: 2665020 - DNA, 25 bp, Homo sapien
tacccacgattgagatggttggaga

SEQ ID NO: 2665021 - DNA, 25 bp, Homo sapien
cataagaatagtaagggtggttggc

SEQ ID NO: 2665022 - DNA, 25 bp, Homo sapien
tgatgctgtcagcataagaatagta

SEQ ID NO: 2665023 - DNA, 25 bp, Homo sapien
tcagcataagaatagtaagggtggt

SEQ ID NO: 2665024 - DNA, 25 bp, Homo sapien
gaatagtaagggtggttggctttca

SEQ ID NO: 2665025 - DNA, 25 bp, Homo sapien
tgattccctaggacaagtttccggc

SEQ ID NO: 2665026 - DNA, 25 bp, Homo sapien
cactgcttgagatccaaaaacttaa

SEQ ID NO: 2665027 - DNA, 25 bp, Homo sapien
actgctaatgactactgccaagatg

SEQ ID NO: 2665028 - DNA, 25 bp, Homo sapien
ccaccagagagcagttgattcccta

SEQ ID NO: 2665029 - DNA, 25 bp, Homo sapien
taagctgaaagtcggccctactgag

SEQ ID NO: 2665030 - DNA, 25 bp, Homo sapien
gagacgcctccaatggtttttggca

SEQ ID NO: 2665031 - DNA, 25 bp, Homo sapien
tggctctggctttcctactcaaacg

SEQ ID NO: 2665032 - DNA, 25 bp, Homo sapien
ggcggaggtccaattgtagtatcta

SEQ ID NO: 2665033 - DNA, 25 bp, Homo sapien
gaattttcttctcaacttcctcttg

SEQ ID NO: 2665034 - DNA, 25 bp, Homo sapien
tcaacttcctcttgctcctttttcc

SEQ ID NO: 2665035 - DNA, 25 bp, Homo sapien
ttctcaacttcctcttgctcctttt

SEQ ID NO: 2665036 - DNA, 25 bp, Homo sapien
aattttcttctcaacttcctcttgc

SEQ ID NO: 2665037 - DNA, 25 bp, Homo sapien
cctgctctgccaaaccaagtgtctc

SEQ ID NO: 2665038 - DNA, 25 bp, Homo sapien
ttgcaaaaaccttgatgtgagtgac

SEQ ID NO: 2665039 - DNA, 25 bp, Homo sapien
ttttgcaaaaaccttgatgtgagtg

SEQ ID NO: 2665040 - DNA, 25 bp, Homo sapien
gttatagattgaacattacttctgc

SEQ ID NO: 2665041 - DNA, 25 bp, Homo sapien
tcatctatggttatagattgaacat

SEQ ID NO: 2665042 - DNA, 25 bp, Homo sapien
ggaactgagctggctacaaatgctt

SEQ ID NO: 2665043 - DNA, 25 bp, Homo sapien
cagaatctctctgcaaggtcttggc

SEQ ID NO: 2665044 - DNA, 25 bp, Homo sapien
gcggacctcttgtgcccttagctga

SEQ ID NO: 2665045 - DNA, 25 bp, Homo sapien
tagctgagctctgcaaaaggtgctg

SEQ ID NO: 2665046 - DNA, 25 bp, Homo sapien
ccacatactgttgtatcttgctgaa

SEQ ID NO: 2665047 - DNA, 25 bp, Homo sapien
cacatactgttgtatcttgctgaat

SEQ ID NO: 2665048 - DNA, 25 bp, Homo sapien
gtatcttgctgaattatttttgtca

SEQ ID NO: 2665049 - DNA, 25 bp, Homo sapien
gttgtatcttgctgaattatttttg

SEQ ID NO: 2665050 - DNA, 25 bp, Homo sapien
ggtggggaagacacacttccacaaa

SEQ ID NO: 2665051 - DNA, 25 bp, Homo sapien
gtggggaagacacacttccacaaac

SEQ ID NO: 2665052 - DNA, 25 bp, Homo sapien
gggaagacacacttccacaaacatg

SEQ ID NO: 2665053 - DNA, 25 bp, Homo sapien
aagacacacttccacaaacatgagt

SEQ ID NO: 2665054 - DNA, 25 bp, Homo sapien
caagaattggccagacactaaggtg

SEQ ID NO: 2665055 - DNA, 25 bp, Homo sapien
tcattgctgccagccagttggtcct

SEQ ID NO: 2665056 - DNA, 25 bp, Homo sapien
gcaaatattccatctgttgcctgta

SEQ ID NO: 2665057 - DNA, 25 bp, Homo sapien
cagtgtcacctggtaatggctgatg

SEQ ID NO: 2665058 - DNA, 25 bp, Homo sapien
catacccctttcttgtgaagcatta

SEQ ID NO: 2665059 - DNA, 25 bp, Homo sapien
tacctagccatcctgaataccatct

SEQ ID NO: 2665060 - DNA, 25 bp, Homo sapien
tccggaaacgagcaatatattgacc

SEQ ID NO: 2665061 - DNA, 25 bp, Homo sapien
tccgtaactgagagttgactataca

SEQ ID NO: 2665062 - DNA, 25 bp, Homo sapien
cagccattggtggaagtgatgtcac

SEQ ID NO: 2665063 - DNA, 25 bp, Homo sapien
ctcagtctcagccattggtggaagt

SEQ ID NO: 2665064 - DNA, 25 bp, Homo sapien
ccattggtggaagtgatgtcaccat

SEQ ID NO: 2665065 - DNA, 25 bp, Homo sapien
tctcagccattggtggaagtgatgt

SEQ ID NO: 2665066 - DNA, 25 bp, Homo sapien
cttcctctgagatctgctgagtaaa

SEQ ID NO: 2665067 - DNA, 25 bp, Homo sapien
tttttcttcctctgagatctgctga

SEQ ID NO: 2665068 - DNA, 25 bp, Homo sapien
ttcttcctctgagatctgctgagta

SEQ ID NO: 2665069 - DNA, 25 bp, Homo sapien
ttttcttcctctgagatctgctgag

SEQ ID NO: 2665070 - DNA, 25 bp, Homo sapien
tgcagaatactgtgtggcacgagat

SEQ ID NO: 2665071 - DNA, 25 bp, Homo sapien
aatactgtgtggcacgagatttctg

SEQ ID NO: 2665072 - DNA, 25 bp, Homo sapien
tactgtgtggcacgagatttctgtt

SEQ ID NO: 2665073 - DNA, 25 bp, Homo sapien
ctctgcagaatactgtgtggcacga

SEQ ID NO: 2665074 - DNA, 25 bp, Homo sapien
aatgttacagtgcttgcttattgtc

SEQ ID NO: 2665075 - DNA, 25 bp, Homo sapien
aaatgtcttgtagcttcatttctga

SEQ ID NO: 2665076 - DNA, 25 bp, Homo sapien
gtaatgcaagtgcatgaatgtcaga

SEQ ID NO: 2665077 - DNA, 25 bp, Homo sapien
taccttcaaatatcggggactacat

SEQ ID NO: 2665078 - DNA, 25 bp, Homo sapien
caacacaggaggtaaccaatttata

SEQ ID NO: 2665079 - DNA, 25 bp, Homo sapien
cacaggaggtaaccaatttatatta

SEQ ID NO: 2665080 - DNA, 25 bp, Homo sapien
ccaacacaggaggtaaccaatttat

SEQ ID NO: 2665081 - DNA, 25 bp, Homo sapien
acacaggaggtaaccaatttatatt

SEQ ID NO: 2665082 - DNA, 25 bp, Homo sapien
caaacaggtggtaagagctactgga

SEQ ID NO: 2665083 - DNA, 25 bp, Homo sapien
gctactggatggtagacatcatgtc

SEQ ID NO: 2665084 - DNA, 25 bp, Homo sapien
ggtccaccggtcagcaggtttagca

SEQ ID NO: 2665085 - DNA, 25 bp, Homo sapien
gcacctgcaacaggattgggtccac

SEQ ID NO: 2665086 - DNA, 25 bp, Homo sapien
cttttatcaaagtttccgtagccag

SEQ ID NO: 2665087 - DNA, 25 bp, Homo sapien
ttaaagtctggatcttttatcaaag

SEQ ID NO: 2665088 - DNA, 25 bp, Homo sapien
gtttcatcacaatatttacagtgct

SEQ ID NO: 2665089 - DNA, 25 bp, Homo sapien
gctgcctaggtcacgttctttctct

SEQ ID NO: 2665090 - DNA, 25 bp, Homo sapien
cacaatatttacagtgctgcctagg

SEQ ID NO: 2665091 - DNA, 25 bp, Homo sapien
tacagtgctgcctaggtcacgttct

SEQ ID NO: 2665092 - DNA, 25 bp, Homo sapien
tagaatcactgaatgctacctatga

SEQ ID NO: 2665093 - DNA, 25 bp, Homo sapien
tatacttggaaacttagatctaggc

SEQ ID NO: 2665094 - DNA, 25 bp, Homo sapien
gcctggtatcttggagtaaagccaa

SEQ ID NO: 2665095 - DNA, 25 bp, Homo sapien
ctcaatcttagtttggcctggcaaa

SEQ ID NO: 2665096 - DNA, 25 bp, Homo sapien
taagtacttgttctgcaattcaaaa

SEQ ID NO: 2665097 - DNA, 25 bp, Homo sapien
taaaagcatattgtctacttataaa

SEQ ID NO: 2665098 - DNA, 25 bp, Homo sapien
ccccatgttgaaggtagtataatct

SEQ ID NO: 2665099 - DNA, 25 bp, Homo sapien
caaaatttgtcaacctttgagactt

SEQ ID NO: 2665100 - DNA, 25 bp, Homo sapien
gactgactttgcagctcttcactca

SEQ ID NO: 2665101 - DNA, 25 bp, Homo sapien
ggtctgactgcagatctctgggttg

SEQ ID NO: 2665102 - DNA, 25 bp, Homo sapien
atgtggctggcatactttcttttct

SEQ ID NO: 2665103 - DNA, 25 bp, Homo sapien
tgtagtgtgcctctttagactgact

SEQ ID NO: 2665104 - DNA, 25 bp, Homo sapien
taagcagacaagtctgcttggctcc

SEQ ID NO: 2665105 - DNA, 25 bp, Homo sapien
ctttaggtcttaagcagacaagtct

SEQ ID NO: 2665106 - DNA, 25 bp, Homo sapien
ccttcagcttcacaatgggccctgt

SEQ ID NO: 2665107 - DNA, 25 bp, Homo sapien
cacaatgggccctgttttttcacag

SEQ ID NO: 2665108 - DNA, 25 bp, Homo sapien
agaagccttgagagcacaccccatg

SEQ ID NO: 2665109 - DNA, 25 bp, Homo sapien
tcccgaggattgacaggaccagacc

SEQ ID NO: 2665110 - DNA, 25 bp, Homo sapien
gggccgtgagcatcccctacagctt

SEQ ID NO: 2665111 - DNA, 25 bp, Homo sapien
cagacccacaaaattttctagctgt

SEQ ID NO: 2665112 - DNA, 25 bp, Homo sapien
caaagaggacagaccccttcttttg

SEQ ID NO: 2665113 - DNA, 25 bp, Homo sapien
cagacagtttcctgctcggctttct

SEQ ID NO: 2665114 - DNA, 25 bp, Homo sapien
tttcctgctcggctttctctcacac

SEQ ID NO: 2665115 - DNA, 25 bp, Homo sapien
gtttcctgctcggctttctctcaca

SEQ ID NO: 2665116 - DNA, 25 bp, Homo sapien
tcacagacagtttcctgctcggctt

SEQ ID NO: 2665117 - DNA, 25 bp, Homo sapien
tcacacttttacctacttcctctaa

SEQ ID NO: 2665118 - DNA, 25 bp, Homo sapien
ccctatgccactctcaggttgtggt

SEQ ID NO: 2665119 - DNA, 25 bp, Homo sapien
cactctcaggttgtggtatctcact

SEQ ID NO: 2665120 - DNA, 25 bp, Homo sapien
tatgccactctcaggttgtggtatc

SEQ ID NO: 2665121 - DNA, 25 bp, Homo sapien
ttaagtgaccattcatatttgctgc

SEQ ID NO: 2665122 - DNA, 25 bp, Homo sapien
aggcctaattctgttggcattaagt

SEQ ID NO: 2665123 - DNA, 25 bp, Homo sapien
gaggcaggtggtgttgtaaggccta

SEQ ID NO: 2665124 - DNA, 25 bp, Homo sapien
gaccattcatatttgctgcaggagc

SEQ ID NO: 2665125 - DNA, 25 bp, Homo sapien
gagtgttagagctgactatggcatt

SEQ ID NO: 2665126 - DNA, 25 bp, Homo sapien
gactatggcattacatgctgtattc

SEQ ID NO: 2665127 - DNA, 25 bp, Homo sapien
gacgttgtttaggagtgttagagct

SEQ ID NO: 2665128 - DNA, 25 bp, Homo sapien
taagacgttgtttaggagtgttaga

SEQ ID NO: 2665129 - DNA, 25 bp, Homo sapien
tgcttgtccgtgaatgaagacttca

SEQ ID NO: 2665130 - DNA, 25 bp, Homo sapien
tgaatgaagacttcacgttgcggtt

SEQ ID NO: 2665131 - DNA, 25 bp, Homo sapien
ccagagctgcttgtccgtgaatgaa

SEQ ID NO: 2665132 - DNA, 25 bp, Homo sapien
tccgtgaatgaagacttcacgttgc

SEQ ID NO: 2665133 - DNA, 25 bp, Homo sapien
tctctttccattaaggatttcattt

SEQ ID NO: 2665134 - DNA, 25 bp, Homo sapien
taaaggtttgcatgtgcatcatcat

SEQ ID NO: 2665135 - DNA, 25 bp, Homo sapien
tattatctgcaatgggtttctgaaa

SEQ ID NO: 2665136 - DNA, 25 bp, Homo sapien
catattttattgaagttggtaataa

SEQ ID NO: 2665137 - DNA, 25 bp, Homo sapien
tctgcgaagagggacaatctactct

SEQ ID NO: 2665138 - DNA, 25 bp, Homo sapien
ctctttggaccaactgatctttcat

SEQ ID NO: 2665139 - DNA, 25 bp, Homo sapien
tgcagagctttaaaggctgttgcag

SEQ ID NO: 2665140 - DNA, 25 bp, Homo sapien
gagctttaaaggctgttgcagccag

SEQ ID NO: 2665141 - DNA, 25 bp, Homo sapien
taaccagggtttgctttagctgtgg

SEQ ID NO: 2665142 - DNA, 25 bp, Homo sapien
caaaaggcaatattgattatgtctg

SEQ ID NO: 2665143 - DNA, 25 bp, Homo sapien
aagatttggccagcactaaccaggg

SEQ ID NO: 2665144 - DNA, 25 bp, Homo sapien
tatgtctgggatatgccaattataa

SEQ ID NO: 2665145 - DNA, 25 bp, Homo sapien
gccactgccatccatactactatta

SEQ ID NO: 2665146 - DNA, 25 bp, Homo sapien
cactgccatccatactactattatc

SEQ ID NO: 2665147 - DNA, 25 bp, Homo sapien
atgccactgccatccatactactat

SEQ ID NO: 2665148 - DNA, 25 bp, Homo sapien
tgccactgccatccatactactatt

SEQ ID NO: 2665149 - DNA, 25 bp, Homo sapien
caccgaggtgttccgaaatttctgc

SEQ ID NO: 2665150 - DNA, 25 bp, Homo sapien
tatgcttgtaatgaggtcaccgagg

SEQ ID NO: 2665151 - DNA, 25 bp, Homo sapien
gccttttgtttgattctagctccca

SEQ ID NO: 2665152 - DNA, 25 bp, Homo sapien
tacagacttttcatcctcagtggcc

SEQ ID NO: 2665153 - DNA, 25 bp, Homo sapien
ttactaagtactggcatgggtagga

SEQ ID NO: 2665154 - DNA, 25 bp, Homo sapien
ttccagcacaacagcgtcattggct

SEQ ID NO: 2665155 - DNA, 25 bp, Homo sapien
tttatacgtctcttggaaagtaagc

SEQ ID NO: 2665156 - DNA, 25 bp, Homo sapien
tgagaccaactttactaagtactgg

SEQ ID NO: 2665157 - DNA, 25 bp, Homo sapien
aggccatgaagttaaattttgtttg

SEQ ID NO: 2665158 - DNA, 25 bp, Homo sapien
ctaggccatgaagttaaattttgtt

SEQ ID NO: 2665159 - DNA, 25 bp, Homo sapien
gccatgaagttaaattttgtttgga

SEQ ID NO: 2665160 - DNA, 25 bp, Homo sapien
caaatgcagtcctatggatggctca

SEQ ID NO: 2665161 - DNA, 25 bp, Homo sapien
atgcagtcctatggatggctcaaca

SEQ ID NO: 2665162 - DNA, 25 bp, Homo sapien
tctgccgtgcacagccaaatgactt

SEQ ID NO: 2665163 - DNA, 25 bp, Homo sapien
aatgcagtcctatggatggctcaac

SEQ ID NO: 2665164 - DNA, 25 bp, Homo sapien
aacccagttcctccctacattcaga

SEQ ID NO: 2665165 - DNA, 25 bp, Homo sapien
cctccctacattcagaatgtttaca

SEQ ID NO: 2665166 - DNA, 25 bp, Homo sapien
acagaacccagttcctccctacatt

SEQ ID NO: 2665167 - DNA, 25 bp, Homo sapien
tccctacattcagaatgtttacatt

SEQ ID NO: 2665168 - DNA, 25 bp, Homo sapien
ttttgataataggtgagccaggaaa

SEQ ID NO: 2665169 - DNA, 25 bp, Homo sapien
tcttttgataataggtgagccagga

SEQ ID NO: 2665170 - DNA, 25 bp, Homo sapien
tttgataataggtgagccaggaaaa

SEQ ID NO: 2665171 - DNA, 25 bp, Homo sapien
tcttcctcaactattattcttgccc

SEQ ID NO: 2665172 - DNA, 25 bp, Homo sapien
ccagaagtgagtactgggaacagcc

SEQ ID NO: 2665173 - DNA, 25 bp, Homo sapien
acagccagaatccagagtaagtttc

SEQ ID NO: 2665174 - DNA, 25 bp, Homo sapien
tcccagccaaagctagcagtactga

SEQ ID NO: 2665175 - DNA, 25 bp, Homo sapien
gcaaaaatacacttctgtgggtgta

SEQ ID NO: 2665176 - DNA, 25 bp, Homo sapien
tgtgggtgtaattgtattcgtggcc

SEQ ID NO: 2665177 - DNA, 25 bp, Homo sapien
ggaatgcctggtggtagtactaact

SEQ ID NO: 2665178 - DNA, 25 bp, Homo sapien
ggacttcttccattagcaggaatgc

SEQ ID NO: 2665179 - DNA, 25 bp, Homo sapien
ttccactcggtaaaggggctctgaa

SEQ ID NO: 2665180 - DNA, 25 bp, Homo sapien
aagccttgttttagctggtgacact

SEQ ID NO: 2665181 - DNA, 25 bp, Homo sapien
gccttgttttagctggtgacacttt

SEQ ID NO: 2665182 - DNA, 25 bp, Homo sapien
aagaagccttgttttagctggtgac

SEQ ID NO: 2665183 - DNA, 25 bp, Homo sapien
gaagccttgttttagctggtgacac

SEQ ID NO: 2665184 - DNA, 25 bp, Homo sapien
ttttgatgtcaagtaagtcaacata

SEQ ID NO: 2665185 - DNA, 25 bp, Homo sapien
cttttttgatgtcaagtaagtcaac

SEQ ID NO: 2665186 - DNA, 25 bp, Homo sapien
tcttttttgatgtcaagtaagtcaa

SEQ ID NO: 2665187 - DNA, 25 bp, Homo sapien
ttttttgatgtcaagtaagtcaaca

SEQ ID NO: 2665188 - DNA, 25 bp, Homo sapien
gggctacggtccaatttgcacagca

SEQ ID NO: 2665189 - DNA, 25 bp, Homo sapien
agcaaacgcatcactagattcagcg

SEQ ID NO: 2665190 - DNA, 25 bp, Homo sapien
tagattcagcgagaaatattgtaac

SEQ ID NO: 2665191 - DNA, 25 bp, Homo sapien
cttttctgggctacggtccaatttg

SEQ ID NO: 2665192 - DNA, 25 bp, Homo sapien
catgcatgatatgttcaagcttact

SEQ ID NO: 2665193 - DNA, 25 bp, Homo sapien
ctaaaaattagtccttatccatgat

SEQ ID NO: 2665194 - DNA, 25 bp, Homo sapien
ggattactttggtgattaagattac

SEQ ID NO: 2665195 - DNA, 25 bp, Homo sapien
tacctttgaggtatggtgacctggt

SEQ ID NO: 2665196 - DNA, 25 bp, Homo sapien
ctccgctgctaatgcaatcacccac

SEQ ID NO: 2665197 - DNA, 25 bp, Homo sapien
gctgctaatgcaatcacccacctat

SEQ ID NO: 2665198 - DNA, 25 bp, Homo sapien
gcaatcacccacctataaattttgg

SEQ ID NO: 2665199 - DNA, 25 bp, Homo sapien
gctaatgcaatcacccacctataaa

SEQ ID NO: 2665200 - DNA, 25 bp, Homo sapien
tgggaatgaaatatcgcgaggcttc

SEQ ID NO: 2665201 - DNA, 25 bp, Homo sapien
gtgggaatgaaatatcgcgaggctt

SEQ ID NO: 2665202 - DNA, 25 bp, Homo sapien
ggtgggaatgaaatatcgcgaggct

SEQ ID NO: 2665203 - DNA, 25 bp, Homo sapien
tgcagggaacgagaccagtgcattt

SEQ ID NO: 2665204 - DNA, 25 bp, Homo sapien
ggttatttctgtcagcgcgtagggc

SEQ ID NO: 2665205 - DNA, 25 bp, Homo sapien
ccagtgcatttctgctaaggaggtt

SEQ ID NO: 2665206 - DNA, 25 bp, Homo sapien
aggaggttatttctgtcagcgcgta

SEQ ID NO: 2665207 - DNA, 25 bp, Homo sapien
gcgggaaaggagcctagggcagcct

SEQ ID NO: 2665208 - DNA, 25 bp, Homo sapien
cgggaaaggagcctagggcagcctg

SEQ ID NO: 2665209 - DNA, 25 bp, Homo sapien
aaaggagcctagggcagcctgcccg

SEQ ID NO: 2665210 - DNA, 25 bp, Homo sapien
taggcagaaccatagcgacatttca

SEQ ID NO: 2665211 - DNA, 25 bp, Homo sapien
gctgaggtcgttcgtgtctgttgaa

SEQ ID NO: 2665212 - DNA, 25 bp, Homo sapien
tgattgacgtaaaacctacccaatg

SEQ ID NO: 2665213 - DNA, 25 bp, Homo sapien
aagtgtctatgttgtgggaggtccc

SEQ ID NO: 2665214 - DNA, 25 bp, Homo sapien
cagtttctgaatggcggcccacaga

SEQ ID NO: 2665215 - DNA, 25 bp, Homo sapien
gaaaaacgcatcgagccaatccgaa

SEQ ID NO: 2665216 - DNA, 25 bp, Homo sapien
gaccgcacggctttacgagagagga

SEQ ID NO: 2665217 - DNA, 25 bp, Homo sapien
cagagcacagccaattttcgcagac

SEQ ID NO: 2665218 - DNA, 25 bp, Homo sapien
taaatagcctgataatctaaccctg

SEQ ID NO: 2665219 - DNA, 25 bp, Homo sapien
agaatcacttggaaggcttgtgagg

SEQ ID NO: 2665220 - DNA, 25 bp, Homo sapien
gggaaaggtggtttagatacagcta

SEQ ID NO: 2665221 - DNA, 25 bp, Homo sapien
taaccctgtgataatccaagtacag

SEQ ID NO: 2665222 - DNA, 25 bp, Homo sapien
agacagtctcatgtgtgttaacagc

SEQ ID NO: 2665223 - DNA, 25 bp, Homo sapien
tagatataatcacggcctccaagaa

SEQ ID NO: 2665224 - DNA, 25 bp, Homo sapien
aaaagattccactcaatttaccgag

SEQ ID NO: 2665225 - DNA, 25 bp, Homo sapien
gagcacctacgcaccagacatttta

SEQ ID NO: 2665226 - DNA, 25 bp, Homo sapien
tctaacgtttatgtcacctccttta

SEQ ID NO: 2665227 - DNA, 25 bp, Homo sapien
gtgctatcccttagctaatttttag

SEQ ID NO: 2665228 - DNA, 25 bp, Homo sapien
cttctaggtctaacgtttatgtcac

SEQ ID NO: 2665229 - DNA, 25 bp, Homo sapien
ccatccttctaggtctaacgtttat

SEQ ID NO: 2665230 - DNA, 25 bp, Homo sapien
taaaaggtcagattcttgtgactgg

SEQ ID NO: 2665231 - DNA, 25 bp, Homo sapien
tattttggttccttagctgactcag

SEQ ID NO: 2665232 - DNA, 25 bp, Homo sapien
tgtgactggaagcttttaggccttt

SEQ ID NO: 2665233 - DNA, 25 bp, Homo sapien
ttttcttgagtacttcttaggcagc

SEQ ID NO: 2665234 - DNA, 25 bp, Homo sapien
tacagtgtggctcaactgagtcttc

SEQ ID NO: 2665235 - DNA, 25 bp, Homo sapien
tatctactgcttggaactcattcaa

SEQ ID NO: 2665236 - DNA, 25 bp, Homo sapien
tcttacaaggcctaccaaggtgtca

SEQ ID NO: 2665237 - DNA, 25 bp, Homo sapien
gagtcttccacttagggtcttacaa

SEQ ID NO: 2665238 - DNA, 25 bp, Homo sapien
gtttatcctgtaatccactgaagac

SEQ ID NO: 2665239 - DNA, 25 bp, Homo sapien
tcccagtttgggccattataaataa

SEQ ID NO: 2665240 - DNA, 25 bp, Homo sapien
gtaatagtctattgtgtggatgtac

SEQ ID NO: 2665241 - DNA, 25 bp, Homo sapien
ttctttctagaggtgagtaatagtc

SEQ ID NO: 2665242 - DNA, 25 bp, Homo sapien
agaacatattatcactacaacctcc

SEQ ID NO: 2665243 - DNA, 25 bp, Homo sapien
ctgactggtgagatatggtagctct

SEQ ID NO: 2665244 - DNA, 25 bp, Homo sapien
tttatgtccttgccccactttcaat

SEQ ID NO: 2665245 - DNA, 25 bp, Homo sapien
gtgcactaatcttaaatgaacagtt

SEQ ID NO: 2665246 - DNA, 25 bp, Homo sapien
ttctccctcatagtcattcccaatt

SEQ ID NO: 2665247 - DNA, 25 bp, Homo sapien
ccctcatagtcattcccaattctaa

SEQ ID NO: 2665248 - DNA, 25 bp, Homo sapien
tccctcatagtcattcccaattcta

SEQ ID NO: 2665249 - DNA, 25 bp, Homo sapien
ttcttctccctcatagtcattccca

SEQ ID NO: 2665250 - DNA, 25 bp, Homo sapien
tctggccatcaggccataagtatgc

SEQ ID NO: 2665251 - DNA, 25 bp, Homo sapien
tcaggccataagtatgcaagctttg

SEQ ID NO: 2665252 - DNA, 25 bp, Homo sapien
ggccatcaggccataagtatgcaag

SEQ ID NO: 2665253 - DNA, 25 bp, Homo sapien
ctacacagcttgaacaaaatatgtg

SEQ ID NO: 2665254 - DNA, 25 bp, Homo sapien
agagaacacagtacatcttgcgaac

SEQ ID NO: 2665255 - DNA, 25 bp, Homo sapien
ctgtgaaaaggtcaaagtttgcaaa

SEQ ID NO: 2665256 - DNA, 25 bp, Homo sapien
acatcttgcgaactgtgaaaaggtc

SEQ ID NO: 2665257 - DNA, 25 bp, Homo sapien
gatttggaaataagagaacacagta

SEQ ID NO: 2665258 - DNA, 25 bp, Homo sapien
ccaaaaggtaattgaccagcctcaa

SEQ ID NO: 2665259 - DNA, 25 bp, Homo sapien
taatcttactcccagcaccaaaagg

SEQ ID NO: 2665260 - DNA, 25 bp, Homo sapien
aaaaatcagggtatagtaggcacta

SEQ ID NO: 2665261 - DNA, 25 bp, Homo sapien
gagtgcccatgctgtacatttaaaa

SEQ ID NO: 2665262 - DNA, 25 bp, Homo sapien
aactctgcagccgaagtgccggccg

SEQ ID NO: 2665263 - DNA, 25 bp, Homo sapien
gtgccggccggcaaggaaagggtga

SEQ ID NO: 2665264 - DNA, 25 bp, Homo sapien
gtctcgaagcgtgggcaaaactctg

SEQ ID NO: 2665265 - DNA, 25 bp, Homo sapien
agagaacgccggcgcttgactgccg

SEQ ID NO: 2665266 - DNA, 25 bp, Homo sapien
tgcaaacagtcctaggagtagagac

SEQ ID NO: 2665267 - DNA, 25 bp, Homo sapien
gaggtaccaagctatctccaaacgc

SEQ ID NO: 2665268 - DNA, 25 bp, Homo sapien
tgaatagtcggtcctcagctgcaat

SEQ ID NO: 2665269 - DNA, 25 bp, Homo sapien
caatctgcggcaatgactagtgcct

SEQ ID NO: 2665270 - DNA, 25 bp, Homo sapien
agaaacaactgcaagagcccactag

SEQ ID NO: 2665271 - DNA, 25 bp, Homo sapien
tgagcctagagaaagcgtatctccc

SEQ ID NO: 2665272 - DNA, 25 bp, Homo sapien
tgtctaagaaactaggtcagtgccc

SEQ ID NO: 2665273 - DNA, 25 bp, Homo sapien
taggcctactcaaaaccactgggct

SEQ ID NO: 2665274 - DNA, 25 bp, Homo sapien
tataccagatgagtgggcaaattct

SEQ ID NO: 2665275 - DNA, 25 bp, Homo sapien
ataccagatgagtgggcaaattctg

SEQ ID NO: 2665276 - DNA, 25 bp, Homo sapien
agttataccagatgagtgggcaaat

SEQ ID NO: 2665277 - DNA, 25 bp, Homo sapien
ttataccagatgagtgggcaaattc

SEQ ID NO: 2665278 - DNA, 25 bp, Homo sapien
aaggtataagcagcacgtcctcttc

SEQ ID NO: 2665279 - DNA, 25 bp, Homo sapien
ggtggtttcaacactacatcaggta

SEQ ID NO: 2665280 - DNA, 25 bp, Homo sapien
gcctcaatattaaaggtataagcag

SEQ ID NO: 2665281 - DNA, 25 bp, Homo sapien
tattaaaggtataagcagcacgtcc

SEQ ID NO: 2665282 - DNA, 25 bp, Homo sapien
ctcaactcctgtttcaaagccagca

SEQ ID NO: 2665283 - DNA, 25 bp, Homo sapien
tctcaactcctgtttcaaagccagc

SEQ ID NO: 2665284 - DNA, 25 bp, Homo sapien
tctctcaactcctgtttcaaagcca

SEQ ID NO: 2665285 - DNA, 25 bp, Homo sapien
tcaactcctgtttcaaagccagcat

SEQ ID NO: 2665286 - DNA, 25 bp, Homo sapien
tatatatcttgtgcttaaacactgt

SEQ ID NO: 2665287 - DNA, 25 bp, Homo sapien
atgattatatatcttgtgcttaaac

SEQ ID NO: 2665288 - DNA, 25 bp, Homo sapien
ttatatatcttgtgcttaaacactg

SEQ ID NO: 2665289 - DNA, 25 bp, Homo sapien
gattatatatcttgtgcttaaacac

SEQ ID NO: 2665290 - DNA, 25 bp, Homo sapien
agagtagactaccagtcattaaaag

SEQ ID NO: 2665291 - DNA, 25 bp, Homo sapien
taatatatccacagagtagactacc

SEQ ID NO: 2665292 - DNA, 25 bp, Homo sapien
ccaagaataataaggatatgtgaaa

SEQ ID NO: 2665293 - DNA, 25 bp, Homo sapien
taaagagaatatacatgcataagaa

SEQ ID NO: 2665294 - DNA, 25 bp, Homo sapien
caaagattgactgtagaaggccacc

SEQ ID NO: 2665295 - DNA, 25 bp, Homo sapien
tgagcatccagagagctatctatct

SEQ ID NO: 2665296 - DNA, 25 bp, Homo sapien
tcatagaacaaaaatgatcgtctca

SEQ ID NO: 2665297 - DNA, 25 bp, Homo sapien
tctgattcgtctaagaattgtggaa

SEQ ID NO: 2665298 - DNA, 25 bp, Homo sapien
aaagcatctaaaaaattagatagtg

SEQ ID NO: 2665299 - DNA, 25 bp, Homo sapien
atgaaaagcatctaaaaaattagat

SEQ ID NO: 2665300 - DNA, 25 bp, Homo sapien
gcatctaaaaaattagatagtggct

SEQ ID NO: 2665301 - DNA, 25 bp, Homo sapien
aaaaaattagatagtggctgggcac

SEQ ID NO: 2665302 - DNA, 25 bp, Homo sapien
tcttccttgtataccttcatgtatc

SEQ ID NO: 2665303 - DNA, 25 bp, Homo sapien
ctggtatccattcttccttgtatac

SEQ ID NO: 2665304 - DNA, 25 bp, Homo sapien
atccattcttccttgtataccttca

SEQ ID NO: 2665305 - DNA, 25 bp, Homo sapien
ggtatccattcttccttgtatacct

SEQ ID NO: 2665306 - DNA, 25 bp, Homo sapien
tctaggaatttgtggcattgaacat

SEQ ID NO: 2665307 - DNA, 25 bp, Homo sapien
gaaggacacaacagttgtccagaaa

SEQ ID NO: 2665308 - DNA, 25 bp, Homo sapien
actatttgaaggacacaacagttgt

SEQ ID NO: 2665309 - DNA, 25 bp, Homo sapien
cctctaggaatttgtggcattgaac

SEQ ID NO: 2665310 - DNA, 25 bp, Homo sapien
gcatcatctctcttggaagtcttct

SEQ ID NO: 2665311 - DNA, 25 bp, Homo sapien
ttttacatttatttcttggcatcat

SEQ ID NO: 2665312 - DNA, 25 bp, Homo sapien
catttatttcttggcatcatctctc

SEQ ID NO: 2665313 - DNA, 25 bp, Homo sapien
atctctcttggaagtcttctccaat

SEQ ID NO: 2665314 - DNA, 25 bp, Homo sapien
taaaggacagtacaagcttatcaga

SEQ ID NO: 2665315 - DNA, 25 bp, Homo sapien
tggaggacatcttaacataaaggac

SEQ ID NO: 2665316 - DNA, 25 bp, Homo sapien
tacagatgtgtgatcctctaggaca

SEQ ID NO: 2665317 - DNA, 25 bp, Homo sapien
acacatggcagtagctggttcttca

SEQ ID NO: 2665318 - DNA, 25 bp, Homo sapien
tcttcagtattagtgagtggtgtgc

SEQ ID NO: 2665319 - DNA, 25 bp, Homo sapien
tgtgcctttgcctgcgtcttttgcc

SEQ ID NO: 2665320 - DNA, 25 bp, Homo sapien
cagtattagtgagtggtgtgccttt

SEQ ID NO: 2665321 - DNA, 25 bp, Homo sapien
cacatcttcagtattagtgagtggt

SEQ ID NO: 2665322 - DNA, 25 bp, Homo sapien
gtgccacataggaaccaggaagtct

SEQ ID NO: 2665323 - DNA, 25 bp, Homo sapien
aagtctctatttctattattgctac

SEQ ID NO: 2665324 - DNA, 25 bp, Homo sapien
tttccaccacacagatctaaatcag

SEQ ID NO: 2665325 - DNA, 25 bp, Homo sapien
tattgctacctcaaatacctttaaa

SEQ ID NO: 2665326 - DNA, 25 bp, Homo sapien
ttacttcctgttgccaggaattctt

SEQ ID NO: 2665327 - DNA, 25 bp, Homo sapien
gtcaatactagcaattattaggaat

SEQ ID NO: 2665328 - DNA, 25 bp, Homo sapien
tttacttcctgttgccaggaattct

SEQ ID NO: 2665329 - DNA, 25 bp, Homo sapien
ttatttacttcctgttgccaggaat

SEQ ID NO: 2665330 - DNA, 25 bp, Homo sapien
tcctcctgttctgcggcatcatcgt

SEQ ID NO: 2665331 - DNA, 25 bp, Homo sapien
ttcctcctgttctgcggcatcatcg

SEQ ID NO: 2665332 - DNA, 25 bp, Homo sapien
agactagaaagaactccagagacca

SEQ ID NO: 2665333 - DNA, 25 bp, Homo sapien
taagacttggcaattagcacaatgc

SEQ ID NO: 2665334 - DNA, 25 bp, Homo sapien
gggatgcaatcagagagattacagc

SEQ ID NO: 2665335 - DNA, 25 bp, Homo sapien
gggaagcaaccatgtttgtctaaga

SEQ ID NO: 2665336 - DNA, 25 bp, Homo sapien
catgttgtcatcactgtctgcgcca

SEQ ID NO: 2665337 - DNA, 25 bp, Homo sapien
aataggttgcctcatccatgttgtc

SEQ ID NO: 2665338 - DNA, 25 bp, Homo sapien
caaagtatgaattaatgtagtcatt

SEQ ID NO: 2665339 - DNA, 25 bp, Homo sapien
tcatcactgtctgcgccaaaatcat

SEQ ID NO: 2665340 - DNA, 25 bp, Homo sapien
gctcttaacggtacctcccagagta

SEQ ID NO: 2665341 - DNA, 25 bp, Homo sapien
tagaggataatatctccccaaaggg

SEQ ID NO: 2665342 - DNA, 25 bp, Homo sapien
gtactctgaaacataaaaggccacc

SEQ ID NO: 2665343 - DNA, 25 bp, Homo sapien
caagcattacagcaaccagttttgc

SEQ ID NO: 2665344 - DNA, 25 bp, Homo sapien
aacatccctgcttaatagttactag

SEQ ID NO: 2665345 - DNA, 25 bp, Homo sapien
tactagttaagatctatattaacaa

SEQ ID NO: 2665346 - DNA, 25 bp, Homo sapien
tttggaacaaacatccctgcttaat

SEQ ID NO: 2665347 - DNA, 25 bp, Homo sapien
gaacaaacatccctgcttaatagtt

SEQ ID NO: 2665348 - DNA, 25 bp, Homo sapien
tcttccacgtatgtgcatattgcac

SEQ ID NO: 2665349 - DNA, 25 bp, Homo sapien
taaagtctgtatttaaatggtgcac

SEQ ID NO: 2665350 - DNA, 25 bp, Homo sapien
caaaaatgttgctcaggtaatcagt

SEQ ID NO: 2665351 - DNA, 25 bp, Homo sapien
tatcatgaagcaaggatctagtcag

SEQ ID NO: 2665352 - DNA, 25 bp, Homo sapien
tgtgcacgcatgtacttgtatgcaa

SEQ ID NO: 2665353 - DNA, 25 bp, Homo sapien
aaaatggttacacactctgctggcc

SEQ ID NO: 2665354 - DNA, 25 bp, Homo sapien
tctgctggccacattaaaaattaga

SEQ ID NO: 2665355 - DNA, 25 bp, Homo sapien
tctttgctatctcactcctaggaag

SEQ ID NO: 2665356 - DNA, 25 bp, Homo sapien
gactcctcgagccagggaaaacatt

SEQ ID NO: 2665357 - DNA, 25 bp, Homo sapien
aacatggcgcaattttctgaaaccg

SEQ ID NO: 2665358 - DNA, 25 bp, Homo sapien
tgtggacgctggacaaagacgcagc

SEQ ID NO: 2665359 - DNA, 25 bp, Homo sapien
aaaaaatgcaagacagctccccgac

SEQ ID NO: 2665360 - DNA, 25 bp, Homo sapien
tggcgtcgggaacaccctgccttgg

SEQ ID NO: 2665361 - DNA, 25 bp, Homo sapien
cccgggctgcgcactctgctctccg

SEQ ID NO: 2665362 - DNA, 25 bp, Homo sapien
tctgctctccgcagcgggcagccag

SEQ ID NO: 2665363 - DNA, 25 bp, Homo sapien
gtccgcgctctggcgtcgggaacac

SEQ ID NO: 2665364 - DNA, 25 bp, Homo sapien
ctctgactcccgtccgtactccttg

SEQ ID NO: 2665365 - DNA, 25 bp, Homo sapien
gtactccttgcccgcgctgctgatt

SEQ ID NO: 2665366 - DNA, 25 bp, Homo sapien
tgcccgcgctgctgattcttactac

SEQ ID NO: 2665367 - DNA, 25 bp, Homo sapien
tccttgcccgcgctgctgattctta

SEQ ID NO: 2665368 - DNA, 25 bp, Homo sapien
tggggctcagcgatgctcgcagcac

SEQ ID NO: 2665369 - DNA, 25 bp, Homo sapien
ccctggggctcagcgatgctcgcag

SEQ ID NO: 2665370 - DNA, 25 bp, Homo sapien
gggctcagcgatgctcgcagcacca

SEQ ID NO: 2665371 - DNA, 25 bp, Homo sapien
tgctgatgctgaggcgctcccctgg

SEQ ID NO: 2665372 - DNA, 25 bp, Homo sapien
caagtacttcgttgcatgtaaccaa

SEQ ID NO: 2665373 - DNA, 25 bp, Homo sapien
aactgaagacagacaggggaccttg

SEQ ID NO: 2665374 - DNA, 25 bp, Homo sapien
tgtaaccaaattggctagttgaaat

SEQ ID NO: 2665375 - DNA, 25 bp, Homo sapien
ttgaaatgctaattgcctttcagca

SEQ ID NO: 2665376 - DNA, 25 bp, Homo sapien
gaagctttcgctgtccattcatggg

SEQ ID NO: 2665377 - DNA, 25 bp, Homo sapien
taagccctctgggaataatccgaac

SEQ ID NO: 2665378 - DNA, 25 bp, Homo sapien
ggagtctgcctctcatggtcaaagt

SEQ ID NO: 2665379 - DNA, 25 bp, Homo sapien
cccaaagccatcgtggagacaggat

SEQ ID NO: 2665380 - DNA, 25 bp, Homo sapien
ctggagtccaggcagcactgcgacc

SEQ ID NO: 2665381 - DNA, 25 bp, Homo sapien
aatggtgttctgtgcctaggaggca

SEQ ID NO: 2665382 - DNA, 25 bp, Homo sapien
gcagatttggatcatgcctgagaat

SEQ ID NO: 2665383 - DNA, 25 bp, Homo sapien
gcagcactgcgaccctggagaatgg

SEQ ID NO: 2665384 - DNA, 25 bp, Homo sapien
tttgcaaggtaattagttgtaggcc

SEQ ID NO: 2665385 - DNA, 25 bp, Homo sapien
gatataaacccaagccatcagagtc

SEQ ID NO: 2665386 - DNA, 25 bp, Homo sapien
taatagcagctaactttaccaagca

SEQ ID NO: 2665387 - DNA, 25 bp, Homo sapien
caactcagtctcttatgggcagcac

SEQ ID NO: 2665388 - DNA, 25 bp, Homo sapien
cattgtatctctcatcaataaaatg

SEQ ID NO: 2665389 - DNA, 25 bp, Homo sapien
caacattgtatctctcatcaataaa

SEQ ID NO: 2665390 - DNA, 25 bp, Homo sapien
aacattgtatctctcatcaataaaa

SEQ ID NO: 2665391 - DNA, 25 bp, Homo sapien
attgtatctctcatcaataaaatgc

SEQ ID NO: 2665392 - DNA, 25 bp, Homo sapien
tgtcttccaacccaggaatgttcat

SEQ ID NO: 2665393 - DNA, 25 bp, Homo sapien
tccaggcaaacctgccagaagacca

SEQ ID NO: 2665394 - DNA, 25 bp, Homo sapien
gccagaagaccaatgaaatctgaag

SEQ ID NO: 2665395 - DNA, 25 bp, Homo sapien
aagaagagttttccttgaccagctg

SEQ ID NO: 2665396 - DNA, 25 bp, Homo sapien
ctccaaacacaaataggatgagtaa

SEQ ID NO: 2665397 - DNA, 25 bp, Homo sapien
ttactaataaagatgcagagggcat

SEQ ID NO: 2665398 - DNA, 25 bp, Homo sapien
acacaaataggatgagtaaagctga

SEQ ID NO: 2665399 - DNA, 25 bp, Homo sapien
agatttactaataaagatgcagagg

SEQ ID NO: 2665400 - DNA, 25 bp, Homo sapien
cagtttgtccagtaaatcttatttc

SEQ ID NO: 2665401 - DNA, 25 bp, Homo sapien
tggctctcctatcctttcaatgata

SEQ ID NO: 2665402 - DNA, 25 bp, Homo sapien
caattgcagtaacatttgctggctc

SEQ ID NO: 2665403 - DNA, 25 bp, Homo sapien
taagacgaataactgttgtacttgt

SEQ ID NO: 2665404 - DNA, 25 bp, Homo sapien
cagcatatgtgtcaaaaaagtcacc

SEQ ID NO: 2665405 - DNA, 25 bp, Homo sapien
ttcgtcaggctctggtaagtcatca

SEQ ID NO: 2665406 - DNA, 25 bp, Homo sapien
caggtataaaagctgcagcatatgt

SEQ ID NO: 2665407 - DNA, 25 bp, Homo sapien
ttgtttctccggcaggtataaaagc

SEQ ID NO: 2665408 - DNA, 25 bp, Homo sapien
tattgtcacagtaacagtccttggc

SEQ ID NO: 2665409 - DNA, 25 bp, Homo sapien
ttgataatattgtcacagtaacagt

SEQ ID NO: 2665410 - DNA, 25 bp, Homo sapien
gataatattgtcacagtaacagtcc

SEQ ID NO: 2665411 - DNA, 25 bp, Homo sapien
taatattgtcacagtaacagtcctt

SEQ ID NO: 2665412 - DNA, 25 bp, Homo sapien
gaaaggtgacaaactcaaatgctca

SEQ ID NO: 2665413 - DNA, 25 bp, Homo sapien
catcagccagcttgtcagtgaaaag

SEQ ID NO: 2665414 - DNA, 25 bp, Homo sapien
ggaacacggacacagccaagtacat

SEQ ID NO: 2665415 - DNA, 25 bp, Homo sapien
tgctaataactttcaggacaggatc

SEQ ID NO: 2665416 - DNA, 25 bp, Homo sapien
ggctcactcactgcgattgagggaa

SEQ ID NO: 2665417 - DNA, 25 bp, Homo sapien
cttttccctgatgagagtaagaggc

SEQ ID NO: 2665418 - DNA, 25 bp, Homo sapien
gagagtaagaggcatagactcattt

SEQ ID NO: 2665419 - DNA, 25 bp, Homo sapien
gctcactcactgcgattgagggaag

SEQ ID NO: 2665420 - DNA, 25 bp, Homo sapien
gatatttcctttaactggactcaaa

SEQ ID NO: 2665421 - DNA, 25 bp, Homo sapien
atatttcctttaactggactcaaat

SEQ ID NO: 2665422 - DNA, 25 bp, Homo sapien
caacagaagggcttattagcacagc

SEQ ID NO: 2665423 - DNA, 25 bp, Homo sapien
ctctgaaggaatctcacgggactat

SEQ ID NO: 2665424 - DNA, 25 bp, Homo sapien
caatctccggtatggtgtcatcaac

SEQ ID NO: 2665425 - DNA, 25 bp, Homo sapien
tgtgaaacgattcagcaatctccgg

SEQ ID NO: 2665426 - DNA, 25 bp, Homo sapien
caccacaaaacttaaatctggaata

SEQ ID NO: 2665427 - DNA, 25 bp, Homo sapien
ttctaacagttcattgttgtgtcca

SEQ ID NO: 2665428 - DNA, 25 bp, Homo sapien
gacacatattctaacagttcattgt

SEQ ID NO: 2665429 - DNA, 25 bp, Homo sapien
tgttgtgtccaacaccacaaaactt

SEQ ID NO: 2665430 - DNA, 25 bp, Homo sapien
atgtgaatgtgtcctagggaactac

SEQ ID NO: 2665431 - DNA, 25 bp, Homo sapien
aagaaaacagtgaagccatggtaga

SEQ ID NO: 2665432 - DNA, 25 bp, Homo sapien
agaaaacagtgaagccatggtagaa

SEQ ID NO: 2665433 - DNA, 25 bp, Homo sapien
gaactactatactatgaatcatttg

SEQ ID NO: 2665434 - DNA, 25 bp, Homo sapien
tctgcacctcctcgtattgtatgag

SEQ ID NO: 2665435 - DNA, 25 bp, Homo sapien
gatatctgctgttactggtgaggga

SEQ ID NO: 2665436 - DNA, 25 bp, Homo sapien
ccacagtaagaggaattgttgccaa

SEQ ID NO: 2665437 - DNA, 25 bp, Homo sapien
cgtgtcaacacccaattcgcagaga

SEQ ID NO: 2665438 - DNA, 25 bp, Homo sapien
gataagtatcgttcacctgggctgc

SEQ ID NO: 2665439 - DNA, 25 bp, Homo sapien
gtccctcctagtcttgtaaaactca

SEQ ID NO: 2665440 - DNA, 25 bp, Homo sapien
gttattaggccatagacatcatcac

SEQ ID NO: 2665441 - DNA, 25 bp, Homo sapien
ctccagcaggaatgtaaagtacaga

SEQ ID NO: 2665442 - DNA, 25 bp, Homo sapien
tgcaatggctggagtaaccagtaaa

SEQ ID NO: 2665443 - DNA, 25 bp, Homo sapien
ccaaatctagggcttatgggtggga

SEQ ID NO: 2665444 - DNA, 25 bp, Homo sapien
cttctggttcatgcaaaataattgg

SEQ ID NO: 2665445 - DNA, 25 bp, Homo sapien
tggaagattgctgagaaagccaatt

SEQ ID NO: 2665446 - DNA, 25 bp, Homo sapien
tcaaactccagtagacagtagcctg

SEQ ID NO: 2665447 - DNA, 25 bp, Homo sapien
cattcatttccggtatgtcatcacc

SEQ ID NO: 2665448 - DNA, 25 bp, Homo sapien
gttccatcccgatgtaagggaatgt

SEQ ID NO: 2665449 - DNA, 25 bp, Homo sapien
gcttttgaattaaagccagagggct

SEQ ID NO: 2665450 - DNA, 25 bp, Homo sapien
tttctacagattcccacagcattgg

SEQ ID NO: 2665451 - DNA, 25 bp, Homo sapien
gaatgcttacaccttacttaaggaa

SEQ ID NO: 2665452 - DNA, 25 bp, Homo sapien
gttttcaagattgtccactgaatgc

SEQ ID NO: 2665453 - DNA, 25 bp, Homo sapien
gaaactgtcagctaagctaacaaag

SEQ ID NO: 2665454 - DNA, 25 bp, Homo sapien
cacaagttttttagtatcagggcaa

SEQ ID NO: 2665455 - DNA, 25 bp, Homo sapien
tttattgtaatcatgcttgctatca

SEQ ID NO: 2665456 - DNA, 25 bp, Homo sapien
cagggcaacttttgtctatattgag

SEQ ID NO: 2665457 - DNA, 25 bp, Homo sapien
taaactgttatcacaataaactgtt

SEQ ID NO: 2665458 - DNA, 25 bp, Homo sapien
ttttcaaacagccttgaaagcacat

SEQ ID NO: 2665459 - DNA, 25 bp, Homo sapien
tttcaaacagccttgaaagcacatg

SEQ ID NO: 2665460 - DNA, 25 bp, Homo sapien
aaatgtagagccctagagcttcatt

SEQ ID NO: 2665461 - DNA, 25 bp, Homo sapien
tgtagagccctagagcttcattttt

SEQ ID NO: 2665462 - DNA, 25 bp, Homo sapien
caagcactgtacaggctcacaaacc

SEQ ID NO: 2665463 - DNA, 25 bp, Homo sapien
tatggaagatgaccccatggccagc

SEQ ID NO: 2665464 - DNA, 25 bp, Homo sapien
gacaaatgctagcaagaggttcggc

SEQ ID NO: 2665465 - DNA, 25 bp, Homo sapien
gaggttcggcagttcccacttatgg

SEQ ID NO: 2665466 - DNA, 25 bp, Homo sapien
ctgtcaacacagaaagaagtgtggg

SEQ ID NO: 2665467 - DNA, 25 bp, Homo sapien
aaggaggcagggcaccatttgctaa

SEQ ID NO: 2665468 - DNA, 25 bp, Homo sapien
tgagaaacttagaatggcaagggaa

SEQ ID NO: 2665469 - DNA, 25 bp, Homo sapien
aaatctcactaatactgtgagaaac

SEQ ID NO: 2665470 - DNA, 25 bp, Homo sapien
atacacgacaaacctttcagtttct

SEQ ID NO: 2665471 - DNA, 25 bp, Homo sapien
ccaaaatacacgacaaacctttcag

SEQ ID NO: 2665472 - DNA, 25 bp, Homo sapien
caaaatacacgacaaacctttcagt

SEQ ID NO: 2665473 - DNA, 25 bp, Homo sapien
tacacgacaaacctttcagtttcta

SEQ ID NO: 2665474 - DNA, 25 bp, Homo sapien
gctctaaaccttgcgaaatgtcacg

SEQ ID NO: 2665475 - DNA, 25 bp, Homo sapien
gaattatcaatcctgcaagctgctc

SEQ ID NO: 2665476 - DNA, 25 bp, Homo sapien
taaatggactaaagcaagccacgct

SEQ ID NO: 2665477 - DNA, 25 bp, Homo sapien
gaaaagttctgtatacggctctgag

SEQ ID NO: 2665478 - DNA, 25 bp, Homo sapien
aaggaaggctatgaggaattagacc

SEQ ID NO: 2665479 - DNA, 25 bp, Homo sapien
tagaccttaagtgaattcacgtgtg

SEQ ID NO: 2665480 - DNA, 25 bp, Homo sapien
tgaattcacgtgtgttgaaatcatt

SEQ ID NO: 2665481 - DNA, 25 bp, Homo sapien
tatgtacaccaagaatactgtaacc

SEQ ID NO: 2665482 - DNA, 25 bp, Homo sapien
aaataattaggtcacggctagtata

SEQ ID NO: 2665483 - DNA, 25 bp, Homo sapien
tcccccagggtcatcattttccaaa

SEQ ID NO: 2665484 - DNA, 25 bp, Homo sapien
attaggtcacggctagtatatccag

SEQ ID NO: 2665485 - DNA, 25 bp, Homo sapien
ataacatagggtcctctggaagcag

SEQ ID NO: 2665486 - DNA, 25 bp, Homo sapien
tcttgctagcaaggtgatcactatc

SEQ ID NO: 2665487 - DNA, 25 bp, Homo sapien
tactcccgtgtttccatagaattca

SEQ ID NO: 2665488 - DNA, 25 bp, Homo sapien
tgtagaaactgcttaacaagggacc

SEQ ID NO: 2665489 - DNA, 25 bp, Homo sapien
ccttgatcggatgatgtggagctct

SEQ ID NO: 2665490 - DNA, 25 bp, Homo sapien
cagaatcgttatattgacaatggtg

SEQ ID NO: 2665491 - DNA, 25 bp, Homo sapien
cgttctccgtggctgctgaggacca

SEQ ID NO: 2665492 - DNA, 25 bp, Homo sapien
tgaggaccacccagtagtgttcatc

SEQ ID NO: 2665493 - DNA, 25 bp, Homo sapien
gacaatggtggcacttcccaacttg

SEQ ID NO: 2665494 - DNA, 25 bp, Homo sapien
tgatacactaacatcaccaaagttg

SEQ ID NO: 2665495 - DNA, 25 bp, Homo sapien
gacaacagtcccttgtacaggaaat

SEQ ID NO: 2665496 - DNA, 25 bp, Homo sapien
caaagttgcctcgatttcttactac

SEQ ID NO: 2665497 - DNA, 25 bp, Homo sapien
taaagtctggactaaccacccatga

SEQ ID NO: 2665498 - DNA, 25 bp, Homo sapien
tatttcccactttagctcctccagt

SEQ ID NO: 2665499 - DNA, 25 bp, Homo sapien
cttctaatcctcagagttgcagttg

SEQ ID NO: 2665500 - DNA, 25 bp, Homo sapien
tagctcctccagtgccattcagtag

SEQ ID NO: 2665501 - DNA, 25 bp, Homo sapien
tcagtaggataacggtaaattcttc

SEQ ID NO: 2665502 - DNA, 25 bp, Homo sapien
tgtaaagttggcagtctcaccttcc

SEQ ID NO: 2665503 - DNA, 25 bp, Homo sapien
cttgcagtagccttcccatccttgg

SEQ ID NO: 2665504 - DNA, 25 bp, Homo sapien
caaatatggatatgctctgctgtct

SEQ ID NO: 2665505 - DNA, 25 bp, Homo sapien
ccttggtagcatactggaccatgca

SEQ ID NO: 2665506 - DNA, 25 bp, Homo sapien
ctactccatattgatatactactgt

SEQ ID NO: 2665507 - DNA, 25 bp, Homo sapien
gtttcatagaactcctgcccaggct

SEQ ID NO: 2665508 - DNA, 25 bp, Homo sapien
agaaacactaccaaagtatcctcgg

SEQ ID NO: 2665509 - DNA, 25 bp, Homo sapien
agatacagaaacactaccaaagtat

SEQ ID NO: 2665510 - DNA, 25 bp, Homo sapien
aaagtatcctcggtgcctcaaaatc

SEQ ID NO: 2665511 - DNA, 25 bp, Homo sapien
atatggctctaattatctaagtata

SEQ ID NO: 2665512 - DNA, 25 bp, Homo sapien
tggctctaattatctaagtataaaa

SEQ ID NO: 2665513 - DNA, 25 bp, Homo sapien
gctctaattatctaagtataaaatg

SEQ ID NO: 2665514 - DNA, 25 bp, Homo sapien
tatggctctaattatctaagtataa

SEQ ID NO: 2665515 - DNA, 25 bp, Homo sapien
gaggttggtttctgctagctggccc

SEQ ID NO: 2665516 - DNA, 25 bp, Homo sapien
caaagcatccgttccactgtggtga

SEQ ID NO: 2665517 - DNA, 25 bp, Homo sapien
cattggtggcaaaccagcagggaac

SEQ ID NO: 2665518 - DNA, 25 bp, Homo sapien
gacagtatttcccagcccagttgta

SEQ ID NO: 2665519 - DNA, 25 bp, Homo sapien
tgagcatgaaatatctacagcaggc

SEQ ID NO: 2665520 - DNA, 25 bp, Homo sapien
gatacttgtaggtattcacacagcc

SEQ ID NO: 2665521 - DNA, 25 bp, Homo sapien
tcagcaatactgaactagcagcagt

SEQ ID NO: 2665522 - DNA, 25 bp, Homo sapien
ccttttatgatactgtgagatgcca

SEQ ID NO: 2665523 - DNA, 25 bp, Homo sapien
attgccatttatccctgctccaatt

SEQ ID NO: 2665524 - DNA, 25 bp, Homo sapien
cattgccatttatccctgctccaat

SEQ ID NO: 2665525 - DNA, 25 bp, Homo sapien
tcattgccatttatccctgctccaa

SEQ ID NO: 2665526 - DNA, 25 bp, Homo sapien
cagtttccgctcataggacctcaca

SEQ ID NO: 2665527 - DNA, 25 bp, Homo sapien
gaactccagatatccagaaattggg

SEQ ID NO: 2665528 - DNA, 25 bp, Homo sapien
ttttcttccgaaatacgagctcctc

SEQ ID NO: 2665529 - DNA, 25 bp, Homo sapien
taaatcactttttgcgggcatggca

SEQ ID NO: 2665530 - DNA, 25 bp, Homo sapien
gaaatggttgatccctcctctgcaa

SEQ ID NO: 2665531 - DNA, 25 bp, Homo sapien
ggcattagcaaagtcatcaacaagg

SEQ ID NO: 2665532 - DNA, 25 bp, Homo sapien
catgcacataatccagagctcctct

SEQ ID NO: 2665533 - DNA, 25 bp, Homo sapien
aaggtaattaatgccatcagtttca

SEQ ID NO: 2665534 - DNA, 25 bp, Homo sapien
cagcagacatgtttgaagcaaattc

SEQ ID NO: 2665535 - DNA, 25 bp, Homo sapien
aatgtatcagttacagttgtaaata

SEQ ID NO: 2665536 - DNA, 25 bp, Homo sapien
gtaaataataatgggaagcgacact

SEQ ID NO: 2665537 - DNA, 25 bp, Homo sapien
ctgataaaggttttacagcagacat

SEQ ID NO: 2665538 - DNA, 25 bp, Homo sapien
tccttttcaggatctatgcttgcac

SEQ ID NO: 2665539 - DNA, 25 bp, Homo sapien
tgcaccactggtaggagttgagcct

SEQ ID NO: 2665540 - DNA, 25 bp, Homo sapien
tatggatgatcactagctttgatgg

SEQ ID NO: 2665541 - DNA, 25 bp, Homo sapien
tgcagaaaccaatgtcacacggaaa

SEQ ID NO: 2665542 - DNA, 25 bp, Homo sapien
aggaggcagccctgtggagaactgc

SEQ ID NO: 2665543 - DNA, 25 bp, Homo sapien
ctgaggaggcagccctgtggagaac

SEQ ID NO: 2665544 - DNA, 25 bp, Homo sapien
gcgtccttaggctgaggaggcagcc

SEQ ID NO: 2665545 - DNA, 25 bp, Homo sapien
tgcgtccttaggctgaggaggcagc

SEQ ID NO: 2665546 - DNA, 25 bp, Homo sapien
cagtgatatgtggaacgctgcttgc

SEQ ID NO: 2665547 - DNA, 25 bp, Homo sapien
tggtaatcctcaggactgaatgctg

SEQ ID NO: 2665548 - DNA, 25 bp, Homo sapien
gaatgctgtcaaggacactgttcta

SEQ ID NO: 2665549 - DNA, 25 bp, Homo sapien
gaagtccctgtgcacggatgaccaa

SEQ ID NO: 2665550 - DNA, 25 bp, Homo sapien
tataaaagactgatccattagatta

SEQ ID NO: 2665551 - DNA, 25 bp, Homo sapien
taaaagactgatccattagattaca

SEQ ID NO: 2665552 - DNA, 25 bp, Homo sapien
aatataaaagactgatccattagat

SEQ ID NO: 2665553 - DNA, 25 bp, Homo sapien
aaaagactgatccattagattacaa

SEQ ID NO: 2665554 - DNA, 25 bp, Homo sapien
aggaatagaattatcagtgatgttt

SEQ ID NO: 2665555 - DNA, 25 bp, Homo sapien
caggaatagaattatcagtgatgtt

SEQ ID NO: 2665556 - DNA, 25 bp, Homo sapien
gaaattctaatgtgccagcaacatt

SEQ ID NO: 2665557 - DNA, 25 bp, Homo sapien
tgaaattctaatgtgccagcaacat

SEQ ID NO: 2665558 - DNA, 25 bp, Homo sapien
atatctgtagatagatctagcagag

SEQ ID NO: 2665559 - DNA, 25 bp, Homo sapien
caactcattatagatcatccaaaag

SEQ ID NO: 2665560 - DNA, 25 bp, Homo sapien
actcattatagatcatccaaaagga

SEQ ID NO: 2665561 - DNA, 25 bp, Homo sapien
aactcattatagatcatccaaaagg

SEQ ID NO: 2665562 - DNA, 25 bp, Homo sapien
taactgttacttcccaattctgtca

SEQ ID NO: 2665563 - DNA, 25 bp, Homo sapien
aatagtagaattatagcaccagtca

SEQ ID NO: 2665564 - DNA, 25 bp, Homo sapien
gcaccagtcaagctaccaaattatc

SEQ ID NO: 2665565 - DNA, 25 bp, Homo sapien
gaaatactccatgtagactgtaact

SEQ ID NO: 2665566 - DNA, 25 bp, Homo sapien
cacgtttgtgaatagttggaaggaa

SEQ ID NO: 2665567 - DNA, 25 bp, Homo sapien
acgtttgtgaatagttggaaggaag

SEQ ID NO: 2665568 - DNA, 25 bp, Homo sapien
cgtttgtgaatagttggaaggaaga

SEQ ID NO: 2665569 - DNA, 25 bp, Homo sapien
gtttgtgaatagttggaaggaagaa

SEQ ID NO: 2665570 - DNA, 25 bp, Homo sapien
atttgggaagccactcctagactgg

SEQ ID NO: 2665571 - DNA, 25 bp, Homo sapien
taacagtgctatacccatcttctgg

SEQ ID NO: 2665572 - DNA, 25 bp, Homo sapien
tcaaatacgccatgagcgtggtcag

SEQ ID NO: 2665573 - DNA, 25 bp, Homo sapien
ggttcagttccactgacaaagagtg

SEQ ID NO: 2665574 - DNA, 25 bp, Homo sapien
gactcagggctaaattcaaatacgc

SEQ ID NO: 2665575 - DNA, 25 bp, Homo sapien
gagacagagttccatgatgtcttat

SEQ ID NO: 2665576 - DNA, 25 bp, Homo sapien
tggagacagagttccatgatgtctt

SEQ ID NO: 2665577 - DNA, 25 bp, Homo sapien
gacagagttccatgatgtcttataa

SEQ ID NO: 2665578 - DNA, 25 bp, Homo sapien
acagagttccatgatgtcttataac

SEQ ID NO: 2665579 - DNA, 25 bp, Homo sapien
taacgtggcattaatatgagctccc

SEQ ID NO: 2665580 - DNA, 25 bp, Homo sapien
tctccacagtgatattggcgctcgt

SEQ ID NO: 2665581 - DNA, 25 bp, Homo sapien
gctcgtctgcccaatctcaaatgtg

SEQ ID NO: 2665582 - DNA, 25 bp, Homo sapien
gagacaaggacttttcccatgaggc

SEQ ID NO: 2665583 - DNA, 25 bp, Homo sapien
tagtcacattgataatgggtccaac

SEQ ID NO: 2665584 - DNA, 25 bp, Homo sapien
taccttaggcccaagacgtggagaa

SEQ ID NO: 2665585 - DNA, 25 bp, Homo sapien
gattttctgccactcggacaattgg

SEQ ID NO: 2665586 - DNA, 25 bp, Homo sapien
cagctattgcagttattggcacagc

SEQ ID NO: 2665587 - DNA, 25 bp, Homo sapien
tgactgcctctgttaaagcccctag

SEQ ID NO: 2665588 - DNA, 25 bp, Homo sapien
catatattggcacggctttactggt

SEQ ID NO: 2665589 - DNA, 25 bp, Homo sapien
catcagaggcctcaataataatgac

SEQ ID NO: 2665590 - DNA, 25 bp, Homo sapien
ggtttccccttctagcaagaccaca

SEQ ID NO: 2665591 - DNA, 25 bp, Homo sapien
ttcaatctccggaacgtcgtcagcc

SEQ ID NO: 2665592 - DNA, 25 bp, Homo sapien
tcgcaggtcgccagtagcaagctgt

SEQ ID NO: 2665593 - DNA, 25 bp, Homo sapien
caagctgtccattaatggtggcaac

SEQ ID NO: 2665594 - DNA, 25 bp, Homo sapien
gaacagtaacattgccgagtgtccc

SEQ ID NO: 2665595 - DNA, 25 bp, Homo sapien
cattctatactagccagtcctctca

SEQ ID NO: 2665596 - DNA, 25 bp, Homo sapien
attctatactagccagtcctctcac

SEQ ID NO: 2665597 - DNA, 25 bp, Homo sapien
tcattctatactagccagtcctctc

SEQ ID NO: 2665598 - DNA, 25 bp, Homo sapien
tccagaggctcttgaacacgataaa

SEQ ID NO: 2665599 - DNA, 25 bp, Homo sapien
gagcaaaggctactgtaccataagg

SEQ ID NO: 2665600 - DNA, 25 bp, Homo sapien
caccagaggcatcagttagttgcac

SEQ ID NO: 2665601 - DNA, 25 bp, Homo sapien
taccataaggatcatcattggcagg

SEQ ID NO: 2665602 - DNA, 25 bp, Homo sapien
aagtcatagtacaaacacaatcctg

SEQ ID NO: 2665603 - DNA, 25 bp, Homo sapien
tcctgtgaggaaaccttgctaattt

SEQ ID NO: 2665604 - DNA, 25 bp, Homo sapien
tttccaaggtatgcaaattcagggt

SEQ ID NO: 2665605 - DNA, 25 bp, Homo sapien
taaaagacaggttaagcactcaaag

SEQ ID NO: 2665606 - DNA, 25 bp, Homo sapien
agaacaacaacagccgaccaaagtg

SEQ ID NO: 2665607 - DNA, 25 bp, Homo sapien
aacaacaacagccgaccaaagtgcc

SEQ ID NO: 2665608 - DNA, 25 bp, Homo sapien
aacaacagccgaccaaagtgccctc

SEQ ID NO: 2665609 - DNA, 25 bp, Homo sapien
ctgtagaacaacaacagccgaccaa

SEQ ID NO: 2665610 - DNA, 25 bp, Homo sapien
taaaaagagatgctaccctggtcat

SEQ ID NO: 2665611 - DNA, 25 bp, Homo sapien
tgtagatcacaaacactccaaaggc

SEQ ID NO: 2665612 - DNA, 25 bp, Homo sapien
tagaaaactctcatccatctctggg

SEQ ID NO: 2665613 - DNA, 25 bp, Homo sapien
tgttccttaaggcacaaagtggcac

SEQ ID NO: 2665614 - DNA, 25 bp, Homo sapien
cagcaaaggtcagaatctctccagc

SEQ ID NO: 2665615 - DNA, 25 bp, Homo sapien
cttcagcaaaggtcagaatctctcc

SEQ ID NO: 2665616 - DNA, 25 bp, Homo sapien
tcagcaaaggtcagaatctctccag

SEQ ID NO: 2665617 - DNA, 25 bp, Homo sapien
agcaaaggtcagaatctctccagca

SEQ ID NO: 2665618 - DNA, 25 bp, Homo sapien
tcatgacctatgacagatctggaag

SEQ ID NO: 2665619 - DNA, 25 bp, Homo sapien
taacagtgtcggagcttggcaaaat

SEQ ID NO: 2665620 - DNA, 25 bp, Homo sapien
tatgatactttcgtcatcctctggt

SEQ ID NO: 2665621 - DNA, 25 bp, Homo sapien
tcagtgtacaccaaactaactatga

SEQ ID NO: 2665622 - DNA, 25 bp, Homo sapien
aaattgagttctagattttgcccaa

SEQ ID NO: 2665623 - DNA, 25 bp, Homo sapien
taacagtaacatttcctcgaccagg

SEQ ID NO: 2665624 - DNA, 25 bp, Homo sapien
ggaaagttcttatcacatggaattg

SEQ ID NO: 2665625 - DNA, 25 bp, Homo sapien
gaaaagttgtccgctaaagttagca

SEQ ID NO: 2665626 - DNA, 25 bp, Homo sapien
catacagaatgacttggtatacttc

SEQ ID NO: 2665627 - DNA, 25 bp, Homo sapien
gaatgttgtcatccaacaaatgcac

SEQ ID NO: 2665628 - DNA, 25 bp, Homo sapien
caaacaatgttgtattcaacgaccc

SEQ ID NO: 2665629 - DNA, 25 bp, Homo sapien
ctgacatcatacagaatgacttggt

SEQ ID NO: 2665630 - DNA, 25 bp, Homo sapien
aaagctgaattgttatgttagcctc

SEQ ID NO: 2665631 - DNA, 25 bp, Homo sapien
tatgttagcctcttgtagtaacaca

SEQ ID NO: 2665632 - DNA, 25 bp, Homo sapien
atcaagcagggcgattccggctggt

SEQ ID NO: 2665633 - DNA, 25 bp, Homo sapien
taaaactccatgtggttcatcactg

SEQ ID NO: 2665634 - DNA, 25 bp, Homo sapien
tctgctaggtttcctactgtttggt

SEQ ID NO: 2665635 - DNA, 25 bp, Homo sapien
tccaggaaccgtggtatatgtgaca

SEQ ID NO: 2665636 - DNA, 25 bp, Homo sapien
ctactgtttggttcttcagactcag

SEQ ID NO: 2665637 - DNA, 25 bp, Homo sapien
ctcaagaatggtaatgttgatggct

SEQ ID NO: 2665638 - DNA, 25 bp, Homo sapien
cagccatggtaagtccaacgtaagt

SEQ ID NO: 2665639 - DNA, 25 bp, Homo sapien
gcagccatggtaagtccaacgtaag

SEQ ID NO: 2665640 - DNA, 25 bp, Homo sapien
gccatggtaagtccaacgtaagtta

SEQ ID NO: 2665641 - DNA, 25 bp, Homo sapien
aagcagccatggtaagtccaacgta

SEQ ID NO: 2665642 - DNA, 25 bp, Homo sapien
tataaaagcccatcatattttaaca

SEQ ID NO: 2665643 - DNA, 25 bp, Homo sapien
aattgcaatatatgagagtatcaaa

SEQ ID NO: 2665644 - DNA, 25 bp, Homo sapien
aagagctattttgaggattacaaat

SEQ ID NO: 2665645 - DNA, 25 bp, Homo sapien
taaagagcatcacacaataattttt

SEQ ID NO: 2665646 - DNA, 25 bp, Homo sapien
gtctgtaatgaattaactgagtctt

SEQ ID NO: 2665647 - DNA, 25 bp, Homo sapien
ctgtaatgaattaactgagtctttt

SEQ ID NO: 2665648 - DNA, 25 bp, Homo sapien
ctttcagtctgtaatgaattaactg

SEQ ID NO: 2665649 - DNA, 25 bp, Homo sapien
tcagtctgtaatgaattaactgagt

SEQ ID NO: 2665650 - DNA, 25 bp, Homo sapien
caataataacttgtgcagtcaaacc

SEQ ID NO: 2665651 - DNA, 25 bp, Homo sapien
cattcaattacacctcgggccccat

SEQ ID NO: 2665652 - DNA, 25 bp, Homo sapien
ataacttgtgcagtcaaaccttctg

SEQ ID NO: 2665653 - DNA, 25 bp, Homo sapien
ttggcatcaataataacttgtgcag

SEQ ID NO: 2665654 - DNA, 25 bp, Homo sapien
gggtgaagatataatccagccccac

SEQ ID NO: 2665655 - DNA, 25 bp, Homo sapien
aattctgagcatacacaaataagga

SEQ ID NO: 2665656 - DNA, 25 bp, Homo sapien
ctcctctgggctaccaatgttaaac

SEQ ID NO: 2665657 - DNA, 25 bp, Homo sapien
caatgttaaacttccatgggtttca

SEQ ID NO: 2665658 - DNA, 25 bp, Homo sapien
catcatcaagaatcatgatattgac

SEQ ID NO: 2665659 - DNA, 25 bp, Homo sapien
tagtccaggagaaggatttgttaaa

SEQ ID NO: 2665660 - DNA, 25 bp, Homo sapien
ttgtatttttccctagctctagtcc

SEQ ID NO: 2665661 - DNA, 25 bp, Homo sapien
gctctagtccaggagaaggatttgt

SEQ ID NO: 2665662 - DNA, 25 bp, Homo sapien
caatactgcaacactctcctggacg

SEQ ID NO: 2665663 - DNA, 25 bp, Homo sapien
ctcctggacgtagagagctgttggc

SEQ ID NO: 2665664 - DNA, 25 bp, Homo sapien
aactccagggccgtcatcattagca

SEQ ID NO: 2665665 - DNA, 25 bp, Homo sapien
gtcacaatgaactgaactgtcactg

SEQ ID NO: 2665666 - DNA, 25 bp, Homo sapien
tagtctagcacctccagttggatta

SEQ ID NO: 2665667 - DNA, 25 bp, Homo sapien
ttctggttccgtgtctaatatggca

SEQ ID NO: 2665668 - DNA, 25 bp, Homo sapien
gtttgaacatgcacccctagtctag

SEQ ID NO: 2665669 - DNA, 25 bp, Homo sapien
caactgcagagatactgaatagccc

SEQ ID NO: 2665670 - DNA, 25 bp, Homo sapien
tcaatgccattagttcgagatacat

SEQ ID NO: 2665671 - DNA, 25 bp, Homo sapien
ttcttcgatgtctatggaggtggct

SEQ ID NO: 2665672 - DNA, 25 bp, Homo sapien
tacatttaaatacacggtcctattg

SEQ ID NO: 2665673 - DNA, 25 bp, Homo sapien
cacggtcctattggcttcttcgatg

SEQ ID NO: 2665674 - DNA, 25 bp, Homo sapien
gccaaaggctgtttcagatactgtc

SEQ ID NO: 2665675 - DNA, 25 bp, Homo sapien
tgccaaaggctgtttcagatactgt

SEQ ID NO: 2665676 - DNA, 25 bp, Homo sapien
tcatgccaaaggctgtttcagatac

SEQ ID NO: 2665677 - DNA, 25 bp, Homo sapien
catgccaaaggctgtttcagatact

SEQ ID NO: 2665678 - DNA, 25 bp, Homo sapien
tttgaaatacggaaaacacaacatc

SEQ ID NO: 2665679 - DNA, 25 bp, Homo sapien
gaataaaaatcccctgccatcggta

SEQ ID NO: 2665680 - DNA, 25 bp, Homo sapien
cctgccatcggtaaacagtaacaga

SEQ ID NO: 2665681 - DNA, 25 bp, Homo sapien
gaaatacggaaaacacaacatccat

SEQ ID NO: 2665682 - DNA, 25 bp, Homo sapien
accaatattaaaggcctcacaagtt

SEQ ID NO: 2665683 - DNA, 25 bp, Homo sapien
catgagtaatcacaaagtagggaga

SEQ ID NO: 2665684 - DNA, 25 bp, Homo sapien
taaatccagatgtgaatgtaaacac

SEQ ID NO: 2665685 - DNA, 25 bp, Homo sapien
tgaatgtaaacacactgttaagaga

SEQ ID NO: 2665686 - DNA, 25 bp, Homo sapien
tttccagaataatgattgtttgtac

SEQ ID NO: 2665687 - DNA, 25 bp, Homo sapien
ttgagaactttccagaataatgatt

SEQ ID NO: 2665688 - DNA, 25 bp, Homo sapien
gaactttccagaataatgattgttt

SEQ ID NO: 2665689 - DNA, 25 bp, Homo sapien
gagaactttccagaataatgattgt

SEQ ID NO: 2665690 - DNA, 25 bp, Homo sapien
atgattaaataatcttggctgtctg

SEQ ID NO: 2665691 - DNA, 25 bp, Homo sapien
tgattaaataatcttggctgtctga

SEQ ID NO: 2665692 - DNA, 25 bp, Homo sapien
taattcggaatcatctctttgactt

SEQ ID NO: 2665693 - DNA, 25 bp, Homo sapien
tgagttaattcggaatcatctcttt

SEQ ID NO: 2665694 - DNA, 25 bp, Homo sapien
ggagtttagcctggcattagcctgg

SEQ ID NO: 2665695 - DNA, 25 bp, Homo sapien
tttttgatgcaacacgaagcttcct

SEQ ID NO: 2665696 - DNA, 25 bp, Homo sapien
gctgaagacaaagcctcaacttctg

SEQ ID NO: 2665697 - DNA, 25 bp, Homo sapien
tgggaaatggctaagaacacagagc

SEQ ID NO: 2665698 - DNA, 25 bp, Homo sapien
gaaggagtggattctgttaacagca

SEQ ID NO: 2665699 - DNA, 25 bp, Homo sapien
ggctggtgtgaaggagtggattctg

SEQ ID NO: 2665700 - DNA, 25 bp, Homo sapien
tgaaggagtggattctgttaacagc

SEQ ID NO: 2665701 - DNA, 25 bp, Homo sapien
gtgtgaaggagtggattctgttaac

SEQ ID NO: 2665702 - DNA, 25 bp, Homo sapien
gagcagacatatcttggccaataag

SEQ ID NO: 2665703 - DNA, 25 bp, Homo sapien
gattacgctccgaattccagcagta

SEQ ID NO: 2665704 - DNA, 25 bp, Homo sapien
cacatcataagcagaaggtacttcc

SEQ ID NO: 2665705 - DNA, 25 bp, Homo sapien
tcttgcttgaattaagggactttac

SEQ ID NO: 2665706 - DNA, 25 bp, Homo sapien
ccataagaagcatatacaaaataag

SEQ ID NO: 2665707 - DNA, 25 bp, Homo sapien
aagaagcatatacaaaataagtcaa

SEQ ID NO: 2665708 - DNA, 25 bp, Homo sapien
taagaagcatatacaaaataagtca

SEQ ID NO: 2665709 - DNA, 25 bp, Homo sapien
ctaccataagaagcatatacaaaat

SEQ ID NO: 2665710 - DNA, 25 bp, Homo sapien
tcatcaaggatatttactgctattg

SEQ ID NO: 2665711 - DNA, 25 bp, Homo sapien
tctggaactgtatcatcaaggatat

SEQ ID NO: 2665712 - DNA, 25 bp, Homo sapien
aatcattaatgccaatctctgctcc

SEQ ID NO: 2665713 - DNA, 25 bp, Homo sapien
ccataggcatcatcattagacagaa

SEQ ID NO: 2665714 - DNA, 25 bp, Homo sapien
aaggttactaggctatcttgctcca

SEQ ID NO: 2665715 - DNA, 25 bp, Homo sapien
tacggccatatgttccttttaagcg

SEQ ID NO: 2665716 - DNA, 25 bp, Homo sapien
agcgttcaacgttcaaggttactag

SEQ ID NO: 2665717 - DNA, 25 bp, Homo sapien
cccatgctatggttatacggccata

SEQ ID NO: 2665718 - DNA, 25 bp, Homo sapien
tctgtcctgatcaatagtagcacct

SEQ ID NO: 2665719 - DNA, 25 bp, Homo sapien
tctaatgaagacagacgcagcacgc

SEQ ID NO: 2665720 - DNA, 25 bp, Homo sapien
agtagcacctttgtatgagtcctca

SEQ ID NO: 2665721 - DNA, 25 bp, Homo sapien
tacgggtgagggttacaatcacaac

SEQ ID NO: 2665722 - DNA, 25 bp, Homo sapien
ccaagtagtcctttatctcgagcta

SEQ ID NO: 2665723 - DNA, 25 bp, Homo sapien
caaaatggaaacttcggcatgagct

SEQ ID NO: 2665724 - DNA, 25 bp, Homo sapien
gctctcaagtgaatggcaatatccc

SEQ ID NO: 2665725 - DNA, 25 bp, Homo sapien
tatcgacatgcagtaagaaattggg

SEQ ID NO: 2665726 - DNA, 25 bp, Homo sapien
ttcacctcagtgatagtgacaataa

SEQ ID NO: 2665727 - DNA, 25 bp, Homo sapien
ctccgcacacttggctgtcctgtag

SEQ ID NO: 2665728 - DNA, 25 bp, Homo sapien
tatctcagctatttccattccgggc

SEQ ID NO: 2665729 - DNA, 25 bp, Homo sapien
tgatagtgacaataaatccttcctc

SEQ ID NO: 2665730 - DNA, 25 bp, Homo sapien
cctcataggcagtaataacttcccc

SEQ ID NO: 2665731 - DNA, 25 bp, Homo sapien
gaagaacgttcaagggtggaggcac

SEQ ID NO: 2665732 - DNA, 25 bp, Homo sapien
taaacatttactgccccaaagcttc

SEQ ID NO: 2665733 - DNA, 25 bp, Homo sapien
ccagccagccggactacaggaactt

SEQ ID NO: 2665734 - DNA, 25 bp, Homo sapien
ccagcaacactgatcaaggaaatat

SEQ ID NO: 2665735 - DNA, 25 bp, Homo sapien
gaacgtctctgtcaattcaaattca

SEQ ID NO: 2665736 - DNA, 25 bp, Homo sapien
ggaataacaacagttaccacaacat

SEQ ID NO: 2665737 - DNA, 25 bp, Homo sapien
aacatcatcaccaagtctgccacct

SEQ ID NO: 2665738 - DNA, 25 bp, Homo sapien
aaaattacatgaaacgctagcctga

SEQ ID NO: 2665739 - DNA, 25 bp, Homo sapien
caaaaatgtgagacactttctactc

SEQ ID NO: 2665740 - DNA, 25 bp, Homo sapien
tagcctgaaacaaggctttcccctg

SEQ ID NO: 2665741 - DNA, 25 bp, Homo sapien
gacgggaattcaaccatattggcca

SEQ ID NO: 2665742 - DNA, 25 bp, Homo sapien
gggaccggacaaccgtcaatgtcac

SEQ ID NO: 2665743 - DNA, 25 bp, Homo sapien
cagggtcatcggatgaaagggattc

SEQ ID NO: 2665744 - DNA, 25 bp, Homo sapien
tatggtccactcaagtcggacggtt

SEQ ID NO: 2665745 - DNA, 25 bp, Homo sapien
tcaatgtcacatatgaatcagggtc

SEQ ID NO: 2665746 - DNA, 25 bp, Homo sapien
gatatcagctgaatggtgaaacgcc

SEQ ID NO: 2665747 - DNA, 25 bp, Homo sapien
catcaattgatatcagctgaatggt

SEQ ID NO: 2665748 - DNA, 25 bp, Homo sapien
tccaacactgtgtcttgaagtgtgt

SEQ ID NO: 2665749 - DNA, 25 bp, Homo sapien
tggtgaaacgcctgtcctcctccaa

SEQ ID NO: 2665750 - DNA, 25 bp, Homo sapien
gataatagcggtaccattatatttt

SEQ ID NO: 2665751 - DNA, 25 bp, Homo sapien
cccaatgaggatgtgcctagatgac

SEQ ID NO: 2665752 - DNA, 25 bp, Homo sapien
cggagctatcccaacttctcctgat

SEQ ID NO: 2665753 - DNA, 25 bp, Homo sapien
gatgctcgcttatcaccccgaataa

SEQ ID NO: 2665754 - DNA, 25 bp, Homo sapien
ggagggaatatcctccagaacactg

SEQ ID NO: 2665755 - DNA, 25 bp, Homo sapien
gactgcagactgttcgtctcgcatt

SEQ ID NO: 2665756 - DNA, 25 bp, Homo sapien
gatgtttcagcaaattcccccacgg

SEQ ID NO: 2665757 - DNA, 25 bp, Homo sapien
caaaatccctgggcctcgaacaagg

SEQ ID NO: 2665758 - DNA, 25 bp, Homo sapien
tcctcgggaatgtcatcgttcaaag

SEQ ID NO: 2665759 - DNA, 25 bp, Homo sapien
tcatagaagcttttttcctcgggaa

SEQ ID NO: 2665760 - DNA, 25 bp, Homo sapien
caaatcggccatagggagagtcgct

SEQ ID NO: 2665761 - DNA, 25 bp, Homo sapien
tcgaagttgctcatgtgaaaaggca

SEQ ID NO: 2665762 - DNA, 25 bp, Homo sapien
tggaacggatgattgtgatgttaac

SEQ ID NO: 2665763 - DNA, 25 bp, Homo sapien
gatttcaacatgcagacttttcctc

SEQ ID NO: 2665764 - DNA, 25 bp, Homo sapien
tcgtcttgtaccagagtcgcacatg

SEQ ID NO: 2665765 - DNA, 25 bp, Homo sapien
ccgctgtcccgctcatcgtcttgta

SEQ ID NO: 2665766 - DNA, 25 bp, Homo sapien
ccctggagttccacctttgtaattg

SEQ ID NO: 2665767 - DNA, 25 bp, Homo sapien
tgtgttgctcccaatgagtggtgcc

SEQ ID NO: 2665768 - DNA, 25 bp, Homo sapien
cataaaatgaacctttgggaatcac

SEQ ID NO: 2665769 - DNA, 25 bp, Homo sapien
tgggaatcacggctgaatacataca

SEQ ID NO: 2665770 - DNA, 25 bp, Homo sapien
gagtggtgcctgtacgaagccaaaa

SEQ ID NO: 2665771 - DNA, 25 bp, Homo sapien
aacaacaaaaaatacataattgcat

SEQ ID NO: 2665772 - DNA, 25 bp, Homo sapien
aacaacaacaaaaaatacataattg

SEQ ID NO: 2665773 - DNA, 25 bp, Homo sapien
cttccaaagtcatacaaatcaaaat

SEQ ID NO: 2665774 - DNA, 25 bp, Homo sapien
ttccaaagtcatacaaatcaaaata

SEQ ID NO: 2665775 - DNA, 25 bp, Homo sapien
tgatgcgaacaatggagatgtttcc

SEQ ID NO: 2665776 - DNA, 25 bp, Homo sapien
cttcgaaggcagtatactttgggtc

SEQ ID NO: 2665777 - DNA, 25 bp, Homo sapien
caggaggttgatctatctgaagtcc

SEQ ID NO: 2665778 - DNA, 25 bp, Homo sapien
ttcttgaatggtaaaatcataccct

SEQ ID NO: 2665779 - DNA, 25 bp, Homo sapien
tgtaatcaacacctccgggactggc

SEQ ID NO: 2665780 - DNA, 25 bp, Homo sapien
gaaaggtgactgtactgccatgcaa

SEQ ID NO: 2665781 - DNA, 25 bp, Homo sapien
taagttttgcccatgctgaaaggtg

SEQ ID NO: 2665782 - DNA, 25 bp, Homo sapien
gatgaaatcagctgtcacatagcca

SEQ ID NO: 2665783 - DNA, 25 bp, Homo sapien
tccagcaccagtgataaaatcattg

SEQ ID NO: 2665784 - DNA, 25 bp, Homo sapien
tgctttgattgagaaaccttataac

SEQ ID NO: 2665785 - DNA, 25 bp, Homo sapien
cttataactccaaagggagagtcac

SEQ ID NO: 2665786 - DNA, 25 bp, Homo sapien
cagtgagtagaatttcaatgggctc

SEQ ID NO: 2665787 - DNA, 25 bp, Homo sapien
cagtaaggcttcttgagagttgggt

SEQ ID NO: 2665788 - DNA, 25 bp, Homo sapien
tgggtcctactgtctcccagttcac

SEQ ID NO: 2665789 - DNA, 25 bp, Homo sapien
gcttcttgagagttgggtcctactg

SEQ ID NO: 2665790 - DNA, 25 bp, Homo sapien
tgagagttgggtcctactgtctccc

SEQ ID NO: 2665791 - DNA, 25 bp, Homo sapien
gctctggagtctaatttagcttctc

SEQ ID NO: 2665792 - DNA, 25 bp, Homo sapien
tccaaaatagaacaacccgctcact

SEQ ID NO: 2665793 - DNA, 25 bp, Homo sapien
tcatgaggatagattgtcagaatta

SEQ ID NO: 2665794 - DNA, 25 bp, Homo sapien
aacaacccgctcactgggtctgcaa

SEQ ID NO: 2665795 - DNA, 25 bp, Homo sapien
gccagaggctctgaataagtcttct

SEQ ID NO: 2665796 - DNA, 25 bp, Homo sapien
taatctctccaaaggtgcccttgac

SEQ ID NO: 2665797 - DNA, 25 bp, Homo sapien
aaagaaggtaatgagcaggggccct

SEQ ID NO: 2665798 - DNA, 25 bp, Homo sapien
ataagtcttcttagacaaagtttca

SEQ ID NO: 2665799 - DNA, 25 bp, Homo sapien
caataagtattgactggcgatccga

SEQ ID NO: 2665800 - DNA, 25 bp, Homo sapien
tccgatgatattcgaagcccaacag

SEQ ID NO: 2665801 - DNA, 25 bp, Homo sapien
caaatgttccagcaagccgggttat

SEQ ID NO: 2665802 - DNA, 25 bp, Homo sapien
gatccgaatacagggcaaatactcc

SEQ ID NO: 2665803 - DNA, 25 bp, Homo sapien
cccaaatgctcaagccttcatggag

SEQ ID NO: 2665804 - DNA, 25 bp, Homo sapien
catggagttgatttgggtgttccca

SEQ ID NO: 2665805 - DNA, 25 bp, Homo sapien
ctgacactggctgaataacacacct

SEQ ID NO: 2665806 - DNA, 25 bp, Homo sapien
gacaccaatctgtctacttcttgga

SEQ ID NO: 2665807 - DNA, 25 bp, Homo sapien
cacattccaaagatgtgcacgtgag

SEQ ID NO: 2665808 - DNA, 25 bp, Homo sapien
caactgtccgtgtggagtctgcaca

SEQ ID NO: 2665809 - DNA, 25 bp, Homo sapien
aaaaaatcaattgccagccagggca

SEQ ID NO: 2665810 - DNA, 25 bp, Homo sapien
ccttgagagctgtcggatacaggaa

SEQ ID NO: 2665811 - DNA, 25 bp, Homo sapien
gcattccatagaaacgtccaccgac

SEQ ID NO: 2665812 - DNA, 25 bp, Homo sapien
tagaaacgtccaccgacaagcatca

SEQ ID NO: 2665813 - DNA, 25 bp, Homo sapien
aattagagcccagtgataggaagac

SEQ ID NO: 2665814 - DNA, 25 bp, Homo sapien
cacagtcaccagttgcaaagtgaaa

SEQ ID NO: 2665815 - DNA, 25 bp, Homo sapien
aaccgagagagctccatatgtgcct

SEQ ID NO: 2665816 - DNA, 25 bp, Homo sapien
tcataacgtggcttgtgccagcagt

SEQ ID NO: 2665817 - DNA, 25 bp, Homo sapien
ccagcagtgatgttcatgagttgaa

SEQ ID NO: 2665818 - DNA, 25 bp, Homo sapien
caggagcatatccagtggtccaggc

SEQ ID NO: 2665819 - DNA, 25 bp, Homo sapien
tcctttgttcaccgtgggaaaatga

SEQ ID NO: 2665820 - DNA, 25 bp, Homo sapien
cagggctaggaaacgtccacaggaa

SEQ ID NO: 2665821 - DNA, 25 bp, Homo sapien
aacaaaggcctctggccaaccaggg

SEQ ID NO: 2665822 - DNA, 25 bp, Homo sapien
tctggccaaccagggctaggaaacg

SEQ ID NO: 2665823 - DNA, 25 bp, Homo sapien
tgacattgccagtaaacccaccagt

SEQ ID NO: 2665824 - DNA, 25 bp, Homo sapien
tataaacaatggatggcccaaggct

SEQ ID NO: 2665825 - DNA, 25 bp, Homo sapien
aaatctagattcaggcgtgggctcc

SEQ ID NO: 2665826 - DNA, 25 bp, Homo sapien
taataagatcgctgtggaacccaaa

SEQ ID NO: 2665827 - DNA, 25 bp, Homo sapien
gcaaaagctgcaaatccagtatcat

SEQ ID NO: 2665828 - DNA, 25 bp, Homo sapien
caaaagctgcaaatccagtatcatc

SEQ ID NO: 2665829 - DNA, 25 bp, Homo sapien
agtccactctgggactcctcactga

SEQ ID NO: 2665830 - DNA, 25 bp, Homo sapien
ataaggtgcaatcttctcataacag

SEQ ID NO: 2665831 - DNA, 25 bp, Homo sapien
tcctcactgaatcctatgatgccat

SEQ ID NO: 2665832 - DNA, 25 bp, Homo sapien
tcttgtgacaataaggtgcaatctt

SEQ ID NO: 2665833 - DNA, 25 bp, Homo sapien
gttaagtgtgactcgccaaaagacc

SEQ ID NO: 2665834 - DNA, 25 bp, Homo sapien
tccttctggagcacgacgactgttt

SEQ ID NO: 2665835 - DNA, 25 bp, Homo sapien
tacaggttgtggtccctgacacaga

SEQ ID NO: 2665836 - DNA, 25 bp, Homo sapien
tgtttgacccattgtacaggttgtg

SEQ ID NO: 2665837 - DNA, 25 bp, Homo sapien
agcagtagcttcatatagttccaca

SEQ ID NO: 2665838 - DNA, 25 bp, Homo sapien
gattaaagtggccttcttgtgagcc

SEQ ID NO: 2665839 - DNA, 25 bp, Homo sapien
gattttaatctgtgcgaatctggca

SEQ ID NO: 2665840 - DNA, 25 bp, Homo sapien
ggcactgttgtttattgctgctcca

SEQ ID NO: 2665841 - DNA, 25 bp, Homo sapien
gctgatgtagctgatctgcaagccc

SEQ ID NO: 2665842 - DNA, 25 bp, Homo sapien
aattctggcaccaccttttgggtca

SEQ ID NO: 2665843 - DNA, 25 bp, Homo sapien
tctggccaggttcaaagaccaatgt

SEQ ID NO: 2665844 - DNA, 25 bp, Homo sapien
tctctggcgttaggatgacatccaa

SEQ ID NO: 2665845 - DNA, 25 bp, Homo sapien
tccttgcgctttgggttaataagag

SEQ ID NO: 2665846 - DNA, 25 bp, Homo sapien
catagaaaagagttcggctggcaac

SEQ ID NO: 2665847 - DNA, 25 bp, Homo sapien
gactgaatcccctagtgtccttgcg

SEQ ID NO: 2665848 - DNA, 25 bp, Homo sapien
ttcaccaggagagccgcaagtaaca

SEQ ID NO: 2665849 - DNA, 25 bp, Homo sapien
gacaaatatgggcaactatcaagga

SEQ ID NO: 2665850 - DNA, 25 bp, Homo sapien
cactgttggctgctatactctgtaa

SEQ ID NO: 2665851 - DNA, 25 bp, Homo sapien
agtagcctctctggaattcgaatgt

SEQ ID NO: 2665852 - DNA, 25 bp, Homo sapien
ttgctgaggataccagtgaagagcc

SEQ ID NO: 2665853 - DNA, 25 bp, Homo sapien
gctcagcagcataaatcctgtagag

SEQ ID NO: 2665854 - DNA, 25 bp, Homo sapien
gcagcagcctgattccaaaggagac

SEQ ID NO: 2665855 - DNA, 25 bp, Homo sapien
tcctgtagagaacctcattgtcatt

SEQ ID NO: 2665856 - DNA, 25 bp, Homo sapien
gaactctgacctttcacactcaaag

SEQ ID NO: 2665857 - DNA, 25 bp, Homo sapien
tgaacaggcacattccacatagtct

SEQ ID NO: 2665858 - DNA, 25 bp, Homo sapien
gtcagtccgagcatagacagcatac

SEQ ID NO: 2665859 - DNA, 25 bp, Homo sapien
tcattgtatgaagacaagttgtcag

SEQ ID NO: 2665860 - DNA, 25 bp, Homo sapien
gacagcatacacagacatgtgtgaa

SEQ ID NO: 2665861 - DNA, 25 bp, Homo sapien
tgcaaacatggagtacctggcacag

SEQ ID NO: 2665862 - DNA, 25 bp, Homo sapien
tttagctgcaaacatggagtacctg

SEQ ID NO: 2665863 - DNA, 25 bp, Homo sapien
tagctgcaaacatggagtacctggc

SEQ ID NO: 2665864 - DNA, 25 bp, Homo sapien
gaagtttagctgcaaacatggagta

SEQ ID NO: 2665865 - DNA, 25 bp, Homo sapien
agcagaatcttttcgcaagggtgtc

SEQ ID NO: 2665866 - DNA, 25 bp, Homo sapien
ggtactcaaagcgagaatgacataa

SEQ ID NO: 2665867 - DNA, 25 bp, Homo sapien
aaagattcccaaagatgctaggtac

SEQ ID NO: 2665868 - DNA, 25 bp, Homo sapien
tgacataattccagattaaagcaga

SEQ ID NO: 2665869 - DNA, 25 bp, Homo sapien
acattcgcccttacaaccaaaacat

SEQ ID NO: 2665870 - DNA, 25 bp, Homo sapien
ttgacatgtttcagtttggcaataa

SEQ ID NO: 2665871 - DNA, 25 bp, Homo sapien
acatagtgcctgaaaccaagctcct

SEQ ID NO: 2665872 - DNA, 25 bp, Homo sapien
ttggcaataacattcgcccttacaa

SEQ ID NO: 2665873 - DNA, 25 bp, Homo sapien
accatggaggtgaggttgaagtcct

SEQ ID NO: 2665874 - DNA, 25 bp, Homo sapien
attcagcttttgctagtagatgttc

SEQ ID NO: 2665875 - DNA, 25 bp, Homo sapien
gaagtcctcattcagcttttgctag

SEQ ID NO: 2665876 - DNA, 25 bp, Homo sapien
gatggtgttaggtgggaaccttggc

SEQ ID NO: 2665877 - DNA, 25 bp, Homo sapien
tcctggaacgcatcattcaatttct

SEQ ID NO: 2665878 - DNA, 25 bp, Homo sapien
agtttcttggccatgtactgaggta

SEQ ID NO: 2665879 - DNA, 25 bp, Homo sapien
ctttaatttgattaagccagaaata

SEQ ID NO: 2665880 - DNA, 25 bp, Homo sapien
tactgaggtaggatccatgaaatac

SEQ ID NO: 2665881 - DNA, 25 bp, Homo sapien
ccagtgtagaccttgctatgatttc

SEQ ID NO: 2665882 - DNA, 25 bp, Homo sapien
cacaccttattcaacagacaaatga

SEQ ID NO: 2665883 - DNA, 25 bp, Homo sapien
ttagcttgctaatgatatcccagat

SEQ ID NO: 2665884 - DNA, 25 bp, Homo sapien
cacaatccaagatttgatagtcagc

SEQ ID NO: 2665885 - DNA, 25 bp, Homo sapien
cagcaagtttgctatctgatatatt

SEQ ID NO: 2665886 - DNA, 25 bp, Homo sapien
atatttctgctaaaagtaagcatcc

SEQ ID NO: 2665887 - DNA, 25 bp, Homo sapien
gcatccaggaagttaacctgtttca

SEQ ID NO: 2665888 - DNA, 25 bp, Homo sapien
gtcagcaagtttgctatctgatata

SEQ ID NO: 2665889 - DNA, 25 bp, Homo sapien
cggcttaaaacacgacgcaccacaa

SEQ ID NO: 2665890 - DNA, 25 bp, Homo sapien
ggcttaaaacacgacgcaccacaag

SEQ ID NO: 2665891 - DNA, 25 bp, Homo sapien
aaaacacgacgcaccacaagattat

SEQ ID NO: 2665892 - DNA, 25 bp, Homo sapien
cttaaaacacgacgcaccacaagat

SEQ ID NO: 2665893 - DNA, 25 bp, Homo sapien
cagatacttctatttttaaaatatg

SEQ ID NO: 2665894 - DNA, 25 bp, Homo sapien
acagatacttctatttttaaaatat

SEQ ID NO: 2665895 - DNA, 25 bp, Homo sapien
taagaaacagatacttctattttta

SEQ ID NO: 2665896 - DNA, 25 bp, Homo sapien
ctgtaagaaacagatacttctattt

SEQ ID NO: 2665897 - DNA, 25 bp, Homo sapien
ctgaatgagcatccagctaaactgg

SEQ ID NO: 2665898 - DNA, 25 bp, Homo sapien
tctcctcagcgagttggggacttgc

SEQ ID NO: 2665899 - DNA, 25 bp, Homo sapien
agatacaggtaatgtgtgacagcag

SEQ ID NO: 2665900 - DNA, 25 bp, Homo sapien
tggggacttgcgtatgcagacgcca

SEQ ID NO: 2665901 - DNA, 25 bp, Homo sapien
tggcagagtttcgcttttctcgccc

SEQ ID NO: 2665902 - DNA, 25 bp, Homo sapien
ttggcagagtttcgcttttctcgcc

SEQ ID NO: 2665903 - DNA, 25 bp, Homo sapien
tttggcagagtttcgcttttctcgc

SEQ ID NO: 2665904 - DNA, 25 bp, Homo sapien
tagcctctttatcgaccaaatcagc

SEQ ID NO: 2665905 - DNA, 25 bp, Homo sapien
tatgctaggactctactggtctcac

SEQ ID NO: 2665906 - DNA, 25 bp, Homo sapien
tgagccacttaaatactacgcacca

SEQ ID NO: 2665907 - DNA, 25 bp, Homo sapien
caaaggcagcattttagttgagcca

SEQ ID NO: 2665908 - DNA, 25 bp, Homo sapien
catgctttggaaatccaactgagag

SEQ ID NO: 2665909 - DNA, 25 bp, Homo sapien
tgctttggaaatccaactgagagca

SEQ ID NO: 2665910 - DNA, 25 bp, Homo sapien
ctcatgctttggaaatccaactgag

SEQ ID NO: 2665911 - DNA, 25 bp, Homo sapien
gctttggaaatccaactgagagcat

SEQ ID NO: 2665912 - DNA, 25 bp, Homo sapien
accagcacgtaccagaaattcacag

SEQ ID NO: 2665913 - DNA, 25 bp, Homo sapien
ccagcacgtaccagaaattcacaga

SEQ ID NO: 2665914 - DNA, 25 bp, Homo sapien
caccagcacgtaccagaaattcaca

SEQ ID NO: 2665915 - DNA, 25 bp, Homo sapien
caaaataactatgaggagaatcacc

SEQ ID NO: 2665916 - DNA, 25 bp, Homo sapien
gagtccatagatctgtgacatgctc

SEQ ID NO: 2665917 - DNA, 25 bp, Homo sapien
aaaacagcagatatcgcctctctgt

SEQ ID NO: 2665918 - DNA, 25 bp, Homo sapien
tgaatgagtccatagatctgtgaca

SEQ ID NO: 2665919 - DNA, 25 bp, Homo sapien
gtcaggaaagccagcgaattatctg

SEQ ID NO: 2665920 - DNA, 25 bp, Homo sapien
gaaagggagactgaaaatccaggat

SEQ ID NO: 2665921 - DNA, 25 bp, Homo sapien
ggtatccgcctattaatacttggag

SEQ ID NO: 2665922 - DNA, 25 bp, Homo sapien
agagtcaggaaagccagcgaattat

SEQ ID NO: 2665923 - DNA, 25 bp, Homo sapien
atgatggcatatgacatcctcctaa

SEQ ID NO: 2665924 - DNA, 25 bp, Homo sapien
gatggcatatgacatcctcctaacc

SEQ ID NO: 2665925 - DNA, 25 bp, Homo sapien
gcatatgacatcctcctaaccatca

SEQ ID NO: 2665926 - DNA, 25 bp, Homo sapien
tatgacatcctcctaaccatcatgg

SEQ ID NO: 2665927 - DNA, 25 bp, Homo sapien
gtttcaattgtctccaacaggacca

SEQ ID NO: 2665928 - DNA, 25 bp, Homo sapien
cagtaagtacaatctgagacctgtg

SEQ ID NO: 2665929 - DNA, 25 bp, Homo sapien
gaggaaatcccaacaattcttgatg

SEQ ID NO: 2665930 - DNA, 25 bp, Homo sapien
gagtctataagagtttttatccgag

SEQ ID NO: 2665931 - DNA, 25 bp, Homo sapien
ccacatatttaagggcagggagaat

SEQ ID NO: 2665932 - DNA, 25 bp, Homo sapien
ggagcttcagttaactccacatatt

SEQ ID NO: 2665933 - DNA, 25 bp, Homo sapien
ctccacatatttaagggcagggaga

SEQ ID NO: 2665934 - DNA, 25 bp, Homo sapien
ctggagcttcagttaactccacata

SEQ ID NO: 2665935 - DNA, 25 bp, Homo sapien
tacttgaggtcaagatactgtgtaa

SEQ ID NO: 2665936 - DNA, 25 bp, Homo sapien
aacacttctcttgaagaggctctgc

SEQ ID NO: 2665937 - DNA, 25 bp, Homo sapien
tctcccactatgctgctatgtaaat

SEQ ID NO: 2665938 - DNA, 25 bp, Homo sapien
tttcaacacttctcttgaagaggct

SEQ ID NO: 2665939 - DNA, 25 bp, Homo sapien
gtctttttggcactcctccaaaatc

SEQ ID NO: 2665940 - DNA, 25 bp, Homo sapien
cgcctctgagttcaggaatgctcat

SEQ ID NO: 2665941 - DNA, 25 bp, Homo sapien
gcacaaatggctctgtcgcctctga

SEQ ID NO: 2665942 - DNA, 25 bp, Homo sapien
ttttggcactcctccaaaatccact

SEQ ID NO: 2665943 - DNA, 25 bp, Homo sapien
ctccctggcaggcccgcacatgact

SEQ ID NO: 2665944 - DNA, 25 bp, Homo sapien
cctggcaggcccgcacatgactcat

SEQ ID NO: 2665945 - DNA, 25 bp, Homo sapien
tccctggcaggcccgcacatgactc

SEQ ID NO: 2665946 - DNA, 25 bp, Homo sapien
ccctggcaggcccgcacatgactca

SEQ ID NO: 2665947 - DNA, 25 bp, Homo sapien
cctctattgtgactttgaagatgag

SEQ ID NO: 2665948 - DNA, 25 bp, Homo sapien
gggaagcacactcaatctcagtggc

SEQ ID NO: 2665949 - DNA, 25 bp, Homo sapien
taggtggggaagcacactcaatctc

SEQ ID NO: 2665950 - DNA, 25 bp, Homo sapien
aatctcagtggcctcctctattgtg

SEQ ID NO: 2665951 - DNA, 25 bp, Homo sapien
ctcttagggttcagggagtcagaca

SEQ ID NO: 2665952 - DNA, 25 bp, Homo sapien
gttgtgaaacacttaacatttgcaa

SEQ ID NO: 2665953 - DNA, 25 bp, Homo sapien
gaggcagggatatcagggtaaccca

SEQ ID NO: 2665954 - DNA, 25 bp, Homo sapien
ttagggttcagggagtcagacactg

SEQ ID NO: 2665955 - DNA, 25 bp, Homo sapien
cgtcaaaggaacaagagctgcagtg

SEQ ID NO: 2665956 - DNA, 25 bp, Homo sapien
accaccacgaggcacgtcaaaggaa

SEQ ID NO: 2665957 - DNA, 25 bp, Homo sapien
cagcatagacgtttggaataaaaca

SEQ ID NO: 2665958 - DNA, 25 bp, Homo sapien
tggtaggcatggatgaacaccacga

SEQ ID NO: 2665959 - DNA, 25 bp, Homo sapien
acatcatcatatgctttccactgtg

SEQ ID NO: 2665960 - DNA, 25 bp, Homo sapien
agacatcatcatatgctttccactg

SEQ ID NO: 2665961 - DNA, 25 bp, Homo sapien
catcatcatatgctttccactgtgg

SEQ ID NO: 2665962 - DNA, 25 bp, Homo sapien
gacatcatcatatgctttccactgt

SEQ ID NO: 2665963 - DNA, 25 bp, Homo sapien
cattaaagcgtttccatctccaaag

SEQ ID NO: 2665964 - DNA, 25 bp, Homo sapien
caaggctgcgactcatttacttgga

SEQ ID NO: 2665965 - DNA, 25 bp, Homo sapien
tgtcagcacaaccagagctctgcat

SEQ ID NO: 2665966 - DNA, 25 bp, Homo sapien
cactcatgagcactgcggaggtttg

SEQ ID NO: 2665967 - DNA, 25 bp, Homo sapien
tgaaagcttgggaagtggctcccaa

SEQ ID NO: 2665968 - DNA, 25 bp, Homo sapien
ttctgccaacacaatgattgcatgc

SEQ ID NO: 2665969 - DNA, 25 bp, Homo sapien
ggctagatactgctatgctacaaac

SEQ ID NO: 2665970 - DNA, 25 bp, Homo sapien
gcatattaactgatcaagttcagga

SEQ ID NO: 2665971 - DNA, 25 bp, Homo sapien
ttaaacaatattcctcggctgggcg

SEQ ID NO: 2665972 - DNA, 25 bp, Homo sapien
tgatgtgaacaacaatggcagctct

SEQ ID NO: 2665973 - DNA, 25 bp, Homo sapien
tctgactagaggaaatcatacctgc

SEQ ID NO: 2665974 - DNA, 25 bp, Homo sapien
gataacttgaaatgaccccagcaca

SEQ ID NO: 2665975 - DNA, 25 bp, Homo sapien
gattctaatcccacaactgagcagc

SEQ ID NO: 2665976 - DNA, 25 bp, Homo sapien
cattcgcaccgatttaccctgatgc

SEQ ID NO: 2665977 - DNA, 25 bp, Homo sapien
tgagtactggtatcaccattcgcac

SEQ ID NO: 2665978 - DNA, 25 bp, Homo sapien
caaacagagttcctccacagctgaa

SEQ ID NO: 2665979 - DNA, 25 bp, Homo sapien
acttctcttaagctccaggcctgga

SEQ ID NO: 2665980 - DNA, 25 bp, Homo sapien
acaccgaggcttgggccccttcctg

SEQ ID NO: 2665981 - DNA, 25 bp, Homo sapien
tggattccttcctcacaacgattgg

SEQ ID NO: 2665982 - DNA, 25 bp, Homo sapien
aacgattggcttctgacaccgaggc

SEQ ID NO: 2665983 - DNA, 25 bp, Homo sapien
tcctcacaacgattggcttctgaca

SEQ ID NO: 2665984 - DNA, 25 bp, Homo sapien
caaagagatataaaatcagtggaat

SEQ ID NO: 2665985 - DNA, 25 bp, Homo sapien
agagcaaagagatataaaatcagtg

SEQ ID NO: 2665986 - DNA, 25 bp, Homo sapien
gtcacggaaatcagagcaaagagat

SEQ ID NO: 2665987 - DNA, 25 bp, Homo sapien
gagcaaagagatataaaatcagtgg

SEQ ID NO: 2665988 - DNA, 25 bp, Homo sapien
acatccagaagtgtctgtaggccat

SEQ ID NO: 2665989 - DNA, 25 bp, Homo sapien
aatgacaaagagaaccaacatccag

SEQ ID NO: 2665990 - DNA, 25 bp, Homo sapien
caacatccagaagtgtctgtaggcc

SEQ ID NO: 2665991 - DNA, 25 bp, Homo sapien
tgaaaatgacaaagagaaccaacat

SEQ ID NO: 2665992 - DNA, 25 bp, Homo sapien
tatagtggacgtctgttactttggc

SEQ ID NO: 2665993 - DNA, 25 bp, Homo sapien
ccccttctgttggtcagagaatcct

SEQ ID NO: 2665994 - DNA, 25 bp, Homo sapien
cattggccttgttcaaacttatatc

SEQ ID NO: 2665995 - DNA, 25 bp, Homo sapien
gacatttggttatatgatagatcac

SEQ ID NO: 2665996 - DNA, 25 bp, Homo sapien
caaaccaaggaatgtgatggtagtt

SEQ ID NO: 2665997 - DNA, 25 bp, Homo sapien
aaccaaggaatgtgatggtagttac

SEQ ID NO: 2665998 - DNA, 25 bp, Homo sapien
agaggagctacaggatctgcacgaa

SEQ ID NO: 2665999 - DNA, 25 bp, Homo sapien
ctgcaaaccaaggaatgtgatggta

SEQ ID NO: 2666000 - DNA, 25 bp, Homo sapien
tatctgaaagcaggtgaatgacata

SEQ ID NO: 2666001 - DNA, 25 bp, Homo sapien
ctgcttgagcctaaaggcatttggt

SEQ ID NO: 2666002 - DNA, 25 bp, Homo sapien
ctaaaggcatttggtacatatctga

SEQ ID NO: 2666003 - DNA, 25 bp, Homo sapien
gcaggtgaatgacatacaacagatc

SEQ ID NO: 2666004 - DNA, 25 bp, Homo sapien
ggagcaaaagcatccgtgataatgg

SEQ ID NO: 2666005 - DNA, 25 bp, Homo sapien
aataaactccctggtggctgtcttt

SEQ ID NO: 2666006 - DNA, 25 bp, Homo sapien
tgtcctccagcggaataaactccct

SEQ ID NO: 2666007 - DNA, 25 bp, Homo sapien
tcattctcagagtcagtatcagtgg

SEQ ID NO: 2666008 - DNA, 25 bp, Homo sapien
gaaatgcacttttagagaccactgt

SEQ ID NO: 2666009 - DNA, 25 bp, Homo sapien
ttagagaccactgtttgtacgccat

SEQ ID NO: 2666010 - DNA, 25 bp, Homo sapien
aatgcacttttagagaccactgttt

SEQ ID NO: 2666011 - DNA, 25 bp, Homo sapien
gcacttttagagaccactgtttgta

SEQ ID NO: 2666012 - DNA, 25 bp, Homo sapien
tctacttctaccctcttcactaagt

SEQ ID NO: 2666013 - DNA, 25 bp, Homo sapien
ggccaccagactgctctggggggct

SEQ ID NO: 2666014 - DNA, 25 bp, Homo sapien
tcctggttgctcaaggccaccagac

SEQ ID NO: 2666015 - DNA, 25 bp, Homo sapien
ctggggggctgacctcatttctact

SEQ ID NO: 2666016 - DNA, 25 bp, Homo sapien
taagtcataacttggaacccttcca

SEQ ID NO: 2666017 - DNA, 25 bp, Homo sapien
tatgcacttccagtaaacttggtga

SEQ ID NO: 2666018 - DNA, 25 bp, Homo sapien
tgacttactgaatttggcacatgaa

SEQ ID NO: 2666019 - DNA, 25 bp, Homo sapien
tgatttaactgaggtaccggcttta

SEQ ID NO: 2666020 - DNA, 25 bp, Homo sapien
tcaaacaccaggcatatctgctgtt

SEQ ID NO: 2666021 - DNA, 25 bp, Homo sapien
tacagaagtggtccacaaatgacag

SEQ ID NO: 2666022 - DNA, 25 bp, Homo sapien
taccagcaagcgcaaaggtgctctt

SEQ ID NO: 2666023 - DNA, 25 bp, Homo sapien
caaatgtcttgtgggatgcctgcag

SEQ ID NO: 2666024 - DNA, 25 bp, Homo sapien
tgttgggaagtgcaatcaggtgacc

SEQ ID NO: 2666025 - DNA, 25 bp, Homo sapien
tagtctatagaacagacacctggct

SEQ ID NO: 2666026 - DNA, 25 bp, Homo sapien
tgtagttccaacttctgaccaccaa

SEQ ID NO: 2666027 - DNA, 25 bp, Homo sapien
gactctagtctcagttgaactccag

SEQ ID NO: 2666028 - DNA, 25 bp, Homo sapien
gtctcagctctgacactaaatagtg

SEQ ID NO: 2666029 - DNA, 25 bp, Homo sapien
aaacaggccaatgtctaagaagagt

SEQ ID NO: 2666030 - DNA, 25 bp, Homo sapien
tgggctttcgtcacagacagcaact

SEQ ID NO: 2666031 - DNA, 25 bp, Homo sapien
gaatcactgggtagggactcagcag

SEQ ID NO: 2666032 - DNA, 25 bp, Homo sapien
cattcatggtctctacaaaggatct

SEQ ID NO: 2666033 - DNA, 25 bp, Homo sapien
gaaaaatggcattctcccgtggttc

SEQ ID NO: 2666034 - DNA, 25 bp, Homo sapien
agggcaacacatttggttgtgtaaa

SEQ ID NO: 2666035 - DNA, 25 bp, Homo sapien
cacagtgtaactggccttcataggg

SEQ ID NO: 2666036 - DNA, 25 bp, Homo sapien
ggcaacacatttggttgtgtaaaat

SEQ ID NO: 2666037 - DNA, 25 bp, Homo sapien
catttccacagtgtaactggccttc

SEQ ID NO: 2666038 - DNA, 25 bp, Homo sapien
actcccgggcgtgaaaaaggctgtg

SEQ ID NO: 2666039 - DNA, 25 bp, Homo sapien
tcccgggcgtgaaaaaggctgtgct

SEQ ID NO: 2666040 - DNA, 25 bp, Homo sapien
ccactcccgggcgtgaaaaaggctg

SEQ ID NO: 2666041 - DNA, 25 bp, Homo sapien
cccgggcgtgaaaaaggctgtgctg

SEQ ID NO: 2666042 - DNA, 25 bp, Homo sapien
ctccatagcaccgatgagattctgg

SEQ ID NO: 2666043 - DNA, 25 bp, Homo sapien
ccatagcaccgatgagattctgggt

SEQ ID NO: 2666044 - DNA, 25 bp, Homo sapien
tcctccatagcaccgatgagattct

SEQ ID NO: 2666045 - DNA, 25 bp, Homo sapien
ctcctccatagcaccgatgagattc

SEQ ID NO: 2666046 - DNA, 25 bp, Homo sapien
gaaaattatgtctctccctgagaca

SEQ ID NO: 2666047 - DNA, 25 bp, Homo sapien
ctgtgattctaaaccatgtctctat

SEQ ID NO: 2666048 - DNA, 25 bp, Homo sapien
cctgagacaatttaatctgtgattc

SEQ ID NO: 2666049 - DNA, 25 bp, Homo sapien
catgtctctatttgaattacttgta

SEQ ID NO: 2666050 - DNA, 25 bp, Homo sapien
tcggctatcagtgacccctggccat

SEQ ID NO: 2666051 - DNA, 25 bp, Homo sapien
ctcatcggctatcagtgacccctgg

SEQ ID NO: 2666052 - DNA, 25 bp, Homo sapien
ctggccatatcctccagaggacggg

SEQ ID NO: 2666053 - DNA, 25 bp, Homo sapien
gtggctccattttgtggacttggct

SEQ ID NO: 2666054 - DNA, 25 bp, Homo sapien
tgttaaaggccgctgttgaaactcc

SEQ ID NO: 2666055 - DNA, 25 bp, Homo sapien
ctctctgttaaaggccgctgttgaa

SEQ ID NO: 2666056 - DNA, 25 bp, Homo sapien
ggccgctgttgaaactccacttcct

SEQ ID NO: 2666057 - DNA, 25 bp, Homo sapien
taaaggccgctgttgaaactccact

SEQ ID NO: 2666058 - DNA, 25 bp, Homo sapien
catagggtgtgctggatgaatcacc

SEQ ID NO: 2666059 - DNA, 25 bp, Homo sapien
gggatgtggtcatagggtgtgctgg

SEQ ID NO: 2666060 - DNA, 25 bp, Homo sapien
ggtcatagggtgtgctggatgaatc

SEQ ID NO: 2666061 - DNA, 25 bp, Homo sapien
gatgtggtcatagggtgtgctggat

SEQ ID NO: 2666062 - DNA, 25 bp, Homo sapien
gccccgaattcatatgcactgaggt

SEQ ID NO: 2666063 - DNA, 25 bp, Homo sapien
atataggccccgaattcatatgcac

SEQ ID NO: 2666064 - DNA, 25 bp, Homo sapien
tgttacaaaacatataggccccgaa

SEQ ID NO: 2666065 - DNA, 25 bp, Homo sapien
tttgctgttacaaaacatataggcc

SEQ ID NO: 2666066 - DNA, 25 bp, Homo sapien
caatttacattaggtccaagcctgt

SEQ ID NO: 2666067 - DNA, 25 bp, Homo sapien
aaaatccaaactattagtgcagtga

SEQ ID NO: 2666068 - DNA, 25 bp, Homo sapien
taagccatacatttagaatagatat

SEQ ID NO: 2666069 - DNA, 25 bp, Homo sapien
ttagtgcagtgaattcttaagaatc

SEQ ID NO: 2666070 - DNA, 25 bp, Homo sapien
gagtcagtcaaggtgcccccctcct

SEQ ID NO: 2666071 - DNA, 25 bp, Homo sapien
ttgaccagattcattatcactgaca

SEQ ID NO: 2666072 - DNA, 25 bp, Homo sapien
tggctgccttgaccagattcattat

SEQ ID NO: 2666073 - DNA, 25 bp, Homo sapien
tcctggctgccttgaccagattcat

SEQ ID NO: 2666074 - DNA, 25 bp, Homo sapien
ctacaggtgagtgtcggcgatgggt

SEQ ID NO: 2666075 - DNA, 25 bp, Homo sapien
agtgtcggcgatgggtatcctcctg

SEQ ID NO: 2666076 - DNA, 25 bp, Homo sapien
tgagtgtcggcgatgggtatcctcc

SEQ ID NO: 2666077 - DNA, 25 bp, Homo sapien
gtcggcgatgggtatcctcctgagc

SEQ ID NO: 2666078 - DNA, 25 bp, Homo sapien
tagagagttttagcacaaaagctga

SEQ ID NO: 2666079 - DNA, 25 bp, Homo sapien
tacacaggtggatgtacttagagag

SEQ ID NO: 2666080 - DNA, 25 bp, Homo sapien
agtgtgctcagtcgaatggttagtg

SEQ ID NO: 2666081 - DNA, 25 bp, Homo sapien
taatatccttggaatatgaacatcc

SEQ ID NO: 2666082 - DNA, 25 bp, Homo sapien
tctggatcacctggattcatgcaag

SEQ ID NO: 2666083 - DNA, 25 bp, Homo sapien
tgcaggatcatcaacagacagacca

SEQ ID NO: 2666084 - DNA, 25 bp, Homo sapien
tctagttgcagtgaagtcttgaatc

SEQ ID NO: 2666085 - DNA, 25 bp, Homo sapien
ggtgcttgtcatcatctacatatag

SEQ ID NO: 2666086 - DNA, 25 bp, Homo sapien
gacgatgaccacatattccacaaaa

SEQ ID NO: 2666087 - DNA, 25 bp, Homo sapien
acgatgaccacatattccacaaaag

SEQ ID NO: 2666088 - DNA, 25 bp, Homo sapien
cgatgaccacatattccacaaaagc

SEQ ID NO: 2666089 - DNA, 25 bp, Homo sapien
tcttttgggtaactgatctcaggtc

SEQ ID NO: 2666090 - DNA, 25 bp, Homo sapien
gcaaagactaagaaatccagcaata

SEQ ID NO: 2666091 - DNA, 25 bp, Homo sapien
tccagtagtgtttcagatgattctg

SEQ ID NO: 2666092 - DNA, 25 bp, Homo sapien
aaggatcatatctggcttagtgacg

SEQ ID NO: 2666093 - DNA, 25 bp, Homo sapien
agtcccaagggttgtttgatgccaa

SEQ ID NO: 2666094 - DNA, 25 bp, Homo sapien
cccggattgtggactcagctggttt

SEQ ID NO: 2666095 - DNA, 25 bp, Homo sapien
tgaacagctgttacccggattgtgg

SEQ ID NO: 2666096 - DNA, 25 bp, Homo sapien
ccctgagtcccaagggttgtttgat

SEQ ID NO: 2666097 - DNA, 25 bp, Homo sapien
gaaggaaaagaacatgttgctctca

SEQ ID NO: 2666098 - DNA, 25 bp, Homo sapien
cagaaggaaaagaacatgttgctct

SEQ ID NO: 2666099 - DNA, 25 bp, Homo sapien
aaggaaaagaacatgttgctctcat

SEQ ID NO: 2666100 - DNA, 25 bp, Homo sapien
gtcagaaggaaaagaacatgttgct

SEQ ID NO: 2666101 - DNA, 25 bp, Homo sapien
cctgtcgttgaagacgatgtattcc

SEQ ID NO: 2666102 - DNA, 25 bp, Homo sapien
ctagtgggttggtcacctgtcgttg

SEQ ID NO: 2666103 - DNA, 25 bp, Homo sapien
tgaagacgatgtattccgatggaaa

SEQ ID NO: 2666104 - DNA, 25 bp, Homo sapien
ggttggtcacctgtcgttgaagacg

SEQ ID NO: 2666105 - DNA, 25 bp, Homo sapien
tgcttctggttagaattggattcag

SEQ ID NO: 2666106 - DNA, 25 bp, Homo sapien
ttgcttctggttagaattggattca

SEQ ID NO: 2666107 - DNA, 25 bp, Homo sapien
gaacaattgaaacatagctgtgatg

SEQ ID NO: 2666108 - DNA, 25 bp, Homo sapien
tggcgggcggaatacagccctttaa

SEQ ID NO: 2666109 - DNA, 25 bp, Homo sapien
caaggagctcctgcaccagaattgt

SEQ ID NO: 2666110 - DNA, 25 bp, Homo sapien
tttaatgcgctcagtgcattgagga

SEQ ID NO: 2666111 - DNA, 25 bp, Homo sapien
ccaacccacactggtcttcccatat

SEQ ID NO: 2666112 - DNA, 25 bp, Homo sapien
gaatcattaggtacatccaacccac

SEQ ID NO: 2666113 - DNA, 25 bp, Homo sapien
gaagaatcattaggtacatccaacc

SEQ ID NO: 2666114 - DNA, 25 bp, Homo sapien
attaggtacatccaacccacactgg

SEQ ID NO: 2666115 - DNA, 25 bp, Homo sapien
gaagaactgtaagccactctgaggc

SEQ ID NO: 2666116 - DNA, 25 bp, Homo sapien
ccgatttattgttaacgttatgctc

SEQ ID NO: 2666117 - DNA, 25 bp, Homo sapien
gggatgataggctcttgatttttag

SEQ ID NO: 2666118 - DNA, 25 bp, Homo sapien
gttgcattgtgaagtaaggctgtgt

SEQ ID NO: 2666119 - DNA, 25 bp, Homo sapien
gggatacatgaggactctttttcca

SEQ ID NO: 2666120 - DNA, 25 bp, Homo sapien
tccattgctcagaatcattttggca

SEQ ID NO: 2666121 - DNA, 25 bp, Homo sapien
ctgtgagggatacatgaggactctt

SEQ ID NO: 2666122 - DNA, 25 bp, Homo sapien
gcttatactactttggctctgaaat

SEQ ID NO: 2666123 - DNA, 25 bp, Homo sapien
gatatcactgatacctgttgcccgt

SEQ ID NO: 2666124 - DNA, 25 bp, Homo sapien
tatttgggcttctgccatttgacca

SEQ ID NO: 2666125 - DNA, 25 bp, Homo sapien
gaccaatggcttgtcgagaacttct

SEQ ID NO: 2666126 - DNA, 25 bp, Homo sapien
tgccacttctggatttcccatattt

SEQ ID NO: 2666127 - DNA, 25 bp, Homo sapien
tcattcccattactaatcatgaaaa

SEQ ID NO: 2666128 - DNA, 25 bp, Homo sapien
cattcccattactaatcatgaaaac

SEQ ID NO: 2666129 - DNA, 25 bp, Homo sapien
ttcattcccattactaatcatgaaa

SEQ ID NO: 2666130 - DNA, 25 bp, Homo sapien
attcccattactaatcatgaaaaca

SEQ ID NO: 2666131 - DNA, 25 bp, Homo sapien
gaaataactagaaatctgccaagct

SEQ ID NO: 2666132 - DNA, 25 bp, Homo sapien
ccagaggttaatctggcttcagaca

SEQ ID NO: 2666133 - DNA, 25 bp, Homo sapien
gacttgctagcaagatagttgccag

SEQ ID NO: 2666134 - DNA, 25 bp, Homo sapien
gcttcaaattttccgagcgtggacc

SEQ ID NO: 2666135 - DNA, 25 bp, Homo sapien
tctcttgctctccgtggcttctttt

SEQ ID NO: 2666136 - DNA, 25 bp, Homo sapien
tgctctccgtggcttcttttgttgt

SEQ ID NO: 2666137 - DNA, 25 bp, Homo sapien
cttggaagtttatctgtgaaagctc

SEQ ID NO: 2666138 - DNA, 25 bp, Homo sapien
cttgctctccgtggcttcttttgtt

SEQ ID NO: 2666139 - DNA, 25 bp, Homo sapien
cattggataaactgcattggctacc

SEQ ID NO: 2666140 - DNA, 25 bp, Homo sapien
atatcgcaagtcattacagtgaagt

SEQ ID NO: 2666141 - DNA, 25 bp, Homo sapien
gataaactgcattggctaccatact

SEQ ID NO: 2666142 - DNA, 25 bp, Homo sapien
actatatcgcaagtcattacagtga

SEQ ID NO: 2666143 - DNA, 25 bp, Homo sapien
caaatcaggttggaacttggcatcg

SEQ ID NO: 2666144 - DNA, 25 bp, Homo sapien
ttggaacttggcatcgttgtgtgcg

SEQ ID NO: 2666145 - DNA, 25 bp, Homo sapien
ctgtggtgacgcaaatcaggttgga

SEQ ID NO: 2666146 - DNA, 25 bp, Homo sapien
cacaactgtggtgacgcaaatcagg

SEQ ID NO: 2666147 - DNA, 25 bp, Homo sapien
tcctgtcgctttaaacagagcaagg

SEQ ID NO: 2666148 - DNA, 25 bp, Homo sapien
tcactgcttttgaatcccgaccgag

SEQ ID NO: 2666149 - DNA, 25 bp, Homo sapien
tcaaaagagtgttgggacaaatccc

SEQ ID NO: 2666150 - DNA, 25 bp, Homo sapien
tgcctttaagagtgcaatagtccac

SEQ ID NO: 2666151 - DNA, 25 bp, Homo sapien
tgactcagcgctgactcatccgact

SEQ ID NO: 2666152 - DNA, 25 bp, Homo sapien
gataccgctgcctccttagtctttc

SEQ ID NO: 2666153 - DNA, 25 bp, Homo sapien
tcatccgactcgctgccagtggatt

SEQ ID NO: 2666154 - DNA, 25 bp, Homo sapien
ctcgcaggacttcgcagataccgct

SEQ ID NO: 2666155 - DNA, 25 bp, Homo sapien
aagtacctgtactacctctttgtga

SEQ ID NO: 2666156 - DNA, 25 bp, Homo sapien
gaaactgactccatggtccaatccc

SEQ ID NO: 2666157 - DNA, 25 bp, Homo sapien
cactacgtttgtgatgtacattccc

SEQ ID NO: 2666158 - DNA, 25 bp, Homo sapien
gcgaggacctttttcagaaagtgga

SEQ ID NO: 2666159 - DNA, 25 bp, Homo sapien
gactcttgtctaaggatcttgccca

SEQ ID NO: 2666160 - DNA, 25 bp, Homo sapien
tacttgctcaggtgttttagactct

SEQ ID NO: 2666161 - DNA, 25 bp, Homo sapien
cacttttctggccaactgatgattg

SEQ ID NO: 2666162 - DNA, 25 bp, Homo sapien
tgcctggttgttttgcatcacctac

SEQ ID NO: 2666163 - DNA, 25 bp, Homo sapien
ggactgaggtcccatagtagggccc

SEQ ID NO: 2666164 - DNA, 25 bp, Homo sapien
ggtaacacattgtgctacaacctta

SEQ ID NO: 2666165 - DNA, 25 bp, Homo sapien
gagtcatgtccctcctggtaaataa

SEQ ID NO: 2666166 - DNA, 25 bp, Homo sapien
aaattgctgtgtcctgagtcatgtc

SEQ ID NO: 2666167 - DNA, 25 bp, Homo sapien
gaatatcttggttgggggcaaataa

SEQ ID NO: 2666168 - DNA, 25 bp, Homo sapien
tccacaaggtaccccgcaaggacat

SEQ ID NO: 2666169 - DNA, 25 bp, Homo sapien
atcacctaatgggtcaaggcctgcc

SEQ ID NO: 2666170 - DNA, 25 bp, Homo sapien
aggtaggctctcatcacctaatggg

SEQ ID NO: 2666171 - DNA, 25 bp, Homo sapien
ttaggccacttggtaggcccagctc

SEQ ID NO: 2666172 - DNA, 25 bp, Homo sapien
ggcccagctccagtatcgacactga

SEQ ID NO: 2666173 - DNA, 25 bp, Homo sapien
gcatacataaggcattacaggccag

SEQ ID NO: 2666174 - DNA, 25 bp, Homo sapien
taatcagcgtgggactttttacctg

SEQ ID NO: 2666175 - DNA, 25 bp, Homo sapien
tccaggagtggcacatgtcagcagg

SEQ ID NO: 2666176 - DNA, 25 bp, Homo sapien
tcattagtatagtggatttctgggt

SEQ ID NO: 2666177 - DNA, 25 bp, Homo sapien
agggctgtgtcccaaccgcagagct

SEQ ID NO: 2666178 - DNA, 25 bp, Homo sapien
tcagccagaagttagcttgagggtg

SEQ ID NO: 2666179 - DNA, 25 bp, Homo sapien
gaagcaatgacacaacatcaccatc

SEQ ID NO: 2666180 - DNA, 25 bp, Homo sapien
tcttgagtagtgactgagtgccaaa

SEQ ID NO: 2666181 - DNA, 25 bp, Homo sapien
ggaggccagtttcaatccactgaag

SEQ ID NO: 2666182 - DNA, 25 bp, Homo sapien
tgccagagtccaacaccaagatact

SEQ ID NO: 2666183 - DNA, 25 bp, Homo sapien
gggtctctatttaaagagcctccca

SEQ ID NO: 2666184 - DNA, 25 bp, Homo sapien
gcacctggcccatgccaacaatatt

SEQ ID NO: 2666185 - DNA, 25 bp, Homo sapien
tacatcccaagcatctatacctggc

SEQ ID NO: 2666186 - DNA, 25 bp, Homo sapien
gaaacccttatctgcgtgtacaagt

SEQ ID NO: 2666187 - DNA, 25 bp, Homo sapien
tagcgtgcctgtacagttgtgtcca

SEQ ID NO: 2666188 - DNA, 25 bp, Homo sapien
ttggaaggatgagacttagcgtgcc

SEQ ID NO: 2666189 - DNA, 25 bp, Homo sapien
gaatgtgactgacgtctttggaagg

SEQ ID NO: 2666190 - DNA, 25 bp, Homo sapien
tacatgctgttgatgaaactgctaa

SEQ ID NO: 2666191 - DNA, 25 bp, Homo sapien
tgctttctgctagctgactccttcc

SEQ ID NO: 2666192 - DNA, 25 bp, Homo sapien
ttccacatgtatcaatcagtaagtc

SEQ ID NO: 2666193 - DNA, 25 bp, Homo sapien
aacagagcaaaacagaatgtttgct

SEQ ID NO: 2666194 - DNA, 25 bp, Homo sapien
caggcctggtgttccattccacatg

SEQ ID NO: 2666195 - DNA, 25 bp, Homo sapien
tatttacacgaagggcatggtttgg

SEQ ID NO: 2666196 - DNA, 25 bp, Homo sapien
tcagtgaaactgttcaaggagatct

SEQ ID NO: 2666197 - DNA, 25 bp, Homo sapien
gaagtgggaatttgcagtcagtgcc

SEQ ID NO: 2666198 - DNA, 25 bp, Homo sapien
aatatccccatgatttttgcttgcg

SEQ ID NO: 2666199 - DNA, 25 bp, Homo sapien
ttctggtcctcattttcacctataa

SEQ ID NO: 2666200 - DNA, 25 bp, Homo sapien
tttttctttctggtcctcattttca

SEQ ID NO: 2666201 - DNA, 25 bp, Homo sapien
ttttctttctggtcctcattttcac

SEQ ID NO: 2666202 - DNA, 25 bp, Homo sapien
tctttctggtcctcattttcaccta

SEQ ID NO: 2666203 - DNA, 25 bp, Homo sapien
atcatggtgatcacacattctacct

SEQ ID NO: 2666204 - DNA, 25 bp, Homo sapien
ggttattttacaccactcatcaatg

SEQ ID NO: 2666205 - DNA, 25 bp, Homo sapien
tggttttgaatactctcaaaatacg

SEQ ID NO: 2666206 - DNA, 25 bp, Homo sapien
tgctggtgaggtcgatgtctgcttt

SEQ ID NO: 2666207 - DNA, 25 bp, Homo sapien
ggtcttcatggagcttgttgtccag

SEQ ID NO: 2666208 - DNA, 25 bp, Homo sapien
tcttcatggagcttgttgtccagac

SEQ ID NO: 2666209 - DNA, 25 bp, Homo sapien
tcactccaggtcttcatggagcttg

SEQ ID NO: 2666210 - DNA, 25 bp, Homo sapien
caggtcttcatggagcttgttgtcc

SEQ ID NO: 2666211 - DNA, 25 bp, Homo sapien
tacagccacggtaacaagtggtctt

SEQ ID NO: 2666212 - DNA, 25 bp, Homo sapien
tcttagtgtactggcctcggacatg

SEQ ID NO: 2666213 - DNA, 25 bp, Homo sapien
acaagtggtcttagtgtactggcct

SEQ ID NO: 2666214 - DNA, 25 bp, Homo sapien
ggacacacccacagtacagccacgg

SEQ ID NO: 2666215 - DNA, 25 bp, Homo sapien
tgggcaatgattaagacagatgctc

SEQ ID NO: 2666216 - DNA, 25 bp, Homo sapien
tgatggagcgagacactgtgttaaa

SEQ ID NO: 2666217 - DNA, 25 bp, Homo sapien
ggccctaatctgataggactatggc

SEQ ID NO: 2666218 - DNA, 25 bp, Homo sapien
caatgcatggatcaagctgagtaca

SEQ ID NO: 2666219 - DNA, 25 bp, Homo sapien
taccctactgtagcatgacttcgta

SEQ ID NO: 2666220 - DNA, 25 bp, Homo sapien
gacttcgtatcaactaatcacacct

SEQ ID NO: 2666221 - DNA, 25 bp, Homo sapien
ggatggactaacagctggcaatcct

SEQ ID NO: 2666222 - DNA, 25 bp, Homo sapien
taatcacacctacaatgactctgtt

SEQ ID NO: 2666223 - DNA, 25 bp, Homo sapien
ttccagtattcaagatagattcctg

SEQ ID NO: 2666224 - DNA, 25 bp, Homo sapien
tctaactgactagggaacaattgtt

SEQ ID NO: 2666225 - DNA, 25 bp, Homo sapien
tctgataattggcactggatcacaa

SEQ ID NO: 2666226 - DNA, 25 bp, Homo sapien
tgaatatgtccttgtaggctctgtt

SEQ ID NO: 2666227 - DNA, 25 bp, Homo sapien
ttggtatggcatgaaaactcgactt

SEQ ID NO: 2666228 - DNA, 25 bp, Homo sapien
aaatgggtgttacatctatcctgcc

SEQ ID NO: 2666229 - DNA, 25 bp, Homo sapien
taaaatactagaacgtttgctgcga

SEQ ID NO: 2666230 - DNA, 25 bp, Homo sapien
tgttggaaatcgcttttgctggtgc

SEQ ID NO: 2666231 - DNA, 25 bp, Homo sapien
taatctcaggtgaacgcatcacttg

SEQ ID NO: 2666232 - DNA, 25 bp, Homo sapien
catgctcagaattgtctactaggct

SEQ ID NO: 2666233 - DNA, 25 bp, Homo sapien
gaaatttggaaacgggacatacaca

SEQ ID NO: 2666234 - DNA, 25 bp, Homo sapien
taatatagcctggactttacctgcg

SEQ ID NO: 2666235 - DNA, 25 bp, Homo sapien
caatatccttaagtgccaaaattga

SEQ ID NO: 2666236 - DNA, 25 bp, Homo sapien
aagaaaagacactctgttgctggtt

SEQ ID NO: 2666237 - DNA, 25 bp, Homo sapien
agaaaagacactctgttgctggttc

SEQ ID NO: 2666238 - DNA, 25 bp, Homo sapien
aggcccaatatccttaagtgccaaa

SEQ ID NO: 2666239 - DNA, 25 bp, Homo sapien
caccctgcggagtatgtaaatgttg

SEQ ID NO: 2666240 - DNA, 25 bp, Homo sapien
tctttaaagttatgccaccctgcgg

SEQ ID NO: 2666241 - DNA, 25 bp, Homo sapien
ttaccatgatgtgagacccgagcct

SEQ ID NO: 2666242 - DNA, 25 bp, Homo sapien
gatgataattccgaagaaggcttcc

SEQ ID NO: 2666243 - DNA, 25 bp, Homo sapien
gctaatcgtaaaggtttctacacca

SEQ ID NO: 2666244 - DNA, 25 bp, Homo sapien
taggcactttaatgatctagaaccc

SEQ ID NO: 2666245 - DNA, 25 bp, Homo sapien
tcgtttaatatcagggaggcatcac

SEQ ID NO: 2666246 - DNA, 25 bp, Homo sapien
ggagacataagcgaatcaccatgat

SEQ ID NO: 2666247 - DNA, 25 bp, Homo sapien
agccagatggaaccggtcgccggct

SEQ ID NO: 2666248 - DNA, 25 bp, Homo sapien
ctaaaggtgtcagagtggcccgagc

SEQ ID NO: 2666249 - DNA, 25 bp, Homo sapien
cgaaactaaaggtgtcagagtggcc

SEQ ID NO: 2666250 - DNA, 25 bp, Homo sapien
agagtggcccgagccagatggaacc

SEQ ID NO: 2666251 - DNA, 25 bp, Homo sapien
gggcttcgacgggtatcctctgccc

SEQ ID NO: 2666252 - DNA, 25 bp, Homo sapien
agcaaaggctggcccgaggaagaag

SEQ ID NO: 2666253 - DNA, 25 bp, Homo sapien
gtgattccaatatcgaaatgttggg

SEQ ID NO: 2666254 - DNA, 25 bp, Homo sapien
ccttcgccaccccaatatcccttgc

SEQ ID NO: 2666255 - DNA, 25 bp, Homo sapien
gatggccatggacccaactttagca

SEQ ID NO: 2666256 - DNA, 25 bp, Homo sapien
gggccatcgaaaggaaacgacttca

SEQ ID NO: 2666257 - DNA, 25 bp, Homo sapien
ccgttagctatcttccgagtgggag

SEQ ID NO: 2666258 - DNA, 25 bp, Homo sapien
gcccagcccgtgtcaacatcatgtt

SEQ ID NO: 2666259 - DNA, 25 bp, Homo sapien
gagaagtgctgatgactaaggcaag

SEQ ID NO: 2666260 - DNA, 25 bp, Homo sapien
tgcaaatgcctaatgacagccttgg

SEQ ID NO: 2666261 - DNA, 25 bp, Homo sapien
cattagttgcaccatgatttcgtgg

SEQ ID NO: 2666262 - DNA, 25 bp, Homo sapien
tgcaacgcgtagacgagctcagtct

SEQ ID NO: 2666263 - DNA, 25 bp, Homo sapien
gagcatcatgtctaactttggaacg

SEQ ID NO: 2666264 - DNA, 25 bp, Homo sapien
tgacatatggtatcaacaccccacg

SEQ ID NO: 2666265 - DNA, 25 bp, Homo sapien
caggtggtggcgatgacttaattcc

SEQ ID NO: 2666266 - DNA, 25 bp, Homo sapien
cagcagattggttacacgcgtcagg

SEQ ID NO: 2666267 - DNA, 25 bp, Homo sapien
agatgccatttgagcttagatgaat

SEQ ID NO: 2666268 - DNA, 25 bp, Homo sapien
aatatgcactgccatagcttcactg

SEQ ID NO: 2666269 - DNA, 25 bp, Homo sapien
ctcatcttctacatgataatatgca

SEQ ID NO: 2666270 - DNA, 25 bp, Homo sapien
attctttctgtagaccagatgccat

SEQ ID NO: 2666271 - DNA, 25 bp, Homo sapien
tgagttatgttcttgaccagtgatt

SEQ ID NO: 2666272 - DNA, 25 bp, Homo sapien
ggaactatgaggcttaagattaaca

SEQ ID NO: 2666273 - DNA, 25 bp, Homo sapien
tctcaaacctgcttatacacaaagg

SEQ ID NO: 2666274 - DNA, 25 bp, Homo sapien
tactcaagcctctttaagggaacta

SEQ ID NO: 2666275 - DNA, 25 bp, Homo sapien
tctcagtatattagggatcagttga

SEQ ID NO: 2666276 - DNA, 25 bp, Homo sapien
cctactatagctttgtcccatttga

SEQ ID NO: 2666277 - DNA, 25 bp, Homo sapien
tgcatttcagaacctactatagctt

SEQ ID NO: 2666278 - DNA, 25 bp, Homo sapien
gggaaaggatctcagtatattaggg

SEQ ID NO: 2666279 - DNA, 25 bp, Homo sapien
tactttctccctgagacggccaaag

SEQ ID NO: 2666280 - DNA, 25 bp, Homo sapien
gaaaagcacctagactggaactggg

SEQ ID NO: 2666281 - DNA, 25 bp, Homo sapien
aaagtctcccctggatccgtggctt

SEQ ID NO: 2666282 - DNA, 25 bp, Homo sapien
cagggcttcacagcttacctatact

SEQ ID NO: 2666283 - DNA, 25 bp, Homo sapien
ttttactctgtacttcaagaaatgt

SEQ ID NO: 2666284 - DNA, 25 bp, Homo sapien
cgtcttatggaaactgtcttgacta

SEQ ID NO: 2666285 - DNA, 25 bp, Homo sapien
aagtatctcccccagatttccatct

SEQ ID NO: 2666286 - DNA, 25 bp, Homo sapien
ttttcttcgtcttatggaaactgtc

SEQ ID NO: 2666287 - DNA, 25 bp, Homo sapien
acatgggtacaccaaacaccagtgg

SEQ ID NO: 2666288 - DNA, 25 bp, Homo sapien
ttggacaaattagtcacatgggtac

SEQ ID NO: 2666289 - DNA, 25 bp, Homo sapien
ggtacaccaaacaccagtggacctg

SEQ ID NO: 2666290 - DNA, 25 bp, Homo sapien
gacaaattagtcacatgggtacacc

SEQ ID NO: 2666291 - DNA, 25 bp, Homo sapien
ctccacatcaaactcactctaggaa

SEQ ID NO: 2666292 - DNA, 25 bp, Homo sapien
ctcactctaggaacccaactaaggg

SEQ ID NO: 2666293 - DNA, 25 bp, Homo sapien
cagtcaccaactggaatattcctag

SEQ ID NO: 2666294 - DNA, 25 bp, Homo sapien
ttcactgcaggtcattttgggctcc

SEQ ID NO: 2666295 - DNA, 25 bp, Homo sapien
gataggttatgcagttataatctac

SEQ ID NO: 2666296 - DNA, 25 bp, Homo sapien
tgcagttataatctacaacttccaa

SEQ ID NO: 2666297 - DNA, 25 bp, Homo sapien
catatcaatattgataggttatgca

SEQ ID NO: 2666298 - DNA, 25 bp, Homo sapien
taagttaataagttagaaataatca

SEQ ID NO: 2666299 - DNA, 25 bp, Homo sapien
agatggcgccaaacccctaaatatt

SEQ ID NO: 2666300 - DNA, 25 bp, Homo sapien
tacacgtgtacaacagcacatgttg

SEQ ID NO: 2666301 - DNA, 25 bp, Homo sapien
cattcttaagtactgtgcatagctg

SEQ ID NO: 2666302 - DNA, 25 bp, Homo sapien
ccaggcattcaaagcgctcaaaagt

SEQ ID NO: 2666303 - DNA, 25 bp, Homo sapien
tagacgtttctaagtactaagaaga

SEQ ID NO: 2666304 - DNA, 25 bp, Homo sapien
tttgagttataatttgtcaggaaca

SEQ ID NO: 2666305 - DNA, 25 bp, Homo sapien
agagaataacaaaggccttagaaat

SEQ ID NO: 2666306 - DNA, 25 bp, Homo sapien
tgagtacaatgctgtgataaagaga

SEQ ID NO: 2666307 - DNA, 25 bp, Homo sapien
atcaccacttcatagggacctcttc

SEQ ID NO: 2666308 - DNA, 25 bp, Homo sapien
aggcctcttcctcatggaccatcac

SEQ ID NO: 2666309 - DNA, 25 bp, Homo sapien
gacctcttccttttatacaggtgtc

SEQ ID NO: 2666310 - DNA, 25 bp, Homo sapien
tggaagccctgcttagatttccagg

SEQ ID NO: 2666311 - DNA, 25 bp, Homo sapien
taggcatagaataccatctccactg

SEQ ID NO: 2666312 - DNA, 25 bp, Homo sapien
gagcaaaacccattgagacttccgg

SEQ ID NO: 2666313 - DNA, 25 bp, Homo sapien
gcctgggtgctttgggcacagtaaa

SEQ ID NO: 2666314 - DNA, 25 bp, Homo sapien
ttgataacaaccaggcctaatgagg

SEQ ID NO: 2666315 - DNA, 25 bp, Homo sapien
tagaatgggccacttctcgagggtg

SEQ ID NO: 2666316 - DNA, 25 bp, Homo sapien
tcagaagggaacagatgaggtagcc

SEQ ID NO: 2666317 - DNA, 25 bp, Homo sapien
tacagtcagaggttggcaagctcca

SEQ ID NO: 2666318 - DNA, 25 bp, Homo sapien
cagtcaggtagctaggtcagcggca

SEQ ID NO: 2666319 - DNA, 25 bp, Homo sapien
tttaaccagctaaagcaagtcttgc

SEQ ID NO: 2666320 - DNA, 25 bp, Homo sapien
gcaggactactgtactctagaggaa

SEQ ID NO: 2666321 - DNA, 25 bp, Homo sapien
caaccagtgggttatctaagtaagg

SEQ ID NO: 2666322 - DNA, 25 bp, Homo sapien
ctaaagagtggccagcatgcctcca

SEQ ID NO: 2666323 - DNA, 25 bp, Homo sapien
tcaccccagcaatatacactgttta

SEQ ID NO: 2666324 - DNA, 25 bp, Homo sapien
tatttggcgacatgagccagttcct

SEQ ID NO: 2666325 - DNA, 25 bp, Homo sapien
gctatatgcatataggccttgaagt

SEQ ID NO: 2666326 - DNA, 25 bp, Homo sapien
tatgcgtttgtaactatctagctgt

SEQ ID NO: 2666327 - DNA, 25 bp, Homo sapien
tcgaatgagataagtcccacaccac

SEQ ID NO: 2666328 - DNA, 25 bp, Homo sapien
gaatttctacttctcctcgaatgag

SEQ ID NO: 2666329 - DNA, 25 bp, Homo sapien
gtatttttgaaaggcatcccactcc

SEQ ID NO: 2666330 - DNA, 25 bp, Homo sapien
gaaattacggcattggcagttccat

SEQ ID NO: 2666331 - DNA, 25 bp, Homo sapien
tgaaggaggctgtcaatcagggctc

SEQ ID NO: 2666332 - DNA, 25 bp, Homo sapien
tgttagtagaaacttagcctccagc

SEQ ID NO: 2666333 - DNA, 25 bp, Homo sapien
taatcaatgccagaaccataagacg

SEQ ID NO: 2666334 - DNA, 25 bp, Homo sapien
tcagggctcaagcaaagtacaggaa

SEQ ID NO: 2666335 - DNA, 25 bp, Homo sapien
ggaacccaataatcatgccatgaga

SEQ ID NO: 2666336 - DNA, 25 bp, Homo sapien
taatatggccacaaaaagatctccc

SEQ ID NO: 2666337 - DNA, 25 bp, Homo sapien
cattgggatgctcattcttggaacc

SEQ ID NO: 2666338 - DNA, 25 bp, Homo sapien
tacaatgcacagtgatcagagagtg

SEQ ID NO: 2666339 - DNA, 25 bp, Homo sapien
gaagacccacgccatcacttgtatg

SEQ ID NO: 2666340 - DNA, 25 bp, Homo sapien
gatgaggatcattacagccgtgttg

SEQ ID NO: 2666341 - DNA, 25 bp, Homo sapien
tggtcacttgcagactaaacctggt

SEQ ID NO: 2666342 - DNA, 25 bp, Homo sapien
tagacagctccttgaatatccagat

SEQ ID NO: 2666343 - DNA, 25 bp, Homo sapien
tcataactctatgagatgggcagca

SEQ ID NO: 2666344 - DNA, 25 bp, Homo sapien
caagtgtcagccactattctaagga

SEQ ID NO: 2666345 - DNA, 25 bp, Homo sapien
ggacaagcttcacaacatccttaag

SEQ ID NO: 2666346 - DNA, 25 bp, Homo sapien
ggaagttgagttagtcctaggtcac

SEQ ID NO: 2666347 - DNA, 25 bp, Homo sapien
tacaatatgattctctctactgatg

SEQ ID NO: 2666348 - DNA, 25 bp, Homo sapien
cagatatcgatttaagacatgtctc

SEQ ID NO: 2666349 - DNA, 25 bp, Homo sapien
tgtatcatgatcaccaattctgcca

SEQ ID NO: 2666350 - DNA, 25 bp, Homo sapien
taaatactttaaccttgagtgctca

SEQ ID NO: 2666351 - DNA, 25 bp, Homo sapien
ctcaaacctaactgttgtgttgtcc

SEQ ID NO: 2666352 - DNA, 25 bp, Homo sapien
ctgtgataccactgctgtccaaccg

SEQ ID NO: 2666353 - DNA, 25 bp, Homo sapien
taactgttgtgttgtccaagcagac

SEQ ID NO: 2666354 - DNA, 25 bp, Homo sapien
tgctgtccaaccgtgtcccagatct

SEQ ID NO: 2666355 - DNA, 25 bp, Homo sapien
gccttgttacccgtgagcgcaagga

SEQ ID NO: 2666356 - DNA, 25 bp, Homo sapien
ctggcaaatgtatctgtattggtga

SEQ ID NO: 2666357 - DNA, 25 bp, Homo sapien
ggctctggcaaatgtatctgtattg

SEQ ID NO: 2666358 - DNA, 25 bp, Homo sapien
cccgtgagcgcaaggaccatgttgg

SEQ ID NO: 2666359 - DNA, 25 bp, Homo sapien
aacagccaactgtcatcgtctgcat

SEQ ID NO: 2666360 - DNA, 25 bp, Homo sapien
tccatgaacagccaactgtcatcgt

SEQ ID NO: 2666361 - DNA, 25 bp, Homo sapien
tgaacagccaactgtcatcgtctgc

SEQ ID NO: 2666362 - DNA, 25 bp, Homo sapien
catgaacagccaactgtcatcgtct

SEQ ID NO: 2666363 - DNA, 25 bp, Homo sapien
gccgggtggttctcctggaggtcca

SEQ ID NO: 2666364 - DNA, 25 bp, Homo sapien
tggggctggccgggtggttctcctg

SEQ ID NO: 2666365 - DNA, 25 bp, Homo sapien
gggtggttctcctggaggtccacac

SEQ ID NO: 2666366 - DNA, 25 bp, Homo sapien
ctggccgggtggttctcctggaggt

SEQ ID NO: 2666367 - DNA, 25 bp, Homo sapien
aaggggggctccattgctgcaacac

SEQ ID NO: 2666368 - DNA, 25 bp, Homo sapien
gcagtggacaggcaaggggggctcc

SEQ ID NO: 2666369 - DNA, 25 bp, Homo sapien
ctaaggtggaagacttgggggcagt

SEQ ID NO: 2666370 - DNA, 25 bp, Homo sapien
aggcaaggggggctccattgctgca

SEQ ID NO: 2666371 - DNA, 25 bp, Homo sapien
taacatcaggattcttcttattgtc

SEQ ID NO: 2666372 - DNA, 25 bp, Homo sapien
aataaatctaacatcaggattcttc

SEQ ID NO: 2666373 - DNA, 25 bp, Homo sapien
taataaatctaacatcaggattctt

SEQ ID NO: 2666374 - DNA, 25 bp, Homo sapien
ataaatctaacatcaggattcttct

SEQ ID NO: 2666375 - DNA, 25 bp, Homo sapien
ggctgatccctggtccgattggcta

SEQ ID NO: 2666376 - DNA, 25 bp, Homo sapien
tggctatgctaccaagcaaagactg

SEQ ID NO: 2666377 - DNA, 25 bp, Homo sapien
ctcacaggctgatccctggtccgat

SEQ ID NO: 2666378 - DNA, 25 bp, Homo sapien
ggtccgattggctatgctaccaagc

SEQ ID NO: 2666379 - DNA, 25 bp, Homo sapien
tcctgaacactctaagaaaaagtag

SEQ ID NO: 2666380 - DNA, 25 bp, Homo sapien
taattagagagaaacaataagccct

SEQ ID NO: 2666381 - DNA, 25 bp, Homo sapien
ctttgaagtgttcaggtttcctggg

SEQ ID NO: 2666382 - DNA, 25 bp, Homo sapien
gagtatcaggccagacaccaatttg

SEQ ID NO: 2666383 - DNA, 25 bp, Homo sapien
ctcctttccggtatttgtgtatttg

SEQ ID NO: 2666384 - DNA, 25 bp, Homo sapien
cttctcctttccggtatttgtgtat

SEQ ID NO: 2666385 - DNA, 25 bp, Homo sapien
tcttctcctttccggtatttgtgta

SEQ ID NO: 2666386 - DNA, 25 bp, Homo sapien
aattaatgtaactgcactaacagac

SEQ ID NO: 2666387 - DNA, 25 bp, Homo sapien
ttcggaacctccaacgtacttcaga

SEQ ID NO: 2666388 - DNA, 25 bp, Homo sapien
tacttcagaatctcaggatgaataa

SEQ ID NO: 2666389 - DNA, 25 bp, Homo sapien
gaataattaatgtaactgcactaac

SEQ ID NO: 2666390 - DNA, 25 bp, Homo sapien
ttgccttcacttagtttcagagagc

SEQ ID NO: 2666391 - DNA, 25 bp, Homo sapien
caaagttgccttcacttagtttcag

SEQ ID NO: 2666392 - DNA, 25 bp, Homo sapien
cccatttaagtactgaccaaagttg

SEQ ID NO: 2666393 - DNA, 25 bp, Homo sapien
taagtactgaccaaagttgccttca

SEQ ID NO: 2666394 - DNA, 25 bp, Homo sapien
ggactcatttccctccgtagtcagg

SEQ ID NO: 2666395 - DNA, 25 bp, Homo sapien
tagtcaggcctctgggtcttaggat

SEQ ID NO: 2666396 - DNA, 25 bp, Homo sapien
taagagtcaggccacgttttcagac

SEQ ID NO: 2666397 - DNA, 25 bp, Homo sapien
tctaagggacgctgaagataccgaa

SEQ ID NO: 2666398 - DNA, 25 bp, Homo sapien
ctatattcaaagctgtatgtttatt

SEQ ID NO: 2666399 - DNA, 25 bp, Homo sapien
ctctatattcaaagctgtatgttta

SEQ ID NO: 2666400 - DNA, 25 bp, Homo sapien
actctatattcaaagctgtatgttt

SEQ ID NO: 2666401 - DNA, 25 bp, Homo sapien
tggccaattgaaactatccctgaga

SEQ ID NO: 2666402 - DNA, 25 bp, Homo sapien
tgggacatgatcaagcatactaaca

SEQ ID NO: 2666403 - DNA, 25 bp, Homo sapien
tgagaaagccaaaacgctggactaa

SEQ ID NO: 2666404 - DNA, 25 bp, Homo sapien
gagagcatagtacatataccatggg

SEQ ID NO: 2666405 - DNA, 25 bp, Homo sapien
gcatactgtcataggcataactcat

SEQ ID NO: 2666406 - DNA, 25 bp, Homo sapien
tattatgaatggcacactgagcctg

SEQ ID NO: 2666407 - DNA, 25 bp, Homo sapien
gcacactgagcctgatttagagtaa

SEQ ID NO: 2666408 - DNA, 25 bp, Homo sapien
gagtaataagcatactgtcataggc

SEQ ID NO: 2666409 - DNA, 25 bp, Homo sapien
actctctggtgcacaagtggatcac

SEQ ID NO: 2666410 - DNA, 25 bp, Homo sapien
tgagacggtgtaaaattttaccaca

SEQ ID NO: 2666411 - DNA, 25 bp, Homo sapien
tctggtgcacaagtggatcacactc

SEQ ID NO: 2666412 - DNA, 25 bp, Homo sapien
gcacaagtggatcacactctctgct

SEQ ID NO: 2666413 - DNA, 25 bp, Homo sapien
gagtatagggctgtattagttcgtt

SEQ ID NO: 2666414 - DNA, 25 bp, Homo sapien
tattgaaatgatatcagagtatagg

SEQ ID NO: 2666415 - DNA, 25 bp, Homo sapien
ttataggcaggagaaaccaattggt

SEQ ID NO: 2666416 - DNA, 25 bp, Homo sapien
ttttaagcatatcttgtaacactta

SEQ ID NO: 2666417 - DNA, 25 bp, Homo sapien
gaaagaatgagtttgttagcaggta

SEQ ID NO: 2666418 - DNA, 25 bp, Homo sapien
caacggcatcatgaaagtaattcta

SEQ ID NO: 2666419 - DNA, 25 bp, Homo sapien
gtgacttgcactaattctaccacaa

SEQ ID NO: 2666420 - DNA, 25 bp, Homo sapien
taataggcccttcttaaatggtgaa

SEQ ID NO: 2666421 - DNA, 25 bp, Homo sapien
gacctatttgaagaacactatgata

SEQ ID NO: 2666422 - DNA, 25 bp, Homo sapien
gatcaccactgtgatcactaaactt

SEQ ID NO: 2666423 - DNA, 25 bp, Homo sapien
ttatcagatatgatcaccactgtga

SEQ ID NO: 2666424 - DNA, 25 bp, Homo sapien
tctatcacctcacctatactttagg

SEQ ID NO: 2666425 - DNA, 25 bp, Homo sapien
tagcaagccatttaaacaagatctt

SEQ ID NO: 2666426 - DNA, 25 bp, Homo sapien
gatctgcttcttgtattagcaagcc

SEQ ID NO: 2666427 - DNA, 25 bp, Homo sapien
gatgtaaggtccatttaaaatgatc

SEQ ID NO: 2666428 - DNA, 25 bp, Homo sapien
aaagatgtaaggtccatttaaaatg

SEQ ID NO: 2666429 - DNA, 25 bp, Homo sapien
ttcagccttgagtatgtcagccaag

SEQ ID NO: 2666430 - DNA, 25 bp, Homo sapien
ttttctgctggtcaaagtcacaaaa

SEQ ID NO: 2666431 - DNA, 25 bp, Homo sapien
gagtatgtcagccaaggttttctgc

SEQ ID NO: 2666432 - DNA, 25 bp, Homo sapien
ttctgctggtcaaagtcacaaaaag

SEQ ID NO: 2666433 - DNA, 25 bp, Homo sapien
ccacaggggcagagttgaagtgttt

SEQ ID NO: 2666434 - DNA, 25 bp, Homo sapien
acaggggcagagttgaagtgtttcc

SEQ ID NO: 2666435 - DNA, 25 bp, Homo sapien
cagattgtctgaagggaagccattc

SEQ ID NO: 2666436 - DNA, 25 bp, Homo sapien
ggaagccattcttgccacaggggca

SEQ ID NO: 2666437 - DNA, 25 bp, Homo sapien
gaggtctgcccttgcatacataaaa

SEQ ID NO: 2666438 - DNA, 25 bp, Homo sapien
taataattcgggtcagcacacatgc

SEQ ID NO: 2666439 - DNA, 25 bp, Homo sapien
gctaccctgttgattaaagctgcca

SEQ ID NO: 2666440 - DNA, 25 bp, Homo sapien
cagctctgggtgcactgtgatgttt

SEQ ID NO: 2666441 - DNA, 25 bp, Homo sapien
gactatacagaatccagggcttaca

SEQ ID NO: 2666442 - DNA, 25 bp, Homo sapien
ggaatatactactgaggccactaga

SEQ ID NO: 2666443 - DNA, 25 bp, Homo sapien
cagagacaatgccaaatagagtgct

SEQ ID NO: 2666444 - DNA, 25 bp, Homo sapien
tcttagaccctgttcatgcaaggcc

SEQ ID NO: 2666445 - DNA, 25 bp, Homo sapien
cacattcttgcagctcttcacaaag

SEQ ID NO: 2666446 - DNA, 25 bp, Homo sapien
ttagtacatgcaagcacattcttgc

SEQ ID NO: 2666447 - DNA, 25 bp, Homo sapien
catgcaagcacattcttgcagctct

SEQ ID NO: 2666448 - DNA, 25 bp, Homo sapien
agcacattcttgcagctcttcacaa

SEQ ID NO: 2666449 - DNA, 25 bp, Homo sapien
taaacctcagaacaattcctgccag

SEQ ID NO: 2666450 - DNA, 25 bp, Homo sapien
ctgtcatacagagaactgaaaatta

SEQ ID NO: 2666451 - DNA, 25 bp, Homo sapien
tcctgccaggtttctcatgcaaatg

SEQ ID NO: 2666452 - DNA, 25 bp, Homo sapien
tgtgttttcccctcaatccatgctc

SEQ ID NO: 2666453 - DNA, 25 bp, Homo sapien
tgtcatgttgctgcggttttcacca

SEQ ID NO: 2666454 - DNA, 25 bp, Homo sapien
catgttgctgcggttttcaccaaat

SEQ ID NO: 2666455 - DNA, 25 bp, Homo sapien
gacataacataaagggcaaaaggca

SEQ ID NO: 2666456 - DNA, 25 bp, Homo sapien
tgaatctatatctggcttaatcaca

SEQ ID NO: 2666457 - DNA, 25 bp, Homo sapien
ccattataatacaagtactacttag

SEQ ID NO: 2666458 - DNA, 25 bp, Homo sapien
cctcacacctttttccattataata

SEQ ID NO: 2666459 - DNA, 25 bp, Homo sapien
tagctgacaggttttactatgtaat

SEQ ID NO: 2666460 - DNA, 25 bp, Homo sapien
tactacttagccatatgattttctg

SEQ ID NO: 2666461 - DNA, 25 bp, Homo sapien
tcctctcactgtgggtccctttctc

SEQ ID NO: 2666462 - DNA, 25 bp, Homo sapien
ttcctctcactgtgggtccctttct

SEQ ID NO: 2666463 - DNA, 25 bp, Homo sapien
gtccctttctctgttatctgttcca

SEQ ID NO: 2666464 - DNA, 25 bp, Homo sapien
tgtgggtccctttctctgttatctg

SEQ ID NO: 2666465 - DNA, 25 bp, Homo sapien
cagaggagaaattgtctttgaacat

SEQ ID NO: 2666466 - DNA, 25 bp, Homo sapien
gtaatctatgcattgatcagaggag

SEQ ID NO: 2666467 - DNA, 25 bp, Homo sapien
tttccctcttgtaatctatgcattg

SEQ ID NO: 2666468 - DNA, 25 bp, Homo sapien
ccctcttgtaatctatgcattgatc

SEQ ID NO: 2666469 - DNA, 25 bp, Homo sapien
cccaagttggcactacacacatgcc

SEQ ID NO: 2666470 - DNA, 25 bp, Homo sapien
caagttggcactacacacatgccca

SEQ ID NO: 2666471 - DNA, 25 bp, Homo sapien
agttggcactacacacatgcccacc

SEQ ID NO: 2666472 - DNA, 25 bp, Homo sapien
aagttggcactacacacatgcccac

SEQ ID NO: 2666473 - DNA, 25 bp, Homo sapien
ctaatgccgatcaggttggtcagtc

SEQ ID NO: 2666474 - DNA, 25 bp, Homo sapien
ggcaagtatcacctcaacacttgtg

SEQ ID NO: 2666475 - DNA, 25 bp, Homo sapien
tggagagcctagatgaccaggcaag

SEQ ID NO: 2666476 - DNA, 25 bp, Homo sapien
tcaacacttgtgcttctcatggagg

SEQ ID NO: 2666477 - DNA, 25 bp, Homo sapien
gtgatctcgagctgctgagacaatc

SEQ ID NO: 2666478 - DNA, 25 bp, Homo sapien
tttctcttgctgtgatctcgagctg

SEQ ID NO: 2666479 - DNA, 25 bp, Homo sapien
agggcaggaacactggtgttttcag

SEQ ID NO: 2666480 - DNA, 25 bp, Homo sapien
ggcaggaacactggtgttttcagga

SEQ ID NO: 2666481 - DNA, 25 bp, Homo sapien
cttgccccaaactaatgactatgat

SEQ ID NO: 2666482 - DNA, 25 bp, Homo sapien
gccccaaactaatgactatgatttc

SEQ ID NO: 2666483 - DNA, 25 bp, Homo sapien
acacttgccccaaactaatgactat

SEQ ID NO: 2666484 - DNA, 25 bp, Homo sapien
atatgatacatgaatgcttgattcc

SEQ ID NO: 2666485 - DNA, 25 bp, Homo sapien
ggtctgagacctctaaagagtaatc

SEQ ID NO: 2666486 - DNA, 25 bp, Homo sapien
gaagcccatcatacctcgtagaaga

SEQ ID NO: 2666487 - DNA, 25 bp, Homo sapien
tggagtctgcttcatgtccgatgga

SEQ ID NO: 2666488 - DNA, 25 bp, Homo sapien
cagagatcttgtcgttgggcaaggt

SEQ ID NO: 2666489 - DNA, 25 bp, Homo sapien
tgaagcatctgtaataagcctatgt

SEQ ID NO: 2666490 - DNA, 25 bp, Homo sapien
tctttcgttctagttccatcattag

SEQ ID NO: 2666491 - DNA, 25 bp, Homo sapien
catcattagttatggcaaattcagg

SEQ ID NO: 2666492 - DNA, 25 bp, Homo sapien
aaaacgtatagatctctgaagcatc

SEQ ID NO: 2666493 - DNA, 25 bp, Homo sapien
tgtgctgttatcctctgctgaaatc

SEQ ID NO: 2666494 - DNA, 25 bp, Homo sapien
gtgctgttatcctctgctgaaatct

SEQ ID NO: 2666495 - DNA, 25 bp, Homo sapien
ttattgttgagaatttgtgctgtta

SEQ ID NO: 2666496 - DNA, 25 bp, Homo sapien
attcctccacaaggataaatctgaa

SEQ ID NO: 2666497 - DNA, 25 bp, Homo sapien
aaattcctccacaaggataaatctg

SEQ ID NO: 2666498 - DNA, 25 bp, Homo sapien
gaaacctgcgcataaccttcaattt

SEQ ID NO: 2666499 - DNA, 25 bp, Homo sapien
aagtataattcagaaacctgcgcat

SEQ ID NO: 2666500 - DNA, 25 bp, Homo sapien
tgtgaggtagcgaaagtgcatttag

SEQ ID NO: 2666501 - DNA, 25 bp, Homo sapien
tgcatttaggaacagagtacaagct

SEQ ID NO: 2666502 - DNA, 25 bp, Homo sapien
gatgggacaagatttctgcaattaa

SEQ ID NO: 2666503 - DNA, 25 bp, Homo sapien
tgaatgtaacacttggatgggacaa

SEQ ID NO: 2666504 - DNA, 25 bp, Homo sapien
tcaattcttgctagtacggagcctc

SEQ ID NO: 2666505 - DNA, 25 bp, Homo sapien
tcttggatatatgtacaaccctcta

SEQ ID NO: 2666506 - DNA, 25 bp, Homo sapien
gattgctagccccaactgttattgc

SEQ ID NO: 2666507 - DNA, 25 bp, Homo sapien
tagctgtgacgtgaaacaactgcca

SEQ ID NO: 2666508 - DNA, 25 bp, Homo sapien
caatcagtgccaactgccacaaaaa

SEQ ID NO: 2666509 - DNA, 25 bp, Homo sapien
catctgctttcctaatcctagtagt

SEQ ID NO: 2666510 - DNA, 25 bp, Homo sapien
tggcaggaatgccatggttatcaat

SEQ ID NO: 2666511 - DNA, 25 bp, Homo sapien
cctagtagtactttcaattttgcca

SEQ ID NO: 2666512 - DNA, 25 bp, Homo sapien
agtagattcaatacctgttttgctc

SEQ ID NO: 2666513 - DNA, 25 bp, Homo sapien
gttttgctcccaccatcacagttaa

SEQ ID NO: 2666514 - DNA, 25 bp, Homo sapien
aatacctgttttgctcccaccatca

SEQ ID NO: 2666515 - DNA, 25 bp, Homo sapien
gattcaatacctgttttgctcccac

SEQ ID NO: 2666516 - DNA, 25 bp, Homo sapien
ccaaaatcaaggagatccctcagaa

SEQ ID NO: 2666517 - DNA, 25 bp, Homo sapien
aaaatcaaggagatccctcagaagt

SEQ ID NO: 2666518 - DNA, 25 bp, Homo sapien
attggctgaataatttcagacatca

SEQ ID NO: 2666519 - DNA, 25 bp, Homo sapien
caccaaaatcaaggagatccctcag

SEQ ID NO: 2666520 - DNA, 25 bp, Homo sapien
agcaacagtgcgaactttccccaca

SEQ ID NO: 2666521 - DNA, 25 bp, Homo sapien
gtggtaaggacaagtacatcacaag

SEQ ID NO: 2666522 - DNA, 25 bp, Homo sapien
atcacaagcagcaacagtgcgaact

SEQ ID NO: 2666523 - DNA, 25 bp, Homo sapien
tggtaaggacaagtacatcacaagc

SEQ ID NO: 2666524 - DNA, 25 bp, Homo sapien
tataggcagttgttgtaccaggatt

SEQ ID NO: 2666525 - DNA, 25 bp, Homo sapien
cagacttggcaagtgtttataggca

SEQ ID NO: 2666526 - DNA, 25 bp, Homo sapien
tttataggcagttgttgtaccagga

SEQ ID NO: 2666527 - DNA, 25 bp, Homo sapien
cttggcaagtgtttataggcagttg

SEQ ID NO: 2666528 - DNA, 25 bp, Homo sapien
tggtttctagaatctacacggtaag

SEQ ID NO: 2666529 - DNA, 25 bp, Homo sapien
tactagactgtttagtgcacccctc

SEQ ID NO: 2666530 - DNA, 25 bp, Homo sapien
tacacggtaagtccatactccaacc

SEQ ID NO: 2666531 - DNA, 25 bp, Homo sapien
gccttactagactgtttagtgcacc

SEQ ID NO: 2666532 - DNA, 25 bp, Homo sapien
ttccgtaatgggcatcactagggag

SEQ ID NO: 2666533 - DNA, 25 bp, Homo sapien
ctgtccagggagcattgtttgatga

SEQ ID NO: 2666534 - DNA, 25 bp, Homo sapien
ctccagatggttcatggcagagcca

SEQ ID NO: 2666535 - DNA, 25 bp, Homo sapien
catcactagggagtaggaactccag

SEQ ID NO: 2666536 - DNA, 25 bp, Homo sapien
cctgtgctctaagcaatgtcaatcc

SEQ ID NO: 2666537 - DNA, 25 bp, Homo sapien
ttttatttgggcgactcactttctc

SEQ ID NO: 2666538 - DNA, 25 bp, Homo sapien
gctctaagcaatgtcaatccataat

SEQ ID NO: 2666539 - DNA, 25 bp, Homo sapien
ttatttgggcgactcactttctctt

SEQ ID NO: 2666540 - DNA, 25 bp, Homo sapien
cagctgggttctcgaatcttctttc

SEQ ID NO: 2666541 - DNA, 25 bp, Homo sapien
gctttcaaccagttttgaatacagg

SEQ ID NO: 2666542 - DNA, 25 bp, Homo sapien
agaagaagaataaaccttcgtgctt

SEQ ID NO: 2666543 - DNA, 25 bp, Homo sapien
gaaagcagctgggttctcgaatctt

SEQ ID NO: 2666544 - DNA, 25 bp, Homo sapien
ccctcataatatccatacacaagct

SEQ ID NO: 2666545 - DNA, 25 bp, Homo sapien
cataatatccatacacaagctcttt

SEQ ID NO: 2666546 - DNA, 25 bp, Homo sapien
ggctcgggaaaatccctcataatat

SEQ ID NO: 2666547 - DNA, 25 bp, Homo sapien
aggctcgggaaaatccctcataata

SEQ ID NO: 2666548 - DNA, 25 bp, Homo sapien
cccagctgagcacgattttgattct

SEQ ID NO: 2666549 - DNA, 25 bp, Homo sapien
gccccagctgagcacgattttgatt

SEQ ID NO: 2666550 - DNA, 25 bp, Homo sapien
attgactgccccagctgagcacgat

SEQ ID NO: 2666551 - DNA, 25 bp, Homo sapien
gactgccccagctgagcacgatttt

SEQ ID NO: 2666552 - DNA, 25 bp, Homo sapien
acatgaaacagtagcatctggctcc

SEQ ID NO: 2666553 - DNA, 25 bp, Homo sapien
agacatgaaacagtagcatctggct

SEQ ID NO: 2666554 - DNA, 25 bp, Homo sapien
ctgcatctgtcacatgtttagactg

SEQ ID NO: 2666555 - DNA, 25 bp, Homo sapien
catctgtcacatgtttagactgcac

SEQ ID NO: 2666556 - DNA, 25 bp, Homo sapien
tctttggaaggtgatcacaggacac

SEQ ID NO: 2666557 - DNA, 25 bp, Homo sapien
cctctttggaaggtgatcacaggac

SEQ ID NO: 2666558 - DNA, 25 bp, Homo sapien
ctttggaaggtgatcacaggacaca

SEQ ID NO: 2666559 - DNA, 25 bp, Homo sapien
ctcctctttggaaggtgatcacagg

SEQ ID NO: 2666560 - DNA, 25 bp, Homo sapien
aaacagtttcccctgggcttctatg

SEQ ID NO: 2666561 - DNA, 25 bp, Homo sapien
tctccccatgaacattccagggttc

SEQ ID NO: 2666562 - DNA, 25 bp, Homo sapien
tgtcctttactttgtcctactctac

SEQ ID NO: 2666563 - DNA, 25 bp, Homo sapien
ccatgaacattccagggttccttca

SEQ ID NO: 2666564 - DNA, 25 bp, Homo sapien
tttttgccattcagcctcttaacag

SEQ ID NO: 2666565 - DNA, 25 bp, Homo sapien
tgcctggtaaatcatgcaagcatta

SEQ ID NO: 2666566 - DNA, 25 bp, Homo sapien
cattcagcctcttaacagcttccat

SEQ ID NO: 2666567 - DNA, 25 bp, Homo sapien
catgactgccagcataggtcaataa

SEQ ID NO: 2666568 - DNA, 25 bp, Homo sapien
cacaggcagcacagctgacttccat

SEQ ID NO: 2666569 - DNA, 25 bp, Homo sapien
catcattctgaataccacaggcagc

SEQ ID NO: 2666570 - DNA, 25 bp, Homo sapien
cattctgaataccacaggcagcaca

SEQ ID NO: 2666571 - DNA, 25 bp, Homo sapien
tcttcatcattctgaataccacagg

SEQ ID NO: 2666572 - DNA, 25 bp, Homo sapien
caagccagacatcccaggtgaaata

SEQ ID NO: 2666573 - DNA, 25 bp, Homo sapien
atcccaggtgaaatatacctgtatt

SEQ ID NO: 2666574 - DNA, 25 bp, Homo sapien
cccaggtgaaatatacctgtattct

SEQ ID NO: 2666575 - DNA, 25 bp, Homo sapien
cacaagccagacatcccaggtgaaa

SEQ ID NO: 2666576 - DNA, 25 bp, Homo sapien
catacctgtgtggaactcttctttg

SEQ ID NO: 2666577 - DNA, 25 bp, Homo sapien
catttcgaggtatacctgtgtctgc

SEQ ID NO: 2666578 - DNA, 25 bp, Homo sapien
gactgatggtgaggaaccatttcga

SEQ ID NO: 2666579 - DNA, 25 bp, Homo sapien
ttggtgaaatctcatacctgtgtgg

SEQ ID NO: 2666580 - DNA, 25 bp, Homo sapien
caagagcactattttgcttcccttt

SEQ ID NO: 2666581 - DNA, 25 bp, Homo sapien
gtgacctctccatcagttaacacaa

SEQ ID NO: 2666582 - DNA, 25 bp, Homo sapien
tcagtgacctctccatcagttaaca

SEQ ID NO: 2666583 - DNA, 25 bp, Homo sapien
cctctccatcagttaacacaaatgc

SEQ ID NO: 2666584 - DNA, 25 bp, Homo sapien
agctcagtgacctctccatcagtta

SEQ ID NO: 2666585 - DNA, 25 bp, Homo sapien
tatttgatgtcttggaacatcagct

SEQ ID NO: 2666586 - DNA, 25 bp, Homo sapien
aatatttgatgtcttggaacatcag

SEQ ID NO: 2666587 - DNA, 25 bp, Homo sapien
atatttgatgtcttggaacatcagc

SEQ ID NO: 2666588 - DNA, 25 bp, Homo sapien
ctaatatttgatgtcttggaacatc

SEQ ID NO: 2666589 - DNA, 25 bp, Homo sapien
atatgccatatacggcgggatgagc

SEQ ID NO: 2666590 - DNA, 25 bp, Homo sapien
aaaatacttcttgtgtccaaatgtg

SEQ ID NO: 2666591 - DNA, 25 bp, Homo sapien
ccaaatgtgtaagcagtgaaggagt

SEQ ID NO: 2666592 - DNA, 25 bp, Homo sapien
ttttcccaatatgccatatacggcg

SEQ ID NO: 2666593 - DNA, 25 bp, Homo sapien
agaaaaagactgcagggttgattac

SEQ ID NO: 2666594 - DNA, 25 bp, Homo sapien
catttgtggtgaagaaggtcttcct

SEQ ID NO: 2666595 - DNA, 25 bp, Homo sapien
aaagactgcagggttgattactatt

SEQ ID NO: 2666596 - DNA, 25 bp, Homo sapien
gtgaagaaggtcttcctaggcaaga

SEQ ID NO: 2666597 - DNA, 25 bp, Homo sapien
gaaacaagtctcaatcaagtccaag

SEQ ID NO: 2666598 - DNA, 25 bp, Homo sapien
aacaagtctcaatcaagtccaagga

SEQ ID NO: 2666599 - DNA, 25 bp, Homo sapien
caatcaagtccaaggaattaaaaca

SEQ ID NO: 2666600 - DNA, 25 bp, Homo sapien
agtctcaatcaagtccaaggaatta

SEQ ID NO: 2666601 - DNA, 25 bp, Homo sapien
gagtaccagatgtcagaagagttga

SEQ ID NO: 2666602 - DNA, 25 bp, Homo sapien
cctttggtccttcaagatttttctg

SEQ ID NO: 2666603 - DNA, 25 bp, Homo sapien
gttgagtaccagatgtcagaagagt

SEQ ID NO: 2666604 - DNA, 25 bp, Homo sapien
gatgtcagaagagttgaaaacatgt

SEQ ID NO: 2666605 - DNA, 25 bp, Homo sapien
aattgtaaccctcaagtgttgagag

SEQ ID NO: 2666606 - DNA, 25 bp, Homo sapien
ggtgtatagaactactagtgatttt

SEQ ID NO: 2666607 - DNA, 25 bp, Homo sapien
gattcttatccatgctcttatccat

SEQ ID NO: 2666608 - DNA, 25 bp, Homo sapien
tggatacagaatcaagcatgtaatc

SEQ ID NO: 2666609 - DNA, 25 bp, Homo sapien
ggtctcattcaacaatcacaaaaac

SEQ ID NO: 2666610 - DNA, 25 bp, Homo sapien
ggctgtagacttctgtatcttgtca

SEQ ID NO: 2666611 - DNA, 25 bp, Homo sapien
catttcaagatgctggggctagagt

SEQ ID NO: 2666612 - DNA, 25 bp, Homo sapien
ttctttacctttggctgtagacttc

SEQ ID NO: 2666613 - DNA, 25 bp, Homo sapien
gattcttaccaatgggcggtacaat

SEQ ID NO: 2666614 - DNA, 25 bp, Homo sapien
tctatgtttcctcccatttaggaga

SEQ ID NO: 2666615 - DNA, 25 bp, Homo sapien
tatcagagaacatggtgagcccctg

SEQ ID NO: 2666616 - DNA, 25 bp, Homo sapien
cctgcctccatttgcaactgagatt

SEQ ID NO: 2666617 - DNA, 25 bp, Homo sapien
gacacagttaaaaggcactatccga

SEQ ID NO: 2666618 - DNA, 25 bp, Homo sapien
caaacttctttggtaaattggctat

SEQ ID NO: 2666619 - DNA, 25 bp, Homo sapien
cactatccgattattggtaaggcat

SEQ ID NO: 2666620 - DNA, 25 bp, Homo sapien
ttagtatgtagggtcttggacacag

SEQ ID NO: 2666621 - DNA, 25 bp, Homo sapien
cgagtagttaaagttgtagcaggta

SEQ ID NO: 2666622 - DNA, 25 bp, Homo sapien
gccgtaaacagtcaacgagtagtta

SEQ ID NO: 2666623 - DNA, 25 bp, Homo sapien
caactaagtgttgagtttcagtaac

SEQ ID NO: 2666624 - DNA, 25 bp, Homo sapien
tactccaacttacagcaaaagccgt

SEQ ID NO: 2666625 - DNA, 25 bp, Homo sapien
tctctcctggatcaatatctatcat

SEQ ID NO: 2666626 - DNA, 25 bp, Homo sapien
gagattgcatatgctgttgattttg

SEQ ID NO: 2666627 - DNA, 25 bp, Homo sapien
tattactcgctcataatacttcatg

SEQ ID NO: 2666628 - DNA, 25 bp, Homo sapien
acagcaaagcccttgctattactcg

SEQ ID NO: 2666629 - DNA, 25 bp, Homo sapien
tcatggctacatctgcggttgacaa

SEQ ID NO: 2666630 - DNA, 25 bp, Homo sapien
atggcttttagatacgtttgagttt

SEQ ID NO: 2666631 - DNA, 25 bp, Homo sapien
tagatacgtttgagtttttagactc

SEQ ID NO: 2666632 - DNA, 25 bp, Homo sapien
cgtttcacatgggtaggcacttcag

SEQ ID NO: 2666633 - DNA, 25 bp, Homo sapien
acaacctgcttcttccgaatagcac

SEQ ID NO: 2666634 - DNA, 25 bp, Homo sapien
catgggtaggcacttcagagttcac

SEQ ID NO: 2666635 - DNA, 25 bp, Homo sapien
aatagcacttgttcgtttcacatgg

SEQ ID NO: 2666636 - DNA, 25 bp, Homo sapien
tgaaaccaatctccgtttccaagga

SEQ ID NO: 2666637 - DNA, 25 bp, Homo sapien
tttcatgaaaccaatctccgtttcc

SEQ ID NO: 2666638 - DNA, 25 bp, Homo sapien
aacaaaaaggcagttggcagctagc

SEQ ID NO: 2666639 - DNA, 25 bp, Homo sapien
caaaaaggcagttggcagctagcat

SEQ ID NO: 2666640 - DNA, 25 bp, Homo sapien
gaaatcgatgtctgggactgaccat

SEQ ID NO: 2666641 - DNA, 25 bp, Homo sapien
tcaggtgccccagtacaattacaat

SEQ ID NO: 2666642 - DNA, 25 bp, Homo sapien
taggttgcctgagtcctgttccagc

SEQ ID NO: 2666643 - DNA, 25 bp, Homo sapien
tacatactcctagaggtggccaaag

SEQ ID NO: 2666644 - DNA, 25 bp, Homo sapien
tttcacctattagagagtcagcctg

SEQ ID NO: 2666645 - DNA, 25 bp, Homo sapien
catgagacgaggcaactccctttca

SEQ ID NO: 2666646 - DNA, 25 bp, Homo sapien
tctcatgagacgaggcaactccctt

SEQ ID NO: 2666647 - DNA, 25 bp, Homo sapien
caaagtctcatgagacgaggcaact

SEQ ID NO: 2666648 - DNA, 25 bp, Homo sapien
ggttcctgttaaggcgtccgctcca

SEQ ID NO: 2666649 - DNA, 25 bp, Homo sapien
catcccttttgacacttggttcctg

SEQ ID NO: 2666650 - DNA, 25 bp, Homo sapien
ctgttaaggcgtccgctccatggtc

SEQ ID NO: 2666651 - DNA, 25 bp, Homo sapien
ttgacacttggttcctgttaaggcg

SEQ ID NO: 2666652 - DNA, 25 bp, Homo sapien
cacccagccaacattcactaattct

SEQ ID NO: 2666653 - DNA, 25 bp, Homo sapien
cattgacatacaatttatcaactac

SEQ ID NO: 2666654 - DNA, 25 bp, Homo sapien
tgttgcattgacatacaatttatca

SEQ ID NO: 2666655 - DNA, 25 bp, Homo sapien
acacttgttgcattgacatacaatt

SEQ ID NO: 2666656 - DNA, 25 bp, Homo sapien
ctgcctgagaatgtccaaggcctta

SEQ ID NO: 2666657 - DNA, 25 bp, Homo sapien
gagaatgtccaaggccttacttccc

SEQ ID NO: 2666658 - DNA, 25 bp, Homo sapien
gcctgagaatgtccaaggccttact

SEQ ID NO: 2666659 - DNA, 25 bp, Homo sapien
cctgagaatgtccaaggccttactt

SEQ ID NO: 2666660 - DNA, 25 bp, Homo sapien
actgccgctgacatgttttaacttc

SEQ ID NO: 2666661 - DNA, 25 bp, Homo sapien
ttcacagaagcaactgccgctgaca

SEQ ID NO: 2666662 - DNA, 25 bp, Homo sapien
aagcaactgccgctgacatgtttta

SEQ ID NO: 2666663 - DNA, 25 bp, Homo sapien
acagaagcaactgccgctgacatgt

SEQ ID NO: 2666664 - DNA, 25 bp, Homo sapien
taatagcaatttacatgtctaccag

SEQ ID NO: 2666665 - DNA, 25 bp, Homo sapien
tgtctaccagtagagtataagcctc

SEQ ID NO: 2666666 - DNA, 25 bp, Homo sapien
ggaattgtgattttataggacatag

SEQ ID NO: 2666667 - DNA, 25 bp, Homo sapien
tttcttatacaagagtttcctttga

SEQ ID NO: 2666668 - DNA, 25 bp, Homo sapien
tttccaagacgataagcagggagcg

SEQ ID NO: 2666669 - DNA, 25 bp, Homo sapien
ctattttccaagacgataagcaggg

SEQ ID NO: 2666670 - DNA, 25 bp, Homo sapien
ttttccaagacgataagcagggagc

SEQ ID NO: 2666671 - DNA, 25 bp, Homo sapien
tccaagacgataagcagggagcgca

SEQ ID NO: 2666672 - DNA, 25 bp, Homo sapien
aaaatgaagattaagtcctctaaca

SEQ ID NO: 2666673 - DNA, 25 bp, Homo sapien
taagtcctctaacaagagcagtttt

SEQ ID NO: 2666674 - DNA, 25 bp, Homo sapien
ttagtgggaggagttagcagctcca

SEQ ID NO: 2666675 - DNA, 25 bp, Homo sapien
aggattcggtaaaaagatgagaggg

SEQ ID NO: 2666676 - DNA, 25 bp, Homo sapien
tcctgaatgatgttgcagttcttca

SEQ ID NO: 2666677 - DNA, 25 bp, Homo sapien
gagtttgcccaattgagctgccagt

SEQ ID NO: 2666678 - DNA, 25 bp, Homo sapien
taaagcctgattgataaagtgccga

SEQ ID NO: 2666679 - DNA, 25 bp, Homo sapien
tgtgagaaaggtccaagaataatgg

SEQ ID NO: 2666680 - DNA, 25 bp, Homo sapien
ggccatggagaaggaactatccgga

SEQ ID NO: 2666681 - DNA, 25 bp, Homo sapien
gtaggtgagtggctggtatgttcac

SEQ ID NO: 2666682 - DNA, 25 bp, Homo sapien
aactatccggagtaggtgagtggct

SEQ ID NO: 2666683 - DNA, 25 bp, Homo sapien
tagcagagtaggagctgaaccgggc

SEQ ID NO: 2666684 - DNA, 25 bp, Homo sapien
aataaaatgattcagtggctggcac

SEQ ID NO: 2666685 - DNA, 25 bp, Homo sapien
ctgtgaatcagaaagtgtaataaaa

SEQ ID NO: 2666686 - DNA, 25 bp, Homo sapien
taaaatgattcagtggctggcacat

SEQ ID NO: 2666687 - DNA, 25 bp, Homo sapien
tgtaataaaatgattcagtggctgg

SEQ ID NO: 2666688 - DNA, 25 bp, Homo sapien
tgtggtcgtatgtatactcttgtcc

SEQ ID NO: 2666689 - DNA, 25 bp, Homo sapien
attctgtggtcgtatgtatactctt

SEQ ID NO: 2666690 - DNA, 25 bp, Homo sapien
atgtatactcttgtccccatttccg

SEQ ID NO: 2666691 - DNA, 25 bp, Homo sapien
ggtcgtatgtatactcttgtcccca

SEQ ID NO: 2666692 - DNA, 25 bp, Homo sapien
tcagagtgtagaaagtctgtgaacc

SEQ ID NO: 2666693 - DNA, 25 bp, Homo sapien
ctgtcagagtgtagaaagtctgtga

SEQ ID NO: 2666694 - DNA, 25 bp, Homo sapien
ctgtgaacctggcacaggattcttc

SEQ ID NO: 2666695 - DNA, 25 bp, Homo sapien
gaacctggcacaggattcttctcct

SEQ ID NO: 2666696 - DNA, 25 bp, Homo sapien
agctgtgaaacccagatgctgagtt

SEQ ID NO: 2666697 - DNA, 25 bp, Homo sapien
gcatctgggtatttggttggccttt

SEQ ID NO: 2666698 - DNA, 25 bp, Homo sapien
gctgagttccagtatgtaattttcc

SEQ ID NO: 2666699 - DNA, 25 bp, Homo sapien
gtagctgagccaagcaccatgggca

SEQ ID NO: 2666700 - DNA, 25 bp, Homo sapien
caatgggctactctagatgtggtct

SEQ ID NO: 2666701 - DNA, 25 bp, Homo sapien
taaggcagagtgttaaaatgaggtc

SEQ ID NO: 2666702 - DNA, 25 bp, Homo sapien
caagtcagcctgatgcaatgggcta

SEQ ID NO: 2666703 - DNA, 25 bp, Homo sapien
ggtgctgaatcaatcagtgcccaag

SEQ ID NO: 2666704 - DNA, 25 bp, Homo sapien
ccaattcttttgttgtgaaacttca

SEQ ID NO: 2666705 - DNA, 25 bp, Homo sapien
cctcatcacatttagggagctcttc

SEQ ID NO: 2666706 - DNA, 25 bp, Homo sapien
aaaggtgttgcatgaagggtcccct

SEQ ID NO: 2666707 - DNA, 25 bp, Homo sapien
gcatgcagacgagatgacaccaatt

SEQ ID NO: 2666708 - DNA, 25 bp, Homo sapien
taatcgacagcagaagttttagcaa

SEQ ID NO: 2666709 - DNA, 25 bp, Homo sapien
gacagcagaagttttagcaaagttt

SEQ ID NO: 2666710 - DNA, 25 bp, Homo sapien
tcgacagcagaagttttagcaaagt

SEQ ID NO: 2666711 - DNA, 25 bp, Homo sapien
ttaatcgacagcagaagttttagca

SEQ ID NO: 2666712 - DNA, 25 bp, Homo sapien
gatctctaagggtagtcatcagcct

SEQ ID NO: 2666713 - DNA, 25 bp, Homo sapien
tctgtttcacttatggcctactgca

SEQ ID NO: 2666714 - DNA, 25 bp, Homo sapien
gcaactgtccacaaactacattgag

SEQ ID NO: 2666715 - DNA, 25 bp, Homo sapien
gatgactgtgttgattagagaccta

SEQ ID NO: 2666716 - DNA, 25 bp, Homo sapien
caggtaacaatgggtctttccacct

SEQ ID NO: 2666717 - DNA, 25 bp, Homo sapien
ggtaacaatgggtctttccacctca

SEQ ID NO: 2666718 - DNA, 25 bp, Homo sapien
ctccaggtaacaatgggtctttcca

SEQ ID NO: 2666719 - DNA, 25 bp, Homo sapien
tccaggtaacaatgggtctttccac

SEQ ID NO: 2666720 - DNA, 25 bp, Homo sapien
tgtattccagctgaactaaccttcc

SEQ ID NO: 2666721 - DNA, 25 bp, Homo sapien
ttttcccaatccaaactctgtattc

SEQ ID NO: 2666722 - DNA, 25 bp, Homo sapien
ccaaactctgtattccagctgaact

SEQ ID NO: 2666723 - DNA, 25 bp, Homo sapien
tattccagctgaactaaccttccca

SEQ ID NO: 2666724 - DNA, 25 bp, Homo sapien
tcccttttgagcacagatttccggg

SEQ ID NO: 2666725 - DNA, 25 bp, Homo sapien
caaatgaaagagtgttctcttgagt

SEQ ID NO: 2666726 - DNA, 25 bp, Homo sapien
caaccaacaaggaactttatagttg

SEQ ID NO: 2666727 - DNA, 25 bp, Homo sapien
tgtgttgtgggctgcttcatagtat

SEQ ID NO: 2666728 - DNA, 25 bp, Homo sapien
ccattagaagagatcaaatctccac

SEQ ID NO: 2666729 - DNA, 25 bp, Homo sapien
aggaaaggccatcagagtacactct

SEQ ID NO: 2666730 - DNA, 25 bp, Homo sapien
tacactctacctgacaaggatgcac

SEQ ID NO: 2666731 - DNA, 25 bp, Homo sapien
tcagagtacactctacctgacaagg

SEQ ID NO: 2666732 - DNA, 25 bp, Homo sapien
aagcaaattagctttgaccatagcg

SEQ ID NO: 2666733 - DNA, 25 bp, Homo sapien
ttagctttgaccatagcgtaattac

SEQ ID NO: 2666734 - DNA, 25 bp, Homo sapien
caaattagctttgaccatagcgtaa

SEQ ID NO: 2666735 - DNA, 25 bp, Homo sapien
cagaaagcaaattagctttgaccat

SEQ ID NO: 2666736 - DNA, 25 bp, Homo sapien
acagcgatacaactggaattgtcta

SEQ ID NO: 2666737 - DNA, 25 bp, Homo sapien
ttgtctaaggtcaacagtgccgtaa

SEQ ID NO: 2666738 - DNA, 25 bp, Homo sapien
ctgtagacagcgatacaactggaat

SEQ ID NO: 2666739 - DNA, 25 bp, Homo sapien
tctaaggtcaacagtgccgtaatta

SEQ ID NO: 2666740 - DNA, 25 bp, Homo sapien
tatctcaaaggagccccatatggtg

SEQ ID NO: 2666741 - DNA, 25 bp, Homo sapien
catatggtgctctttgtccgtgtca

SEQ ID NO: 2666742 - DNA, 25 bp, Homo sapien
ttacctcgttacagccactgtctgc

SEQ ID NO: 2666743 - DNA, 25 bp, Homo sapien
gccaaaggtagaccaagcgctgcag

SEQ ID NO: 2666744 - DNA, 25 bp, Homo sapien
gatttaatattgtgtaacatctgga

SEQ ID NO: 2666745 - DNA, 25 bp, Homo sapien
cgatatagcagggtgacagcttcac

SEQ ID NO: 2666746 - DNA, 25 bp, Homo sapien
gacaatcatcatgatgctgagcccc

SEQ ID NO: 2666747 - DNA, 25 bp, Homo sapien
tctggattgtcctgccgatatagca

SEQ ID NO: 2666748 - DNA, 25 bp, Homo sapien
tgtacattgttttccgcttagaaaa

SEQ ID NO: 2666749 - DNA, 25 bp, Homo sapien
gttattagtggcaacacagtctgca

SEQ ID NO: 2666750 - DNA, 25 bp, Homo sapien
cttagaaaagttattagtggcaaca

SEQ ID NO: 2666751 - DNA, 25 bp, Homo sapien
aacacagtctgcatgaagctttgtc

SEQ ID NO: 2666752 - DNA, 25 bp, Homo sapien
gtccccaaccaagtctcatcttgaa

SEQ ID NO: 2666753 - DNA, 25 bp, Homo sapien
ttagatgtttatatagtttggctgt

SEQ ID NO: 2666754 - DNA, 25 bp, Homo sapien
cccaaccaagtctcatcttgaattg

SEQ ID NO: 2666755 - DNA, 25 bp, Homo sapien
ctgttagatgtttatatagtttggc

SEQ ID NO: 2666756 - DNA, 25 bp, Homo sapien
gagtattaaggctctgatcgttcat

SEQ ID NO: 2666757 - DNA, 25 bp, Homo sapien
gtggttgaaatataagtgagagtat

SEQ ID NO: 2666758 - DNA, 25 bp, Homo sapien
aagtgagagtattaaggctctgatc

SEQ ID NO: 2666759 - DNA, 25 bp, Homo sapien
tgagagtattaaggctctgatcgtt

SEQ ID NO: 2666760 - DNA, 25 bp, Homo sapien
gaaattctgctccttagttgcttct

SEQ ID NO: 2666761 - DNA, 25 bp, Homo sapien
aaattctgctccttagttgcttctt

SEQ ID NO: 2666762 - DNA, 25 bp, Homo sapien
attttcccacttgaacgtgccacag

SEQ ID NO: 2666763 - DNA, 25 bp, Homo sapien
tgaacgtgccacaggtatttgaatt

SEQ ID NO: 2666764 - DNA, 25 bp, Homo sapien
atgcagaagctctaaccaaggattc

SEQ ID NO: 2666765 - DNA, 25 bp, Homo sapien
gactgaagtggtatgggctttttct

SEQ ID NO: 2666766 - DNA, 25 bp, Homo sapien
tggcaaccactgaatagaacccttg

SEQ ID NO: 2666767 - DNA, 25 bp, Homo sapien
taaattacatggaatacacctggca

SEQ ID NO: 2666768 - DNA, 25 bp, Homo sapien
tattacttgggattgcgtcacacaa

SEQ ID NO: 2666769 - DNA, 25 bp, Homo sapien
cacccatttatttagagaggcgaac

SEQ ID NO: 2666770 - DNA, 25 bp, Homo sapien
cagcatgtgaagctttgagtctttc

SEQ ID NO: 2666771 - DNA, 25 bp, Homo sapien
cagaccagtctatggcaaattccac

SEQ ID NO: 2666772 - DNA, 25 bp, Homo sapien
ttcgccacaaggactgaaatgaccc

SEQ ID NO: 2666773 - DNA, 25 bp, Homo sapien
gacccactccgaaagcagcatgtga

SEQ ID NO: 2666774 - DNA, 25 bp, Homo sapien
aaaatgaacgctattatagtgtccc

SEQ ID NO: 2666775 - DNA, 25 bp, Homo sapien
taagaatcgggtgaatcataaggtc

SEQ ID NO: 2666776 - DNA, 25 bp, Homo sapien
tgtgctgccagtcgcattctccagc

SEQ ID NO: 2666777 - DNA, 25 bp, Homo sapien
tagtgtccctgatcattccatcatg

SEQ ID NO: 2666778 - DNA, 25 bp, Homo sapien
ttccatagcagacaagctgctcaca

SEQ ID NO: 2666779 - DNA, 25 bp, Homo sapien
ggctgctgcaccaagcgtaatgaac

SEQ ID NO: 2666780 - DNA, 25 bp, Homo sapien
aatcaatccaccaacgcggctgctg

SEQ ID NO: 2666781 - DNA, 25 bp, Homo sapien
catgcaggtcaataacgcctcttca

SEQ ID NO: 2666782 - DNA, 25 bp, Homo sapien
tatttcttcctttgggcaaaactgc

SEQ ID NO: 2666783 - DNA, 25 bp, Homo sapien
tcttcctttgggcaaaactgcctta

SEQ ID NO: 2666784 - DNA, 25 bp, Homo sapien
cttcctttgggcaaaactgccttat

SEQ ID NO: 2666785 - DNA, 25 bp, Homo sapien
ttcctttgggcaaaactgccttatc

SEQ ID NO: 2666786 - DNA, 25 bp, Homo sapien
atatgtcacctactattattgctgc

SEQ ID NO: 2666787 - DNA, 25 bp, Homo sapien
gctaatatgtcacctactattattg

SEQ ID NO: 2666788 - DNA, 25 bp, Homo sapien
tgtcacatctcttatcatgtaacat

SEQ ID NO: 2666789 - DNA, 25 bp, Homo sapien
ttttctgtcacatctcttatcatgt

SEQ ID NO: 2666790 - DNA, 25 bp, Homo sapien
ttcttcttttaggtaagcactagat

SEQ ID NO: 2666791 - DNA, 25 bp, Homo sapien
ttcttttaggtaagcactagatagc

SEQ ID NO: 2666792 - DNA, 25 bp, Homo sapien
cttttaggtaagcactagatagcat

SEQ ID NO: 2666793 - DNA, 25 bp, Homo sapien
ctgccagtctaccatctgtgtttct

SEQ ID NO: 2666794 - DNA, 25 bp, Homo sapien
gcacactcctccttggaatgtacat

SEQ ID NO: 2666795 - DNA, 25 bp, Homo sapien
ccttggaatgtacatttctgttcat

SEQ ID NO: 2666796 - DNA, 25 bp, Homo sapien
cactcctccttggaatgtacatttc

SEQ ID NO: 2666797 - DNA, 25 bp, Homo sapien
tttcactgagggcacactcctcctt

SEQ ID NO: 2666798 - DNA, 25 bp, Homo sapien
cgtatagcccttcaaggtgttgtcc

SEQ ID NO: 2666799 - DNA, 25 bp, Homo sapien
tagcccttcaaggtgttgtccaaca

SEQ ID NO: 2666800 - DNA, 25 bp, Homo sapien
aaggtgttgtccaacagggatgtcc

SEQ ID NO: 2666801 - DNA, 25 bp, Homo sapien
gcccttcaaggtgttgtccaacagg

SEQ ID NO: 2666802 - DNA, 25 bp, Homo sapien
cacacatttcgctgattctaaatca

SEQ ID NO: 2666803 - DNA, 25 bp, Homo sapien
tagtgatctatagctgcaatccatg

SEQ ID NO: 2666804 - DNA, 25 bp, Homo sapien
caatccatgagagggtagtttcaat

SEQ ID NO: 2666805 - DNA, 25 bp, Homo sapien
ccaacatagtctttcctgtcacaca

SEQ ID NO: 2666806 - DNA, 25 bp, Homo sapien
cctagtatctaattcaagcaagaac

SEQ ID NO: 2666807 - DNA, 25 bp, Homo sapien
caatagtcttacataacctgagtca

SEQ ID NO: 2666808 - DNA, 25 bp, Homo sapien
tactggcactcaaccatagtgaatc

SEQ ID NO: 2666809 - DNA, 25 bp, Homo sapien
tcatgagtccgtaaacagaagcttt

SEQ ID NO: 2666810 - DNA, 25 bp, Homo sapien
tactccattaacagagggcaacttc

SEQ ID NO: 2666811 - DNA, 25 bp, Homo sapien
tagcatttactaggcacttggcaat

SEQ ID NO: 2666812 - DNA, 25 bp, Homo sapien
cttcatttaagcactattggctggt

SEQ ID NO: 2666813 - DNA, 25 bp, Homo sapien
aactagaacaagagagactgatgga

SEQ ID NO: 2666814 - DNA, 25 bp, Homo sapien
ttttggttcgttgggctggcattta

SEQ ID NO: 2666815 - DNA, 25 bp, Homo sapien
ttctcctacatcatgcctgttttgg

SEQ ID NO: 2666816 - DNA, 25 bp, Homo sapien
catcatgcctgttttggttcgttgg

SEQ ID NO: 2666817 - DNA, 25 bp, Homo sapien
cctgttttggttcgttgggctggca

SEQ ID NO: 2666818 - DNA, 25 bp, Homo sapien
aattggcttatactcatttttcgtt

SEQ ID NO: 2666819 - DNA, 25 bp, Homo sapien
tggcttatactcatttttcgtttat

SEQ ID NO: 2666820 - DNA, 25 bp, Homo sapien
caaaattggcttatactcatttttc

SEQ ID NO: 2666821 - DNA, 25 bp, Homo sapien
catttgatccaagggctttgtggat

SEQ ID NO: 2666822 - DNA, 25 bp, Homo sapien
tgagctgcattatgagattgaggga

SEQ ID NO: 2666823 - DNA, 25 bp, Homo sapien
tcatattttagggtcattttgtcct

SEQ ID NO: 2666824 - DNA, 25 bp, Homo sapien
cttaaaatgagctgcattatgagat

SEQ ID NO: 2666825 - DNA, 25 bp, Homo sapien
aaatgagctgcattatgagattgag

SEQ ID NO: 2666826 - DNA, 25 bp, Homo sapien
atgactaagtttggttccaaaccag

SEQ ID NO: 2666827 - DNA, 25 bp, Homo sapien
ctaagtttggttccaaaccagctgt

SEQ ID NO: 2666828 - DNA, 25 bp, Homo sapien
ttagggtgcatagtaatgactaagt

SEQ ID NO: 2666829 - DNA, 25 bp, Homo sapien
gggtgcatagtaatgactaagtttg

SEQ ID NO: 2666830 - DNA, 25 bp, Homo sapien
tgttggcatgcgctgctttgagcag

SEQ ID NO: 2666831 - DNA, 25 bp, Homo sapien
ggtgctgcttggttaggaactgggc

SEQ ID NO: 2666832 - DNA, 25 bp, Homo sapien
cccaacaccttgtaatgagtccctg

SEQ ID NO: 2666833 - DNA, 25 bp, Homo sapien
tgggctgccatcctcctgttggcat

SEQ ID NO: 2666834 - DNA, 25 bp, Homo sapien
gtttaagaagcaggatgacgaatca

SEQ ID NO: 2666835 - DNA, 25 bp, Homo sapien
gagagatacggaaaccaaagatcaa

SEQ ID NO: 2666836 - DNA, 25 bp, Homo sapien
gaaagaacagagagatacggaaacc

SEQ ID NO: 2666837 - DNA, 25 bp, Homo sapien
aagcaggatgacgaatcatagtcca

SEQ ID NO: 2666838 - DNA, 25 bp, Homo sapien
tattagtgacatatagtatgacaga

SEQ ID NO: 2666839 - DNA, 25 bp, Homo sapien
tgggaggtcctctaactattctatc

SEQ ID NO: 2666840 - DNA, 25 bp, Homo sapien
tgatctgaactagtcttatcttatg

SEQ ID NO: 2666841 - DNA, 25 bp, Homo sapien
ttctatcatgagactgacctgattg

SEQ ID NO: 2666842 - DNA, 25 bp, Homo sapien
caagagttgttcgttttagcaccca

SEQ ID NO: 2666843 - DNA, 25 bp, Homo sapien
ccggtaaagaatgtcaataatccag

SEQ ID NO: 2666844 - DNA, 25 bp, Homo sapien
tagtctactgtagttccggtaaaga

SEQ ID NO: 2666845 - DNA, 25 bp, Homo sapien
tgcttccaacacgaaaactgtgatg

SEQ ID NO: 2666846 - DNA, 25 bp, Homo sapien
tttactccaggtcatctctaccatg

SEQ ID NO: 2666847 - DNA, 25 bp, Homo sapien
aggtcatctctaccatgcctgtcac

SEQ ID NO: 2666848 - DNA, 25 bp, Homo sapien
tgcttcctctgtgcaatatatttac

SEQ ID NO: 2666849 - DNA, 25 bp, Homo sapien
gcaatatatttactccaggtcatct

SEQ ID NO: 2666850 - DNA, 25 bp, Homo sapien
gatgtactgtggaagactttaagac

SEQ ID NO: 2666851 - DNA, 25 bp, Homo sapien
caagaacattccaactaatattggc

SEQ ID NO: 2666852 - DNA, 25 bp, Homo sapien
gacactcaacatgatgtactgtgga

SEQ ID NO: 2666853 - DNA, 25 bp, Homo sapien
gttttatccattgacactcaacatg

SEQ ID NO: 2666854 - DNA, 25 bp, Homo sapien
tagctcagatgaatgcatttgtgcc

SEQ ID NO: 2666855 - DNA, 25 bp, Homo sapien
tcaacttggtaactagggagaggaa

SEQ ID NO: 2666856 - DNA, 25 bp, Homo sapien
ggccccagactatgtttcctcacta

SEQ ID NO: 2666857 - DNA, 25 bp, Homo sapien
tcccatgtgcctttgcaagtctcaa

SEQ ID NO: 2666858 - DNA, 25 bp, Homo sapien
acagccaactggctccataggtcac

SEQ ID NO: 2666859 - DNA, 25 bp, Homo sapien
tgacagccaactggctccataggtc

SEQ ID NO: 2666860 - DNA, 25 bp, Homo sapien
agccaactggctccataggtcacac

SEQ ID NO: 2666861 - DNA, 25 bp, Homo sapien
catgacagccaactggctccatagg

SEQ ID NO: 2666862 - DNA, 25 bp, Homo sapien
ggtctgggcgatttgtcaaatggtt

SEQ ID NO: 2666863 - DNA, 25 bp, Homo sapien
agctcaaccagcttttgtgagggtc

SEQ ID NO: 2666864 - DNA, 25 bp, Homo sapien
cagtggtgtatagagagagcagcca

SEQ ID NO: 2666865 - DNA, 25 bp, Homo sapien
aaacagtggtgtatagagagagcag

SEQ ID NO: 2666866 - DNA, 25 bp, Homo sapien
tatggtccttatatactggagctgc

SEQ ID NO: 2666867 - DNA, 25 bp, Homo sapien
gcttaagtacatctcagttgcagta

SEQ ID NO: 2666868 - DNA, 25 bp, Homo sapien
caaccttggttgtctgagaagtcca

SEQ ID NO: 2666869 - DNA, 25 bp, Homo sapien
ctggagctgcaattagaagtctgta

SEQ ID NO: 2666870 - DNA, 25 bp, Homo sapien
tcgtatttgcttctcggtgtgtctc

SEQ ID NO: 2666871 - DNA, 25 bp, Homo sapien
gtatttgcttctcggtgtgtctctc

SEQ ID NO: 2666872 - DNA, 25 bp, Homo sapien
cgttcgtatttgcttctcggtgtgt

SEQ ID NO: 2666873 - DNA, 25 bp, Homo sapien
tttgcttctcggtgtgtctctctca

SEQ ID NO: 2666874 - DNA, 25 bp, Homo sapien
caggacaagggcaacattctctgat

SEQ ID NO: 2666875 - DNA, 25 bp, Homo sapien
ttgttctcggctttgatctcagtgg

SEQ ID NO: 2666876 - DNA, 25 bp, Homo sapien
gtcactccacaaactgtcagtgttt

SEQ ID NO: 2666877 - DNA, 25 bp, Homo sapien
tttgagatctctttctagtaggctg

SEQ ID NO: 2666878 - DNA, 25 bp, Homo sapien
tcagggacacagcaaattccatctt

SEQ ID NO: 2666879 - DNA, 25 bp, Homo sapien
ttgtcagggacacagcaaattccat

SEQ ID NO: 2666880 - DNA, 25 bp, Homo sapien
gcaaattccatcttcattttgatgg

SEQ ID NO: 2666881 - DNA, 25 bp, Homo sapien
gggacacagcaaattccatcttcat

SEQ ID NO: 2666882 - DNA, 25 bp, Homo sapien
gaggggtgttgtgattgagtagttt

SEQ ID NO: 2666883 - DNA, 25 bp, Homo sapien
aggaggggtgttgtgattgagtagt

SEQ ID NO: 2666884 - DNA, 25 bp, Homo sapien
ggtgttgtgattgagtagtttaagc

SEQ ID NO: 2666885 - DNA, 25 bp, Homo sapien
tgagtagtttaagcttaaaaatgta

SEQ ID NO: 2666886 - DNA, 25 bp, Homo sapien
tatcttcatgaggacagccaataac

SEQ ID NO: 2666887 - DNA, 25 bp, Homo sapien
ggaagaagtttatcttcatgaggac

SEQ ID NO: 2666888 - DNA, 25 bp, Homo sapien
cagccaataactgggtcactcatgg

SEQ ID NO: 2666889 - DNA, 25 bp, Homo sapien
tgaggacagccaataactgggtcac

SEQ ID NO: 2666890 - DNA, 25 bp, Homo sapien
aacgatattacactttggctttaag

SEQ ID NO: 2666891 - DNA, 25 bp, Homo sapien
gagacttggccctttattgattcag

SEQ ID NO: 2666892 - DNA, 25 bp, Homo sapien
gtatataaccaaattcaggagtatt

SEQ ID NO: 2666893 - DNA, 25 bp, Homo sapien
ccatagatatggaagactgactgta

SEQ ID NO: 2666894 - DNA, 25 bp, Homo sapien
aatagaccggatggattcttggtaa

SEQ ID NO: 2666895 - DNA, 25 bp, Homo sapien
aatgctctatatgttctagctctaa

SEQ ID NO: 2666896 - DNA, 25 bp, Homo sapien
tgtgttctaaaacagtcatgaaaat

SEQ ID NO: 2666897 - DNA, 25 bp, Homo sapien
ttattgtaataatagaccggatgga

SEQ ID NO: 2666898 - DNA, 25 bp, Homo sapien
tagtattgaatccactctcaaggga

SEQ ID NO: 2666899 - DNA, 25 bp, Homo sapien
gatcaatgtcaatccagtgggtacc

SEQ ID NO: 2666900 - DNA, 25 bp, Homo sapien
tctcaagggatgatgactttccacc

SEQ ID NO: 2666901 - DNA, 25 bp, Homo sapien
actgcaatcgctacaagttttgttg

SEQ ID NO: 2666902 - DNA, 25 bp, Homo sapien
gaaatgtaccgctgtgcattctcag

SEQ ID NO: 2666903 - DNA, 25 bp, Homo sapien
taccgctgtgcattctcagtaactg

SEQ ID NO: 2666904 - DNA, 25 bp, Homo sapien
ttagggaaatgtaccgctgtgcatt

SEQ ID NO: 2666905 - DNA, 25 bp, Homo sapien
aatgtaccgctgtgcattctcagta

SEQ ID NO: 2666906 - DNA, 25 bp, Homo sapien
tggggatacgccttgaagtatttta

SEQ ID NO: 2666907 - DNA, 25 bp, Homo sapien
aaatctcttggggatacgccttgaa

SEQ ID NO: 2666908 - DNA, 25 bp, Homo sapien
cagctgaaatctcttggggatacgc

SEQ ID NO: 2666909 - DNA, 25 bp, Homo sapien
aattttgattgtccagctgaaatct

SEQ ID NO: 2666910 - DNA, 25 bp, Homo sapien
tgttggatatagcagcacataggta

SEQ ID NO: 2666911 - DNA, 25 bp, Homo sapien
atagacaccttcacatagggttttt

SEQ ID NO: 2666912 - DNA, 25 bp, Homo sapien
taggtaaatagattggatcagggcc

SEQ ID NO: 2666913 - DNA, 25 bp, Homo sapien
ttctgaatgggatgggtatgctgac

SEQ ID NO: 2666914 - DNA, 25 bp, Homo sapien
aatacaggttatttgcaatttgaca

SEQ ID NO: 2666915 - DNA, 25 bp, Homo sapien
tctgaaacacttagaagtaatgatc

SEQ ID NO: 2666916 - DNA, 25 bp, Homo sapien
tgaaacccttgatttagaatctgaa

SEQ ID NO: 2666917 - DNA, 25 bp, Homo sapien
cataagcactgtaaacgctattcta

SEQ ID NO: 2666918 - DNA, 25 bp, Homo sapien
tctggtgtgacactaggtgaatgtg

SEQ ID NO: 2666919 - DNA, 25 bp, Homo sapien
gctccaaaggacttgtgcctagaat

SEQ ID NO: 2666920 - DNA, 25 bp, Homo sapien
tggaggagaaatcccagaagaatct

SEQ ID NO: 2666921 - DNA, 25 bp, Homo sapien
ctctcagaagaccaatgcagctttt

SEQ ID NO: 2666922 - DNA, 25 bp, Homo sapien
aatggaatgggttagattggcagtc

SEQ ID NO: 2666923 - DNA, 25 bp, Homo sapien
aggagacgaattgtggcacttggta

SEQ ID NO: 2666924 - DNA, 25 bp, Homo sapien
tcacaaggagacgaattgtggcact

SEQ ID NO: 2666925 - DNA, 25 bp, Homo sapien
atgagtcacaaggagacgaattgtg

SEQ ID NO: 2666926 - DNA, 25 bp, Homo sapien
ctgtgaacacccacacggatcctcc

SEQ ID NO: 2666927 - DNA, 25 bp, Homo sapien
gaagcctgagccttggactcttgcc

SEQ ID NO: 2666928 - DNA, 25 bp, Homo sapien
tgagccttggactcttgcctcccac

SEQ ID NO: 2666929 - DNA, 25 bp, Homo sapien
agcctgagccttggactcttgcctc

SEQ ID NO: 2666930 - DNA, 25 bp, Homo sapien
aggaagcctgagccttggactcttg

SEQ ID NO: 2666931 - DNA, 25 bp, Homo sapien
tgacagtaaactgcgaccttgttga

SEQ ID NO: 2666932 - DNA, 25 bp, Homo sapien
tgttaatggataattgtgggtcacc

SEQ ID NO: 2666933 - DNA, 25 bp, Homo sapien
caatgaactattacatggtccctgc

SEQ ID NO: 2666934 - DNA, 25 bp, Homo sapien
catatcaatgcagtagggcttagac

SEQ ID NO: 2666935 - DNA, 25 bp, Homo sapien
gctgggtcaatgcagaaagtaacat

SEQ ID NO: 2666936 - DNA, 25 bp, Homo sapien
aatgcagaaagtaacattgcagcca

SEQ ID NO: 2666937 - DNA, 25 bp, Homo sapien
tcaatgcagaaagtaacattgcagc

SEQ ID NO: 2666938 - DNA, 25 bp, Homo sapien
gggtcaatgcagaaagtaacattgc

SEQ ID NO: 2666939 - DNA, 25 bp, Homo sapien
tgacttgagttgtcgttaagttcaa

SEQ ID NO: 2666940 - DNA, 25 bp, Homo sapien
aaaaaaggagggcattgacttgagt

SEQ ID NO: 2666941 - DNA, 25 bp, Homo sapien
aaggagggcattgacttgagttgtc

SEQ ID NO: 2666942 - DNA, 25 bp, Homo sapien
gggcattgacttgagttgtcgttaa

SEQ ID NO: 2666943 - DNA, 25 bp, Homo sapien
caaagctgcttcatcattaatgtca

SEQ ID NO: 2666944 - DNA, 25 bp, Homo sapien
gagcctggacaacagtcctttccaa

SEQ ID NO: 2666945 - DNA, 25 bp, Homo sapien
gacacagacaaagctgcttcatcat

SEQ ID NO: 2666946 - DNA, 25 bp, Homo sapien
cagtaaaaggatctggaggaaaaat

SEQ ID NO: 2666947 - DNA, 25 bp, Homo sapien
tagacattcgcatgatggcatcagc

SEQ ID NO: 2666948 - DNA, 25 bp, Homo sapien
gctgatctaatgcatctggagctgc

SEQ ID NO: 2666949 - DNA, 25 bp, Homo sapien
aagtaagtgttagacattcgcatga

SEQ ID NO: 2666950 - DNA, 25 bp, Homo sapien
atcagctgctgatctaatgcatctg

SEQ ID NO: 2666951 - DNA, 25 bp, Homo sapien
tctgaattgtgactgtgcattgaac

SEQ ID NO: 2666952 - DNA, 25 bp, Homo sapien
aatctcccctctgaattgtgactgt

SEQ ID NO: 2666953 - DNA, 25 bp, Homo sapien
gactgtgcattgaactttaaaactg

SEQ ID NO: 2666954 - DNA, 25 bp, Homo sapien
ccataaatgtgtgaaatctcccctc

SEQ ID NO: 2666955 - DNA, 25 bp, Homo sapien
tcttgcatcagtaaatgttgacttc

SEQ ID NO: 2666956 - DNA, 25 bp, Homo sapien
ggagtcctcagctttcaggagtccc

SEQ ID NO: 2666957 - DNA, 25 bp, Homo sapien
gcactggtcccgttgagtcctgggg

SEQ ID NO: 2666958 - DNA, 25 bp, Homo sapien
atggcactggtcccgttgagtcctg

SEQ ID NO: 2666959 - DNA, 25 bp, Homo sapien
tgagcagcaggggaacaaaggcagg

SEQ ID NO: 2666960 - DNA, 25 bp, Homo sapien
tattaggctatccttctgtttgggg

SEQ ID NO: 2666961 - DNA, 25 bp, Homo sapien
ctattaggctatccttctgtttggg

SEQ ID NO: 2666962 - DNA, 25 bp, Homo sapien
taggagaggcaagatctccatttgc

SEQ ID NO: 2666963 - DNA, 25 bp, Homo sapien
ctttgtttgttctggcactactttc

SEQ ID NO: 2666964 - DNA, 25 bp, Homo sapien
cactttgtttgttctggcactactt

SEQ ID NO: 2666965 - DNA, 25 bp, Homo sapien
actttgtttgttctggcactacttt

SEQ ID NO: 2666966 - DNA, 25 bp, Homo sapien
gctctaagtccgacggcataggata

SEQ ID NO: 2666967 - DNA, 25 bp, Homo sapien
ggcataggatactctccaacttgaa

SEQ ID NO: 2666968 - DNA, 25 bp, Homo sapien
tgctctagtcctcttgctgtgaaag

SEQ ID NO: 2666969 - DNA, 25 bp, Homo sapien
tgtgaaagcatgtagtgagttgccc

SEQ ID NO: 2666970 - DNA, 25 bp, Homo sapien
tcaatgagagaatgagtatggctcc

SEQ ID NO: 2666971 - DNA, 25 bp, Homo sapien
tattgcacaccatgtgtcaatgaga

SEQ ID NO: 2666972 - DNA, 25 bp, Homo sapien
tgtgtcaatgagagaatgagtatgg

SEQ ID NO: 2666973 - DNA, 25 bp, Homo sapien
tgtcaatgagagaatgagtatggct

SEQ ID NO: 2666974 - DNA, 25 bp, Homo sapien
gatgactccccagcagcggagagca

SEQ ID NO: 2666975 - DNA, 25 bp, Homo sapien
ctgggtagatgactccccagcagcg

SEQ ID NO: 2666976 - DNA, 25 bp, Homo sapien
agcagcggagagcatctgacagcag

SEQ ID NO: 2666977 - DNA, 25 bp, Homo sapien
gcagcggagagcatctgacagcaga

SEQ ID NO: 2666978 - DNA, 25 bp, Homo sapien
caaaggcaatcttatagcccaagac

SEQ ID NO: 2666979 - DNA, 25 bp, Homo sapien
aatcttatagcccaagacagccaag

SEQ ID NO: 2666980 - DNA, 25 bp, Homo sapien
ggagcaaaggcaatcttatagccca

SEQ ID NO: 2666981 - DNA, 25 bp, Homo sapien
ggcaatcttatagcccaagacagcc

SEQ ID NO: 2666982 - DNA, 25 bp, Homo sapien
ggtcaaagtggcctgccacagagtc

SEQ ID NO: 2666983 - DNA, 25 bp, Homo sapien
tcagatccccacagtctgctgaggc

SEQ ID NO: 2666984 - DNA, 25 bp, Homo sapien
cagtcactggggtgacggtcaaagt

SEQ ID NO: 2666985 - DNA, 25 bp, Homo sapien
ctggcccgctaccagcacagtcact

SEQ ID NO: 2666986 - DNA, 25 bp, Homo sapien
ggctgtgtgctctcaatgtcaggct

SEQ ID NO: 2666987 - DNA, 25 bp, Homo sapien
gattcttcttcctgtaatatattag

SEQ ID NO: 2666988 - DNA, 25 bp, Homo sapien
tcttcctgtaatatattaggctgtg

SEQ ID NO: 2666989 - DNA, 25 bp, Homo sapien
ctgtgtgctctcaatgtcaggctct

SEQ ID NO: 2666990 - DNA, 25 bp, Homo sapien
cacatgatgagcttcgtgcttggag

SEQ ID NO: 2666991 - DNA, 25 bp, Homo sapien
tatgcaactcacaagtgtgtaggga

SEQ ID NO: 2666992 - DNA, 25 bp, Homo sapien
tgttgactgtcaagagcagagcacc

SEQ ID NO: 2666993 - DNA, 25 bp, Homo sapien
gaggttggatatacagcttctaggg

SEQ ID NO: 2666994 - DNA, 25 bp, Homo sapien
ggcgtcagccgagcatgcattattt

SEQ ID NO: 2666995 - DNA, 25 bp, Homo sapien
tggtgtctggcgacaatctggaaac

SEQ ID NO: 2666996 - DNA, 25 bp, Homo sapien
ttgtggttgccgtaggaaaattcgc

SEQ ID NO: 2666997 - DNA, 25 bp, Homo sapien
aaatgcacaagtggaggcgtcagcc

SEQ ID NO: 2666998 - DNA, 25 bp, Homo sapien
tgactcgacctcacaccaacattga

SEQ ID NO: 2666999 - DNA, 25 bp, Homo sapien
gctcttgggctaaaaaacttgtgtc

SEQ ID NO: 2667000 - DNA, 25 bp, Homo sapien
tgtccgaagtgtgccagtgtgatct

SEQ ID NO: 2667001 - DNA, 25 bp, Homo sapien
tgtgatctgcactcacgtgactcga

SEQ ID NO: 2667002 - DNA, 25 bp, Homo sapien
gcctaatggttatgcaagtctcaga

SEQ ID NO: 2667003 - DNA, 25 bp, Homo sapien
tgcccctggcaagactttttcaagt

SEQ ID NO: 2667004 - DNA, 25 bp, Homo sapien
tgttcacttttgctagacctttaac

SEQ ID NO: 2667005 - DNA, 25 bp, Homo sapien
gaaagcctgatcttaatttctgccc

SEQ ID NO: 2667006 - DNA, 25 bp, Homo sapien
gatgcgccttttgcaccattaaaag

SEQ ID NO: 2667007 - DNA, 25 bp, Homo sapien
ccatcaaatcgagtacagaatctgt

SEQ ID NO: 2667008 - DNA, 25 bp, Homo sapien
agaatctgtgttgccctctccacac

SEQ ID NO: 2667009 - DNA, 25 bp, Homo sapien
tctccacacttatcaagatgcgcct

SEQ ID NO: 2667010 - DNA, 25 bp, Homo sapien
tactgtgaacctctttgcactcggt

SEQ ID NO: 2667011 - DNA, 25 bp, Homo sapien
ccagagtgatcagactggccaagct

SEQ ID NO: 2667012 - DNA, 25 bp, Homo sapien
gtacatccacaagaagttgcataaa

SEQ ID NO: 2667013 - DNA, 25 bp, Homo sapien
gttgcataaataaccccaaatactg

SEQ ID NO: 2667014 - DNA, 25 bp, Homo sapien
ctgactctcgttaaaccctatcagt

SEQ ID NO: 2667015 - DNA, 25 bp, Homo sapien
tgactctcgttaaaccctatcagtg

SEQ ID NO: 2667016 - DNA, 25 bp, Homo sapien
gactctcgttaaaccctatcagtga

SEQ ID NO: 2667017 - DNA, 25 bp, Homo sapien
cttcaggtcctgaagtttactggtc

SEQ ID NO: 2667018 - DNA, 25 bp, Homo sapien
aactggtgtgtatttgacatcttct

SEQ ID NO: 2667019 - DNA, 25 bp, Homo sapien
ttcaggtcctgaagtttactggtct

SEQ ID NO: 2667020 - DNA, 25 bp, Homo sapien
tttagtaactggtgtgtatttgaca

SEQ ID NO: 2667021 - DNA, 25 bp, Homo sapien
ttctttcctattaccagccaaatca

SEQ ID NO: 2667022 - DNA, 25 bp, Homo sapien
actcatgtggctgtatgggcttaaa

SEQ ID NO: 2667023 - DNA, 25 bp, Homo sapien
caaatcactttactcatgtggctgt

SEQ ID NO: 2667024 - DNA, 25 bp, Homo sapien
tattaccagccaaatcactttactc

SEQ ID NO: 2667025 - DNA, 25 bp, Homo sapien
tccccaagtatcaaatatggggctt

SEQ ID NO: 2667026 - DNA, 25 bp, Homo sapien
ctccccaagtatcaaatatggggct

SEQ ID NO: 2667027 - DNA, 25 bp, Homo sapien
tgtctccccaagtatcaaatatggg

SEQ ID NO: 2667028 - DNA, 25 bp, Homo sapien
ggctgtctccccaagtatcaaatat

SEQ ID NO: 2667029 - DNA, 25 bp, Homo sapien
gcttctgtgaacaactgtgactgct

SEQ ID NO: 2667030 - DNA, 25 bp, Homo sapien
gaagcaaggcttctgtgaacaactg

SEQ ID NO: 2667031 - DNA, 25 bp, Homo sapien
tcaaaaattgtgcagaagcaaggct

SEQ ID NO: 2667032 - DNA, 25 bp, Homo sapien
tgtgcagaagcaaggcttctgtgaa

SEQ ID NO: 2667033 - DNA, 25 bp, Homo sapien
gaaagttaccatttggcaagaaggc

SEQ ID NO: 2667034 - DNA, 25 bp, Homo sapien
accatttggcaagaaggcttccaga

SEQ ID NO: 2667035 - DNA, 25 bp, Homo sapien
ttctaaatgaggaaacttccagaaa

SEQ ID NO: 2667036 - DNA, 25 bp, Homo sapien
gcttccagatgcctttttttgctta

SEQ ID NO: 2667037 - DNA, 25 bp, Homo sapien
ttgtcttggcaaatggggcatatat

SEQ ID NO: 2667038 - DNA, 25 bp, Homo sapien
gttcacattttgacagttcagcagt

SEQ ID NO: 2667039 - DNA, 25 bp, Homo sapien
ctgtgcttgctacagcaatattttt

SEQ ID NO: 2667040 - DNA, 25 bp, Homo sapien
acattttgacagttcagcagtgaaa

SEQ ID NO: 2667041 - DNA, 25 bp, Homo sapien
gcaagatgtaacatagcgacagctc

SEQ ID NO: 2667042 - DNA, 25 bp, Homo sapien
ggagcaagatgtaacatagcgacag

SEQ ID NO: 2667043 - DNA, 25 bp, Homo sapien
aggagcaagatgtaacatagcgaca

SEQ ID NO: 2667044 - DNA, 25 bp, Homo sapien
gagcaagatgtaacatagcgacagc

SEQ ID NO: 2667045 - DNA, 25 bp, Homo sapien
cgccacatccccagctatcagatat

SEQ ID NO: 2667046 - DNA, 25 bp, Homo sapien
ttctaaatggatcattgatggacat

SEQ ID NO: 2667047 - DNA, 25 bp, Homo sapien
gcgccacatccccagctatcagata

SEQ ID NO: 2667048 - DNA, 25 bp, Homo sapien
ttcactaccgctccactgccccagt

SEQ ID NO: 2667049 - DNA, 25 bp, Homo sapien
tcgcgcagcttcttcactaccgctc

SEQ ID NO: 2667050 - DNA, 25 bp, Homo sapien
gcagcttcttcactaccgctccact

SEQ ID NO: 2667051 - DNA, 25 bp, Homo sapien
gctcgcgcagcttcttcactaccgc

SEQ ID NO: 2667052 - DNA, 25 bp, Homo sapien
ctgcgggagcaggttgtgctcctca

SEQ ID NO: 2667053 - DNA, 25 bp, Homo sapien
gcagcggcatggacttgaacaaagt

SEQ ID NO: 2667054 - DNA, 25 bp, Homo sapien
agcaggttgtgctcctcactgatct

SEQ ID NO: 2667055 - DNA, 25 bp, Homo sapien
actgatctcctgcaggatggagggc

SEQ ID NO: 2667056 - DNA, 25 bp, Homo sapien
caggatgatccctgtaaccaacttt

SEQ ID NO: 2667057 - DNA, 25 bp, Homo sapien
ggtggatgtatttgctccgagcagg

SEQ ID NO: 2667058 - DNA, 25 bp, Homo sapien
aggatgatccctgtaaccaactttg

SEQ ID NO: 2667059 - DNA, 25 bp, Homo sapien
ctgggtggatgtatttgctccgagc

SEQ ID NO: 2667060 - DNA, 25 bp, Homo sapien
ggtcagcaaagcagtggtcttccac

SEQ ID NO: 2667061 - DNA, 25 bp, Homo sapien
aggtcagcaaagcagtggtcttcca

SEQ ID NO: 2667062 - DNA, 25 bp, Homo sapien
tgaggtcagcaaagcagtggtcttc

SEQ ID NO: 2667063 - DNA, 25 bp, Homo sapien
gaggtcagcaaagcagtggtcttcc

SEQ ID NO: 2667064 - DNA, 25 bp, Homo sapien
cagcagcaggaacctatctgtgtca

SEQ ID NO: 2667065 - DNA, 25 bp, Homo sapien
ccagcagcaggaacctatctgtgtc

SEQ ID NO: 2667066 - DNA, 25 bp, Homo sapien
accagcagcaggaacctatctgtgt

SEQ ID NO: 2667067 - DNA, 25 bp, Homo sapien
cgggagacatgggccgcgctgaact

SEQ ID NO: 2667068 - DNA, 25 bp, Homo sapien
gggagacatgggccgcgctgaactg

SEQ ID NO: 2667069 - DNA, 25 bp, Homo sapien
gctgaggaggttgccttcaaggaca

SEQ ID NO: 2667070 - DNA, 25 bp, Homo sapien
caggaggatctcatccagcatcttc

SEQ ID NO: 2667071 - DNA, 25 bp, Homo sapien
tccacgctggctgcctgggttttct

SEQ ID NO: 2667072 - DNA, 25 bp, Homo sapien
cacgggcactgaggagctcagctgc

SEQ ID NO: 2667073 - DNA, 25 bp, Homo sapien
tggtgggatcaaactcgcctggcat

SEQ ID NO: 2667074 - DNA, 25 bp, Homo sapien
tgggatcaaactcgcctggcatcac

SEQ ID NO: 2667075 - DNA, 25 bp, Homo sapien
ttggtgggatcaaactcgcctggca

SEQ ID NO: 2667076 - DNA, 25 bp, Homo sapien
ggtgggatcaaactcgcctggcatc

SEQ ID NO: 2667077 - DNA, 25 bp, Homo sapien
ctgactccatcaatggtggcctggt

SEQ ID NO: 2667078 - DNA, 25 bp, Homo sapien
tgactccatcaatggtggcctggta

SEQ ID NO: 2667079 - DNA, 25 bp, Homo sapien
atgctgctgtatcggaaaatgtcac

SEQ ID NO: 2667080 - DNA, 25 bp, Homo sapien
tccatgctgctgtatcggaaaatgt

SEQ ID NO: 2667081 - DNA, 25 bp, Homo sapien
gatcctccatgctgctgtatcggaa

SEQ ID NO: 2667082 - DNA, 25 bp, Homo sapien
tcctccatgctgctgtatcggaaaa

SEQ ID NO: 2667083 - DNA, 25 bp, Homo sapien
gaagaagaatgggtcggttttgcag

SEQ ID NO: 2667084 - DNA, 25 bp, Homo sapien
atgcgggcactccgggaagaagaat

SEQ ID NO: 2667085 - DNA, 25 bp, Homo sapien
cttaagtcagggatggtcaccaaca

SEQ ID NO: 2667086 - DNA, 25 bp, Homo sapien
agaagaatgggtcggttttgcagaa

SEQ ID NO: 2667087 - DNA, 25 bp, Homo sapien
ctctgccccgaagcctgagaagctg

SEQ ID NO: 2667088 - DNA, 25 bp, Homo sapien
tgagaagctgatgggctggcaggcc

SEQ ID NO: 2667089 - DNA, 25 bp, Homo sapien
ggcaggttcacgaggcaggcggtct

SEQ ID NO: 2667090 - DNA, 25 bp, Homo sapien
gcctcccagatcatcgtcctctgcc

SEQ ID NO: 2667091 - DNA, 25 bp, Homo sapien
cacgtgaccaagtattcgtttctga

SEQ ID NO: 2667092 - DNA, 25 bp, Homo sapien
gcccacgtgaccaagtattcgtttc

SEQ ID NO: 2667093 - DNA, 25 bp, Homo sapien
gaccaagtattcgtttctgatgcac

SEQ ID NO: 2667094 - DNA, 25 bp, Homo sapien
agtattcgtttctgatgcacatgtg

SEQ ID NO: 2667095 - DNA, 25 bp, Homo sapien
caagctctgagtgaattgtggccca

SEQ ID NO: 2667096 - DNA, 25 bp, Homo sapien
cttacaagctctgagtgaattgtgg

SEQ ID NO: 2667097 - DNA, 25 bp, Homo sapien
tacaagctctgagtgaattgtggcc

SEQ ID NO: 2667098 - DNA, 25 bp, Homo sapien
agctctgagtgaattgtggcccagg

SEQ ID NO: 2667099 - DNA, 25 bp, Homo sapien
gcgtgtgtgaaggtaccctcaggga

SEQ ID NO: 2667100 - DNA, 25 bp, Homo sapien
tccagcgtgtgtgaaggtaccctca

SEQ ID NO: 2667101 - DNA, 25 bp, Homo sapien
cagcgtgtgtgaaggtaccctcagg

SEQ ID NO: 2667102 - DNA, 25 bp, Homo sapien
gtgtgtgaaggtaccctcagggacc

SEQ ID NO: 2667103 - DNA, 25 bp, Homo sapien
aaccagtgatccttcactgatgaca

SEQ ID NO: 2667104 - DNA, 25 bp, Homo sapien
tgacataatttgactggcagggaga

SEQ ID NO: 2667105 - DNA, 25 bp, Homo sapien
tactgagcagctgatagaagtctcc

SEQ ID NO: 2667106 - DNA, 25 bp, Homo sapien
gaatctgctgtatgtcagagatgaa

SEQ ID NO: 2667107 - DNA, 25 bp, Homo sapien
gaacatgttagtatctatgatctct

SEQ ID NO: 2667108 - DNA, 25 bp, Homo sapien
ggttgcctcgagactgcttgctttg

SEQ ID NO: 2667109 - DNA, 25 bp, Homo sapien
gaattacgctcaggaaaatgtgtct

SEQ ID NO: 2667110 - DNA, 25 bp, Homo sapien
ttctaatatacctacacaactgtca

SEQ ID NO: 2667111 - DNA, 25 bp, Homo sapien
ttttgcagtcccatttcgccagaca

SEQ ID NO: 2667112 - DNA, 25 bp, Homo sapien
atgaattttttgcagtcccatttcg

SEQ ID NO: 2667113 - DNA, 25 bp, Homo sapien
attttttgcagtcccatttcgccag

SEQ ID NO: 2667114 - DNA, 25 bp, Homo sapien
gtcccatttcgccagacattcaaac

SEQ ID NO: 2667115 - DNA, 25 bp, Homo sapien
taaagcattcagcagcccaggacat

SEQ ID NO: 2667116 - DNA, 25 bp, Homo sapien
ctaaagcattcagcagcccaggaca

SEQ ID NO: 2667117 - DNA, 25 bp, Homo sapien
gatgctgaagaattccacaggtcat

SEQ ID NO: 2667118 - DNA, 25 bp, Homo sapien
tagcttttgcccacggcttgcggca

SEQ ID NO: 2667119 - DNA, 25 bp, Homo sapien
tcatcctcactgacctagaaaactg

SEQ ID NO: 2667120 - DNA, 25 bp, Homo sapien
ttagccttatactgtcaggagtgtg

SEQ ID NO: 2667121 - DNA, 25 bp, Homo sapien
taaacccagaatctttataagtgac

SEQ ID NO: 2667122 - DNA, 25 bp, Homo sapien
gctcagtgagtcattaattaaaccc

SEQ ID NO: 2667123 - DNA, 25 bp, Homo sapien
tctgtgaacatggttagagaatacc

SEQ ID NO: 2667124 - DNA, 25 bp, Homo sapien
tgtctcccgttagtcctgtgctcag

SEQ ID NO: 2667125 - DNA, 25 bp, Homo sapien
tcttgtgccaaaaaataatcagtga

SEQ ID NO: 2667126 - DNA, 25 bp, Homo sapien
cagtgaaaatgattttgtgtgaaac

SEQ ID NO: 2667127 - DNA, 25 bp, Homo sapien
tgaaagccaagtttagctgattttg

SEQ ID NO: 2667128 - DNA, 25 bp, Homo sapien
tttttgaaagccaagtttagctgat

SEQ ID NO: 2667129 - DNA, 25 bp, Homo sapien
tgagcagtgaggaggatgtggagtc

SEQ ID NO: 2667130 - DNA, 25 bp, Homo sapien
agtgaggaggatgtggagtccagag

SEQ ID NO: 2667131 - DNA, 25 bp, Homo sapien
agcagtgaggaggatgtggagtcca

SEQ ID NO: 2667132 - DNA, 25 bp, Homo sapien
ctggtgagcagtgaggaggatgtgg

SEQ ID NO: 2667133 - DNA, 25 bp, Homo sapien
ctttgctgcagcaattgagtggtta

SEQ ID NO: 2667134 - DNA, 25 bp, Homo sapien
ctacccccacggcttctacttcctg

SEQ ID NO: 2667135 - DNA, 25 bp, Homo sapien
tcctttgctgcagcaattgagtggt

SEQ ID NO: 2667136 - DNA, 25 bp, Homo sapien
tgacatctgatttccggtttcttgt

SEQ ID NO: 2667137 - DNA, 25 bp, Homo sapien
tcatgggggaccaagtgacctcagt

SEQ ID NO: 2667138 - DNA, 25 bp, Homo sapien
ctgaatgaaaatccttgctcatggg

SEQ ID NO: 2667139 - DNA, 25 bp, Homo sapien
cagaaaggatcagtgtcaatgtccc

SEQ ID NO: 2667140 - DNA, 25 bp, Homo sapien
ttcttttatgaagcaacacaatggc

SEQ ID NO: 2667141 - DNA, 25 bp, Homo sapien
tatggtaaggacaaggcatcttggc

SEQ ID NO: 2667142 - DNA, 25 bp, Homo sapien
gaacactgataagcgtggaacaaac

SEQ ID NO: 2667143 - DNA, 25 bp, Homo sapien
ctatctaggatatggtaaggacaag

SEQ ID NO: 2667144 - DNA, 25 bp, Homo sapien
ggctgaacactgataagcgtggaac

SEQ ID NO: 2667145 - DNA, 25 bp, Homo sapien
gcaacccagtttgcagaatcatggg

SEQ ID NO: 2667146 - DNA, 25 bp, Homo sapien
tcttggtgtgctcatccgaatcaca

SEQ ID NO: 2667147 - DNA, 25 bp, Homo sapien
gagaaagtgccagcaatcttgtgag

SEQ ID NO: 2667148 - DNA, 25 bp, Homo sapien
gttctctaaagatctgcaacccagt

SEQ ID NO: 2667149 - DNA, 25 bp, Homo sapien
ttcaggtgtccaccaaggatgctgg

SEQ ID NO: 2667150 - DNA, 25 bp, Homo sapien
catttcctcctagtcccttcaggtg

SEQ ID NO: 2667151 - DNA, 25 bp, Homo sapien
gcatgagttctgactgggaagttct

SEQ ID NO: 2667152 - DNA, 25 bp, Homo sapien
ggaggccattgttcgcttctgctag

SEQ ID NO: 2667153 - DNA, 25 bp, Homo sapien
tctggagtgcctcctacgcagtggg

SEQ ID NO: 2667154 - DNA, 25 bp, Homo sapien
tgcactgttgttggcctctttgtag

SEQ ID NO: 2667155 - DNA, 25 bp, Homo sapien
taaaaggacatgcactgttgttggc

SEQ ID NO: 2667156 - DNA, 25 bp, Homo sapien
gggagctaggtcttaagcacctgag

SEQ ID NO: 2667157 - DNA, 25 bp, Homo sapien
cacacagattgcagtgatgtgggca

SEQ ID NO: 2667158 - DNA, 25 bp, Homo sapien
ctgcacacagattgcagtgatgtgg

SEQ ID NO: 2667159 - DNA, 25 bp, Homo sapien
acacagattgcagtgatgtgggcaa

SEQ ID NO: 2667160 - DNA, 25 bp, Homo sapien
ttgcagtgatgtgggcaaacaattt

SEQ ID NO: 2667161 - DNA, 25 bp, Homo sapien
tgcctcgagtgcttttcaatttgga

SEQ ID NO: 2667162 - DNA, 25 bp, Homo sapien
ccaacacggacttgtttcaggcttc

SEQ ID NO: 2667163 - DNA, 25 bp, Homo sapien
agcagctgctcttttgcctcgagtg

SEQ ID NO: 2667164 - DNA, 25 bp, Homo sapien
caacacggacttgtttcaggcttcc

SEQ ID NO: 2667165 - DNA, 25 bp, Homo sapien
gcaggtaaaaggtcaagtaaggtca

SEQ ID NO: 2667166 - DNA, 25 bp, Homo sapien
tggtgactgctggtaatggattttc

SEQ ID NO: 2667167 - DNA, 25 bp, Homo sapien
ggcagtttggccattcgtcaaggcg

SEQ ID NO: 2667168 - DNA, 25 bp, Homo sapien
cacagggcatttcccggatgctggc

SEQ ID NO: 2667169 - DNA, 25 bp, Homo sapien
agtgaacacaactcagcgtgggaca

SEQ ID NO: 2667170 - DNA, 25 bp, Homo sapien
ctggaatgctggtcgggtggtgaca

SEQ ID NO: 2667171 - DNA, 25 bp, Homo sapien
gccaaagatattcgggaatgggtcc

SEQ ID NO: 2667172 - DNA, 25 bp, Homo sapien
caggctgatgaaacatatctggaaa

SEQ ID NO: 2667173 - DNA, 25 bp, Homo sapien
cacagagcggcgtgggtacactttc

SEQ ID NO: 2667174 - DNA, 25 bp, Homo sapien
gcttctctcaaggtcaaaagttgcc

SEQ ID NO: 2667175 - DNA, 25 bp, Homo sapien
ttgccctgaaactggttttctcacc

SEQ ID NO: 2667176 - DNA, 25 bp, Homo sapien
aggtcaaaagttgccctgaaactgg

SEQ ID NO: 2667177 - DNA, 25 bp, Homo sapien
tcaaggtcaaaagttgccctgaaac

SEQ ID NO: 2667178 - DNA, 25 bp, Homo sapien
agtgaagacgctttataaatatctc

SEQ ID NO: 2667179 - DNA, 25 bp, Homo sapien
gtttctcttgtggaattgagctgcc

SEQ ID NO: 2667180 - DNA, 25 bp, Homo sapien
gtgaagacgctttataaatatctcc

SEQ ID NO: 2667181 - DNA, 25 bp, Homo sapien
ttgagctgccttttataaagtgaag

SEQ ID NO: 2667182 - DNA, 25 bp, Homo sapien
ttgctctagagcaggatgtgactgc

SEQ ID NO: 2667183 - DNA, 25 bp, Homo sapien
ggtgtttctcgccttgctctagagc

SEQ ID NO: 2667184 - DNA, 25 bp, Homo sapien
tatagagtggcgagagaattccaga

SEQ ID NO: 2667185 - DNA, 25 bp, Homo sapien
cctcagggggtgtttctcgccttgc

SEQ ID NO: 2667186 - DNA, 25 bp, Homo sapien
tctctgggctggcaagccttttcct

SEQ ID NO: 2667187 - DNA, 25 bp, Homo sapien
tgatcctgggggcatcactatttct

SEQ ID NO: 2667188 - DNA, 25 bp, Homo sapien
tctgtcctgctatattcactactgc

SEQ ID NO: 2667189 - DNA, 25 bp, Homo sapien
gctctttttaaggatccatctgtcc

SEQ ID NO: 2667190 - DNA, 25 bp, Homo sapien
aatgaggaagtcattcaaaaccagg

SEQ ID NO: 2667191 - DNA, 25 bp, Homo sapien
ccagatgtataaatgaggaagtcat

SEQ ID NO: 2667192 - DNA, 25 bp, Homo sapien
tgaggaagtcattcaaaaccaggaa

SEQ ID NO: 2667193 - DNA, 25 bp, Homo sapien
ttccagatgtataaatgaggaagtc

SEQ ID NO: 2667194 - DNA, 25 bp, Homo sapien
tgtttcaattgaaagaaccctattc

SEQ ID NO: 2667195 - DNA, 25 bp, Homo sapien
ctcagataaaaccaagtggacacca

SEQ ID NO: 2667196 - DNA, 25 bp, Homo sapien
gaacttgttccccagttatgcaaaa

SEQ ID NO: 2667197 - DNA, 25 bp, Homo sapien
tcttacaccatcataatgggaacaa

SEQ ID NO: 2667198 - DNA, 25 bp, Homo sapien
ggaatgtcagaatgagcacatttca

SEQ ID NO: 2667199 - DNA, 25 bp, Homo sapien
cagtggaatgtcagaatgagcacat

SEQ ID NO: 2667200 - DNA, 25 bp, Homo sapien
ctctgcagcgccgagcagcagtgga

SEQ ID NO: 2667201 - DNA, 25 bp, Homo sapien
tctgcagcgccgagcagcagtggaa

SEQ ID NO: 2667202 - DNA, 25 bp, Homo sapien
taacatggcctgacaccatgtgata

SEQ ID NO: 2667203 - DNA, 25 bp, Homo sapien
caaagcctgacgcaattgacccaga

SEQ ID NO: 2667204 - DNA, 25 bp, Homo sapien
tgacccagaattgatccccaaatgt

SEQ ID NO: 2667205 - DNA, 25 bp, Homo sapien
caccatgtgataaatcaaagcctga

SEQ ID NO: 2667206 - DNA, 25 bp, Homo sapien
ttggaaagataagcactggagaacc

SEQ ID NO: 2667207 - DNA, 25 bp, Homo sapien
taggactgggacagatagccactga

SEQ ID NO: 2667208 - DNA, 25 bp, Homo sapien
gacattaagaatgccgcagtggaca

SEQ ID NO: 2667209 - DNA, 25 bp, Homo sapien
gatggtgtgcctcactagccagaaa

SEQ ID NO: 2667210 - DNA, 25 bp, Homo sapien
ctgatttccttaggcttggatctgt

SEQ ID NO: 2667211 - DNA, 25 bp, Homo sapien
tttctgatttccttaggcttggatc

SEQ ID NO: 2667212 - DNA, 25 bp, Homo sapien
cttttccaaatatgcaggtatgtga

SEQ ID NO: 2667213 - DNA, 25 bp, Homo sapien
caggtatgtgatatttctgatttcc

SEQ ID NO: 2667214 - DNA, 25 bp, Homo sapien
gattgcttcacagcacgcttctcta

SEQ ID NO: 2667215 - DNA, 25 bp, Homo sapien
acagcacgcttctctatctgcaact

SEQ ID NO: 2667216 - DNA, 25 bp, Homo sapien
gttctttgcttgtccgattgcttca

SEQ ID NO: 2667217 - DNA, 25 bp, Homo sapien
tgtccgattgcttcacagcacgctt

SEQ ID NO: 2667218 - DNA, 25 bp, Homo sapien
taagtggagacatcaggggcccaag

SEQ ID NO: 2667219 - DNA, 25 bp, Homo sapien
gtgctgagccttttaagtggagaca

SEQ ID NO: 2667220 - DNA, 25 bp, Homo sapien
ttgaaggttacagtagtgctgagcc

SEQ ID NO: 2667221 - DNA, 25 bp, Homo sapien
tgatgaggatgggttgaaggttaca

SEQ ID NO: 2667222 - DNA, 25 bp, Homo sapien
agatgccagctctgaggattgagcc

SEQ ID NO: 2667223 - DNA, 25 bp, Homo sapien
aggcataaggcaaccgaaatccagt

SEQ ID NO: 2667224 - DNA, 25 bp, Homo sapien
tctgaggattgagccaacatgtttg

SEQ ID NO: 2667225 - DNA, 25 bp, Homo sapien
tgtaggaaaccgaaaatccagtcag

SEQ ID NO: 2667226 - DNA, 25 bp, Homo sapien
cagcatgagtagcgaagatgaacat

SEQ ID NO: 2667227 - DNA, 25 bp, Homo sapien
catcagaaacaagtgcagcatgagt

SEQ ID NO: 2667228 - DNA, 25 bp, Homo sapien
tctgcatcagaaacaagtgcagcat

SEQ ID NO: 2667229 - DNA, 25 bp, Homo sapien
tgcatcagaaacaagtgcagcatga

SEQ ID NO: 2667230 - DNA, 25 bp, Homo sapien
ggcatgtggcagctctttcacaagt

SEQ ID NO: 2667231 - DNA, 25 bp, Homo sapien
cagagaggcatgtggcagctctttc

SEQ ID NO: 2667232 - DNA, 25 bp, Homo sapien
agaggcatgtggcagctctttcaca

SEQ ID NO: 2667233 - DNA, 25 bp, Homo sapien
tgtggcagctctttcacaagttggc

SEQ ID NO: 2667234 - DNA, 25 bp, Homo sapien
accacaccgaggaatggagacttgg

SEQ ID NO: 2667235 - DNA, 25 bp, Homo sapien
ctaaaccacaccgaggaatggagac

SEQ ID NO: 2667236 - DNA, 25 bp, Homo sapien
caccgaggaatggagacttggaaca

SEQ ID NO: 2667237 - DNA, 25 bp, Homo sapien
gaatggagacttggaacataacctt

SEQ ID NO: 2667238 - DNA, 25 bp, Homo sapien
ggtgccagcctccacacttaaccaa

SEQ ID NO: 2667239 - DNA, 25 bp, Homo sapien
ctggatgacgtcaaaaactgctagt

SEQ ID NO: 2667240 - DNA, 25 bp, Homo sapien
acacttaaccaaatgcagtataact

SEQ ID NO: 2667241 - DNA, 25 bp, Homo sapien
aagcctggatgacgtcaaaaactgc

SEQ ID NO: 2667242 - DNA, 25 bp, Homo sapien
ctcctcggaggagcttgacttgcag

SEQ ID NO: 2667243 - DNA, 25 bp, Homo sapien
tcggaggagcttgacttgcaggagg

SEQ ID NO: 2667244 - DNA, 25 bp, Homo sapien
gagcttgacttgcaggaggctgatt

SEQ ID NO: 2667245 - DNA, 25 bp, Homo sapien
cctcggaggagcttgacttgcagga

SEQ ID NO: 2667246 - DNA, 25 bp, Homo sapien
ggcatccagtgtcggcagccaagat

SEQ ID NO: 2667247 - DNA, 25 bp, Homo sapien
tcggcagccaagatggttagctttg

SEQ ID NO: 2667248 - DNA, 25 bp, Homo sapien
ccaagatggttagctttgtgctggg

SEQ ID NO: 2667249 - DNA, 25 bp, Homo sapien
tcagcggcatccagtgtcggcagcc

SEQ ID NO: 2667250 - DNA, 25 bp, Homo sapien
tcattgctgcccactaatctctgtc

SEQ ID NO: 2667251 - DNA, 25 bp, Homo sapien
gctgcccactaatctctgtcaggag

SEQ ID NO: 2667252 - DNA, 25 bp, Homo sapien
ttgctgcccactaatctctgtcagg

SEQ ID NO: 2667253 - DNA, 25 bp, Homo sapien
gcccactaatctctgtcaggagaac

SEQ ID NO: 2667254 - DNA, 25 bp, Homo sapien
cgcctcgtcagatgttcaaagataa

SEQ ID NO: 2667255 - DNA, 25 bp, Homo sapien
gctcatagccttgcagtcagttttg

SEQ ID NO: 2667256 - DNA, 25 bp, Homo sapien
aaatgaggcagcatgcacgccagca

SEQ ID NO: 2667257 - DNA, 25 bp, Homo sapien
ggagagtgcctcttgattcgcctcg

SEQ ID NO: 2667258 - DNA, 25 bp, Homo sapien
ctgtacaatcacaagcatttcctga

SEQ ID NO: 2667259 - DNA, 25 bp, Homo sapien
gtacaatcacaagcatttcctgatt

SEQ ID NO: 2667260 - DNA, 25 bp, Homo sapien
agcatttcctgatttttctgatgcc

SEQ ID NO: 2667261 - DNA, 25 bp, Homo sapien
catttcctgatttttctgatgccat

SEQ ID NO: 2667262 - DNA, 25 bp, Homo sapien
ttccaaatggaacagagatgataga

SEQ ID NO: 2667263 - DNA, 25 bp, Homo sapien
tgtgtaactgtatatagatgaaacc

SEQ ID NO: 2667264 - DNA, 25 bp, Homo sapien
tgatagaaaattcccagaatgaata

SEQ ID NO: 2667265 - DNA, 25 bp, Homo sapien
gaatagggttgaaacacaaagatat

SEQ ID NO: 2667266 - DNA, 25 bp, Homo sapien
tgctctcactctcacttggcggaag

SEQ ID NO: 2667267 - DNA, 25 bp, Homo sapien
cgtcaggcagcgttgcaaagcaatc

SEQ ID NO: 2667268 - DNA, 25 bp, Homo sapien
ggagctttgcaatcaaactaagcag

SEQ ID NO: 2667269 - DNA, 25 bp, Homo sapien
gaagtgccacgacacgaagagtgca

SEQ ID NO: 2667270 - DNA, 25 bp, Homo sapien
tctacttaaaggattgtcattctgg

SEQ ID NO: 2667271 - DNA, 25 bp, Homo sapien
gctgcctggtgtctacttaaaggat

SEQ ID NO: 2667272 - DNA, 25 bp, Homo sapien
cttaaaggattgtcattctgggaaa

SEQ ID NO: 2667273 - DNA, 25 bp, Homo sapien
cctggtgtctacttaaaggattgtc

SEQ ID NO: 2667274 - DNA, 25 bp, Homo sapien
tggcttgtatgtgataaatcccttc

SEQ ID NO: 2667275 - DNA, 25 bp, Homo sapien
ttgtagagcaagtctgtcagtgaac

SEQ ID NO: 2667276 - DNA, 25 bp, Homo sapien
cagtgaacttttatctggcagtgtc

SEQ ID NO: 2667277 - DNA, 25 bp, Homo sapien
gctgtatataaattccttgttggca

SEQ ID NO: 2667278 - DNA, 25 bp, Homo sapien
cttctgcttaatcaacttggctatt

SEQ ID NO: 2667279 - DNA, 25 bp, Homo sapien
gcttaatcaacttggctattgataa

SEQ ID NO: 2667280 - DNA, 25 bp, Homo sapien
tctgcttaatcaacttggctattga

SEQ ID NO: 2667281 - DNA, 25 bp, Homo sapien
taatcaacttggctattgataattg

SEQ ID NO: 2667282 - DNA, 25 bp, Homo sapien
ctttatcactcatagagctccctga

SEQ ID NO: 2667283 - DNA, 25 bp, Homo sapien
tgtttaatgggtgctggaggtaaaa

SEQ ID NO: 2667284 - DNA, 25 bp, Homo sapien
tttactttatcactcatagagctcc

SEQ ID NO: 2667285 - DNA, 25 bp, Homo sapien
gtgctggaggtaaaaatcctttggc

SEQ ID NO: 2667286 - DNA, 25 bp, Homo sapien
ttaagaaatccagcttttggattca

SEQ ID NO: 2667287 - DNA, 25 bp, Homo sapien
taatcatttaagaaatccagctttt

SEQ ID NO: 2667288 - DNA, 25 bp, Homo sapien
aatcatttaagaaatccagcttttg

SEQ ID NO: 2667289 - DNA, 25 bp, Homo sapien
agaaatccagcttttggattcattg

SEQ ID NO: 2667290 - DNA, 25 bp, Homo sapien
gtcagggaaacgctgaagcacagca

SEQ ID NO: 2667291 - DNA, 25 bp, Homo sapien
gcagcaccaccagcgctccatttct

SEQ ID NO: 2667292 - DNA, 25 bp, Homo sapien
caaagtcagggaaacgctgaagcac

SEQ ID NO: 2667293 - DNA, 25 bp, Homo sapien
ttcaaagtcagggaaacgctgaagc

SEQ ID NO: 2667294 - DNA, 25 bp, Homo sapien
gaactgggtttcaaaaagctgtaga

SEQ ID NO: 2667295 - DNA, 25 bp, Homo sapien
ctgggtttcaaaaagctgtagagtc

SEQ ID NO: 2667296 - DNA, 25 bp, Homo sapien
gggtttcaaaaagctgtagagtcag

SEQ ID NO: 2667297 - DNA, 25 bp, Homo sapien
aactgggtttcaaaaagctgtagag

SEQ ID NO: 2667298 - DNA, 25 bp, Homo sapien
ggctaaagcgctgaaccttgccatc

SEQ ID NO: 2667299 - DNA, 25 bp, Homo sapien
cactccttgagaaggccggagggac

SEQ ID NO: 2667300 - DNA, 25 bp, Homo sapien
ggtgcctaacgatttgccctgcctt

SEQ ID NO: 2667301 - DNA, 25 bp, Homo sapien
tttaaggttcagagatccaccgtcg

SEQ ID NO: 2667302 - DNA, 25 bp, Homo sapien
taattctgcggactgggatcccttg

SEQ ID NO: 2667303 - DNA, 25 bp, Homo sapien
caaacgctcttgcataggagggcgg

SEQ ID NO: 2667304 - DNA, 25 bp, Homo sapien
tcgcaaagtgtgtcagtctccatgt

SEQ ID NO: 2667305 - DNA, 25 bp, Homo sapien
gaatggaatcgtgacctggcgctag

SEQ ID NO: 2667306 - DNA, 25 bp, Homo sapien
ttttgcccgatttccctttgctcag

SEQ ID NO: 2667307 - DNA, 25 bp, Homo sapien
taagtgtttttactcgtcgcaggta

SEQ ID NO: 2667308 - DNA, 25 bp, Homo sapien
cagtcagttctagctgagtctctag

SEQ ID NO: 2667309 - DNA, 25 bp, Homo sapien
gtctctagagggtcaaataagtgtt

SEQ ID NO: 2667310 - DNA, 25 bp, Homo sapien
acccggccgataggcgaagaggagc

SEQ ID NO: 2667311 - DNA, 25 bp, Homo sapien
cggctgacaggtgacccggccgata

SEQ ID NO: 2667312 - DNA, 25 bp, Homo sapien
agccagccgagagagcaccggctga

SEQ ID NO: 2667313 - DNA, 25 bp, Homo sapien
agagagcaccggctgacaggtgacc

SEQ ID NO: 2667314 - DNA, 25 bp, Homo sapien
gcccagctcgggctgacagcgcgtt

SEQ ID NO: 2667315 - DNA, 25 bp, Homo sapien
ccagctcgggctgacagcgcgttgt

SEQ ID NO: 2667316 - DNA, 25 bp, Homo sapien
cagctcgggctgacagcgcgttgtt

SEQ ID NO: 2667317 - DNA, 25 bp, Homo sapien
ctcgggctgacagcgcgttgttgcg

SEQ ID NO: 2667318 - DNA, 25 bp, Homo sapien
gcagtcgcgggaagcggaggatccg

SEQ ID NO: 2667319 - DNA, 25 bp, Homo sapien
tagtccagcgcgactccggcagtcg

SEQ ID NO: 2667320 - DNA, 25 bp, Homo sapien
cattgtcgggcggagacctcccttc

SEQ ID NO: 2667321 - DNA, 25 bp, Homo sapien
gcctctcagcgggagataacaacat

SEQ ID NO: 2667322 - DNA, 25 bp, Homo sapien
gtgtgatagtcgtgccccaagtcct

SEQ ID NO: 2667323 - DNA, 25 bp, Homo sapien
caggatctcccagttgcgtgtgata

SEQ ID NO: 2667324 - DNA, 25 bp, Homo sapien
cagtgagggccatgtccccttgttc

SEQ ID NO: 2667325 - DNA, 25 bp, Homo sapien
tttttcctccgtcttccaggatctc

SEQ ID NO: 2667326 - DNA, 25 bp, Homo sapien
cactaattctatgggctttttttga

SEQ ID NO: 2667327 - DNA, 25 bp, Homo sapien
taagtcacactgaacaaaagtggcc

SEQ ID NO: 2667328 - DNA, 25 bp, Homo sapien
ttttctaaatctagttcaagagcca

SEQ ID NO: 2667329 - DNA, 25 bp, Homo sapien
gatattgatatcttggtctcccgaa

SEQ ID NO: 2667330 - DNA, 25 bp, Homo sapien
agtgtagttccccaaaaaggcgatg

SEQ ID NO: 2667331 - DNA, 25 bp, Homo sapien
tctgggaactgtaagggccttgccg

SEQ ID NO: 2667332 - DNA, 25 bp, Homo sapien
aaaggcgatgagaaggtaccgctcc

SEQ ID NO: 2667333 - DNA, 25 bp, Homo sapien
ttcttggactcggaccgctgtggct

SEQ ID NO: 2667334 - DNA, 25 bp, Homo sapien
tttctcttcggaagcctgtgctccc

SEQ ID NO: 2667335 - DNA, 25 bp, Homo sapien
tctggaactcgtccggcctgagtgg

SEQ ID NO: 2667336 - DNA, 25 bp, Homo sapien
gcctgagtggcacttagagctcagt

SEQ ID NO: 2667337 - DNA, 25 bp, Homo sapien
accaaggcttttcgaggagggcgct

SEQ ID NO: 2667338 - DNA, 25 bp, Homo sapien
ctgcggacgccgtttgtaacgccat

SEQ ID NO: 2667339 - DNA, 25 bp, Homo sapien
gccatcccctaatgtaacgcgatcg

SEQ ID NO: 2667340 - DNA, 25 bp, Homo sapien
cccctaatgtaacgcgatcgatggc

SEQ ID NO: 2667341 - DNA, 25 bp, Homo sapien
gtttgtaacgccatcccctaatgta

SEQ ID NO: 2667342 - DNA, 25 bp, Homo sapien
gagaactttcttcggggcctgctcg

SEQ ID NO: 2667343 - DNA, 25 bp, Homo sapien
tcgccgtagcgctaaggcgaggatc

SEQ ID NO: 2667344 - DNA, 25 bp, Homo sapien
tcggcctctgtctcgccgtagcgct

SEQ ID NO: 2667345 - DNA, 25 bp, Homo sapien
ggcctgctcgggagttgccctcgct

SEQ ID NO: 2667346 - DNA, 25 bp, Homo sapien
caaattcgatcggaatcaagggttc

SEQ ID NO: 2667347 - DNA, 25 bp, Homo sapien
gaacgcctagcgatgggcaaaagga

SEQ ID NO: 2667348 - DNA, 25 bp, Homo sapien
tgatgacaaagcacactcctggaat

SEQ ID NO: 2667349 - DNA, 25 bp, Homo sapien
caagtagaaacagggtaggatctcc

SEQ ID NO: 2667350 - DNA, 25 bp, Homo sapien
gaggactcgcagagcaatgtttccg

SEQ ID NO: 2667351 - DNA, 25 bp, Homo sapien
aactgacacgtttctatggagatcg

SEQ ID NO: 2667352 - DNA, 25 bp, Homo sapien
gatctgcgcgaatgtctgtatatag

SEQ ID NO: 2667353 - DNA, 25 bp, Homo sapien
tgacactactattgaaactgacacg

SEQ ID NO: 2667354 - DNA, 25 bp, Homo sapien
gccggcgaggaagatcacacacttt

SEQ ID NO: 2667355 - DNA, 25 bp, Homo sapien
aataagtgctcttcagccggcaacc

SEQ ID NO: 2667356 - DNA, 25 bp, Homo sapien
tacgggataattcacgccggcgacg

SEQ ID NO: 2667357 - DNA, 25 bp, Homo sapien
gccggcgacgaaatcacagcgaaat

SEQ ID NO: 2667358 - DNA, 25 bp, Homo sapien
gggggcggcgggcatgggccacggc

SEQ ID NO: 2667359 - DNA, 25 bp, Homo sapien
gctcccttctctcgcttttttcttc

SEQ ID NO: 2667360 - DNA, 25 bp, Homo sapien
ccccggcgagcaagctcccttctct

SEQ ID NO: 2667361 - DNA, 25 bp, Homo sapien
aatcagaaatggcacaggcggcagc

SEQ ID NO: 2667362 - DNA, 25 bp, Homo sapien
ccggggtcgcaggagccgagcccga

SEQ ID NO: 2667363 - DNA, 25 bp, Homo sapien
ctgccgccgctactgcctcggccgc

SEQ ID NO: 2667364 - DNA, 25 bp, Homo sapien
ttctctctttttgcagcccccccag

SEQ ID NO: 2667365 - DNA, 25 bp, Homo sapien
tctctttttgcagcccccccaggct

SEQ ID NO: 2667366 - DNA, 25 bp, Homo sapien
gcggatctcgccagctgctaactac

SEQ ID NO: 2667367 - DNA, 25 bp, Homo sapien
cgtcgtcctgcggatctcgccagct

SEQ ID NO: 2667368 - DNA, 25 bp, Homo sapien
ctgcggatctcgccagctgctaact

SEQ ID NO: 2667369 - DNA, 25 bp, Homo sapien
cccggccacgtcgtcctgcggatct

SEQ ID NO: 2667370 - DNA, 25 bp, Homo sapien
tggcacggcatgtgtaagttaagtt

SEQ ID NO: 2667371 - DNA, 25 bp, Homo sapien
ctgttggcacggcatgtgtaagtta

SEQ ID NO: 2667372 - DNA, 25 bp, Homo sapien
taagttaagttcctgcggacgctcc

SEQ ID NO: 2667373 - DNA, 25 bp, Homo sapien
agttcctgcggacgctcctcttgaa

SEQ ID NO: 2667374 - DNA, 25 bp, Homo sapien
tgaatctatggttcagggtactcca

SEQ ID NO: 2667375 - DNA, 25 bp, Homo sapien
cttccaaaaggatgatggcagcaat

SEQ ID NO: 2667376 - DNA, 25 bp, Homo sapien
aaatctcactcctctttttccgagc

SEQ ID NO: 2667377 - DNA, 25 bp, Homo sapien
gcctcacgcacacgcgggaaagaga

SEQ ID NO: 2667378 - DNA, 25 bp, Homo sapien
gaaccagtgaacgggccagaagccc

SEQ ID NO: 2667379 - DNA, 25 bp, Homo sapien
agggaaccagtgaacgggccagaag

SEQ ID NO: 2667380 - DNA, 25 bp, Homo sapien
ggaaccagtgaacgggccagaagcc

SEQ ID NO: 2667381 - DNA, 25 bp, Homo sapien
cagtgaacgggccagaagcccccct

SEQ ID NO: 2667382 - DNA, 25 bp, Homo sapien
tatgaaagcacggttcagtcacaaa

SEQ ID NO: 2667383 - DNA, 25 bp, Homo sapien
gctgcagtctatgcattacggccaa

SEQ ID NO: 2667384 - DNA, 25 bp, Homo sapien
tggaagctcatgctagctgcagtct

SEQ ID NO: 2667385 - DNA, 25 bp, Homo sapien
caaatcagaaggatcggtaaatgcc

SEQ ID NO: 2667386 - DNA, 25 bp, Homo sapien
tctgcaaaattgactggttcgctaa

SEQ ID NO: 2667387 - DNA, 25 bp, Homo sapien
caagttccagtgcaattgaagctct

SEQ ID NO: 2667388 - DNA, 25 bp, Homo sapien
aatctccctggagctagaaatgaag

SEQ ID NO: 2667389 - DNA, 25 bp, Homo sapien
tgttttacttcaacagtgccagcgt

SEQ ID NO: 2667390 - DNA, 25 bp, Homo sapien
gtctgtcctgcgcggtgccactgca

SEQ ID NO: 2667391 - DNA, 25 bp, Homo sapien
gcagccagcttttgcccagtgaatg

SEQ ID NO: 2667392 - DNA, 25 bp, Homo sapien
gaatgcacgagctttcaactgcaaa

SEQ ID NO: 2667393 - DNA, 25 bp, Homo sapien
gcccagtgaatgcacgagctttcaa

SEQ ID NO: 2667394 - DNA, 25 bp, Homo sapien
tagcggcctcctcatttgcaagcaa

SEQ ID NO: 2667395 - DNA, 25 bp, Homo sapien
caaggtcaagaaagtgtcatccaac

SEQ ID NO: 2667396 - DNA, 25 bp, Homo sapien
agtccacaccgctaggagatctggg

SEQ ID NO: 2667397 - DNA, 25 bp, Homo sapien
tccagggagcttgcgaacattgccg

SEQ ID NO: 2667398 - DNA, 25 bp, Homo sapien
agcagcagcgagatgtagccggaca

SEQ ID NO: 2667399 - DNA, 25 bp, Homo sapien
ctcctggaagatgcggatgtggtcc

SEQ ID NO: 2667400 - DNA, 25 bp, Homo sapien
cacgtgcagcggcatagagcactgg

SEQ ID NO: 2667401 - DNA, 25 bp, Homo sapien
tcgcagatgttctcgatgcccataa

SEQ ID NO: 2667402 - DNA, 25 bp, Homo sapien
ttcaaggagagtgccacacagggta

SEQ ID NO: 2667403 - DNA, 25 bp, Homo sapien
gaaaatcaggcagcgataaagcggg

SEQ ID NO: 2667404 - DNA, 25 bp, Homo sapien
tgagctctggctcacacataacacg

SEQ ID NO: 2667405 - DNA, 25 bp, Homo sapien
ggtaagaagccacattcccacgttc

SEQ ID NO: 2667406 - DNA, 25 bp, Homo sapien
atacagtatatatttatgctccatg

SEQ ID NO: 2667407 - DNA, 25 bp, Homo sapien
ccctcagctcagtaaaatatctatc

SEQ ID NO: 2667408 - DNA, 25 bp, Homo sapien
cctccggcaggagccctggttctgg

SEQ ID NO: 2667409 - DNA, 25 bp, Homo sapien
ggaaattcattcacccctttgcaac

SEQ ID NO: 2667410 - DNA, 25 bp, Homo sapien
aaagggagcacacggttaggctgac

SEQ ID NO: 2667411 - DNA, 25 bp, Homo sapien
ggagcacacggttaggctgacaaat

SEQ ID NO: 2667412 - DNA, 25 bp, Homo sapien
agcacacggttaggctgacaaatag

SEQ ID NO: 2667413 - DNA, 25 bp, Homo sapien
cagggaaagggagcacacggttagg

SEQ ID NO: 2667414 - DNA, 25 bp, Homo sapien
tgcgcactgcgacttctcctgcagg

SEQ ID NO: 2667415 - DNA, 25 bp, Homo sapien
gggtactggctcctcacgtactcct

SEQ ID NO: 2667416 - DNA, 25 bp, Homo sapien
cagtcgcagcagcagtttgccaaaa

SEQ ID NO: 2667417 - DNA, 25 bp, Homo sapien
gcaggctctcgatgtgggccgcatc

SEQ ID NO: 2667418 - DNA, 25 bp, Homo sapien
ggatggacatgtaaggccagttgaa

SEQ ID NO: 2667419 - DNA, 25 bp, Homo sapien
gtaaggccagttgaagctgctccca

SEQ ID NO: 2667420 - DNA, 25 bp, Homo sapien
catgtaaggccagttgaagctgctc

SEQ ID NO: 2667421 - DNA, 25 bp, Homo sapien
gacatgtaaggccagttgaagctgc

SEQ ID NO: 2667422 - DNA, 25 bp, Homo sapien
acggggcaggtgggaagcgcccaag

SEQ ID NO: 2667423 - DNA, 25 bp, Homo sapien
ggacggggcaggtgggaagcgccca

SEQ ID NO: 2667424 - DNA, 25 bp, Homo sapien
cggggcaggtgggaagcgcccaagg

SEQ ID NO: 2667425 - DNA, 25 bp, Homo sapien
gacggggcaggtgggaagcgcccaa

SEQ ID NO: 2667426 - DNA, 25 bp, Homo sapien
tagtatagaatcacaggaaatctgg

SEQ ID NO: 2667427 - DNA, 25 bp, Homo sapien
tttttcctcgccaacgtgctcacag

SEQ ID NO: 2667428 - DNA, 25 bp, Homo sapien
gaagaacagcctcgacaacatatat

SEQ ID NO: 2667429 - DNA, 25 bp, Homo sapien
cccatgctttgtagctcggattgta

SEQ ID NO: 2667430 - DNA, 25 bp, Homo sapien
gagctggagagaggcgggttctacc

SEQ ID NO: 2667431 - DNA, 25 bp, Homo sapien
gtcccgctctccatgtccctctgta

SEQ ID NO: 2667432 - DNA, 25 bp, Homo sapien
agcgctgaggctccaactgtctccc

SEQ ID NO: 2667433 - DNA, 25 bp, Homo sapien
accagcgccgggctcagtggcgtct

SEQ ID NO: 2667434 - DNA, 25 bp, Homo sapien
tgctcagatagacgcgtcgcagctc

SEQ ID NO: 2667435 - DNA, 25 bp, Homo sapien
tgccctctctgtgaaggaaagccaa

SEQ ID NO: 2667436 - DNA, 25 bp, Homo sapien
caaacttcccttagcgcgtgcagat

SEQ ID NO: 2667437 - DNA, 25 bp, Homo sapien
ccacatgacctctgattcaaggcag

SEQ ID NO: 2667438 - DNA, 25 bp, Homo sapien
ggtgatttgttctgaggaattgcag

SEQ ID NO: 2667439 - DNA, 25 bp, Homo sapien
tgcagagacattcaggtgatttgtt

SEQ ID NO: 2667440 - DNA, 25 bp, Homo sapien
ctgctatttgcagagacattcaggt

SEQ ID NO: 2667441 - DNA, 25 bp, Homo sapien
tgaggaattgcagagctcacaggag

SEQ ID NO: 2667442 - DNA, 25 bp, Homo sapien
gcagattgagacatatcgagttccc

SEQ ID NO: 2667443 - DNA, 25 bp, Homo sapien
tacccagaggctttgagtgaagtgc

SEQ ID NO: 2667444 - DNA, 25 bp, Homo sapien
tcaaggaacaggatctgggagagca

SEQ ID NO: 2667445 - DNA, 25 bp, Homo sapien
caaagtttgcactcgtgactggcat

SEQ ID NO: 2667446 - DNA, 25 bp, Homo sapien
gaaaggtgtcttatcaatcacaggc

SEQ ID NO: 2667447 - DNA, 25 bp, Homo sapien
taaacctgctggtcatgacaaccca

SEQ ID NO: 2667448 - DNA, 25 bp, Homo sapien
ggcaggcattgctgacgtcacttca

SEQ ID NO: 2667449 - DNA, 25 bp, Homo sapien
agtttatttacgttgtcccacagag

SEQ ID NO: 2667450 - DNA, 25 bp, Homo sapien
tgaaagccttttccggcgtgccaaa

SEQ ID NO: 2667451 - DNA, 25 bp, Homo sapien
taattgcaacaaagtgccgccgagt

SEQ ID NO: 2667452 - DNA, 25 bp, Homo sapien
taactggtaccgagtgctcctggcg

SEQ ID NO: 2667453 - DNA, 25 bp, Homo sapien
tgtattgactctgaggcaagcgcgc

SEQ ID NO: 2667454 - DNA, 25 bp, Homo sapien
ctccgtgcagaactcccaattatca

SEQ ID NO: 2667455 - DNA, 25 bp, Homo sapien
acggtacacttcatctacatttggg

SEQ ID NO: 2667456 - DNA, 25 bp, Homo sapien
acgcgttcgtgatgactgagcccaa

SEQ ID NO: 2667457 - DNA, 25 bp, Homo sapien
gaattaagatggactttgaagcagc

SEQ ID NO: 2667458 - DNA, 25 bp, Homo sapien
cccagggcttcagcgcagaggaaag

SEQ ID NO: 2667459 - DNA, 25 bp, Homo sapien
aagtttctgctcttcgcctcaccga

SEQ ID NO: 2667460 - DNA, 25 bp, Homo sapien
tgaggtgagacagaccgtttctgcc

SEQ ID NO: 2667461 - DNA, 25 bp, Homo sapien
taaaggacagctcctcgcaggattg

SEQ ID NO: 2667462 - DNA, 25 bp, Homo sapien
tctttaattagaacaggccgcttct

SEQ ID NO: 2667463 - DNA, 25 bp, Homo sapien
caaatgcccacaaatagttcagaac

SEQ ID NO: 2667464 - DNA, 25 bp, Homo sapien
aatagttcagaacaacggtgctaaa

SEQ ID NO: 2667465 - DNA, 25 bp, Homo sapien
gctaaaaagccgctttaattctgaa

SEQ ID NO: 2667466 - DNA, 25 bp, Homo sapien
gcactgtactgatcaaatgcccaca

SEQ ID NO: 2667467 - DNA, 25 bp, Homo sapien
gtgtgacgaaaacaagggcaataat

SEQ ID NO: 2667468 - DNA, 25 bp, Homo sapien
tgtgacgaaaacaagggcaataata

SEQ ID NO: 2667469 - DNA, 25 bp, Homo sapien
tttggactgaagatcttggattcct

SEQ ID NO: 2667470 - DNA, 25 bp, Homo sapien
gtttggactgaagatcttggattcc

SEQ ID NO: 2667471 - DNA, 25 bp, Homo sapien
tgtttggactgaagatcttggattc

SEQ ID NO: 2667472 - DNA, 25 bp, Homo sapien
ggattcctctaggtgaaaattcctc

SEQ ID NO: 2667473 - DNA, 25 bp, Homo sapien
gcagttttgaagtgttttattctcc

SEQ ID NO: 2667474 - DNA, 25 bp, Homo sapien
agttttgaagtgttttattctccat

SEQ ID NO: 2667475 - DNA, 25 bp, Homo sapien
ttgcagttttgaagtgttttattct

SEQ ID NO: 2667476 - DNA, 25 bp, Homo sapien
tcaagaattgcagttttgaagtgtt

SEQ ID NO: 2667477 - DNA, 25 bp, Homo sapien
ctatatgaagtttcttggggagttt

SEQ ID NO: 2667478 - DNA, 25 bp, Homo sapien
gagccttctcagatttcatcagtgg

SEQ ID NO: 2667479 - DNA, 25 bp, Homo sapien
taaaccacacacttaagagggatga

SEQ ID NO: 2667480 - DNA, 25 bp, Homo sapien
gaagaactcttgttaattcccagca

SEQ ID NO: 2667481 - DNA, 25 bp, Homo sapien
cagtgggactctccatgacgtctaa

SEQ ID NO: 2667482 - DNA, 25 bp, Homo sapien
gccatcccgtcgttaaatgttttca

SEQ ID NO: 2667483 - DNA, 25 bp, Homo sapien
taggtactagccatcccgtcgttaa

SEQ ID NO: 2667484 - DNA, 25 bp, Homo sapien
ttggagctttctataggtactagcc

SEQ ID NO: 2667485 - DNA, 25 bp, Homo sapien
aacaagtagaatgggaaaggagtga

SEQ ID NO: 2667486 - DNA, 25 bp, Homo sapien
taaagtactgaatccgcattactgc

SEQ ID NO: 2667487 - DNA, 25 bp, Homo sapien
gaatttccaactgttatcactggga

SEQ ID NO: 2667488 - DNA, 25 bp, Homo sapien
gccagctaattgtgagagtttacac

SEQ ID NO: 2667489 - DNA, 25 bp, Homo sapien
tttaagtgtaggtgtgaaggtccca

SEQ ID NO: 2667490 - DNA, 25 bp, Homo sapien
gccggcgaagctctaattgccctga

SEQ ID NO: 2667491 - DNA, 25 bp, Homo sapien
gctctaattgccctgaaggagaccg

SEQ ID NO: 2667492 - DNA, 25 bp, Homo sapien
ggctcggccggcgaagctctaattg

SEQ ID NO: 2667493 - DNA, 25 bp, Homo sapien
gcgaagctctaattgccctgaagga

SEQ ID NO: 2667494 - DNA, 25 bp, Homo sapien
tgcaactgtcaaagcaatatgggtt

SEQ ID NO: 2667495 - DNA, 25 bp, Homo sapien
gagcccagggtcgtgatatatacat

SEQ ID NO: 2667496 - DNA, 25 bp, Homo sapien
tcactgcttgtgtcgagcggactcc

SEQ ID NO: 2667497 - DNA, 25 bp, Homo sapien
ttcactggtcgtgcttcctgcgggc

SEQ ID NO: 2667498 - DNA, 25 bp, Homo sapien
tcacgagctaacttcctggaagagc

SEQ ID NO: 2667499 - DNA, 25 bp, Homo sapien
ctgaagccggctgtgacgcgccgct

SEQ ID NO: 2667500 - DNA, 25 bp, Homo sapien
ctggaagagctttccgtctattttc

SEQ ID NO: 2667501 - DNA, 25 bp, Homo sapien
ttctttaccgaagcctcagaggcca

SEQ ID NO: 2667502 - DNA, 25 bp, Homo sapien
ggtaaccgaatgtgttgttctttgc

SEQ ID NO: 2667503 - DNA, 25 bp, Homo sapien
tggccacctggtaaccgaatgtgtt

SEQ ID NO: 2667504 - DNA, 25 bp, Homo sapien
cacctggtaaccgaatgtgttgttc

SEQ ID NO: 2667505 - DNA, 25 bp, Homo sapien
ccgcgtggccacctggtaaccgaat

SEQ ID NO: 2667506 - DNA, 25 bp, Homo sapien
tctgtaaaaatgtcgcccgccagga

SEQ ID NO: 2667507 - DNA, 25 bp, Homo sapien
tccgggagacgcaagaaaaatcatt

SEQ ID NO: 2667508 - DNA, 25 bp, Homo sapien
cttgggaagcaaggaaacaggcgct

SEQ ID NO: 2667509 - DNA, 25 bp, Homo sapien
taagcgtcccgtatgatttggtctc

SEQ ID NO: 2667510 - DNA, 25 bp, Homo sapien
tcgaaaccacagagagaagccgtag

SEQ ID NO: 2667511 - DNA, 25 bp, Homo sapien
gacttccaagcggtatctctctgca

SEQ ID NO: 2667512 - DNA, 25 bp, Homo sapien
tatccgctgcctgtgttaaactgaa

SEQ ID NO: 2667513 - DNA, 25 bp, Homo sapien
caaattcaagttcatgaggccagtc

SEQ ID NO: 2667514 - DNA, 25 bp, Homo sapien
tgcttcagaccgttgactccttagg

SEQ ID NO: 2667515 - DNA, 25 bp, Homo sapien
tgttgagagccagtacaagtattca

SEQ ID NO: 2667516 - DNA, 25 bp, Homo sapien
tcagtccaggactaatcaagcagag

SEQ ID NO: 2667517 - DNA, 25 bp, Homo sapien
cactagtaggtgtaagtgtgatcac

SEQ ID NO: 2667518 - DNA, 25 bp, Homo sapien
tacgttgttcataataattgacttt

SEQ ID NO: 2667519 - DNA, 25 bp, Homo sapien
cttgatgccagttttacgttgttca

SEQ ID NO: 2667520 - DNA, 25 bp, Homo sapien
gccagttttacgttgttcataataa

SEQ ID NO: 2667521 - DNA, 25 bp, Homo sapien
tttacgttgttcataataattgact

SEQ ID NO: 2667522 - DNA, 25 bp, Homo sapien
gcacaggtcattgtatttgttgaca

SEQ ID NO: 2667523 - DNA, 25 bp, Homo sapien
ttgacatggctagtatgctaacttc

SEQ ID NO: 2667524 - DNA, 25 bp, Homo sapien
tcatatcatatcaccgtggcacagg

SEQ ID NO: 2667525 - DNA, 25 bp, Homo sapien
ggaatactggatcatacaacaggtt

SEQ ID NO: 2667526 - DNA, 25 bp, Homo sapien
gatcatgaatcttgaactgttacat

SEQ ID NO: 2667527 - DNA, 25 bp, Homo sapien
tgaactgttacatttgggtcaaatg

SEQ ID NO: 2667528 - DNA, 25 bp, Homo sapien
ttcttctgatcatgaatcttgaact

SEQ ID NO: 2667529 - DNA, 25 bp, Homo sapien
actgttacatttgggtcaaatgcaa

SEQ ID NO: 2667530 - DNA, 25 bp, Homo sapien
ggtgttcaatgtaatcattcagtgg

SEQ ID NO: 2667531 - DNA, 25 bp, Homo sapien
ggtagatatgtaaacttagccaagc

SEQ ID NO: 2667532 - DNA, 25 bp, Homo sapien
tactacagttaaccctccaagagct

SEQ ID NO: 2667533 - DNA, 25 bp, Homo sapien
aaggcatgcattgagttagcaggga

SEQ ID NO: 2667534 - DNA, 25 bp, Homo sapien
aattttaagtccctcagttcagctg

SEQ ID NO: 2667535 - DNA, 25 bp, Homo sapien
tgcatgcagttaattctacattttc

SEQ ID NO: 2667536 - DNA, 25 bp, Homo sapien
agggtagccagaaatagatcttaaa

SEQ ID NO: 2667537 - DNA, 25 bp, Homo sapien
taagccctcagcatccatgcatgca

SEQ ID NO: 2667538 - DNA, 25 bp, Homo sapien
agtagtctactagtatggtaaacag

SEQ ID NO: 2667539 - DNA, 25 bp, Homo sapien
tgtgagggttaaccaattgccagga

SEQ ID NO: 2667540 - DNA, 25 bp, Homo sapien
caaacataggtagaacagtaaagtc

SEQ ID NO: 2667541 - DNA, 25 bp, Homo sapien
gataagaaccctcagtatagtgtca

SEQ ID NO: 2667542 - DNA, 25 bp, Homo sapien
tttttagcacattatagccacttcc

SEQ ID NO: 2667543 - DNA, 25 bp, Homo sapien
catttatcccgtttatttgctggcc

SEQ ID NO: 2667544 - DNA, 25 bp, Homo sapien
ctttagtttatatgattcccattga

SEQ ID NO: 2667545 - DNA, 25 bp, Homo sapien
gttgattttatactgcctcacaggt

SEQ ID NO: 2667546 - DNA, 25 bp, Homo sapien
ttttctgagagtaattgcggatgcc

SEQ ID NO: 2667547 - DNA, 25 bp, Homo sapien
tgcttactagcattaggccagtagc

SEQ ID NO: 2667548 - DNA, 25 bp, Homo sapien
ttgctactgcaaactagttgggagt

SEQ ID NO: 2667549 - DNA, 25 bp, Homo sapien
ctactattatctgtggcctgagaga

SEQ ID NO: 2667550 - DNA, 25 bp, Homo sapien
cctggtatcttgtgtaatcttctat

SEQ ID NO: 2667551 - DNA, 25 bp, Homo sapien
taatcttctatcaggattgtatctc

SEQ ID NO: 2667552 - DNA, 25 bp, Homo sapien
tccatttcagtttgtatgacactac

SEQ ID NO: 2667553 - DNA, 25 bp, Homo sapien
tgtatctccatttcagtttgtatga

SEQ ID NO: 2667554 - DNA, 25 bp, Homo sapien
tgacaaacctaaactaacacctgga

SEQ ID NO: 2667555 - DNA, 25 bp, Homo sapien
actctctatgggctgtttgtgggca

SEQ ID NO: 2667556 - DNA, 25 bp, Homo sapien
ctggagaatgctttttgcggaggct

SEQ ID NO: 2667557 - DNA, 25 bp, Homo sapien
ccctgtttgagactaaaggcagtca

SEQ ID NO: 2667558 - DNA, 25 bp, Homo sapien
tgccatatggggctacgatcaggtg

SEQ ID NO: 2667559 - DNA, 25 bp, Homo sapien
gaaagagtgtagatgttttaattga

SEQ ID NO: 2667560 - DNA, 25 bp, Homo sapien
tatggggctacgatcaggtgaaaga

SEQ ID NO: 2667561 - DNA, 25 bp, Homo sapien
aaagaaagagtgtagatgttttaat

SEQ ID NO: 2667562 - DNA, 25 bp, Homo sapien
tgggcaacctctaagcactcaggaa

SEQ ID NO: 2667563 - DNA, 25 bp, Homo sapien
gtacttgcaattcatgtttgaagaa

SEQ ID NO: 2667564 - DNA, 25 bp, Homo sapien
cagctgtgctatctggtacttgcaa

SEQ ID NO: 2667565 - DNA, 25 bp, Homo sapien
taagttaggtaaacatatgggagaa

SEQ ID NO: 2667566 - DNA, 25 bp, Homo sapien
cataatgtagcatattattgtccag

SEQ ID NO: 2667567 - DNA, 25 bp, Homo sapien
tgtccagacttcctgtttaatcagt

SEQ ID NO: 2667568 - DNA, 25 bp, Homo sapien
tcagtacagagcttcttacaagtgc

SEQ ID NO: 2667569 - DNA, 25 bp, Homo sapien
aatgatgtttctacaatcttggttg

SEQ ID NO: 2667570 - DNA, 25 bp, Homo sapien
ctaagcataaggctcaattggtggg

SEQ ID NO: 2667571 - DNA, 25 bp, Homo sapien
taaggctcaattggtgggagcttgc

SEQ ID NO: 2667572 - DNA, 25 bp, Homo sapien
tgcgcagggagagccatttgccctt

SEQ ID NO: 2667573 - DNA, 25 bp, Homo sapien
agcttgcgcagggagagccatttgc

SEQ ID NO: 2667574 - DNA, 25 bp, Homo sapien
ttctggtcaaattaagtagtgcctt

SEQ ID NO: 2667575 - DNA, 25 bp, Homo sapien
cattgtaatctctaaatctggctga

SEQ ID NO: 2667576 - DNA, 25 bp, Homo sapien
tcattagaaaggtactgagacatca

SEQ ID NO: 2667577 - DNA, 25 bp, Homo sapien
ggcctgtgccagagaaatccataat

SEQ ID NO: 2667578 - DNA, 25 bp, Homo sapien
tccggatgactaaccaagaggctat

SEQ ID NO: 2667579 - DNA, 25 bp, Homo sapien
tgagcgccagttatccttaagaacg

SEQ ID NO: 2667580 - DNA, 25 bp, Homo sapien
gccgccacccgatggaagattcgat

SEQ ID NO: 2667581 - DNA, 25 bp, Homo sapien
cttaagaacggccagtttagggctg

SEQ ID NO: 2667582 - DNA, 25 bp, Homo sapien
tttgattctttatacttctcttctt

SEQ ID NO: 2667583 - DNA, 25 bp, Homo sapien
gattctttatacttctcttctttgt

SEQ ID NO: 2667584 - DNA, 25 bp, Homo sapien
atctatttgattctttatacttctc

SEQ ID NO: 2667585 - DNA, 25 bp, Homo sapien
ctcttctttgttaatctggctagca

SEQ ID NO: 2667586 - DNA, 25 bp, Homo sapien
ttcgccgacactcgccagagaacgg

SEQ ID NO: 2667587 - DNA, 25 bp, Homo sapien
tacttcgccgacactcgccagagaa

SEQ ID NO: 2667588 - DNA, 25 bp, Homo sapien
gccagagaacggcagcaccagaggc

SEQ ID NO: 2667589 - DNA, 25 bp, Homo sapien
agagaacggcagcaccagaggcagt

SEQ ID NO: 2667590 - DNA, 25 bp, Homo sapien
tagacatcaggagtctcagtgagtg

SEQ ID NO: 2667591 - DNA, 25 bp, Homo sapien
tcagtgagtgttcaaacagagctgc

SEQ ID NO: 2667592 - DNA, 25 bp, Homo sapien
gaatattagggtactgagggcacca

SEQ ID NO: 2667593 - DNA, 25 bp, Homo sapien
cagctttgcaactccagagcgacag

SEQ ID NO: 2667594 - DNA, 25 bp, Homo sapien
ggcaccgcttggtgctgacctattg

SEQ ID NO: 2667595 - DNA, 25 bp, Homo sapien
ccgcttggtgctgacctattggtca

SEQ ID NO: 2667596 - DNA, 25 bp, Homo sapien
gaagtggcaccgcttggtgctgacc

SEQ ID NO: 2667597 - DNA, 25 bp, Homo sapien
gcagaagtggcaccgcttggtgctg

SEQ ID NO: 2667598 - DNA, 25 bp, Homo sapien
tttttgttcttttccgcagttctga

SEQ ID NO: 2667599 - DNA, 25 bp, Homo sapien
ttttcttgtagtctgccttaaatcc

SEQ ID NO: 2667600 - DNA, 25 bp, Homo sapien
gttgcttatgattttcttgtagtct

SEQ ID NO: 2667601 - DNA, 25 bp, Homo sapien
tgttcttttccgcagttctgatttt

SEQ ID NO: 2667602 - DNA, 25 bp, Homo sapien
aaaccaactcctgattttccgccag

SEQ ID NO: 2667603 - DNA, 25 bp, Homo sapien
atgtttggccatttcccagacatcc

SEQ ID NO: 2667604 - DNA, 25 bp, Homo sapien
aatgtttggccatttcccagacatc

SEQ ID NO: 2667605 - DNA, 25 bp, Homo sapien
actcctgattttccgccaggctctg

SEQ ID NO: 2667606 - DNA, 25 bp, Homo sapien
tggagaaattgtgatgagctctcaa

SEQ ID NO: 2667607 - DNA, 25 bp, Homo sapien
tcagggaacagctcctagagtccat

SEQ ID NO: 2667608 - DNA, 25 bp, Homo sapien
tgagctctcaatctcagggaacagc

SEQ ID NO: 2667609 - DNA, 25 bp, Homo sapien
aattgtgatgagctctcaatctcag

SEQ ID NO: 2667610 - DNA, 25 bp, Homo sapien
gagtcagaccatgttgaatgccaga

SEQ ID NO: 2667611 - DNA, 25 bp, Homo sapien
gctgtaaagaggcactgacctcagc

SEQ ID NO: 2667612 - DNA, 25 bp, Homo sapien
ttcagcagagtcagaccatgttgaa

SEQ ID NO: 2667613 - DNA, 25 bp, Homo sapien
caactctgattgtgttgtgaacata

SEQ ID NO: 2667614 - DNA, 25 bp, Homo sapien
aggcacccttggcttgtaacgcctt

SEQ ID NO: 2667615 - DNA, 25 bp, Homo sapien
ggcacccttggcttgtaacgccttc

SEQ ID NO: 2667616 - DNA, 25 bp, Homo sapien
cacccttggcttgtaacgccttctc

SEQ ID NO: 2667617 - DNA, 25 bp, Homo sapien
gcacccttggcttgtaacgccttct

SEQ ID NO: 2667618 - DNA, 25 bp, Homo sapien
ccaggtatagttccacgtgctgagg

SEQ ID NO: 2667619 - DNA, 25 bp, Homo sapien
tagccggcacacattctagcaaggg

SEQ ID NO: 2667620 - DNA, 25 bp, Homo sapien
tacacagcctgtagcgatggcagcc

SEQ ID NO: 2667621 - DNA, 25 bp, Homo sapien
gaatttagtctcaaggtgctgcctt

SEQ ID NO: 2667622 - DNA, 25 bp, Homo sapien
tgcattgctttctagaggtgattta

SEQ ID NO: 2667623 - DNA, 25 bp, Homo sapien
tctcaagccacaagctcactgtctg

SEQ ID NO: 2667624 - DNA, 25 bp, Homo sapien
ttcccaaaacatacgtcttcaaaga

SEQ ID NO: 2667625 - DNA, 25 bp, Homo sapien
ccttcacttccctttgatgtgggct

SEQ ID NO: 2667626 - DNA, 25 bp, Homo sapien
aataagacacttgatctaccagtca

SEQ ID NO: 2667627 - DNA, 25 bp, Homo sapien
cctggtcccagaacagtagggttgc

SEQ ID NO: 2667628 - DNA, 25 bp, Homo sapien
aaagccattcctcggcctttattgg

SEQ ID NO: 2667629 - DNA, 25 bp, Homo sapien
tttccacagtgaggacggattccat

SEQ ID NO: 2667630 - DNA, 25 bp, Homo sapien
tagatgagtttcgttggccaaaccc

SEQ ID NO: 2667631 - DNA, 25 bp, Homo sapien
gagacagcggtcttctaataccaac

SEQ ID NO: 2667632 - DNA, 25 bp, Homo sapien
tgtagtgacttttaaccctcagaca

SEQ ID NO: 2667633 - DNA, 25 bp, Homo sapien
gaatagcacctaccaagtaccaggc

SEQ ID NO: 2667634 - DNA, 25 bp, Homo sapien
cagcagggagaacctcactgaggtc

SEQ ID NO: 2667635 - DNA, 25 bp, Homo sapien
tagtatggatttataatggcccgtc

SEQ ID NO: 2667636 - DNA, 25 bp, Homo sapien
aataggatcccaacagtatacagga

SEQ ID NO: 2667637 - DNA, 25 bp, Homo sapien
caggacagtccaacaggatcagagg

SEQ ID NO: 2667638 - DNA, 25 bp, Homo sapien
ttcaaaaagattgatctggcaacag

SEQ ID NO: 2667639 - DNA, 25 bp, Homo sapien
agctgcagtattagattcttataaa

SEQ ID NO: 2667640 - DNA, 25 bp, Homo sapien
tgcagtattagattcttataaaagc

SEQ ID NO: 2667641 - DNA, 25 bp, Homo sapien
cgggtcacagatgggtaccagtcca

SEQ ID NO: 2667642 - DNA, 25 bp, Homo sapien
taatctatcagcaaatgtcctggaa

SEQ ID NO: 2667643 - DNA, 25 bp, Homo sapien
gatggatctcctagacttacctggt

SEQ ID NO: 2667644 - DNA, 25 bp, Homo sapien
caaggcttcacagcgagttgtgatc

SEQ ID NO: 2667645 - DNA, 25 bp, Homo sapien
taatagtacccttgtccagcctggg

SEQ ID NO: 2667646 - DNA, 25 bp, Homo sapien
cactggtcaaaggtaggtggttgga

SEQ ID NO: 2667647 - DNA, 25 bp, Homo sapien
taggtggttggaagtggatattctg

SEQ ID NO: 2667648 - DNA, 25 bp, Homo sapien
cccacgaggcaaggggcatctcttc

SEQ ID NO: 2667649 - DNA, 25 bp, Homo sapien
cccagagctagagcccacgaggcaa

SEQ ID NO: 2667650 - DNA, 25 bp, Homo sapien
taaacgaaccagtgtaagctagcat

SEQ ID NO: 2667651 - DNA, 25 bp, Homo sapien
cactaatgaagaggggaataaacga

SEQ ID NO: 2667652 - DNA, 25 bp, Homo sapien
tgtaggtagggattttaacaagcat

SEQ ID NO: 2667653 - DNA, 25 bp, Homo sapien
taacaagcatttacgagagtccatt

SEQ ID NO: 2667654 - DNA, 25 bp, Homo sapien
tcaaccaaactctactccataaagt

SEQ ID NO: 2667655 - DNA, 25 bp, Homo sapien
ccaaactctactccataaagtcgtc

SEQ ID NO: 2667656 - DNA, 25 bp, Homo sapien
taaagtcgtctgaagaaaaactcac

SEQ ID NO: 2667657 - DNA, 25 bp, Homo sapien
agtcgtctgaagaaaaactcactct

SEQ ID NO: 2667658 - DNA, 25 bp, Homo sapien
tgctctggcggttaaaatcttttgt

SEQ ID NO: 2667659 - DNA, 25 bp, Homo sapien
acatttcccgaatgctctggcggtt

SEQ ID NO: 2667660 - DNA, 25 bp, Homo sapien
tggacgattggacaattgaaagatt

SEQ ID NO: 2667661 - DNA, 25 bp, Homo sapien
aggtctgctgtggacgattggacaa

SEQ ID NO: 2667662 - DNA, 25 bp, Homo sapien
atatttgtgatgggtctattctctg

SEQ ID NO: 2667663 - DNA, 25 bp, Homo sapien
tgtgatgggtctattctctgcctct

SEQ ID NO: 2667664 - DNA, 25 bp, Homo sapien
tgttcctgtgtttgatgtaatgtaa

SEQ ID NO: 2667665 - DNA, 25 bp, Homo sapien
atgtaagcaaggacaaaaaggagag

SEQ ID NO: 2667666 - DNA, 25 bp, Homo sapien
tttcatcataaagcctgtgaggagg

SEQ ID NO: 2667667 - DNA, 25 bp, Homo sapien
catgaagttgctggcgtgctgtgca

SEQ ID NO: 2667668 - DNA, 25 bp, Homo sapien
taagatatagattcctgctggctgt

SEQ ID NO: 2667669 - DNA, 25 bp, Homo sapien
tgaggaggccgctccccattgagtg

SEQ ID NO: 2667670 - DNA, 25 bp, Homo sapien
ccaggatgggtgcatttacggccat

SEQ ID NO: 2667671 - DNA, 25 bp, Homo sapien
gccaggatgggtgcatttacggcca

SEQ ID NO: 2667672 - DNA, 25 bp, Homo sapien
tttattcatcaggacttgggccagg

SEQ ID NO: 2667673 - DNA, 25 bp, Homo sapien
ttattcatcaggacttgggccagga

SEQ ID NO: 2667674 - DNA, 25 bp, Homo sapien
gaagaagatggatgttttcccttat

SEQ ID NO: 2667675 - DNA, 25 bp, Homo sapien
ttctatgtatgcattctcaggtttc

SEQ ID NO: 2667676 - DNA, 25 bp, Homo sapien
ctactttgtagattcaatcttgcca

SEQ ID NO: 2667677 - DNA, 25 bp, Homo sapien
gtatgcattctcaggtttccctgaa

SEQ ID NO: 2667678 - DNA, 25 bp, Homo sapien
gggataacacccatacttcagcttt

SEQ ID NO: 2667679 - DNA, 25 bp, Homo sapien
tcagctttactgtgatatggaaagc

SEQ ID NO: 2667680 - DNA, 25 bp, Homo sapien
ctatagtgaagactgatgaaacgtt

SEQ ID NO: 2667681 - DNA, 25 bp, Homo sapien
acatcctgtacttggaaaccttgaa

SEQ ID NO: 2667682 - DNA, 25 bp, Homo sapien
tgagaacatgtccgttgcctcttgg

SEQ ID NO: 2667683 - DNA, 25 bp, Homo sapien
ctgagaacatgtccgttgcctcttg

SEQ ID NO: 2667684 - DNA, 25 bp, Homo sapien
tctgagaacatgtccgttgcctctt

SEQ ID NO: 2667685 - DNA, 25 bp, Homo sapien
catcaatcacatgggtcatccctat

SEQ ID NO: 2667686 - DNA, 25 bp, Homo sapien
ggaggagcaagaggcttagccacaa

SEQ ID NO: 2667687 - DNA, 25 bp, Homo sapien
catatgaagtttacggtactgagga

SEQ ID NO: 2667688 - DNA, 25 bp, Homo sapien
aagaggcttagccacaaacagcagt

SEQ ID NO: 2667689 - DNA, 25 bp, Homo sapien
ctttttctgccgtattaaagctaat

SEQ ID NO: 2667690 - DNA, 25 bp, Homo sapien
tggaatagcccttgattttcctgtt

SEQ ID NO: 2667691 - DNA, 25 bp, Homo sapien
aatggaatagcccttgattttcctg

SEQ ID NO: 2667692 - DNA, 25 bp, Homo sapien
tttttctgccgtattaaagctaata

SEQ ID NO: 2667693 - DNA, 25 bp, Homo sapien
gatatctgtagagggtcatggaaac

SEQ ID NO: 2667694 - DNA, 25 bp, Homo sapien
cagaaggatgtatgtaggctatgag

SEQ ID NO: 2667695 - DNA, 25 bp, Homo sapien
tatacagaaggatgtatgtaggcta

SEQ ID NO: 2667696 - DNA, 25 bp, Homo sapien
ggcacttgagcatccattggttttg

SEQ ID NO: 2667697 - DNA, 25 bp, Homo sapien
tctagctcaacaaagacttttcttg

SEQ ID NO: 2667698 - DNA, 25 bp, Homo sapien
agtctctttctagctcaacaaagac

SEQ ID NO: 2667699 - DNA, 25 bp, Homo sapien
tatgttcaatagaatagtctctttc

SEQ ID NO: 2667700 - DNA, 25 bp, Homo sapien
gttcccagtagaacctacatcatta

SEQ ID NO: 2667701 - DNA, 25 bp, Homo sapien
tcctgttttggcttatgagctatac

SEQ ID NO: 2667702 - DNA, 25 bp, Homo sapien
taggcaaagcgctggtgtatattac

SEQ ID NO: 2667703 - DNA, 25 bp, Homo sapien
tgatatagtccaatctgactgctga

SEQ ID NO: 2667704 - DNA, 25 bp, Homo sapien
tggaatgtcagtattctgaggtgct

SEQ ID NO: 2667705 - DNA, 25 bp, Homo sapien
tcccaaatgatatcctttgtagtag

SEQ ID NO: 2667706 - DNA, 25 bp, Homo sapien
cctctgggagttgtatactgcataa

SEQ ID NO: 2667707 - DNA, 25 bp, Homo sapien
ctgcataatttgatagcccagccag

SEQ ID NO: 2667708 - DNA, 25 bp, Homo sapien
tcagtcctctgggagttgtatactg

SEQ ID NO: 2667709 - DNA, 25 bp, Homo sapien
ctgacctcaagttgagagacaggac

SEQ ID NO: 2667710 - DNA, 25 bp, Homo sapien
gtgtggtcaatattacagtatgtgt

SEQ ID NO: 2667711 - DNA, 25 bp, Homo sapien
cttccactattatcgtgtggttatc

SEQ ID NO: 2667712 - DNA, 25 bp, Homo sapien
cagtgggtgtcaaggtgaggtcttc

SEQ ID NO: 2667713 - DNA, 25 bp, Homo sapien
caatattacagtatgtgtcatgtgc

SEQ ID NO: 2667714 - DNA, 25 bp, Homo sapien
gagctcaggtaggactgccgtttgc

SEQ ID NO: 2667715 - DNA, 25 bp, Homo sapien
tctgacttgtgtctgggcctccgct

SEQ ID NO: 2667716 - DNA, 25 bp, Homo sapien
caggcccgggtcgaaatcaggaggg

SEQ ID NO: 2667717 - DNA, 25 bp, Homo sapien
gaggctgtctggaaccacgctgcat

SEQ ID NO: 2667718 - DNA, 25 bp, Homo sapien
gttggtttacttgtcagccaccaga

SEQ ID NO: 2667719 - DNA, 25 bp, Homo sapien
tttagctgcctcagaggagagggta

SEQ ID NO: 2667720 - DNA, 25 bp, Homo sapien
cttagagagtctgagatctcctctc

SEQ ID NO: 2667721 - DNA, 25 bp, Homo sapien
ggagagggtatctaactcagctttg

SEQ ID NO: 2667722 - DNA, 25 bp, Homo sapien
ggctgttgtcatacagctattagtt

SEQ ID NO: 2667723 - DNA, 25 bp, Homo sapien
taggcaggattggacttgaaaggat

SEQ ID NO: 2667724 - DNA, 25 bp, Homo sapien
tgattttgacatcttaggcaggatt

SEQ ID NO: 2667725 - DNA, 25 bp, Homo sapien
ttcagcacataacctcttcattctt

SEQ ID NO: 2667726 - DNA, 25 bp, Homo sapien
cagaggctgcatcttgtgaaggtca

SEQ ID NO: 2667727 - DNA, 25 bp, Homo sapien
agaggctgcatcttgtgaaggtcat

SEQ ID NO: 2667728 - DNA, 25 bp, Homo sapien
caaagatagccagcaaactaccaga

SEQ ID NO: 2667729 - DNA, 25 bp, Homo sapien
ggaactaatgtcatcacagaggtaa

SEQ ID NO: 2667730 - DNA, 25 bp, Homo sapien
taccagaagctaggaggaaagcacg

SEQ ID NO: 2667731 - DNA, 25 bp, Homo sapien
gaaatctgggtgacgcatctacaat

SEQ ID NO: 2667732 - DNA, 25 bp, Homo sapien
gatgcctcataaagaagggctagaa

SEQ ID NO: 2667733 - DNA, 25 bp, Homo sapien
aattctgcaatgagagtgctgctgg

SEQ ID NO: 2667734 - DNA, 25 bp, Homo sapien
gaagatgcctcataaagaagggcta

SEQ ID NO: 2667735 - DNA, 25 bp, Homo sapien
ccaccatttgctccatgcaattctg

SEQ ID NO: 2667736 - DNA, 25 bp, Homo sapien
gctcttccttggtatgaacagctga

SEQ ID NO: 2667737 - DNA, 25 bp, Homo sapien
taattcacaggaaataatcagctct

SEQ ID NO: 2667738 - DNA, 25 bp, Homo sapien
tgaagggtgaagtgagcctgcattg

SEQ ID NO: 2667739 - DNA, 25 bp, Homo sapien
tgtctatagggtgcgctgaaggtcc

SEQ ID NO: 2667740 - DNA, 25 bp, Homo sapien
cttgggtttgtttgtgcaggtgatc

SEQ ID NO: 2667741 - DNA, 25 bp, Homo sapien
tgggtttgtttgtgcaggtgatcat

SEQ ID NO: 2667742 - DNA, 25 bp, Homo sapien
ttgggtttgtttgtgcaggtgatca

SEQ ID NO: 2667743 - DNA, 25 bp, Homo sapien
agttgatgattgtaatagaacagag

SEQ ID NO: 2667744 - DNA, 25 bp, Homo sapien
taatagaacagagtatgatactgca

SEQ ID NO: 2667745 - DNA, 25 bp, Homo sapien
ctctttgcaacacctggggttgttt

SEQ ID NO: 2667746 - DNA, 25 bp, Homo sapien
agtgggttctgctttaactcagttg

SEQ ID NO: 2667747 - DNA, 25 bp, Homo sapien
tctattgatgggttgtgacaaatca

SEQ ID NO: 2667748 - DNA, 25 bp, Homo sapien
ttattttctattgatgggttgtgac

SEQ ID NO: 2667749 - DNA, 25 bp, Homo sapien
agacaagcccattgacaagtgagaa

SEQ ID NO: 2667750 - DNA, 25 bp, Homo sapien
gacaagcccattgacaagtgagaat

SEQ ID NO: 2667751 - DNA, 25 bp, Homo sapien
cataatcatgctccacaaagatggg

SEQ ID NO: 2667752 - DNA, 25 bp, Homo sapien
tggccaagatgcataggggagcagt

SEQ ID NO: 2667753 - DNA, 25 bp, Homo sapien
taatcatgctccacaaagatgggaa

SEQ ID NO: 2667754 - DNA, 25 bp, Homo sapien
cataggggagcagtgcgttcggtca

SEQ ID NO: 2667755 - DNA, 25 bp, Homo sapien
ccagatggacatttctgcattatgc

SEQ ID NO: 2667756 - DNA, 25 bp, Homo sapien
gccagatggacatttctgcattatg

SEQ ID NO: 2667757 - DNA, 25 bp, Homo sapien
cagatggacatttctgcattatgca

SEQ ID NO: 2667758 - DNA, 25 bp, Homo sapien
aaagtacaaacgtttctcatctcta

SEQ ID NO: 2667759 - DNA, 25 bp, Homo sapien
acaaacgtttctcatctctattccc

SEQ ID NO: 2667760 - DNA, 25 bp, Homo sapien
aaacgtttctcatctctattcccac

SEQ ID NO: 2667761 - DNA, 25 bp, Homo sapien
gtacaaacgtttctcatctctattc

SEQ ID NO: 2667762 - DNA, 25 bp, Homo sapien
aacctcagtcttcgtggcttctcat

SEQ ID NO: 2667763 - DNA, 25 bp, Homo sapien
actgtgtaacctcagtcttcgtggc

SEQ ID NO: 2667764 - DNA, 25 bp, Homo sapien
cgtggcttctcatttatggggctct

SEQ ID NO: 2667765 - DNA, 25 bp, Homo sapien
tgtaacctcagtcttcgtggcttct

SEQ ID NO: 2667766 - DNA, 25 bp, Homo sapien
tggaacttgtagccatctgcaaggc

SEQ ID NO: 2667767 - DNA, 25 bp, Homo sapien
tttggtggaacttgtagccatctgc

SEQ ID NO: 2667768 - DNA, 25 bp, Homo sapien
ggtttggtggaacttgtagccatct

SEQ ID NO: 2667769 - DNA, 25 bp, Homo sapien
gaacttgtagccatctgcaaggcca

SEQ ID NO: 2667770 - DNA, 25 bp, Homo sapien
tattggccatgtctgattttacaga

SEQ ID NO: 2667771 - DNA, 25 bp, Homo sapien
agggtctgggtgcatatattggcca

SEQ ID NO: 2667772 - DNA, 25 bp, Homo sapien
accttggacagctgaaggagggtct

SEQ ID NO: 2667773 - DNA, 25 bp, Homo sapien
tgtaattatcttggctgaggacctc

SEQ ID NO: 2667774 - DNA, 25 bp, Homo sapien
tgagcagagactgcccctgtcctct

SEQ ID NO: 2667775 - DNA, 25 bp, Homo sapien
cagagactgcccctgtcctctgggt

SEQ ID NO: 2667776 - DNA, 25 bp, Homo sapien
gagaatgagcagagactgcccctgt

SEQ ID NO: 2667777 - DNA, 25 bp, Homo sapien
gctggagaatgagcagagactgccc

SEQ ID NO: 2667778 - DNA, 25 bp, Homo sapien
caagtgattaacatcacagttgcac

SEQ ID NO: 2667779 - DNA, 25 bp, Homo sapien
tcaagtgattaacatcacagttgca

SEQ ID NO: 2667780 - DNA, 25 bp, Homo sapien
attaacatcacagttgcacttgtgg

SEQ ID NO: 2667781 - DNA, 25 bp, Homo sapien
gtgattaacatcacagttgcacttg

SEQ ID NO: 2667782 - DNA, 25 bp, Homo sapien
cagccctagagacaagagcctcaaa

SEQ ID NO: 2667783 - DNA, 25 bp, Homo sapien
cagtgaaacccctcaattgacagcc

SEQ ID NO: 2667784 - DNA, 25 bp, Homo sapien
cattaggaacactctaggttgaggg

SEQ ID NO: 2667785 - DNA, 25 bp, Homo sapien
ttctggagaaaccaaacagccctag

SEQ ID NO: 2667786 - DNA, 25 bp, Homo sapien
agaaatgagcccatatggaacaact

SEQ ID NO: 2667787 - DNA, 25 bp, Homo sapien
ttcattcaacaccaagatgtacctt

SEQ ID NO: 2667788 - DNA, 25 bp, Homo sapien
caacaccaagatgtaccttgatgcc

SEQ ID NO: 2667789 - DNA, 25 bp, Homo sapien
agcccatatggaacaacttcattca

SEQ ID NO: 2667790 - DNA, 25 bp, Homo sapien
aggcttccaggcatgcatataaaac

SEQ ID NO: 2667791 - DNA, 25 bp, Homo sapien
ttaaaaggcttccaggcatgcatat

SEQ ID NO: 2667792 - DNA, 25 bp, Homo sapien
aaggcttccaggcatgcatataaaa

SEQ ID NO: 2667793 - DNA, 25 bp, Homo sapien
aaaaggcttccaggcatgcatataa

SEQ ID NO: 2667794 - DNA, 25 bp, Homo sapien
gaatgacctactcctttgaaaaggc

SEQ ID NO: 2667795 - DNA, 25 bp, Homo sapien
cagtaatgcctcatcactatagaag

SEQ ID NO: 2667796 - DNA, 25 bp, Homo sapien
tctggccttcggcagaattctgtca

SEQ ID NO: 2667797 - DNA, 25 bp, Homo sapien
agttgtcccgatgcttctctttagg

SEQ ID NO: 2667798 - DNA, 25 bp, Homo sapien
tacaacagccattatttgctggctt

SEQ ID NO: 2667799 - DNA, 25 bp, Homo sapien
cccgacaaaatgttttataagcttg

SEQ ID NO: 2667800 - DNA, 25 bp, Homo sapien
tacagcagcccatgcatgctaatgt

SEQ ID NO: 2667801 - DNA, 25 bp, Homo sapien
acaatatgtgtgaagctgccagaat

SEQ ID NO: 2667802 - DNA, 25 bp, Homo sapien
gactgatgggtaattgataactgtg

SEQ ID NO: 2667803 - DNA, 25 bp, Homo sapien
tgatagacacaaacagaagagttgg

SEQ ID NO: 2667804 - DNA, 25 bp, Homo sapien
cagagatcccatttttgacggcaaa

SEQ ID NO: 2667805 - DNA, 25 bp, Homo sapien
tgacggcaaatgtcactgcctggat

SEQ ID NO: 2667806 - DNA, 25 bp, Homo sapien
cctcaaagttaatgttggtgtcttc

SEQ ID NO: 2667807 - DNA, 25 bp, Homo sapien
ttcctcaaagttaatgttggtgtct

SEQ ID NO: 2667808 - DNA, 25 bp, Homo sapien
ttgtgtgcacttcacagcatcatgt

SEQ ID NO: 2667809 - DNA, 25 bp, Homo sapien
tattgtgtgcacttcacagcatcat

SEQ ID NO: 2667810 - DNA, 25 bp, Homo sapien
agtggcataagttgtgataacaagg

SEQ ID NO: 2667811 - DNA, 25 bp, Homo sapien
caaggagcaaatgtaacttcagacg

SEQ ID NO: 2667812 - DNA, 25 bp, Homo sapien
tatctgagagggctgacgttccgcc

SEQ ID NO: 2667813 - DNA, 25 bp, Homo sapien
ccaagggagactgaaaaaaggctca

SEQ ID NO: 2667814 - DNA, 25 bp, Homo sapien
cctgttttcagcacatgaaatgtcg

SEQ ID NO: 2667815 - DNA, 25 bp, Homo sapien
gcctgcatctttgaaatacagttgg

SEQ ID NO: 2667816 - DNA, 25 bp, Homo sapien
cagttggtgcactgtattacattat

SEQ ID NO: 2667817 - DNA, 25 bp, Homo sapien
acatgaaatgtcgagttggcctgca

SEQ ID NO: 2667818 - DNA, 25 bp, Homo sapien
gagtggtacccaaatgcaataacat

SEQ ID NO: 2667819 - DNA, 25 bp, Homo sapien
tagagagtggtacccaaatgcaata

SEQ ID NO: 2667820 - DNA, 25 bp, Homo sapien
gagagtggtacccaaatgcaataac

SEQ ID NO: 2667821 - DNA, 25 bp, Homo sapien
ttagagagtggtacccaaatgcaat

SEQ ID NO: 2667822 - DNA, 25 bp, Homo sapien
gcaatgtttctgtcccaagcttcat

SEQ ID NO: 2667823 - DNA, 25 bp, Homo sapien
gggtgtccatttctagggagcatag

SEQ ID NO: 2667824 - DNA, 25 bp, Homo sapien
ggcagtatgtatagctcagcaatgt

SEQ ID NO: 2667825 - DNA, 25 bp, Homo sapien
gaggacaatgggaacctcttctagt

SEQ ID NO: 2667826 - DNA, 25 bp, Homo sapien
gagtgcctccgtagaggctttccca

SEQ ID NO: 2667827 - DNA, 25 bp, Homo sapien
gagatgttgccactgtcgtatccta

SEQ ID NO: 2667828 - DNA, 25 bp, Homo sapien
tcctgaacagcatagcactgagtgt

SEQ ID NO: 2667829 - DNA, 25 bp, Homo sapien
gagggaaccgatgaaccatacagca

SEQ ID NO: 2667830 - DNA, 25 bp, Homo sapien
agacaacaatggctcctttggagcc

SEQ ID NO: 2667831 - DNA, 25 bp, Homo sapien
tctttagaacgcaaaatattgacac

SEQ ID NO: 2667832 - DNA, 25 bp, Homo sapien
tattgacacaatagacaacaatggc

SEQ ID NO: 2667833 - DNA, 25 bp, Homo sapien
gatcatctttagaacgcaaaatatt

SEQ ID NO: 2667834 - DNA, 25 bp, Homo sapien
tttaacaaataactaggataagtca

SEQ ID NO: 2667835 - DNA, 25 bp, Homo sapien
tgatcttcaactttgtgcatgaaga

SEQ ID NO: 2667836 - DNA, 25 bp, Homo sapien
aatgtatggcatttgacactactta

SEQ ID NO: 2667837 - DNA, 25 bp, Homo sapien
gcatgaagatagctggcattttgcc

SEQ ID NO: 2667838 - DNA, 25 bp, Homo sapien
caagtagaagttcccctgagatagc

SEQ ID NO: 2667839 - DNA, 25 bp, Homo sapien
ggcagccgtaaggtaaaggtccagc

SEQ ID NO: 2667840 - DNA, 25 bp, Homo sapien
taaggcccattatcaatagtctgct

SEQ ID NO: 2667841 - DNA, 25 bp, Homo sapien
tagccatgtgctccataatgcgctg

SEQ ID NO: 2667842 - DNA, 25 bp, Homo sapien
tgtgtgggcctagtaaaatgcttcc

SEQ ID NO: 2667843 - DNA, 25 bp, Homo sapien
tgcacagagacaatataatgccacg

SEQ ID NO: 2667844 - DNA, 25 bp, Homo sapien
cattttggctcacacccttgacagt

SEQ ID NO: 2667845 - DNA, 25 bp, Homo sapien
taatgccacgaaagacgaaggtgtc

SEQ ID NO: 2667846 - DNA, 25 bp, Homo sapien
gtggcacttacataaggaataccag

SEQ ID NO: 2667847 - DNA, 25 bp, Homo sapien
ctaaggaccgccagatgtcgcaaag

SEQ ID NO: 2667848 - DNA, 25 bp, Homo sapien
gatgaagcgggttttatccaaaatg

SEQ ID NO: 2667849 - DNA, 25 bp, Homo sapien
ccagatgtcgcaaaggcatcattga

SEQ ID NO: 2667850 - DNA, 25 bp, Homo sapien
cccagtggggtcaccgagaccttca

SEQ ID NO: 2667851 - DNA, 25 bp, Homo sapien
tgaactcctggttactactccctta

SEQ ID NO: 2667852 - DNA, 25 bp, Homo sapien
tcatccttgaagtaacctgaactcc

SEQ ID NO: 2667853 - DNA, 25 bp, Homo sapien
ctactcccttatcagacttggttac

SEQ ID NO: 2667854 - DNA, 25 bp, Homo sapien
ctgtgtgagtctttcacccccaaat

SEQ ID NO: 2667855 - DNA, 25 bp, Homo sapien
gtgagtctttcacccccaaattatc

SEQ ID NO: 2667856 - DNA, 25 bp, Homo sapien
ctcacctgtaacagctgtctgtgtg

SEQ ID NO: 2667857 - DNA, 25 bp, Homo sapien
ccctcacctgtaacagctgtctgtg

SEQ ID NO: 2667858 - DNA, 25 bp, Homo sapien
tttataccttttggcaattccactc

SEQ ID NO: 2667859 - DNA, 25 bp, Homo sapien
tccactctttgtccaaccttgggta

SEQ ID NO: 2667860 - DNA, 25 bp, Homo sapien
caattccactctttgtccaaccttg

SEQ ID NO: 2667861 - DNA, 25 bp, Homo sapien
ttataccttttggcaattccactct

SEQ ID NO: 2667862 - DNA, 25 bp, Homo sapien
aacccagagagagtgaatctaggac

SEQ ID NO: 2667863 - DNA, 25 bp, Homo sapien
aacataggtgtagatcagagaaccc

SEQ ID NO: 2667864 - DNA, 25 bp, Homo sapien
ggaatgccggcaacataggtgtaga

SEQ ID NO: 2667865 - DNA, 25 bp, Homo sapien
acagaggccctacgatgctaacgca

SEQ ID NO: 2667866 - DNA, 25 bp, Homo sapien
gaacttagcgtaggaccacgaaatc

SEQ ID NO: 2667867 - DNA, 25 bp, Homo sapien
tcctttctgaacttagcgtaggacc

SEQ ID NO: 2667868 - DNA, 25 bp, Homo sapien
ttctgacggataaactgaacgtgtt

SEQ ID NO: 2667869 - DNA, 25 bp, Homo sapien
tatttcaagtagttctgacggataa

SEQ ID NO: 2667870 - DNA, 25 bp, Homo sapien
ttggccattgttaattcttcctctg

SEQ ID NO: 2667871 - DNA, 25 bp, Homo sapien
tgcttgtaaatcatttgaggccaca

SEQ ID NO: 2667872 - DNA, 25 bp, Homo sapien
gattaatgcttgtaaatcatttgag

SEQ ID NO: 2667873 - DNA, 25 bp, Homo sapien
cttggccttggccattgttaattct

SEQ ID NO: 2667874 - DNA, 25 bp, Homo sapien
tcaggctaccttactagattttggc

SEQ ID NO: 2667875 - DNA, 25 bp, Homo sapien
gtccagcaagtttggcaagacagcc

SEQ ID NO: 2667876 - DNA, 25 bp, Homo sapien
tggcgcactgcgtagtaactgcaat

SEQ ID NO: 2667877 - DNA, 25 bp, Homo sapien
cagctgtgagctatgctatgaacct

SEQ ID NO: 2667878 - DNA, 25 bp, Homo sapien
tgactgggcctttccagcacccttg

SEQ ID NO: 2667879 - DNA, 25 bp, Homo sapien
cttcagcagcgcagtagcctaaact

SEQ ID NO: 2667880 - DNA, 25 bp, Homo sapien
tgggcctttccagcacccttgttct

SEQ ID NO: 2667881 - DNA, 25 bp, Homo sapien
cagaattaagaatgcatcctgggca

SEQ ID NO: 2667882 - DNA, 25 bp, Homo sapien
aatttgaactgtttgtggtttgaca

SEQ ID NO: 2667883 - DNA, 25 bp, Homo sapien
tgtgagaaagcaaaattgacactga

SEQ ID NO: 2667884 - DNA, 25 bp, Homo sapien
ttaaaatcagatgaagtgaagggaa

SEQ ID NO: 2667885 - DNA, 25 bp, Homo sapien
gacactgacactctctattatttgc

SEQ ID NO: 2667886 - DNA, 25 bp, Homo sapien
gagatgggggtagggccttctatgg

SEQ ID NO: 2667887 - DNA, 25 bp, Homo sapien
gtagaaagaccccagctacaactat

SEQ ID NO: 2667888 - DNA, 25 bp, Homo sapien
gagtagaaagaccccagctacaact

SEQ ID NO: 2667889 - DNA, 25 bp, Homo sapien
tgagtagaaagaccccagctacaac

SEQ ID NO: 2667890 - DNA, 25 bp, Homo sapien
agaaagaccccagctacaactatgg

SEQ ID NO: 2667891 - DNA, 25 bp, Homo sapien
gaagcccgtgaggaagggcattcct

SEQ ID NO: 2667892 - DNA, 25 bp, Homo sapien
tgaggtctatggaatagaagcccgt

SEQ ID NO: 2667893 - DNA, 25 bp, Homo sapien
ataatatggctttgaagaaagcatg

SEQ ID NO: 2667894 - DNA, 25 bp, Homo sapien
gatatatttgcggttttgatgatga

SEQ ID NO: 2667895 - DNA, 25 bp, Homo sapien
tccttggaaggaagtcttcatttcc

SEQ ID NO: 2667896 - DNA, 25 bp, Homo sapien
tctgctctggttctccaaaacagtt

SEQ ID NO: 2667897 - DNA, 25 bp, Homo sapien
tttcatccatgatttttctgctctg

SEQ ID NO: 2667898 - DNA, 25 bp, Homo sapien
tttatctttcactattttcatccat

SEQ ID NO: 2667899 - DNA, 25 bp, Homo sapien
gctctggttctccaaaacagttcca

SEQ ID NO: 2667900 - DNA, 25 bp, Homo sapien
gttttatgcactacttctaataaaa

SEQ ID NO: 2667901 - DNA, 25 bp, Homo sapien
ttttatgcactacttctaataaaag

SEQ ID NO: 2667902 - DNA, 25 bp, Homo sapien
caaatgttttatgcactacttctaa

SEQ ID NO: 2667903 - DNA, 25 bp, Homo sapien
tgttagggaaagcacaatttgattt

SEQ ID NO: 2667904 - DNA, 25 bp, Homo sapien
tttaaccaagtcttctacacaacac

SEQ ID NO: 2667905 - DNA, 25 bp, Homo sapien
ctgatctccaatgttagggaaagca

SEQ ID NO: 2667906 - DNA, 25 bp, Homo sapien
ttctacacaacactgcagcagggcc

SEQ ID NO: 2667907 - DNA, 25 bp, Homo sapien
catttttgtgggtttatatttctct

SEQ ID NO: 2667908 - DNA, 25 bp, Homo sapien
ttgtgatgatgactcttcatttttg

SEQ ID NO: 2667909 - DNA, 25 bp, Homo sapien
tctcttctccataatataacttctt

SEQ ID NO: 2667910 - DNA, 25 bp, Homo sapien
ttctccataatataacttctttacc

SEQ ID NO: 2667911 - DNA, 25 bp, Homo sapien
tgctcctcatctatacacttattca

SEQ ID NO: 2667912 - DNA, 25 bp, Homo sapien
tcatctgaataatgagtggttcaca

SEQ ID NO: 2667913 - DNA, 25 bp, Homo sapien
aactgatgagtcgaaattgaaacac

SEQ ID NO: 2667914 - DNA, 25 bp, Homo sapien
tattaaatgtacatcccacttgttt

SEQ ID NO: 2667915 - DNA, 25 bp, Homo sapien
ctaaattatgaagagtaagaaattg

SEQ ID NO: 2667916 - DNA, 25 bp, Homo sapien
cattcaccagggtattgccattcat

SEQ ID NO: 2667917 - DNA, 25 bp, Homo sapien
gatgtataacacattcaccagggta

SEQ ID NO: 2667918 - DNA, 25 bp, Homo sapien
tataacacattcaccagggtattgc

SEQ ID NO: 2667919 - DNA, 25 bp, Homo sapien
taacacattcaccagggtattgcca

SEQ ID NO: 2667920 - DNA, 25 bp, Homo sapien
ctgtaactagtgcttcaactagcgg

SEQ ID NO: 2667921 - DNA, 25 bp, Homo sapien
gcttctgtaactagtgcttcaacta

SEQ ID NO: 2667922 - DNA, 25 bp, Homo sapien
ttctgtaactagtgcttcaactagc

SEQ ID NO: 2667923 - DNA, 25 bp, Homo sapien
atgcttctgtaactagtgcttcaac

SEQ ID NO: 2667924 - DNA, 25 bp, Homo sapien
caaggaacttaagttctggatggtt

SEQ ID NO: 2667925 - DNA, 25 bp, Homo sapien
gaacttaagttctggatggtttcca

SEQ ID NO: 2667926 - DNA, 25 bp, Homo sapien
acagacaaggaacttaagttctgga

SEQ ID NO: 2667927 - DNA, 25 bp, Homo sapien
taagttctggatggtttccaagttc

SEQ ID NO: 2667928 - DNA, 25 bp, Homo sapien
cgttggttagctcctctgacatcaa

SEQ ID NO: 2667929 - DNA, 25 bp, Homo sapien
gaagaaactgtaccattctttttgc

SEQ ID NO: 2667930 - DNA, 25 bp, Homo sapien
ggttgataatgatatctaaagtttc

SEQ ID NO: 2667931 - DNA, 25 bp, Homo sapien
tcgttggttagctcctctgacatca

SEQ ID NO: 2667932 - DNA, 25 bp, Homo sapien
tatacctaagtagaaattaagatgt

SEQ ID NO: 2667933 - DNA, 25 bp, Homo sapien
tcgagaaaccatgggatctgaaact

SEQ ID NO: 2667934 - DNA, 25 bp, Homo sapien
tatttagttccataagacaaaactg

SEQ ID NO: 2667935 - DNA, 25 bp, Homo sapien
tgctgacagaagcagtcgagaaacc

SEQ ID NO: 2667936 - DNA, 25 bp, Homo sapien
cattcatgccagcaatacctttatt

SEQ ID NO: 2667937 - DNA, 25 bp, Homo sapien
tatggcttccataaagaagagattt

SEQ ID NO: 2667938 - DNA, 25 bp, Homo sapien
aaatctactgtatggtaataaggag

SEQ ID NO: 2667939 - DNA, 25 bp, Homo sapien
tatggtaataaggagtaagaactga

SEQ ID NO: 2667940 - DNA, 25 bp, Homo sapien
actcaaaatctactgtatggtaata

SEQ ID NO: 2667941 - DNA, 25 bp, Homo sapien
tgtccactccacactcattcataaa

SEQ ID NO: 2667942 - DNA, 25 bp, Homo sapien
gtccactccacactcattcataaaa

SEQ ID NO: 2667943 - DNA, 25 bp, Homo sapien
tccactccacactcattcataaaag

SEQ ID NO: 2667944 - DNA, 25 bp, Homo sapien
tacagcaactagtttttagaggcag

SEQ ID NO: 2667945 - DNA, 25 bp, Homo sapien
taccccaagtagatactgtctgcca

SEQ ID NO: 2667946 - DNA, 25 bp, Homo sapien
ccatatttaggacagcacattgatt

SEQ ID NO: 2667947 - DNA, 25 bp, Homo sapien
caatatgttcaattcaaggcccctg

SEQ ID NO: 2667948 - DNA, 25 bp, Homo sapien
tgctccaggctttgtcgataatgaa

SEQ ID NO: 2667949 - DNA, 25 bp, Homo sapien
cagtcagttcccgaaagagttgtag

SEQ ID NO: 2667950 - DNA, 25 bp, Homo sapien
taggtaactagttttcacttgccac

SEQ ID NO: 2667951 - DNA, 25 bp, Homo sapien
aattgcttccgacaaagggataatg

SEQ ID NO: 2667952 - DNA, 25 bp, Homo sapien
tttggccactcttgattcctgagta

SEQ ID NO: 2667953 - DNA, 25 bp, Homo sapien
ctaccaatgatcaacgagtttccta

SEQ ID NO: 2667954 - DNA, 25 bp, Homo sapien
tgagtactgtttccgtagttctggg

SEQ ID NO: 2667955 - DNA, 25 bp, Homo sapien
ctcccattggcagcgtttggccact

SEQ ID NO: 2667956 - DNA, 25 bp, Homo sapien
ccgtgactcggcgttgtgccgagtt

SEQ ID NO: 2667957 - DNA, 25 bp, Homo sapien
tgactcggcgttgtgccgagtttct

SEQ ID NO: 2667958 - DNA, 25 bp, Homo sapien
tgtaccgtgactcggcgttgtgccg

SEQ ID NO: 2667959 - DNA, 25 bp, Homo sapien
cgtgtaccgtgactcggcgttgtgc

SEQ ID NO: 2667960 - DNA, 25 bp, Homo sapien
cgacttggaactcgacctcgggtca

SEQ ID NO: 2667961 - DNA, 25 bp, Homo sapien
actcgacctcgggtcaccaagtgtc

SEQ ID NO: 2667962 - DNA, 25 bp, Homo sapien
cgtcttatccactcgcaaaatctgt

SEQ ID NO: 2667963 - DNA, 25 bp, Homo sapien
gcaaaatctgtctccgacttggaac

SEQ ID NO: 2667964 - DNA, 25 bp, Homo sapien
tggaaccagaaggagtccccatcaa

SEQ ID NO: 2667965 - DNA, 25 bp, Homo sapien
tgatattaatggctggccggggctc

SEQ ID NO: 2667966 - DNA, 25 bp, Homo sapien
agatcagcaccggaggtggaagact

SEQ ID NO: 2667967 - DNA, 25 bp, Homo sapien
ggctctgtgcagcattatggccagc

SEQ ID NO: 2667968 - DNA, 25 bp, Homo sapien
gagccgtcgccagggtggtaatacc

SEQ ID NO: 2667969 - DNA, 25 bp, Homo sapien
gaagcgatagtaccatttccgggtg

SEQ ID NO: 2667970 - DNA, 25 bp, Homo sapien
taatacctggtgcagagcttgagtc

SEQ ID NO: 2667971 - DNA, 25 bp, Homo sapien
tttccgggtggttgtcagtgacgct

SEQ ID NO: 2667972 - DNA, 25 bp, Homo sapien
tcgggagagctggaacgaactgcag

SEQ ID NO: 2667973 - DNA, 25 bp, Homo sapien
aagcgcgagagccagacaccgctgc

SEQ ID NO: 2667974 - DNA, 25 bp, Homo sapien
acactgtgtcttcctagctgagccc

SEQ ID NO: 2667975 - DNA, 25 bp, Homo sapien
tcacagccgggaggcagaaacttcg

SEQ ID NO: 2667976 - DNA, 25 bp, Homo sapien
ctcggtggcagtccccgcagcggca

SEQ ID NO: 2667977 - DNA, 25 bp, Homo sapien
tagcgccttccaggcggcgggccga

SEQ ID NO: 2667978 - DNA, 25 bp, Homo sapien
agtggctcagcccagtactgcagag

SEQ ID NO: 2667979 - DNA, 25 bp, Homo sapien
gcagagctgcgcaagcagaagcggg

SEQ ID NO: 2667980 - DNA, 25 bp, Homo sapien
cgcagacgctaagttatggaaagca

SEQ ID NO: 2667981 - DNA, 25 bp, Homo sapien
gtatcaggatgaggcgtccccatgg

SEQ ID NO: 2667982 - DNA, 25 bp, Homo sapien
ttcttcgtcacaggaaagtgggcct

SEQ ID NO: 2667983 - DNA, 25 bp, Homo sapien
cagccaccttcgcagacgctaagtt

SEQ ID NO: 2667984 - DNA, 25 bp, Homo sapien
tgtatgtttgtgtttaaaggcctat

SEQ ID NO: 2667985 - DNA, 25 bp, Homo sapien
gataggatcactgccgttttagcag

SEQ ID NO: 2667986 - DNA, 25 bp, Homo sapien
cccttcagcgaaaagtgtatgtgtg

SEQ ID NO: 2667987 - DNA, 25 bp, Homo sapien
tatagcagtcagagataggatcact

SEQ ID NO: 2667988 - DNA, 25 bp, Homo sapien
agaagcagtaattagtccctctgat

SEQ ID NO: 2667989 - DNA, 25 bp, Homo sapien
agtccctctgatgacaaatttagcg

SEQ ID NO: 2667990 - DNA, 25 bp, Homo sapien
gtaattagtccctctgatgacaaat

SEQ ID NO: 2667991 - DNA, 25 bp, Homo sapien
gcagtaattagtccctctgatgaca

SEQ ID NO: 2667992 - DNA, 25 bp, Homo sapien
ctggatgatatgctttggggtacca

SEQ ID NO: 2667993 - DNA, 25 bp, Homo sapien
tatgctttggggtaccatcttccat

SEQ ID NO: 2667994 - DNA, 25 bp, Homo sapien
atatgctttggggtaccatcttcca

SEQ ID NO: 2667995 - DNA, 25 bp, Homo sapien
gatgatatgctttggggtaccatct

SEQ ID NO: 2667996 - DNA, 25 bp, Homo sapien
agtaatttgactagcgcttcttttt

SEQ ID NO: 2667997 - DNA, 25 bp, Homo sapien
taatttgactagcgcttctttttct

SEQ ID NO: 2667998 - DNA, 25 bp, Homo sapien
aaaagtaatttgactagcgcttctt

SEQ ID NO: 2667999 - DNA, 25 bp, Homo sapien
cttaataaaagtgcaatctagtttt

SEQ ID NO: 2668000 - DNA, 25 bp, Homo sapien
aagtaagactccctttatgacacat

SEQ ID NO: 2668001 - DNA, 25 bp, Homo sapien
taaagtaagactccctttatgacac

SEQ ID NO: 2668002 - DNA, 25 bp, Homo sapien
tactaaagtaagactccctttatga

SEQ ID NO: 2668003 - DNA, 25 bp, Homo sapien
ctaaagtaagactccctttatgaca

SEQ ID NO: 2668004 - DNA, 25 bp, Homo sapien
tcactcttacataggcgttcagcta

SEQ ID NO: 2668005 - DNA, 25 bp, Homo sapien
tacataggcgttcagctataagatg

SEQ ID NO: 2668006 - DNA, 25 bp, Homo sapien
tttcactcttacataggcgttcagc

SEQ ID NO: 2668007 - DNA, 25 bp, Homo sapien
cgttcagctataagatgtgtacaat

SEQ ID NO: 2668008 - DNA, 25 bp, Homo sapien
catttgaggtgaataacgggaatct

SEQ ID NO: 2668009 - DNA, 25 bp, Homo sapien
agcaccagtgcgtttcagttcttca

SEQ ID NO: 2668010 - DNA, 25 bp, Homo sapien
tctaacaaggaggacaactttccat

SEQ ID NO: 2668011 - DNA, 25 bp, Homo sapien
ccatctgtggaaggctcctggagca

SEQ ID NO: 2668012 - DNA, 25 bp, Homo sapien
aaaatcccctagatactgaattgga

SEQ ID NO: 2668013 - DNA, 25 bp, Homo sapien
cattactggcaatcacatgagttat

SEQ ID NO: 2668014 - DNA, 25 bp, Homo sapien
gatactgaattggataaaatggagc

SEQ ID NO: 2668015 - DNA, 25 bp, Homo sapien
ctttctcagctttaattcttgcatt

SEQ ID NO: 2668016 - DNA, 25 bp, Homo sapien
atgttcagtccaaacagaattggtt

SEQ ID NO: 2668017 - DNA, 25 bp, Homo sapien
tatgttcagtccaaacagaattggt

SEQ ID NO: 2668018 - DNA, 25 bp, Homo sapien
taattaccatgtgttgagaacgcac

SEQ ID NO: 2668019 - DNA, 25 bp, Homo sapien
cccagagacataggacaatttccta

SEQ ID NO: 2668020 - DNA, 25 bp, Homo sapien
tatatattgtgctctcaggtaagaa

SEQ ID NO: 2668021 - DNA, 25 bp, Homo sapien
caatttcctaacatgttcaagtcac

SEQ ID NO: 2668022 - DNA, 25 bp, Homo sapien
tcttttttgtgatgttgaatcaaaa

SEQ ID NO: 2668023 - DNA, 25 bp, Homo sapien
ttttttgtgatgttgaatcaaaata

SEQ ID NO: 2668024 - DNA, 25 bp, Homo sapien
ttttgtgatgttgaatcaaaataga

SEQ ID NO: 2668025 - DNA, 25 bp, Homo sapien
cttttttgtgatgttgaatcaaaat

SEQ ID NO: 2668026 - DNA, 25 bp, Homo sapien
tcaaatctttactggaaccactgaa

SEQ ID NO: 2668027 - DNA, 25 bp, Homo sapien
tatatatgtgccttcttaaggtact

SEQ ID NO: 2668028 - DNA, 25 bp, Homo sapien
catgttcaacgcctttcttgcaatt

SEQ ID NO: 2668029 - DNA, 25 bp, Homo sapien
caaagtataactcctctgaatatct

SEQ ID NO: 2668030 - DNA, 25 bp, Homo sapien
tttcttgcgttttctcctcaaagta

SEQ ID NO: 2668031 - DNA, 25 bp, Homo sapien
tgctcctgccaacatatgtactttc

SEQ ID NO: 2668032 - DNA, 25 bp, Homo sapien
tgttgccatggtcatacaaaacaaa

SEQ ID NO: 2668033 - DNA, 25 bp, Homo sapien
ttttatttgctcctgccaacatatg

SEQ ID NO: 2668034 - DNA, 25 bp, Homo sapien
gttgccatggtcatacaaaacaaaa

SEQ ID NO: 2668035 - DNA, 25 bp, Homo sapien
atccacatctgtcttaatagccatg

SEQ ID NO: 2668036 - DNA, 25 bp, Homo sapien
tctatatatgtgcttccttaaggta

SEQ ID NO: 2668037 - DNA, 25 bp, Homo sapien
tctttggcatattcagcaaaaatag

SEQ ID NO: 2668038 - DNA, 25 bp, Homo sapien
tcttaatagccatggcttttgattc

SEQ ID NO: 2668039 - DNA, 25 bp, Homo sapien
tacactggttgtttatctattctaa

SEQ ID NO: 2668040 - DNA, 25 bp, Homo sapien
ctctacgttgtacactggttgttta

SEQ ID NO: 2668041 - DNA, 25 bp, Homo sapien
tatctattctaatgcagttgtatct

SEQ ID NO: 2668042 - DNA, 25 bp, Homo sapien
ttctaatgcagttgtatctgacagc

SEQ ID NO: 2668043 - DNA, 25 bp, Homo sapien
accaatgctgctccaagccccttac

SEQ ID NO: 2668044 - DNA, 25 bp, Homo sapien
tcaccaatgctgctccaagcccctt

SEQ ID NO: 2668045 - DNA, 25 bp, Homo sapien
caccaatgctgctccaagcccctta

SEQ ID NO: 2668046 - DNA, 25 bp, Homo sapien
taatacacctctgggaaattcagca

SEQ ID NO: 2668047 - DNA, 25 bp, Homo sapien
tctctagaagggcatgaagaacgca

SEQ ID NO: 2668048 - DNA, 25 bp, Homo sapien
gggatataatgtgcctgcaaagtgg

SEQ ID NO: 2668049 - DNA, 25 bp, Homo sapien
ctgtagaacgttctctagaagggca

SEQ ID NO: 2668050 - DNA, 25 bp, Homo sapien
taaggacttctactaaagaccatgc

SEQ ID NO: 2668051 - DNA, 25 bp, Homo sapien
tctcgacatggctggagacttccaa

SEQ ID NO: 2668052 - DNA, 25 bp, Homo sapien
catgctcctttcatacaagttggac

SEQ ID NO: 2668053 - DNA, 25 bp, Homo sapien
gacttccaaggaggatgcaggtgaa

SEQ ID NO: 2668054 - DNA, 25 bp, Homo sapien
tgagtagcgtcaggtggagcacctt

SEQ ID NO: 2668055 - DNA, 25 bp, Homo sapien
gaaaaatttgagtagcgtcaggtgg

SEQ ID NO: 2668056 - DNA, 25 bp, Homo sapien
aatttgagtagcgtcaggtggagca

SEQ ID NO: 2668057 - DNA, 25 bp, Homo sapien
aaagaaaaatttgagtagcgtcagg

SEQ ID NO: 2668058 - DNA, 25 bp, Homo sapien
actggtttggtcaaaagcccagagg

SEQ ID NO: 2668059 - DNA, 25 bp, Homo sapien
tttccttgtgagaatatatagtcca

SEQ ID NO: 2668060 - DNA, 25 bp, Homo sapien
agaatatatagtccattccaaaagc

SEQ ID NO: 2668061 - DNA, 25 bp, Homo sapien
tttcaagaagcattgcctttcctgt

SEQ ID NO: 2668062 - DNA, 25 bp, Homo sapien
taattccaaagggagatcattctga

SEQ ID NO: 2668063 - DNA, 25 bp, Homo sapien
gcaaccaaaatgtgccaaagttatg

SEQ ID NO: 2668064 - DNA, 25 bp, Homo sapien
tgaatgatgtaacgcaaaaaaggag

SEQ ID NO: 2668065 - DNA, 25 bp, Homo sapien
cagagcactctaggttaaagtacca

SEQ ID NO: 2668066 - DNA, 25 bp, Homo sapien
ggagctactcagatacctgacttcg

SEQ ID NO: 2668067 - DNA, 25 bp, Homo sapien
ccggcctcaattgaacccacttaga

SEQ ID NO: 2668068 - DNA, 25 bp, Homo sapien
agtgaggtactcaagggagctactc

SEQ ID NO: 2668069 - DNA, 25 bp, Homo sapien
tatgaggaagtgctaggccaaaatc

SEQ ID NO: 2668070 - DNA, 25 bp, Homo sapien
gactagggtctagtgctagtctcca

SEQ ID NO: 2668071 - DNA, 25 bp, Homo sapien
tcggcaggactagggtctagtgcta

SEQ ID NO: 2668072 - DNA, 25 bp, Homo sapien
tggtgtgatcggcaggactagggtc

SEQ ID NO: 2668073 - DNA, 25 bp, Homo sapien
agtgctagtctccagaaaacactgc

SEQ ID NO: 2668074 - DNA, 25 bp, Homo sapien
cagttgcggctatatggcatgggaa

SEQ ID NO: 2668075 - DNA, 25 bp, Homo sapien
agaaagtggtgtacttcttcggaca

SEQ ID NO: 2668076 - DNA, 25 bp, Homo sapien
taggacagctgagtttaagccttgc

SEQ ID NO: 2668077 - DNA, 25 bp, Homo sapien
tcttcggacatgatcagcgaccaag

SEQ ID NO: 2668078 - DNA, 25 bp, Homo sapien
catcaagggcagcatactgcattcg

SEQ ID NO: 2668079 - DNA, 25 bp, Homo sapien
tctgttgtcctatcacatcaagggc

SEQ ID NO: 2668080 - DNA, 25 bp, Homo sapien
tcgtgtagggctagacattagaatc

SEQ ID NO: 2668081 - DNA, 25 bp, Homo sapien
ccagaacagtgtttatggaaggaaa

SEQ ID NO: 2668082 - DNA, 25 bp, Homo sapien
tgagaaaatacctggtttttgtaga

SEQ ID NO: 2668083 - DNA, 25 bp, Homo sapien
tctccacatgacaaaagagttaaca

SEQ ID NO: 2668084 - DNA, 25 bp, Homo sapien
taagaaccctagctaactaattctc

SEQ ID NO: 2668085 - DNA, 25 bp, Homo sapien
ccaataccatcaagtttgttaggaa

SEQ ID NO: 2668086 - DNA, 25 bp, Homo sapien
caataatctattgctgctccaagaa

SEQ ID NO: 2668087 - DNA, 25 bp, Homo sapien
ctgctccaagaattccagccaataa

SEQ ID NO: 2668088 - DNA, 25 bp, Homo sapien
aaaatccaataatctattgctgctc

SEQ ID NO: 2668089 - DNA, 25 bp, Homo sapien
tccaataatctattgctgctccaag

SEQ ID NO: 2668090 - DNA, 25 bp, Homo sapien
acataacttcctaagtcatcagaca

SEQ ID NO: 2668091 - DNA, 25 bp, Homo sapien
catcacacgaaagagaaacataact

SEQ ID NO: 2668092 - DNA, 25 bp, Homo sapien
cacacgaaagagaaacataacttcc

SEQ ID NO: 2668093 - DNA, 25 bp, Homo sapien
cataacttcctaagtcatcagacat

SEQ ID NO: 2668094 - DNA, 25 bp, Homo sapien
caaccaagaggatatcaaaaaagct

SEQ ID NO: 2668095 - DNA, 25 bp, Homo sapien
gggtggaattctttcagcgtgaaga

SEQ ID NO: 2668096 - DNA, 25 bp, Homo sapien
tataaggcataaaagctggcctctc

SEQ ID NO: 2668097 - DNA, 25 bp, Homo sapien
aggcccaggacgctgcaatacacag

SEQ ID NO: 2668098 - DNA, 25 bp, Homo sapien
gaaaatctctaattcctgtgaagaa

SEQ ID NO: 2668099 - DNA, 25 bp, Homo sapien
ggaaaaggagcaaatgaaaatctct

SEQ ID NO: 2668100 - DNA, 25 bp, Homo sapien
aatgaaaatctctaattcctgtgaa

SEQ ID NO: 2668101 - DNA, 25 bp, Homo sapien
aacaaacatttgaagccaggaggag

SEQ ID NO: 2668102 - DNA, 25 bp, Homo sapien
cattttctgaagagagagtggctca

SEQ ID NO: 2668103 - DNA, 25 bp, Homo sapien
gctctgtagacacaactttttaaag

SEQ ID NO: 2668104 - DNA, 25 bp, Homo sapien
gagtcaaaacaaggccgctgtccta

SEQ ID NO: 2668105 - DNA, 25 bp, Homo sapien
gcattagtaaggttctctgagagtc

SEQ ID NO: 2668106 - DNA, 25 bp, Homo sapien
ccccaaggctggtaaataggaatat

SEQ ID NO: 2668107 - DNA, 25 bp, Homo sapien
gtaactctggcagcccttcgacttg

SEQ ID NO: 2668108 - DNA, 25 bp, Homo sapien
ctacagaggggcaattctccttgga

SEQ ID NO: 2668109 - DNA, 25 bp, Homo sapien
taatgatgaggaacatttagcaagg

SEQ ID NO: 2668110 - DNA, 25 bp, Homo sapien
tctccttggaacatgacaattctcc

SEQ ID NO: 2668111 - DNA, 25 bp, Homo sapien
aattcatctttttaactacagaggg

SEQ ID NO: 2668112 - DNA, 25 bp, Homo sapien
tccacttggttatttatgcaagctc

SEQ ID NO: 2668113 - DNA, 25 bp, Homo sapien
cacttggttatttatgcaagctcta

SEQ ID NO: 2668114 - DNA, 25 bp, Homo sapien
tggttatttatgcaagctctatgca

SEQ ID NO: 2668115 - DNA, 25 bp, Homo sapien
cttggttatttatgcaagctctatg

SEQ ID NO: 2668116 - DNA, 25 bp, Homo sapien
ggcttcatgcaaaggcgtccagcca

SEQ ID NO: 2668117 - DNA, 25 bp, Homo sapien
gatctacctctggacaacgttgcaa

SEQ ID NO: 2668118 - DNA, 25 bp, Homo sapien
cacacactgtgttgccatagttaca

SEQ ID NO: 2668119 - DNA, 25 bp, Homo sapien
agtgcatcatgcaaaggagtcaccc

SEQ ID NO: 2668120 - DNA, 25 bp, Homo sapien
gctttcagaaatgactggctcacaa

SEQ ID NO: 2668121 - DNA, 25 bp, Homo sapien
tcagcaggaaaaacgcagatgaata

SEQ ID NO: 2668122 - DNA, 25 bp, Homo sapien
taaaagcaccaatccgttttgaaca

SEQ ID NO: 2668123 - DNA, 25 bp, Homo sapien
aattggctgcaaaatgtgaatgacg

SEQ ID NO: 2668124 - DNA, 25 bp, Homo sapien
gatccagtaaccagtcagtatgaac

SEQ ID NO: 2668125 - DNA, 25 bp, Homo sapien
cacataatccaagggcaattctccc

SEQ ID NO: 2668126 - DNA, 25 bp, Homo sapien
tcatcaaggcctcagtgtgtacccc

SEQ ID NO: 2668127 - DNA, 25 bp, Homo sapien
tagatgagttaaccctttggaagct

SEQ ID NO: 2668128 - DNA, 25 bp, Homo sapien
caaggctgcaaagtctgtcaataaa

SEQ ID NO: 2668129 - DNA, 25 bp, Homo sapien
tgtcagtaagctatgaagtccacag

SEQ ID NO: 2668130 - DNA, 25 bp, Homo sapien
gaagcccatactagagttttgtaga

SEQ ID NO: 2668131 - DNA, 25 bp, Homo sapien
aattctacaccctggaaaaagtcag

SEQ ID NO: 2668132 - DNA, 25 bp, Homo sapien
ggagctacaagtttataggtacgca

SEQ ID NO: 2668133 - DNA, 25 bp, Homo sapien
gattctaagacctagaacatctaga

SEQ ID NO: 2668134 - DNA, 25 bp, Homo sapien
tatttcagtccaacaacctagagag

SEQ ID NO: 2668135 - DNA, 25 bp, Homo sapien
aaatccatccctaagagtcaggagc

SEQ ID NO: 2668136 - DNA, 25 bp, Homo sapien
gtttaccaagcaaacactatcccag

SEQ ID NO: 2668137 - DNA, 25 bp, Homo sapien
acagaatactgggttacatagggca

SEQ ID NO: 2668138 - DNA, 25 bp, Homo sapien
gaagaaactccaatctcaaaagtgg

SEQ ID NO: 2668139 - DNA, 25 bp, Homo sapien
catagggcagcgacagatacatttt

SEQ ID NO: 2668140 - DNA, 25 bp, Homo sapien
cagtaacctatgtttgccacgttgg

SEQ ID NO: 2668141 - DNA, 25 bp, Homo sapien
ttcttaaaggcagagacctcagtga

SEQ ID NO: 2668142 - DNA, 25 bp, Homo sapien
gatatcacatctggcaaaatacagt

SEQ ID NO: 2668143 - DNA, 25 bp, Homo sapien
ggtattgttagccagggcacagaac

SEQ ID NO: 2668144 - DNA, 25 bp, Homo sapien
tgcctcagggaaagagtgcctcatg

SEQ ID NO: 2668145 - DNA, 25 bp, Homo sapien
tgattaaggagcaacagtgacaggc

SEQ ID NO: 2668146 - DNA, 25 bp, Homo sapien
cacgtcagcaggaggtgcaattggc

SEQ ID NO: 2668147 - DNA, 25 bp, Homo sapien
tatttaccttcctagactgtgggcc

SEQ ID NO: 2668148 - DNA, 25 bp, Homo sapien
ggtcttgaacgttatcaccacaaag

SEQ ID NO: 2668149 - DNA, 25 bp, Homo sapien
agaggatggtctgaagggctacaaa

SEQ ID NO: 2668150 - DNA, 25 bp, Homo sapien
cctgtgagaaaggactgagtattac

SEQ ID NO: 2668151 - DNA, 25 bp, Homo sapien
ttcaagatagctagaaaagtgggtc

SEQ ID NO: 2668152 - DNA, 25 bp, Homo sapien
tccacatagtatccacatgagcaag

SEQ ID NO: 2668153 - DNA, 25 bp, Homo sapien
tctcagaattctctcaacagagggt

SEQ ID NO: 2668154 - DNA, 25 bp, Homo sapien
gagctgtggtaagacactctcagaa

SEQ ID NO: 2668155 - DNA, 25 bp, Homo sapien
gcaaaataatatgctctggagagct

SEQ ID NO: 2668156 - DNA, 25 bp, Homo sapien
tacaaacttcagtttccattaacag

SEQ ID NO: 2668157 - DNA, 25 bp, Homo sapien
caaacttcagtttccattaacagag

SEQ ID NO: 2668158 - DNA, 25 bp, Homo sapien
tggccttaaactcttacaaacttca

SEQ ID NO: 2668159 - DNA, 25 bp, Homo sapien
aactcttacaaacttcagtttccat

SEQ ID NO: 2668160 - DNA, 25 bp, Homo sapien
gaaaatgttaccctctggtacctca

SEQ ID NO: 2668161 - DNA, 25 bp, Homo sapien
gcaatttgaatagaggcagtcacat

SEQ ID NO: 2668162 - DNA, 25 bp, Homo sapien
tatagtggcaatttgaatagaggca

SEQ ID NO: 2668163 - DNA, 25 bp, Homo sapien
gatttacttcagctgaatggctaaa

SEQ ID NO: 2668164 - DNA, 25 bp, Homo sapien
gctgcaattctgtcttgagagctgc

SEQ ID NO: 2668165 - DNA, 25 bp, Homo sapien
gggtgagcaaccaatgacattaaca

SEQ ID NO: 2668166 - DNA, 25 bp, Homo sapien
cattaacagaggaataagaactagc

SEQ ID NO: 2668167 - DNA, 25 bp, Homo sapien
tagaaactactacattcacaggctg

SEQ ID NO: 2668168 - DNA, 25 bp, Homo sapien
ttcagctggagtttgtgacagggag

SEQ ID NO: 2668169 - DNA, 25 bp, Homo sapien
gtcagggaagatcctcctccaagtt

SEQ ID NO: 2668170 - DNA, 25 bp, Homo sapien
agctgtcagggaagatcctcctcca

SEQ ID NO: 2668171 - DNA, 25 bp, Homo sapien
tcctcctccaagttagttcagctgg

SEQ ID NO: 2668172 - DNA, 25 bp, Homo sapien
gaaagagcagttgcataaagaacct

SEQ ID NO: 2668173 - DNA, 25 bp, Homo sapien
aagagcagttgcataaagaacctac

SEQ ID NO: 2668174 - DNA, 25 bp, Homo sapien
agaaagagcagttgcataaagaacc

SEQ ID NO: 2668175 - DNA, 25 bp, Homo sapien
ggagaaagagcagttgcataaagaa

SEQ ID NO: 2668176 - DNA, 25 bp, Homo sapien
tactgcattccgctgagatacattg

SEQ ID NO: 2668177 - DNA, 25 bp, Homo sapien
gccatcctgtactgcattccgctga

SEQ ID NO: 2668178 - DNA, 25 bp, Homo sapien
attccgctgagatacattgtccttg

SEQ ID NO: 2668179 - DNA, 25 bp, Homo sapien
ctgtgtgttcacagccatcctgtac

SEQ ID NO: 2668180 - DNA, 25 bp, Homo sapien
cactcttaagaagtaccagactgga

SEQ ID NO: 2668181 - DNA, 25 bp, Homo sapien
ccctggaggctctacacagtgtttc

SEQ ID NO: 2668182 - DNA, 25 bp, Homo sapien
tgacccagtcctctacgttaccaat

SEQ ID NO: 2668183 - DNA, 25 bp, Homo sapien
tatttatatgcccaaccctggaggc

SEQ ID NO: 2668184 - DNA, 25 bp, Homo sapien
tccccattgagtgctgtctttcttt

SEQ ID NO: 2668185 - DNA, 25 bp, Homo sapien
gctgatacctgacagaaacatctca

SEQ ID NO: 2668186 - DNA, 25 bp, Homo sapien
gtacacagtgtgctgatacctgaca

SEQ ID NO: 2668187 - DNA, 25 bp, Homo sapien
cttttatctggggtacacagtgtgc

SEQ ID NO: 2668188 - DNA, 25 bp, Homo sapien
gtcctccacacgctatccactgaaa

SEQ ID NO: 2668189 - DNA, 25 bp, Homo sapien
cgctatccactgaaacagtgtgaag

SEQ ID NO: 2668190 - DNA, 25 bp, Homo sapien
actgaaacagtgtgaagccctcaat

SEQ ID NO: 2668191 - DNA, 25 bp, Homo sapien
gaaacagtgtgaagccctcaatttg

SEQ ID NO: 2668192 - DNA, 25 bp, Homo sapien
catctcgtgcctttcatgttgtaag

SEQ ID NO: 2668193 - DNA, 25 bp, Homo sapien
acagatttgaatccttgggcataca

SEQ ID NO: 2668194 - DNA, 25 bp, Homo sapien
tggatttcagaagactattcccgta

SEQ ID NO: 2668195 - DNA, 25 bp, Homo sapien
tatttccacatgtctaggtgctgag

SEQ ID NO: 2668196 - DNA, 25 bp, Homo sapien
ttagaacatattggttggaaagaag

SEQ ID NO: 2668197 - DNA, 25 bp, Homo sapien
gttggaaagaagtcatacttgtagc

SEQ ID NO: 2668198 - DNA, 25 bp, Homo sapien
gaagtcatacttgtagctttgaaga

SEQ ID NO: 2668199 - DNA, 25 bp, Homo sapien
gctttgaagaaataacaccgtccta

SEQ ID NO: 2668200 - DNA, 25 bp, Homo sapien
gtgacggtgacctgtgagccccatt

SEQ ID NO: 2668201 - DNA, 25 bp, Homo sapien
gagccccattcttctgtgggataag

SEQ ID NO: 2668202 - DNA, 25 bp, Homo sapien
aaatctatgccatccaggaggtatg

SEQ ID NO: 2668203 - DNA, 25 bp, Homo sapien
cagtgtccagaacatcctagatgaa

SEQ ID NO: 2668204 - DNA, 25 bp, Homo sapien
cacaaatccatgatgctgggtcccc

SEQ ID NO: 2668205 - DNA, 25 bp, Homo sapien
agcacaaatccatgatgctgggtcc

SEQ ID NO: 2668206 - DNA, 25 bp, Homo sapien
caaatccatgatgctgggtcccctt

SEQ ID NO: 2668207 - DNA, 25 bp, Homo sapien
aatccatgatgctgggtccccttcc

SEQ ID NO: 2668208 - DNA, 25 bp, Homo sapien
tcattgctcacaaatctcaagtgca

SEQ ID NO: 2668209 - DNA, 25 bp, Homo sapien
caaatctcaagtgcatccagcattc

SEQ ID NO: 2668210 - DNA, 25 bp, Homo sapien
gctcacaaatctcaagtgcatccag

SEQ ID NO: 2668211 - DNA, 25 bp, Homo sapien
caagtgcatccagcattctctgctg

SEQ ID NO: 2668212 - DNA, 25 bp, Homo sapien
atttatggccgttttctcttgcttg

SEQ ID NO: 2668213 - DNA, 25 bp, Homo sapien
catttatggccgttttctcttgctt

SEQ ID NO: 2668214 - DNA, 25 bp, Homo sapien
ccatttatggccgttttctcttgct

SEQ ID NO: 2668215 - DNA, 25 bp, Homo sapien
cacttatttgagctgcagttgaacc

SEQ ID NO: 2668216 - DNA, 25 bp, Homo sapien
tgaaattagtgctcccataagtggt

SEQ ID NO: 2668217 - DNA, 25 bp, Homo sapien
tcttgatggttctccaaagcgtcca

SEQ ID NO: 2668218 - DNA, 25 bp, Homo sapien
catatgtctgccaaagggtcttatc

SEQ ID NO: 2668219 - DNA, 25 bp, Homo sapien
gtttattggctatccttttactcaa

SEQ ID NO: 2668220 - DNA, 25 bp, Homo sapien
gagtttattggctatccttttactc

SEQ ID NO: 2668221 - DNA, 25 bp, Homo sapien
ccttttactcaattctcaaactgca

SEQ ID NO: 2668222 - DNA, 25 bp, Homo sapien
ttttactcaattctcaaactgcagt

SEQ ID NO: 2668223 - DNA, 25 bp, Homo sapien
tggccactgtttgttcttcacgcct

SEQ ID NO: 2668224 - DNA, 25 bp, Homo sapien
gccactgtttgttcttcacgcctca

SEQ ID NO: 2668225 - DNA, 25 bp, Homo sapien
tgtttgttcttcacgcctcagtctg

SEQ ID NO: 2668226 - DNA, 25 bp, Homo sapien
gttcttcacgcctcagtctgttgct

SEQ ID NO: 2668227 - DNA, 25 bp, Homo sapien
gtgctggaagaggggcctttcaccc

SEQ ID NO: 2668228 - DNA, 25 bp, Homo sapien
ctgagaaaggtgctggaagaggggc

SEQ ID NO: 2668229 - DNA, 25 bp, Homo sapien
gagaaaggtgctggaagaggggcct

SEQ ID NO: 2668230 - DNA, 25 bp, Homo sapien
ctggaagaggggcctttcaccctgg

SEQ ID NO: 2668231 - DNA, 25 bp, Homo sapien
caaggctgtactcttatggggtgca

SEQ ID NO: 2668232 - DNA, 25 bp, Homo sapien
tgggatggtcttcggggctcctcca

SEQ ID NO: 2668233 - DNA, 25 bp, Homo sapien
tggctgtagcccctgcaaggctgta

SEQ ID NO: 2668234 - DNA, 25 bp, Homo sapien
acttgtaggcaagccggttggcgtc

SEQ ID NO: 2668235 - DNA, 25 bp, Homo sapien
ttgaggtctgagtgtgatgcatggt

SEQ ID NO: 2668236 - DNA, 25 bp, Homo sapien
gaggtctgagtgtgatgcatggtgt

SEQ ID NO: 2668237 - DNA, 25 bp, Homo sapien
tgaggtctgagtgtgatgcatggtg

SEQ ID NO: 2668238 - DNA, 25 bp, Homo sapien
cactgaggacagatgtgcagcgtgg

SEQ ID NO: 2668239 - DNA, 25 bp, Homo sapien
agcactgaggacagatgtgcagcgt

SEQ ID NO: 2668240 - DNA, 25 bp, Homo sapien
tgtgcagcgtggtggaagagcttga

SEQ ID NO: 2668241 - DNA, 25 bp, Homo sapien
ctgaggacagatgtgcagcgtggtg

SEQ ID NO: 2668242 - DNA, 25 bp, Homo sapien
tatccgcaaagccagtactcacaga

SEQ ID NO: 2668243 - DNA, 25 bp, Homo sapien
caagcatagaagacccataaggagc

SEQ ID NO: 2668244 - DNA, 25 bp, Homo sapien
tgcaaaagctagcacagcacagctg

SEQ ID NO: 2668245 - DNA, 25 bp, Homo sapien
gacagcaattgctcgccacttggga

SEQ ID NO: 2668246 - DNA, 25 bp, Homo sapien
aaatggatgatcactcttttcttct

SEQ ID NO: 2668247 - DNA, 25 bp, Homo sapien
ccacatattcagtgctcttagcaga

SEQ ID NO: 2668248 - DNA, 25 bp, Homo sapien
catacagcctgtaaacacatctaaa

SEQ ID NO: 2668249 - DNA, 25 bp, Homo sapien
tcttcttcgtgcttatttcaacagc

SEQ ID NO: 2668250 - DNA, 25 bp, Homo sapien
tgaaaactttacaggatctccgagg

SEQ ID NO: 2668251 - DNA, 25 bp, Homo sapien
ccacagaatctttcagcatgtgtga

SEQ ID NO: 2668252 - DNA, 25 bp, Homo sapien
cgtaagtccatattgatatcccaga

SEQ ID NO: 2668253 - DNA, 25 bp, Homo sapien
cctgcatagcgcatagcactggaag

SEQ ID NO: 2668254 - DNA, 25 bp, Homo sapien
tatccagctgtgcatttgaaccggt

SEQ ID NO: 2668255 - DNA, 25 bp, Homo sapien
tccagctgtgcatttgaaccggttg

SEQ ID NO: 2668256 - DNA, 25 bp, Homo sapien
gtgtttgctggcatatccagctgtg

SEQ ID NO: 2668257 - DNA, 25 bp, Homo sapien
aattatgtgtttgctggcatatcca

SEQ ID NO: 2668258 - DNA, 25 bp, Homo sapien
catcaacaccatagacatgcagcag

SEQ ID NO: 2668259 - DNA, 25 bp, Homo sapien
gcagcattgcaaatgatacgcatgc

SEQ ID NO: 2668260 - DNA, 25 bp, Homo sapien
tctgttttgcggactaatttgagcc

SEQ ID NO: 2668261 - DNA, 25 bp, Homo sapien
gagctaattacaatgcgctcatctg

SEQ ID NO: 2668262 - DNA, 25 bp, Homo sapien
caaacttgtcacaaactttcaccat

SEQ ID NO: 2668263 - DNA, 25 bp, Homo sapien
tacaaacttgtcacaaactttcacc

SEQ ID NO: 2668264 - DNA, 25 bp, Homo sapien
acaaacttgtcacaaactttcacca

SEQ ID NO: 2668265 - DNA, 25 bp, Homo sapien
tttacaaacttgtcacaaactttca

SEQ ID NO: 2668266 - DNA, 25 bp, Homo sapien
atttttgcttctgtcaaacccatag

SEQ ID NO: 2668267 - DNA, 25 bp, Homo sapien
gcttctgtcaaacccatagaatctt

SEQ ID NO: 2668268 - DNA, 25 bp, Homo sapien
gagagagtgactcatttttgcttct

SEQ ID NO: 2668269 - DNA, 25 bp, Homo sapien
ctgagagagtgactcatttttgctt

SEQ ID NO: 2668270 - DNA, 25 bp, Homo sapien
tggaattagggttaacacctctgcc

SEQ ID NO: 2668271 - DNA, 25 bp, Homo sapien
tgaagcagagctaaactgaaacagc

SEQ ID NO: 2668272 - DNA, 25 bp, Homo sapien
tttggacaacttaaaccatatggcc

SEQ ID NO: 2668273 - DNA, 25 bp, Homo sapien
taaagtacgatgatggctgttgctg

SEQ ID NO: 2668274 - DNA, 25 bp, Homo sapien
tcaagaacagtagaacggtgcacat

SEQ ID NO: 2668275 - DNA, 25 bp, Homo sapien
ggctgtatgcaaatttaatgcccag

SEQ ID NO: 2668276 - DNA, 25 bp, Homo sapien
tcccctctgggaatctagttggatt

SEQ ID NO: 2668277 - DNA, 25 bp, Homo sapien
gtagaacggtgcacatacaggaacc

SEQ ID NO: 2668278 - DNA, 25 bp, Homo sapien
ccatctgcctgtgtctaccacattt

SEQ ID NO: 2668279 - DNA, 25 bp, Homo sapien
catctgcctgtgtctaccacatttc

SEQ ID NO: 2668280 - DNA, 25 bp, Homo sapien
tctgcctgtgtctaccacatttcat

SEQ ID NO: 2668281 - DNA, 25 bp, Homo sapien
caccatctgcctgtgtctaccacat

SEQ ID NO: 2668282 - DNA, 25 bp, Homo sapien
actttgccgtgatgacagaggtcca

SEQ ID NO: 2668283 - DNA, 25 bp, Homo sapien
tgatgactctggtgcatcttgtact

SEQ ID NO: 2668284 - DNA, 25 bp, Homo sapien
gagtagtcatcagctattggctcaa

SEQ ID NO: 2668285 - DNA, 25 bp, Homo sapien
aacactcagcaagtggtaacactga

SEQ ID NO: 2668286 - DNA, 25 bp, Homo sapien
tgaggctaccaatgtgaaaggattc

SEQ ID NO: 2668287 - DNA, 25 bp, Homo sapien
ccatcattagggtcgaagacttacc

SEQ ID NO: 2668288 - DNA, 25 bp, Homo sapien
caacattgtgtaagctctgagataa

SEQ ID NO: 2668289 - DNA, 25 bp, Homo sapien
gccgaagcacctgaagacaatatgt

SEQ ID NO: 2668290 - DNA, 25 bp, Homo sapien
aacagacgcacaagctggagttgca

SEQ ID NO: 2668291 - DNA, 25 bp, Homo sapien
gaccagaaggaacgagaggagatat

SEQ ID NO: 2668292 - DNA, 25 bp, Homo sapien
ctctgacctgtctgtcaactccctg

SEQ ID NO: 2668293 - DNA, 25 bp, Homo sapien
gggtgagggacacctggtgctgctg

SEQ ID NO: 2668294 - DNA, 25 bp, Homo sapien
aattcattggaatattcatgttcat

SEQ ID NO: 2668295 - DNA, 25 bp, Homo sapien
aattttaaattcattggaatattca

SEQ ID NO: 2668296 - DNA, 25 bp, Homo sapien
taaattcattggaatattcatgttc

SEQ ID NO: 2668297 - DNA, 25 bp, Homo sapien
tttaaattcattggaatattcatgt

SEQ ID NO: 2668298 - DNA, 25 bp, Homo sapien
gaagctatagctcatattgccaagc

SEQ ID NO: 2668299 - DNA, 25 bp, Homo sapien
tattcagttgaccagaatgcagcca

SEQ ID NO: 2668300 - DNA, 25 bp, Homo sapien
caccgtatacagctctaagttcagg

SEQ ID NO: 2668301 - DNA, 25 bp, Homo sapien
tgtagccctcggaactaagaatctg

SEQ ID NO: 2668302 - DNA, 25 bp, Homo sapien
taatcaaggagatggtggcaactgt

SEQ ID NO: 2668303 - DNA, 25 bp, Homo sapien
ggcaactgtaatcatttcctttaaa

SEQ ID NO: 2668304 - DNA, 25 bp, Homo sapien
aattaataatcaaggagatggtggc

SEQ ID NO: 2668305 - DNA, 25 bp, Homo sapien
tgataattgaagaaaagcctttaat

SEQ ID NO: 2668306 - DNA, 25 bp, Homo sapien
catttctgaagatgatggcttttgt

SEQ ID NO: 2668307 - DNA, 25 bp, Homo sapien
gatgatggcttttgtaaaatcacca

SEQ ID NO: 2668308 - DNA, 25 bp, Homo sapien
tctgaagatgatggcttttgtaaaa

SEQ ID NO: 2668309 - DNA, 25 bp, Homo sapien
gaagatgatggcttttgtaaaatca

SEQ ID NO: 2668310 - DNA, 25 bp, Homo sapien
gttgatattcaacagaggtcatgaa

SEQ ID NO: 2668311 - DNA, 25 bp, Homo sapien
ccttaatggtcctcttttgtactct

SEQ ID NO: 2668312 - DNA, 25 bp, Homo sapien
tccgtaaatattgactttcccagag

SEQ ID NO: 2668313 - DNA, 25 bp, Homo sapien
tttgtactcttttacccatgaagta

SEQ ID NO: 2668314 - DNA, 25 bp, Homo sapien
taactttcagtgtaatcacgtacat

SEQ ID NO: 2668315 - DNA, 25 bp, Homo sapien
taatttttagtgtaatgaggataac

SEQ ID NO: 2668316 - DNA, 25 bp, Homo sapien
attcaagtttacatccacacggtct

SEQ ID NO: 2668317 - DNA, 25 bp, Homo sapien
caagtttacatccacacggtcttta

SEQ ID NO: 2668318 - DNA, 25 bp, Homo sapien
tgaaactcttcaagtctactctgtg

SEQ ID NO: 2668319 - DNA, 25 bp, Homo sapien
gtgttattgctaaagaaaagtttgc

SEQ ID NO: 2668320 - DNA, 25 bp, Homo sapien
gcaagtgttgtgagaacaatatttt

SEQ ID NO: 2668321 - DNA, 25 bp, Homo sapien
ctctgtgagtctgatgtgttattgc

SEQ ID NO: 2668322 - DNA, 25 bp, Homo sapien
tgatagtactttacccacagtagag

SEQ ID NO: 2668323 - DNA, 25 bp, Homo sapien
ctttatcaactaagtcaatgaacta

SEQ ID NO: 2668324 - DNA, 25 bp, Homo sapien
taatagattcaattgttaagtaaaa

SEQ ID NO: 2668325 - DNA, 25 bp, Homo sapien
ataatactggagtattttatggcta

SEQ ID NO: 2668326 - DNA, 25 bp, Homo sapien
tttggagctattgcaggttcggttc

SEQ ID NO: 2668327 - DNA, 25 bp, Homo sapien
ccgaagtagctatgaaaaagggtat

SEQ ID NO: 2668328 - DNA, 25 bp, Homo sapien
gaattatacatacaggcctattttg

SEQ ID NO: 2668329 - DNA, 25 bp, Homo sapien
caggatgtgggaggaacccataaca

SEQ ID NO: 2668330 - DNA, 25 bp, Homo sapien
caggccttgctaactcattgtcaga

SEQ ID NO: 2668331 - DNA, 25 bp, Homo sapien
caggaggtggatacgttgagggccc

SEQ ID NO: 2668332 - DNA, 25 bp, Homo sapien
gttcctcctaccctatttgacgtca

SEQ ID NO: 2668333 - DNA, 25 bp, Homo sapien
tgagtttggatgtaactcctcctgc

SEQ ID NO: 2668334 - DNA, 25 bp, Homo sapien
gaggcaggaccaagaatagacccca

SEQ ID NO: 2668335 - DNA, 25 bp, Homo sapien
gccacatgagggatttcttgaaccc

SEQ ID NO: 2668336 - DNA, 25 bp, Homo sapien
tcttgatgaacgaggataggccaca

SEQ ID NO: 2668337 - DNA, 25 bp, Homo sapien
tagaccccagataggctgtatagca

SEQ ID NO: 2668338 - DNA, 25 bp, Homo sapien
tgctgtgcatgagcatcacacagaa

SEQ ID NO: 2668339 - DNA, 25 bp, Homo sapien
gggtgctgtgcatgagcatcacaca

SEQ ID NO: 2668340 - DNA, 25 bp, Homo sapien
tcaggggtgctgtgcatgagcatca

SEQ ID NO: 2668341 - DNA, 25 bp, Homo sapien
caggggtgctgtgcatgagcatcac

SEQ ID NO: 2668342 - DNA, 25 bp, Homo sapien
gatttgcaatattttcatgctccat

SEQ ID NO: 2668343 - DNA, 25 bp, Homo sapien
cctggatttgcaatattttcatgct

SEQ ID NO: 2668344 - DNA, 25 bp, Homo sapien
ggatttgcaatattttcatgctcca

SEQ ID NO: 2668345 - DNA, 25 bp, Homo sapien
tggatttgcaatattttcatgctcc

SEQ ID NO: 2668346 - DNA, 25 bp, Homo sapien
gtgcgaaacccagaagtgccttgct

SEQ ID NO: 2668347 - DNA, 25 bp, Homo sapien
gacaaagaagatgatgtttagagtc

SEQ ID NO: 2668348 - DNA, 25 bp, Homo sapien
ggaagtgcgaaacccagaagtgcct

SEQ ID NO: 2668349 - DNA, 25 bp, Homo sapien
acgggaagtgcgaaacccagaagtg

SEQ ID NO: 2668350 - DNA, 25 bp, Homo sapien
cggtgggcggtaattcaggccttct

SEQ ID NO: 2668351 - DNA, 25 bp, Homo sapien
caaactttgctcttaacggtgggcg

SEQ ID NO: 2668352 - DNA, 25 bp, Homo sapien
gatttgttcatgtgaggcatctgct

SEQ ID NO: 2668353 - DNA, 25 bp, Homo sapien
gcaccagactaggaggttgttttcc

SEQ ID NO: 2668354 - DNA, 25 bp, Homo sapien
cccattcttccggtttgacattttg

SEQ ID NO: 2668355 - DNA, 25 bp, Homo sapien
tccggtttgacattttgcggatcat

SEQ ID NO: 2668356 - DNA, 25 bp, Homo sapien
tctcatcatgtccaccattaacccc

SEQ ID NO: 2668357 - DNA, 25 bp, Homo sapien
cattttgcggatcattggtgatcca

SEQ ID NO: 2668358 - DNA, 25 bp, Homo sapien
tgctaacacagagccaggtgcttcc

SEQ ID NO: 2668359 - DNA, 25 bp, Homo sapien
tgattttcaaaagtgtgccgggttc

SEQ ID NO: 2668360 - DNA, 25 bp, Homo sapien
tacagaagctagtcacccagaatgc

SEQ ID NO: 2668361 - DNA, 25 bp, Homo sapien
gaatgatggccagcttcctagggaa

SEQ ID NO: 2668362 - DNA, 25 bp, Homo sapien
gtttctgagcagtcatagtgggtga

SEQ ID NO: 2668363 - DNA, 25 bp, Homo sapien
ttgtttctgagcagtcatagtgggt

SEQ ID NO: 2668364 - DNA, 25 bp, Homo sapien
tttctgagcagtcatagtgggtgag

SEQ ID NO: 2668365 - DNA, 25 bp, Homo sapien
tgtttctgagcagtcatagtgggtg

SEQ ID NO: 2668366 - DNA, 25 bp, Homo sapien
cttgcagctgcattgtaactcacca

SEQ ID NO: 2668367 - DNA, 25 bp, Homo sapien
taatttgacagtccttgcagctgca

SEQ ID NO: 2668368 - DNA, 25 bp, Homo sapien
ttgcagctgcattgtaactcaccat

SEQ ID NO: 2668369 - DNA, 25 bp, Homo sapien
caataatttgacagtccttgcagct

SEQ ID NO: 2668370 - DNA, 25 bp, Homo sapien
gcacccttgcgggtaagtcacctgg

SEQ ID NO: 2668371 - DNA, 25 bp, Homo sapien
catctgcaaagttaggagtacgtac

SEQ ID NO: 2668372 - DNA, 25 bp, Homo sapien
catgaaagaccccaatgaaaactgt

SEQ ID NO: 2668373 - DNA, 25 bp, Homo sapien
ctgtgagcctaaggacaaggagctc

SEQ ID NO: 2668374 - DNA, 25 bp, Homo sapien
tttttaagagcttgtgcccccagaa

SEQ ID NO: 2668375 - DNA, 25 bp, Homo sapien
cttgcattcagggatacagaaatat

SEQ ID NO: 2668376 - DNA, 25 bp, Homo sapien
ttccccacttgcattcagggataca

SEQ ID NO: 2668377 - DNA, 25 bp, Homo sapien
cccacttgcattcagggatacagaa

SEQ ID NO: 2668378 - DNA, 25 bp, Homo sapien
gtgcagggctgttgctatcacttgg

SEQ ID NO: 2668379 - DNA, 25 bp, Homo sapien
aacagcctcttttgccggtattcag

SEQ ID NO: 2668380 - DNA, 25 bp, Homo sapien
cagagcagcaagtgctccgtgcagg

SEQ ID NO: 2668381 - DNA, 25 bp, Homo sapien
tatcacttggaggtgaacagcctct

SEQ ID NO: 2668382 - DNA, 25 bp, Homo sapien
tattcatgtaacaacccagagctgt

SEQ ID NO: 2668383 - DNA, 25 bp, Homo sapien
gacgctgatcagcattacctactgg

SEQ ID NO: 2668384 - DNA, 25 bp, Homo sapien
tctctgccaggtccaagacgctgat

SEQ ID NO: 2668385 - DNA, 25 bp, Homo sapien
tgcctacttcctggtctgagacgga

SEQ ID NO: 2668386 - DNA, 25 bp, Homo sapien
ctgcattcacaagcccgcaatctgg

SEQ ID NO: 2668387 - DNA, 25 bp, Homo sapien
tctctccttggcaaatagatgctct

SEQ ID NO: 2668388 - DNA, 25 bp, Homo sapien
tgctccttaatgactcgatgggttg

SEQ ID NO: 2668389 - DNA, 25 bp, Homo sapien
ttccaagttgcccaagactgcacca

SEQ ID NO: 2668390 - DNA, 25 bp, Homo sapien
tatttacagtacgggttggagtcat

SEQ ID NO: 2668391 - DNA, 25 bp, Homo sapien
gatatttacagtacgggttggagtc

SEQ ID NO: 2668392 - DNA, 25 bp, Homo sapien
atatttacagtacgggttggagtca

SEQ ID NO: 2668393 - DNA, 25 bp, Homo sapien
tttacagtacgggttggagtcatct

SEQ ID NO: 2668394 - DNA, 25 bp, Homo sapien
aggctgttgcttataacatcgctga

SEQ ID NO: 2668395 - DNA, 25 bp, Homo sapien
taaggctgttgcttataacatcgct

SEQ ID NO: 2668396 - DNA, 25 bp, Homo sapien
taacatcgctgaaggtaagcagggg

SEQ ID NO: 2668397 - DNA, 25 bp, Homo sapien
tataacatcgctgaaggtaagcagg

SEQ ID NO: 2668398 - DNA, 25 bp, Homo sapien
ctctgaaagctttccagcagtttct

SEQ ID NO: 2668399 - DNA, 25 bp, Homo sapien
attttaaagccttgaagtctcgcct

SEQ ID NO: 2668400 - DNA, 25 bp, Homo sapien
tgcctttgtatttggaaccttctct

SEQ ID NO: 2668401 - DNA, 25 bp, Homo sapien
caaggtctctgctcccaattttaaa

SEQ ID NO: 2668402 - DNA, 25 bp, Homo sapien
taacaagttggctttgtgaaaaata

SEQ ID NO: 2668403 - DNA, 25 bp, Homo sapien
tgtggccttcttatggttacaagat

SEQ ID NO: 2668404 - DNA, 25 bp, Homo sapien
tatggttacaagataggtgctccat

SEQ ID NO: 2668405 - DNA, 25 bp, Homo sapien
ggccttcttatggttacaagatagg

SEQ ID NO: 2668406 - DNA, 25 bp, Homo sapien
cttcttatggttacaagataggtgc

SEQ ID NO: 2668407 - DNA, 25 bp, Homo sapien
ttattgttgtcgtagcagtggagac

SEQ ID NO: 2668408 - DNA, 25 bp, Homo sapien
tgactgactgttgtctcaggttgct

SEQ ID NO: 2668409 - DNA, 25 bp, Homo sapien
tgttgtctcaggttgctgtgtctcc

SEQ ID NO: 2668410 - DNA, 25 bp, Homo sapien
ggacactgaagattatgtttacatt

SEQ ID NO: 2668411 - DNA, 25 bp, Homo sapien
tggcagttgacaccaccagagccat

SEQ ID NO: 2668412 - DNA, 25 bp, Homo sapien
ctgtgattgtggagtgaaattccgt

SEQ ID NO: 2668413 - DNA, 25 bp, Homo sapien
aacatgccctttatggcagttgaca

SEQ ID NO: 2668414 - DNA, 25 bp, Homo sapien
agtactcagttattccagggcccac

SEQ ID NO: 2668415 - DNA, 25 bp, Homo sapien
agaaaattgagtgctcggacaatga

SEQ ID NO: 2668416 - DNA, 25 bp, Homo sapien
ttgagtgctcggacaatgatcactg

SEQ ID NO: 2668417 - DNA, 25 bp, Homo sapien
gtgctcggacaatgatcactgtcat

SEQ ID NO: 2668418 - DNA, 25 bp, Homo sapien
aaattgagtgctcggacaatgatca

SEQ ID NO: 2668419 - DNA, 25 bp, Homo sapien
tgtaaccttcgcctattcatagggg

SEQ ID NO: 2668420 - DNA, 25 bp, Homo sapien
cagtgccactcagtttattctcttc

SEQ ID NO: 2668421 - DNA, 25 bp, Homo sapien
gctttgcagtgccactcagtttatt

SEQ ID NO: 2668422 - DNA, 25 bp, Homo sapien
cctggctttgcagtgccactcagtt

SEQ ID NO: 2668423 - DNA, 25 bp, Homo sapien
tctttccagcttcaggcttcagtac

SEQ ID NO: 2668424 - DNA, 25 bp, Homo sapien
cagtgtatctttccagcttcaggct

SEQ ID NO: 2668425 - DNA, 25 bp, Homo sapien
tgtatctttccagcttcaggcttca

SEQ ID NO: 2668426 - DNA, 25 bp, Homo sapien
tcagtgtatctttccagcttcaggc

SEQ ID NO: 2668427 - DNA, 25 bp, Homo sapien
tgttgtacagaaggccaaggagact

SEQ ID NO: 2668428 - DNA, 25 bp, Homo sapien
tggactgaagcttgttgtacagaag

SEQ ID NO: 2668429 - DNA, 25 bp, Homo sapien
tgaagcttgttgtacagaaggccaa

SEQ ID NO: 2668430 - DNA, 25 bp, Homo sapien
ctcttggactgaagcttgttgtaca

SEQ ID NO: 2668431 - DNA, 25 bp, Homo sapien
agagctgagggtggaatgtgaacac

SEQ ID NO: 2668432 - DNA, 25 bp, Homo sapien
ctatgaaaaggaagctgggtagagc

SEQ ID NO: 2668433 - DNA, 25 bp, Homo sapien
tagagctgagggtggaatgtgaaca

SEQ ID NO: 2668434 - DNA, 25 bp, Homo sapien
tgaaaaggaagctgggtagagctga

SEQ ID NO: 2668435 - DNA, 25 bp, Homo sapien
ttcttggtattggactctgactctg

SEQ ID NO: 2668436 - DNA, 25 bp, Homo sapien
tctgacattgcacccacacatctgg

SEQ ID NO: 2668437 - DNA, 25 bp, Homo sapien
cccacacatctggatttctgattcc

SEQ ID NO: 2668438 - DNA, 25 bp, Homo sapien
ggtatccatttttcgcacccaagtc

SEQ ID NO: 2668439 - DNA, 25 bp, Homo sapien
tatgtgccattttaatttgctcttc

SEQ ID NO: 2668440 - DNA, 25 bp, Homo sapien
gaagatacagcctttttctacatca

SEQ ID NO: 2668441 - DNA, 25 bp, Homo sapien
aactttatgtgccattttaatttgc

SEQ ID NO: 2668442 - DNA, 25 bp, Homo sapien
aaattttgatttgtcggcaccattg

SEQ ID NO: 2668443 - DNA, 25 bp, Homo sapien
cgaatcggatcaaaggcagtgcgca

SEQ ID NO: 2668444 - DNA, 25 bp, Homo sapien
tcataagagaccagtgcagaggcaa

SEQ ID NO: 2668445 - DNA, 25 bp, Homo sapien
taaactctcgtcttggacccaggga

SEQ ID NO: 2668446 - DNA, 25 bp, Homo sapien
tatcgtcagactccggaaatgctag

SEQ ID NO: 2668447 - DNA, 25 bp, Homo sapien
tggtcccaccactaacttcatatgg

SEQ ID NO: 2668448 - DNA, 25 bp, Homo sapien
cttcatatggtccaagtcccctcat

SEQ ID NO: 2668449 - DNA, 25 bp, Homo sapien
tgtaaatacctcactggtcccacca

SEQ ID NO: 2668450 - DNA, 25 bp, Homo sapien
caccactaacttcatatggtccaag

SEQ ID NO: 2668451 - DNA, 25 bp, Homo sapien
caagagagctgtcgcttttggtatt

SEQ ID NO: 2668452 - DNA, 25 bp, Homo sapien
agggcaactgttcctcaagagagct

SEQ ID NO: 2668453 - DNA, 25 bp, Homo sapien
tagatggtgcaagggcatcattccg

SEQ ID NO: 2668454 - DNA, 25 bp, Homo sapien
tcttccccaaaggtaggaatagatg

SEQ ID NO: 2668455 - DNA, 25 bp, Homo sapien
taacaatagcgatgccaaatagcag

SEQ ID NO: 2668456 - DNA, 25 bp, Homo sapien
ttaacaatagcgatgccaaatagca

SEQ ID NO: 2668457 - DNA, 25 bp, Homo sapien
aacaatagcgatgccaaatagcaga

SEQ ID NO: 2668458 - DNA, 25 bp, Homo sapien
aacaagacgagttcgctgctcaagg

SEQ ID NO: 2668459 - DNA, 25 bp, Homo sapien
gttagcatggcttgttctagcaagt

SEQ ID NO: 2668460 - DNA, 25 bp, Homo sapien
gtggcagtataattaagtcgtcaag

SEQ ID NO: 2668461 - DNA, 25 bp, Homo sapien
gcaaagtcatcaaccagtggcagta

SEQ ID NO: 2668462 - DNA, 25 bp, Homo sapien
acctttcatctttatgagtgttgca

SEQ ID NO: 2668463 - DNA, 25 bp, Homo sapien
cctttcatctttatgagtgttgcat

SEQ ID NO: 2668464 - DNA, 25 bp, Homo sapien
tacctttcatctttatgagtgttgc

SEQ ID NO: 2668465 - DNA, 25 bp, Homo sapien
agtacctttcatctttatgagtgtt

SEQ ID NO: 2668466 - DNA, 25 bp, Homo sapien
tgaaatctcttcctgcagatcctga

SEQ ID NO: 2668467 - DNA, 25 bp, Homo sapien
gaacaaggtgaaatctcttcctgca

SEQ ID NO: 2668468 - DNA, 25 bp, Homo sapien
ctcctgaaagggaacaaggtgaaat

SEQ ID NO: 2668469 - DNA, 25 bp, Homo sapien
aatctcttcctgcagatcctgagcc

SEQ ID NO: 2668470 - DNA, 25 bp, Homo sapien
ttgggtgctgacagccctgcgtgct

SEQ ID NO: 2668471 - DNA, 25 bp, Homo sapien
tgggtgctgacagccctgcgtgctg

SEQ ID NO: 2668472 - DNA, 25 bp, Homo sapien
gggtgctgacagccctgcgtgctgt

SEQ ID NO: 2668473 - DNA, 25 bp, Homo sapien
ctctttccgaggcagttgggtagga

SEQ ID NO: 2668474 - DNA, 25 bp, Homo sapien
tgcgagggacctccagtaataagag

SEQ ID NO: 2668475 - DNA, 25 bp, Homo sapien
tgagtcccttggcatacagctgggc

SEQ ID NO: 2668476 - DNA, 25 bp, Homo sapien
catgggttgagagccctcagttggc

SEQ ID NO: 2668477 - DNA, 25 bp, Homo sapien
tagtctcagacaatggtgccagggt

SEQ ID NO: 2668478 - DNA, 25 bp, Homo sapien
tgactttatagaccctcgatacccg

SEQ ID NO: 2668479 - DNA, 25 bp, Homo sapien
tacaagatggccttggtaggtagct

SEQ ID NO: 2668480 - DNA, 25 bp, Homo sapien
tgggatgtagtgattgaactggtac

SEQ ID NO: 2668481 - DNA, 25 bp, Homo sapien
taaaagtttgaagtagacataatta

SEQ ID NO: 2668482 - DNA, 25 bp, Homo sapien
cttaaaagtttgaagtagacataat

SEQ ID NO: 2668483 - DNA, 25 bp, Homo sapien
aaaagtttgaagtagacataattag

SEQ ID NO: 2668484 - DNA, 25 bp, Homo sapien
agagccagaccggacctcctggtag

SEQ ID NO: 2668485 - DNA, 25 bp, Homo sapien
caaaagcactggtagcagaatctgc

SEQ ID NO: 2668486 - DNA, 25 bp, Homo sapien
acatgccggcaatggagccaaaagc

SEQ ID NO: 2668487 - DNA, 25 bp, Homo sapien
actaacagcaaacatgccggcaatg

SEQ ID NO: 2668488 - DNA, 25 bp, Homo sapien
catcttccattcattattgttgctg

SEQ ID NO: 2668489 - DNA, 25 bp, Homo sapien
caatagaggctacatacccacatct

SEQ ID NO: 2668490 - DNA, 25 bp, Homo sapien
atagaggctacatacccacatctcc

SEQ ID NO: 2668491 - DNA, 25 bp, Homo sapien
aatagaggctacatacccacatctc

SEQ ID NO: 2668492 - DNA, 25 bp, Homo sapien
tggctggccctcacaactgaagtca

SEQ ID NO: 2668493 - DNA, 25 bp, Homo sapien
ttctgaggaagccaatgtaccaagg

SEQ ID NO: 2668494 - DNA, 25 bp, Homo sapien
aatccctgggatttagaagctttga

SEQ ID NO: 2668495 - DNA, 25 bp, Homo sapien
tcttcccaagggtgacttagtagca

SEQ ID NO: 2668496 - DNA, 25 bp, Homo sapien
ctctgcagtcgcagttggagaggca

SEQ ID NO: 2668497 - DNA, 25 bp, Homo sapien
gccaggaagggggccatcaggttca

SEQ ID NO: 2668498 - DNA, 25 bp, Homo sapien
aggaagggggccatcaggttcaact

SEQ ID NO: 2668499 - DNA, 25 bp, Homo sapien
cctctgcagtcgcagttggagaggc

SEQ ID NO: 2668500 - DNA, 25 bp, Homo sapien
cttatatgtttggagagtagtcctc

SEQ ID NO: 2668501 - DNA, 25 bp, Homo sapien
ggcatttcctcagcaaccggttggt

SEQ ID NO: 2668502 - DNA, 25 bp, Homo sapien
aaagtgtatgatgaatacagtgtcc

SEQ ID NO: 2668503 - DNA, 25 bp, Homo sapien
tgtccaagggcactaacttgtcctc

SEQ ID NO: 2668504 - DNA, 25 bp, Homo sapien
caactagatctgtagaattcttggt

SEQ ID NO: 2668505 - DNA, 25 bp, Homo sapien
tcaactagatctgtagaattcttgg

SEQ ID NO: 2668506 - DNA, 25 bp, Homo sapien
acattttggctggagataatcttac

SEQ ID NO: 2668507 - DNA, 25 bp, Homo sapien
aattcttggttgacattttggctgg

SEQ ID NO: 2668508 - DNA, 25 bp, Homo sapien
tggaactgactggtgttacacagca

SEQ ID NO: 2668509 - DNA, 25 bp, Homo sapien
tacacagcaaagtagtagaaggact

SEQ ID NO: 2668510 - DNA, 25 bp, Homo sapien
tggagttgtccctctgtggtacacc

SEQ ID NO: 2668511 - DNA, 25 bp, Homo sapien
taaagcccagagacattatggaact

SEQ ID NO: 2668512 - DNA, 25 bp, Homo sapien
cttggaagataaggttagctaatac

SEQ ID NO: 2668513 - DNA, 25 bp, Homo sapien
tacattcattgtccttaactcagaa

SEQ ID NO: 2668514 - DNA, 25 bp, Homo sapien
caaatacaagttatgtggaacatga

SEQ ID NO: 2668515 - DNA, 25 bp, Homo sapien
gggctaacgctaacatactgtgatt

SEQ ID NO: 2668516 - DNA, 25 bp, Homo sapien
gatgatgttgggagttcctgtagca

SEQ ID NO: 2668517 - DNA, 25 bp, Homo sapien
ctgtagcatttgtggccctcttgag

SEQ ID NO: 2668518 - DNA, 25 bp, Homo sapien
ggccctcttgagataccttcccata

SEQ ID NO: 2668519 - DNA, 25 bp, Homo sapien
ggtgaagcatatgcaaactgcagta

SEQ ID NO: 2668520 - DNA, 25 bp, Homo sapien
ccagctgtgctgtagctggcagatc

SEQ ID NO: 2668521 - DNA, 25 bp, Homo sapien
ctgtgctgtagctggcagatcagcc

SEQ ID NO: 2668522 - DNA, 25 bp, Homo sapien
gcagatcagccggtacatggagcct

SEQ ID NO: 2668523 - DNA, 25 bp, Homo sapien
gccggtacatggagcctctcacttc

SEQ ID NO: 2668524 - DNA, 25 bp, Homo sapien
tgaatcagatggctgcgttggcctg

SEQ ID NO: 2668525 - DNA, 25 bp, Homo sapien
taagccttctattcgccaatctcca

SEQ ID NO: 2668526 - DNA, 25 bp, Homo sapien
gatcccagtgtgctctgtaataagc

SEQ ID NO: 2668527 - DNA, 25 bp, Homo sapien
ttccctgggcaacccaacctgaatc

SEQ ID NO: 2668528 - DNA, 25 bp, Homo sapien
gtgaagatcactggaaagagaagtc

SEQ ID NO: 2668529 - DNA, 25 bp, Homo sapien
aagatcactggaaagagaagtcagc

SEQ ID NO: 2668530 - DNA, 25 bp, Homo sapien
attatgttgtgaagatcactggaaa

SEQ ID NO: 2668531 - DNA, 25 bp, Homo sapien
ttatgttgtgaagatcactggaaag

SEQ ID NO: 2668532 - DNA, 25 bp, Homo sapien
tgacctctctgggtgtttggaatga

SEQ ID NO: 2668533 - DNA, 25 bp, Homo sapien
ggtacgcgcctggttgttcagtctg

SEQ ID NO: 2668534 - DNA, 25 bp, Homo sapien
tccttgatgcggaaggcttgttcaa

SEQ ID NO: 2668535 - DNA, 25 bp, Homo sapien
gtcctccttgatgcggaaggcttgt

SEQ ID NO: 2668536 - DNA, 25 bp, Homo sapien
gatgtcctccttgatgcggaaggct

SEQ ID NO: 2668537 - DNA, 25 bp, Homo sapien
ctccttgatgcggaaggcttgttca

SEQ ID NO: 2668538 - DNA, 25 bp, Homo sapien
tctggatgtggctttccagtaactt

SEQ ID NO: 2668539 - DNA, 25 bp, Homo sapien
gctgagttttttgacgatgctggtg

SEQ ID NO: 2668540 - DNA, 25 bp, Homo sapien
cagtaacttcctggcgagcgattcc

SEQ ID NO: 2668541 - DNA, 25 bp, Homo sapien
ttttggctgagttttttgacgatgc

SEQ ID NO: 2668542 - DNA, 25 bp, Homo sapien
ctgtggccgcctgatctcgagctct

SEQ ID NO: 2668543 - DNA, 25 bp, Homo sapien
caaagttagttcctgtggccgcctg

SEQ ID NO: 2668544 - DNA, 25 bp, Homo sapien
tccaactccttgtaggtgtttgatg

SEQ ID NO: 2668545 - DNA, 25 bp, Homo sapien
gatgtttatctcgtgtactgcaaag

SEQ ID NO: 2668546 - DNA, 25 bp, Homo sapien
tctgatgacccacgcaagcccctag

SEQ ID NO: 2668547 - DNA, 25 bp, Homo sapien
gacctctctctctgatgacccacgc

SEQ ID NO: 2668548 - DNA, 25 bp, Homo sapien
ctgaatctctaaggggacgtgacct

SEQ ID NO: 2668549 - DNA, 25 bp, Homo sapien
aatctctaaggggacgtgacctctc

SEQ ID NO: 2668550 - DNA, 25 bp, Homo sapien
cccttcccatgctcgccttttcctt

SEQ ID NO: 2668551 - DNA, 25 bp, Homo sapien
tggtagatagcatcctctattcagg

SEQ ID NO: 2668552 - DNA, 25 bp, Homo sapien
tctctcaggtataagcgggcaagga

SEQ ID NO: 2668553 - DNA, 25 bp, Homo sapien
tcagcctgtcgcacttcagccagtt

SEQ ID NO: 2668554 - DNA, 25 bp, Homo sapien
caggcttgcagtatcaaatctctct

SEQ ID NO: 2668555 - DNA, 25 bp, Homo sapien
ctatagtagacacctgcacattcat

SEQ ID NO: 2668556 - DNA, 25 bp, Homo sapien
ttgatggccaaagttctaaagtcat

SEQ ID NO: 2668557 - DNA, 25 bp, Homo sapien
tttgatggccaaagttctaaagtca

SEQ ID NO: 2668558 - DNA, 25 bp, Homo sapien
catttgatggccaaagttctaaagt

SEQ ID NO: 2668559 - DNA, 25 bp, Homo sapien
tggtgtggatcaatacctttataac

SEQ ID NO: 2668560 - DNA, 25 bp, Homo sapien
atggcaagatggaaattggtgtgga

SEQ ID NO: 2668561 - DNA, 25 bp, Homo sapien
tggcaagatggaaattggtgtggat

SEQ ID NO: 2668562 - DNA, 25 bp, Homo sapien
gctcttgcctgaataagtgaatgtc

SEQ ID NO: 2668563 - DNA, 25 bp, Homo sapien
tccagggcgggcacgaattcttgaa

SEQ ID NO: 2668564 - DNA, 25 bp, Homo sapien
ctttctcaatttgccggtgctcttg

SEQ ID NO: 2668565 - DNA, 25 bp, Homo sapien
cttgcctgaataagtgaatgtctcc

SEQ ID NO: 2668566 - DNA, 25 bp, Homo sapien
ttctggcagtaacacgtaatatgag

SEQ ID NO: 2668567 - DNA, 25 bp, Homo sapien
taatatgagtcccatctattttcaa

SEQ ID NO: 2668568 - DNA, 25 bp, Homo sapien
tggcagtaacacgtaatatgagtcc

SEQ ID NO: 2668569 - DNA, 25 bp, Homo sapien
gcagtaacacgtaatatgagtccca

SEQ ID NO: 2668570 - DNA, 25 bp, Homo sapien
ggttcatttcgtggcgataatcccc

SEQ ID NO: 2668571 - DNA, 25 bp, Homo sapien
taaattcgaggtttgctcaggactg

SEQ ID NO: 2668572 - DNA, 25 bp, Homo sapien
tctatctttcctaagagctgcatca

SEQ ID NO: 2668573 - DNA, 25 bp, Homo sapien
cccctggaccatctttaaattcgag

SEQ ID NO: 2668574 - DNA, 25 bp, Homo sapien
tcaaagaacttgtgccagtctctgc

SEQ ID NO: 2668575 - DNA, 25 bp, Homo sapien
cagtctctgctgtggatgtttctta

SEQ ID NO: 2668576 - DNA, 25 bp, Homo sapien
cttaaattagctgtcttcaatcttg

SEQ ID NO: 2668577 - DNA, 25 bp, Homo sapien
aatcttgtagtgtctaattttctgg

SEQ ID NO: 2668578 - DNA, 25 bp, Homo sapien
cttgaaaggacttgtcagcacctct

SEQ ID NO: 2668579 - DNA, 25 bp, Homo sapien
ttgaaaggacttgtcagcacctctg

SEQ ID NO: 2668580 - DNA, 25 bp, Homo sapien
ctccatattcaagcctcacagctag

SEQ ID NO: 2668581 - DNA, 25 bp, Homo sapien
tattcaagcctcacagctagaccga

SEQ ID NO: 2668582 - DNA, 25 bp, Homo sapien
ctcacagctagaccgagaagccagt

SEQ ID NO: 2668583 - DNA, 25 bp, Homo sapien
aagcctcacagctagaccgagaagc

SEQ ID NO: 2668584 - DNA, 25 bp, Homo sapien
gtaatcgtcatgacattgaatctga

SEQ ID NO: 2668585 - DNA, 25 bp, Homo sapien
ggtaatcgtcatgacattgaatctg

SEQ ID NO: 2668586 - DNA, 25 bp, Homo sapien
taatcgtcatgacattgaatctgaa

SEQ ID NO: 2668587 - DNA, 25 bp, Homo sapien
caaaattcgaattgccttaggcatt

SEQ ID NO: 2668588 - DNA, 25 bp, Homo sapien
tgaaccaaaattcgaattgccttag

SEQ ID NO: 2668589 - DNA, 25 bp, Homo sapien
cctgtcaggtgctcctgaaccaaaa

SEQ ID NO: 2668590 - DNA, 25 bp, Homo sapien
gcatcctgtcaggtgctcctgaacc

SEQ ID NO: 2668591 - DNA, 25 bp, Homo sapien
caggcaaaccctctgtttgatttgc

SEQ ID NO: 2668592 - DNA, 25 bp, Homo sapien
tattttgtctaaagcaacaggcaaa

SEQ ID NO: 2668593 - DNA, 25 bp, Homo sapien
tctaaagcaacaggcaaaccctctg

SEQ ID NO: 2668594 - DNA, 25 bp, Homo sapien
ccaataatattttgtctaaagcaac

SEQ ID NO: 2668595 - DNA, 25 bp, Homo sapien
ctgtccttggatcagtaataattgt

SEQ ID NO: 2668596 - DNA, 25 bp, Homo sapien
ccttggatcagtaataattgtctga

SEQ ID NO: 2668597 - DNA, 25 bp, Homo sapien
gtccttggatcagtaataattgtct

SEQ ID NO: 2668598 - DNA, 25 bp, Homo sapien
tgtccttggatcagtaataattgtc

SEQ ID NO: 2668599 - DNA, 25 bp, Homo sapien
ctgtaggaccttcagacattcattt

SEQ ID NO: 2668600 - DNA, 25 bp, Homo sapien
tattattctcaacttcttcgtacag

SEQ ID NO: 2668601 - DNA, 25 bp, Homo sapien
ttcgtacagattacttgaaagtgaa

SEQ ID NO: 2668602 - DNA, 25 bp, Homo sapien
catttatatggcccaggtggtcttt

SEQ ID NO: 2668603 - DNA, 25 bp, Homo sapien
tactgaagcagtgaagattaccata

SEQ ID NO: 2668604 - DNA, 25 bp, Homo sapien
tactcactgctaacaaggactatgc

SEQ ID NO: 2668605 - DNA, 25 bp, Homo sapien
gagtagcaaacaggaccagaagaca

SEQ ID NO: 2668606 - DNA, 25 bp, Homo sapien
gactatgcaggtgcttgcttcacaa

SEQ ID NO: 2668607 - DNA, 25 bp, Homo sapien
ccattgaccacagtgatggcgctgt

SEQ ID NO: 2668608 - DNA, 25 bp, Homo sapien
cattgaccacagtgatggcgctgtg

SEQ ID NO: 2668609 - DNA, 25 bp, Homo sapien
aggactggcagccattgaccacagt

SEQ ID NO: 2668610 - DNA, 25 bp, Homo sapien
tccacagggaatctgggagcaggaa

SEQ ID NO: 2668611 - DNA, 25 bp, Homo sapien
tctccacagggaatctgggagcagg

SEQ ID NO: 2668612 - DNA, 25 bp, Homo sapien
ttctccacagggaatctgggagcag

SEQ ID NO: 2668613 - DNA, 25 bp, Homo sapien
cacagggaatctgggagcaggaact

SEQ ID NO: 2668614 - DNA, 25 bp, Homo sapien
ttcggctagaatagtgactcgccat

SEQ ID NO: 2668615 - DNA, 25 bp, Homo sapien
ccacgtggacagacttcggctagaa

SEQ ID NO: 2668616 - DNA, 25 bp, Homo sapien
tcaatttcatacctccacgtggaca

SEQ ID NO: 2668617 - DNA, 25 bp, Homo sapien
gacagacttcggctagaatagtgac

SEQ ID NO: 2668618 - DNA, 25 bp, Homo sapien
attctctactttgcttgaaagctgc

SEQ ID NO: 2668619 - DNA, 25 bp, Homo sapien
attcattctgcattgtctctaattc

SEQ ID NO: 2668620 - DNA, 25 bp, Homo sapien
aattcaccccagatctgcttttcca

SEQ ID NO: 2668621 - DNA, 25 bp, Homo sapien
tgtctctaattcaccccagatctgc

SEQ ID NO: 2668622 - DNA, 25 bp, Homo sapien
cactatcttgcgctgtaatttcttt

SEQ ID NO: 2668623 - DNA, 25 bp, Homo sapien
actatcttgcgctgtaatttcttta

SEQ ID NO: 2668624 - DNA, 25 bp, Homo sapien
tatcttgcgctgtaatttctttagg

SEQ ID NO: 2668625 - DNA, 25 bp, Homo sapien
tcctggagttccactatcttgcgct

SEQ ID NO: 2668626 - DNA, 25 bp, Homo sapien
aacatcccagagatagtaactttct

SEQ ID NO: 2668627 - DNA, 25 bp, Homo sapien
ttccaacaaatcactccattggctg

SEQ ID NO: 2668628 - DNA, 25 bp, Homo sapien
atttttctggtacattcgtctcctt

SEQ ID NO: 2668629 - DNA, 25 bp, Homo sapien
ctccttaaaaggagacattagaagc

SEQ ID NO: 2668630 - DNA, 25 bp, Homo sapien
aaatatcttctgaaaggaagtagca

SEQ ID NO: 2668631 - DNA, 25 bp, Homo sapien
aatatcttctgaaaggaagtagcaa

SEQ ID NO: 2668632 - DNA, 25 bp, Homo sapien
atatcttctgaaaggaagtagcaaa

SEQ ID NO: 2668633 - DNA, 25 bp, Homo sapien
tgcaattccttcaattatgatggaa

SEQ ID NO: 2668634 - DNA, 25 bp, Homo sapien
tgttgatgagactagactctaatgg

SEQ ID NO: 2668635 - DNA, 25 bp, Homo sapien
cactcaggtgtgtgaatgcatttaa

SEQ ID NO: 2668636 - DNA, 25 bp, Homo sapien
tctaaagttcggcaaaccaattcat

SEQ ID NO: 2668637 - DNA, 25 bp, Homo sapien
gaaagttaaccaccatatgtgctta

SEQ ID NO: 2668638 - DNA, 25 bp, Homo sapien
taaggcaatttggatagaactggag

SEQ ID NO: 2668639 - DNA, 25 bp, Homo sapien
caccactgggaacttatccaaagga

SEQ ID NO: 2668640 - DNA, 25 bp, Homo sapien
tcaaagagacatctgtaccctcatg

SEQ ID NO: 2668641 - DNA, 25 bp, Homo sapien
ttatcattccggttttggtatatgt

SEQ ID NO: 2668642 - DNA, 25 bp, Homo sapien
taaggaatgctttatgaatttttgt

SEQ ID NO: 2668643 - DNA, 25 bp, Homo sapien
tgctaatcttctttttatcattccg

SEQ ID NO: 2668644 - DNA, 25 bp, Homo sapien
ttgtgtcatccttgctcagtagcca

SEQ ID NO: 2668645 - DNA, 25 bp, Homo sapien
gattatgggctgatgtgacaaactg

SEQ ID NO: 2668646 - DNA, 25 bp, Homo sapien
tggacacctgtcctggtaggataga

SEQ ID NO: 2668647 - DNA, 25 bp, Homo sapien
ttctgtttggtaaaaggattgctgg

SEQ ID NO: 2668648 - DNA, 25 bp, Homo sapien
gatagaaaactcgagttcttcaaga

SEQ ID NO: 2668649 - DNA, 25 bp, Homo sapien
ccaaaaaggactatctacaagcaga

SEQ ID NO: 2668650 - DNA, 25 bp, Homo sapien
taccctgacctagctgaagttcatg

SEQ ID NO: 2668651 - DNA, 25 bp, Homo sapien
tttggctatagaattgacaggtgtc

SEQ ID NO: 2668652 - DNA, 25 bp, Homo sapien
ggttctcaaaagcttggcctatcgg

SEQ ID NO: 2668653 - DNA, 25 bp, Homo sapien
tcccaaagcttgcagtttggttgct

SEQ ID NO: 2668654 - DNA, 25 bp, Homo sapien
gcagggacagcgaacaactcccaaa

SEQ ID NO: 2668655 - DNA, 25 bp, Homo sapien
gagcttcacccgcagaactacaact

SEQ ID NO: 2668656 - DNA, 25 bp, Homo sapien
tgcttgatagtaacgccgagcttca

SEQ ID NO: 2668657 - DNA, 25 bp, Homo sapien
ccgccagcgccaaggctgcgaccac

SEQ ID NO: 2668658 - DNA, 25 bp, Homo sapien
cacattgggcgctttggctgctctc

SEQ ID NO: 2668659 - DNA, 25 bp, Homo sapien
cagcaccacattgggcgctttggct

SEQ ID NO: 2668660 - DNA, 25 bp, Homo sapien
ctgcgaccaccgacacccacagcag

SEQ ID NO: 2668661 - DNA, 25 bp, Homo sapien
cgcccggccgtgaatgcaaaaaatt

SEQ ID NO: 2668662 - DNA, 25 bp, Homo sapien
gctctgaagcaccatactagtttga

SEQ ID NO: 2668663 - DNA, 25 bp, Homo sapien
tcactcctattggaaagcagctctg

SEQ ID NO: 2668664 - DNA, 25 bp, Homo sapien
ccagtggccatccaacatgcaggtg

SEQ ID NO: 2668665 - DNA, 25 bp, Homo sapien
tgaacaccctaacactcagactgtg

SEQ ID NO: 2668666 - DNA, 25 bp, Homo sapien
aaagctcttgcgttgttatcctgaa

SEQ ID NO: 2668667 - DNA, 25 bp, Homo sapien
tgtaagctgcactcaggactagcat

SEQ ID NO: 2668668 - DNA, 25 bp, Homo sapien
tcttgggagttgatctacaaagctc

SEQ ID NO: 2668669 - DNA, 25 bp, Homo sapien
tgtaggcattcagaaaggaagtccc

SEQ ID NO: 2668670 - DNA, 25 bp, Homo sapien
tcactacctgacttcctggatgaaa

SEQ ID NO: 2668671 - DNA, 25 bp, Homo sapien
ggaagtcccacgtgtcttcataaag

SEQ ID NO: 2668672 - DNA, 25 bp, Homo sapien
tgataaaaggaagtttcactacctg

SEQ ID NO: 2668673 - DNA, 25 bp, Homo sapien
attctgttaagtgagtgaagaggcc

SEQ ID NO: 2668674 - DNA, 25 bp, Homo sapien
ccatgttgtataatttggatctaga

SEQ ID NO: 2668675 - DNA, 25 bp, Homo sapien
gatctagacccttaaaattattcca

SEQ ID NO: 2668676 - DNA, 25 bp, Homo sapien
aattattccaagattctgttaagtg

SEQ ID NO: 2668677 - DNA, 25 bp, Homo sapien
tcccaaatttctgtgttcggtagcc

SEQ ID NO: 2668678 - DNA, 25 bp, Homo sapien
gagtgatgtcctgaagtatagtcca

SEQ ID NO: 2668679 - DNA, 25 bp, Homo sapien
gtgttcggtagccatgcctctccat

SEQ ID NO: 2668680 - DNA, 25 bp, Homo sapien
ctaatggagtgatgtcctgaagtat

SEQ ID NO: 2668681 - DNA, 25 bp, Homo sapien
gctcattagagaatcagtacccaag

SEQ ID NO: 2668682 - DNA, 25 bp, Homo sapien
gacaatgtgtccaagatcagactac

SEQ ID NO: 2668683 - DNA, 25 bp, Homo sapien
ggaaagctggtattcggcataaacc

SEQ ID NO: 2668684 - DNA, 25 bp, Homo sapien
caagtgtccggttggagtctcagag

SEQ ID NO: 2668685 - DNA, 25 bp, Homo sapien
attagttgacccacgttcactgtgc

SEQ ID NO: 2668686 - DNA, 25 bp, Homo sapien
tctttgattagttgacccacgttca

SEQ ID NO: 2668687 - DNA, 25 bp, Homo sapien
ttctttgattagttgacccacgttc

SEQ ID NO: 2668688 - DNA, 25 bp, Homo sapien
ttgattagttgacccacgttcactg

SEQ ID NO: 2668689 - DNA, 25 bp, Homo sapien
ttgccactccttggattaactcagg

SEQ ID NO: 2668690 - DNA, 25 bp, Homo sapien
gatggctatattgaacccagcttgc

SEQ ID NO: 2668691 - DNA, 25 bp, Homo sapien
cacgatgtagtctagaccatgagcg

SEQ ID NO: 2668692 - DNA, 25 bp, Homo sapien
gagcgagtctagaccatctcaaaga

SEQ ID NO: 2668693 - DNA, 25 bp, Homo sapien
tactgctttgtctgtattctgccaa

SEQ ID NO: 2668694 - DNA, 25 bp, Homo sapien
tgggcctgccttcttgtctgagtaa

SEQ ID NO: 2668695 - DNA, 25 bp, Homo sapien
gactttagtcctgttacggataaga

SEQ ID NO: 2668696 - DNA, 25 bp, Homo sapien
gaaagcaacatctcttgtccacgct

SEQ ID NO: 2668697 - DNA, 25 bp, Homo sapien
tttgtaaatcttccagtgcagtttt

SEQ ID NO: 2668698 - DNA, 25 bp, Homo sapien
aatctacagggtgcatttctgacaa

SEQ ID NO: 2668699 - DNA, 25 bp, Homo sapien
gcatggcatctgtctcagcacacat

SEQ ID NO: 2668700 - DNA, 25 bp, Homo sapien
taagaagagtaataatctacagggt

SEQ ID NO: 2668701 - DNA, 25 bp, Homo sapien
ccatggtctgaggagtatatgacaa

SEQ ID NO: 2668702 - DNA, 25 bp, Homo sapien
tcaaaagcggaacatgtgcactagc

SEQ ID NO: 2668703 - DNA, 25 bp, Homo sapien
taaaactgtcgatgttccatggcca

SEQ ID NO: 2668704 - DNA, 25 bp, Homo sapien
cacatttgatacttgtaggccggct

SEQ ID NO: 2668705 - DNA, 25 bp, Homo sapien
tgaggcaatattgatgcaccatccg

SEQ ID NO: 2668706 - DNA, 25 bp, Homo sapien
tatttccagtggttagttcgaagca

SEQ ID NO: 2668707 - DNA, 25 bp, Homo sapien
tccagggtggatgcaggtttttgac

SEQ ID NO: 2668708 - DNA, 25 bp, Homo sapien
aagcatgtaggtggaggcattcaca

SEQ ID NO: 2668709 - DNA, 25 bp, Homo sapien
actgctctttattatactggtggac

SEQ ID NO: 2668710 - DNA, 25 bp, Homo sapien
taaactgctctttattatactggtg

SEQ ID NO: 2668711 - DNA, 25 bp, Homo sapien
gataaactgctctttattatactgg

SEQ ID NO: 2668712 - DNA, 25 bp, Homo sapien
tttccacttgataaactgctcttta

SEQ ID NO: 2668713 - DNA, 25 bp, Homo sapien
gccacctaagatttgctataacgtt

SEQ ID NO: 2668714 - DNA, 25 bp, Homo sapien
ttggtgccacctaagatttgctata

SEQ ID NO: 2668715 - DNA, 25 bp, Homo sapien
cctaagatttgctataacgtttgaa

SEQ ID NO: 2668716 - DNA, 25 bp, Homo sapien
ggtgccacctaagatttgctataac

SEQ ID NO: 2668717 - DNA, 25 bp, Homo sapien
actgctcttggattcatatgggttt

SEQ ID NO: 2668718 - DNA, 25 bp, Homo sapien
gctcttggattcatatgggttttaa

SEQ ID NO: 2668719 - DNA, 25 bp, Homo sapien
ttggattcatatgggttttaagcca

SEQ ID NO: 2668720 - DNA, 25 bp, Homo sapien
tcttggattcatatgggttttaagc

SEQ ID NO: 2668721 - DNA, 25 bp, Homo sapien
taacaaaatcaggtacatccagggt

SEQ ID NO: 2668722 - DNA, 25 bp, Homo sapien
caatctctaaaaatgcgtaagcagg

SEQ ID NO: 2668723 - DNA, 25 bp, Homo sapien
aaggccatggtaaagcagattccag

SEQ ID NO: 2668724 - DNA, 25 bp, Homo sapien
gagacttcacgatcactgttaaccc

SEQ ID NO: 2668725 - DNA, 25 bp, Homo sapien
ttgaaaaggcacacgcacagagagg

SEQ ID NO: 2668726 - DNA, 25 bp, Homo sapien
gattcgggcggctttgcgcttagtt

SEQ ID NO: 2668727 - DNA, 25 bp, Homo sapien
gacgctgggtctatacgagttccca

SEQ ID NO: 2668728 - DNA, 25 bp, Homo sapien
caggacgcgggaaaccaaagtggag

SEQ ID NO: 2668729 - DNA, 25 bp, Homo sapien
agcactgtggtgttgcctgccaccg

SEQ ID NO: 2668730 - DNA, 25 bp, Homo sapien
cagcactgtggtgttgcctgccacc

SEQ ID NO: 2668731 - DNA, 25 bp, Homo sapien
ccagcccagcaagatgggcacggaa

SEQ ID NO: 2668732 - DNA, 25 bp, Homo sapien
cacggaaatgttgggcgccggcggc

SEQ ID NO: 2668733 - DNA, 25 bp, Homo sapien
cgctcgagggcgatgagcaccacga

SEQ ID NO: 2668734 - DNA, 25 bp, Homo sapien
ccccgcccggatgcctgcagcagct

SEQ ID NO: 2668735 - DNA, 25 bp, Homo sapien
cgcacgcgtacaggtccgccagggc

SEQ ID NO: 2668736 - DNA, 25 bp, Homo sapien
tgcaggaagcggcacgccaggtccc

SEQ ID NO: 2668737 - DNA, 25 bp, Homo sapien
cagcggccggccgtgcggaagacgc

SEQ ID NO: 2668738 - DNA, 25 bp, Homo sapien
agcggccggccgtgcggaagacgca

SEQ ID NO: 2668739 - DNA, 25 bp, Homo sapien
ggcagcggccggccgtgcggaagac

SEQ ID NO: 2668740 - DNA, 25 bp, Homo sapien
gcggccggccgtgcggaagacgcac

SEQ ID NO: 2668741 - DNA, 25 bp, Homo sapien
cgaagatcccgtggcagcgacgctc

SEQ ID NO: 2668742 - DNA, 25 bp, Homo sapien
gggcgcgaagatcccgtggcagcga

SEQ ID NO: 2668743 - DNA, 25 bp, Homo sapien
cggcaggggcgcgaagatcccgtgg

SEQ ID NO: 2668744 - DNA, 25 bp, Homo sapien
cctggctgcagggacgttggcggcg

SEQ ID NO: 2668745 - DNA, 25 bp, Homo sapien
tgccgccaccagacggagagtaggt

SEQ ID NO: 2668746 - DNA, 25 bp, Homo sapien
gtaacaggcgcgacgaagcccgcga

SEQ ID NO: 2668747 - DNA, 25 bp, Homo sapien
gcgacggcctcgtagaacgcgtaga

SEQ ID NO: 2668748 - DNA, 25 bp, Homo sapien
agtaggtggccgcaagcgacgccca

SEQ ID NO: 2668749 - DNA, 25 bp, Homo sapien
gattgagagcgctgttggccatcgc

SEQ ID NO: 2668750 - DNA, 25 bp, Homo sapien
cccgccgagcatggtgataatgagg

SEQ ID NO: 2668751 - DNA, 25 bp, Homo sapien
cagcgttggcggtagagcgcctggt

SEQ ID NO: 2668752 - DNA, 25 bp, Homo sapien
tagaaggcactttcgcaggagcaag

SEQ ID NO: 2668753 - DNA, 25 bp, Homo sapien
cgagttccctggaggttgcgcctta

SEQ ID NO: 2668754 - DNA, 25 bp, Homo sapien
ttgcgccttagcgacagatgacccg

SEQ ID NO: 2668755 - DNA, 25 bp, Homo sapien
tgccccttgtgatctggacagaccc

SEQ ID NO: 2668756 - DNA, 25 bp, Homo sapien
taaaggccacgctgattttcttctg

SEQ ID NO: 2668757 - DNA, 25 bp, Homo sapien
tagtaaatgcctactgcttggaccc

SEQ ID NO: 2668758 - DNA, 25 bp, Homo sapien
tgatcacgagtgagctagacctggg

SEQ ID NO: 2668759 - DNA, 25 bp, Homo sapien
cctgcgcggcgagaacagaacttac

SEQ ID NO: 2668760 - DNA, 25 bp, Homo sapien
taaagaccgcctgcagttctgagac

SEQ ID NO: 2668761 - DNA, 25 bp, Homo sapien
tgcctccaacccgacaaactggtga

SEQ ID NO: 2668762 - DNA, 25 bp, Homo sapien
cacaatagggaaagcccacgtgttc

SEQ ID NO: 2668763 - DNA, 25 bp, Homo sapien
tttgacggctagttgaaaacatccc

SEQ ID NO: 2668764 - DNA, 25 bp, Homo sapien
ctggtgaacttttacgggactgata

SEQ ID NO: 2668765 - DNA, 25 bp, Homo sapien
ccttgaattgcaaataggtggtaac

SEQ ID NO: 2668766 - DNA, 25 bp, Homo sapien
taaggaagaaggtctaagacaattc

SEQ ID NO: 2668767 - DNA, 25 bp, Homo sapien
ggcaagatcagtagagtgtccaatc

SEQ ID NO: 2668768 - DNA, 25 bp, Homo sapien
tgtccaatctattgctaatcaaatg

SEQ ID NO: 2668769 - DNA, 25 bp, Homo sapien
aaaaactggtcactgagatgacagc

SEQ ID NO: 2668770 - DNA, 25 bp, Homo sapien
cacttctctatcatggacaacagct

SEQ ID NO: 2668771 - DNA, 25 bp, Homo sapien
cttgtgcagagccatcaagattcat

SEQ ID NO: 2668772 - DNA, 25 bp, Homo sapien
ggtaacagcgaatatccatagcatg

SEQ ID NO: 2668773 - DNA, 25 bp, Homo sapien
ccatagcatgatattctcccttgtg

SEQ ID NO: 2668774 - DNA, 25 bp, Homo sapien
cccaaatgtaaaggtcctcctgagt

SEQ ID NO: 2668775 - DNA, 25 bp, Homo sapien
tcccaaatgtaaaggtcctcctgag

SEQ ID NO: 2668776 - DNA, 25 bp, Homo sapien
ctcccaaatgtaaaggtcctcctga

SEQ ID NO: 2668777 - DNA, 25 bp, Homo sapien
ctatacacggtcgtccatcaaaatc

SEQ ID NO: 2668778 - DNA, 25 bp, Homo sapien
tgccaggggcaaactatacacggtc

SEQ ID NO: 2668779 - DNA, 25 bp, Homo sapien
gggcaaactatacacggtcgtccat

SEQ ID NO: 2668780 - DNA, 25 bp, Homo sapien
tgtatttatgccaggggcaaactat

SEQ ID NO: 2668781 - DNA, 25 bp, Homo sapien
tattcctttggagcaccacttgggt

SEQ ID NO: 2668782 - DNA, 25 bp, Homo sapien
tagggtttatagactggtacagacc

SEQ ID NO: 2668783 - DNA, 25 bp, Homo sapien
ccgttgtctactgtcactgtgtgaa

SEQ ID NO: 2668784 - DNA, 25 bp, Homo sapien
tctccagtggcataaaaatcagagt

SEQ ID NO: 2668785 - DNA, 25 bp, Homo sapien
tcaagcatacacaacatttttcatt

SEQ ID NO: 2668786 - DNA, 25 bp, Homo sapien
aatgttttcaagcatacacaacatt

SEQ ID NO: 2668787 - DNA, 25 bp, Homo sapien
tgttttcaagcatacacaacatttt

SEQ ID NO: 2668788 - DNA, 25 bp, Homo sapien
tttcaagcatacacaacatttttca

SEQ ID NO: 2668789 - DNA, 25 bp, Homo sapien
ctttaaaactgaagcagagttattc

SEQ ID NO: 2668790 - DNA, 25 bp, Homo sapien
cctttaaaactgaagcagagttatt

SEQ ID NO: 2668791 - DNA, 25 bp, Homo sapien
taaaactgaagcagagttattctaa

SEQ ID NO: 2668792 - DNA, 25 bp, Homo sapien
tttaaaactgaagcagagttattct

SEQ ID NO: 2668793 - DNA, 25 bp, Homo sapien
taagtctgctacatcaaacagggat

SEQ ID NO: 2668794 - DNA, 25 bp, Homo sapien
cattggctcactgaataggagactt

SEQ ID NO: 2668795 - DNA, 25 bp, Homo sapien
gagaggtagcaaatccacagaggta

SEQ ID NO: 2668796 - DNA, 25 bp, Homo sapien
ttcaagttcagcaggtaaacctatc

SEQ ID NO: 2668797 - DNA, 25 bp, Homo sapien
tgagaaatgaggaccaagtgctact

SEQ ID NO: 2668798 - DNA, 25 bp, Homo sapien
ttctggacatgtgttaagacctgac

SEQ ID NO: 2668799 - DNA, 25 bp, Homo sapien
gaaagagtccaggtcggctccttag

SEQ ID NO: 2668800 - DNA, 25 bp, Homo sapien
tgtaattattcctgcaaaccagggc

SEQ ID NO: 2668801 - DNA, 25 bp, Homo sapien
atgtgatgagaagatttctgtatat

SEQ ID NO: 2668802 - DNA, 25 bp, Homo sapien
caatgtgatgagaagatttctgtat

SEQ ID NO: 2668803 - DNA, 25 bp, Homo sapien
aatgtgatgagaagatttctgtata

SEQ ID NO: 2668804 - DNA, 25 bp, Homo sapien
tgaattttccgttctcaccgcgtgc

SEQ ID NO: 2668805 - DNA, 25 bp, Homo sapien
cagtggatcacatatttgctcagaa

SEQ ID NO: 2668806 - DNA, 25 bp, Homo sapien
caccgcgtgccttgaatactcagca

SEQ ID NO: 2668807 - DNA, 25 bp, Homo sapien
taattaatgcagtccttagtggttc

SEQ ID NO: 2668808 - DNA, 25 bp, Homo sapien
gaatcttgacttacacctaaggtca

SEQ ID NO: 2668809 - DNA, 25 bp, Homo sapien
ccatctggaactaatatgaggtaag

SEQ ID NO: 2668810 - DNA, 25 bp, Homo sapien
tattctcctgttgtattctagaagc

SEQ ID NO: 2668811 - DNA, 25 bp, Homo sapien
tcttgtaccaattgagcactgtatt

SEQ ID NO: 2668812 - DNA, 25 bp, Homo sapien
taatgttaataatactgtgcaatag

SEQ ID NO: 2668813 - DNA, 25 bp, Homo sapien
ctgctttaactagcataatatatgc

SEQ ID NO: 2668814 - DNA, 25 bp, Homo sapien
agcaaagactgctttaactagcata

SEQ ID NO: 2668815 - DNA, 25 bp, Homo sapien
taactagcataatatatgcttcata

SEQ ID NO: 2668816 - DNA, 25 bp, Homo sapien
acacccgtactagtccattcttgca

SEQ ID NO: 2668817 - DNA, 25 bp, Homo sapien
tctcatgtagacacccgtactagtc

SEQ ID NO: 2668818 - DNA, 25 bp, Homo sapien
tacaactagatatcatgagaattca

SEQ ID NO: 2668819 - DNA, 25 bp, Homo sapien
ggtgggagaggccatacacttttat

SEQ ID NO: 2668820 - DNA, 25 bp, Homo sapien
caaaactctctattatatggctgag

SEQ ID NO: 2668821 - DNA, 25 bp, Homo sapien
ctgtctggtcactgttttgtggatg

SEQ ID NO: 2668822 - DNA, 25 bp, Homo sapien
tgtagctggagcaccttaaatagct

SEQ ID NO: 2668823 - DNA, 25 bp, Homo sapien
tgagaataccagtgaggcaggtgac

SEQ ID NO: 2668824 - DNA, 25 bp, Homo sapien
ggatttcctgcatcacactgatagg

SEQ ID NO: 2668825 - DNA, 25 bp, Homo sapien
cagttctgcaaaggcttgatcccca

SEQ ID NO: 2668826 - DNA, 25 bp, Homo sapien
tattttagggtccagtaacatctcc

SEQ ID NO: 2668827 - DNA, 25 bp, Homo sapien
ggagtcccacatggagaccagcttc

SEQ ID NO: 2668828 - DNA, 25 bp, Homo sapien
tccttagggcaatgtgatgtgggcc

SEQ ID NO: 2668829 - DNA, 25 bp, Homo sapien
taagcttgaattccttagggcaatg

SEQ ID NO: 2668830 - DNA, 25 bp, Homo sapien
cacagtacgttgcatcacaggagag

SEQ ID NO: 2668831 - DNA, 25 bp, Homo sapien
gcatcagccagagcagtatcttgtg

SEQ ID NO: 2668832 - DNA, 25 bp, Homo sapien
ccgagtcatctaggaatttgatcaa

SEQ ID NO: 2668833 - DNA, 25 bp, Homo sapien
caatcttgttgtaaagggcgtatgg

SEQ ID NO: 2668834 - DNA, 25 bp, Homo sapien
catgccaatcaaacctgttgggtgg

SEQ ID NO: 2668835 - DNA, 25 bp, Homo sapien
gaacaattgggaataagatccccta

SEQ ID NO: 2668836 - DNA, 25 bp, Homo sapien
gattctgtagcaggttctcggaagc

SEQ ID NO: 2668837 - DNA, 25 bp, Homo sapien
aagattctgtagcaggttctcggaa

SEQ ID NO: 2668838 - DNA, 25 bp, Homo sapien
gtcagaagattctgtagcaggttct

SEQ ID NO: 2668839 - DNA, 25 bp, Homo sapien
tcactgccagagtgatgtcagaaga

SEQ ID NO: 2668840 - DNA, 25 bp, Homo sapien
tatggcggagggtgttctaaggcag

SEQ ID NO: 2668841 - DNA, 25 bp, Homo sapien
gacactttcagcagccgtggcttta

SEQ ID NO: 2668842 - DNA, 25 bp, Homo sapien
ttcaggcttcccatgctagaggaat

SEQ ID NO: 2668843 - DNA, 25 bp, Homo sapien
tgtggactaagaacaccatgagagc

SEQ ID NO: 2668844 - DNA, 25 bp, Homo sapien
tataaggtcataatgtaagtgctgc

SEQ ID NO: 2668845 - DNA, 25 bp, Homo sapien
cataagatgcataagattattggca

SEQ ID NO: 2668846 - DNA, 25 bp, Homo sapien
gattttcttactccatcaccgtctg

SEQ ID NO: 2668847 - DNA, 25 bp, Homo sapien
catcaccgtctgtcatttttcacca

SEQ ID NO: 2668848 - DNA, 25 bp, Homo sapien
tgacactgccccttcagatggagcc

SEQ ID NO: 2668849 - DNA, 25 bp, Homo sapien
tatttgtctcttggaagccttccgg

SEQ ID NO: 2668850 - DNA, 25 bp, Homo sapien
gataacaatctagtccctgagcgtc

SEQ ID NO: 2668851 - DNA, 25 bp, Homo sapien
tgactgacattggtgcccttaggag

SEQ ID NO: 2668852 - DNA, 25 bp, Homo sapien
catcggtttctgcttttggcctctt

SEQ ID NO: 2668853 - DNA, 25 bp, Homo sapien
tcatcggtttctgcttttggcctct

SEQ ID NO: 2668854 - DNA, 25 bp, Homo sapien
ctccctcatcggtttctgcttttgg

SEQ ID NO: 2668855 - DNA, 25 bp, Homo sapien
ccctcatcggtttctgcttttggcc

SEQ ID NO: 2668856 - DNA, 25 bp, Homo sapien
gctatacattgttcctcctggagcc

SEQ ID NO: 2668857 - DNA, 25 bp, Homo sapien
tcaaattgcccaatccgaaggacac

SEQ ID NO: 2668858 - DNA, 25 bp, Homo sapien
gagcctcgagcctgtatatccaatt

SEQ ID NO: 2668859 - DNA, 25 bp, Homo sapien
tatccaattgcctagtcatccccag

SEQ ID NO: 2668860 - DNA, 25 bp, Homo sapien
tgtatatcgacagattcctttggcc

SEQ ID NO: 2668861 - DNA, 25 bp, Homo sapien
cactgggaagctagcttgtatatcg

SEQ ID NO: 2668862 - DNA, 25 bp, Homo sapien
gctagcttgtatatcgacagattcc

SEQ ID NO: 2668863 - DNA, 25 bp, Homo sapien
tccatccactgggaagctagcttgt

SEQ ID NO: 2668864 - DNA, 25 bp, Homo sapien
tacggacagccaagcaaagatcctt

SEQ ID NO: 2668865 - DNA, 25 bp, Homo sapien
ggtaggacaaggacactctccatct

SEQ ID NO: 2668866 - DNA, 25 bp, Homo sapien
cagttctaggacctgggtaggacaa

SEQ ID NO: 2668867 - DNA, 25 bp, Homo sapien
taactgtcacaactccgacaaggcc

SEQ ID NO: 2668868 - DNA, 25 bp, Homo sapien
cgagagctcccagccgccaatccgc

SEQ ID NO: 2668869 - DNA, 25 bp, Homo sapien
ctcccagccgccaatccgcctgcag

SEQ ID NO: 2668870 - DNA, 25 bp, Homo sapien
acaacgccccagcccgagagctccc

SEQ ID NO: 2668871 - DNA, 25 bp, Homo sapien
agcccgagagctcccagccgccaat

SEQ ID NO: 2668872 - DNA, 25 bp, Homo sapien
taagctgccgctactcagggagtgc

SEQ ID NO: 2668873 - DNA, 25 bp, Homo sapien
gggcggcgagttcacccgcaatccg

SEQ ID NO: 2668874 - DNA, 25 bp, Homo sapien
aagtggacgcagctgaccgcagtcc

SEQ ID NO: 2668875 - DNA, 25 bp, Homo sapien
aaagcagcggctcacggcttcgcgg

SEQ ID NO: 2668876 - DNA, 25 bp, Homo sapien
acggcacgcgctggagagagacaat

SEQ ID NO: 2668877 - DNA, 25 bp, Homo sapien
agaagggaagcacggtcagcgcgcg

SEQ ID NO: 2668878 - DNA, 25 bp, Homo sapien
agagacaatggcaggacggcggcgc

SEQ ID NO: 2668879 - DNA, 25 bp, Homo sapien
gggcgcacggcacgcgctggagaga

SEQ ID NO: 2668880 - DNA, 25 bp, Homo sapien
caggtaagtgcggataagccccgac

SEQ ID NO: 2668881 - DNA, 25 bp, Homo sapien
agtcgtggaccaccagcttgacatt

SEQ ID NO: 2668882 - DNA, 25 bp, Homo sapien
gcttgacattcccaaacgcactggc

SEQ ID NO: 2668883 - DNA, 25 bp, Homo sapien
gatactcggtgaacaccggacgcgc

SEQ ID NO: 2668884 - DNA, 25 bp, Homo sapien
aatttgacccatgtaacgcggacac

SEQ ID NO: 2668885 - DNA, 25 bp, Homo sapien
caagggtcaacccacagtcgtgaag

SEQ ID NO: 2668886 - DNA, 25 bp, Homo sapien
tgatgaaacttagtgaccccgtccc

SEQ ID NO: 2668887 - DNA, 25 bp, Homo sapien
gacactccacactcacggaagtggg

SEQ ID NO: 2668888 - DNA, 25 bp, Homo sapien
tagctgaaacatacgtaactccaat

SEQ ID NO: 2668889 - DNA, 25 bp, Homo sapien
tgtatgggatcacaagcattactgt

SEQ ID NO: 2668890 - DNA, 25 bp, Homo sapien
tacgggaaagcaatcctaacatcct

SEQ ID NO: 2668891 - DNA, 25 bp, Homo sapien
gaaaacttacacgagcgagtgatct

SEQ ID NO: 2668892 - DNA, 25 bp, Homo sapien
taattatcctttacttcatggaatg

SEQ ID NO: 2668893 - DNA, 25 bp, Homo sapien
gcagcaataattactggaactgaat

SEQ ID NO: 2668894 - DNA, 25 bp, Homo sapien
gtcattaacgttgtatttgatcaca

SEQ ID NO: 2668895 - DNA, 25 bp, Homo sapien
gatcacaatgatgtcagcgccccca

SEQ ID NO: 2668896 - DNA, 25 bp, Homo sapien
taagattggaacaagaacttatgaa

SEQ ID NO: 2668897 - DNA, 25 bp, Homo sapien
cttaagattggaacaagaacttatg

SEQ ID NO: 2668898 - DNA, 25 bp, Homo sapien
tccttaagattggaacaagaactta

SEQ ID NO: 2668899 - DNA, 25 bp, Homo sapien
agattggaacaagaacttatgaaaa

SEQ ID NO: 2668900 - DNA, 25 bp, Homo sapien
catttaatcaggaacaagcagagga

SEQ ID NO: 2668901 - DNA, 25 bp, Homo sapien
aattctagcctagtaaaggaccagg

SEQ ID NO: 2668902 - DNA, 25 bp, Homo sapien
aagtagtggctttgggaacctgcag

SEQ ID NO: 2668903 - DNA, 25 bp, Homo sapien
gatgcctgtctttgggagcttaaac

SEQ ID NO: 2668904 - DNA, 25 bp, Homo sapien
taactgagggagtaagtacactggc

SEQ ID NO: 2668905 - DNA, 25 bp, Homo sapien
cctggagcagggataacttgggcaa

SEQ ID NO: 2668906 - DNA, 25 bp, Homo sapien
gatcttgggaataacgcttctcagg

SEQ ID NO: 2668907 - DNA, 25 bp, Homo sapien
taaatcgaccagcaatcagacaagg

SEQ ID NO: 2668908 - DNA, 25 bp, Homo sapien
tctgaatacaaagtgtcaatgactc

SEQ ID NO: 2668909 - DNA, 25 bp, Homo sapien
taaactctaacgcatttgacttcag

SEQ ID NO: 2668910 - DNA, 25 bp, Homo sapien
taacaacttgattgccatggagagc

SEQ ID NO: 2668911 - DNA, 25 bp, Homo sapien
aaacaaccagtactcgtgggcctgc

SEQ ID NO: 2668912 - DNA, 25 bp, Homo sapien
gaggtacatagtgggcatgtacaag

SEQ ID NO: 2668913 - DNA, 25 bp, Homo sapien
tacatagtgggcatgtacaaggtaa

SEQ ID NO: 2668914 - DNA, 25 bp, Homo sapien
tagtgggcatgtacaaggtaactct

SEQ ID NO: 2668915 - DNA, 25 bp, Homo sapien
tgaggtacatagtgggcatgtacaa

SEQ ID NO: 2668916 - DNA, 25 bp, Homo sapien
atgtagaagtcatcaaggctgtgga

SEQ ID NO: 2668917 - DNA, 25 bp, Homo sapien
cagttgtactaacacagctccctct

SEQ ID NO: 2668918 - DNA, 25 bp, Homo sapien
aggtcgctcctagttcttttgcaag

SEQ ID NO: 2668919 - DNA, 25 bp, Homo sapien
tgcaagttggatcccttcagttgta

SEQ ID NO: 2668920 - DNA, 25 bp, Homo sapien
tcccatgagccaggaaacttcgctt

SEQ ID NO: 2668921 - DNA, 25 bp, Homo sapien
gtgcatttacgtagcttcaggcctg

SEQ ID NO: 2668922 - DNA, 25 bp, Homo sapien
tgaatactcgagaaagccaagcact

SEQ ID NO: 2668923 - DNA, 25 bp, Homo sapien
tatgtctacagatgttcccatgagc

SEQ ID NO: 2668924 - DNA, 25 bp, Homo sapien
ttgtcttctgatttaaggcttgaat

SEQ ID NO: 2668925 - DNA, 25 bp, Homo sapien
caagttgaggtggtctaattccatg

SEQ ID NO: 2668926 - DNA, 25 bp, Homo sapien
ctggttgttcaagttgaggtggtct

SEQ ID NO: 2668927 - DNA, 25 bp, Homo sapien
aggtggtctaattccatgaaaggag

SEQ ID NO: 2668928 - DNA, 25 bp, Homo sapien
tctagacattggctaagaaatgcac

SEQ ID NO: 2668929 - DNA, 25 bp, Homo sapien
tgagaataattgctctaagacctgt

SEQ ID NO: 2668930 - DNA, 25 bp, Homo sapien
gaatgtctagacattggctaagaaa

SEQ ID NO: 2668931 - DNA, 25 bp, Homo sapien
tgagaaaggatctgtaatgaatgtt

SEQ ID NO: 2668932 - DNA, 25 bp, Homo sapien
tattgaaccagtatccaatcaaggt

SEQ ID NO: 2668933 - DNA, 25 bp, Homo sapien
gctccccacctaggacacataggat

SEQ ID NO: 2668934 - DNA, 25 bp, Homo sapien
cttgggaggctgattaacacagatt

SEQ ID NO: 2668935 - DNA, 25 bp, Homo sapien
cagattctaggccttatcccaggtt

SEQ ID NO: 2668936 - DNA, 25 bp, Homo sapien
agttgcagatatcaggatcctttgg

SEQ ID NO: 2668937 - DNA, 25 bp, Homo sapien
ttaaaagttgcagatatcaggatcc

SEQ ID NO: 2668938 - DNA, 25 bp, Homo sapien
tgcagatatcaggatcctttggctc

SEQ ID NO: 2668939 - DNA, 25 bp, Homo sapien
gatatcaggatcctttggctctaaa

SEQ ID NO: 2668940 - DNA, 25 bp, Homo sapien
ccttcacatatatccctcacgtgga

SEQ ID NO: 2668941 - DNA, 25 bp, Homo sapien
catatatccctcacgtggattttgc

SEQ ID NO: 2668942 - DNA, 25 bp, Homo sapien
atatacccttcacatatatccctca

SEQ ID NO: 2668943 - DNA, 25 bp, Homo sapien
cacgtggattttgcaattattaaca

SEQ ID NO: 2668944 - DNA, 25 bp, Homo sapien
gagttataatgtgacgcttcagcct

SEQ ID NO: 2668945 - DNA, 25 bp, Homo sapien
gtcagagttataatgtgacgcttca

SEQ ID NO: 2668946 - DNA, 25 bp, Homo sapien
gcaagttatttaagtcagagttata

SEQ ID NO: 2668947 - DNA, 25 bp, Homo sapien
taatgtgacgcttcagcctttaaga

SEQ ID NO: 2668948 - DNA, 25 bp, Homo sapien
tggcttacagcgcagagaacgatct

SEQ ID NO: 2668949 - DNA, 25 bp, Homo sapien
gaagattcatggctagcacctggaa

SEQ ID NO: 2668950 - DNA, 25 bp, Homo sapien
gactcgtaatggtgggttgcctgaa

SEQ ID NO: 2668951 - DNA, 25 bp, Homo sapien
gaacgatcttgtgggcctctacaac

SEQ ID NO: 2668952 - DNA, 25 bp, Homo sapien
gaaagcttggaccaattcttatata

SEQ ID NO: 2668953 - DNA, 25 bp, Homo sapien
caaagcttatgagattgtaagtaac

SEQ ID NO: 2668954 - DNA, 25 bp, Homo sapien
gatgaggcaagtacatttgtaagga

SEQ ID NO: 2668955 - DNA, 25 bp, Homo sapien
aactaaccagtacccttgagtgtca

SEQ ID NO: 2668956 - DNA, 25 bp, Homo sapien
tacagagaacccgttgaaggcaatg

SEQ ID NO: 2668957 - DNA, 25 bp, Homo sapien
actgatatgatgatgcccggctact

SEQ ID NO: 2668958 - DNA, 25 bp, Homo sapien
gatcagccactggagatacatctag

SEQ ID NO: 2668959 - DNA, 25 bp, Homo sapien
cagagtgctcatatgcctttgaaag

SEQ ID NO: 2668960 - DNA, 25 bp, Homo sapien
tgtgaaactctaagggccatctgtg

SEQ ID NO: 2668961 - DNA, 25 bp, Homo sapien
cacttagacttttagagcgcatggt

SEQ ID NO: 2668962 - DNA, 25 bp, Homo sapien
caatacagaaaaggacatgccacgg

SEQ ID NO: 2668963 - DNA, 25 bp, Homo sapien
aagaattactccctgaagaccagga

SEQ ID NO: 2668964 - DNA, 25 bp, Homo sapien
cttcctccccagactgctgctacct

SEQ ID NO: 2668965 - DNA, 25 bp, Homo sapien
agtcttcctccccagactgctgcta

SEQ ID NO: 2668966 - DNA, 25 bp, Homo sapien
tgaagtcttcctccccagactgctg

SEQ ID NO: 2668967 - DNA, 25 bp, Homo sapien
tcctccccagactgctgctacctct

SEQ ID NO: 2668968 - DNA, 25 bp, Homo sapien
aatgcatttaactttctcgattaca

SEQ ID NO: 2668969 - DNA, 25 bp, Homo sapien
aactttctcgattacatttgaaaca

SEQ ID NO: 2668970 - DNA, 25 bp, Homo sapien
catttaactttctcgattacatttg

SEQ ID NO: 2668971 - DNA, 25 bp, Homo sapien
tgcatttaactttctcgattacatt

SEQ ID NO: 2668972 - DNA, 25 bp, Homo sapien
tgagggaagtgttataaaaccacaa

SEQ ID NO: 2668973 - DNA, 25 bp, Homo sapien
caagcatcggcttattaaggaaaaa

SEQ ID NO: 2668974 - DNA, 25 bp, Homo sapien
cacaaaggttttctggcttgatagg

SEQ ID NO: 2668975 - DNA, 25 bp, Homo sapien
cttgaatttcgaagacaacatcggc

SEQ ID NO: 2668976 - DNA, 25 bp, Homo sapien
ctcagagtgctaggaggaataaatg

SEQ ID NO: 2668977 - DNA, 25 bp, Homo sapien
ggtgggccaggcataaccctcagtc

SEQ ID NO: 2668978 - DNA, 25 bp, Homo sapien
tctcagttgctctggtgataaaatt

SEQ ID NO: 2668979 - DNA, 25 bp, Homo sapien
ggaataaatgtagcaatatctatgg

SEQ ID NO: 2668980 - DNA, 25 bp, Homo sapien
tgaccatagggagtgcaagtacagt

SEQ ID NO: 2668981 - DNA, 25 bp, Homo sapien
agactttcttgaccatagggagtgc

SEQ ID NO: 2668982 - DNA, 25 bp, Homo sapien
tagggagtgcaagtacagtagcagt

SEQ ID NO: 2668983 - DNA, 25 bp, Homo sapien
acctctggtaatcttctcgaagact

SEQ ID NO: 2668984 - DNA, 25 bp, Homo sapien
tagagcatcaatagctaacatcata

SEQ ID NO: 2668985 - DNA, 25 bp, Homo sapien
cataggtttggactgcttcttaagt

SEQ ID NO: 2668986 - DNA, 25 bp, Homo sapien
aagagttgtcataggtttggactgc

SEQ ID NO: 2668987 - DNA, 25 bp, Homo sapien
ttatagcaaactgaataatttcttc

SEQ ID NO: 2668988 - DNA, 25 bp, Homo sapien
tgatgacaacccttttcactgcttc

SEQ ID NO: 2668989 - DNA, 25 bp, Homo sapien
tttactgtgatgacaacccttttca

SEQ ID NO: 2668990 - DNA, 25 bp, Homo sapien
caccgtttactgtgatgacaaccct

SEQ ID NO: 2668991 - DNA, 25 bp, Homo sapien
tttccaccgtttactgtgatgacaa

SEQ ID NO: 2668992 - DNA, 25 bp, Homo sapien
ataagatatgcaaaaattttgatgt

SEQ ID NO: 2668993 - DNA, 25 bp, Homo sapien
tagcctaattattcgatacattaat

SEQ ID NO: 2668994 - DNA, 25 bp, Homo sapien
tacacaaaaattagatctggtgatt

SEQ ID NO: 2668995 - DNA, 25 bp, Homo sapien
cacaaaaattagatctggtgattct

SEQ ID NO: 2668996 - DNA, 25 bp, Homo sapien
ggtgtatactgagcactggcaattt

SEQ ID NO: 2668997 - DNA, 25 bp, Homo sapien
tcttcagcaatgacaaccaaaggtg

SEQ ID NO: 2668998 - DNA, 25 bp, Homo sapien
caagagtaggtacaatagactgggc

SEQ ID NO: 2668999 - DNA, 25 bp, Homo sapien
cataggcatccttgaattcatgttg

SEQ ID NO: 2669000 - DNA, 25 bp, Homo sapien
tactgctataacctgaggaccagct

SEQ ID NO: 2669001 - DNA, 25 bp, Homo sapien
tgtcaacaaacctggagcttttact

SEQ ID NO: 2669002 - DNA, 25 bp, Homo sapien
gtgttatgaggcctacccccttctc

SEQ ID NO: 2669003 - DNA, 25 bp, Homo sapien
ttctttctattgtcaacaaacctgg

SEQ ID NO: 2669004 - DNA, 25 bp, Homo sapien
catttcctttaaagagcatagcatc

SEQ ID NO: 2669005 - DNA, 25 bp, Homo sapien
atttcctttaaagagcatagcatca

SEQ ID NO: 2669006 - DNA, 25 bp, Homo sapien
tttcctttaaagagcatagcatcac

SEQ ID NO: 2669007 - DNA, 25 bp, Homo sapien
tgaatacaattttcaattcaagact

SEQ ID NO: 2669008 - DNA, 25 bp, Homo sapien
tccattttaaagttttgccattcat

SEQ ID NO: 2669009 - DNA, 25 bp, Homo sapien
tgccattcattcacttttccctttt

SEQ ID NO: 2669010 - DNA, 25 bp, Homo sapien
caattttcaattcaagacttgtcac

SEQ ID NO: 2669011 - DNA, 25 bp, Homo sapien
tgctgtaattaatggagaagccacc

SEQ ID NO: 2669012 - DNA, 25 bp, Homo sapien
cacccaagcagcatctaataaagca

SEQ ID NO: 2669013 - DNA, 25 bp, Homo sapien
ccttcgttgggccaatgattcctct

SEQ ID NO: 2669014 - DNA, 25 bp, Homo sapien
agttctcacatccttcgttgggcca

SEQ ID NO: 2669015 - DNA, 25 bp, Homo sapien
ttctagggactgtaggagacacagc

SEQ ID NO: 2669016 - DNA, 25 bp, Homo sapien
tttaagtttcctcctgcgaccagga

SEQ ID NO: 2669017 - DNA, 25 bp, Homo sapien
gaaactccaatcaagaggacctagg

SEQ ID NO: 2669018 - DNA, 25 bp, Homo sapien
taaaggcaagtcacagttctaggga

SEQ ID NO: 2669019 - DNA, 25 bp, Homo sapien
ggaagaaaagcacgccattaggagg

SEQ ID NO: 2669020 - DNA, 25 bp, Homo sapien
tctgactcctaagaagacttggttt

SEQ ID NO: 2669021 - DNA, 25 bp, Homo sapien
cattaggaggagcaaggattcacca

SEQ ID NO: 2669022 - DNA, 25 bp, Homo sapien
catgtgctacatattcccttcgaaa

SEQ ID NO: 2669023 - DNA, 25 bp, Homo sapien
cacacaattgagtagacagtatcta

SEQ ID NO: 2669024 - DNA, 25 bp, Homo sapien
catttcattcagtgggctggtggtc

SEQ ID NO: 2669025 - DNA, 25 bp, Homo sapien
cagtgaggcaaattcaaacacgctc

SEQ ID NO: 2669026 - DNA, 25 bp, Homo sapien
aaactgacttgagggaaattatgcc

SEQ ID NO: 2669027 - DNA, 25 bp, Homo sapien
tatcaaagttacattccaatgtgaa

SEQ ID NO: 2669028 - DNA, 25 bp, Homo sapien
tgataatatcaaagttacattccaa

SEQ ID NO: 2669029 - DNA, 25 bp, Homo sapien
aattatttcacaactatgaatcttt

SEQ ID NO: 2669030 - DNA, 25 bp, Homo sapien
tctgtcttccggctagagtaaagtg

SEQ ID NO: 2669031 - DNA, 25 bp, Homo sapien
tggagtacggtagcacagtctcact

SEQ ID NO: 2669032 - DNA, 25 bp, Homo sapien
ctggagtacggtagcacagtctcac

SEQ ID NO: 2669033 - DNA, 25 bp, Homo sapien
ggagtacggtagcacagtctcactc

SEQ ID NO: 2669034 - DNA, 25 bp, Homo sapien
caagctggctgtatttgtatacagc

SEQ ID NO: 2669035 - DNA, 25 bp, Homo sapien
ggctgtatttgtatacagcagttaa

SEQ ID NO: 2669036 - DNA, 25 bp, Homo sapien
gtatttgtatacagcagttaataaa

SEQ ID NO: 2669037 - DNA, 25 bp, Homo sapien
aaagcaagctggctgtatttgtata

SEQ ID NO: 2669038 - DNA, 25 bp, Homo sapien
tcctcgcctcactgggacagtgtcc

SEQ ID NO: 2669039 - DNA, 25 bp, Homo sapien
ctcctcgcctcactgggacagtgtc

SEQ ID NO: 2669040 - DNA, 25 bp, Homo sapien
cctcctcgcctcactgggacagtgt

SEQ ID NO: 2669041 - DNA, 25 bp, Homo sapien
cctcgcctcactgggacagtgtccc

SEQ ID NO: 2669042 - DNA, 25 bp, Homo sapien
cagctctgagcctactgctcggcac

SEQ ID NO: 2669043 - DNA, 25 bp, Homo sapien
gctctgagcctactgctcggcactg

SEQ ID NO: 2669044 - DNA, 25 bp, Homo sapien
gagcctactgctcggcactgccatt

SEQ ID NO: 2669045 - DNA, 25 bp, Homo sapien
cctactgctcggcactgccatttgc

SEQ ID NO: 2669046 - DNA, 25 bp, Homo sapien
tacaccacagtaggaatagcaagag

SEQ ID NO: 2669047 - DNA, 25 bp, Homo sapien
taagctgtccgtacaccacagtagg

SEQ ID NO: 2669048 - DNA, 25 bp, Homo sapien
taaaccataagctgtccgtacacca

SEQ ID NO: 2669049 - DNA, 25 bp, Homo sapien
tgtccgtacaccacagtaggaatag

SEQ ID NO: 2669050 - DNA, 25 bp, Homo sapien
ttctgggcctgactcacagaaccat

SEQ ID NO: 2669051 - DNA, 25 bp, Homo sapien
caagaaacaagtgagataaacctgc

SEQ ID NO: 2669052 - DNA, 25 bp, Homo sapien
gcccatgtgcctcccaagaaaacaa

SEQ ID NO: 2669053 - DNA, 25 bp, Homo sapien
tcagatgttgaccttgaaaccaaca

SEQ ID NO: 2669054 - DNA, 25 bp, Homo sapien
ttagactaccacattagggacagct

SEQ ID NO: 2669055 - DNA, 25 bp, Homo sapien
ttggaaacaccataaacgggaatca

SEQ ID NO: 2669056 - DNA, 25 bp, Homo sapien
cttcacaacgggccaccaggatggc

SEQ ID NO: 2669057 - DNA, 25 bp, Homo sapien
taccattaaacatggctgccatcac

SEQ ID NO: 2669058 - DNA, 25 bp, Homo sapien
tgtgtacaggtattctaaaaatgac

SEQ ID NO: 2669059 - DNA, 25 bp, Homo sapien
tatctggcttaactttttgattatt

SEQ ID NO: 2669060 - DNA, 25 bp, Homo sapien
gtatctggcttaactttttgattat

SEQ ID NO: 2669061 - DNA, 25 bp, Homo sapien
cttcccaatgcacagattccagtat

SEQ ID NO: 2669062 - DNA, 25 bp, Homo sapien
cccaatgcacagattccagtatctg

SEQ ID NO: 2669063 - DNA, 25 bp, Homo sapien
ccctggcaaccacccaatttggctg

SEQ ID NO: 2669064 - DNA, 25 bp, Homo sapien
gagccgccacatccggcccatttta

SEQ ID NO: 2669065 - DNA, 25 bp, Homo sapien
ctggcaaccacccaatttggctggg

SEQ ID NO: 2669066 - DNA, 25 bp, Homo sapien
tttaagtatatgattcattggcatg

SEQ ID NO: 2669067 - DNA, 25 bp, Homo sapien
tgagagaaagtggatgatgaaacca

SEQ ID NO: 2669068 - DNA, 25 bp, Homo sapien
catgagagaaagtggatgatgaaac

SEQ ID NO: 2669069 - DNA, 25 bp, Homo sapien
gacatgagagaaagtggatgatgaa

SEQ ID NO: 2669070 - DNA, 25 bp, Homo sapien
gggacatgagagaaagtggatgatg

SEQ ID NO: 2669071 - DNA, 25 bp, Homo sapien
tttaagcaggtcaactatatcaagg

SEQ ID NO: 2669072 - DNA, 25 bp, Homo sapien
acagatcaggagacacatggcctgg

SEQ ID NO: 2669073 - DNA, 25 bp, Homo sapien
tatatcaaggttcatggatgccagt

SEQ ID NO: 2669074 - DNA, 25 bp, Homo sapien
cacttggtacatctcggcacagatc

SEQ ID NO: 2669075 - DNA, 25 bp, Homo sapien
ctatcagatacacagagtcaattac

SEQ ID NO: 2669076 - DNA, 25 bp, Homo sapien
ttcaaatgactctactaagggccac

SEQ ID NO: 2669077 - DNA, 25 bp, Homo sapien
catcgctatcagtatatatggacca

SEQ ID NO: 2669078 - DNA, 25 bp, Homo sapien
tataaaagggactgcacacaaaccc

SEQ ID NO: 2669079 - DNA, 25 bp, Homo sapien
gaaggcactttagcctcattagcca

SEQ ID NO: 2669080 - DNA, 25 bp, Homo sapien
tctagctaatgtacagacctggccc

SEQ ID NO: 2669081 - DNA, 25 bp, Homo sapien
tagtctagggactctgtaacaggaa

SEQ ID NO: 2669082 - DNA, 25 bp, Homo sapien
gaagaacgtggagaaaatacccata

SEQ ID NO: 2669083 - DNA, 25 bp, Homo sapien
gacctggcccagattcatagtctag

SEQ ID NO: 2669084 - DNA, 25 bp, Homo sapien
gtaggatgacacatctgaataagct

SEQ ID NO: 2669085 - DNA, 25 bp, Homo sapien
tgacacatctgaataagctttccgc

SEQ ID NO: 2669086 - DNA, 25 bp, Homo sapien
taagctttccgcttccaggaatgaa

SEQ ID NO: 2669087 - DNA, 25 bp, Homo sapien
taaatacagtaggatgacacatctg

SEQ ID NO: 2669088 - DNA, 25 bp, Homo sapien
tgaccaagatttaagatattatcca

SEQ ID NO: 2669089 - DNA, 25 bp, Homo sapien
tttgaccaagatttaagatattatc

SEQ ID NO: 2669090 - DNA, 25 bp, Homo sapien
gaccaagatttaagatattatccaa

SEQ ID NO: 2669091 - DNA, 25 bp, Homo sapien
ccaagatttaagatattatccaaaa

SEQ ID NO: 2669092 - DNA, 25 bp, Homo sapien
tagagaagccaccactactgttacg

SEQ ID NO: 2669093 - DNA, 25 bp, Homo sapien
aacaccaggaggttaggacattgcc

SEQ ID NO: 2669094 - DNA, 25 bp, Homo sapien
tgttacgtgattaacccagagcaga

SEQ ID NO: 2669095 - DNA, 25 bp, Homo sapien
gaatgtgtgcaatctcaagggaaaa

SEQ ID NO: 2669096 - DNA, 25 bp, Homo sapien
tgccggagtggccaaacgtctttaa

SEQ ID NO: 2669097 - DNA, 25 bp, Homo sapien
taaaagtacattctcggaagaagcc

SEQ ID NO: 2669098 - DNA, 25 bp, Homo sapien
gaataacaatctacggctgccggag

SEQ ID NO: 2669099 - DNA, 25 bp, Homo sapien
gaagccaggccaacagcgaataaca

SEQ ID NO: 2669100 - DNA, 25 bp, Homo sapien
aattcaggcttttgactgaagatga

SEQ ID NO: 2669101 - DNA, 25 bp, Homo sapien
caggttgaaaggcaatcagagtggt

SEQ ID NO: 2669102 - DNA, 25 bp, Homo sapien
gcaatgaaatgaagtagccaggttg

SEQ ID NO: 2669103 - DNA, 25 bp, Homo sapien
cttttgactgaagatgaggtagtta

SEQ ID NO: 2669104 - DNA, 25 bp, Homo sapien
gggactcccatataggtatactcag

SEQ ID NO: 2669105 - DNA, 25 bp, Homo sapien
tgtcacctgaggacacattttgtca

SEQ ID NO: 2669106 - DNA, 25 bp, Homo sapien
tccaaagtaatataagggactccca

SEQ ID NO: 2669107 - DNA, 25 bp, Homo sapien
tagaaaacttcttgtgtaacacagg

SEQ ID NO: 2669108 - DNA, 25 bp, Homo sapien
gattacaccgaggtggaatcaccat

SEQ ID NO: 2669109 - DNA, 25 bp, Homo sapien
gaactactatgactgaaggagggag

SEQ ID NO: 2669110 - DNA, 25 bp, Homo sapien
ggctgaatacatctcccaaaaacgg

SEQ ID NO: 2669111 - DNA, 25 bp, Homo sapien
caaaaacggattgtgtgttcctggg

SEQ ID NO: 2669112 - DNA, 25 bp, Homo sapien
tgctcctttaggtgggccgtcagcg

SEQ ID NO: 2669113 - DNA, 25 bp, Homo sapien
agaagtgactgcgaccctctggaga

SEQ ID NO: 2669114 - DNA, 25 bp, Homo sapien
gatgacacctcatagcaggaccctg

SEQ ID NO: 2669115 - DNA, 25 bp, Homo sapien
gagtgaccgtgacaagaaactttcc

SEQ ID NO: 2669116 - DNA, 25 bp, Homo sapien
catttccgggagtgaatatacttcc

SEQ ID NO: 2669117 - DNA, 25 bp, Homo sapien
tacttcctgtattccgcaagctgct

SEQ ID NO: 2669118 - DNA, 25 bp, Homo sapien
attactaagcaacgacatttccggg

SEQ ID NO: 2669119 - DNA, 25 bp, Homo sapien
gcaagctgcttcaagtacatattcg

SEQ ID NO: 2669120 - DNA, 25 bp, Homo sapien
taagaatttccgctatagcagagcc

SEQ ID NO: 2669121 - DNA, 25 bp, Homo sapien
cccacattggtttcggtcagaagaa

SEQ ID NO: 2669122 - DNA, 25 bp, Homo sapien
agttacacgctaagaaagccagccc

SEQ ID NO: 2669123 - DNA, 25 bp, Homo sapien
tagcagagccttgaaccaagtgtgg

SEQ ID NO: 2669124 - DNA, 25 bp, Homo sapien
aaattcttgagccaacttcggtagc

SEQ ID NO: 2669125 - DNA, 25 bp, Homo sapien
ccaaaggcgggaatcttcactatgt

SEQ ID NO: 2669126 - DNA, 25 bp, Homo sapien
caaagaatttaagccactgacgtcc

SEQ ID NO: 2669127 - DNA, 25 bp, Homo sapien
tctatgatagagcaagaactgtgac

SEQ ID NO: 2669128 - DNA, 25 bp, Homo sapien
tgactgctacagtttgagaacaact

SEQ ID NO: 2669129 - DNA, 25 bp, Homo sapien
cagcccgttttaattagcccctcag

SEQ ID NO: 2669130 - DNA, 25 bp, Homo sapien
acttgtttattaacaaaatgctgtg

SEQ ID NO: 2669131 - DNA, 25 bp, Homo sapien
ttctgatgactgctacagtttgaga

SEQ ID NO: 2669132 - DNA, 25 bp, Homo sapien
caaggcatgatctgtggaccagcag

SEQ ID NO: 2669133 - DNA, 25 bp, Homo sapien
cataagcatcgcctgggaacttctt

SEQ ID NO: 2669134 - DNA, 25 bp, Homo sapien
gaattgtcttatgggttctcaaggc

SEQ ID NO: 2669135 - DNA, 25 bp, Homo sapien
atggaggataaggaacggccctcga

SEQ ID NO: 2669136 - DNA, 25 bp, Homo sapien
gaatccttagcagcgtttcccaggc

SEQ ID NO: 2669137 - DNA, 25 bp, Homo sapien
gccgaggtcagtgtataaggaatcc

SEQ ID NO: 2669138 - DNA, 25 bp, Homo sapien
aaataatggtctactcctgccgagg

SEQ ID NO: 2669139 - DNA, 25 bp, Homo sapien
gagaatctagcaaatcactgccatg

SEQ ID NO: 2669140 - DNA, 25 bp, Homo sapien
gcgacccttgtgtagagctgactct

SEQ ID NO: 2669141 - DNA, 25 bp, Homo sapien
agctgactctgggtgccttcatcca

SEQ ID NO: 2669142 - DNA, 25 bp, Homo sapien
gcctcatcaaatcagtcactgtgtg

SEQ ID NO: 2669143 - DNA, 25 bp, Homo sapien
gggctgtcccccgacatctagaatg

SEQ ID NO: 2669144 - DNA, 25 bp, Homo sapien
tgtagactctcatgtaacctcctgt

SEQ ID NO: 2669145 - DNA, 25 bp, Homo sapien
ggccctttgggctagactccagaca

SEQ ID NO: 2669146 - DNA, 25 bp, Homo sapien
tctggttgcctcactgggagatccc

SEQ ID NO: 2669147 - DNA, 25 bp, Homo sapien
aattcaaggctgtccaaagatgccc

SEQ ID NO: 2669148 - DNA, 25 bp, Homo sapien
agctttcaggaggagatcaaagcac

SEQ ID NO: 2669149 - DNA, 25 bp, Homo sapien
tatagactggcttcggcatcccttg

SEQ ID NO: 2669150 - DNA, 25 bp, Homo sapien
gtgagtccttggaaacacggcaccc

SEQ ID NO: 2669151 - DNA, 25 bp, Homo sapien
cagaaatatggtaacggcagagggc

SEQ ID NO: 2669152 - DNA, 25 bp, Homo sapien
ggcaccccacgatcagggaggctat

SEQ ID NO: 2669153 - DNA, 25 bp, Homo sapien
gtgaaagagctcctacactttgaaa

SEQ ID NO: 2669154 - DNA, 25 bp, Homo sapien
ggctgtggtcatgcggaacactctg

SEQ ID NO: 2669155 - DNA, 25 bp, Homo sapien
tatcatgaagtttgcctgttctaga

SEQ ID NO: 2669156 - DNA, 25 bp, Homo sapien
taagatggctatccagataatcctg

SEQ ID NO: 2669157 - DNA, 25 bp, Homo sapien
gagcctttcgcttctttgccagaca

SEQ ID NO: 2669158 - DNA, 25 bp, Homo sapien
tgagcacaaaactccacgctgggag

SEQ ID NO: 2669159 - DNA, 25 bp, Homo sapien
cagttgtccagactagaggatgggt

SEQ ID NO: 2669160 - DNA, 25 bp, Homo sapien
cattcactgatacgatttatggcag

SEQ ID NO: 2669161 - DNA, 25 bp, Homo sapien
ggcttctggaatttgtcgatatcac

SEQ ID NO: 2669162 - DNA, 25 bp, Homo sapien
caactgaggattcttcccggggaga

SEQ ID NO: 2669163 - DNA, 25 bp, Homo sapien
gcttctggaatttgtcgatatcaca

SEQ ID NO: 2669164 - DNA, 25 bp, Homo sapien
tctggaatttgtcgatatcacagcc

SEQ ID NO: 2669165 - DNA, 25 bp, Homo sapien
tgggattcctcttacgtggcagtcg

SEQ ID NO: 2669166 - DNA, 25 bp, Homo sapien
ttctagtaacgatgagagtcacagt

SEQ ID NO: 2669167 - DNA, 25 bp, Homo sapien
gcctctttgaagatactctggtttc

SEQ ID NO: 2669168 - DNA, 25 bp, Homo sapien
ccttcccttgatcgcagtatgcttg

SEQ ID NO: 2669169 - DNA, 25 bp, Homo sapien
tcacacaagccaaaggagagtccac

SEQ ID NO: 2669170 - DNA, 25 bp, Homo sapien
ccatggcggctttccattgagatgc

SEQ ID NO: 2669171 - DNA, 25 bp, Homo sapien
cttgacgcatctgcagtccccatgg

SEQ ID NO: 2669172 - DNA, 25 bp, Homo sapien
tgagatgccctaaggtccatgctgg

SEQ ID NO: 2669173 - DNA, 25 bp, Homo sapien
ggcacagggcagatcaatgcatcaa

SEQ ID NO: 2669174 - DNA, 25 bp, Homo sapien
aactatacctaagcagctgaccaac

SEQ ID NO: 2669175 - DNA, 25 bp, Homo sapien
tcctcttcttgcaagtaaactccaa

SEQ ID NO: 2669176 - DNA, 25 bp, Homo sapien
gcaagtaaactccaatctttaatga

SEQ ID NO: 2669177 - DNA, 25 bp, Homo sapien
agggatgggtcatgatcaggttcaa

SEQ ID NO: 2669178 - DNA, 25 bp, Homo sapien
ttttcctcttggagtagagagggat

SEQ ID NO: 2669179 - DNA, 25 bp, Homo sapien
ctgcccctcctttatcaaagttggg

SEQ ID NO: 2669180 - DNA, 25 bp, Homo sapien
gggtcatgatcaggttcaatgacag

SEQ ID NO: 2669181 - DNA, 25 bp, Homo sapien
ctacggtagcaaccggctgacgaga

SEQ ID NO: 2669182 - DNA, 25 bp, Homo sapien
tagcaaccggctgacgagagtatcc

SEQ ID NO: 2669183 - DNA, 25 bp, Homo sapien
aaccggctgacgagagtatccacct

SEQ ID NO: 2669184 - DNA, 25 bp, Homo sapien
tgacgagagtatccacctccgaaac

SEQ ID NO: 2669185 - DNA, 25 bp, Homo sapien
gcagcagtgggacatggcgaacttg

SEQ ID NO: 2669186 - DNA, 25 bp, Homo sapien
cgtcccgggcccggatgaggacatt

SEQ ID NO: 2669187 - DNA, 25 bp, Homo sapien
tgggctgcagggacgtcccgggccc

SEQ ID NO: 2669188 - DNA, 25 bp, Homo sapien
tgggacatggcgaacttgggctgca

SEQ ID NO: 2669189 - DNA, 25 bp, Homo sapien
taacatatcctagcacaagaatcca

SEQ ID NO: 2669190 - DNA, 25 bp, Homo sapien
ttgcccctggtgagaggatctgaac

SEQ ID NO: 2669191 - DNA, 25 bp, Homo sapien
tcatacggtggtctgacctttttaa

SEQ ID NO: 2669192 - DNA, 25 bp, Homo sapien
ttacacatatggaatcatacggtgg

SEQ ID NO: 2669193 - DNA, 25 bp, Homo sapien
tgttggtgactttgctccatcaagc

SEQ ID NO: 2669194 - DNA, 25 bp, Homo sapien
ggccagttagcttgcccatcctcag

SEQ ID NO: 2669195 - DNA, 25 bp, Homo sapien
aggagcccacagttggctatttcgg

SEQ ID NO: 2669196 - DNA, 25 bp, Homo sapien
tcggccgtgtgtccagagtctggaa

SEQ ID NO: 2669197 - DNA, 25 bp, Homo sapien
catcttgacttaatgcctctccatt

SEQ ID NO: 2669198 - DNA, 25 bp, Homo sapien
atcttgacttaatgcctctccattc

SEQ ID NO: 2669199 - DNA, 25 bp, Homo sapien
cttgacttaatgcctctccattctc

SEQ ID NO: 2669200 - DNA, 25 bp, Homo sapien
tcttgacttaatgcctctccattct

SEQ ID NO: 2669201 - DNA, 25 bp, Homo sapien
ggggctgttgttttgccctttgaga

SEQ ID NO: 2669202 - DNA, 25 bp, Homo sapien
ctcggaggctgcgtcgtgaagactt

SEQ ID NO: 2669203 - DNA, 25 bp, Homo sapien
gaaggacctcggaggctgcgtcgtg

SEQ ID NO: 2669204 - DNA, 25 bp, Homo sapien
ggctgcgtcgtgaagactttccatc

SEQ ID NO: 2669205 - DNA, 25 bp, Homo sapien
agcttcacttgctgtgaggtcaaag

SEQ ID NO: 2669206 - DNA, 25 bp, Homo sapien
gactgattactcttggagcagtgaa

SEQ ID NO: 2669207 - DNA, 25 bp, Homo sapien
ttcattcctgctactgagacacgtg

SEQ ID NO: 2669208 - DNA, 25 bp, Homo sapien
tgttccttcaccagcttcacttgct

SEQ ID NO: 2669209 - DNA, 25 bp, Homo sapien
tgtcctcccctcattgtggagatgg

SEQ ID NO: 2669210 - DNA, 25 bp, Homo sapien
gctgtcctcccctcattgtggagat

SEQ ID NO: 2669211 - DNA, 25 bp, Homo sapien
tcctcccctcattgtggagatggac

SEQ ID NO: 2669212 - DNA, 25 bp, Homo sapien
gtcctcccctcattgtggagatgga

SEQ ID NO: 2669213 - DNA, 25 bp, Homo sapien
ggtgatgttgaaaggcaggaatact

SEQ ID NO: 2669214 - DNA, 25 bp, Homo sapien
gctcagcccagcaaaatagcagggc

SEQ ID NO: 2669215 - DNA, 25 bp, Homo sapien
ggcaggaatactgctcagcccagca

SEQ ID NO: 2669216 - DNA, 25 bp, Homo sapien
tcagagccttcagggtgatgttgaa

SEQ ID NO: 2669217 - DNA, 25 bp, Homo sapien
ggatattgagcaggtcaaaccacag

SEQ ID NO: 2669218 - DNA, 25 bp, Homo sapien
taaccctggcactaggatttgagaa

SEQ ID NO: 2669219 - DNA, 25 bp, Homo sapien
tattgccttgatcgcatgcctaacc

SEQ ID NO: 2669220 - DNA, 25 bp, Homo sapien
tgagaatttaccagaggttacctcc

SEQ ID NO: 2669221 - DNA, 25 bp, Homo sapien
taaaccccaaacccatactcatcaa

SEQ ID NO: 2669222 - DNA, 25 bp, Homo sapien
aaacccatactcatcaaacttgaaa

SEQ ID NO: 2669223 - DNA, 25 bp, Homo sapien
ccatactcatcaaacttgaaaggta

SEQ ID NO: 2669224 - DNA, 25 bp, Homo sapien
catactcatcaaacttgaaaggtaa

SEQ ID NO: 2669225 - DNA, 25 bp, Homo sapien
tttgataattaagaaagtcgactga

SEQ ID NO: 2669226 - DNA, 25 bp, Homo sapien
aattaagaaagtcgactgagctgtg

SEQ ID NO: 2669227 - DNA, 25 bp, Homo sapien
gaggatatcggatcaatttgataat

SEQ ID NO: 2669228 - DNA, 25 bp, Homo sapien
tagttttgagaaatagaggatatcg

SEQ ID NO: 2669229 - DNA, 25 bp, Homo sapien
catttaaaggtcatcaccttgagct

SEQ ID NO: 2669230 - DNA, 25 bp, Homo sapien
cagagatgtactgcaaaatccatga

SEQ ID NO: 2669231 - DNA, 25 bp, Homo sapien
gagctctttcaagggtaaatcatct

SEQ ID NO: 2669232 - DNA, 25 bp, Homo sapien
ttcaagggtaaatcatctcccagag

SEQ ID NO: 2669233 - DNA, 25 bp, Homo sapien
agtgagtcttttaacagtccccctg

SEQ ID NO: 2669234 - DNA, 25 bp, Homo sapien
aaaatgaactgcacttctttgccca

SEQ ID NO: 2669235 - DNA, 25 bp, Homo sapien
caagtctgtctctacaatcatacac

SEQ ID NO: 2669236 - DNA, 25 bp, Homo sapien
cctagtcttaccttctacatcactt

SEQ ID NO: 2669237 - DNA, 25 bp, Homo sapien
gaccgaagagcttcacgttgtacag

SEQ ID NO: 2669238 - DNA, 25 bp, Homo sapien
gccactgtaatgaagactggccaga

SEQ ID NO: 2669239 - DNA, 25 bp, Homo sapien
aagcacagacaggaccgaagagctt

SEQ ID NO: 2669240 - DNA, 25 bp, Homo sapien
gctgccactgtaatgaagactggcc

SEQ ID NO: 2669241 - DNA, 25 bp, Homo sapien
gctgactcaaaactgcctgagatct

SEQ ID NO: 2669242 - DNA, 25 bp, Homo sapien
acctgaaggctgactcaaaactgcc

SEQ ID NO: 2669243 - DNA, 25 bp, Homo sapien
gatctttcttcatcgttcagttcaa

SEQ ID NO: 2669244 - DNA, 25 bp, Homo sapien
gaaggctgactcaaaactgcctgag

SEQ ID NO: 2669245 - DNA, 25 bp, Homo sapien
cagaagttgatgctccaagcatgag

SEQ ID NO: 2669246 - DNA, 25 bp, Homo sapien
aagttgatgctccaagcatgaggca

SEQ ID NO: 2669247 - DNA, 25 bp, Homo sapien
tccagaagttgatgctccaagcatg

SEQ ID NO: 2669248 - DNA, 25 bp, Homo sapien
ttgatgctccaagcatgaggcaggg

SEQ ID NO: 2669249 - DNA, 25 bp, Homo sapien
tgccagcttgtcatggcctggactg

SEQ ID NO: 2669250 - DNA, 25 bp, Homo sapien
tggactgttggctctctctgtgatc

SEQ ID NO: 2669251 - DNA, 25 bp, Homo sapien
ggactgttggctctctctgtgatcc

SEQ ID NO: 2669252 - DNA, 25 bp, Homo sapien
cttgtcatggcctggactgttggct

SEQ ID NO: 2669253 - DNA, 25 bp, Homo sapien
gagctacagccacgccagttggaca

SEQ ID NO: 2669254 - DNA, 25 bp, Homo sapien
gaagaagagcaataggggtaagtgg

SEQ ID NO: 2669255 - DNA, 25 bp, Homo sapien
gaaggagctacagccacgccagttg

SEQ ID NO: 2669256 - DNA, 25 bp, Homo sapien
ttcttcagcattgccttgcaggaag

SEQ ID NO: 2669257 - DNA, 25 bp, Homo sapien
ccattaagccaacccgtcctaagag

SEQ ID NO: 2669258 - DNA, 25 bp, Homo sapien
catggctcaaggtcacttccaccga

SEQ ID NO: 2669259 - DNA, 25 bp, Homo sapien
caaagagaataccatagttccaggt

SEQ ID NO: 2669260 - DNA, 25 bp, Homo sapien
ccaggtttcggtttgaaggtgctga

SEQ ID NO: 2669261 - DNA, 25 bp, Homo sapien
tgtgcagcttccgtgatgcagtttg

SEQ ID NO: 2669262 - DNA, 25 bp, Homo sapien
tgcagcttccgtgatgcagtttgat

SEQ ID NO: 2669263 - DNA, 25 bp, Homo sapien
cgtgtgcagcttccgtgatgcagtt

SEQ ID NO: 2669264 - DNA, 25 bp, Homo sapien
gcagcttccgtgatgcagtttgatc

SEQ ID NO: 2669265 - DNA, 25 bp, Homo sapien
aaatggcaaagggatattctgcttg

SEQ ID NO: 2669266 - DNA, 25 bp, Homo sapien
caaagggatattctgcttgcagtct

SEQ ID NO: 2669267 - DNA, 25 bp, Homo sapien
gatattctgcttgcagtcttttgcc

SEQ ID NO: 2669268 - DNA, 25 bp, Homo sapien
gcttgcagtcttttgccctctggca

SEQ ID NO: 2669269 - DNA, 25 bp, Homo sapien
gaagtggttggaacacacagttctg

SEQ ID NO: 2669270 - DNA, 25 bp, Homo sapien
gaggaaagagctttcgttcactttg

SEQ ID NO: 2669271 - DNA, 25 bp, Homo sapien
gctggccagtctgtccccacgtggg

SEQ ID NO: 2669272 - DNA, 25 bp, Homo sapien
agctctggccgcgttgagacccacg

SEQ ID NO: 2669273 - DNA, 25 bp, Homo sapien
aatatgcacccgttacgcaaaccag

SEQ ID NO: 2669274 - DNA, 25 bp, Homo sapien
cagcccttaaggctgcacatgatcc

SEQ ID NO: 2669275 - DNA, 25 bp, Homo sapien
tggtgtggcgtgtatatgtgcacca

SEQ ID NO: 2669276 - DNA, 25 bp, Homo sapien
tccccactacagaatgtggtgtggc

SEQ ID NO: 2669277 - DNA, 25 bp, Homo sapien
gctttcagacaacggccagtcctga

SEQ ID NO: 2669278 - DNA, 25 bp, Homo sapien
gtccttgaggtttgctttcagacaa

SEQ ID NO: 2669279 - DNA, 25 bp, Homo sapien
tggaattcatgcgatggagcagcag

SEQ ID NO: 2669280 - DNA, 25 bp, Homo sapien
aagtggctgcggagtccagaagtcc

SEQ ID NO: 2669281 - DNA, 25 bp, Homo sapien
gggccgagaggcaagccgggtccgc

SEQ ID NO: 2669282 - DNA, 25 bp, Homo sapien
cctggggccgagaggcaagccgggt

SEQ ID NO: 2669283 - DNA, 25 bp, Homo sapien
gccgagaggcaagccgggtccgcgc

SEQ ID NO: 2669284 - DNA, 25 bp, Homo sapien
gggtccgcgcggggtgcagcgccac

SEQ ID NO: 2669285 - DNA, 25 bp, Homo sapien
agctgcagcggggtgcgcgcagacc

SEQ ID NO: 2669286 - DNA, 25 bp, Homo sapien
tcgtttgcgtttgccacagctgcag

SEQ ID NO: 2669287 - DNA, 25 bp, Homo sapien
ctgcagcggggtgcgcgcagaccca

SEQ ID NO: 2669288 - DNA, 25 bp, Homo sapien
tcatcgtttgcgtttgccacagctg

SEQ ID NO: 2669289 - DNA, 25 bp, Homo sapien
cactacagatccgtcccaaattggt

SEQ ID NO: 2669290 - DNA, 25 bp, Homo sapien
tagtgagcaaacgtgcattctggcc

SEQ ID NO: 2669291 - DNA, 25 bp, Homo sapien
cctaaaaattcaaggaatggcccag

SEQ ID NO: 2669292 - DNA, 25 bp, Homo sapien
tgttttccattgtgcggtgacgcca

SEQ ID NO: 2669293 - DNA, 25 bp, Homo sapien
tttcatttgaatttctacacagtat

SEQ ID NO: 2669294 - DNA, 25 bp, Homo sapien
aaaagtattttgcaagtttcatttg

SEQ ID NO: 2669295 - DNA, 25 bp, Homo sapien
catttgaatttctacacagtataat

SEQ ID NO: 2669296 - DNA, 25 bp, Homo sapien
cagaaaagtattttgcaagtttcat

SEQ ID NO: 2669297 - DNA, 25 bp, Homo sapien
ttccatgaacgatcctctccagggc

SEQ ID NO: 2669298 - DNA, 25 bp, Homo sapien
ccagtcgtcatccttgtttccatga

SEQ ID NO: 2669299 - DNA, 25 bp, Homo sapien
cccagtcgtcatccttgtttccatg

SEQ ID NO: 2669300 - DNA, 25 bp, Homo sapien
ccttgtttccatgaacgatcctctc

SEQ ID NO: 2669301 - DNA, 25 bp, Homo sapien
taaacccagggtgctattagcaggc

SEQ ID NO: 2669302 - DNA, 25 bp, Homo sapien
gctcttggagatgaaaaggtttccc

SEQ ID NO: 2669303 - DNA, 25 bp, Homo sapien
tggcccacgcaagctacctggtgta

SEQ ID NO: 2669304 - DNA, 25 bp, Homo sapien
ccagttagccacaacaaagaatggg

SEQ ID NO: 2669305 - DNA, 25 bp, Homo sapien
ttctttccattcgatggtcatcagt

SEQ ID NO: 2669306 - DNA, 25 bp, Homo sapien
ggcatcagggcttctgtgtaagtca

SEQ ID NO: 2669307 - DNA, 25 bp, Homo sapien
catcagttttatcaggggcatcagg

SEQ ID NO: 2669308 - DNA, 25 bp, Homo sapien
gggcatcagggcttctgtgtaagtc

SEQ ID NO: 2669309 - DNA, 25 bp, Homo sapien
agggccagctatgggacaatgcctg

SEQ ID NO: 2669310 - DNA, 25 bp, Homo sapien
ggccagctatgggacaatgcctggg

SEQ ID NO: 2669311 - DNA, 25 bp, Homo sapien
agctatgggacaatgcctgggcttt

SEQ ID NO: 2669312 - DNA, 25 bp, Homo sapien
ccagctatgggacaatgcctgggct

SEQ ID NO: 2669313 - DNA, 25 bp, Homo sapien
cagaatataccctttttccaattca

SEQ ID NO: 2669314 - DNA, 25 bp, Homo sapien
tctggaagttaagctatctgcaaac

SEQ ID NO: 2669315 - DNA, 25 bp, Homo sapien
ggaaaaatggtctagggatctttgc

SEQ ID NO: 2669316 - DNA, 25 bp, Homo sapien
gggactagtgaaactcaggaattct

SEQ ID NO: 2669317 - DNA, 25 bp, Homo sapien
gtttcaccacgaagactttgccgca

SEQ ID NO: 2669318 - DNA, 25 bp, Homo sapien
actttgccgcagacgtggggtttag

SEQ ID NO: 2669319 - DNA, 25 bp, Homo sapien
tgtttcaccacgaagactttgccgc

SEQ ID NO: 2669320 - DNA, 25 bp, Homo sapien
aagactttgccgcagacgtggggtt

SEQ ID NO: 2669321 - DNA, 25 bp, Homo sapien
gagattgacgcttcttgtactgaag

SEQ ID NO: 2669322 - DNA, 25 bp, Homo sapien
attagcttgcatgccccagctactg

SEQ ID NO: 2669323 - DNA, 25 bp, Homo sapien
tcagcaaggtcatatttggatagag

SEQ ID NO: 2669324 - DNA, 25 bp, Homo sapien
ggcctttgattggtacaggttggaa

SEQ ID NO: 2669325 - DNA, 25 bp, Homo sapien
gcaatagaaacatccggatttgtca

SEQ ID NO: 2669326 - DNA, 25 bp, Homo sapien
catgcaatagaaacatccggatttg

SEQ ID NO: 2669327 - DNA, 25 bp, Homo sapien
taacaaccatgcaatagaaacatcc

SEQ ID NO: 2669328 - DNA, 25 bp, Homo sapien
ggcaaataacaaccatgcaatagaa

SEQ ID NO: 2669329 - DNA, 25 bp, Homo sapien
agaggtgagttattttctactcctc

SEQ ID NO: 2669330 - DNA, 25 bp, Homo sapien
gaagaggtgagttattttctactcc

SEQ ID NO: 2669331 - DNA, 25 bp, Homo sapien
gaggtgagttattttctactcctcc

SEQ ID NO: 2669332 - DNA, 25 bp, Homo sapien
tgaagaggtgagttattttctactc

SEQ ID NO: 2669333 - DNA, 25 bp, Homo sapien
aggtatagttccctcagacatttgt

SEQ ID NO: 2669334 - DNA, 25 bp, Homo sapien
catctacttttgactcaacccttat

SEQ ID NO: 2669335 - DNA, 25 bp, Homo sapien
gcaggtatagttccctcagacattt

SEQ ID NO: 2669336 - DNA, 25 bp, Homo sapien
cttttgactcaacccttatcaaagc

SEQ ID NO: 2669337 - DNA, 25 bp, Homo sapien
tgaacgatcaccgttattatgagag

SEQ ID NO: 2669338 - DNA, 25 bp, Homo sapien
tcaccgttattatgagagtgatgat

SEQ ID NO: 2669339 - DNA, 25 bp, Homo sapien
aacgatcaccgttattatgagagtg

SEQ ID NO: 2669340 - DNA, 25 bp, Homo sapien
tcagtgaacgatcaccgttattatg

SEQ ID NO: 2669341 - DNA, 25 bp, Homo sapien
ggtcgtttgactggagccctctgtt

SEQ ID NO: 2669342 - DNA, 25 bp, Homo sapien
cctcaccatgtgcagctttccacag

SEQ ID NO: 2669343 - DNA, 25 bp, Homo sapien
ctcaccatgtgcagctttccacagg

SEQ ID NO: 2669344 - DNA, 25 bp, Homo sapien
attggtcgtttgactggagccctct

SEQ ID NO: 2669345 - DNA, 25 bp, Homo sapien
ggcccacgggatttcacatgggaaa

SEQ ID NO: 2669346 - DNA, 25 bp, Homo sapien
ttcacatgggaaagtttgagctggg

SEQ ID NO: 2669347 - DNA, 25 bp, Homo sapien
tcaaactggcccacgggatttcaca

SEQ ID NO: 2669348 - DNA, 25 bp, Homo sapien
tttcacatgggaaagtttgagctgg

SEQ ID NO: 2669349 - DNA, 25 bp, Homo sapien
ccctggtaatgtaggataatgcctg

SEQ ID NO: 2669350 - DNA, 25 bp, Homo sapien
cagggcaatttgcctaaacccctag

SEQ ID NO: 2669351 - DNA, 25 bp, Homo sapien
tggtaatgtaggataatgcctgtga

SEQ ID NO: 2669352 - DNA, 25 bp, Homo sapien
tgcctgtgaagtttaaacactgtca

SEQ ID NO: 2669353 - DNA, 25 bp, Homo sapien
gggacactagggaccgtcagcaaag

SEQ ID NO: 2669354 - DNA, 25 bp, Homo sapien
gagaacagctgtaaggggacactag

SEQ ID NO: 2669355 - DNA, 25 bp, Homo sapien
ctagggaccgtcagcaaagccacct

SEQ ID NO: 2669356 - DNA, 25 bp, Homo sapien
tgtaaggggacactagggaccgtca

SEQ ID NO: 2669357 - DNA, 25 bp, Homo sapien
tagaatctctaggtatagggcccaa

SEQ ID NO: 2669358 - DNA, 25 bp, Homo sapien
taatgtcagttactccggtggaaga

SEQ ID NO: 2669359 - DNA, 25 bp, Homo sapien
caaacaagccttccagttggtgaat

SEQ ID NO: 2669360 - DNA, 25 bp, Homo sapien
gcttggaccatttggatcacctgag

SEQ ID NO: 2669361 - DNA, 25 bp, Homo sapien
tgctgccagttgaaaagggaagcat

SEQ ID NO: 2669362 - DNA, 25 bp, Homo sapien
tgccaaaattttggtagtgtcttta

SEQ ID NO: 2669363 - DNA, 25 bp, Homo sapien
tcaaagtgctgccagttgaaaaggg

SEQ ID NO: 2669364 - DNA, 25 bp, Homo sapien
aagtgctgccagttgaaaagggaag

SEQ ID NO: 2669365 - DNA, 25 bp, Homo sapien
taaagaggattgcactgcctccatg

SEQ ID NO: 2669366 - DNA, 25 bp, Homo sapien
ccaaagggatggtttactgctgaca

SEQ ID NO: 2669367 - DNA, 25 bp, Homo sapien
tctgccaatggagagagcggcttaa

SEQ ID NO: 2669368 - DNA, 25 bp, Homo sapien
tagggatctgactcttcaaagctga

SEQ ID NO: 2669369 - DNA, 25 bp, Homo sapien
gataatgtgtatgcagctcttagca

SEQ ID NO: 2669370 - DNA, 25 bp, Homo sapien
gagcatatcccattaaaagcctcag

SEQ ID NO: 2669371 - DNA, 25 bp, Homo sapien
gacggtacctgccttttcaggtgaa

SEQ ID NO: 2669372 - DNA, 25 bp, Homo sapien
tttgttatcattaggcagtgtcccc

SEQ ID NO: 2669373 - DNA, 25 bp, Homo sapien
ctagactagggaggaaggccagttt

SEQ ID NO: 2669374 - DNA, 25 bp, Homo sapien
gagaataatgctgatcccactgtgg

SEQ ID NO: 2669375 - DNA, 25 bp, Homo sapien
tcagcctgggtagaagaccaatgag

SEQ ID NO: 2669376 - DNA, 25 bp, Homo sapien
gcaaccctctcgtgggcagaagaaa

SEQ ID NO: 2669377 - DNA, 25 bp, Homo sapien
ctgtccataatctggcttcaccttt

SEQ ID NO: 2669378 - DNA, 25 bp, Homo sapien
ccataatctggcttcaccttttcca

SEQ ID NO: 2669379 - DNA, 25 bp, Homo sapien
taatctggcttcaccttttccattc

SEQ ID NO: 2669380 - DNA, 25 bp, Homo sapien
tctggcttcaccttttccattcaat

SEQ ID NO: 2669381 - DNA, 25 bp, Homo sapien
tgggcaaagacaaccctcagggcag

SEQ ID NO: 2669382 - DNA, 25 bp, Homo sapien
ggcagctttgactgcatccagcaaa

SEQ ID NO: 2669383 - DNA, 25 bp, Homo sapien
gcaaacattctccaggtaagtactt

SEQ ID NO: 2669384 - DNA, 25 bp, Homo sapien
gtgggcaaagacaaccctcagggca

SEQ ID NO: 2669385 - DNA, 25 bp, Homo sapien
gcttgtatcccagagtaattagacg

SEQ ID NO: 2669386 - DNA, 25 bp, Homo sapien
ccttatgtaaataggacgtccgtga

SEQ ID NO: 2669387 - DNA, 25 bp, Homo sapien
gcttctgccctagatccttatgtaa

SEQ ID NO: 2669388 - DNA, 25 bp, Homo sapien
cgtccgtgacttgatgttgaaatga

SEQ ID NO: 2669389 - DNA, 25 bp, Homo sapien
taatttttcagccttccatggacac

SEQ ID NO: 2669390 - DNA, 25 bp, Homo sapien
catggacacctgttttagctgattc

SEQ ID NO: 2669391 - DNA, 25 bp, Homo sapien
tgctacccttctagaggagcagcag

SEQ ID NO: 2669392 - DNA, 25 bp, Homo sapien
tattttgagtttgagacagttggaa

SEQ ID NO: 2669393 - DNA, 25 bp, Homo sapien
tggtagccttacagagtggacttgc

SEQ ID NO: 2669394 - DNA, 25 bp, Homo sapien
gaataatgcccatatctgctggcat

SEQ ID NO: 2669395 - DNA, 25 bp, Homo sapien
cagtatatgagattctagacctcgg

SEQ ID NO: 2669396 - DNA, 25 bp, Homo sapien
tcatgtccagggagtaatttcccca

SEQ ID NO: 2669397 - DNA, 25 bp, Homo sapien
tgttcagtctccctaggtgagttca

SEQ ID NO: 2669398 - DNA, 25 bp, Homo sapien
ttctctagctccaagtactgatttc

SEQ ID NO: 2669399 - DNA, 25 bp, Homo sapien
taatcattgcaaggagaaaactatc

SEQ ID NO: 2669400 - DNA, 25 bp, Homo sapien
tctcaagggtatggctaatcattgc

SEQ ID NO: 2669401 - DNA, 25 bp, Homo sapien
gattaatgaaacgtaagtaactcta

SEQ ID NO: 2669402 - DNA, 25 bp, Homo sapien
aacgttcctggatttacatttcaag

SEQ ID NO: 2669403 - DNA, 25 bp, Homo sapien
tagtgtaattcctaaagtccttgaa

SEQ ID NO: 2669404 - DNA, 25 bp, Homo sapien
gaaggagtgctttcaattacctcac

SEQ ID NO: 2669405 - DNA, 25 bp, Homo sapien
cattggcactaggaggagtacccct

SEQ ID NO: 2669406 - DNA, 25 bp, Homo sapien
tacttaaggccatcataaagcactg

SEQ ID NO: 2669407 - DNA, 25 bp, Homo sapien
gagattgttgacgttttgaggaaag

SEQ ID NO: 2669408 - DNA, 25 bp, Homo sapien
aaacagtgctgtattacttaacatg

SEQ ID NO: 2669409 - DNA, 25 bp, Homo sapien
aagctcaccgagacggcgatccggg

SEQ ID NO: 2669410 - DNA, 25 bp, Homo sapien
accgtactgcatgtgaagctcaccg

SEQ ID NO: 2669411 - DNA, 25 bp, Homo sapien
gggcaggacaacatcaccgtactgc

SEQ ID NO: 2669412 - DNA, 25 bp, Homo sapien
gcgatccgggcgctcgagacttacc

SEQ ID NO: 2669413 - DNA, 25 bp, Homo sapien
ccttgagggaatgtctgcagatgat

SEQ ID NO: 2669414 - DNA, 25 bp, Homo sapien
tatcaatgggtggtaaggtgtcacc

SEQ ID NO: 2669415 - DNA, 25 bp, Homo sapien
gagttggtagctccctggaaagccc

SEQ ID NO: 2669416 - DNA, 25 bp, Homo sapien
taaatgctgtagtgtacacgggtct

SEQ ID NO: 2669417 - DNA, 25 bp, Homo sapien
gcttgtttaagcagatagaccccat

SEQ ID NO: 2669418 - DNA, 25 bp, Homo sapien
tctgagaccacacgacataactgaa

SEQ ID NO: 2669419 - DNA, 25 bp, Homo sapien
cccatgcagtgtgggatgagctcca

SEQ ID NO: 2669420 - DNA, 25 bp, Homo sapien
atatcttgaaggcaacttggcaggc

SEQ ID NO: 2669421 - DNA, 25 bp, Homo sapien
gcagccttgaattgctaggctttag

SEQ ID NO: 2669422 - DNA, 25 bp, Homo sapien
cagccttgaattgctaggctttagc

SEQ ID NO: 2669423 - DNA, 25 bp, Homo sapien
tgggtcacatcttttagagagttcc

SEQ ID NO: 2669424 - DNA, 25 bp, Homo sapien
ggagtgggtcacatcttttagagag

SEQ ID NO: 2669425 - DNA, 25 bp, Homo sapien
gagtgggtcacatcttttagagagt

SEQ ID NO: 2669426 - DNA, 25 bp, Homo sapien
gtgggtcacatcttttagagagttc

SEQ ID NO: 2669427 - DNA, 25 bp, Homo sapien
tcaatagtcaaactccaagagagac

SEQ ID NO: 2669428 - DNA, 25 bp, Homo sapien
taggacccctttatccacagtctca

SEQ ID NO: 2669429 - DNA, 25 bp, Homo sapien
tccaagagagaccatccgagtgatc

SEQ ID NO: 2669430 - DNA, 25 bp, Homo sapien
ctagattggttgagtggaattagga

SEQ ID NO: 2669431 - DNA, 25 bp, Homo sapien
caatctggactccagccgtaccact

SEQ ID NO: 2669432 - DNA, 25 bp, Homo sapien
ggtttctggcaaaactctgatattc

SEQ ID NO: 2669433 - DNA, 25 bp, Homo sapien
ctcaagggtttctggcaaaactctg

SEQ ID NO: 2669434 - DNA, 25 bp, Homo sapien
actcctccacagactgcaatctgga

SEQ ID NO: 2669435 - DNA, 25 bp, Homo sapien
tcaccattcctatgtctctcttttc

SEQ ID NO: 2669436 - DNA, 25 bp, Homo sapien
aaaacttcaccattcctatgtctct

SEQ ID NO: 2669437 - DNA, 25 bp, Homo sapien
ctcttttcccctcacagccaagctc

SEQ ID NO: 2669438 - DNA, 25 bp, Homo sapien
caaacaaaacttcaccattcctatg

SEQ ID NO: 2669439 - DNA, 25 bp, Homo sapien
gcttaacttgcctacttcctgccag

SEQ ID NO: 2669440 - DNA, 25 bp, Homo sapien
cacacacgcctgaatgaaaaatcaa

SEQ ID NO: 2669441 - DNA, 25 bp, Homo sapien
gacgtctaatgtcacaaaatgcaga

SEQ ID NO: 2669442 - DNA, 25 bp, Homo sapien
agccccaggctagctgcttaacttg

SEQ ID NO: 2669443 - DNA, 25 bp, Homo sapien
tcattgacggtctcccctaaaaggc

SEQ ID NO: 2669444 - DNA, 25 bp, Homo sapien
gagtcattgacggtctcccctaaaa

SEQ ID NO: 2669445 - DNA, 25 bp, Homo sapien
aggagtcattgacggtctcccctaa

SEQ ID NO: 2669446 - DNA, 25 bp, Homo sapien
cattgacggtctcccctaaaaggct

SEQ ID NO: 2669447 - DNA, 25 bp, Homo sapien
acacaggggtggtcgatttctggca

SEQ ID NO: 2669448 - DNA, 25 bp, Homo sapien
gccatcacactaacctcatcactca

SEQ ID NO: 2669449 - DNA, 25 bp, Homo sapien
tataacacaggggtggtcgatttct

SEQ ID NO: 2669450 - DNA, 25 bp, Homo sapien
ggctgccatcacactaacctcatca

SEQ ID NO: 2669451 - DNA, 25 bp, Homo sapien
tgatctctggactatgccgtgatga

SEQ ID NO: 2669452 - DNA, 25 bp, Homo sapien
ctggactatgccgtgatgaataaga

SEQ ID NO: 2669453 - DNA, 25 bp, Homo sapien
cttgtcccttcccagtgcgtggttt

SEQ ID NO: 2669454 - DNA, 25 bp, Homo sapien
gtgcgtggtttttgcaaagctgatc

SEQ ID NO: 2669455 - DNA, 25 bp, Homo sapien
caggtgccaacagttagctcttcca

SEQ ID NO: 2669456 - DNA, 25 bp, Homo sapien
aagtctagagaagcaatagggtagt

SEQ ID NO: 2669457 - DNA, 25 bp, Homo sapien
aagcaatagggtagttcagggaagc

SEQ ID NO: 2669458 - DNA, 25 bp, Homo sapien
aagcgaggtagcaggtgccaacagt

SEQ ID NO: 2669459 - DNA, 25 bp, Homo sapien
tgttcagatttcacatacctcttgg

SEQ ID NO: 2669460 - DNA, 25 bp, Homo sapien
agagaacctggattccctctgtgtt

SEQ ID NO: 2669461 - DNA, 25 bp, Homo sapien
cttggcaaactctgtcactctcctt

SEQ ID NO: 2669462 - DNA, 25 bp, Homo sapien
aacctggattccctctgtgttcaga

SEQ ID NO: 2669463 - DNA, 25 bp, Homo sapien
attgttgatccccagttggtctctg

SEQ ID NO: 2669464 - DNA, 25 bp, Homo sapien
aattgttgatccccagttggtctct

SEQ ID NO: 2669465 - DNA, 25 bp, Homo sapien
gaattgttgatccccagttggtctc

SEQ ID NO: 2669466 - DNA, 25 bp, Homo sapien
aactgttgcttccggctttgcacca

SEQ ID NO: 2669467 - DNA, 25 bp, Homo sapien
aatgcatgagctccaactgttgctt

SEQ ID NO: 2669468 - DNA, 25 bp, Homo sapien
agggcaatatctctggaatgcatga

SEQ ID NO: 2669469 - DNA, 25 bp, Homo sapien
gctccaactgttgcttccggctttg

SEQ ID NO: 2669470 - DNA, 25 bp, Homo sapien
aacaaatccactcaagcctagcctt

SEQ ID NO: 2669471 - DNA, 25 bp, Homo sapien
ccactcaagcctagccttctctgaa

SEQ ID NO: 2669472 - DNA, 25 bp, Homo sapien
ccttctctgaattgttatccaccca

SEQ ID NO: 2669473 - DNA, 25 bp, Homo sapien
tagccttctctgaattgttatccac

SEQ ID NO: 2669474 - DNA, 25 bp, Homo sapien
tgagcttcctgtgacagacttccag

SEQ ID NO: 2669475 - DNA, 25 bp, Homo sapien
gagcttcctgtgacagacttccagg

SEQ ID NO: 2669476 - DNA, 25 bp, Homo sapien
tgacagacttccaggacaagacttc

SEQ ID NO: 2669477 - DNA, 25 bp, Homo sapien
gtgacagacttccaggacaagactt

SEQ ID NO: 2669478 - DNA, 25 bp, Homo sapien
tgaatcgaatttcttgttttgggtc

SEQ ID NO: 2669479 - DNA, 25 bp, Homo sapien
tcaaaagttggtgtgaactcttccc

SEQ ID NO: 2669480 - DNA, 25 bp, Homo sapien
tacttatgtttgtgggacttcattt

SEQ ID NO: 2669481 - DNA, 25 bp, Homo sapien
acttctaggaagttagcagtctcac

SEQ ID NO: 2669482 - DNA, 25 bp, Homo sapien
tgacctttcgtagcccttgttcctg

SEQ ID NO: 2669483 - DNA, 25 bp, Homo sapien
taatcttaggagtctgagggcttca

SEQ ID NO: 2669484 - DNA, 25 bp, Homo sapien
tgagtgagcagaacttgacctttcg

SEQ ID NO: 2669485 - DNA, 25 bp, Homo sapien
tggcttctcgtcttcaccaatgcag

SEQ ID NO: 2669486 - DNA, 25 bp, Homo sapien
tctagatgacaaacataaagcacct

SEQ ID NO: 2669487 - DNA, 25 bp, Homo sapien
tatattcttcttaccaagggcagca

SEQ ID NO: 2669488 - DNA, 25 bp, Homo sapien
gatgccaatgcctactgcacattag

SEQ ID NO: 2669489 - DNA, 25 bp, Homo sapien
ccacttaagatagtgctggcaatca

SEQ ID NO: 2669490 - DNA, 25 bp, Homo sapien
gaaaggttatgctgagtctaaaaaa

SEQ ID NO: 2669491 - DNA, 25 bp, Homo sapien
tagtggactaaatggtaatacacaa

SEQ ID NO: 2669492 - DNA, 25 bp, Homo sapien
aaatagtgaagtatatctactggac

SEQ ID NO: 2669493 - DNA, 25 bp, Homo sapien
aaacataaaatagtggactaaatgg

SEQ ID NO: 2669494 - DNA, 25 bp, Homo sapien
caaatcttactccttatgggttcca

SEQ ID NO: 2669495 - DNA, 25 bp, Homo sapien
gacaggctagacagactaattatcc

SEQ ID NO: 2669496 - DNA, 25 bp, Homo sapien
gaagccaaaatgaggctgcacccag

SEQ ID NO: 2669497 - DNA, 25 bp, Homo sapien
gaaagagtactttagctctgtccct

SEQ ID NO: 2669498 - DNA, 25 bp, Homo sapien
gtttgagaacccctgctgtacagta

SEQ ID NO: 2669499 - DNA, 25 bp, Homo sapien
ttacagtggctactacatcaggtgc

SEQ ID NO: 2669500 - DNA, 25 bp, Homo sapien
tgcactggccaatcggatcattctc

SEQ ID NO: 2669501 - DNA, 25 bp, Homo sapien
taagtatcagtagttatgacccaca

SEQ ID NO: 2669502 - DNA, 25 bp, Homo sapien
tcagacccacgttcttcaagggtta

SEQ ID NO: 2669503 - DNA, 25 bp, Homo sapien
aaaatatacaccaacagattaaatg

SEQ ID NO: 2669504 - DNA, 25 bp, Homo sapien
taaaatatacaccaacagattaaat

SEQ ID NO: 2669505 - DNA, 25 bp, Homo sapien
gaagcgtcttaggaaggccagctcc

SEQ ID NO: 2669506 - DNA, 25 bp, Homo sapien
tgtgccaggcatatactacgtagct

SEQ ID NO: 2669507 - DNA, 25 bp, Homo sapien
ggccagctcctgaatgcataataga

SEQ ID NO: 2669508 - DNA, 25 bp, Homo sapien
tggatcctaaacctagcacatgtag

SEQ ID NO: 2669509 - DNA, 25 bp, Homo sapien
gataaacagctgtctgcgtccaggt

SEQ ID NO: 2669510 - DNA, 25 bp, Homo sapien
tgttcactgtcaacaacttgatgtg

SEQ ID NO: 2669511 - DNA, 25 bp, Homo sapien
cattttcaggctctataagaagttc

SEQ ID NO: 2669512 - DNA, 25 bp, Homo sapien
catgtaggcttggtcacttgtcacc

SEQ ID NO: 2669513 - DNA, 25 bp, Homo sapien
tttatgcagccaaaaaacacatgaa

SEQ ID NO: 2669514 - DNA, 25 bp, Homo sapien
aacagacacttctcaaaagaagaca

SEQ ID NO: 2669515 - DNA, 25 bp, Homo sapien
aacacatgaaaaaatgctcaccatc

SEQ ID NO: 2669516 - DNA, 25 bp, Homo sapien
catcaaaaagtgggcgaaggacatg

SEQ ID NO: 2669517 - DNA, 25 bp, Homo sapien
ccgaccagccaagggtttgtattgc

SEQ ID NO: 2669518 - DNA, 25 bp, Homo sapien
tgtccccaccgagtggctactgagg

SEQ ID NO: 2669519 - DNA, 25 bp, Homo sapien
gagactgggcattaattaggtatcc

SEQ ID NO: 2669520 - DNA, 25 bp, Homo sapien
tgtgtttctctaagctaccgaccag

SEQ ID NO: 2669521 - DNA, 25 bp, Homo sapien
cgtaggcaggggacatcttcctctt

SEQ ID NO: 2669522 - DNA, 25 bp, Homo sapien
caagaggtgtaatcacaaaaagcca

SEQ ID NO: 2669523 - DNA, 25 bp, Homo sapien
cttctgctgtctttcgtaggcaggg

SEQ ID NO: 2669524 - DNA, 25 bp, Homo sapien
ggatggaaataagcaatcccatgct

SEQ ID NO: 2669525 - DNA, 25 bp, Homo sapien
gaaatagaatgctgacaagaaaata

SEQ ID NO: 2669526 - DNA, 25 bp, Homo sapien
gaagtccacccgagagaccaagtgt

SEQ ID NO: 2669527 - DNA, 25 bp, Homo sapien
ccgagagaccaagtgtttccagata

SEQ ID NO: 2669528 - DNA, 25 bp, Homo sapien
ggctggaagtccacccgagagacca

SEQ ID NO: 2669529 - DNA, 25 bp, Homo sapien
gagcacatgctaggtctggtcaaac

SEQ ID NO: 2669530 - DNA, 25 bp, Homo sapien
caactagacccttatgtgagagaga

SEQ ID NO: 2669531 - DNA, 25 bp, Homo sapien
gagcctataagagcgttgccaggag

SEQ ID NO: 2669532 - DNA, 25 bp, Homo sapien
tcagctaggcaaatggtcttacaca

SEQ ID NO: 2669533 - DNA, 25 bp, Homo sapien
gtctcgtcttcaaattagtgaagag

SEQ ID NO: 2669534 - DNA, 25 bp, Homo sapien
agagacacttttgtttaccactgtc

SEQ ID NO: 2669535 - DNA, 25 bp, Homo sapien
acacttttgtttaccactgtcaatg

SEQ ID NO: 2669536 - DNA, 25 bp, Homo sapien
tcttgttccaaatatcgtttgtctc

SEQ ID NO: 2669537 - DNA, 25 bp, Homo sapien
gatagcattatcatagctgtttttc

SEQ ID NO: 2669538 - DNA, 25 bp, Homo sapien
gccatgatagcattatcatagctgt

SEQ ID NO: 2669539 - DNA, 25 bp, Homo sapien
cacgccatgatagcattatcatagc

SEQ ID NO: 2669540 - DNA, 25 bp, Homo sapien
catgatagcattatcatagctgttt

SEQ ID NO: 2669541 - DNA, 25 bp, Homo sapien
ggctgtgcccatgtaaggatgagga

SEQ ID NO: 2669542 - DNA, 25 bp, Homo sapien
ctgctgctgcaatcctccatttcct

SEQ ID NO: 2669543 - DNA, 25 bp, Homo sapien
aggctgtgcccatgtaaggatgagg

SEQ ID NO: 2669544 - DNA, 25 bp, Homo sapien
gctgtgcccatgtaaggatgaggac

SEQ ID NO: 2669545 - DNA, 25 bp, Homo sapien
ggcttcaatacctgaacatcgactg

SEQ ID NO: 2669546 - DNA, 25 bp, Homo sapien
ctgaacatcgactgaagtttctagg

SEQ ID NO: 2669547 - DNA, 25 bp, Homo sapien
ctccaaaaggcttcaatacctgaac

SEQ ID NO: 2669548 - DNA, 25 bp, Homo sapien
tcaatacctgaacatcgactgaagt

SEQ ID NO: 2669549 - DNA, 25 bp, Homo sapien
cttcaaccgttccagagaaggaaca

SEQ ID NO: 2669550 - DNA, 25 bp, Homo sapien
cattgctgcacaaggtgattgcttc

SEQ ID NO: 2669551 - DNA, 25 bp, Homo sapien
tgctccatcccccttcaaccgttcc

SEQ ID NO: 2669552 - DNA, 25 bp, Homo sapien
catttccattgctgcacaaggtgat

SEQ ID NO: 2669553 - DNA, 25 bp, Homo sapien
tcctccttcggtttggtttcatgga

SEQ ID NO: 2669554 - DNA, 25 bp, Homo sapien
cctccttcggtttggtttcatggag

SEQ ID NO: 2669555 - DNA, 25 bp, Homo sapien
ctccttcggtttggtttcatggagt

SEQ ID NO: 2669556 - DNA, 25 bp, Homo sapien
cctcctccttcggtttggtttcatg

SEQ ID NO: 2669557 - DNA, 25 bp, Homo sapien
cttctgccaatgacatgttgactgt

SEQ ID NO: 2669558 - DNA, 25 bp, Homo sapien
tctttcctctccatatcactatcat

SEQ ID NO: 2669559 - DNA, 25 bp, Homo sapien
ctgccaatgacatgttgactgtgtg

SEQ ID NO: 2669560 - DNA, 25 bp, Homo sapien
ctttcctctccatatcactatcatc

SEQ ID NO: 2669561 - DNA, 25 bp, Homo sapien
ccagtgattaggtgagccatgaggg

SEQ ID NO: 2669562 - DNA, 25 bp, Homo sapien
agccagtgattaggtgagccatgag

SEQ ID NO: 2669563 - DNA, 25 bp, Homo sapien
agagccagtgattaggtgagccatg

SEQ ID NO: 2669564 - DNA, 25 bp, Homo sapien
cagtgattaggtgagccatgagggg

SEQ ID NO: 2669565 - DNA, 25 bp, Homo sapien
aggtcactctaactcgggcacacac

SEQ ID NO: 2669566 - DNA, 25 bp, Homo sapien
tccctgtattaaagtcccaccagga

SEQ ID NO: 2669567 - DNA, 25 bp, Homo sapien
ggaacacactgtacaggtcactcta

SEQ ID NO: 2669568 - DNA, 25 bp, Homo sapien
ttttccaaacatagagctcctcatc

SEQ ID NO: 2669569 - DNA, 25 bp, Homo sapien
aactttcttgagttccagccagtct

SEQ ID NO: 2669570 - DNA, 25 bp, Homo sapien
tgaactttcttgagttccagccagt

SEQ ID NO: 2669571 - DNA, 25 bp, Homo sapien
tttcttgagttccagccagtctttg

SEQ ID NO: 2669572 - DNA, 25 bp, Homo sapien
ctttcttgagttccagccagtcttt

SEQ ID NO: 2669573 - DNA, 25 bp, Homo sapien
cctgaaggggtgtttggcagctcca

SEQ ID NO: 2669574 - DNA, 25 bp, Homo sapien
cagtgctgctatgcctgtgaatttc

SEQ ID NO: 2669575 - DNA, 25 bp, Homo sapien
taaagaaccagtctggccctgaagg

SEQ ID NO: 2669576 - DNA, 25 bp, Homo sapien
tgtgaatcagtgctgctatgcctgt

SEQ ID NO: 2669577 - DNA, 25 bp, Homo sapien
atctccatgtcagtgacaataaatg

SEQ ID NO: 2669578 - DNA, 25 bp, Homo sapien
ctgtcatccagttctctttgtggag

SEQ ID NO: 2669579 - DNA, 25 bp, Homo sapien
tgtcatccagttctctttgtggagc

SEQ ID NO: 2669580 - DNA, 25 bp, Homo sapien
gtcatccagttctctttgtggagca

SEQ ID NO: 2669581 - DNA, 25 bp, Homo sapien
tgccaaatactcaggtcagaataac

SEQ ID NO: 2669582 - DNA, 25 bp, Homo sapien
ctaaggcaccaccaatagcttttgt

SEQ ID NO: 2669583 - DNA, 25 bp, Homo sapien
tacagtttggtgtaactaaggcacc

SEQ ID NO: 2669584 - DNA, 25 bp, Homo sapien
tgatgttcgatgaaaaagcaaccag

SEQ ID NO: 2669585 - DNA, 25 bp, Homo sapien
gcaacgaggaatccttgaagtgaca

SEQ ID NO: 2669586 - DNA, 25 bp, Homo sapien
caacgaggaatccttgaagtgacag

SEQ ID NO: 2669587 - DNA, 25 bp, Homo sapien
actgcaacgaggaatccttgaagtg

SEQ ID NO: 2669588 - DNA, 25 bp, Homo sapien
tgcaacgaggaatccttgaagtgac

SEQ ID NO: 2669589 - DNA, 25 bp, Homo sapien
cactcttttgcccggactacagtgc

SEQ ID NO: 2669590 - DNA, 25 bp, Homo sapien
actcttttgcccggactacagtgca

SEQ ID NO: 2669591 - DNA, 25 bp, Homo sapien
gacaaaaagctcttacactacatta

SEQ ID NO: 2669592 - DNA, 25 bp, Homo sapien
tctggagtcacagttgacaaaaagc

SEQ ID NO: 2669593 - DNA, 25 bp, Homo sapien
ttagaacactgcattagagcccatt

SEQ ID NO: 2669594 - DNA, 25 bp, Homo sapien
attgatcataggtatttcaaaacac

SEQ ID NO: 2669595 - DNA, 25 bp, Homo sapien
taattgttgagccttgaaaattatg

SEQ ID NO: 2669596 - DNA, 25 bp, Homo sapien
ttgtcattgaactttatagacctct

SEQ ID NO: 2669597 - DNA, 25 bp, Homo sapien
tcattgaactttatagacctctttt

SEQ ID NO: 2669598 - DNA, 25 bp, Homo sapien
gtaactgaatttatagacctcttat

SEQ ID NO: 2669599 - DNA, 25 bp, Homo sapien
gaacatctcgggtaagtctcgcata

SEQ ID NO: 2669600 - DNA, 25 bp, Homo sapien
gcagcgccgtggtccttaaggcaga

SEQ ID NO: 2669601 - DNA, 25 bp, Homo sapien
catatccttgggctgaagaggcagc

SEQ ID NO: 2669602 - DNA, 25 bp, Homo sapien
gtcttgttagtaatcccttggccca

SEQ ID NO: 2669603 - DNA, 25 bp, Homo sapien
gggttttgtcacattggtcagtctg

SEQ ID NO: 2669604 - DNA, 25 bp, Homo sapien
atggggttttgtcacattggtcagt

SEQ ID NO: 2669605 - DNA, 25 bp, Homo sapien
tggggttttgtcacattggtcagtc

SEQ ID NO: 2669606 - DNA, 25 bp, Homo sapien
gttttgtcacattggtcagtctggt

SEQ ID NO: 2669607 - DNA, 25 bp, Homo sapien
taagagccttgttcttcatagcagg

SEQ ID NO: 2669608 - DNA, 25 bp, Homo sapien
ggagcagacttaactgatcccagca

SEQ ID NO: 2669609 - DNA, 25 bp, Homo sapien
tgaaaatgtttctcacggtacagaa

SEQ ID NO: 2669610 - DNA, 25 bp, Homo sapien
gagggaaagcactcccagcctttga

SEQ ID NO: 2669611 - DNA, 25 bp, Homo sapien
ggataaactacttcacttgcctgca

SEQ ID NO: 2669612 - DNA, 25 bp, Homo sapien
gaagttcaccctgtgagccgtggat

SEQ ID NO: 2669613 - DNA, 25 bp, Homo sapien
tctggctctctcaacgggcttatgg

SEQ ID NO: 2669614 - DNA, 25 bp, Homo sapien
gaatgtcaaacgtactaatgcctgc

SEQ ID NO: 2669615 - DNA, 25 bp, Homo sapien
cagtaaacatccatgtacatatgtc

SEQ ID NO: 2669616 - DNA, 25 bp, Homo sapien
gcttcatccatgtccgtgaaaaagg

SEQ ID NO: 2669617 - DNA, 25 bp, Homo sapien
catccatgtccgtgaaaaaggacat

SEQ ID NO: 2669618 - DNA, 25 bp, Homo sapien
actggcctcctaccccgcaacaggc

SEQ ID NO: 2669619 - DNA, 25 bp, Homo sapien
ttcaccctcaatcataatcatcttc

SEQ ID NO: 2669620 - DNA, 25 bp, Homo sapien
taaacctgcccattgtcatccactg

SEQ ID NO: 2669621 - DNA, 25 bp, Homo sapien
catggccttccgagctcttcctgga

SEQ ID NO: 2669622 - DNA, 25 bp, Homo sapien
gaggcctcgtcccatgtttggagga

SEQ ID NO: 2669623 - DNA, 25 bp, Homo sapien
tactcatgtgacaagcagggggcct

SEQ ID NO: 2669624 - DNA, 25 bp, Homo sapien
tctctcttctgtgatatggctggtc

SEQ ID NO: 2669625 - DNA, 25 bp, Homo sapien
aacagctagtgaagaagggcctcaa

SEQ ID NO: 2669626 - DNA, 25 bp, Homo sapien
tcaacggccgcttttggatggcttt

SEQ ID NO: 2669627 - DNA, 25 bp, Homo sapien
tctttgcctgcacgggtgacccgtg

SEQ ID NO: 2669628 - DNA, 25 bp, Homo sapien
tgcaacctggataattaagtcagat

SEQ ID NO: 2669629 - DNA, 25 bp, Homo sapien
cttgattataagttccaacacggca

SEQ ID NO: 2669630 - DNA, 25 bp, Homo sapien
cacggcacttgcaacctggataatt

SEQ ID NO: 2669631 - DNA, 25 bp, Homo sapien
taattaagtcagattggtgagagaa

SEQ ID NO: 2669632 - DNA, 25 bp, Homo sapien
tcaagtttgcacaaaagtggtcaga

SEQ ID NO: 2669633 - DNA, 25 bp, Homo sapien
tagtaacaagttcttctgaagtcaa

SEQ ID NO: 2669634 - DNA, 25 bp, Homo sapien
agtggtcagatctggtgtcaaatcc

SEQ ID NO: 2669635 - DNA, 25 bp, Homo sapien
taaagccaagttgccctttgtggtc

SEQ ID NO: 2669636 - DNA, 25 bp, Homo sapien
acttcagccatagccagcttatcat

SEQ ID NO: 2669637 - DNA, 25 bp, Homo sapien
cttcagccatagccagcttatcatt

SEQ ID NO: 2669638 - DNA, 25 bp, Homo sapien
ttcagccatagccagcttatcattt

SEQ ID NO: 2669639 - DNA, 25 bp, Homo sapien
tcagccatagccagcttatcatttg

SEQ ID NO: 2669640 - DNA, 25 bp, Homo sapien
ctggatgtgccggtgaggtcttttt

SEQ ID NO: 2669641 - DNA, 25 bp, Homo sapien
tttttgacaggatcacaggataaac

SEQ ID NO: 2669642 - DNA, 25 bp, Homo sapien
tgctgaactggatgtgccggtgagg

SEQ ID NO: 2669643 - DNA, 25 bp, Homo sapien
gataaactgccatcgtgtatgggaa

SEQ ID NO: 2669644 - DNA, 25 bp, Homo sapien
catggccgtccccatatgggatgtg

SEQ ID NO: 2669645 - DNA, 25 bp, Homo sapien
agcttgggcataggaaccatttcca

SEQ ID NO: 2669646 - DNA, 25 bp, Homo sapien
agtctcaactgactggtagatccag

SEQ ID NO: 2669647 - DNA, 25 bp, Homo sapien
gcagggtgctctagttttgggttcc

SEQ ID NO: 2669648 - DNA, 25 bp, Homo sapien
gttctgaatggctgggaaggcctca

SEQ ID NO: 2669649 - DNA, 25 bp, Homo sapien
agttctgaatggctgggaaggcctc

SEQ ID NO: 2669650 - DNA, 25 bp, Homo sapien
ttctgaatggctgggaaggcctcag

SEQ ID NO: 2669651 - DNA, 25 bp, Homo sapien
ctgaatggctgggaaggcctcagga

SEQ ID NO: 2669652 - DNA, 25 bp, Homo sapien
ccaccatgctctgactgagaggtga

SEQ ID NO: 2669653 - DNA, 25 bp, Homo sapien
tgcgccaccatgctctgactgagag

SEQ ID NO: 2669654 - DNA, 25 bp, Homo sapien
aggtgattcttgattctttgtaagt

SEQ ID NO: 2669655 - DNA, 25 bp, Homo sapien
catgctctgactgagaggtgattct

SEQ ID NO: 2669656 - DNA, 25 bp, Homo sapien
atatctgggtcacgataataaagcc

SEQ ID NO: 2669657 - DNA, 25 bp, Homo sapien
gataaattgtgctcccacctcatgg

SEQ ID NO: 2669658 - DNA, 25 bp, Homo sapien
gattctccgcctctattttcagtta

SEQ ID NO: 2669659 - DNA, 25 bp, Homo sapien
gatactagggctgatgattctccgc

SEQ ID NO: 2669660 - DNA, 25 bp, Homo sapien
tcattcccactgaagacatcattag

SEQ ID NO: 2669661 - DNA, 25 bp, Homo sapien
ctgtcattcccactgaagacatcat

SEQ ID NO: 2669662 - DNA, 25 bp, Homo sapien
tcagaaccttttctctctgtcattc

SEQ ID NO: 2669663 - DNA, 25 bp, Homo sapien
attcccactgaagacatcattagag

SEQ ID NO: 2669664 - DNA, 25 bp, Homo sapien
cttgtcacgtcttttcactaatgtc

SEQ ID NO: 2669665 - DNA, 25 bp, Homo sapien
cctgttttgcttttgggacccatct

SEQ ID NO: 2669666 - DNA, 25 bp, Homo sapien
tttcactaatgtcttcccttcctgt

SEQ ID NO: 2669667 - DNA, 25 bp, Homo sapien
tcctgttttgcttttgggacccatc

SEQ ID NO: 2669668 - DNA, 25 bp, Homo sapien
gctgacttctcatccatgctattgt

SEQ ID NO: 2669669 - DNA, 25 bp, Homo sapien
tggagagctggtccttttagttttc

SEQ ID NO: 2669670 - DNA, 25 bp, Homo sapien
tattatagctattggtggagagctg

SEQ ID NO: 2669671 - DNA, 25 bp, Homo sapien
ttctctcacaagattctgcataggc

SEQ ID NO: 2669672 - DNA, 25 bp, Homo sapien
tgatatctacaacagtaatccaggc

SEQ ID NO: 2669673 - DNA, 25 bp, Homo sapien
gatatctacaacagtaatccaggcc

SEQ ID NO: 2669674 - DNA, 25 bp, Homo sapien
tatctacaacagtaatccaggccat

SEQ ID NO: 2669675 - DNA, 25 bp, Homo sapien
cttgatatctacaacagtaatccag

SEQ ID NO: 2669676 - DNA, 25 bp, Homo sapien
ggactgccaacacttggtagacaaa

SEQ ID NO: 2669677 - DNA, 25 bp, Homo sapien
accaggttgtgcatgatgctgtgca

SEQ ID NO: 2669678 - DNA, 25 bp, Homo sapien
ctgtgcatccatacttcccaggact

SEQ ID NO: 2669679 - DNA, 25 bp, Homo sapien
tagacttgtggctgttctgctttcc

SEQ ID NO: 2669680 - DNA, 25 bp, Homo sapien
catggtgctgtaggttgaattcagt

SEQ ID NO: 2669681 - DNA, 25 bp, Homo sapien
gttccctcatatgcttggctacatt

SEQ ID NO: 2669682 - DNA, 25 bp, Homo sapien
ctgaggattctcaacatggtgctgt

SEQ ID NO: 2669683 - DNA, 25 bp, Homo sapien
cttatctcgaggtgggctgctgtgt

SEQ ID NO: 2669684 - DNA, 25 bp, Homo sapien
ttagtctctgagcacaggaccttcg

SEQ ID NO: 2669685 - DNA, 25 bp, Homo sapien
tctgagcacaggaccttcgggagtg

SEQ ID NO: 2669686 - DNA, 25 bp, Homo sapien
cgggagtgtgtagagtcatcttgac

SEQ ID NO: 2669687 - DNA, 25 bp, Homo sapien
gaccttcgggagtgtgtagagtcat

SEQ ID NO: 2669688 - DNA, 25 bp, Homo sapien
gccaggccattgcaaatcttcccaa

SEQ ID NO: 2669689 - DNA, 25 bp, Homo sapien
aacggaggtaggacaatgtttattg

SEQ ID NO: 2669690 - DNA, 25 bp, Homo sapien
atgtcacccaactcagaggccacag

SEQ ID NO: 2669691 - DNA, 25 bp, Homo sapien
tctcatagaaaaacggaggtaggac

SEQ ID NO: 2669692 - DNA, 25 bp, Homo sapien
gatgacctgacttaaagttaccaga

SEQ ID NO: 2669693 - DNA, 25 bp, Homo sapien
tttgtatctgccataagatgacctg

SEQ ID NO: 2669694 - DNA, 25 bp, Homo sapien
ggcaatgtagatgtagtggcattca

SEQ ID NO: 2669695 - DNA, 25 bp, Homo sapien
gacctggcacttaggcaatgtagat

SEQ ID NO: 2669696 - DNA, 25 bp, Homo sapien
cttctgcaccggcagtctctccttg

SEQ ID NO: 2669697 - DNA, 25 bp, Homo sapien
ttctgcaccggcagtctctccttgt

SEQ ID NO: 2669698 - DNA, 25 bp, Homo sapien
tctgcaccggcagtctctccttgtg

SEQ ID NO: 2669699 - DNA, 25 bp, Homo sapien
gttttcccattctaagccaagctcc

SEQ ID NO: 2669700 - DNA, 25 bp, Homo sapien
gcctgaaaatctgttctcctctctg

SEQ ID NO: 2669701 - DNA, 25 bp, Homo sapien
agttagccctgtaggactgcgtgga

SEQ ID NO: 2669702 - DNA, 25 bp, Homo sapien
actgcgtggatggagctaaagtctc

SEQ ID NO: 2669703 - DNA, 25 bp, Homo sapien
caatccttgcacaaaggaaacacaa

SEQ ID NO: 2669704 - DNA, 25 bp, Homo sapien
tcttatctctagtaacaatccttgc

SEQ ID NO: 2669705 - DNA, 25 bp, Homo sapien
ttatctctagtaacaatccttgcac

SEQ ID NO: 2669706 - DNA, 25 bp, Homo sapien
aacaatccttgcacaaaggaaacac

SEQ ID NO: 2669707 - DNA, 25 bp, Homo sapien
gcaaatgtcgtaagggaatcccaga

SEQ ID NO: 2669708 - DNA, 25 bp, Homo sapien
cagagtgcagcagaacttgtcatcc

SEQ ID NO: 2669709 - DNA, 25 bp, Homo sapien
tagatgtggctactcaggttcagca

SEQ ID NO: 2669710 - DNA, 25 bp, Homo sapien
gcgattccaaatgctactcaacctt

SEQ ID NO: 2669711 - DNA, 25 bp, Homo sapien
gaggtctagaggatccccagaagaa

SEQ ID NO: 2669712 - DNA, 25 bp, Homo sapien
gaacaaaatcgttcaagcccatgaa

SEQ ID NO: 2669713 - DNA, 25 bp, Homo sapien
tgaatcagaagataagggaaggaga

SEQ ID NO: 2669714 - DNA, 25 bp, Homo sapien
gtaaccctaaccttgcatgcactgg

SEQ ID NO: 2669715 - DNA, 25 bp, Homo sapien
gcacaccttcactggattaggatga

SEQ ID NO: 2669716 - DNA, 25 bp, Homo sapien
tcaggcttcaaggtgcttgcacacc

SEQ ID NO: 2669717 - DNA, 25 bp, Homo sapien
tgcttgcacaccttcactggattag

SEQ ID NO: 2669718 - DNA, 25 bp, Homo sapien
caccttcactggattaggatgattt

SEQ ID NO: 2669719 - DNA, 25 bp, Homo sapien
ttcacagttgcaaagtcgtttctat

SEQ ID NO: 2669720 - DNA, 25 bp, Homo sapien
cagttgcaaagtcgtttctatatct

SEQ ID NO: 2669721 - DNA, 25 bp, Homo sapien
tgacccctttaaaggcaaacatcat

SEQ ID NO: 2669722 - DNA, 25 bp, Homo sapien
gtgacccctttaaaggcaaacatca

SEQ ID NO: 2669723 - DNA, 25 bp, Homo sapien
caatacatcttgcaagacagtccac

SEQ ID NO: 2669724 - DNA, 25 bp, Homo sapien
tattccctgtttacatgtgcagccc

SEQ ID NO: 2669725 - DNA, 25 bp, Homo sapien
taactgttgcctggtggtagccact

SEQ ID NO: 2669726 - DNA, 25 bp, Homo sapien
taaaaatcaatcgatgatgagaggc

SEQ ID NO: 2669727 - DNA, 25 bp, Homo sapien
tggaccatgcatgacccgtgcatgc

SEQ ID NO: 2669728 - DNA, 25 bp, Homo sapien
gcacattcttcaagtagcaggacat

SEQ ID NO: 2669729 - DNA, 25 bp, Homo sapien
gttcttccgagagacatctcccatc

SEQ ID NO: 2669730 - DNA, 25 bp, Homo sapien
catctggttatctaaatcctgcaca

SEQ ID NO: 2669731 - DNA, 25 bp, Homo sapien
ctaaagcttctctttgcctgggtct

SEQ ID NO: 2669732 - DNA, 25 bp, Homo sapien
ttgcctgggtctatccttctccctg

SEQ ID NO: 2669733 - DNA, 25 bp, Homo sapien
ttccctcttatccacagaaagccag

SEQ ID NO: 2669734 - DNA, 25 bp, Homo sapien
cctcttatccacagaaagccagctt

SEQ ID NO: 2669735 - DNA, 25 bp, Homo sapien
tggaaactgaggacccggaaagtca

SEQ ID NO: 2669736 - DNA, 25 bp, Homo sapien
aatggtagacctgacttgaactgac

SEQ ID NO: 2669737 - DNA, 25 bp, Homo sapien
gagtagaattccagatcccatcatg

SEQ ID NO: 2669738 - DNA, 25 bp, Homo sapien
taacgtgaagcatgtagacctgggc

SEQ ID NO: 2669739 - DNA, 25 bp, Homo sapien
gctctggtcccggttggtcagaaag

SEQ ID NO: 2669740 - DNA, 25 bp, Homo sapien
ctggtcccggttggtcagaaagaag

SEQ ID NO: 2669741 - DNA, 25 bp, Homo sapien
agcactgctctggtcccggttggtc

SEQ ID NO: 2669742 - DNA, 25 bp, Homo sapien
cactgctctggtcccggttggtcag

SEQ ID NO: 2669743 - DNA, 25 bp, Homo sapien
cgggcgatgaaacagcttttccgac

SEQ ID NO: 2669744 - DNA, 25 bp, Homo sapien
gatgaaacagcttttccgaccccac

SEQ ID NO: 2669745 - DNA, 25 bp, Homo sapien
gagcgggcgatgaaacagcttttcc

SEQ ID NO: 2669746 - DNA, 25 bp, Homo sapien
ccgggagcgggcgatgaaacagctt

SEQ ID NO: 2669747 - DNA, 25 bp, Homo sapien
gccgctgcctcccggaatgcgccgc

SEQ ID NO: 2669748 - DNA, 25 bp, Homo sapien
cgctgcctcccggaatgcgccgcgg

SEQ ID NO: 2669749 - DNA, 25 bp, Homo sapien
tgcctcccggaatgcgccgcggaga

SEQ ID NO: 2669750 - DNA, 25 bp, Homo sapien
ctgcctcccggaatgcgccgcggag

SEQ ID NO: 2669751 - DNA, 25 bp, Homo sapien
gaggcggcgggcttctggccgggct

SEQ ID NO: 2669752 - DNA, 25 bp, Homo sapien
cgggcttctggccgggctgggacat

SEQ ID NO: 2669753 - DNA, 25 bp, Homo sapien
ggcggcgggcttctggccgggctgg

SEQ ID NO: 2669754 - DNA, 25 bp, Homo sapien
cggcgggcttctggccgggctggga

SEQ ID NO: 2669755 - DNA, 25 bp, Homo sapien
gcggccacagctccgggacccggta

SEQ ID NO: 2669756 - DNA, 25 bp, Homo sapien
agcctggcaacgcccagggagggcg

SEQ ID NO: 2669757 - DNA, 25 bp, Homo sapien
cccgccagcctggcaacgcccaggg

SEQ ID NO: 2669758 - DNA, 25 bp, Homo sapien
acccgccagcctggcaacgcccagg

SEQ ID NO: 2669759 - DNA, 25 bp, Homo sapien
ggcaacaaccggctggctccgatcc

SEQ ID NO: 2669760 - DNA, 25 bp, Homo sapien
gggtgttgcgttggaggcgccgggc

SEQ ID NO: 2669761 - DNA, 25 bp, Homo sapien
ggcgccgggctcacactccgcttgg

SEQ ID NO: 2669762 - DNA, 25 bp, Homo sapien
ggctggctccgatccgcacggcggg

SEQ ID NO: 2669763 - DNA, 25 bp, Homo sapien
cgtcttgtaccaccagctggcgaat

SEQ ID NO: 2669764 - DNA, 25 bp, Homo sapien
tcttgtaccaccagctggcgaatgc

SEQ ID NO: 2669765 - DNA, 25 bp, Homo sapien
tgtaccaccagctggcgaatgccat

SEQ ID NO: 2669766 - DNA, 25 bp, Homo sapien
ttgtaccaccagctggcgaatgcca

SEQ ID NO: 2669767 - DNA, 25 bp, Homo sapien
gagttgacattagtgaggcacctgg

SEQ ID NO: 2669768 - DNA, 25 bp, Homo sapien
tttgtaaggctatatgaccgtgacc

SEQ ID NO: 2669769 - DNA, 25 bp, Homo sapien
tttttccctggcaatctgactgtgg

SEQ ID NO: 2669770 - DNA, 25 bp, Homo sapien
caataaactctgatagggcagaaac

SEQ ID NO: 2669771 - DNA, 25 bp, Homo sapien
ctggtttggaaggcgattcactggt

SEQ ID NO: 2669772 - DNA, 25 bp, Homo sapien
tggtttggaaggcgattcactggtt

SEQ ID NO: 2669773 - DNA, 25 bp, Homo sapien
cctggtttggaaggcgattcactgg

SEQ ID NO: 2669774 - DNA, 25 bp, Homo sapien
catagcaggttctagccgtaacagc

SEQ ID NO: 2669775 - DNA, 25 bp, Homo sapien
ggcaaatcctgtatcctttggaagg

SEQ ID NO: 2669776 - DNA, 25 bp, Homo sapien
tggaagggcagaactttcacatgac

SEQ ID NO: 2669777 - DNA, 25 bp, Homo sapien
tcaaagaaaacccatctcaaagtgg

SEQ ID NO: 2669778 - DNA, 25 bp, Homo sapien
tacatcctgtacatccaaggtgtaa

SEQ ID NO: 2669779 - DNA, 25 bp, Homo sapien
caaagtctgcctcttataacatggc

SEQ ID NO: 2669780 - DNA, 25 bp, Homo sapien
ccagttataattggccagaatgacc

SEQ ID NO: 2669781 - DNA, 25 bp, Homo sapien
gttgttacataccaataatgcctgt

SEQ ID NO: 2669782 - DNA, 25 bp, Homo sapien
taggcagggcagataacaaattcag

SEQ ID NO: 2669783 - DNA, 25 bp, Homo sapien
taatgcctaaagtgggacagtttcc

SEQ ID NO: 2669784 - DNA, 25 bp, Homo sapien
gtcctcagagggctaaccagtatat

SEQ ID NO: 2669785 - DNA, 25 bp, Homo sapien
gccctttgagacagaccattttgga

SEQ ID NO: 2669786 - DNA, 25 bp, Homo sapien
ggaaagacttatttgttctactgca

SEQ ID NO: 2669787 - DNA, 25 bp, Homo sapien
tagtccatgcaacttttggtcctgt

SEQ ID NO: 2669788 - DNA, 25 bp, Homo sapien
cagtgtggccggatgtgtcagtttc

SEQ ID NO: 2669789 - DNA, 25 bp, Homo sapien
gctctctgagatcatgcccgtttta

SEQ ID NO: 2669790 - DNA, 25 bp, Homo sapien
catgcagaatctccacatactcagc

SEQ ID NO: 2669791 - DNA, 25 bp, Homo sapien
taaatctacatacattggaagaaga

SEQ ID NO: 2669792 - DNA, 25 bp, Homo sapien
agcaccctctcaatcataatcacag

SEQ ID NO: 2669793 - DNA, 25 bp, Homo sapien
cacaaaaacagcttggaagagaact

SEQ ID NO: 2669794 - DNA, 25 bp, Homo sapien
ggttttcaacgtcctctggcttcat

SEQ ID NO: 2669795 - DNA, 25 bp, Homo sapien
ggaaaacaccttaccaatgtagtca

SEQ ID NO: 2669796 - DNA, 25 bp, Homo sapien
aatgcaaacttacatatcaatacaa

SEQ ID NO: 2669797 - DNA, 25 bp, Homo sapien
ccttaccaatgtagtcaaatgcaaa

SEQ ID NO: 2669798 - DNA, 25 bp, Homo sapien
tgcaaacttacatatcaatacaaat

SEQ ID NO: 2669799 - DNA, 25 bp, Homo sapien
cttggtggccgaggctgttccacca

SEQ ID NO: 2669800 - DNA, 25 bp, Homo sapien
gactgctgccgaggcttgctgcttt

SEQ ID NO: 2669801 - DNA, 25 bp, Homo sapien
ttctggaggattgactgctgccgag

SEQ ID NO: 2669802 - DNA, 25 bp, Homo sapien
tgttccaccagcataggttctggag

SEQ ID NO: 2669803 - DNA, 25 bp, Homo sapien
tatgccaagaagatttatacaataa

SEQ ID NO: 2669804 - DNA, 25 bp, Homo sapien
ggtcttttcgtgttcaggaaatcac

SEQ ID NO: 2669805 - DNA, 25 bp, Homo sapien
taatcatatccctgtagaatacagt

SEQ ID NO: 2669806 - DNA, 25 bp, Homo sapien
ttatttaacgcttattatatgccaa

SEQ ID NO: 2669807 - DNA, 25 bp, Homo sapien
tgcccatgaggaggatatgaattat

SEQ ID NO: 2669808 - DNA, 25 bp, Homo sapien
tattttctaaagtgggagcactacg

SEQ ID NO: 2669809 - DNA, 25 bp, Homo sapien
agtgggagcactacgtttttactca

SEQ ID NO: 2669810 - DNA, 25 bp, Homo sapien
cgtttttactcacagtatgttcaaa

SEQ ID NO: 2669811 - DNA, 25 bp, Homo sapien
gagtttataagacccagcattgtca

SEQ ID NO: 2669812 - DNA, 25 bp, Homo sapien
caaagacctcttaacaggaaacctg

SEQ ID NO: 2669813 - DNA, 25 bp, Homo sapien
tactggcgttgtgagcttgtcaagg

SEQ ID NO: 2669814 - DNA, 25 bp, Homo sapien
cattttcttgcctcgaaaggtgagg

SEQ ID NO: 2669815 - DNA, 25 bp, Homo sapien
agctgggctcggctcccgcggtttc

SEQ ID NO: 2669816 - DNA, 25 bp, Homo sapien
cgcagtcctcggcttggttttcagg

SEQ ID NO: 2669817 - DNA, 25 bp, Homo sapien
aggtctgcattcctagctgggctcg

SEQ ID NO: 2669818 - DNA, 25 bp, Homo sapien
gcggtttccgcttggagctccagcc

SEQ ID NO: 2669819 - DNA, 25 bp, Homo sapien
gccctagacccgggagcacgcgcgg

SEQ ID NO: 2669820 - DNA, 25 bp, Homo sapien
aggccctagacccgggagcacgcgc

SEQ ID NO: 2669821 - DNA, 25 bp, Homo sapien
cgcagggcaggtagccgggggcaca

SEQ ID NO: 2669822 - DNA, 25 bp, Homo sapien
caggccctagacccgggagcacgcg

SEQ ID NO: 2669823 - DNA, 25 bp, Homo sapien
tatcgccagggtcgcgatagtagga

SEQ ID NO: 2669824 - DNA, 25 bp, Homo sapien
ccagggtcgcgatagtaggaaaagc

SEQ ID NO: 2669825 - DNA, 25 bp, Homo sapien
gaaaagcgcacgtcccgagcctggg

SEQ ID NO: 2669826 - DNA, 25 bp, Homo sapien
gatagtaggaaaagcgcacgtcccg

SEQ ID NO: 2669827 - DNA, 25 bp, Homo sapien
caccagatacatttcccggcggaag

SEQ ID NO: 2669828 - DNA, 25 bp, Homo sapien
gtaacagtgttaccgacaaggagga

SEQ ID NO: 2669829 - DNA, 25 bp, Homo sapien
gaggagtcgccaagaaacacagtta

SEQ ID NO: 2669830 - DNA, 25 bp, Homo sapien
tgtaccgggccacacaaatcccttg

SEQ ID NO: 2669831 - DNA, 25 bp, Homo sapien
ctagagataaaggtgccaaaccaaa

SEQ ID NO: 2669832 - DNA, 25 bp, Homo sapien
tagagataaaggtgccaaaccaaac

SEQ ID NO: 2669833 - DNA, 25 bp, Homo sapien
gagataaaggtgccaaaccaaactg

SEQ ID NO: 2669834 - DNA, 25 bp, Homo sapien
agagataaaggtgccaaaccaaact

SEQ ID NO: 2669835 - DNA, 25 bp, Homo sapien
agagtctcatcgctgtgtcaggctg

SEQ ID NO: 2669836 - DNA, 25 bp, Homo sapien
cagagtctcatcgctgtgtcaggct

SEQ ID NO: 2669837 - DNA, 25 bp, Homo sapien
acagagtctcatcgctgtgtcaggc

SEQ ID NO: 2669838 - DNA, 25 bp, Homo sapien
gattatgagctctgataccggacca

SEQ ID NO: 2669839 - DNA, 25 bp, Homo sapien
gagctagccacacagcctaggtcag

SEQ ID NO: 2669840 - DNA, 25 bp, Homo sapien
gtattcatgtctctagggattccag

SEQ ID NO: 2669841 - DNA, 25 bp, Homo sapien
tgtaagtaaggagaagagctagcca

SEQ ID NO: 2669842 - DNA, 25 bp, Homo sapien
tagatataggctgaaatccctgctc

SEQ ID NO: 2669843 - DNA, 25 bp, Homo sapien
ggtaataccatgaagctgctctcag

SEQ ID NO: 2669844 - DNA, 25 bp, Homo sapien
aaatcacctggccttgactcacctg

SEQ ID NO: 2669845 - DNA, 25 bp, Homo sapien
gcaactctactatatgaccagactg

SEQ ID NO: 2669846 - DNA, 25 bp, Homo sapien
gaaaggagcactctctgcacgagga

SEQ ID NO: 2669847 - DNA, 25 bp, Homo sapien
gatgagggaaccatagcagttcagg

SEQ ID NO: 2669848 - DNA, 25 bp, Homo sapien
tccgagctgtgtacgccaggcctgg

SEQ ID NO: 2669849 - DNA, 25 bp, Homo sapien
tgtgacctgtcatgcggtgattgga

SEQ ID NO: 2669850 - DNA, 25 bp, Homo sapien
ctggctacagcttgttcaattttta

SEQ ID NO: 2669851 - DNA, 25 bp, Homo sapien
gctacagcttgttcaatttttattc

SEQ ID NO: 2669852 - DNA, 25 bp, Homo sapien
tggctacagcttgttcaatttttat

SEQ ID NO: 2669853 - DNA, 25 bp, Homo sapien
tctggctacagcttgttcaattttt

SEQ ID NO: 2669854 - DNA, 25 bp, Homo sapien
aactttcagagggcccccatgaaca

SEQ ID NO: 2669855 - DNA, 25 bp, Homo sapien
gagggcccccatgaacagtaaaatc

SEQ ID NO: 2669856 - DNA, 25 bp, Homo sapien
agggcccccatgaacagtaaaatct

SEQ ID NO: 2669857 - DNA, 25 bp, Homo sapien
tcagagggcccccatgaacagtaaa

SEQ ID NO: 2669858 - DNA, 25 bp, Homo sapien
gacttgctggttgcaccagaggaag

SEQ ID NO: 2669859 - DNA, 25 bp, Homo sapien
cttgctggttgcaccagaggaagct

SEQ ID NO: 2669860 - DNA, 25 bp, Homo sapien
tggttgcaccagaggaagctgacac

SEQ ID NO: 2669861 - DNA, 25 bp, Homo sapien
tggaagacttgctggttgcaccaga

SEQ ID NO: 2669862 - DNA, 25 bp, Homo sapien
tggtccttccatctgttggctgact

SEQ ID NO: 2669863 - DNA, 25 bp, Homo sapien
gaagatgtggtccttccatctgttg

SEQ ID NO: 2669864 - DNA, 25 bp, Homo sapien
ccttccatctgttggctgactggaa

SEQ ID NO: 2669865 - DNA, 25 bp, Homo sapien
ttttcttgttaggaagatgtggtcc

SEQ ID NO: 2669866 - DNA, 25 bp, Homo sapien
cttggttgactgtgacttcttctca

SEQ ID NO: 2669867 - DNA, 25 bp, Homo sapien
gacttcttctcaggttctgttttta

SEQ ID NO: 2669868 - DNA, 25 bp, Homo sapien
cccaattttcttgcgattcagtaga

SEQ ID NO: 2669869 - DNA, 25 bp, Homo sapien
tagaagacaacttccacttagctgc

SEQ ID NO: 2669870 - DNA, 25 bp, Homo sapien
tgctgaattcttcactcggagtacc

SEQ ID NO: 2669871 - DNA, 25 bp, Homo sapien
taaagtggaatagaagacaacttcc

SEQ ID NO: 2669872 - DNA, 25 bp, Homo sapien
aggtcaatagtaaccctgtcagcag

SEQ ID NO: 2669873 - DNA, 25 bp, Homo sapien
cactcaggcccactctttaggatca

SEQ ID NO: 2669874 - DNA, 25 bp, Homo sapien
gtacacagataacacatgagccatg

SEQ ID NO: 2669875 - DNA, 25 bp, Homo sapien
tgttgacagctaatcccactctaga

SEQ ID NO: 2669876 - DNA, 25 bp, Homo sapien
tccttcttgggattttttctcatga

SEQ ID NO: 2669877 - DNA, 25 bp, Homo sapien
ttccttcttgggattttttctcatg

SEQ ID NO: 2669878 - DNA, 25 bp, Homo sapien
ccttcttgggattttttctcatgaa

SEQ ID NO: 2669879 - DNA, 25 bp, Homo sapien
atgcctgcttgggtaggctttttgg

SEQ ID NO: 2669880 - DNA, 25 bp, Homo sapien
ttttattgtgagcatcgttacttcc

SEQ ID NO: 2669881 - DNA, 25 bp, Homo sapien
gctgttcagctgatctggaaactgc

SEQ ID NO: 2669882 - DNA, 25 bp, Homo sapien
gagcatcgttacttcctgtatctga

SEQ ID NO: 2669883 - DNA, 25 bp, Homo sapien
gccagatattgcagtgataccagca

SEQ ID NO: 2669884 - DNA, 25 bp, Homo sapien
tattgcagtgataccagcaacactc

SEQ ID NO: 2669885 - DNA, 25 bp, Homo sapien
cttgtcacccggcttgccagatatt

SEQ ID NO: 2669886 - DNA, 25 bp, Homo sapien
cccggcttgccagatattgcagtga

SEQ ID NO: 2669887 - DNA, 25 bp, Homo sapien
cacaagtatgtttactgcggcatta

SEQ ID NO: 2669888 - DNA, 25 bp, Homo sapien
aacccaaatgtccaacaatgacaga

SEQ ID NO: 2669889 - DNA, 25 bp, Homo sapien
ttcacaatagcaaagacttcgaacc

SEQ ID NO: 2669890 - DNA, 25 bp, Homo sapien
gtggattaagaaaatgtggcacata

SEQ ID NO: 2669891 - DNA, 25 bp, Homo sapien
tgtactcctgccaatggtacccagg

SEQ ID NO: 2669892 - DNA, 25 bp, Homo sapien
agggaacttagggactggactgcaa

SEQ ID NO: 2669893 - DNA, 25 bp, Homo sapien
caaacctgacaatgagcaccttagg

SEQ ID NO: 2669894 - DNA, 25 bp, Homo sapien
taaaaaggcactcattctcaggtgc

SEQ ID NO: 2669895 - DNA, 25 bp, Homo sapien
ccggtttagattcaactggcacagc

SEQ ID NO: 2669896 - DNA, 25 bp, Homo sapien
tttatccggtttagattcaactggc

SEQ ID NO: 2669897 - DNA, 25 bp, Homo sapien
tttagattcaactggcacagctggg

SEQ ID NO: 2669898 - DNA, 25 bp, Homo sapien
cgatggtttatccggtttagattca

SEQ ID NO: 2669899 - DNA, 25 bp, Homo sapien
tccagtatacgttgtattttcttct

SEQ ID NO: 2669900 - DNA, 25 bp, Homo sapien
gtcctcctaaagtatctattaagtc

SEQ ID NO: 2669901 - DNA, 25 bp, Homo sapien
aacttctggtccagtatacgttgta

SEQ ID NO: 2669902 - DNA, 25 bp, Homo sapien
aagtatctattaagtcatccaaagc

SEQ ID NO: 2669903 - DNA, 25 bp, Homo sapien
aatttttacagatatcatgatcaca

SEQ ID NO: 2669904 - DNA, 25 bp, Homo sapien
ttttacagatatcatgatcacatac

SEQ ID NO: 2669905 - DNA, 25 bp, Homo sapien
gaatttttacagatatcatgatcac

SEQ ID NO: 2669906 - DNA, 25 bp, Homo sapien
ccactgagtatgaatttttacagat

SEQ ID NO: 2669907 - DNA, 25 bp, Homo sapien
aactcaatgttataatgcagctgcc

SEQ ID NO: 2669908 - DNA, 25 bp, Homo sapien
aataagtgtgtgacccagtggaccg

SEQ ID NO: 2669909 - DNA, 25 bp, Homo sapien
taaactgagggtggtaaatatcgag

SEQ ID NO: 2669910 - DNA, 25 bp, Homo sapien
gtcaatcttagcacaacaacaaatg

SEQ ID NO: 2669911 - DNA, 25 bp, Homo sapien
ctatgtaggtggaactcattggatc

SEQ ID NO: 2669912 - DNA, 25 bp, Homo sapien
caatagttccctatattttggagga

SEQ ID NO: 2669913 - DNA, 25 bp, Homo sapien
tattttggaggaattgtgacttctc

SEQ ID NO: 2669914 - DNA, 25 bp, Homo sapien
tttacccaattcctctatgtaggtg

SEQ ID NO: 2669915 - DNA, 25 bp, Homo sapien
aggaggccctgtgatcccttccttt

SEQ ID NO: 2669916 - DNA, 25 bp, Homo sapien
gcaggaggccctgtgatcccttcct

SEQ ID NO: 2669917 - DNA, 25 bp, Homo sapien
gagtctgcaggaggccctgtgatcc

SEQ ID NO: 2669918 - DNA, 25 bp, Homo sapien
ctgcaggaggccctgtgatcccttc

SEQ ID NO: 2669919 - DNA, 25 bp, Homo sapien
ctttccagcagctgtaggcgaccca

SEQ ID NO: 2669920 - DNA, 25 bp, Homo sapien
tgtaggcgacccacaggtgaagtca

SEQ ID NO: 2669921 - DNA, 25 bp, Homo sapien
gaagtcagatgacaaggcgtctata

SEQ ID NO: 2669922 - DNA, 25 bp, Homo sapien
ggcgtctatagcatcatctggccct

SEQ ID NO: 2669923 - DNA, 25 bp, Homo sapien
ggtggagcagcacttctgactgtcc

SEQ ID NO: 2669924 - DNA, 25 bp, Homo sapien
ctcttggggtggagcagcacttctg

SEQ ID NO: 2669925 - DNA, 25 bp, Homo sapien
tgagcttttaaaacttctgtagatt

SEQ ID NO: 2669926 - DNA, 25 bp, Homo sapien
tgtccctgctgactgagcttttaaa

SEQ ID NO: 2669927 - DNA, 25 bp, Homo sapien
cactattccacatagacctgagagg

SEQ ID NO: 2669928 - DNA, 25 bp, Homo sapien
gaatgagctagatcaggctctggaa

SEQ ID NO: 2669929 - DNA, 25 bp, Homo sapien
gatgatcaacataaccctcattggc

SEQ ID NO: 2669930 - DNA, 25 bp, Homo sapien
catcatgggttatgtgctactggca

SEQ ID NO: 2669931 - DNA, 25 bp, Homo sapien
ggctgatcgttgtaggaactcccac

SEQ ID NO: 2669932 - DNA, 25 bp, Homo sapien
ggcttctgacaacctaagcttagga

SEQ ID NO: 2669933 - DNA, 25 bp, Homo sapien
gggctaagacacgtttctacagtaa

SEQ ID NO: 2669934 - DNA, 25 bp, Homo sapien
gctgctctgatagaaaccgttcctg

SEQ ID NO: 2669935 - DNA, 25 bp, Homo sapien
tttatttgaaaccttgcaaaagaga

SEQ ID NO: 2669936 - DNA, 25 bp, Homo sapien
ggcaattttatttgaaaccttgcaa

SEQ ID NO: 2669937 - DNA, 25 bp, Homo sapien
ttgaaaccttgcaaaagagagaaag

SEQ ID NO: 2669938 - DNA, 25 bp, Homo sapien
aggcaattttatttgaaaccttgca

SEQ ID NO: 2669939 - DNA, 25 bp, Homo sapien
ttaattgagcggaggtcgagctcag

SEQ ID NO: 2669940 - DNA, 25 bp, Homo sapien
ccagtgaagccgacagagcctcgag

SEQ ID NO: 2669941 - DNA, 25 bp, Homo sapien
cttccttaattgagcggaggtcgag

SEQ ID NO: 2669942 - DNA, 25 bp, Homo sapien
cgagtgcttgatcactcattgtatc

SEQ ID NO: 2669943 - DNA, 25 bp, Homo sapien
gttgctggaagtcagggagactccc

SEQ ID NO: 2669944 - DNA, 25 bp, Homo sapien
cccagactcaaggattgttgctgga

SEQ ID NO: 2669945 - DNA, 25 bp, Homo sapien
actcaaggattgttgctggaagtca

SEQ ID NO: 2669946 - DNA, 25 bp, Homo sapien
ttgctggaagtcagggagactcccc

SEQ ID NO: 2669947 - DNA, 25 bp, Homo sapien
agaaagtcgaagatagaaactggcc

SEQ ID NO: 2669948 - DNA, 25 bp, Homo sapien
tccaagaaagtcgaagatagaaact

SEQ ID NO: 2669949 - DNA, 25 bp, Homo sapien
caagaaagtcgaagatagaaactgg

SEQ ID NO: 2669950 - DNA, 25 bp, Homo sapien
ctccaagaaagtcgaagatagaaac

SEQ ID NO: 2669951 - DNA, 25 bp, Homo sapien
tctgcgttcaccgtcacaaagctta

SEQ ID NO: 2669952 - DNA, 25 bp, Homo sapien
aaagcttatcgtgccacactgtggc

SEQ ID NO: 2669953 - DNA, 25 bp, Homo sapien
ttggtcctggaagatacgaactgct

SEQ ID NO: 2669954 - DNA, 25 bp, Homo sapien
gaagatacgaactgcttctcttgct

SEQ ID NO: 2669955 - DNA, 25 bp, Homo sapien
attgtgttgtaatcaagtttccctt

SEQ ID NO: 2669956 - DNA, 25 bp, Homo sapien
ttgtgttgtaatcaagtttcccttc

SEQ ID NO: 2669957 - DNA, 25 bp, Homo sapien
tgtgttgtaatcaagtttcccttct

SEQ ID NO: 2669958 - DNA, 25 bp, Homo sapien
tgttgtaatcaagtttcccttcttc

SEQ ID NO: 2669959 - DNA, 25 bp, Homo sapien
ctgtattaagacggtcctccccact

SEQ ID NO: 2669960 - DNA, 25 bp, Homo sapien
taagacggtcctccccactaatctc

SEQ ID NO: 2669961 - DNA, 25 bp, Homo sapien
tgtattaagacggtcctccccacta

SEQ ID NO: 2669962 - DNA, 25 bp, Homo sapien
gacggtcctccccactaatctcagg

SEQ ID NO: 2669963 - DNA, 25 bp, Homo sapien
ctgtcatggagcagcactccccagg

SEQ ID NO: 2669964 - DNA, 25 bp, Homo sapien
tctggagaaatcctgtcatggagca

SEQ ID NO: 2669965 - DNA, 25 bp, Homo sapien
gctctatttcggcatctggagaaat

SEQ ID NO: 2669966 - DNA, 25 bp, Homo sapien
ctatttcggcatctggagaaatcct

SEQ ID NO: 2669967 - DNA, 25 bp, Homo sapien
gatgatatcacttcctctgtgtact

SEQ ID NO: 2669968 - DNA, 25 bp, Homo sapien
ttctcgagtgttatagagaagacca

SEQ ID NO: 2669969 - DNA, 25 bp, Homo sapien
tctgtgtacttctcgagtgttatag

SEQ ID NO: 2669970 - DNA, 25 bp, Homo sapien
tgttatagagaagaccaaatctggt

SEQ ID NO: 2669971 - DNA, 25 bp, Homo sapien
tctgtactcagatgggattgtttca

SEQ ID NO: 2669972 - DNA, 25 bp, Homo sapien
actcagatgggattgtttcatcatc

SEQ ID NO: 2669973 - DNA, 25 bp, Homo sapien
cgtggctggttttaatctgtactca

SEQ ID NO: 2669974 - DNA, 25 bp, Homo sapien
tggctggttttaatctgtactcaga

SEQ ID NO: 2669975 - DNA, 25 bp, Homo sapien
gctctggcaatagtggttttccatc

SEQ ID NO: 2669976 - DNA, 25 bp, Homo sapien
tctggcaatagtggttttccatctt

SEQ ID NO: 2669977 - DNA, 25 bp, Homo sapien
ctctggcaatagtggttttccatct

SEQ ID NO: 2669978 - DNA, 25 bp, Homo sapien
ggctctggcaatagtggttttccat

SEQ ID NO: 2669979 - DNA, 25 bp, Homo sapien
tgaccttgggctatttacataggcc

SEQ ID NO: 2669980 - DNA, 25 bp, Homo sapien
gggcatgtggagattgtcactaaca

SEQ ID NO: 2669981 - DNA, 25 bp, Homo sapien
catgtgattcagacgctgggactca

SEQ ID NO: 2669982 - DNA, 25 bp, Homo sapien
tactccgtttctatgattatgcagg

SEQ ID NO: 2669983 - DNA, 25 bp, Homo sapien
tcagttggcttagatggtttctctt

SEQ ID NO: 2669984 - DNA, 25 bp, Homo sapien
tgaaagttcatcaatgagttctgat

SEQ ID NO: 2669985 - DNA, 25 bp, Homo sapien
cttttcagttggcttagatggtttc

SEQ ID NO: 2669986 - DNA, 25 bp, Homo sapien
cattcagaccggtcaaaatcttctg

SEQ ID NO: 2669987 - DNA, 25 bp, Homo sapien
taagatcacaaacctcaaaactaga

SEQ ID NO: 2669988 - DNA, 25 bp, Homo sapien
taaaacagtctgtctcacaattttt

SEQ ID NO: 2669989 - DNA, 25 bp, Homo sapien
tttaagatcacaaacctcaaaacta

SEQ ID NO: 2669990 - DNA, 25 bp, Homo sapien
gatcacaaacctcaaaactagagat

SEQ ID NO: 2669991 - DNA, 25 bp, Homo sapien
cagggggtgctgactgtatactaca

SEQ ID NO: 2669992 - DNA, 25 bp, Homo sapien
acacagcctccgacacaggagctgg

SEQ ID NO: 2669993 - DNA, 25 bp, Homo sapien
ctgtatactacacatggaggtccga

SEQ ID NO: 2669994 - DNA, 25 bp, Homo sapien
atggaggtccgacacacagcctccg

SEQ ID NO: 2669995 - DNA, 25 bp, Homo sapien
tttaatttgtcaggataagataaaa

SEQ ID NO: 2669996 - DNA, 25 bp, Homo sapien
ttaatttgtcaggataagataaaat

SEQ ID NO: 2669997 - DNA, 25 bp, Homo sapien
tgctcaaatgcccagggagtcactc

SEQ ID NO: 2669998 - DNA, 25 bp, Homo sapien
ttcaccagagtcctcctagagtccc

SEQ ID NO: 2669999 - DNA, 25 bp, Homo sapien
ctctccggttctttaccactgtggc

SEQ ID NO: 2670000 - DNA, 25 bp, Homo sapien
tgtggcctagcacacatgctgtaaa

SEQ ID NO: 2670001 - DNA, 25 bp, Homo sapien
tttgactccaatcacagcctctttg

SEQ ID NO: 2670002 - DNA, 25 bp, Homo sapien
catggccagagttggtggggttaag

SEQ ID NO: 2670003 - DNA, 25 bp, Homo sapien
ctgggcaaccatggccagagttggt

SEQ ID NO: 2670004 - DNA, 25 bp, Homo sapien
accatggccagagttggtggggtta

SEQ ID NO: 2670005 - DNA, 25 bp, Homo sapien
tggccagagttggtggggttaaggc

SEQ ID NO: 2670006 - DNA, 25 bp, Homo sapien
gaccaactaacctgaatggcacagt

SEQ ID NO: 2670007 - DNA, 25 bp, Homo sapien
tttcagagagcccacaagaggccat

SEQ ID NO: 2670008 - DNA, 25 bp, Homo sapien
gcttctactgaccaaaggagtttca

SEQ ID NO: 2670009 - DNA, 25 bp, Homo sapien
catagacggcacaggaaagattttc

SEQ ID NO: 2670010 - DNA, 25 bp, Homo sapien
ttccccaggctatcagccaaggctt

SEQ ID NO: 2670011 - DNA, 25 bp, Homo sapien
caggctatcagccaaggcttctaca

SEQ ID NO: 2670012 - DNA, 25 bp, Homo sapien
cccaggctatcagccaaggcttcta

SEQ ID NO: 2670013 - DNA, 25 bp, Homo sapien
tttttccccaggctatcagccaagg

SEQ ID NO: 2670014 - DNA, 25 bp, Homo sapien
gacctcttctaatctataatcagga

SEQ ID NO: 2670015 - DNA, 25 bp, Homo sapien
gcttttcacggtcttcttctttggc

SEQ ID NO: 2670016 - DNA, 25 bp, Homo sapien
aagcttttcacggtcttcttctttg

SEQ ID NO: 2670017 - DNA, 25 bp, Homo sapien
tataatcaggaggaattgtttcttc

SEQ ID NO: 2670018 - DNA, 25 bp, Homo sapien
ttttagttctcctatctacacaagg

SEQ ID NO: 2670019 - DNA, 25 bp, Homo sapien
ggaaaacattaggtagcttagacat

SEQ ID NO: 2670020 - DNA, 25 bp, Homo sapien
cttgaggatcaagtctacttaggaa

SEQ ID NO: 2670021 - DNA, 25 bp, Homo sapien
tctggtattgtaacaagctgtgggt

SEQ ID NO: 2670022 - DNA, 25 bp, Homo sapien
gaccagcctctactgaatgggcact

SEQ ID NO: 2670023 - DNA, 25 bp, Homo sapien
ccgtgtctgctaaataaatgggcta

SEQ ID NO: 2670024 - DNA, 25 bp, Homo sapien
gacagaacatgtggcccttagcatg

SEQ ID NO: 2670025 - DNA, 25 bp, Homo sapien
tagaaacgctatggctgcaactgaa

SEQ ID NO: 2670026 - DNA, 25 bp, Homo sapien
gccaagccctgacctaagtaagcat

SEQ ID NO: 2670027 - DNA, 25 bp, Homo sapien
catatgcaaggactacatgccaagc

SEQ ID NO: 2670028 - DNA, 25 bp, Homo sapien
gaagcctagagactatcacagcagg

SEQ ID NO: 2670029 - DNA, 25 bp, Homo sapien
gctgcacactggatgaggtatggct

SEQ ID NO: 2670030 - DNA, 25 bp, Homo sapien
gaagctgttccttagactcttttgg

SEQ ID NO: 2670031 - DNA, 25 bp, Homo sapien
ctcttttggcaggagtggctttcca

SEQ ID NO: 2670032 - DNA, 25 bp, Homo sapien
tccttagactcttttggcaggagtg

SEQ ID NO: 2670033 - DNA, 25 bp, Homo sapien
tttggcaggagtggctttccatctt

SEQ ID NO: 2670034 - DNA, 25 bp, Homo sapien
tgtggaccagagaagtcctcagaca

SEQ ID NO: 2670035 - DNA, 25 bp, Homo sapien
aaagcatccagaaggaagtcttcac

SEQ ID NO: 2670036 - DNA, 25 bp, Homo sapien
gaagcattttgtggaccagagaagt

SEQ ID NO: 2670037 - DNA, 25 bp, Homo sapien
gaagtcctcagacaaagcatccaga

SEQ ID NO: 2670038 - DNA, 25 bp, Homo sapien
ctgccctctcaaatgttgctaggaa

SEQ ID NO: 2670039 - DNA, 25 bp, Homo sapien
tggtgactccaactatggatagctt

SEQ ID NO: 2670040 - DNA, 25 bp, Homo sapien
ctaggaattcatactgcgaaaagca

SEQ ID NO: 2670041 - DNA, 25 bp, Homo sapien
tagagttccacggtttgtttacaca

SEQ ID NO: 2670042 - DNA, 25 bp, Homo sapien
ctccagcttgggtcgttgaagctgg

SEQ ID NO: 2670043 - DNA, 25 bp, Homo sapien
ggtttgggaaaccacttcagagatg

SEQ ID NO: 2670044 - DNA, 25 bp, Homo sapien
gtttgggaaaccacttcagagatgg

SEQ ID NO: 2670045 - DNA, 25 bp, Homo sapien
gggctccagcttgggtcgttgaagc

SEQ ID NO: 2670046 - DNA, 25 bp, Homo sapien
gatgatcctgaagctgacgcaacag

SEQ ID NO: 2670047 - DNA, 25 bp, Homo sapien
tgaagatcccaccaggttaaggagg

SEQ ID NO: 2670048 - DNA, 25 bp, Homo sapien
tcaggagccatatccagtgggtgac

SEQ ID NO: 2670049 - DNA, 25 bp, Homo sapien
tttcagaaagtgcagcgtgacccgc

SEQ ID NO: 2670050 - DNA, 25 bp, Homo sapien
gtcagagagtttatccaaggcatca

SEQ ID NO: 2670051 - DNA, 25 bp, Homo sapien
gactgtcagagagtttatccaaggc

SEQ ID NO: 2670052 - DNA, 25 bp, Homo sapien
gtttatccaaggcatcatcgaggtc

SEQ ID NO: 2670053 - DNA, 25 bp, Homo sapien
gagagtttatccaaggcatcatcga

SEQ ID NO: 2670054 - DNA, 25 bp, Homo sapien
tatttataagcaaccctgaaggaca

SEQ ID NO: 2670055 - DNA, 25 bp, Homo sapien
taatttgaatggatgtgctgactgc

SEQ ID NO: 2670056 - DNA, 25 bp, Homo sapien
ggaggctccgctggtatctctgtca

SEQ ID NO: 2670057 - DNA, 25 bp, Homo sapien
cctccagtggagtacagattgattt

SEQ ID NO: 2670058 - DNA, 25 bp, Homo sapien
caggtgggatagtgtcatctctttc

SEQ ID NO: 2670059 - DNA, 25 bp, Homo sapien
tctccaagcttgtctctatgttcag

SEQ ID NO: 2670060 - DNA, 25 bp, Homo sapien
ccaggagatgtctgtattcaggtgg

SEQ ID NO: 2670061 - DNA, 25 bp, Homo sapien
gcttgtctctatgttcagctttagc

SEQ ID NO: 2670062 - DNA, 25 bp, Homo sapien
aatttcccaaagaacgcaagcaggg

SEQ ID NO: 2670063 - DNA, 25 bp, Homo sapien
tggttgacctacgaaagactggcct

SEQ ID NO: 2670064 - DNA, 25 bp, Homo sapien
caagcagggtgagttggtactatca

SEQ ID NO: 2670065 - DNA, 25 bp, Homo sapien
atgcaggagaagatagggagacccc

SEQ ID NO: 2670066 - DNA, 25 bp, Homo sapien
gatttctttgtaggtggcttcactg

SEQ ID NO: 2670067 - DNA, 25 bp, Homo sapien
ctctgatttctttgtaggtggcttc

SEQ ID NO: 2670068 - DNA, 25 bp, Homo sapien
ttgtaggtggcttcactggtttgtc

SEQ ID NO: 2670069 - DNA, 25 bp, Homo sapien
ttgaatcctctgatttctttgtagg

SEQ ID NO: 2670070 - DNA, 25 bp, Homo sapien
cagatctcctgagagagcatcaatg

SEQ ID NO: 2670071 - DNA, 25 bp, Homo sapien
atcaatggggtcttggtcatctgca

SEQ ID NO: 2670072 - DNA, 25 bp, Homo sapien
gatctcctgagagagcatcaatggg

SEQ ID NO: 2670073 - DNA, 25 bp, Homo sapien
tctgtgaggtttctgtagtggaggg

SEQ ID NO: 2670074 - DNA, 25 bp, Homo sapien
tagagcttgtctcgatcaggactgg

SEQ ID NO: 2670075 - DNA, 25 bp, Homo sapien
caattcagtgatcgagagcagtgcc

SEQ ID NO: 2670076 - DNA, 25 bp, Homo sapien
aaggcattacttacgagttaccagg

SEQ ID NO: 2670077 - DNA, 25 bp, Homo sapien
gatgctctaattcccgtggtgcctg

SEQ ID NO: 2670078 - DNA, 25 bp, Homo sapien
ctgaatccttcgctttacctccatt

SEQ ID NO: 2670079 - DNA, 25 bp, Homo sapien
tgctgaatccttcgctttacctcca

SEQ ID NO: 2670080 - DNA, 25 bp, Homo sapien
ctttgctgaatccttcgctttacct

SEQ ID NO: 2670081 - DNA, 25 bp, Homo sapien
gaatccttcgctttacctccattct

SEQ ID NO: 2670082 - DNA, 25 bp, Homo sapien
ttactttaccaagcgatgctatggg

SEQ ID NO: 2670083 - DNA, 25 bp, Homo sapien
cctttcctgtacatagggtcatggc

SEQ ID NO: 2670084 - DNA, 25 bp, Homo sapien
ttaattagggcaagaaagacaggca

SEQ ID NO: 2670085 - DNA, 25 bp, Homo sapien
tgataaaccctactctgtgtaactg

SEQ ID NO: 2670086 - DNA, 25 bp, Homo sapien
agcaaaaccatccgtgagctttctt

SEQ ID NO: 2670087 - DNA, 25 bp, Homo sapien
gcaaaaccatccgtgagctttcttt

SEQ ID NO: 2670088 - DNA, 25 bp, Homo sapien
caaaaccatccgtgagctttctttt

SEQ ID NO: 2670089 - DNA, 25 bp, Homo sapien
ttagtcatcttttggcttggaagtt

SEQ ID NO: 2670090 - DNA, 25 bp, Homo sapien
cttttggcttggaagtttcctctgt

SEQ ID NO: 2670091 - DNA, 25 bp, Homo sapien
ttggcttggaagtttcctctgttgt

SEQ ID NO: 2670092 - DNA, 25 bp, Homo sapien
atcttttggcttggaagtttcctct

SEQ ID NO: 2670093 - DNA, 25 bp, Homo sapien
ttctgaagattaagataagggccca

SEQ ID NO: 2670094 - DNA, 25 bp, Homo sapien
tggtcattctaagtgcctggcctaa

SEQ ID NO: 2670095 - DNA, 25 bp, Homo sapien
gagagagctgaacccgatttaacct

SEQ ID NO: 2670096 - DNA, 25 bp, Homo sapien
gattcaactagcctcagatggtcat

SEQ ID NO: 2670097 - DNA, 25 bp, Homo sapien
aaacatgaaagtggattaatagaat

SEQ ID NO: 2670098 - DNA, 25 bp, Homo sapien
tgtataacagacagaaggaatttcc

SEQ ID NO: 2670099 - DNA, 25 bp, Homo sapien
atataccacttagcaaaagcattgt

SEQ ID NO: 2670100 - DNA, 25 bp, Homo sapien
gtaattttcttgttacagacatagt

SEQ ID NO: 2670101 - DNA, 25 bp, Homo sapien
tcaatactcagtacacaggtgaacc

SEQ ID NO: 2670102 - DNA, 25 bp, Homo sapien
tatttaggatgttcagagactcaac

SEQ ID NO: 2670103 - DNA, 25 bp, Homo sapien
tccaccagctgaagattttacatgc

SEQ ID NO: 2670104 - DNA, 25 bp, Homo sapien
caggtgaaccagtcaaattcatttt

SEQ ID NO: 2670105 - DNA, 25 bp, Homo sapien
gatttacaggcactgtgtgtagaat

SEQ ID NO: 2670106 - DNA, 25 bp, Homo sapien
tgcaaaaattcacttagcttttctt

SEQ ID NO: 2670107 - DNA, 25 bp, Homo sapien
tgagatttacaggcactgtgtgtag

SEQ ID NO: 2670108 - DNA, 25 bp, Homo sapien
tttacaggcactgtgtgtagaatgt

SEQ ID NO: 2670109 - DNA, 25 bp, Homo sapien
tgtgcccaatgtacaatatcttatg

SEQ ID NO: 2670110 - DNA, 25 bp, Homo sapien
aatttattattagcagcccaagagg

SEQ ID NO: 2670111 - DNA, 25 bp, Homo sapien
tggcaaagaagagttcaaactgaaa

SEQ ID NO: 2670112 - DNA, 25 bp, Homo sapien
taaacattatcccaaagcaacatca

SEQ ID NO: 2670113 - DNA, 25 bp, Homo sapien
ctgtgctgactgtaagatgcagaag

SEQ ID NO: 2670114 - DNA, 25 bp, Homo sapien
ctctgttgctgacttgattcaagtc

SEQ ID NO: 2670115 - DNA, 25 bp, Homo sapien
tgttctgtgctgactgtaagatgca

SEQ ID NO: 2670116 - DNA, 25 bp, Homo sapien
tctcagtgtgttctgtgctgactgt

SEQ ID NO: 2670117 - DNA, 25 bp, Homo sapien
atttgctacacaaggacttatctaa

SEQ ID NO: 2670118 - DNA, 25 bp, Homo sapien
aatttgctacacaaggacttatcta

SEQ ID NO: 2670119 - DNA, 25 bp, Homo sapien
tttgctacacaaggacttatctaac

SEQ ID NO: 2670120 - DNA, 25 bp, Homo sapien
aattagattttatttcttatgctcg

SEQ ID NO: 2670121 - DNA, 25 bp, Homo sapien
attagattttatttcttatgctcga

SEQ ID NO: 2670122 - DNA, 25 bp, Homo sapien
taattagattttatttcttatgctc

SEQ ID NO: 2670123 - DNA, 25 bp, Homo sapien
tcaaactgatgctaaggaaggccat

SEQ ID NO: 2670124 - DNA, 25 bp, Homo sapien
gatacatggttagaaatccctcagg

SEQ ID NO: 2670125 - DNA, 25 bp, Homo sapien
catctgtcagtgtcaaaggtttcaa

SEQ ID NO: 2670126 - DNA, 25 bp, Homo sapien
ttcaaagtggtaggacatcagagcc

SEQ ID NO: 2670127 - DNA, 25 bp, Homo sapien
catggtaaaccaacggagttcaagt

SEQ ID NO: 2670128 - DNA, 25 bp, Homo sapien
tgactctaaggtgcggaaatcctca

SEQ ID NO: 2670129 - DNA, 25 bp, Homo sapien
gaaaacttgctacacagggacttat

SEQ ID NO: 2670130 - DNA, 25 bp, Homo sapien
attcaagttgcagcgtgttttgcgc

SEQ ID NO: 2670131 - DNA, 25 bp, Homo sapien
gactaagccggacgatgactgggtt

SEQ ID NO: 2670132 - DNA, 25 bp, Homo sapien
tgccctgcaacgtaaacccaagtgt

SEQ ID NO: 2670133 - DNA, 25 bp, Homo sapien
tatagtttatgcttaagcacccgtg

SEQ ID NO: 2670134 - DNA, 25 bp, Homo sapien
tcctggcggacttgtggtttctaca

SEQ ID NO: 2670135 - DNA, 25 bp, Homo sapien
actgttttgcttggcaaagaaaaga

SEQ ID NO: 2670136 - DNA, 25 bp, Homo sapien
gaaaagactctgcacattctgcttt

SEQ ID NO: 2670137 - DNA, 25 bp, Homo sapien
agaaaagactctgcacattctgctt

SEQ ID NO: 2670138 - DNA, 25 bp, Homo sapien
tggtggaaactgttttgcttggcaa

SEQ ID NO: 2670139 - DNA, 25 bp, Homo sapien
catctaactacgcaagtcctgccgg

SEQ ID NO: 2670140 - DNA, 25 bp, Homo sapien
aaaaccatgctgttcaatgcaggcc

SEQ ID NO: 2670141 - DNA, 25 bp, Homo sapien
cataatggagagcaaactacggaca

SEQ ID NO: 2670142 - DNA, 25 bp, Homo sapien
tgcaatagtgtcctaactggcctcc

SEQ ID NO: 2670143 - DNA, 25 bp, Homo sapien
tccaaagccttgaccagaaaggtag

SEQ ID NO: 2670144 - DNA, 25 bp, Homo sapien
tacagtctcgtagcttttttccagt

SEQ ID NO: 2670145 - DNA, 25 bp, Homo sapien
ccagcgaggtctagagcagagatac

SEQ ID NO: 2670146 - DNA, 25 bp, Homo sapien
acactattttctagcttgagatggg

SEQ ID NO: 2670147 - DNA, 25 bp, Homo sapien
gataattctcgcaattgtcccctga

SEQ ID NO: 2670148 - DNA, 25 bp, Homo sapien
ctcgaggactttgatgtgtgggcca

SEQ ID NO: 2670149 - DNA, 25 bp, Homo sapien
gatacataatggacaggtgataacc

SEQ ID NO: 2670150 - DNA, 25 bp, Homo sapien
aaccatgtgagggacttatggctga

SEQ ID NO: 2670151 - DNA, 25 bp, Homo sapien
gaaagctattatatataggaggccc

SEQ ID NO: 2670152 - DNA, 25 bp, Homo sapien
ccttttattaggctgttggtgtgta

SEQ ID NO: 2670153 - DNA, 25 bp, Homo sapien
tacagctagatcttaacccattgga

SEQ ID NO: 2670154 - DNA, 25 bp, Homo sapien
tttcacaccgatcagtttttagctg

SEQ ID NO: 2670155 - DNA, 25 bp, Homo sapien
cattggcaggaacccagtaggatac

SEQ ID NO: 2670156 - DNA, 25 bp, Homo sapien
gctaactagtgaatctggacaggga

SEQ ID NO: 2670157 - DNA, 25 bp, Homo sapien
taaccttactgtgttttagccttgc

SEQ ID NO: 2670158 - DNA, 25 bp, Homo sapien
tgagcccatggacatatctgaagcc

SEQ ID NO: 2670159 - DNA, 25 bp, Homo sapien
tagattagattagatcattctggca

SEQ ID NO: 2670160 - DNA, 25 bp, Homo sapien
gattagattagatcattctggcatc

SEQ ID NO: 2670161 - DNA, 25 bp, Homo sapien
tagattagatcattctggcatctat

SEQ ID NO: 2670162 - DNA, 25 bp, Homo sapien
gattagatcattctggcatctattt

SEQ ID NO: 2670163 - DNA, 25 bp, Homo sapien
tgcaggaaccgatatcgagccacgg

SEQ ID NO: 2670164 - DNA, 25 bp, Homo sapien
cttgcaggaaccgatatcgagccac

SEQ ID NO: 2670165 - DNA, 25 bp, Homo sapien
aggaaccgatatcgagccacggcac

SEQ ID NO: 2670166 - DNA, 25 bp, Homo sapien
ggagcttgcaggaaccgatatcgag

SEQ ID NO: 2670167 - DNA, 25 bp, Homo sapien
aactatcagccgtgcgtacagaggg

SEQ ID NO: 2670168 - DNA, 25 bp, Homo sapien
taagggacctcattgataagcagac

SEQ ID NO: 2670169 - DNA, 25 bp, Homo sapien
tccaatggaaacttgaggtcagtcc

SEQ ID NO: 2670170 - DNA, 25 bp, Homo sapien
tcagagcgaatgctgcggagtcaac

SEQ ID NO: 2670171 - DNA, 25 bp, Homo sapien
tgtagcccaaccaaatgatctctga

SEQ ID NO: 2670172 - DNA, 25 bp, Homo sapien
ggaaatcccttgcttactctagaag

SEQ ID NO: 2670173 - DNA, 25 bp, Homo sapien
ttagaagactaagtgacacaggccc

SEQ ID NO: 2670174 - DNA, 25 bp, Homo sapien
gatcaggtttctcccaccactgggt

SEQ ID NO: 2670175 - DNA, 25 bp, Homo sapien
cagcagtcagcagtaatgatcgggc

SEQ ID NO: 2670176 - DNA, 25 bp, Homo sapien
caatgcatttcagctcgtcaggtaa

SEQ ID NO: 2670177 - DNA, 25 bp, Homo sapien
taatacacgctgcacaaagtcgcgg

SEQ ID NO: 2670178 - DNA, 25 bp, Homo sapien
gatcgggcgagtctcattaacaatg

SEQ ID NO: 2670179 - DNA, 25 bp, Homo sapien
taggaaacttgacatctcagagagg

SEQ ID NO: 2670180 - DNA, 25 bp, Homo sapien
ggaacacgaggagtttgggccaatc

SEQ ID NO: 2670181 - DNA, 25 bp, Homo sapien
tcacttgcattcacctggtatgggc

SEQ ID NO: 2670182 - DNA, 25 bp, Homo sapien
tgaacactttgagggatccacattg

SEQ ID NO: 2670183 - DNA, 25 bp, Homo sapien
tttactctctagttccccaacttca

SEQ ID NO: 2670184 - DNA, 25 bp, Homo sapien
catttactctctagttccccaactt

SEQ ID NO: 2670185 - DNA, 25 bp, Homo sapien
ggatcccgtcttggggcaggggcga

SEQ ID NO: 2670186 - DNA, 25 bp, Homo sapien
gagtcctctggatcccgtcttgggg

SEQ ID NO: 2670187 - DNA, 25 bp, Homo sapien
atcccgtcttggggcaggggcgatg

SEQ ID NO: 2670188 - DNA, 25 bp, Homo sapien
cagagtcctctggatcccgtcttgg

SEQ ID NO: 2670189 - DNA, 25 bp, Homo sapien
ttggagaggtctcggggactttcag

SEQ ID NO: 2670190 - DNA, 25 bp, Homo sapien
ctgttggagaggtctcggggacttt

SEQ ID NO: 2670191 - DNA, 25 bp, Homo sapien
gagaggtctcggggactttcagagt

SEQ ID NO: 2670192 - DNA, 25 bp, Homo sapien
tgttggagaggtctcggggactttc

SEQ ID NO: 2670193 - DNA, 25 bp, Homo sapien
agcctttctgtcagctcataacgag

SEQ ID NO: 2670194 - DNA, 25 bp, Homo sapien
ctctgatccaaggtcccggtaccaa

SEQ ID NO: 2670195 - DNA, 25 bp, Homo sapien
atcctcgttgagacataactgtttc

SEQ ID NO: 2670196 - DNA, 25 bp, Homo sapien
tctttggacccctcatggacccaac

SEQ ID NO: 2670197 - DNA, 25 bp, Homo sapien
ctccactttcactttcggtcctggg

SEQ ID NO: 2670198 - DNA, 25 bp, Homo sapien
gcttccccgcctgccgctagggctc

SEQ ID NO: 2670199 - DNA, 25 bp, Homo sapien
tcctgggggagctaggccggcggca

SEQ ID NO: 2670200 - DNA, 25 bp, Homo sapien
agaaccccaggtacagcgcgctcga

SEQ ID NO: 2670201 - DNA, 25 bp, Homo sapien
cgaacgcgtctaggcttggtggact

SEQ ID NO: 2670202 - DNA, 25 bp, Homo sapien
tccaatgggcgtcgaacgcgtctag

SEQ ID NO: 2670203 - DNA, 25 bp, Homo sapien
agtggcgagatgacggacacccagc

SEQ ID NO: 2670204 - DNA, 25 bp, Homo sapien
tggcttcggtccccaacttgagcac

SEQ ID NO: 2670205 - DNA, 25 bp, Homo sapien
tcatgtttctttccgaggcgggcca

SEQ ID NO: 2670206 - DNA, 25 bp, Homo sapien
tgtttctttccgaggcgggccaaga

SEQ ID NO: 2670207 - DNA, 25 bp, Homo sapien
tttccgaggcgggccaagagctctc

SEQ ID NO: 2670208 - DNA, 25 bp, Homo sapien
tccgaggcgggccaagagctctcag

SEQ ID NO: 2670209 - DNA, 25 bp, Homo sapien
ttcctcctctacagcatctcccact

SEQ ID NO: 2670210 - DNA, 25 bp, Homo sapien
tcctcctctacagcatctcccactg

SEQ ID NO: 2670211 - DNA, 25 bp, Homo sapien
tctacagcatctcccactgtagtca

SEQ ID NO: 2670212 - DNA, 25 bp, Homo sapien
tcctctacagcatctcccactgtag

SEQ ID NO: 2670213 - DNA, 25 bp, Homo sapien
ctcatttagcctcaactgtttaaag

SEQ ID NO: 2670214 - DNA, 25 bp, Homo sapien
atttagcctcaactgtttaaagatg

SEQ ID NO: 2670215 - DNA, 25 bp, Homo sapien
tttggccattttattcagctttaat

SEQ ID NO: 2670216 - DNA, 25 bp, Homo sapien
tgtttaaagatggtctttttggcca

SEQ ID NO: 2670217 - DNA, 25 bp, Homo sapien
tgttgacacgagcaaaggtaaaagc

SEQ ID NO: 2670218 - DNA, 25 bp, Homo sapien
ctccttgttgacacgagcaaaggta

SEQ ID NO: 2670219 - DNA, 25 bp, Homo sapien
tgacacgagcaaaggtaaaagcaac

SEQ ID NO: 2670220 - DNA, 25 bp, Homo sapien
ccttgttgacacgagcaaaggtaaa

SEQ ID NO: 2670221 - DNA, 25 bp, Homo sapien
aattgacatgatttatccagacaca

SEQ ID NO: 2670222 - DNA, 25 bp, Homo sapien
catgatttatccagacacatttgtg

SEQ ID NO: 2670223 - DNA, 25 bp, Homo sapien
gatttatccagacacatttgtgggt

SEQ ID NO: 2670224 - DNA, 25 bp, Homo sapien
tgacatgatttatccagacacattt

SEQ ID NO: 2670225 - DNA, 25 bp, Homo sapien
cagagctggttagtactttgggtct

SEQ ID NO: 2670226 - DNA, 25 bp, Homo sapien
ggcctagataactcagctacatctg

SEQ ID NO: 2670227 - DNA, 25 bp, Homo sapien
tacatctgtagtgcttctctgtggc

SEQ ID NO: 2670228 - DNA, 25 bp, Homo sapien
gttctgcagaggtagacatgggctg

SEQ ID NO: 2670229 - DNA, 25 bp, Homo sapien
aaaactgatactgatgctgcccagt

SEQ ID NO: 2670230 - DNA, 25 bp, Homo sapien
ttctcctacattttctggctaacgt

SEQ ID NO: 2670231 - DNA, 25 bp, Homo sapien
ttctggctaacgtgtggaaaatctg

SEQ ID NO: 2670232 - DNA, 25 bp, Homo sapien
tacattttctggctaacgtgtggaa

SEQ ID NO: 2670233 - DNA, 25 bp, Homo sapien
cccaggccttaattaaggatgaact

SEQ ID NO: 2670234 - DNA, 25 bp, Homo sapien
ttaattaaggatgaactcagaaaac

SEQ ID NO: 2670235 - DNA, 25 bp, Homo sapien
tagtcccaggccttaattaaggatg

SEQ ID NO: 2670236 - DNA, 25 bp, Homo sapien
gccttaattaaggatgaactcagaa

SEQ ID NO: 2670237 - DNA, 25 bp, Homo sapien
attctgaatgcctcgggcgttgaag

SEQ ID NO: 2670238 - DNA, 25 bp, Homo sapien
cgcaataaaactatctttatccaag

SEQ ID NO: 2670239 - DNA, 25 bp, Homo sapien
atttatggcatggattctgaatgcc

SEQ ID NO: 2670240 - DNA, 25 bp, Homo sapien
tatctttatccaagagggaggattt

SEQ ID NO: 2670241 - DNA, 25 bp, Homo sapien
cctctctcatttgccacagcatcta

SEQ ID NO: 2670242 - DNA, 25 bp, Homo sapien
ggatcactcaaactccaaagaagtt

SEQ ID NO: 2670243 - DNA, 25 bp, Homo sapien
ggtcataaccagctcgacaactcca

SEQ ID NO: 2670244 - DNA, 25 bp, Homo sapien
catgtggcaaggatcactcaaactc

SEQ ID NO: 2670245 - DNA, 25 bp, Homo sapien
taaccagctcgacaactccaattat

SEQ ID NO: 2670246 - DNA, 25 bp, Homo sapien
agtaggatgggcctttccgacttgt

SEQ ID NO: 2670247 - DNA, 25 bp, Homo sapien
gctggctttttgaaggatttattca

SEQ ID NO: 2670248 - DNA, 25 bp, Homo sapien
gagccttcgtactgctggctttttg

SEQ ID NO: 2670249 - DNA, 25 bp, Homo sapien
cctttccgacttgtgagccttcgta

SEQ ID NO: 2670250 - DNA, 25 bp, Homo sapien
tgggtgcaaacctatagaatccagc

SEQ ID NO: 2670251 - DNA, 25 bp, Homo sapien
tgtgcatctcttacttcaacatagg

SEQ ID NO: 2670252 - DNA, 25 bp, Homo sapien
gagggtttgctgtgtcatgcctata

SEQ ID NO: 2670253 - DNA, 25 bp, Homo sapien
gaatagcctgtcatagaatttctcc

SEQ ID NO: 2670254 - DNA, 25 bp, Homo sapien
tgactgccaagatacgacgtagggt

SEQ ID NO: 2670255 - DNA, 25 bp, Homo sapien
agatacgacgtagggtttgaatttg

SEQ ID NO: 2670256 - DNA, 25 bp, Homo sapien
ggatgactgccaagatacgacgtag

SEQ ID NO: 2670257 - DNA, 25 bp, Homo sapien
gccaagatacgacgtagggtttgaa

SEQ ID NO: 2670258 - DNA, 25 bp, Homo sapien
ggatgcagaaagccagacaggcacc

SEQ ID NO: 2670259 - DNA, 25 bp, Homo sapien
agaaagccagacaggcaccagggat

SEQ ID NO: 2670260 - DNA, 25 bp, Homo sapien
tcaggatgcagaaagccagacaggc

SEQ ID NO: 2670261 - DNA, 25 bp, Homo sapien
tgcagaaagccagacaggcaccagg

SEQ ID NO: 2670262 - DNA, 25 bp, Homo sapien
ctgattggggaacaagccttgggta

SEQ ID NO: 2670263 - DNA, 25 bp, Homo sapien
ctgttggtagaatctgtagaggttc

SEQ ID NO: 2670264 - DNA, 25 bp, Homo sapien
tagaggttctggtgtagaggctctg

SEQ ID NO: 2670265 - DNA, 25 bp, Homo sapien
ggtggacggtgggagtagagctgtt

SEQ ID NO: 2670266 - DNA, 25 bp, Homo sapien
ccaggctggctagtgtgcatgtacg

SEQ ID NO: 2670267 - DNA, 25 bp, Homo sapien
ttatagctgcgggaatgacattggc

SEQ ID NO: 2670268 - DNA, 25 bp, Homo sapien
cttgtggctgtaatggcaggaacta

SEQ ID NO: 2670269 - DNA, 25 bp, Homo sapien
tacgaggtctctcctagaaggtgcc

SEQ ID NO: 2670270 - DNA, 25 bp, Homo sapien
gggcagcttctgtgatctttatcag

SEQ ID NO: 2670271 - DNA, 25 bp, Homo sapien
tatcagaggtgattattctcagatt

SEQ ID NO: 2670272 - DNA, 25 bp, Homo sapien
tccttgggcacgaggggactgtatc

SEQ ID NO: 2670273 - DNA, 25 bp, Homo sapien
catgtctgtaaccaccctgtctcct

SEQ ID NO: 2670274 - DNA, 25 bp, Homo sapien
gtactagctggttcattatcacgca

SEQ ID NO: 2670275 - DNA, 25 bp, Homo sapien
catgcttcctgagtacagtaagtac

SEQ ID NO: 2670276 - DNA, 25 bp, Homo sapien
cagggtaaagccttcagaacatagt

SEQ ID NO: 2670277 - DNA, 25 bp, Homo sapien
tatcacgcaggtgtgaatggagctt

SEQ ID NO: 2670278 - DNA, 25 bp, Homo sapien
tgcactggctccagttatgtcacat

SEQ ID NO: 2670279 - DNA, 25 bp, Homo sapien
ttaatatccaggctaatctcgtagt

SEQ ID NO: 2670280 - DNA, 25 bp, Homo sapien
gcactggctccagttatgtcacatg

SEQ ID NO: 2670281 - DNA, 25 bp, Homo sapien
tgtcacatggggtctgaacaatatt

SEQ ID NO: 2670282 - DNA, 25 bp, Homo sapien
tggctgttaagcagtaaaatcctct

SEQ ID NO: 2670283 - DNA, 25 bp, Homo sapien
gctgttaagcagtaaaatcctctgt

SEQ ID NO: 2670284 - DNA, 25 bp, Homo sapien
aagatggctgttaagcagtaaaatc

SEQ ID NO: 2670285 - DNA, 25 bp, Homo sapien
tgttaagcagtaaaatcctctgtga

SEQ ID NO: 2670286 - DNA, 25 bp, Homo sapien
tgctgtgcaagatgataaactgggt

SEQ ID NO: 2670287 - DNA, 25 bp, Homo sapien
cattagtggctactgggaaagcccc

SEQ ID NO: 2670288 - DNA, 25 bp, Homo sapien
cacatagtatttcaggtgaggcgta

SEQ ID NO: 2670289 - DNA, 25 bp, Homo sapien
gtagcattgctgaccaagacttcga

SEQ ID NO: 2670290 - DNA, 25 bp, Homo sapien
gcctgctctctcttcgtatcttgat

SEQ ID NO: 2670291 - DNA, 25 bp, Homo sapien
gttggatagtgcaatatgcctgctc

SEQ ID NO: 2670292 - DNA, 25 bp, Homo sapien
gaacaacggttcatcaaagcaaggg

SEQ ID NO: 2670293 - DNA, 25 bp, Homo sapien
ccatgcgtgcctgggttggctcaaa

SEQ ID NO: 2670294 - DNA, 25 bp, Homo sapien
gtaggctacaaggtatgtactcatt

SEQ ID NO: 2670295 - DNA, 25 bp, Homo sapien
cacaaactatgtaggctacaaggta

SEQ ID NO: 2670296 - DNA, 25 bp, Homo sapien
actatgtaggctacaaggtatgtac

SEQ ID NO: 2670297 - DNA, 25 bp, Homo sapien
gaaatcacaaactatgtaggctaca

SEQ ID NO: 2670298 - DNA, 25 bp, Homo sapien
tggagagtggatagtagatatcaaa

SEQ ID NO: 2670299 - DNA, 25 bp, Homo sapien
cagtttggagagtggatagtagata

SEQ ID NO: 2670300 - DNA, 25 bp, Homo sapien
tgtctggggatgcatagatggacac

SEQ ID NO: 2670301 - DNA, 25 bp, Homo sapien
aatgtgtttgattccgtttgtctgg

SEQ ID NO: 2670302 - DNA, 25 bp, Homo sapien
gacaataatgtggaatttgaacata

SEQ ID NO: 2670303 - DNA, 25 bp, Homo sapien
acaataatgtggaatttgaacatac

SEQ ID NO: 2670304 - DNA, 25 bp, Homo sapien
gaagacaataatgtggaatttgaac

SEQ ID NO: 2670305 - DNA, 25 bp, Homo sapien
aatgaagacaataatgtggaatttg

SEQ ID NO: 2670306 - DNA, 25 bp, Homo sapien
tttctacactcaagaatcatctctg

SEQ ID NO: 2670307 - DNA, 25 bp, Homo sapien
attttctacactcaagaatcatctc

SEQ ID NO: 2670308 - DNA, 25 bp, Homo sapien
cctgagctaactgaattcctcagtg

SEQ ID NO: 2670309 - DNA, 25 bp, Homo sapien
ttcctgagctaactgaattcctcag

SEQ ID NO: 2670310 - DNA, 25 bp, Homo sapien
aaataagaacaaccatacttgagtt

SEQ ID NO: 2670311 - DNA, 25 bp, Homo sapien
gaacaaccatacttgagttttatgg

SEQ ID NO: 2670312 - DNA, 25 bp, Homo sapien
acttgagttttatggctcccacacc

SEQ ID NO: 2670313 - DNA, 25 bp, Homo sapien
catacttgagttttatggctcccac

SEQ ID NO: 2670314 - DNA, 25 bp, Homo sapien
ggctccaggtgcaaagtcaggaata

SEQ ID NO: 2670315 - DNA, 25 bp, Homo sapien
gctccaggtgcaaagtcaggaatag

SEQ ID NO: 2670316 - DNA, 25 bp, Homo sapien
ggtgcaaagtcaggaatagcaatta

SEQ ID NO: 2670317 - DNA, 25 bp, Homo sapien
gcaaagtcaggaatagcaattaaat

SEQ ID NO: 2670318 - DNA, 25 bp, Homo sapien
tcttggggtcaaaaagcagtgacgt

SEQ ID NO: 2670319 - DNA, 25 bp, Homo sapien
ctggtgcgccagttcatgggctatg

SEQ ID NO: 2670320 - DNA, 25 bp, Homo sapien
ggctatgactctggtgacccacagt

SEQ ID NO: 2670321 - DNA, 25 bp, Homo sapien
gacccacagtttatcggaagcagaa

SEQ ID NO: 2670322 - DNA, 25 bp, Homo sapien
taatacagtgttgatagatggccct

SEQ ID NO: 2670323 - DNA, 25 bp, Homo sapien
gattttgccctagattggaatgcca

SEQ ID NO: 2670324 - DNA, 25 bp, Homo sapien
cagagagttaggtatgtgcccagga

SEQ ID NO: 2670325 - DNA, 25 bp, Homo sapien
tcattatggccatgtaagcacaggt

SEQ ID NO: 2670326 - DNA, 25 bp, Homo sapien
cagtgggccactagaaacaataaag

SEQ ID NO: 2670327 - DNA, 25 bp, Homo sapien
aatataaatccaagtgtcctgggtg

SEQ ID NO: 2670328 - DNA, 25 bp, Homo sapien
gacggaccaaagcttcaacaataag

SEQ ID NO: 2670329 - DNA, 25 bp, Homo sapien
aagaattcatttagggctctcaggt

SEQ ID NO: 2670330 - DNA, 25 bp, Homo sapien
gatatgtagcattaacagcgataag

SEQ ID NO: 2670331 - DNA, 25 bp, Homo sapien
gcattaacagcgataagttccatgt

SEQ ID NO: 2670332 - DNA, 25 bp, Homo sapien
gcagctctggatatgtagcattaac

SEQ ID NO: 2670333 - DNA, 25 bp, Homo sapien
ctctggatatgtagcattaacagcg

SEQ ID NO: 2670334 - DNA, 25 bp, Homo sapien
aattcaatgaatcttttgtaattac

SEQ ID NO: 2670335 - DNA, 25 bp, Homo sapien
taattacttcaaaacacacattcaa

SEQ ID NO: 2670336 - DNA, 25 bp, Homo sapien
gaaacttcatcaaacatttcctgta

SEQ ID NO: 2670337 - DNA, 25 bp, Homo sapien
tttccgctggtttggagatagggcg

SEQ ID NO: 2670338 - DNA, 25 bp, Homo sapien
gcttaaattttacggaacatgtgtg

SEQ ID NO: 2670339 - DNA, 25 bp, Homo sapien
aagcttaaattttacggaacatgtg

SEQ ID NO: 2670340 - DNA, 25 bp, Homo sapien
taaattttacggaacatgtgtgatg

SEQ ID NO: 2670341 - DNA, 25 bp, Homo sapien
tttacggaacatgtgtgatgtctga

SEQ ID NO: 2670342 - DNA, 25 bp, Homo sapien
gctccacaagtcatcattcttagca

SEQ ID NO: 2670343 - DNA, 25 bp, Homo sapien
tccacaagtcatcattcttagcatt

SEQ ID NO: 2670344 - DNA, 25 bp, Homo sapien
actgctccacaagtcatcattctta

SEQ ID NO: 2670345 - DNA, 25 bp, Homo sapien
gctgaacttctttaagtactgaatt

SEQ ID NO: 2670346 - DNA, 25 bp, Homo sapien
aagtaaaaaataggagctgtgaaat

SEQ ID NO: 2670347 - DNA, 25 bp, Homo sapien
atccgaatgacaaactccaccagat

SEQ ID NO: 2670348 - DNA, 25 bp, Homo sapien
gtcatcttgggatccgaatgacaaa

SEQ ID NO: 2670349 - DNA, 25 bp, Homo sapien
ttgtcatcttgggatccgaatgaca

SEQ ID NO: 2670350 - DNA, 25 bp, Homo sapien
gaatgacaaactccaccagatgtaa

SEQ ID NO: 2670351 - DNA, 25 bp, Homo sapien
ctactctgtgactctctttatcctt

SEQ ID NO: 2670352 - DNA, 25 bp, Homo sapien
actctgtgactctctttatccttac

SEQ ID NO: 2670353 - DNA, 25 bp, Homo sapien
tactctgtgactctctttatcctta

SEQ ID NO: 2670354 - DNA, 25 bp, Homo sapien
ctaggtcaggctattccacagatct

SEQ ID NO: 2670355 - DNA, 25 bp, Homo sapien
ggtcaggctattccacagatctctt

SEQ ID NO: 2670356 - DNA, 25 bp, Homo sapien
tctaggtcaggctattccacagatc

SEQ ID NO: 2670357 - DNA, 25 bp, Homo sapien
taggtcaggctattccacagatctc

SEQ ID NO: 2670358 - DNA, 25 bp, Homo sapien
agtccatgtagtcatcatctctttg

SEQ ID NO: 2670359 - DNA, 25 bp, Homo sapien
cagtcggagtgaacacccgtcttgt

SEQ ID NO: 2670360 - DNA, 25 bp, Homo sapien
ccgtcttgtttaaccaccagcaggg

SEQ ID NO: 2670361 - DNA, 25 bp, Homo sapien
aggaagcgctcctgttgcagtcgga

SEQ ID NO: 2670362 - DNA, 25 bp, Homo sapien
aaactgagatgaggtaagctagacc

SEQ ID NO: 2670363 - DNA, 25 bp, Homo sapien
gaactagcatcctacaaagttgcca

SEQ ID NO: 2670364 - DNA, 25 bp, Homo sapien
tctcaaggctgatggaatcactaag

SEQ ID NO: 2670365 - DNA, 25 bp, Homo sapien
gaagtccgggttatatgaagctctt

SEQ ID NO: 2670366 - DNA, 25 bp, Homo sapien
gaatgtgtctgtggatcacattaga

SEQ ID NO: 2670367 - DNA, 25 bp, Homo sapien
aactcgtggagtaggtcaatgggat

SEQ ID NO: 2670368 - DNA, 25 bp, Homo sapien
tcacattagaagaactcgtggagta

SEQ ID NO: 2670369 - DNA, 25 bp, Homo sapien
taggtcaatgggatatgccacaggt

SEQ ID NO: 2670370 - DNA, 25 bp, Homo sapien
gctcaggatgagtgtgtacattttc

SEQ ID NO: 2670371 - DNA, 25 bp, Homo sapien
aattgaagctcaggatgagtgtgta

SEQ ID NO: 2670372 - DNA, 25 bp, Homo sapien
atgaaaaaattgaagctcaggatga

SEQ ID NO: 2670373 - DNA, 25 bp, Homo sapien
cacatctaataagtgagagagtgag

SEQ ID NO: 2670374 - DNA, 25 bp, Homo sapien
ccatgaccctcatagtgaacgatgt

SEQ ID NO: 2670375 - DNA, 25 bp, Homo sapien
tactctgtccttaggtctgagaagt

SEQ ID NO: 2670376 - DNA, 25 bp, Homo sapien
ttcagctgtgtaatgagttggtccc

SEQ ID NO: 2670377 - DNA, 25 bp, Homo sapien
aacgatgtagtaaccatttgagtcc

SEQ ID NO: 2670378 - DNA, 25 bp, Homo sapien
ttagtaagtgaagaggtaatacctg

SEQ ID NO: 2670379 - DNA, 25 bp, Homo sapien
taatacacagacttacattctgcct

SEQ ID NO: 2670380 - DNA, 25 bp, Homo sapien
tccaagctcaaaaaattagtaagtg

SEQ ID NO: 2670381 - DNA, 25 bp, Homo sapien
tacctatgcaatcctccaaaccttg

SEQ ID NO: 2670382 - DNA, 25 bp, Homo sapien
gctgctttaaaacagacttatggaa

SEQ ID NO: 2670383 - DNA, 25 bp, Homo sapien
tctcaatcacgatgacttgctgctt

SEQ ID NO: 2670384 - DNA, 25 bp, Homo sapien
tcttctcaatcacgatgacttgctg

SEQ ID NO: 2670385 - DNA, 25 bp, Homo sapien
ctttaatcttctcaatcacgatgac

SEQ ID NO: 2670386 - DNA, 25 bp, Homo sapien
ttctgggcttatacatgttttaaat

SEQ ID NO: 2670387 - DNA, 25 bp, Homo sapien
ggcttatacatgttttaaattcctg

SEQ ID NO: 2670388 - DNA, 25 bp, Homo sapien
ctcttctgggcttatacatgtttta

SEQ ID NO: 2670389 - DNA, 25 bp, Homo sapien
gcttatacatgttttaaattcctgt

SEQ ID NO: 2670390 - DNA, 25 bp, Homo sapien
gttgcacacagagtctataagccat

SEQ ID NO: 2670391 - DNA, 25 bp, Homo sapien
tttctgggaggctatgttgcacaca

SEQ ID NO: 2670392 - DNA, 25 bp, Homo sapien
gaacgattataacctcactattgga

SEQ ID NO: 2670393 - DNA, 25 bp, Homo sapien
cttctgtagaggaaacgaacgatta

SEQ ID NO: 2670394 - DNA, 25 bp, Homo sapien
taactcagaccttcgagaagtgcgg

SEQ ID NO: 2670395 - DNA, 25 bp, Homo sapien
ggctgcttgtttcatgttggaggta

SEQ ID NO: 2670396 - DNA, 25 bp, Homo sapien
ggaggtagtaagtcatgtcaagagc

SEQ ID NO: 2670397 - DNA, 25 bp, Homo sapien
tcaagagctttgtctagggtcagtc

SEQ ID NO: 2670398 - DNA, 25 bp, Homo sapien
gctttgcctgtcaatcactggctta

SEQ ID NO: 2670399 - DNA, 25 bp, Homo sapien
tgcaaggagcatggttcaggtcaca

SEQ ID NO: 2670400 - DNA, 25 bp, Homo sapien
caggccagcttcaagagagccgagc

SEQ ID NO: 2670401 - DNA, 25 bp, Homo sapien
agcggagcatcctgtcccagactga

SEQ ID NO: 2670402 - DNA, 25 bp, Homo sapien
acggcacttggcctagttgagagca

SEQ ID NO: 2670403 - DNA, 25 bp, Homo sapien
cagcaccggaataatggacaccatt

SEQ ID NO: 2670404 - DNA, 25 bp, Homo sapien
tgtcaaaagctaccctctgagatag

SEQ ID NO: 2670405 - DNA, 25 bp, Homo sapien
ttcttgaaggtaggccacatggttg

SEQ ID NO: 2670406 - DNA, 25 bp, Homo sapien
gctctaaaaggtaattccatcctgc

SEQ ID NO: 2670407 - DNA, 25 bp, Homo sapien
tcagcacttgacattgacagttcat

SEQ ID NO: 2670408 - DNA, 25 bp, Homo sapien
tcctgatgcttgctcgttgacaaag

SEQ ID NO: 2670409 - DNA, 25 bp, Homo sapien
tcctgctgttgtctgagcacccaca

SEQ ID NO: 2670410 - DNA, 25 bp, Homo sapien
caatcgcatgaaggagagctgccaa

SEQ ID NO: 2670411 - DNA, 25 bp, Homo sapien
cccctttggacgtctggcaatcgca

SEQ ID NO: 2670412 - DNA, 25 bp, Homo sapien
catgctagttgctgcccctttggac

SEQ ID NO: 2670413 - DNA, 25 bp, Homo sapien
tggacgtctggcaatcgcatgaagg

SEQ ID NO: 2670414 - DNA, 25 bp, Homo sapien
ttcagaagatgggtccaattttctc

SEQ ID NO: 2670415 - DNA, 25 bp, Homo sapien
cagaagatgggtccaattttctctt

SEQ ID NO: 2670416 - DNA, 25 bp, Homo sapien
ttttcagaagatgggtccaattttc

SEQ ID NO: 2670417 - DNA, 25 bp, Homo sapien
gaagatgggtccaattttctcttac

SEQ ID NO: 2670418 - DNA, 25 bp, Homo sapien
gaagaacaaacattggatgaaaatg

SEQ ID NO: 2670419 - DNA, 25 bp, Homo sapien
ttggtttgaggcaactgagacatct

SEQ ID NO: 2670420 - DNA, 25 bp, Homo sapien
tggaagaacaaacattggatgaaaa

SEQ ID NO: 2670421 - DNA, 25 bp, Homo sapien
acaaacattggatgaaaatgaatac

SEQ ID NO: 2670422 - DNA, 25 bp, Homo sapien
tccttatgtcatatgagcccaagtc

SEQ ID NO: 2670423 - DNA, 25 bp, Homo sapien
ttgcaacttatccttggaagaaaag

SEQ ID NO: 2670424 - DNA, 25 bp, Homo sapien
ctgttgtgccagagatgatcatcct

SEQ ID NO: 2670425 - DNA, 25 bp, Homo sapien
gaaaagtgagctgttgtgccagaga

SEQ ID NO: 2670426 - DNA, 25 bp, Homo sapien
tcaattccacaatttgaacatttat

SEQ ID NO: 2670427 - DNA, 25 bp, Homo sapien
acaatttgaacatttattttgaaat

SEQ ID NO: 2670428 - DNA, 25 bp, Homo sapien
ctttcaattccacaatttgaacatt

SEQ ID NO: 2670429 - DNA, 25 bp, Homo sapien
tgaaattgttaaaaacagaaagtca

SEQ ID NO: 2670430 - DNA, 25 bp, Homo sapien
ggttatcgtttccagaacagtttga

SEQ ID NO: 2670431 - DNA, 25 bp, Homo sapien
taagtattaaccattagccaagtcc

SEQ ID NO: 2670432 - DNA, 25 bp, Homo sapien
caagtcctcagagtcggaagattct

SEQ ID NO: 2670433 - DNA, 25 bp, Homo sapien
atccttgagcctcaagagattcaaa

SEQ ID NO: 2670434 - DNA, 25 bp, Homo sapien
ccagcctactttttctattgaccat

SEQ ID NO: 2670435 - DNA, 25 bp, Homo sapien
cgggtttatgccattttcctgctgc

SEQ ID NO: 2670436 - DNA, 25 bp, Homo sapien
tttcctgctgcagcctgccgagtag

SEQ ID NO: 2670437 - DNA, 25 bp, Homo sapien
cgcccagcctactttttctattgac

SEQ ID NO: 2670438 - DNA, 25 bp, Homo sapien
gttggttagacaaaatatccacagc

SEQ ID NO: 2670439 - DNA, 25 bp, Homo sapien
tggatacgatagctgagagcaggca

SEQ ID NO: 2670440 - DNA, 25 bp, Homo sapien
actggtgttaccctgtttgacttca

SEQ ID NO: 2670441 - DNA, 25 bp, Homo sapien
cttgagcttcactggtgttaccctg

SEQ ID NO: 2670442 - DNA, 25 bp, Homo sapien
tcctggccttcttgataaaccctga

SEQ ID NO: 2670443 - DNA, 25 bp, Homo sapien
caaaatagtggcatagcgtgaagca

SEQ ID NO: 2670444 - DNA, 25 bp, Homo sapien
aataggatactgaactggccttccc

SEQ ID NO: 2670445 - DNA, 25 bp, Homo sapien
tctctgtgagggcagattcgacttc

SEQ ID NO: 2670446 - DNA, 25 bp, Homo sapien
ggtccaccaccaagtcaaagttaga

SEQ ID NO: 2670447 - DNA, 25 bp, Homo sapien
tgaccttcatgatattgctccaaag

SEQ ID NO: 2670448 - DNA, 25 bp, Homo sapien
ttcagagagcaagaagcgcccttaa

SEQ ID NO: 2670449 - DNA, 25 bp, Homo sapien
gctccaaagtggattgactaacact

SEQ ID NO: 2670450 - DNA, 25 bp, Homo sapien
gagtgtaaagtcagtgccccgctgc

SEQ ID NO: 2670451 - DNA, 25 bp, Homo sapien
gagggatcactgctcgaaggaccga

SEQ ID NO: 2670452 - DNA, 25 bp, Homo sapien
ggcgaaggtcgctatctgaaccgcg

SEQ ID NO: 2670453 - DNA, 25 bp, Homo sapien
tgtaggtgttttcggcagagatgcc

SEQ ID NO: 2670454 - DNA, 25 bp, Homo sapien
cccgcactgcgccagaaaatcatgg

SEQ ID NO: 2670455 - DNA, 25 bp, Homo sapien
aacaaatgtggagccctactgcgac

SEQ ID NO: 2670456 - DNA, 25 bp, Homo sapien
ctacctgaagtggacccggctgcgg

SEQ ID NO: 2670457 - DNA, 25 bp, Homo sapien
gggaacggtgttcagtcactcaaca

SEQ ID NO: 2670458 - DNA, 25 bp, Homo sapien
gcggctccttacagccggagcgccc

SEQ ID NO: 2670459 - DNA, 25 bp, Homo sapien
ttcctactccgagagctgaggcggc

SEQ ID NO: 2670460 - DNA, 25 bp, Homo sapien
ggagcgcccgagcttcctactccga

SEQ ID NO: 2670461 - DNA, 25 bp, Homo sapien
ccgccgcggctccttacagccggag

SEQ ID NO: 2670462 - DNA, 25 bp, Homo sapien
taacgctcctacaggagagtcgggc

SEQ ID NO: 2670463 - DNA, 25 bp, Homo sapien
tctgcgcacagcagcccaaactttg

SEQ ID NO: 2670464 - DNA, 25 bp, Homo sapien
acgccggcagctcactgaagggcag

SEQ ID NO: 2670465 - DNA, 25 bp, Homo sapien
acaaaagttgggctcggcagctgcc

SEQ ID NO: 2670466 - DNA, 25 bp, Homo sapien
tagtgagtcgtctcccttactggca

SEQ ID NO: 2670467 - DNA, 25 bp, Homo sapien
tttatgctccccgttcagtgaaggg

SEQ ID NO: 2670468 - DNA, 25 bp, Homo sapien
tctggtccgcacaaaagccatggtt

SEQ ID NO: 2670469 - DNA, 25 bp, Homo sapien
caccgtgacggacccttgacattaa

SEQ ID NO: 2670470 - DNA, 25 bp, Homo sapien
aacataatagcaatccctcccaagg

SEQ ID NO: 2670471 - DNA, 25 bp, Homo sapien
taggtcataccagtggcaactttgg

SEQ ID NO: 2670472 - DNA, 25 bp, Homo sapien
gcagaagtatgttacctgaacaggt

SEQ ID NO: 2670473 - DNA, 25 bp, Homo sapien
gagcagggcccaacaaaaataggtc

SEQ ID NO: 2670474 - DNA, 25 bp, Homo sapien
tttcatatataatcagacctcctta

SEQ ID NO: 2670475 - DNA, 25 bp, Homo sapien
tacaaaatataccaaccctgcatgc

SEQ ID NO: 2670476 - DNA, 25 bp, Homo sapien
gagggtgaaccttagcatttgcatt

SEQ ID NO: 2670477 - DNA, 25 bp, Homo sapien
tccttaatcagattctgagggtgaa

SEQ ID NO: 2670478 - DNA, 25 bp, Homo sapien
agttctgggacctcaaaatgccaaa

SEQ ID NO: 2670479 - DNA, 25 bp, Homo sapien
tgtttgattatgcaccacactgcgg

SEQ ID NO: 2670480 - DNA, 25 bp, Homo sapien
tcaactggataccaatctgaacatg

SEQ ID NO: 2670481 - DNA, 25 bp, Homo sapien
gacaactaagtcctccttgtttgat

SEQ ID NO: 2670482 - DNA, 25 bp, Homo sapien
taaatgggcattcaaaagatagctg

SEQ ID NO: 2670483 - DNA, 25 bp, Homo sapien
ctggttatctatctttcaggctgag

SEQ ID NO: 2670484 - DNA, 25 bp, Homo sapien
tcaggctgagttctcaaggataacc

SEQ ID NO: 2670485 - DNA, 25 bp, Homo sapien
taatcaccggttataagagtttcta

SEQ ID NO: 2670486 - DNA, 25 bp, Homo sapien
tccattgatcaagtcggcacacacc

SEQ ID NO: 2670487 - DNA, 25 bp, Homo sapien
tttgatccattgatcaagtcggcac

SEQ ID NO: 2670488 - DNA, 25 bp, Homo sapien
aaactggtcctatcactttagattc

SEQ ID NO: 2670489 - DNA, 25 bp, Homo sapien
ggaaacaataccatgtctcagaacc

SEQ ID NO: 2670490 - DNA, 25 bp, Homo sapien
tgacacctgagtcagttgtccggga

SEQ ID NO: 2670491 - DNA, 25 bp, Homo sapien
aatgctcccacatagcactgttcat

SEQ ID NO: 2670492 - DNA, 25 bp, Homo sapien
tcagttgtccgggaaatgctcccac

SEQ ID NO: 2670493 - DNA, 25 bp, Homo sapien
gaaatgctcccacatagcactgttc

SEQ ID NO: 2670494 - DNA, 25 bp, Homo sapien
taatacaactagtccccacaacatg

SEQ ID NO: 2670495 - DNA, 25 bp, Homo sapien
gacattcatggctgtacggctccac

SEQ ID NO: 2670496 - DNA, 25 bp, Homo sapien
aatgagatccgtatcaggcttctga

SEQ ID NO: 2670497 - DNA, 25 bp, Homo sapien
gaatgtggacgacctccaaaagcca

SEQ ID NO: 2670498 - DNA, 25 bp, Homo sapien
gacaaaaagcgaagccatgacaaac

SEQ ID NO: 2670499 - DNA, 25 bp, Homo sapien
aatttacagtgcatagaggctaccg

SEQ ID NO: 2670500 - DNA, 25 bp, Homo sapien
gaggctaccggcaagagagcaagtc

SEQ ID NO: 2670501 - DNA, 25 bp, Homo sapien
gagcaagtcatcaattgagggatac

SEQ ID NO: 2670502 - DNA, 25 bp, Homo sapien
caagaactgatactacctcgggcta

SEQ ID NO: 2670503 - DNA, 25 bp, Homo sapien
caatgttgtttgtggaccagtgcca

SEQ ID NO: 2670504 - DNA, 25 bp, Homo sapien
caagtcacgtcaaaaaggtagatgc

SEQ ID NO: 2670505 - DNA, 25 bp, Homo sapien
tgtgcaaaagtgtgacccatctggg

SEQ ID NO: 2670506 - DNA, 25 bp, Homo sapien
catgggaagattatgctctcaggca

SEQ ID NO: 2670507 - DNA, 25 bp, Homo sapien
gacaagggcttagtcagatgcctgc

SEQ ID NO: 2670508 - DNA, 25 bp, Homo sapien
gacaacaatgggttctgtacagcat

SEQ ID NO: 2670509 - DNA, 25 bp, Homo sapien
tgacttttttaccacacatgggaag

SEQ ID NO: 2670510 - DNA, 25 bp, Homo sapien
cagcagtcgggaaccccggggctca

SEQ ID NO: 2670511 - DNA, 25 bp, Homo sapien
ggatgtaaacaaggctctttggcta

SEQ ID NO: 2670512 - DNA, 25 bp, Homo sapien
tcaggctctagaggatgtaaacaag

SEQ ID NO: 2670513 - DNA, 25 bp, Homo sapien
tttggctaaatccaccacatctggt

SEQ ID NO: 2670514 - DNA, 25 bp, Homo sapien
ttgcagagggtactgaacaagcccc

SEQ ID NO: 2670515 - DNA, 25 bp, Homo sapien
ttcatagcgtagtggcacaacggca

SEQ ID NO: 2670516 - DNA, 25 bp, Homo sapien
tattccatgtgacctgaagagcctg

SEQ ID NO: 2670517 - DNA, 25 bp, Homo sapien
ggaagcctgatctgtgcccatggaa

SEQ ID NO: 2670518 - DNA, 25 bp, Homo sapien
gaataacctccatactgtgtgaact

SEQ ID NO: 2670519 - DNA, 25 bp, Homo sapien
cattagccaaatggtcagcatcagt

SEQ ID NO: 2670520 - DNA, 25 bp, Homo sapien
cagatgtcgtgaggattttgtgcac

SEQ ID NO: 2670521 - DNA, 25 bp, Homo sapien
tgaaccaaattaagtctctcctaga

SEQ ID NO: 2670522 - DNA, 25 bp, Homo sapien
tgctcatcccttatgatcttgatga

SEQ ID NO: 2670523 - DNA, 25 bp, Homo sapien
ggctttaaatgctggttcatcaaaa

SEQ ID NO: 2670524 - DNA, 25 bp, Homo sapien
gccaggggttcaaactgagttgctg

SEQ ID NO: 2670525 - DNA, 25 bp, Homo sapien
gataaagcggtgtattgctcatccc

SEQ ID NO: 2670526 - DNA, 25 bp, Homo sapien
aggattggctccatagcctgctggg

SEQ ID NO: 2670527 - DNA, 25 bp, Homo sapien
ctcccttagccacatgggtccagga

SEQ ID NO: 2670528 - DNA, 25 bp, Homo sapien
gtccaggaggctcctatcaagctgc

SEQ ID NO: 2670529 - DNA, 25 bp, Homo sapien
gaggctcctatcaagctgcacagtc

SEQ ID NO: 2670530 - DNA, 25 bp, Homo sapien
tttacgtcctgactcaggttcttca

SEQ ID NO: 2670531 - DNA, 25 bp, Homo sapien
ggttccatttacgtcctgactcagg

SEQ ID NO: 2670532 - DNA, 25 bp, Homo sapien
cagggttccatttacgtcctgactc

SEQ ID NO: 2670533 - DNA, 25 bp, Homo sapien
tccatttacgtcctgactcaggttc

SEQ ID NO: 2670534 - DNA, 25 bp, Homo sapien
cattggtgaactcttaactccaatt

SEQ ID NO: 2670535 - DNA, 25 bp, Homo sapien
gggatgtagattagacacagtagaa

SEQ ID NO: 2670536 - DNA, 25 bp, Homo sapien
tctatactcacctggaaaagtggga

SEQ ID NO: 2670537 - DNA, 25 bp, Homo sapien
gatctcaacaggtggaaaatggaaa

SEQ ID NO: 2670538 - DNA, 25 bp, Homo sapien
ttccaaggcataatgaacttgacca

SEQ ID NO: 2670539 - DNA, 25 bp, Homo sapien
tcttaagtgggtactgaatttcaaa

SEQ ID NO: 2670540 - DNA, 25 bp, Homo sapien
ctcaagaagcttcacagttgtttcc

SEQ ID NO: 2670541 - DNA, 25 bp, Homo sapien
gaccaatcttttctggtacagcata

SEQ ID NO: 2670542 - DNA, 25 bp, Homo sapien
tctcctctcggaaggtgagcaaacc

SEQ ID NO: 2670543 - DNA, 25 bp, Homo sapien
tagtcaccagctttctatccgccat

SEQ ID NO: 2670544 - DNA, 25 bp, Homo sapien
tactgtcatacagaagtgtctcctc

SEQ ID NO: 2670545 - DNA, 25 bp, Homo sapien
cagctcatgagcaatgattttagtc

SEQ ID NO: 2670546 - DNA, 25 bp, Homo sapien
ttagctgtatgacttatggcaagcc

SEQ ID NO: 2670547 - DNA, 25 bp, Homo sapien
taatacccaccttagagaagttgcg

SEQ ID NO: 2670548 - DNA, 25 bp, Homo sapien
tatactgggcaatgggcatttgtca

SEQ ID NO: 2670549 - DNA, 25 bp, Homo sapien
gagaaccccattccggcaggagatg

SEQ ID NO: 2670550 - DNA, 25 bp, Homo sapien
caggatatttacagcctcaggaatt

SEQ ID NO: 2670551 - DNA, 25 bp, Homo sapien
taccttaactgaatgggaaacaagc

SEQ ID NO: 2670552 - DNA, 25 bp, Homo sapien
gagaaaacaattaacccacaggata

SEQ ID NO: 2670553 - DNA, 25 bp, Homo sapien
tttttcggccacctcataaagtgag

SEQ ID NO: 2670554 - DNA, 25 bp, Homo sapien
caaaaccttcatttagccataggtc

SEQ ID NO: 2670555 - DNA, 25 bp, Homo sapien
cattccaccacttcattgttaccag

SEQ ID NO: 2670556 - DNA, 25 bp, Homo sapien
ggtcattccaccacttcattgttac

SEQ ID NO: 2670557 - DNA, 25 bp, Homo sapien
atttagccataggtcattccaccac

SEQ ID NO: 2670558 - DNA, 25 bp, Homo sapien
cttcatggttttaaatcgagcatct

SEQ ID NO: 2670559 - DNA, 25 bp, Homo sapien
tttaaatcgagcatctaagaaatct

SEQ ID NO: 2670560 - DNA, 25 bp, Homo sapien
ggttttaaatcgagcatctaagaaa

SEQ ID NO: 2670561 - DNA, 25 bp, Homo sapien
catggttttaaatcgagcatctaag

SEQ ID NO: 2670562 - DNA, 25 bp, Homo sapien
tctgaacatattctacctgtagatc

SEQ ID NO: 2670563 - DNA, 25 bp, Homo sapien
gatgcatcgctataagatctggtta

SEQ ID NO: 2670564 - DNA, 25 bp, Homo sapien
ttctgagtaacacagccaagagctt

SEQ ID NO: 2670565 - DNA, 25 bp, Homo sapien
cacagccaagagcttacttaggacc

SEQ ID NO: 2670566 - DNA, 25 bp, Homo sapien
cttgaaacccagggcgtgtgtttca

SEQ ID NO: 2670567 - DNA, 25 bp, Homo sapien
cagggcgtgtgtttcagattctaaa

SEQ ID NO: 2670568 - DNA, 25 bp, Homo sapien
tcagattctaaaatcgaatcttcaa

SEQ ID NO: 2670569 - DNA, 25 bp, Homo sapien
gaaacccagggcgtgtgtttcagat

SEQ ID NO: 2670570 - DNA, 25 bp, Homo sapien
tgattatgcaggtaaaggacaacag

SEQ ID NO: 2670571 - DNA, 25 bp, Homo sapien
cattaaaactatcccacagatcatc

SEQ ID NO: 2670572 - DNA, 25 bp, Homo sapien
ctttgaatagatgcatagctgtgat

SEQ ID NO: 2670573 - DNA, 25 bp, Homo sapien
ctgtgattatgcaggtaaaggacaa

SEQ ID NO: 2670574 - DNA, 25 bp, Homo sapien
tgacatatgaacaggtcagttgcct

SEQ ID NO: 2670575 - DNA, 25 bp, Homo sapien
agtgacatatgaacaggtcagttgc

SEQ ID NO: 2670576 - DNA, 25 bp, Homo sapien
gacatatgaacaggtcagttgcctt

SEQ ID NO: 2670577 - DNA, 25 bp, Homo sapien
acatatgaacaggtcagttgcctta

SEQ ID NO: 2670578 - DNA, 25 bp, Homo sapien
caggttttcatcattctctttacat

SEQ ID NO: 2670579 - DNA, 25 bp, Homo sapien
gcagggtccaggttttcatcattct

SEQ ID NO: 2670580 - DNA, 25 bp, Homo sapien
tccaggttttcatcattctctttac

SEQ ID NO: 2670581 - DNA, 25 bp, Homo sapien
ctgcagggtccaggttttcatcatt

SEQ ID NO: 2670582 - DNA, 25 bp, Homo sapien
cctttcttttgaacagtcactaaag

SEQ ID NO: 2670583 - DNA, 25 bp, Homo sapien
tgaacagtcactaaaggaaatcctt

SEQ ID NO: 2670584 - DNA, 25 bp, Homo sapien
ttgaacagtcactaaaggaaatcct

SEQ ID NO: 2670585 - DNA, 25 bp, Homo sapien
ttcttttgaacagtcactaaaggaa

SEQ ID NO: 2670586 - DNA, 25 bp, Homo sapien
tattcctaggaagggataatcttgt

SEQ ID NO: 2670587 - DNA, 25 bp, Homo sapien
taggaaggttaagctattcctagga

SEQ ID NO: 2670588 - DNA, 25 bp, Homo sapien
taggtttcacaagaacttatgatta

SEQ ID NO: 2670589 - DNA, 25 bp, Homo sapien
cacctgagagtgcaaaagagatggc

SEQ ID NO: 2670590 - DNA, 25 bp, Homo sapien
tccagtaatgataccgattgatatt

SEQ ID NO: 2670591 - DNA, 25 bp, Homo sapien
cataggatagtggaatatgccacag

SEQ ID NO: 2670592 - DNA, 25 bp, Homo sapien
cttcagtgacataggatagtggaat

SEQ ID NO: 2670593 - DNA, 25 bp, Homo sapien
atttcttatccagtaatgataccga

SEQ ID NO: 2670594 - DNA, 25 bp, Homo sapien
ccttatttcacatggctaaaagcca

SEQ ID NO: 2670595 - DNA, 25 bp, Homo sapien
caaccctagacagtagatagcagag

SEQ ID NO: 2670596 - DNA, 25 bp, Homo sapien
gttaaaatgcagttgcctcagccca

SEQ ID NO: 2670597 - DNA, 25 bp, Homo sapien
tattgtaggtcagcatacaccacgt

SEQ ID NO: 2670598 - DNA, 25 bp, Homo sapien
cagcacttcttctgtaagattgatg

SEQ ID NO: 2670599 - DNA, 25 bp, Homo sapien
gacccacagcacttcttctgtaaga

SEQ ID NO: 2670600 - DNA, 25 bp, Homo sapien
tttgacccacagcacttcttctgta

SEQ ID NO: 2670601 - DNA, 25 bp, Homo sapien
ccacagcacttcttctgtaagattg

SEQ ID NO: 2670602 - DNA, 25 bp, Homo sapien
caactgatggattagtgcttcccaa

SEQ ID NO: 2670603 - DNA, 25 bp, Homo sapien
ggttggctcggtctttgtcactcag

SEQ ID NO: 2670604 - DNA, 25 bp, Homo sapien
caatcatcatctgcatagtgtacaa

SEQ ID NO: 2670605 - DNA, 25 bp, Homo sapien
aagatgttgttgataaggttggctc

SEQ ID NO: 2670606 - DNA, 25 bp, Homo sapien
cctcttgagaggtaccttgcctagg

SEQ ID NO: 2670607 - DNA, 25 bp, Homo sapien
caccagtcttgaggccagatccatg

SEQ ID NO: 2670608 - DNA, 25 bp, Homo sapien
ctgtctgaaacagggcttcggtgat

SEQ ID NO: 2670609 - DNA, 25 bp, Homo sapien
tgggtgcagtatggttctcatttcc

SEQ ID NO: 2670610 - DNA, 25 bp, Homo sapien
agcattatgatagaaaaccattcca

SEQ ID NO: 2670611 - DNA, 25 bp, Homo sapien
cttctcaatagcattatgatagaaa

SEQ ID NO: 2670612 - DNA, 25 bp, Homo sapien
ctcaatagcattatgatagaaaacc

SEQ ID NO: 2670613 - DNA, 25 bp, Homo sapien
tatgatagaaaaccattccaaatga

SEQ ID NO: 2670614 - DNA, 25 bp, Homo sapien
gttagtcaggatggctctatctcct

SEQ ID NO: 2670615 - DNA, 25 bp, Homo sapien
cgggcgtgagccaccatacctggcc

SEQ ID NO: 2670616 - DNA, 25 bp, Homo sapien
ggcgtgagccaccatacctggccgt

SEQ ID NO: 2670617 - DNA, 25 bp, Homo sapien
atgttagtcaggatggctctatctc

SEQ ID NO: 2670618 - DNA, 25 bp, Homo sapien
tccccaggttgtgggtgcaagcaaa

SEQ ID NO: 2670619 - DNA, 25 bp, Homo sapien
aagcaaactctagcagggctgaccg

SEQ ID NO: 2670620 - DNA, 25 bp, Homo sapien
tctcgcatagatggagtgccctcat

SEQ ID NO: 2670621 - DNA, 25 bp, Homo sapien
catggcagtagtagagcagttcccc

SEQ ID NO: 2670622 - DNA, 25 bp, Homo sapien
aaagaagataattcatctgagtaga

SEQ ID NO: 2670623 - DNA, 25 bp, Homo sapien
agaagataattcatctgagtagagg

SEQ ID NO: 2670624 - DNA, 25 bp, Homo sapien
gaagataattcatctgagtagaggt

SEQ ID NO: 2670625 - DNA, 25 bp, Homo sapien
gataattcatctgagtagaggtata

SEQ ID NO: 2670626 - DNA, 25 bp, Homo sapien
gaatgcagatacatagagttcacct

SEQ ID NO: 2670627 - DNA, 25 bp, Homo sapien
aaaaagtcttgtttgacaccgcatg

SEQ ID NO: 2670628 - DNA, 25 bp, Homo sapien
tgtagtcaacctcacaaaaacagga

SEQ ID NO: 2670629 - DNA, 25 bp, Homo sapien
agttcacctacactgacactcagtt

SEQ ID NO: 2670630 - DNA, 25 bp, Homo sapien
cacagttgtcatgacatcagtaggt

SEQ ID NO: 2670631 - DNA, 25 bp, Homo sapien
gcccaaaaggaatgaccagcctttg

SEQ ID NO: 2670632 - DNA, 25 bp, Homo sapien
ctctgagctggcaagtgcttctagt

SEQ ID NO: 2670633 - DNA, 25 bp, Homo sapien
gtatttgcccaaaaggaatgaccag

SEQ ID NO: 2670634 - DNA, 25 bp, Homo sapien
tttggtttctgtatatcatattcct

SEQ ID NO: 2670635 - DNA, 25 bp, Homo sapien
cctggcctgtaacagaagtggggaa

SEQ ID NO: 2670636 - DNA, 25 bp, Homo sapien
acactgtccaacttaggcctggcct

SEQ ID NO: 2670637 - DNA, 25 bp, Homo sapien
tatcatattcctcggtgatttcata

SEQ ID NO: 2670638 - DNA, 25 bp, Homo sapien
ggtgtataagacaacattccaaggg

SEQ ID NO: 2670639 - DNA, 25 bp, Homo sapien
tgtccataaagataaagcccagcac

SEQ ID NO: 2670640 - DNA, 25 bp, Homo sapien
cagcttgcacaaagcaatgccttgg

SEQ ID NO: 2670641 - DNA, 25 bp, Homo sapien
ggctgtgactcctgacatcttgtaa

SEQ ID NO: 2670642 - DNA, 25 bp, Homo sapien
aatactacctaactcaattttatag

SEQ ID NO: 2670643 - DNA, 25 bp, Homo sapien
actcttattaatgttcgtagcaaac

SEQ ID NO: 2670644 - DNA, 25 bp, Homo sapien
tatttgatttgaatgggcaggttaa

SEQ ID NO: 2670645 - DNA, 25 bp, Homo sapien
gaggttatctaattgacccacagtc

SEQ ID NO: 2670646 - DNA, 25 bp, Homo sapien
tgttcggaagttatctccattcagg

SEQ ID NO: 2670647 - DNA, 25 bp, Homo sapien
tccattcaggctacttttcattaac

SEQ ID NO: 2670648 - DNA, 25 bp, Homo sapien
tgtccaggaaaatgtcgacccactg

SEQ ID NO: 2670649 - DNA, 25 bp, Homo sapien
aaaagacagcttctgtgttcggaag

SEQ ID NO: 2670650 - DNA, 25 bp, Homo sapien
tttgttgaaaacaggtaagttgatc

SEQ ID NO: 2670651 - DNA, 25 bp, Homo sapien
tctttgttgaaaacaggtaagttga

SEQ ID NO: 2670652 - DNA, 25 bp, Homo sapien
gtatggtataggaccccagagggaa

SEQ ID NO: 2670653 - DNA, 25 bp, Homo sapien
ttgtatggtataggaccccagaggg

SEQ ID NO: 2670654 - DNA, 25 bp, Homo sapien
cgataaacctcaggtaaccccagct

SEQ ID NO: 2670655 - DNA, 25 bp, Homo sapien
ttcaaggtatctacatggagttccc

SEQ ID NO: 2670656 - DNA, 25 bp, Homo sapien
tgctatgaattcaccccaagaatgc

SEQ ID NO: 2670657 - DNA, 25 bp, Homo sapien
ctttaacttagtgatggctgtgctg

SEQ ID NO: 2670658 - DNA, 25 bp, Homo sapien
ccaaagcctcctggacacaacgaag

SEQ ID NO: 2670659 - DNA, 25 bp, Homo sapien
agcctcctggacacaacgaagccgg

SEQ ID NO: 2670660 - DNA, 25 bp, Homo sapien
ctcctggacacaacgaagccggaag

SEQ ID NO: 2670661 - DNA, 25 bp, Homo sapien
aaagcctcctggacacaacgaagcc

SEQ ID NO: 2670662 - DNA, 25 bp, Homo sapien
aacaaaatgaggtgcggttgtgcat

SEQ ID NO: 2670663 - DNA, 25 bp, Homo sapien
acaaaatgaggtgcggttgtgcatg

SEQ ID NO: 2670664 - DNA, 25 bp, Homo sapien
caacaaaatgaggtgcggttgtgca

SEQ ID NO: 2670665 - DNA, 25 bp, Homo sapien
cggcagagcccaagcttacaagctc

SEQ ID NO: 2670666 - DNA, 25 bp, Homo sapien
ggcagagcccaagcttacaagctct

SEQ ID NO: 2670667 - DNA, 25 bp, Homo sapien
gcggcagagcccaagcttacaagct

SEQ ID NO: 2670668 - DNA, 25 bp, Homo sapien
gtcaggccctgagctaactagaact

SEQ ID NO: 2670669 - DNA, 25 bp, Homo sapien
aaacaacttggcagcgatcctggct

SEQ ID NO: 2670670 - DNA, 25 bp, Homo sapien
agaagcaacagatggctgacaaacc

SEQ ID NO: 2670671 - DNA, 25 bp, Homo sapien
tgatggcggctcttagggtagaact

SEQ ID NO: 2670672 - DNA, 25 bp, Homo sapien
gcatgctttattgtcttcgttacca

SEQ ID NO: 2670673 - DNA, 25 bp, Homo sapien
tgtcttcgttaccatattcttcaga

SEQ ID NO: 2670674 - DNA, 25 bp, Homo sapien
tattcttcagagctaactttgtacc

SEQ ID NO: 2670675 - DNA, 25 bp, Homo sapien
ttcagagctaactttgtaccacatt

SEQ ID NO: 2670676 - DNA, 25 bp, Homo sapien
tagcacctggctattcggcaggaaa

SEQ ID NO: 2670677 - DNA, 25 bp, Homo sapien
tcaaagtagatctgcacacctgagg

SEQ ID NO: 2670678 - DNA, 25 bp, Homo sapien
taaagtatatctacggcagggagtg

SEQ ID NO: 2670679 - DNA, 25 bp, Homo sapien
agtgctcacaaatgggtaaataccc

SEQ ID NO: 2670680 - DNA, 25 bp, Homo sapien
tcaagacaagatttgccatatgcag

SEQ ID NO: 2670681 - DNA, 25 bp, Homo sapien
ttataggagcgatgtcaagaagcac

SEQ ID NO: 2670682 - DNA, 25 bp, Homo sapien
tagtaccacatggtaaaaaaccagc

SEQ ID NO: 2670683 - DNA, 25 bp, Homo sapien
aacacactaggattaaagaagacta

SEQ ID NO: 2670684 - DNA, 25 bp, Homo sapien
cactggctaagacaatgttttgaga

SEQ ID NO: 2670685 - DNA, 25 bp, Homo sapien
gagttctcagaaatacactggctaa

SEQ ID NO: 2670686 - DNA, 25 bp, Homo sapien
tgggaatgaacagcctttgagtaat

SEQ ID NO: 2670687 - DNA, 25 bp, Homo sapien
taattaaggtaagggcaacaacatc

SEQ ID NO: 2670688 - DNA, 25 bp, Homo sapien
gccatgtcggccaaactggtttaga

SEQ ID NO: 2670689 - DNA, 25 bp, Homo sapien
tgacaactcttgtgttcctgtggtg

SEQ ID NO: 2670690 - DNA, 25 bp, Homo sapien
tatggtgaagctgatactacttgca

SEQ ID NO: 2670691 - DNA, 25 bp, Homo sapien
aggaaggcccaagcttatggtgaag

SEQ ID NO: 2670692 - DNA, 25 bp, Homo sapien
cacatctagttttgcagcccaggaa

SEQ ID NO: 2670693 - DNA, 25 bp, Homo sapien
tgtcatgcttttggaccaccgcgtt

SEQ ID NO: 2670694 - DNA, 25 bp, Homo sapien
aataactagtctgtagctactgccc

SEQ ID NO: 2670695 - DNA, 25 bp, Homo sapien
caggtagtacttaactggcaaagca

SEQ ID NO: 2670696 - DNA, 25 bp, Homo sapien
tctgggcacccgatgaattaataca

SEQ ID NO: 2670697 - DNA, 25 bp, Homo sapien
gaggagactgttatacatccggaac

SEQ ID NO: 2670698 - DNA, 25 bp, Homo sapien
tactctgttagctactgcccagcag

SEQ ID NO: 2670699 - DNA, 25 bp, Homo sapien
cattaggtacctttcagtctgggca

SEQ ID NO: 2670700 - DNA, 25 bp, Homo sapien
tatttaccacactctcgggtctggg

SEQ ID NO: 2670701 - DNA, 25 bp, Homo sapien
gcttaaagcgaacatacaggtctgg

SEQ ID NO: 2670702 - DNA, 25 bp, Homo sapien
catgactaactccaaaaaggtgccc

SEQ ID NO: 2670703 - DNA, 25 bp, Homo sapien
tacacatccaagtgaaggaccgggt

SEQ ID NO: 2670704 - DNA, 25 bp, Homo sapien
catcaaccattatggcagctgttac

SEQ ID NO: 2670705 - DNA, 25 bp, Homo sapien
tagtcggcgaagcttaacgtttata

SEQ ID NO: 2670706 - DNA, 25 bp, Homo sapien
tcctgagattccctttggtggtgag

SEQ ID NO: 2670707 - DNA, 25 bp, Homo sapien
tgttactttaccaatgctaaccacc

SEQ ID NO: 2670708 - DNA, 25 bp, Homo sapien
cttgctgatttcatcatggtgcaaa

SEQ ID NO: 2670709 - DNA, 25 bp, Homo sapien
gaaggccttatctcgggctgatttc

SEQ ID NO: 2670710 - DNA, 25 bp, Homo sapien
gccttatctcgggctgatttcaaac

SEQ ID NO: 2670711 - DNA, 25 bp, Homo sapien
atttcatcatggtgcaaacaacaca

SEQ ID NO: 2670712 - DNA, 25 bp, Homo sapien
gagcagcccggatcaacatcattaa

SEQ ID NO: 2670713 - DNA, 25 bp, Homo sapien
ccaaggcagagcgaattttttcctc

SEQ ID NO: 2670714 - DNA, 25 bp, Homo sapien
taaggcacgggtttcagcaacacaa

SEQ ID NO: 2670715 - DNA, 25 bp, Homo sapien
caagcattgctcagaggacccaagg

SEQ ID NO: 2670716 - DNA, 25 bp, Homo sapien
agaaggctgagtcctccaaagagac

SEQ ID NO: 2670717 - DNA, 25 bp, Homo sapien
ctgccccaggagaaggctgagtcct

SEQ ID NO: 2670718 - DNA, 25 bp, Homo sapien
aaggctgagtcctccaaagagacac

SEQ ID NO: 2670719 - DNA, 25 bp, Homo sapien
cccaggagaaggctgagtcctccaa

SEQ ID NO: 2670720 - DNA, 25 bp, Homo sapien
agccacatcggcaagagacctgagg

SEQ ID NO: 2670721 - DNA, 25 bp, Homo sapien
tattgtgtgtaatgtcagcaaagcc

SEQ ID NO: 2670722 - DNA, 25 bp, Homo sapien
tgaggacactgctaaaggaaatgtt

SEQ ID NO: 2670723 - DNA, 25 bp, Homo sapien
catttggagcaaagagatattgtgt

SEQ ID NO: 2670724 - DNA, 25 bp, Homo sapien
gagttgggtcgtcctgcggccaatc

SEQ ID NO: 2670725 - DNA, 25 bp, Homo sapien
tgcggccaatctcctctccgactgt

SEQ ID NO: 2670726 - DNA, 25 bp, Homo sapien
cctcccctggagttgggtcgtcctg

SEQ ID NO: 2670727 - DNA, 25 bp, Homo sapien
ttgggtcgtcctgcggccaatctcc

SEQ ID NO: 2670728 - DNA, 25 bp, Homo sapien
tctgcccaactaaattgtgacatag

SEQ ID NO: 2670729 - DNA, 25 bp, Homo sapien
tacatagccttggtatgcccctgcc

SEQ ID NO: 2670730 - DNA, 25 bp, Homo sapien
taatgtgaatcgttttacatagcct

SEQ ID NO: 2670731 - DNA, 25 bp, Homo sapien
tgtgacatagtcactctaccacttg

SEQ ID NO: 2670732 - DNA, 25 bp, Homo sapien
agaaaggttgtaccagtcaaatgca

SEQ ID NO: 2670733 - DNA, 25 bp, Homo sapien
ccagtcaaatgcagtcttgtgcttc

SEQ ID NO: 2670734 - DNA, 25 bp, Homo sapien
tcttttgagatgagggtaccgtaca

SEQ ID NO: 2670735 - DNA, 25 bp, Homo sapien
ttctcttttgagatgagggtaccgt

SEQ ID NO: 2670736 - DNA, 25 bp, Homo sapien
cttttctagattcaaccttcaattt

SEQ ID NO: 2670737 - DNA, 25 bp, Homo sapien
tcccaggcattgcaggtgtcacaac

SEQ ID NO: 2670738 - DNA, 25 bp, Homo sapien
gtcacaacattgacagtaggattca

SEQ ID NO: 2670739 - DNA, 25 bp, Homo sapien
ttcatcccaggcattgcaggtgtca

SEQ ID NO: 2670740 - DNA, 25 bp, Homo sapien
gcaggtgtcacaacattgacagtag

SEQ ID NO: 2670741 - DNA, 25 bp, Homo sapien
aatgttaggtgtcacgctggtcagg

SEQ ID NO: 2670742 - DNA, 25 bp, Homo sapien
actccaatgttaggtgtcacgctgg

SEQ ID NO: 2670743 - DNA, 25 bp, Homo sapien
tgctgccccttcactccaatgttag

SEQ ID NO: 2670744 - DNA, 25 bp, Homo sapien
gctgccccttcactccaatgttagg

SEQ ID NO: 2670745 - DNA, 25 bp, Homo sapien
tacatagatggtagcaggaaaagag

SEQ ID NO: 2670746 - DNA, 25 bp, Homo sapien
ttacatagatggtagcaggaaaaga

SEQ ID NO: 2670747 - DNA, 25 bp, Homo sapien
tgaaagtgtctgagttagtaccact

SEQ ID NO: 2670748 - DNA, 25 bp, Homo sapien
agcaacattcgggtgacatgaaaat

SEQ ID NO: 2670749 - DNA, 25 bp, Homo sapien
tgtctgagttagtaccactagaaac

SEQ ID NO: 2670750 - DNA, 25 bp, Homo sapien
tgagttagtaccactagaaacagca

SEQ ID NO: 2670751 - DNA, 25 bp, Homo sapien
tcagggatccaacataactcagaca

SEQ ID NO: 2670752 - DNA, 25 bp, Homo sapien
tgagttttatcatgccacgcctttc

SEQ ID NO: 2670753 - DNA, 25 bp, Homo sapien
cactaaacttggataaatgggtcag

SEQ ID NO: 2670754 - DNA, 25 bp, Homo sapien
tcagacatagcccaggtagcctgtt

SEQ ID NO: 2670755 - DNA, 25 bp, Homo sapien
taatttttagatagttcctggtcac

SEQ ID NO: 2670756 - DNA, 25 bp, Homo sapien
tatgtacaaaggtaaccatcactcc

SEQ ID NO: 2670757 - DNA, 25 bp, Homo sapien
tcctggtcactcaaatttaagaatg

SEQ ID NO: 2670758 - DNA, 25 bp, Homo sapien
agtgcatacatgcttcactgaaagc

SEQ ID NO: 2670759 - DNA, 25 bp, Homo sapien
taagcctaatgcagtagctctgtcc

SEQ ID NO: 2670760 - DNA, 25 bp, Homo sapien
taaacagcttagtttcagcacggca

SEQ ID NO: 2670761 - DNA, 25 bp, Homo sapien
tccgtaaaacagaatgagcgttccg

SEQ ID NO: 2670762 - DNA, 25 bp, Homo sapien
ttccagagacagctaaagttaccag

SEQ ID NO: 2670763 - DNA, 25 bp, Homo sapien
agggaagcctggatgcctgtttcga

SEQ ID NO: 2670764 - DNA, 25 bp, Homo sapien
cctgtttcgaggtagctttgccaca

SEQ ID NO: 2670765 - DNA, 25 bp, Homo sapien
ttctaggcagactttgactgaagct

SEQ ID NO: 2670766 - DNA, 25 bp, Homo sapien
ttctgaagcctaatgcaatccaagg

SEQ ID NO: 2670767 - DNA, 25 bp, Homo sapien
ctatgtgtgaagtctgctctaccac

SEQ ID NO: 2670768 - DNA, 25 bp, Homo sapien
cacttgccatctgtgagcttgtcca

SEQ ID NO: 2670769 - DNA, 25 bp, Homo sapien
gtgaagtctgctctaccacttgcca

SEQ ID NO: 2670770 - DNA, 25 bp, Homo sapien
tctgctctaccacttgccatctgtg

SEQ ID NO: 2670771 - DNA, 25 bp, Homo sapien
aaaccaaagctattgcctatgctga

SEQ ID NO: 2670772 - DNA, 25 bp, Homo sapien
aaaacgcgttttatacttccatgcg

SEQ ID NO: 2670773 - DNA, 25 bp, Homo sapien
tgcaaaacagggctgcagagtagtg

SEQ ID NO: 2670774 - DNA, 25 bp, Homo sapien
ggagcatacagccttaaacaaggtg

SEQ ID NO: 2670775 - DNA, 25 bp, Homo sapien
ggaggctaatagtccttgttgacaa

SEQ ID NO: 2670776 - DNA, 25 bp, Homo sapien
gacttctggaggtcaactgcaagca

SEQ ID NO: 2670777 - DNA, 25 bp, Homo sapien
gagactcaagtcagctagctcatag

SEQ ID NO: 2670778 - DNA, 25 bp, Homo sapien
caactgactgacaaagtaggaggct

SEQ ID NO: 2670779 - DNA, 25 bp, Homo sapien
gttgatgctaccaccccaaataaag

SEQ ID NO: 2670780 - DNA, 25 bp, Homo sapien
actcttggtgggtgatgacatctat

SEQ ID NO: 2670781 - DNA, 25 bp, Homo sapien
aatcgacttagtgcataccttcaaa

SEQ ID NO: 2670782 - DNA, 25 bp, Homo sapien
ttggaattccaaacggcaagctggc

SEQ ID NO: 2670783 - DNA, 25 bp, Homo sapien
taacatggaaggcaggatcattggc

SEQ ID NO: 2670784 - DNA, 25 bp, Homo sapien
gcacacttggtagctcaagtttatt

SEQ ID NO: 2670785 - DNA, 25 bp, Homo sapien
ctagacatagggatggatattgcac

SEQ ID NO: 2670786 - DNA, 25 bp, Homo sapien
gggcactgaaggtacaactgcacct

SEQ ID NO: 2670787 - DNA, 25 bp, Homo sapien
ggaaagagtgaataatgagggaact

SEQ ID NO: 2670788 - DNA, 25 bp, Homo sapien
ggagtgactaagagaacaattccag

SEQ ID NO: 2670789 - DNA, 25 bp, Homo sapien
cacttaatagttgttttgagcacac

SEQ ID NO: 2670790 - DNA, 25 bp, Homo sapien
aaaaataggccatgggagtgactaa

SEQ ID NO: 2670791 - DNA, 25 bp, Homo sapien
ccacctttcctattgtgatggtcac

SEQ ID NO: 2670792 - DNA, 25 bp, Homo sapien
tagtatacctcagtgtcgtgaagac

SEQ ID NO: 2670793 - DNA, 25 bp, Homo sapien
aacctcaggtaccttctgtggcctc

SEQ ID NO: 2670794 - DNA, 25 bp, Homo sapien
aaagagtttattacagtgcctgaca

SEQ ID NO: 2670795 - DNA, 25 bp, Homo sapien
gttgcgttacatgagccgagatgac

SEQ ID NO: 2670796 - DNA, 25 bp, Homo sapien
gatgacttcagggtcttgaccgcgg

SEQ ID NO: 2670797 - DNA, 25 bp, Homo sapien
gaaagtgaatgtggccaagttgcgt

SEQ ID NO: 2670798 - DNA, 25 bp, Homo sapien
tcggagaggcatctgggttcggact

SEQ ID NO: 2670799 - DNA, 25 bp, Homo sapien
aagtcactttgcctagagtagaagt

SEQ ID NO: 2670800 - DNA, 25 bp, Homo sapien
tggttgtctggactctagctcaggt

SEQ ID NO: 2670801 - DNA, 25 bp, Homo sapien
tgtttgcgggaaaaatttgctcctc

SEQ ID NO: 2670802 - DNA, 25 bp, Homo sapien
tctctgaggcggaacgtgtcattga

SEQ ID NO: 2670803 - DNA, 25 bp, Homo sapien
tatttttctactcttcaccctccaa

SEQ ID NO: 2670804 - DNA, 25 bp, Homo sapien
tcaattagacaagagtacaaactgc

SEQ ID NO: 2670805 - DNA, 25 bp, Homo sapien
tctgtagacagttaaggttctctgc

SEQ ID NO: 2670806 - DNA, 25 bp, Homo sapien
tcctgaatgccagtctaaacgtgca

SEQ ID NO: 2670807 - DNA, 25 bp, Homo sapien
taaacgtgcactttgatctgtagac

SEQ ID NO: 2670808 - DNA, 25 bp, Homo sapien
catcatcctcaatggaatctaatgt

SEQ ID NO: 2670809 - DNA, 25 bp, Homo sapien
tcaatggaatctaatgtgtaaccca

SEQ ID NO: 2670810 - DNA, 25 bp, Homo sapien
atcatcctcaatggaatctaatgtg

SEQ ID NO: 2670811 - DNA, 25 bp, Homo sapien
tcctcaatggaatctaatgtgtaac

SEQ ID NO: 2670812 - DNA, 25 bp, Homo sapien
ggaataggcttctcatgcccgcaag

SEQ ID NO: 2670813 - DNA, 25 bp, Homo sapien
taatttcacctactagagaggatgc

SEQ ID NO: 2670814 - DNA, 25 bp, Homo sapien
tgcccgcaagtacccatgaaaacaa

SEQ ID NO: 2670815 - DNA, 25 bp, Homo sapien
tgctttcttgcaacaggtaccatgt

SEQ ID NO: 2670816 - DNA, 25 bp, Homo sapien
tagcaatgaacgagaaaacacttga

SEQ ID NO: 2670817 - DNA, 25 bp, Homo sapien
tacacttagcaatgaacgagaaaac

SEQ ID NO: 2670818 - DNA, 25 bp, Homo sapien
acagacacaggtgaccgaacaatga

SEQ ID NO: 2670819 - DNA, 25 bp, Homo sapien
gatagatgctagtgtcctccagagc

SEQ ID NO: 2670820 - DNA, 25 bp, Homo sapien
agtgagcaacgtgcccctgatcaca

SEQ ID NO: 2670821 - DNA, 25 bp, Homo sapien
caggaaggcttgcaaacgtgacacg

SEQ ID NO: 2670822 - DNA, 25 bp, Homo sapien
cgctggacatttatgcgagtgagca

SEQ ID NO: 2670823 - DNA, 25 bp, Homo sapien
gaaaatagtaggcagtcttccctgg

SEQ ID NO: 2670824 - DNA, 25 bp, Homo sapien
tttaggaggtcgaattagcaagact

SEQ ID NO: 2670825 - DNA, 25 bp, Homo sapien
gcaaattgattggaactgggaaacc

SEQ ID NO: 2670826 - DNA, 25 bp, Homo sapien
aaagatctctcaggcaacccagcat

SEQ ID NO: 2670827 - DNA, 25 bp, Homo sapien
gacagctgtctagcctaagttcatg

SEQ ID NO: 2670828 - DNA, 25 bp, Homo sapien
cagcatcaacttcgactttcccaaa

SEQ ID NO: 2670829 - DNA, 25 bp, Homo sapien
ctgcacacgcccaagtttcaaaatc

SEQ ID NO: 2670830 - DNA, 25 bp, Homo sapien
taatgcttatgggtggttacacacg

SEQ ID NO: 2670831 - DNA, 25 bp, Homo sapien
caaaatttgactacactttacagca

SEQ ID NO: 2670832 - DNA, 25 bp, Homo sapien
gaaactagtttccaagtaatgctga

SEQ ID NO: 2670833 - DNA, 25 bp, Homo sapien
catatctcttttggaatcagtgctg

SEQ ID NO: 2670834 - DNA, 25 bp, Homo sapien
gttgtgtccacattttacctttgca

SEQ ID NO: 2670835 - DNA, 25 bp, Homo sapien
caaagggtgataattttggtctcaa

SEQ ID NO: 2670836 - DNA, 25 bp, Homo sapien
gtagctgctcccatatgtagagctc

SEQ ID NO: 2670837 - DNA, 25 bp, Homo sapien
aatctgctacccttgagacccactt

SEQ ID NO: 2670838 - DNA, 25 bp, Homo sapien
tctgaatctgctacccttgagaccc

SEQ ID NO: 2670839 - DNA, 25 bp, Homo sapien
tagctgctcccatatgtagagctct

SEQ ID NO: 2670840 - DNA, 25 bp, Homo sapien
gcaatggcggcccatgaggtcagct

SEQ ID NO: 2670841 - DNA, 25 bp, Homo sapien
tcccatcattgccagaaagtatgcc

SEQ ID NO: 2670842 - DNA, 25 bp, Homo sapien
gccagaaagtatgccaatcagtgcc

SEQ ID NO: 2670843 - DNA, 25 bp, Homo sapien
gatgacatccccaattttcaggctg

SEQ ID NO: 2670844 - DNA, 25 bp, Homo sapien
tatgctttatagatggagggggcaa

SEQ ID NO: 2670845 - DNA, 25 bp, Homo sapien
tttatagatggagggggcaatgcac

SEQ ID NO: 2670846 - DNA, 25 bp, Homo sapien
tgctttatagatggagggggcaatg

SEQ ID NO: 2670847 - DNA, 25 bp, Homo sapien
ctttatagatggagggggcaatgca

SEQ ID NO: 2670848 - DNA, 25 bp, Homo sapien
agaatagctctttataatgcgtaca

SEQ ID NO: 2670849 - DNA, 25 bp, Homo sapien
aatggagtggtgaatgtcatcctca

SEQ ID NO: 2670850 - DNA, 25 bp, Homo sapien
aatgcgtacatgtccacttttaaga

SEQ ID NO: 2670851 - DNA, 25 bp, Homo sapien
gtacttaatggagtggtgaatgtca

SEQ ID NO: 2670852 - DNA, 25 bp, Homo sapien
gattctccagtctgatgtgcctgag

SEQ ID NO: 2670853 - DNA, 25 bp, Homo sapien
tgctgtccacagagcacttcatctc

SEQ ID NO: 2670854 - DNA, 25 bp, Homo sapien
gagctcgttattgggtacatcactg

SEQ ID NO: 2670855 - DNA, 25 bp, Homo sapien
ttccatttgtcttgagaccagactc

SEQ ID NO: 2670856 - DNA, 25 bp, Homo sapien
catcaaagataaaggttgtgtgctt

SEQ ID NO: 2670857 - DNA, 25 bp, Homo sapien
gtgtgcttgtaggaagcaataattt

SEQ ID NO: 2670858 - DNA, 25 bp, Homo sapien
gcatttcgcgtagtgagaaaagtca

SEQ ID NO: 2670859 - DNA, 25 bp, Homo sapien
gaaaagtcatcaaagataaaggttg

SEQ ID NO: 2670860 - DNA, 25 bp, Homo sapien
agccgctggttgtgcaatccaggtg

SEQ ID NO: 2670861 - DNA, 25 bp, Homo sapien
cgctggttgtgcaatccaggtgtcc

SEQ ID NO: 2670862 - DNA, 25 bp, Homo sapien
tggttgtgcaatccaggtgtccttc

SEQ ID NO: 2670863 - DNA, 25 bp, Homo sapien
tggttctatgtgtccctgcaggtgt

SEQ ID NO: 2670864 - DNA, 25 bp, Homo sapien
ttgcctccagctcatatccttcttt

SEQ ID NO: 2670865 - DNA, 25 bp, Homo sapien
gcttgtagcacagttggagagacca

SEQ ID NO: 2670866 - DNA, 25 bp, Homo sapien
taacttggtccttcacctcatggag

SEQ ID NO: 2670867 - DNA, 25 bp, Homo sapien
gactgggacataccatggaagacac

SEQ ID NO: 2670868 - DNA, 25 bp, Homo sapien
ggttgtcaggtagtcagggcttcca

SEQ ID NO: 2670869 - DNA, 25 bp, Homo sapien
tcaactggttatctagccattttgc

SEQ ID NO: 2670870 - DNA, 25 bp, Homo sapien
tcttggataccatttactcaaaagc

SEQ ID NO: 2670871 - DNA, 25 bp, Homo sapien
gaaataagtatctcttggcccttaa

SEQ ID NO: 2670872 - DNA, 25 bp, Homo sapien
tagactactgctaaaacttcatgca

SEQ ID NO: 2670873 - DNA, 25 bp, Homo sapien
cctgcacatagctggacatagaaaa

SEQ ID NO: 2670874 - DNA, 25 bp, Homo sapien
tattggcaagactgcatagtactac

SEQ ID NO: 2670875 - DNA, 25 bp, Homo sapien
tattctttatcacatgaagagggtg

SEQ ID NO: 2670876 - DNA, 25 bp, Homo sapien
gacaattgatctataaactggcgta

SEQ ID NO: 2670877 - DNA, 25 bp, Homo sapien
ttttgcacatttcaatggcagtcga

SEQ ID NO: 2670878 - DNA, 25 bp, Homo sapien
tttgcacatttcaatggcagtcgag

SEQ ID NO: 2670879 - DNA, 25 bp, Homo sapien
tggagtaactgacttcgacattttt

SEQ ID NO: 2670880 - DNA, 25 bp, Homo sapien
ttgtggagtaactgacttcgacatt

SEQ ID NO: 2670881 - DNA, 25 bp, Homo sapien
cttttcaaggactcttacaaacagg

SEQ ID NO: 2670882 - DNA, 25 bp, Homo sapien
atgcttctcttttcaaggactctta

SEQ ID NO: 2670883 - DNA, 25 bp, Homo sapien
tttcaaggactcttacaaacagggc

SEQ ID NO: 2670884 - DNA, 25 bp, Homo sapien
tctcttttcaaggactcttacaaac

SEQ ID NO: 2670885 - DNA, 25 bp, Homo sapien
tgcatgagcttgacgactgtttgga

SEQ ID NO: 2670886 - DNA, 25 bp, Homo sapien
gcttgacgactgtttggagagtaag

SEQ ID NO: 2670887 - DNA, 25 bp, Homo sapien
tgacgactgtttggagagtaaggaa

SEQ ID NO: 2670888 - DNA, 25 bp, Homo sapien
catgagcttgacgactgtttggaga

SEQ ID NO: 2670889 - DNA, 25 bp, Homo sapien
tatacattctgaccttccatgagct

SEQ ID NO: 2670890 - DNA, 25 bp, Homo sapien
ttatacattctgaccttccatgagc

SEQ ID NO: 2670891 - DNA, 25 bp, Homo sapien
ttagaactaggttcctctttcaagc

SEQ ID NO: 2670892 - DNA, 25 bp, Homo sapien
actaggttcctctttcaagccatga

SEQ ID NO: 2670893 - DNA, 25 bp, Homo sapien
ttcaagccatgaatataatgagatg

SEQ ID NO: 2670894 - DNA, 25 bp, Homo sapien
caagccatgaatataatgagatgac

SEQ ID NO: 2670895 - DNA, 25 bp, Homo sapien
tggcattcaaagatccctattaaag

SEQ ID NO: 2670896 - DNA, 25 bp, Homo sapien
ccatcccgctatggcattcaaagat

SEQ ID NO: 2670897 - DNA, 25 bp, Homo sapien
attaaagaatcctcagtggtttctg

SEQ ID NO: 2670898 - DNA, 25 bp, Homo sapien
ctgcttttcacccatcccgctatgg

SEQ ID NO: 2670899 - DNA, 25 bp, Homo sapien
caaaggtgattactggaatcttgaa

SEQ ID NO: 2670900 - DNA, 25 bp, Homo sapien
tcatgcacaaaggtgattactggaa

SEQ ID NO: 2670901 - DNA, 25 bp, Homo sapien
cacaaaggtgattactggaatcttg

SEQ ID NO: 2670902 - DNA, 25 bp, Homo sapien
tgcacaaaggtgattactggaatct

SEQ ID NO: 2670903 - DNA, 25 bp, Homo sapien
tgttcacttacacacagtttatgaa

SEQ ID NO: 2670904 - DNA, 25 bp, Homo sapien
ctgctggcgcatctgttcacttaca

SEQ ID NO: 2670905 - DNA, 25 bp, Homo sapien
gcgcatctgttcacttacacacagt

SEQ ID NO: 2670906 - DNA, 25 bp, Homo sapien
tctgttcacttacacacagtttatg

SEQ ID NO: 2670907 - DNA, 25 bp, Homo sapien
tccagacctggagcaagacatgcct

SEQ ID NO: 2670908 - DNA, 25 bp, Homo sapien
ctactggatgggcacaggcccttga

SEQ ID NO: 2670909 - DNA, 25 bp, Homo sapien
gacctggagcaagacatgcctactg

SEQ ID NO: 2670910 - DNA, 25 bp, Homo sapien
caagacatgcctactggatgggcac

SEQ ID NO: 2670911 - DNA, 25 bp, Homo sapien
taaaccttgtgacttccctgaatcc

SEQ ID NO: 2670912 - DNA, 25 bp, Homo sapien
tattatcctagccatgtggatcccc

SEQ ID NO: 2670913 - DNA, 25 bp, Homo sapien
tccacagagccttccagaaatcgag

SEQ ID NO: 2670914 - DNA, 25 bp, Homo sapien
gaaatcgaggctttatgccagctca

SEQ ID NO: 2670915 - DNA, 25 bp, Homo sapien
cactggctaccaaagcgcatgttcc

SEQ ID NO: 2670916 - DNA, 25 bp, Homo sapien
ggcgactgcaaatagtaggtcttca

SEQ ID NO: 2670917 - DNA, 25 bp, Homo sapien
gaatgaattgaacacactgacctaa

SEQ ID NO: 2670918 - DNA, 25 bp, Homo sapien
gcaggtgtggaagctcactggctac

SEQ ID NO: 2670919 - DNA, 25 bp, Homo sapien
gctgggagctggctttccctcaagg

SEQ ID NO: 2670920 - DNA, 25 bp, Homo sapien
gaggatggccattcctcagcaaaca

SEQ ID NO: 2670921 - DNA, 25 bp, Homo sapien
ggctttccctcaaggccatcttcaa

SEQ ID NO: 2670922 - DNA, 25 bp, Homo sapien
gcaaacacctcagatcctgctggga

SEQ ID NO: 2670923 - DNA, 25 bp, Homo sapien
tattgcaacagcattcagcaaccaa

SEQ ID NO: 2670924 - DNA, 25 bp, Homo sapien
taaaaaactgaagttactggtgctg

SEQ ID NO: 2670925 - DNA, 25 bp, Homo sapien
gactcttggatccataaattatggc

SEQ ID NO: 2670926 - DNA, 25 bp, Homo sapien
aattattaggcatgcaaagaagcag

SEQ ID NO: 2670927 - DNA, 25 bp, Homo sapien
tgttctttccaggattttctattca

SEQ ID NO: 2670928 - DNA, 25 bp, Homo sapien
gatgttctttccaggattttctatt

SEQ ID NO: 2670929 - DNA, 25 bp, Homo sapien
gttctttccaggattttctattcat

SEQ ID NO: 2670930 - DNA, 25 bp, Homo sapien
gggatgttctttccaggattttcta

SEQ ID NO: 2670931 - DNA, 25 bp, Homo sapien
tcatcctccttattgaggggtgttc

SEQ ID NO: 2670932 - DNA, 25 bp, Homo sapien
ttggttcacaacacctttggaatag

SEQ ID NO: 2670933 - DNA, 25 bp, Homo sapien
gatgttctgtccatgattttctgtt

SEQ ID NO: 2670934 - DNA, 25 bp, Homo sapien
tagtcttgccaagatatgtgtttgc

SEQ ID NO: 2670935 - DNA, 25 bp, Homo sapien
tcagaagtaccgcttccagtatttt

SEQ ID NO: 2670936 - DNA, 25 bp, Homo sapien
tccagtattttttgaccagacttga

SEQ ID NO: 2670937 - DNA, 25 bp, Homo sapien
tagtggtacatctcagaagtaccgc

SEQ ID NO: 2670938 - DNA, 25 bp, Homo sapien
cagtattttttgaccagacttgaaa

SEQ ID NO: 2670939 - DNA, 25 bp, Homo sapien
aacagctattgttttcaggtaaagt

SEQ ID NO: 2670940 - DNA, 25 bp, Homo sapien
gctgagtcaatgttatccaaaacat

SEQ ID NO: 2670941 - DNA, 25 bp, Homo sapien
catagtatttccaaaccttcaccac

SEQ ID NO: 2670942 - DNA, 25 bp, Homo sapien
tgttgctgagtcaatgttatccaaa

SEQ ID NO: 2670943 - DNA, 25 bp, Homo sapien
caatgttatccaaaacatagtattt

SEQ ID NO: 2670944 - DNA, 25 bp, Homo sapien
tatcttagtctctgtaacctctgag

SEQ ID NO: 2670945 - DNA, 25 bp, Homo sapien
tatctcagattactaggtgggccaa

SEQ ID NO: 2670946 - DNA, 25 bp, Homo sapien
tcttgggctccactcaagaaatgag

SEQ ID NO: 2670947 - DNA, 25 bp, Homo sapien
tctattctcaggtgccccaaattgc

SEQ ID NO: 2670948 - DNA, 25 bp, Homo sapien
gatataatcagcgaatccaactgtt

SEQ ID NO: 2670949 - DNA, 25 bp, Homo sapien
cattggagatataatcagcgaatcc

SEQ ID NO: 2670950 - DNA, 25 bp, Homo sapien
aaatccttgccctcacttaagcttc

SEQ ID NO: 2670951 - DNA, 25 bp, Homo sapien
tggagatataatcagcgaatccaac

SEQ ID NO: 2670952 - DNA, 25 bp, Homo sapien
catgtactctgaatcgacaactccc

SEQ ID NO: 2670953 - DNA, 25 bp, Homo sapien
tctctaagaatagcatgtactctga

SEQ ID NO: 2670954 - DNA, 25 bp, Homo sapien
ctctgaatcgacaactcccattggc

SEQ ID NO: 2670955 - DNA, 25 bp, Homo sapien
gaatagcatgtactctgaatcgaca

SEQ ID NO: 2670956 - DNA, 25 bp, Homo sapien
gaaaatattgtatttgctgctattg

SEQ ID NO: 2670957 - DNA, 25 bp, Homo sapien
gctgctattgatcaacagtctgtgg

SEQ ID NO: 2670958 - DNA, 25 bp, Homo sapien
tgggcatcaccattaggtgtcagaa

SEQ ID NO: 2670959 - DNA, 25 bp, Homo sapien
gtcagaaatggaacatagagcattt

SEQ ID NO: 2670960 - DNA, 25 bp, Homo sapien
tttcctgacactccttgtttctgta

SEQ ID NO: 2670961 - DNA, 25 bp, Homo sapien
tttttcctgacactccttgtttctg

SEQ ID NO: 2670962 - DNA, 25 bp, Homo sapien
ttcctgacactccttgtttctgtaa

SEQ ID NO: 2670963 - DNA, 25 bp, Homo sapien
tcctgacactccttgtttctgtaaa

SEQ ID NO: 2670964 - DNA, 25 bp, Homo sapien
gaatccaaaatgtctgtggacatct

SEQ ID NO: 2670965 - DNA, 25 bp, Homo sapien
gacatctagagtgggcccttctgac

SEQ ID NO: 2670966 - DNA, 25 bp, Homo sapien
acaactgtcagcattgtgtgctctg

SEQ ID NO: 2670967 - DNA, 25 bp, Homo sapien
ttaagagtgataggatctgaatcca

SEQ ID NO: 2670968 - DNA, 25 bp, Homo sapien
atgcagagataacatcaaaattcca

SEQ ID NO: 2670969 - DNA, 25 bp, Homo sapien
taatatcacttatggaaaatataga

SEQ ID NO: 2670970 - DNA, 25 bp, Homo sapien
ttgaaatcaattaacctgaagaacg

SEQ ID NO: 2670971 - DNA, 25 bp, Homo sapien
tgaagaacgttgtatcctaaggatt

SEQ ID NO: 2670972 - DNA, 25 bp, Homo sapien
cttatccataagagacttcctgcag

SEQ ID NO: 2670973 - DNA, 25 bp, Homo sapien
tcctgcagggagtttaatctgtatt

SEQ ID NO: 2670974 - DNA, 25 bp, Homo sapien
ctgaacttgttcttatccataagag

SEQ ID NO: 2670975 - DNA, 25 bp, Homo sapien
cctctgcaccacaggaaattgatgg

SEQ ID NO: 2670976 - DNA, 25 bp, Homo sapien
ggatgttgatgacctgagcaccagc

SEQ ID NO: 2670977 - DNA, 25 bp, Homo sapien
caggcttaggacagctgacaagaca

SEQ ID NO: 2670978 - DNA, 25 bp, Homo sapien
accagctctgtcatccccaatggga

SEQ ID NO: 2670979 - DNA, 25 bp, Homo sapien
gacctcatatggctgtcaggcttag

SEQ ID NO: 2670980 - DNA, 25 bp, Homo sapien
aaagcatcccacttcaccaccagct

SEQ ID NO: 2670981 - DNA, 25 bp, Homo sapien
tcagggaaaaagcatcccacttcac

SEQ ID NO: 2670982 - DNA, 25 bp, Homo sapien
gaaaaagcatcccacttcaccacca

SEQ ID NO: 2670983 - DNA, 25 bp, Homo sapien
tcaccaccagctcccaaagctgaaa

SEQ ID NO: 2670984 - DNA, 25 bp, Homo sapien
attcttaaatggaatataactatga

SEQ ID NO: 2670985 - DNA, 25 bp, Homo sapien
atcatcattgtacttcaattataag

SEQ ID NO: 2670986 - DNA, 25 bp, Homo sapien
tcattgtacttcaattataagaacc

SEQ ID NO: 2670987 - DNA, 25 bp, Homo sapien
cttaaatggaatataactatgacta

SEQ ID NO: 2670988 - DNA, 25 bp, Homo sapien
tttagctgactgactgctatgctgc

SEQ ID NO: 2670989 - DNA, 25 bp, Homo sapien
ttagctgactgactgctatgctgca

SEQ ID NO: 2670990 - DNA, 25 bp, Homo sapien
gctttagctgactgactgctatgct

SEQ ID NO: 2670991 - DNA, 25 bp, Homo sapien
tagctgactgactgctatgctgcat

SEQ ID NO: 2670992 - DNA, 25 bp, Homo sapien
tacccaactggaacatgcctaggac

SEQ ID NO: 2670993 - DNA, 25 bp, Homo sapien
tgagtccacagattacccaactgga

SEQ ID NO: 2670994 - DNA, 25 bp, Homo sapien
caactggaacatgcctaggacattg

SEQ ID NO: 2670995 - DNA, 25 bp, Homo sapien
cacagattacccaactggaacatgc

SEQ ID NO: 2670996 - DNA, 25 bp, Homo sapien
agccttgtgccctgatgccgagttg

SEQ ID NO: 2670997 - DNA, 25 bp, Homo sapien
ccgagttgtctgtattagagggcat

SEQ ID NO: 2670998 - DNA, 25 bp, Homo sapien
cttaaagccttgtgccctgatgccg

SEQ ID NO: 2670999 - DNA, 25 bp, Homo sapien
gccctgatgccgagttgtctgtatt

SEQ ID NO: 2671000 - DNA, 25 bp, Homo sapien
gagtaacctaattcatgtgccacag

SEQ ID NO: 2671001 - DNA, 25 bp, Homo sapien
tgtgccacagaaaaccgcagtagcc

SEQ ID NO: 2671002 - DNA, 25 bp, Homo sapien
aactgtgaatcacacacatagtatg

SEQ ID NO: 2671003 - DNA, 25 bp, Homo sapien
tagccaagtagccacttcgagttgc

SEQ ID NO: 2671004 - DNA, 25 bp, Homo sapien
gttctcataggaccagggtagggag

SEQ ID NO: 2671005 - DNA, 25 bp, Homo sapien
cataggaccagggtagggaggtcgg

SEQ ID NO: 2671006 - DNA, 25 bp, Homo sapien
ttctcataggaccagggtagggagg

SEQ ID NO: 2671007 - DNA, 25 bp, Homo sapien
gatggtgctgtaagcatagtctccg

SEQ ID NO: 2671008 - DNA, 25 bp, Homo sapien
cacagccatcgtggataagccacat

SEQ ID NO: 2671009 - DNA, 25 bp, Homo sapien
gaacacaattccattgatggtgctg

SEQ ID NO: 2671010 - DNA, 25 bp, Homo sapien
gtaagcatagtctccggatggaatc

SEQ ID NO: 2671011 - DNA, 25 bp, Homo sapien
tgtgtccatctgtcatatggagtca

SEQ ID NO: 2671012 - DNA, 25 bp, Homo sapien
ttgtgtccatctgtcatatggagtc

SEQ ID NO: 2671013 - DNA, 25 bp, Homo sapien
ctttgtgtccatctgtcatatggag

SEQ ID NO: 2671014 - DNA, 25 bp, Homo sapien
tgtccatctgtcatatggagtcagg

SEQ ID NO: 2671015 - DNA, 25 bp, Homo sapien
ttccttcagtgcagttttcatagat

SEQ ID NO: 2671016 - DNA, 25 bp, Homo sapien
caggatctgaaattccttcagtgca

SEQ ID NO: 2671017 - DNA, 25 bp, Homo sapien
cagtgcagttttcatagatgcccat

SEQ ID NO: 2671018 - DNA, 25 bp, Homo sapien
tgcttgacaggatctgaaattcctt

SEQ ID NO: 2671019 - DNA, 25 bp, Homo sapien
aaagaagtctccttatctgagagct

SEQ ID NO: 2671020 - DNA, 25 bp, Homo sapien
gaaagaagtctccttatctgagagc

SEQ ID NO: 2671021 - DNA, 25 bp, Homo sapien
tgaaagaagtctccttatctgagag

SEQ ID NO: 2671022 - DNA, 25 bp, Homo sapien
gaagtctccttatctgagagctgct

SEQ ID NO: 2671023 - DNA, 25 bp, Homo sapien
cattggcactatggggagagggcat

SEQ ID NO: 2671024 - DNA, 25 bp, Homo sapien
ggcattggcactatggggagagggc

SEQ ID NO: 2671025 - DNA, 25 bp, Homo sapien
ctggcattggcactatggggagagg

SEQ ID NO: 2671026 - DNA, 25 bp, Homo sapien
gggagagggcataaaagacctctgg

SEQ ID NO: 2671027 - DNA, 25 bp, Homo sapien
caactctgggaaatttatgcatgga

SEQ ID NO: 2671028 - DNA, 25 bp, Homo sapien
tatataacaaacatgtcagtccaaa

SEQ ID NO: 2671029 - DNA, 25 bp, Homo sapien
caaaggaatgcaccatatagcaaat

SEQ ID NO: 2671030 - DNA, 25 bp, Homo sapien
taaattttgtgaatgatcttggaaa

SEQ ID NO: 2671031 - DNA, 25 bp, Homo sapien
cttagcgtgtattcaccaaatattt

SEQ ID NO: 2671032 - DNA, 25 bp, Homo sapien
aatattttgggcacattgtctccca

SEQ ID NO: 2671033 - DNA, 25 bp, Homo sapien
gggcacattgtctcccacttgctca

SEQ ID NO: 2671034 - DNA, 25 bp, Homo sapien
agcgtgtattcaccaaatattttgg

SEQ ID NO: 2671035 - DNA, 25 bp, Homo sapien
tatcaattttagtccatatggtcaa

SEQ ID NO: 2671036 - DNA, 25 bp, Homo sapien
tgcaggcatcagtgtctattggtgg

SEQ ID NO: 2671037 - DNA, 25 bp, Homo sapien
catatggtcaaagataggtgataga

SEQ ID NO: 2671038 - DNA, 25 bp, Homo sapien
tgcagcactgactttaccactcttt

SEQ ID NO: 2671039 - DNA, 25 bp, Homo sapien
aatcctcccaaactcattttatgag

SEQ ID NO: 2671040 - DNA, 25 bp, Homo sapien
tcctcccaaactcattttatgaggc

SEQ ID NO: 2671041 - DNA, 25 bp, Homo sapien
tattccagttgatagaaaaagaggg

SEQ ID NO: 2671042 - DNA, 25 bp, Homo sapien
tctgaaactattccagttgatagaa

SEQ ID NO: 2671043 - DNA, 25 bp, Homo sapien
aaagcactgtaagtcacgtctctac

SEQ ID NO: 2671044 - DNA, 25 bp, Homo sapien
aagcactgtaagtcacgtctctact

SEQ ID NO: 2671045 - DNA, 25 bp, Homo sapien
caaaagcactgtaagtcacgtctct

SEQ ID NO: 2671046 - DNA, 25 bp, Homo sapien
gcactgtaagtcacgtctctacttc

SEQ ID NO: 2671047 - DNA, 25 bp, Homo sapien
caattaactgtaagtcctgcactga

SEQ ID NO: 2671048 - DNA, 25 bp, Homo sapien
cactgatgtttatgttagattcccc

SEQ ID NO: 2671049 - DNA, 25 bp, Homo sapien
tagattccccagactctaacagagg

SEQ ID NO: 2671050 - DNA, 25 bp, Homo sapien
tgagtgtcagtagtgacggccacat

SEQ ID NO: 2671051 - DNA, 25 bp, Homo sapien
tgaaacagttgtcaatgattttgcc

SEQ ID NO: 2671052 - DNA, 25 bp, Homo sapien
cagttgtcaatgattttgccattca

SEQ ID NO: 2671053 - DNA, 25 bp, Homo sapien
tagccagtgaaacagttgtcaatga

SEQ ID NO: 2671054 - DNA, 25 bp, Homo sapien
gtcaatgattttgccattcataccc

SEQ ID NO: 2671055 - DNA, 25 bp, Homo sapien
cacagagagaatatggccaatggca

SEQ ID NO: 2671056 - DNA, 25 bp, Homo sapien
gatttgctcccgttttgtaaggcca

SEQ ID NO: 2671057 - DNA, 25 bp, Homo sapien
tcttggtcttggatggttagcctcc

SEQ ID NO: 2671058 - DNA, 25 bp, Homo sapien
tacagagggaagacgtgagaagaca

SEQ ID NO: 2671059 - DNA, 25 bp, Homo sapien
ctcttgccgttcctttccattgtat

SEQ ID NO: 2671060 - DNA, 25 bp, Homo sapien
ctcccctcagtccatttacaaaaca

SEQ ID NO: 2671061 - DNA, 25 bp, Homo sapien
cctcagtccatttacaaaacagcat

SEQ ID NO: 2671062 - DNA, 25 bp, Homo sapien
ctctcccctcagtccatttacaaaa

SEQ ID NO: 2671063 - DNA, 25 bp, Homo sapien
caaaacagcatcctatatatataaa

SEQ ID NO: 2671064 - DNA, 25 bp, Homo sapien
aatcctggctgtatcctttgtgtcc

SEQ ID NO: 2671065 - DNA, 25 bp, Homo sapien
taatcctggctgtatcctttgtgtc

SEQ ID NO: 2671066 - DNA, 25 bp, Homo sapien
ctaatcctggctgtatcctttgtgt

SEQ ID NO: 2671067 - DNA, 25 bp, Homo sapien
tgttcttatactcataggctcttcg

SEQ ID NO: 2671068 - DNA, 25 bp, Homo sapien
gttcttatactcataggctcttcgc

SEQ ID NO: 2671069 - DNA, 25 bp, Homo sapien
ttcttatactcataggctcttcgca

SEQ ID NO: 2671070 - DNA, 25 bp, Homo sapien
tcttatactcataggctcttcgcat

SEQ ID NO: 2671071 - DNA, 25 bp, Homo sapien
agttgtctgcgtcaattgctctgag

SEQ ID NO: 2671072 - DNA, 25 bp, Homo sapien
cacataagttgtctgcgtcaattgc

SEQ ID NO: 2671073 - DNA, 25 bp, Homo sapien
cataagttgtctgcgtcaattgctc

SEQ ID NO: 2671074 - DNA, 25 bp, Homo sapien
taagttgtctgcgtcaattgctctg

SEQ ID NO: 2671075 - DNA, 25 bp, Homo sapien
caccccatctccaattagaatgtaa

SEQ ID NO: 2671076 - DNA, 25 bp, Homo sapien
ctcaccccatctccaattagaatgt

SEQ ID NO: 2671077 - DNA, 25 bp, Homo sapien
tcaccccatctccaattagaatgta

SEQ ID NO: 2671078 - DNA, 25 bp, Homo sapien
ctatttgtgtgaacaagatttctta

SEQ ID NO: 2671079 - DNA, 25 bp, Homo sapien
agtagacgagacaaactttctttgc

SEQ ID NO: 2671080 - DNA, 25 bp, Homo sapien
gaccctttactgtaatgcagtgctt

SEQ ID NO: 2671081 - DNA, 25 bp, Homo sapien
tgctcttgaaggaagattatttcag

SEQ ID NO: 2671082 - DNA, 25 bp, Homo sapien
tttcagagaccctttactgtaatgc

SEQ ID NO: 2671083 - DNA, 25 bp, Homo sapien
agatgcctcatagggtcctgctttg

SEQ ID NO: 2671084 - DNA, 25 bp, Homo sapien
tcctgctttgccagtaggtgacact

SEQ ID NO: 2671085 - DNA, 25 bp, Homo sapien
gctaaatctccctttagatgcctca

SEQ ID NO: 2671086 - DNA, 25 bp, Homo sapien
taaacaacatatctggctaaatctc

SEQ ID NO: 2671087 - DNA, 25 bp, Homo sapien
ggctattcacaaggggcaatcatgg

SEQ ID NO: 2671088 - DNA, 25 bp, Homo sapien
gctattcacaaggggcaatcatggt

SEQ ID NO: 2671089 - DNA, 25 bp, Homo sapien
tttgttagagtctagtgactggtac

SEQ ID NO: 2671090 - DNA, 25 bp, Homo sapien
gaattccgaactgtttgttagagtc

SEQ ID NO: 2671091 - DNA, 25 bp, Homo sapien
agtctagtgactggtacttggatgg

SEQ ID NO: 2671092 - DNA, 25 bp, Homo sapien
tggacaccagttgaattccgaactg

SEQ ID NO: 2671093 - DNA, 25 bp, Homo sapien
tcagaaatcctagttccaaaagctt

SEQ ID NO: 2671094 - DNA, 25 bp, Homo sapien
gatttccctgctgtatatggtaaaa

SEQ ID NO: 2671095 - DNA, 25 bp, Homo sapien
taaaaacacgtttcgtgccagcagc

SEQ ID NO: 2671096 - DNA, 25 bp, Homo sapien
gccagcagcagaatatactatacca

SEQ ID NO: 2671097 - DNA, 25 bp, Homo sapien
tctttgacagttcagattgttctct

SEQ ID NO: 2671098 - DNA, 25 bp, Homo sapien
tggtatgaagccagaaacagctgat

SEQ ID NO: 2671099 - DNA, 25 bp, Homo sapien
tcagtaatcgatttaaagcatctta

SEQ ID NO: 2671100 - DNA, 25 bp, Homo sapien
caccaacatacatgattaatcatat

SEQ ID NO: 2671101 - DNA, 25 bp, Homo sapien
tgaaactgatatgtgactccgatcc

SEQ ID NO: 2671102 - DNA, 25 bp, Homo sapien
caacggtctgttaagaatccttgaa

SEQ ID NO: 2671103 - DNA, 25 bp, Homo sapien
tattatagctttccaacggtctgtt

SEQ ID NO: 2671104 - DNA, 25 bp, Homo sapien
gcccagtactgagtagctcatttca

SEQ ID NO: 2671105 - DNA, 25 bp, Homo sapien
ccaccttattccgtcttgttactgc

SEQ ID NO: 2671106 - DNA, 25 bp, Homo sapien
ttccgtcttgttactgccagagtga

SEQ ID NO: 2671107 - DNA, 25 bp, Homo sapien
tactgccagagtgatacaggagttc

SEQ ID NO: 2671108 - DNA, 25 bp, Homo sapien
cagagtgatacaggagttcagctcc

SEQ ID NO: 2671109 - DNA, 25 bp, Homo sapien
acttgtggtgcgacctcgatgatcc

SEQ ID NO: 2671110 - DNA, 25 bp, Homo sapien
ttgattatcaaaagcatctccatgg

SEQ ID NO: 2671111 - DNA, 25 bp, Homo sapien
aagcatctccatggctcttctgtgt

SEQ ID NO: 2671112 - DNA, 25 bp, Homo sapien
atctccatggctcttctgtgtctcc

SEQ ID NO: 2671113 - DNA, 25 bp, Homo sapien
ttatcaaaagcatctccatggctct

SEQ ID NO: 2671114 - DNA, 25 bp, Homo sapien
ctgaaactatttcctgttacttcac

SEQ ID NO: 2671115 - DNA, 25 bp, Homo sapien
cacttcctctttgtctagtatacat

SEQ ID NO: 2671116 - DNA, 25 bp, Homo sapien
actatttcctgttacttcacttcct

SEQ ID NO: 2671117 - DNA, 25 bp, Homo sapien
ttcacttcctctttgtctagtatac

SEQ ID NO: 2671118 - DNA, 25 bp, Homo sapien
cttcatcctgtagatcaggcaaaca

SEQ ID NO: 2671119 - DNA, 25 bp, Homo sapien
cttgaactttgaatgctcagactgt

SEQ ID NO: 2671120 - DNA, 25 bp, Homo sapien
gaactgattgtcttgaaatcttgaa

SEQ ID NO: 2671121 - DNA, 25 bp, Homo sapien
ggcaaacagaactgattgtcttgaa

SEQ ID NO: 2671122 - DNA, 25 bp, Homo sapien
gtgttagattctcctactacactag

SEQ ID NO: 2671123 - DNA, 25 bp, Homo sapien
tagattctcctactacactaggtat

SEQ ID NO: 2671124 - DNA, 25 bp, Homo sapien
gttagattctcctactacactaggt

SEQ ID NO: 2671125 - DNA, 25 bp, Homo sapien
agattctcctactacactaggtatc

SEQ ID NO: 2671126 - DNA, 25 bp, Homo sapien
gtataaatgcattgtctctccttca

SEQ ID NO: 2671127 - DNA, 25 bp, Homo sapien
tacacagcactgtgcgagcctgcag

SEQ ID NO: 2671128 - DNA, 25 bp, Homo sapien
tatctggttgccagagagagattgc

SEQ ID NO: 2671129 - DNA, 25 bp, Homo sapien
tggctggaaacattacacagcactg

SEQ ID NO: 2671130 - DNA, 25 bp, Homo sapien
tgaaattccgttatattagtctcct

SEQ ID NO: 2671131 - DNA, 25 bp, Homo sapien
ccctgaaattccgttatattagtct

SEQ ID NO: 2671132 - DNA, 25 bp, Homo sapien
gcttgccttcacatggtaatgaaac

SEQ ID NO: 2671133 - DNA, 25 bp, Homo sapien
tgccttcacatggtaatgaaaccca

SEQ ID NO: 2671134 - DNA, 25 bp, Homo sapien
agtcctgagacctgagatatgtggg

SEQ ID NO: 2671135 - DNA, 25 bp, Homo sapien
gccttgtagctttcaagtaacagta

SEQ ID NO: 2671136 - DNA, 25 bp, Homo sapien
aactgccgtactgaaccagcccagt

SEQ ID NO: 2671137 - DNA, 25 bp, Homo sapien
agtatttccaactgccgtactgaac

SEQ ID NO: 2671138 - DNA, 25 bp, Homo sapien
taatcctgggaaaatgtcccatcgt

SEQ ID NO: 2671139 - DNA, 25 bp, Homo sapien
cagtaatgtggtgccaggagtcccc

SEQ ID NO: 2671140 - DNA, 25 bp, Homo sapien
gacccatttactgaggttgggacag

SEQ ID NO: 2671141 - DNA, 25 bp, Homo sapien
ctttgctgagacacttaagggagtc

SEQ ID NO: 2671142 - DNA, 25 bp, Homo sapien
tgccacctgggctagttttcttaca

SEQ ID NO: 2671143 - DNA, 25 bp, Homo sapien
tcttacagtctctaataaccttaaa

SEQ ID NO: 2671144 - DNA, 25 bp, Homo sapien
ggtgccatttttgacctgtttattg

SEQ ID NO: 2671145 - DNA, 25 bp, Homo sapien
tgcagtaatgaactactgccacctg

SEQ ID NO: 2671146 - DNA, 25 bp, Homo sapien
ggaaaagaaattgtccatgagggct

SEQ ID NO: 2671147 - DNA, 25 bp, Homo sapien
ttttgcaaagccagtgaaagggcct

SEQ ID NO: 2671148 - DNA, 25 bp, Homo sapien
gatcagtacttttggtataacccca

SEQ ID NO: 2671149 - DNA, 25 bp, Homo sapien
ttttaacggtctgcaaggcaactgc

SEQ ID NO: 2671150 - DNA, 25 bp, Homo sapien
gatgaaacaaggtgactccaagagc

SEQ ID NO: 2671151 - DNA, 25 bp, Homo sapien
caaacaggggtagactctggatgaa

SEQ ID NO: 2671152 - DNA, 25 bp, Homo sapien
aatattttgacttgtctgggcgtta

SEQ ID NO: 2671153 - DNA, 25 bp, Homo sapien
ttaggttctctaactgcactctcct

SEQ ID NO: 2671154 - DNA, 25 bp, Homo sapien
agccatcaagccttgtctgctcttc

SEQ ID NO: 2671155 - DNA, 25 bp, Homo sapien
ccatcaagccttgtctgctcttcat

SEQ ID NO: 2671156 - DNA, 25 bp, Homo sapien
gccatcaagccttgtctgctcttca

SEQ ID NO: 2671157 - DNA, 25 bp, Homo sapien
cagccatcaagccttgtctgctctt

SEQ ID NO: 2671158 - DNA, 25 bp, Homo sapien
tcaaatgaggtaatgctgctttgat

SEQ ID NO: 2671159 - DNA, 25 bp, Homo sapien
gaggtaatgctgctttgatccagtc

SEQ ID NO: 2671160 - DNA, 25 bp, Homo sapien
aaatgaggtaatgctgctttgatcc

SEQ ID NO: 2671161 - DNA, 25 bp, Homo sapien
aatgaggtaatgctgctttgatcca

SEQ ID NO: 2671162 - DNA, 25 bp, Homo sapien
ttggtttcctgcgtgtgccactcat

SEQ ID NO: 2671163 - DNA, 25 bp, Homo sapien
tcgcattggtttcctgcgtgtgcca

SEQ ID NO: 2671164 - DNA, 25 bp, Homo sapien
ccatcgcattggtttcctgcgtgtg

SEQ ID NO: 2671165 - DNA, 25 bp, Homo sapien
gcattggtttcctgcgtgtgccact

SEQ ID NO: 2671166 - DNA, 25 bp, Homo sapien
gattcacatactgtgatatcaggga

SEQ ID NO: 2671167 - DNA, 25 bp, Homo sapien
gggattcacatactgtgatatcagg

SEQ ID NO: 2671168 - DNA, 25 bp, Homo sapien
acatactgtgatatcagggatctga

SEQ ID NO: 2671169 - DNA, 25 bp, Homo sapien
ttcacatactgtgatatcagggatc

SEQ ID NO: 2671170 - DNA, 25 bp, Homo sapien
tgtttaagggcttctccgctcaggc

SEQ ID NO: 2671171 - DNA, 25 bp, Homo sapien
ttaagggcttctccgctcaggcgca

SEQ ID NO: 2671172 - DNA, 25 bp, Homo sapien
aagggcttctccgctcaggcgcacc

SEQ ID NO: 2671173 - DNA, 25 bp, Homo sapien
gtttaagggcttctccgctcaggcg

SEQ ID NO: 2671174 - DNA, 25 bp, Homo sapien
accggagggaagtcaggtcagccac

SEQ ID NO: 2671175 - DNA, 25 bp, Homo sapien
cttagggacgtctttcttctcctgc

SEQ ID NO: 2671176 - DNA, 25 bp, Homo sapien
tgggatggggacgtccagtggggac

SEQ ID NO: 2671177 - DNA, 25 bp, Homo sapien
tctcatcatccttgggtggagggtc

SEQ ID NO: 2671178 - DNA, 25 bp, Homo sapien
aaactcatttccatcgtcaatctta

SEQ ID NO: 2671179 - DNA, 25 bp, Homo sapien
aactcatttccatcgtcaatcttag

SEQ ID NO: 2671180 - DNA, 25 bp, Homo sapien
actcatttccatcgtcaatcttagg

SEQ ID NO: 2671181 - DNA, 25 bp, Homo sapien
ctcatttccatcgtcaatcttaggg

SEQ ID NO: 2671182 - DNA, 25 bp, Homo sapien
aatggttgtctggaaagcttccact

SEQ ID NO: 2671183 - DNA, 25 bp, Homo sapien
tggttgtctggaaagcttccacttt

SEQ ID NO: 2671184 - DNA, 25 bp, Homo sapien
ttggaaatggttgtctggaaagctt

SEQ ID NO: 2671185 - DNA, 25 bp, Homo sapien
gaaatggttgtctggaaagcttcca

SEQ ID NO: 2671186 - DNA, 25 bp, Homo sapien
gagtctcctcggaggccttggccac

SEQ ID NO: 2671187 - DNA, 25 bp, Homo sapien
aggccttggccacaggatccccacg

SEQ ID NO: 2671188 - DNA, 25 bp, Homo sapien
atgagtctcctcggaggccttggcc

SEQ ID NO: 2671189 - DNA, 25 bp, Homo sapien
gccttggccacaggatccccacgtt

SEQ ID NO: 2671190 - DNA, 25 bp, Homo sapien
gcctcatctggctcaagcaccaagg

SEQ ID NO: 2671191 - DNA, 25 bp, Homo sapien
taaagctcagcatagaaggccctca

SEQ ID NO: 2671192 - DNA, 25 bp, Homo sapien
atctggctcaagcaccaaggcccgg

SEQ ID NO: 2671193 - DNA, 25 bp, Homo sapien
ggctcaagcaccaaggcccggtaat

SEQ ID NO: 2671194 - DNA, 25 bp, Homo sapien
tctcttcaccctttgggttgacaat

SEQ ID NO: 2671195 - DNA, 25 bp, Homo sapien
ctttgggttgacaattttctccaag

SEQ ID NO: 2671196 - DNA, 25 bp, Homo sapien
gttgacaattttctccaagttgctg

SEQ ID NO: 2671197 - DNA, 25 bp, Homo sapien
acatagatggcttctcttcaccctt

SEQ ID NO: 2671198 - DNA, 25 bp, Homo sapien
catgtagatcatttattttccttct

SEQ ID NO: 2671199 - DNA, 25 bp, Homo sapien
tcatttattttccttctagtcctgg

SEQ ID NO: 2671200 - DNA, 25 bp, Homo sapien
catttattttccttctagtcctggg

SEQ ID NO: 2671201 - DNA, 25 bp, Homo sapien
agatcatttattttccttctagtcc

SEQ ID NO: 2671202 - DNA, 25 bp, Homo sapien
ctgccattgctttcatataagcttc

SEQ ID NO: 2671203 - DNA, 25 bp, Homo sapien
cagaaagtagtattacttatggtac

SEQ ID NO: 2671204 - DNA, 25 bp, Homo sapien
tcagaaagtagtattacttatggta

SEQ ID NO: 2671205 - DNA, 25 bp, Homo sapien
gatattaaagctaggtactgtgacc

SEQ ID NO: 2671206 - DNA, 25 bp, Homo sapien
gatcactggaaggttctattcagcc

SEQ ID NO: 2671207 - DNA, 25 bp, Homo sapien
taagtccttcatggtcagatgtgga

SEQ ID NO: 2671208 - DNA, 25 bp, Homo sapien
tctctaggtaggacaaggtactcac

SEQ ID NO: 2671209 - DNA, 25 bp, Homo sapien
gcatatgcattagagggcatcccaa

SEQ ID NO: 2671210 - DNA, 25 bp, Homo sapien
tatggcttccggcaggtctagaaag

SEQ ID NO: 2671211 - DNA, 25 bp, Homo sapien
tgaacaccccagattaccaggaaga

SEQ ID NO: 2671212 - DNA, 25 bp, Homo sapien
tggttaagatacaggtgaacacccc

SEQ ID NO: 2671213 - DNA, 25 bp, Homo sapien
gagcaaacaggaatgtgttgtgtct

SEQ ID NO: 2671214 - DNA, 25 bp, Homo sapien
taggtcctttggtgaaaagacatct

SEQ ID NO: 2671215 - DNA, 25 bp, Homo sapien
tcctttggtgaaaagacatctgtgc

SEQ ID NO: 2671216 - DNA, 25 bp, Homo sapien
agcaaacaggaatgtgttgtgtctc

SEQ ID NO: 2671217 - DNA, 25 bp, Homo sapien
cccttgttgatgaggagcgtgctga

SEQ ID NO: 2671218 - DNA, 25 bp, Homo sapien
agagcccttgttgatgaggagcgtg

SEQ ID NO: 2671219 - DNA, 25 bp, Homo sapien
gatgaggagcgtgctgatatcatca

SEQ ID NO: 2671220 - DNA, 25 bp, Homo sapien
tgttgatgaggagcgtgctgatatc

SEQ ID NO: 2671221 - DNA, 25 bp, Homo sapien
ccatgacagaggggaagatggcccg

SEQ ID NO: 2671222 - DNA, 25 bp, Homo sapien
cagaggggaagatggcccgggggca

SEQ ID NO: 2671223 - DNA, 25 bp, Homo sapien
tgacagaggggaagatggcccgggg

SEQ ID NO: 2671224 - DNA, 25 bp, Homo sapien
agaggggaagatggcccgggggcat

SEQ ID NO: 2671225 - DNA, 25 bp, Homo sapien
ggtgctcctcaggagtcatacacag

SEQ ID NO: 2671226 - DNA, 25 bp, Homo sapien
caggagtcatacacagcttgttgta

SEQ ID NO: 2671227 - DNA, 25 bp, Homo sapien
gatctgggtcatcttatgattggcc

SEQ ID NO: 2671228 - DNA, 25 bp, Homo sapien
ctgaaggtctcgaacgtgatctggg

SEQ ID NO: 2671229 - DNA, 25 bp, Homo sapien
actcgtagatgggcagtgtgggtga

SEQ ID NO: 2671230 - DNA, 25 bp, Homo sapien
cactcgtagatgggcagtgtgggtg

SEQ ID NO: 2671231 - DNA, 25 bp, Homo sapien
ctcgtagatgggcagtgtgggtgac

SEQ ID NO: 2671232 - DNA, 25 bp, Homo sapien
gtagcgcccactcggtgaggatctt

SEQ ID NO: 2671233 - DNA, 25 bp, Homo sapien
ggtgaagctgtagcgcccactcggt

SEQ ID NO: 2671234 - DNA, 25 bp, Homo sapien
tggtgaagctgtagcgcccactcgg

SEQ ID NO: 2671235 - DNA, 25 bp, Homo sapien
agctgtagcgcccactcggtgagga

SEQ ID NO: 2671236 - DNA, 25 bp, Homo sapien
ctggctatcgggaggtcgggcagct

SEQ ID NO: 2671237 - DNA, 25 bp, Homo sapien
ctatcgggaggtcgggcagctcgta

SEQ ID NO: 2671238 - DNA, 25 bp, Homo sapien
gatgacctggctatcgggaggtcgg

SEQ ID NO: 2671239 - DNA, 25 bp, Homo sapien
ggtcgggcagctcgtagatcttctc

SEQ ID NO: 2671240 - DNA, 25 bp, Homo sapien
gaagagggcctgggggctgtggaac

SEQ ID NO: 2671241 - DNA, 25 bp, Homo sapien
tggaagagggcctgggggctgtgga

SEQ ID NO: 2671242 - DNA, 25 bp, Homo sapien
ggaagagggcctgggggctgtggaa

SEQ ID NO: 2671243 - DNA, 25 bp, Homo sapien
gacagccctgtgttggcatgcaggt

SEQ ID NO: 2671244 - DNA, 25 bp, Homo sapien
gttgacagtaggatgccacaggatt

SEQ ID NO: 2671245 - DNA, 25 bp, Homo sapien
catgatggagttgacagtaggatgc

SEQ ID NO: 2671246 - DNA, 25 bp, Homo sapien
tccagaggagcaacggcaccagggt

SEQ ID NO: 2671247 - DNA, 25 bp, Homo sapien
caggatggagtcgctgatccacacg

SEQ ID NO: 2671248 - DNA, 25 bp, Homo sapien
tggagtcgctgatccacacggagta

SEQ ID NO: 2671249 - DNA, 25 bp, Homo sapien
gtcgctgatccacacggagtactaa

SEQ ID NO: 2671250 - DNA, 25 bp, Homo sapien
tcgctgatccacacggagtactaac

SEQ ID NO: 2671251 - DNA, 25 bp, Homo sapien
ctaagttacaatccgcctagaacac

SEQ ID NO: 2671252 - DNA, 25 bp, Homo sapien
gggtcaggctcgtcgtattccttgc

SEQ ID NO: 2671253 - DNA, 25 bp, Homo sapien
ggctcgtcgtattccttgctgatcc

SEQ ID NO: 2671254 - DNA, 25 bp, Homo sapien
cctagaacacttgcggtggatgagg

SEQ ID NO: 2671255 - DNA, 25 bp, Homo sapien
ctatcacctcccctttgtgggctca

SEQ ID NO: 2671256 - DNA, 25 bp, Homo sapien
ctcccctttgtgggctcagaagagg

SEQ ID NO: 2671257 - DNA, 25 bp, Homo sapien
atcacctcccctttgtgggctcaga

SEQ ID NO: 2671258 - DNA, 25 bp, Homo sapien
tcaagtcagtgtataggtaagtcct

SEQ ID NO: 2671259 - DNA, 25 bp, Homo sapien
gagtgggatccggagaagggctcat

SEQ ID NO: 2671260 - DNA, 25 bp, Homo sapien
ctaaacctcttgagcacgcagtctg

SEQ ID NO: 2671261 - DNA, 25 bp, Homo sapien
cttgagcacgcagtctgttggcttc

SEQ ID NO: 2671262 - DNA, 25 bp, Homo sapien
ggggagaagagtgcaatttgcatct

SEQ ID NO: 2671263 - DNA, 25 bp, Homo sapien
gcccatgagctattatctacttgga

SEQ ID NO: 2671264 - DNA, 25 bp, Homo sapien
gagcccatgagctattatctacttg

SEQ ID NO: 2671265 - DNA, 25 bp, Homo sapien
catgagctattatctacttggatct

SEQ ID NO: 2671266 - DNA, 25 bp, Homo sapien
gctattatctacttggatctgtccc

SEQ ID NO: 2671267 - DNA, 25 bp, Homo sapien
taattacttcataaagttccagggc

SEQ ID NO: 2671268 - DNA, 25 bp, Homo sapien
atctcatttaccaaggagctgcagt

SEQ ID NO: 2671269 - DNA, 25 bp, Homo sapien
ggtgagcaaaaatactggggacagt

SEQ ID NO: 2671270 - DNA, 25 bp, Homo sapien
tccagggctatgacatttgatccaa

SEQ ID NO: 2671271 - DNA, 25 bp, Homo sapien
ctccctaagttgaggaatttcacag

SEQ ID NO: 2671272 - DNA, 25 bp, Homo sapien
tagctcatcagaggactgtctgctt

SEQ ID NO: 2671273 - DNA, 25 bp, Homo sapien
gcaaacttttccagcttgtgaactc

SEQ ID NO: 2671274 - DNA, 25 bp, Homo sapien
ttcctcttaaagcttagccgcacaa

SEQ ID NO: 2671275 - DNA, 25 bp, Homo sapien
caatcccataacctctatgactctc

SEQ ID NO: 2671276 - DNA, 25 bp, Homo sapien
gccaatcccataacctctatgactc

SEQ ID NO: 2671277 - DNA, 25 bp, Homo sapien
atcccataacctctatgactctctt

SEQ ID NO: 2671278 - DNA, 25 bp, Homo sapien
ccccagaaactggtttcaagccaat

SEQ ID NO: 2671279 - DNA, 25 bp, Homo sapien
ttagctaccctgcacggcggtagca

SEQ ID NO: 2671280 - DNA, 25 bp, Homo sapien
gcatcaaatgatcttccgcaatatt

SEQ ID NO: 2671281 - DNA, 25 bp, Homo sapien
ccctgcacggcggtagcatcaaatg

SEQ ID NO: 2671282 - DNA, 25 bp, Homo sapien
cacggcggtagcatcaaatgatctt

SEQ ID NO: 2671283 - DNA, 25 bp, Homo sapien
cagtaggaatagacgtagacacaca

SEQ ID NO: 2671284 - DNA, 25 bp, Homo sapien
gtaggaatagacgtagacacacaag

SEQ ID NO: 2671285 - DNA, 25 bp, Homo sapien
atttacagtaggaatagacgtagac

SEQ ID NO: 2671286 - DNA, 25 bp, Homo sapien
aggaatagacgtagacacacaagca

SEQ ID NO: 2671287 - DNA, 25 bp, Homo sapien
cttcatcaatcgtttattgttttca

SEQ ID NO: 2671288 - DNA, 25 bp, Homo sapien
tgctattcggcgcatggatggggat

SEQ ID NO: 2671289 - DNA, 25 bp, Homo sapien
gatggggatagttggcactgctata

SEQ ID NO: 2671290 - DNA, 25 bp, Homo sapien
gctataagccttctaatccgagcag

SEQ ID NO: 2671291 - DNA, 25 bp, Homo sapien
agtccattgtcaacactactgtatg

SEQ ID NO: 2671292 - DNA, 25 bp, Homo sapien
cactactgtatgagtgctgtttcca

SEQ ID NO: 2671293 - DNA, 25 bp, Homo sapien
tgtcaacactactgtatgagtgctg

SEQ ID NO: 2671294 - DNA, 25 bp, Homo sapien
taatcatattccagtccattgtcaa

SEQ ID NO: 2671295 - DNA, 25 bp, Homo sapien
tgttgaagttcagaggaatagctca

SEQ ID NO: 2671296 - DNA, 25 bp, Homo sapien
gttgaagttcagaggaatagctcat

SEQ ID NO: 2671297 - DNA, 25 bp, Homo sapien
gcattttctgggtaccataagtcca

SEQ ID NO: 2671298 - DNA, 25 bp, Homo sapien
caacaagtgacccttggcagaaagg

SEQ ID NO: 2671299 - DNA, 25 bp, Homo sapien
cataagtccaaaaggagaactctga

SEQ ID NO: 2671300 - DNA, 25 bp, Homo sapien
gtctttgtgcccaaggtaaggtgca

SEQ ID NO: 2671301 - DNA, 25 bp, Homo sapien
gctctatcctgtggcacttagccgt

SEQ ID NO: 2671302 - DNA, 25 bp, Homo sapien
ccagtcaaaaccaatgaatttggtc

SEQ ID NO: 2671303 - DNA, 25 bp, Homo sapien
gccgtgagactagctgaactcattt

SEQ ID NO: 2671304 - DNA, 25 bp, Homo sapien
cacgttccactaggtcctggaggag

SEQ ID NO: 2671305 - DNA, 25 bp, Homo sapien
tggtgaagtccactaaaagcagaaa

SEQ ID NO: 2671306 - DNA, 25 bp, Homo sapien
aagcagaaacatgtgttcaattttt

SEQ ID NO: 2671307 - DNA, 25 bp, Homo sapien
ccattggtgaagtccactaaaagca

SEQ ID NO: 2671308 - DNA, 25 bp, Homo sapien
aagtagttatttgcatgtctggagc

SEQ ID NO: 2671309 - DNA, 25 bp, Homo sapien
tcctttctgctccagtgtgcttttc

SEQ ID NO: 2671310 - DNA, 25 bp, Homo sapien
ttcctttctgctccagtgtgctttt

SEQ ID NO: 2671311 - DNA, 25 bp, Homo sapien
tgctccagtgtgcttttcatcctgg

SEQ ID NO: 2671312 - DNA, 25 bp, Homo sapien
ttctgctccagtgtgcttttcatcc

SEQ ID NO: 2671313 - DNA, 25 bp, Homo sapien
tactgatcaggttcagttacccttg

SEQ ID NO: 2671314 - DNA, 25 bp, Homo sapien
atgtttgtggatcaggcattgtgtc

SEQ ID NO: 2671315 - DNA, 25 bp, Homo sapien
gttcagttacccttgctatgttgtg

SEQ ID NO: 2671316 - DNA, 25 bp, Homo sapien
gattcaatgtttgtggatcaggcat

SEQ ID NO: 2671317 - DNA, 25 bp, Homo sapien
ttttccacaaggctagagtctgaca

SEQ ID NO: 2671318 - DNA, 25 bp, Homo sapien
gactaatgcaatcagagaagccgga

SEQ ID NO: 2671319 - DNA, 25 bp, Homo sapien
taaggatcagcctctaagtttgaca

SEQ ID NO: 2671320 - DNA, 25 bp, Homo sapien
ttacagtcctgaatagaaattgagc

SEQ ID NO: 2671321 - DNA, 25 bp, Homo sapien
cactggatccttttctgaccacttt

SEQ ID NO: 2671322 - DNA, 25 bp, Homo sapien
ccactggatccttttctgaccactt

SEQ ID NO: 2671323 - DNA, 25 bp, Homo sapien
gccactggatccttttctgaccact

SEQ ID NO: 2671324 - DNA, 25 bp, Homo sapien
tgaaacctggtcctcttcaatgact

SEQ ID NO: 2671325 - DNA, 25 bp, Homo sapien
ctcatagtcatcaattctctggcct

SEQ ID NO: 2671326 - DNA, 25 bp, Homo sapien
ttgtttctgaaacctggtcctcttc

SEQ ID NO: 2671327 - DNA, 25 bp, Homo sapien
ggcctcaactcccttctgatgacta

SEQ ID NO: 2671328 - DNA, 25 bp, Homo sapien
gactcaacagaattcagggcatctt

SEQ ID NO: 2671329 - DNA, 25 bp, Homo sapien
actcaacagaattcagggcatcttc

SEQ ID NO: 2671330 - DNA, 25 bp, Homo sapien
tcaacagaattcagggcatcttcag

SEQ ID NO: 2671331 - DNA, 25 bp, Homo sapien
tgactcaacagaattcagggcatct

SEQ ID NO: 2671332 - DNA, 25 bp, Homo sapien
gtgatccaagtccagataaacttga

SEQ ID NO: 2671333 - DNA, 25 bp, Homo sapien
taaaagctgtgttcagtgatcactg

SEQ ID NO: 2671334 - DNA, 25 bp, Homo sapien
agaacatgttctagatcactctcac

SEQ ID NO: 2671335 - DNA, 25 bp, Homo sapien
atattcagcttctgggcggttgtga

SEQ ID NO: 2671336 - DNA, 25 bp, Homo sapien
ctccatgtactctcacttgggccat

SEQ ID NO: 2671337 - DNA, 25 bp, Homo sapien
tctccatgtactctcacttgggcca

SEQ ID NO: 2671338 - DNA, 25 bp, Homo sapien
agtttaaattggctatcctaactct

SEQ ID NO: 2671339 - DNA, 25 bp, Homo sapien
gtttaaattggctatcctaactctg

SEQ ID NO: 2671340 - DNA, 25 bp, Homo sapien
taaattggctatcctaactctgtat

SEQ ID NO: 2671341 - DNA, 25 bp, Homo sapien
aattggctatcctaactctgtattt

SEQ ID NO: 2671342 - DNA, 25 bp, Homo sapien
catataacataaacggtcacaaaca

SEQ ID NO: 2671343 - DNA, 25 bp, Homo sapien
acataaacggtcacaaacaataaat

SEQ ID NO: 2671344 - DNA, 25 bp, Homo sapien
ctcacatataacataaacggtcaca

SEQ ID NO: 2671345 - DNA, 25 bp, Homo sapien
taacataaacggtcacaaacaataa

SEQ ID NO: 2671346 - DNA, 25 bp, Homo sapien
ctccggtagagattgaggatgtggc

SEQ ID NO: 2671347 - DNA, 25 bp, Homo sapien
ttgaggatgtggcagaaagcaatgt

SEQ ID NO: 2671348 - DNA, 25 bp, Homo sapien
ggatgtggcagaaagcaatgtatag

SEQ ID NO: 2671349 - DNA, 25 bp, Homo sapien
gaggatgtggcagaaagcaatgtat

SEQ ID NO: 2671350 - DNA, 25 bp, Homo sapien
ctcgcccatctgctccacgctctga

SEQ ID NO: 2671351 - DNA, 25 bp, Homo sapien
ctctgaacccgcgtgccttcccaca

SEQ ID NO: 2671352 - DNA, 25 bp, Homo sapien
tcgcccatctgctccacgctctgaa

SEQ ID NO: 2671353 - DNA, 25 bp, Homo sapien
cccatctgctccacgctctgaaccc

SEQ ID NO: 2671354 - DNA, 25 bp, Homo sapien
caaagccgttgaggcccagcgtctc

SEQ ID NO: 2671355 - DNA, 25 bp, Homo sapien
gcccagcgtctccccacggatgcgg

SEQ ID NO: 2671356 - DNA, 25 bp, Homo sapien
agcgtctccccacggatgcgggccg

SEQ ID NO: 2671357 - DNA, 25 bp, Homo sapien
ccagcgtctccccacggatgcgggc

SEQ ID NO: 2671358 - DNA, 25 bp, Homo sapien
gctgaagggctccgactcatgcatg

SEQ ID NO: 2671359 - DNA, 25 bp, Homo sapien
agctgaagggctccgactcatgcat

SEQ ID NO: 2671360 - DNA, 25 bp, Homo sapien
gatcccttccatggcggcagaaagt

SEQ ID NO: 2671361 - DNA, 25 bp, Homo sapien
agggatgatcccttccatggcggca

SEQ ID NO: 2671362 - DNA, 25 bp, Homo sapien
atgatcccttccatggcggcagaaa

SEQ ID NO: 2671363 - DNA, 25 bp, Homo sapien
ggatgatcccttccatggcggcaga

SEQ ID NO: 2671364 - DNA, 25 bp, Homo sapien
tcgttggggtgctctcgattgtcca

SEQ ID NO: 2671365 - DNA, 25 bp, Homo sapien
ctattgctcgttggggtgctctcga

SEQ ID NO: 2671366 - DNA, 25 bp, Homo sapien
ctcgattgtccacgtgttttgtggg

SEQ ID NO: 2671367 - DNA, 25 bp, Homo sapien
gggtgctctcgattgtccacgtgtt

SEQ ID NO: 2671368 - DNA, 25 bp, Homo sapien
tcctagtctttcagcgcttccgtaa

SEQ ID NO: 2671369 - DNA, 25 bp, Homo sapien
caacattgtagagcagggtgttcag

SEQ ID NO: 2671370 - DNA, 25 bp, Homo sapien
gaatcagttacaaagaccatccgat

SEQ ID NO: 2671371 - DNA, 25 bp, Homo sapien
tggtcccaagtgtatctgagtgatt

SEQ ID NO: 2671372 - DNA, 25 bp, Homo sapien
gcagttcagacgtgagacacttctc

SEQ ID NO: 2671373 - DNA, 25 bp, Homo sapien
tcaggatgcagttcagacgtgagac

SEQ ID NO: 2671374 - DNA, 25 bp, Homo sapien
gggcctgtattgtcttcaatcctat

SEQ ID NO: 2671375 - DNA, 25 bp, Homo sapien
tacaggggcctgtattgtcttcaat

SEQ ID NO: 2671376 - DNA, 25 bp, Homo sapien
ctagttgatacaaatctaataggat

SEQ ID NO: 2671377 - DNA, 25 bp, Homo sapien
agtgggtttgttcatagacaatctg

SEQ ID NO: 2671378 - DNA, 25 bp, Homo sapien
aactagttgatacaaatctaatagg

SEQ ID NO: 2671379 - DNA, 25 bp, Homo sapien
gtttgttcatagacaatctgacaag

SEQ ID NO: 2671380 - DNA, 25 bp, Homo sapien
tacactgaacgctaaatgtccacct

SEQ ID NO: 2671381 - DNA, 25 bp, Homo sapien
tacagtaatggtaactcacactaaa

SEQ ID NO: 2671382 - DNA, 25 bp, Homo sapien
ggaatgtacctatacaaaggctcaa

SEQ ID NO: 2671383 - DNA, 25 bp, Homo sapien
aaaacatacttctaatagccattat

SEQ ID NO: 2671384 - DNA, 25 bp, Homo sapien
tccagttccactgtgagcaccacca

SEQ ID NO: 2671385 - DNA, 25 bp, Homo sapien
tgagcaccaccaagacctatctact

SEQ ID NO: 2671386 - DNA, 25 bp, Homo sapien
tctacttcttggatctctttgcttt

SEQ ID NO: 2671387 - DNA, 25 bp, Homo sapien
cctatctacttcttggatctctttg

SEQ ID NO: 2671388 - DNA, 25 bp, Homo sapien
gatcttcttagattgtgcggcactc

SEQ ID NO: 2671389 - DNA, 25 bp, Homo sapien
gccaccttggactacatccacttta

SEQ ID NO: 2671390 - DNA, 25 bp, Homo sapien
ttagtgtgacagtggaagcctctcc

SEQ ID NO: 2671391 - DNA, 25 bp, Homo sapien
tgcggcactcatttctccaggttgg

SEQ ID NO: 2671392 - DNA, 25 bp, Homo sapien
gcttgcccagtaaaatccaatttgg

SEQ ID NO: 2671393 - DNA, 25 bp, Homo sapien
tccaatttggtgctcagttgagtag

SEQ ID NO: 2671394 - DNA, 25 bp, Homo sapien
ttctcctgatttgaccgctgctgcc

SEQ ID NO: 2671395 - DNA, 25 bp, Homo sapien
tagttttaggatccatgctaattct

SEQ ID NO: 2671396 - DNA, 25 bp, Homo sapien
gtggctctataggaattcagcagtg

SEQ ID NO: 2671397 - DNA, 25 bp, Homo sapien
ctgcttctaaatcttcttgcacagg

SEQ ID NO: 2671398 - DNA, 25 bp, Homo sapien
tctgcttctaaatcttcttgcacag

SEQ ID NO: 2671399 - DNA, 25 bp, Homo sapien
tttctccgttggttaatacagtgga

SEQ ID NO: 2671400 - DNA, 25 bp, Homo sapien
gctgtttctccgttggttaatacag

SEQ ID NO: 2671401 - DNA, 25 bp, Homo sapien
aagcccacattcatagaatgtttga

SEQ ID NO: 2671402 - DNA, 25 bp, Homo sapien
tattttacactgcttcttgagacac

SEQ ID NO: 2671403 - DNA, 25 bp, Homo sapien
aagcaaatgaagtatattcaacagc

SEQ ID NO: 2671404 - DNA, 25 bp, Homo sapien
gcaaatgaagtatattcaacagctc

SEQ ID NO: 2671405 - DNA, 25 bp, Homo sapien
caaatgaagtatattcaacagctcc

SEQ ID NO: 2671406 - DNA, 25 bp, Homo sapien
aaatgaagtatattcaacagctcct

SEQ ID NO: 2671407 - DNA, 25 bp, Homo sapien
atttccgtcatatttgtaaaactca

SEQ ID NO: 2671408 - DNA, 25 bp, Homo sapien
tttccgtcatatttgtaaaactcat

SEQ ID NO: 2671409 - DNA, 25 bp, Homo sapien
gagttcaactgcagggataagaaaa

SEQ ID NO: 2671410 - DNA, 25 bp, Homo sapien
tgcagggataagaaaagccagggtt

SEQ ID NO: 2671411 - DNA, 25 bp, Homo sapien
catgagttcaactgcagggataaga

SEQ ID NO: 2671412 - DNA, 25 bp, Homo sapien
ctgcagggataagaaaagccagggt

SEQ ID NO: 2671413 - DNA, 25 bp, Homo sapien
gtttccatggctagttctccaatag

SEQ ID NO: 2671414 - DNA, 25 bp, Homo sapien
ccatggctagttctccaataggtga

SEQ ID NO: 2671415 - DNA, 25 bp, Homo sapien
tccatggctagttctccaataggtg

SEQ ID NO: 2671416 - DNA, 25 bp, Homo sapien
aaagtttccatggctagttctccaa

SEQ ID NO: 2671417 - DNA, 25 bp, Homo sapien
ataggtatgcacgtggtgagtcatt

SEQ ID NO: 2671418 - DNA, 25 bp, Homo sapien
aacccataggtatgcacgtggtgag

SEQ ID NO: 2671419 - DNA, 25 bp, Homo sapien
cccataggtatgcacgtggtgagtc

SEQ ID NO: 2671420 - DNA, 25 bp, Homo sapien
ggtatgcacgtggtgagtcattagc

SEQ ID NO: 2671421 - DNA, 25 bp, Homo sapien
gtctatgagttagcaaaagtttaat

SEQ ID NO: 2671422 - DNA, 25 bp, Homo sapien
gtctgtctatgagttagcaaaagtt

SEQ ID NO: 2671423 - DNA, 25 bp, Homo sapien
agcatagtctgtctatgagttagca

SEQ ID NO: 2671424 - DNA, 25 bp, Homo sapien
tagtctgtctatgagttagcaaaag

SEQ ID NO: 2671425 - DNA, 25 bp, Homo sapien
gtttcattagcattatcatcatcat

SEQ ID NO: 2671426 - DNA, 25 bp, Homo sapien
tgtttcattagcattatcatcatca

SEQ ID NO: 2671427 - DNA, 25 bp, Homo sapien
actgtttcattagcattatcatcat

SEQ ID NO: 2671428 - DNA, 25 bp, Homo sapien
tcattagcattatcatcatcatcac

SEQ ID NO: 2671429 - DNA, 25 bp, Homo sapien
atgtaaagagcagaaggaatctgtt

SEQ ID NO: 2671430 - DNA, 25 bp, Homo sapien
ggaatctgttttcataaggacaaac

SEQ ID NO: 2671431 - DNA, 25 bp, Homo sapien
cttctttcagttcttaaggaatgta

SEQ ID NO: 2671432 - DNA, 25 bp, Homo sapien
aacatatccttgctcaagaccatac

SEQ ID NO: 2671433 - DNA, 25 bp, Homo sapien
aactcacagtggtatttcatggaca

SEQ ID NO: 2671434 - DNA, 25 bp, Homo sapien
gaatggccaagatgagcaaataaat

SEQ ID NO: 2671435 - DNA, 25 bp, Homo sapien
tcagcaactcacagtggtatttcat

SEQ ID NO: 2671436 - DNA, 25 bp, Homo sapien
tgagcaaataaatgtagttcagcaa

SEQ ID NO: 2671437 - DNA, 25 bp, Homo sapien
ggaagaatgtggttgtatgcttact

SEQ ID NO: 2671438 - DNA, 25 bp, Homo sapien
ctgcgctggagaattggaagaatgt

SEQ ID NO: 2671439 - DNA, 25 bp, Homo sapien
aagaatgtggttgtatgcttacttt

SEQ ID NO: 2671440 - DNA, 25 bp, Homo sapien
aatgtggttgtatgcttactttgct

SEQ ID NO: 2671441 - DNA, 25 bp, Homo sapien
actgaacaatgcagtccacttcagt

SEQ ID NO: 2671442 - DNA, 25 bp, Homo sapien
catctgtgcacaatagtgttcccaa

SEQ ID NO: 2671443 - DNA, 25 bp, Homo sapien
tcttgctgccacatctgtgcacaat

SEQ ID NO: 2671444 - DNA, 25 bp, Homo sapien
aatgcagtccacttcagtaatgtcc

SEQ ID NO: 2671445 - DNA, 25 bp, Homo sapien
catttaggcctctggctgttctacc

SEQ ID NO: 2671446 - DNA, 25 bp, Homo sapien
ttaggcctctggctgttctacccac

SEQ ID NO: 2671447 - DNA, 25 bp, Homo sapien
ccaattttctctcccatttaggcct

SEQ ID NO: 2671448 - DNA, 25 bp, Homo sapien
tttctctcccatttaggcctctggc

SEQ ID NO: 2671449 - DNA, 25 bp, Homo sapien
tgctcttgactttcagatcaataaa

SEQ ID NO: 2671450 - DNA, 25 bp, Homo sapien
cttgactttcagatcaataaaggga

SEQ ID NO: 2671451 - DNA, 25 bp, Homo sapien
tcttgactttcagatcaataaaggg

SEQ ID NO: 2671452 - DNA, 25 bp, Homo sapien
gctcttgactttcagatcaataaag

SEQ ID NO: 2671453 - DNA, 25 bp, Homo sapien
ctgttttggaatcttagctgaacta

SEQ ID NO: 2671454 - DNA, 25 bp, Homo sapien
tgttttggaatcttagctgaactat

SEQ ID NO: 2671455 - DNA, 25 bp, Homo sapien
aatctcttaggaaagtcaattctaa

SEQ ID NO: 2671456 - DNA, 25 bp, Homo sapien
gaatctcttaggaaagtcaattcta

SEQ ID NO: 2671457 - DNA, 25 bp, Homo sapien
tctgcttatgctttagcttttcaaa

SEQ ID NO: 2671458 - DNA, 25 bp, Homo sapien
ggaatctcttaggaaagtcaattct

SEQ ID NO: 2671459 - DNA, 25 bp, Homo sapien
gagtgatccaggcagtgattggtat

SEQ ID NO: 2671460 - DNA, 25 bp, Homo sapien
cagcagagtgatccaggcagtgatt

SEQ ID NO: 2671461 - DNA, 25 bp, Homo sapien
ttacgatccagcaaaggcagcagca

SEQ ID NO: 2671462 - DNA, 25 bp, Homo sapien
ctggagttccagctagcttacgatc

SEQ ID NO: 2671463 - DNA, 25 bp, Homo sapien
gtcccagctgggtctgtccatcaat

SEQ ID NO: 2671464 - DNA, 25 bp, Homo sapien
gactggtgcagacttctatgtgaaa

SEQ ID NO: 2671465 - DNA, 25 bp, Homo sapien
aatgtgaggaatgcatgactggtgc

SEQ ID NO: 2671466 - DNA, 25 bp, Homo sapien
tatcgagttgttaatgcgctcttca

SEQ ID NO: 2671467 - DNA, 25 bp, Homo sapien
ggaatccagcgatcttacctgacca

SEQ ID NO: 2671468 - DNA, 25 bp, Homo sapien
gaccacctaaggtgccagtgtgcct

SEQ ID NO: 2671469 - DNA, 25 bp, Homo sapien
tctccgtaaatgatccttaagggtc

SEQ ID NO: 2671470 - DNA, 25 bp, Homo sapien
tctaaaatgggtacagtggcgggaa

SEQ ID NO: 2671471 - DNA, 25 bp, Homo sapien
tctccgactccagaatgagctctgg

SEQ ID NO: 2671472 - DNA, 25 bp, Homo sapien
tagcccgatttctccgccatctagg

SEQ ID NO: 2671473 - DNA, 25 bp, Homo sapien
gaaaataagccgcaagccacgcggc

SEQ ID NO: 2671474 - DNA, 25 bp, Homo sapien
cagcgcgacgcttgccagctgggaa

SEQ ID NO: 2671475 - DNA, 25 bp, Homo sapien
aactaggatctagccggttccaggc

SEQ ID NO: 2671476 - DNA, 25 bp, Homo sapien
ggatcccattttgtagtcccgggca

SEQ ID NO: 2671477 - DNA, 25 bp, Homo sapien
ttttcttccaggcaaacgcagccgc

SEQ ID NO: 2671478 - DNA, 25 bp, Homo sapien
ggcagatttataccccacaggtgga

SEQ ID NO: 2671479 - DNA, 25 bp, Homo sapien
attagccagccactcgctcccaaga

SEQ ID NO: 2671480 - DNA, 25 bp, Homo sapien
cactcgctcccaagaaggccttaaa

SEQ ID NO: 2671481 - DNA, 25 bp, Homo sapien
cgctcccaagaaggccttaaaagct

SEQ ID NO: 2671482 - DNA, 25 bp, Homo sapien
gccactcgctcccaagaaggcctta

SEQ ID NO: 2671483 - DNA, 25 bp, Homo sapien
tcatcacccgctcgtagacaacggg

SEQ ID NO: 2671484 - DNA, 25 bp, Homo sapien
aaaagcatttgggagccgcttgcca

SEQ ID NO: 2671485 - DNA, 25 bp, Homo sapien
tgctctcaccgctcaaaacggcagg

SEQ ID NO: 2671486 - DNA, 25 bp, Homo sapien
ttggcgtgagcaatgcactcgcgga

SEQ ID NO: 2671487 - DNA, 25 bp, Homo sapien
ccctgaacttcggaacacgcaggac

SEQ ID NO: 2671488 - DNA, 25 bp, Homo sapien
gggcccctgaacttcggaacacgca

SEQ ID NO: 2671489 - DNA, 25 bp, Homo sapien
gcccctgaacttcggaacacgcagg

SEQ ID NO: 2671490 - DNA, 25 bp, Homo sapien
gatcagggggcccctgaacttcgga

SEQ ID NO: 2671491 - DNA, 25 bp, Homo sapien
gaggctcaggtgttctagtttgaca

SEQ ID NO: 2671492 - DNA, 25 bp, Homo sapien
aattcgctggcagctgtgcgaggct

SEQ ID NO: 2671493 - DNA, 25 bp, Homo sapien
tgtgcgaggctcaggtgttctagtt

SEQ ID NO: 2671494 - DNA, 25 bp, Homo sapien
gaactgccgccggaattcgctggca

SEQ ID NO: 2671495 - DNA, 25 bp, Homo sapien
caaagaccgtgagcgactgctgaga

SEQ ID NO: 2671496 - DNA, 25 bp, Homo sapien
gcggcccggatatctctgcgcggca

SEQ ID NO: 2671497 - DNA, 25 bp, Homo sapien
tcggcgggcgtggacctccaagagg

SEQ ID NO: 2671498 - DNA, 25 bp, Homo sapien
actgctgagacgagtcccgagcgcg

SEQ ID NO: 2671499 - DNA, 25 bp, Homo sapien
gcccgtgtagcagatggggcgccac

SEQ ID NO: 2671500 - DNA, 25 bp, Homo sapien
ttcaggcccgtgtagcagatggggc

SEQ ID NO: 2671501 - DNA, 25 bp, Homo sapien
cttcaggcccgtgtagcagatgggg

SEQ ID NO: 2671502 - DNA, 25 bp, Homo sapien
ccgtggctgcggcatgggccggggg

SEQ ID NO: 2671503 - DNA, 25 bp, Homo sapien
gcccgtggctgcggcatgggccggg

SEQ ID NO: 2671504 - DNA, 25 bp, Homo sapien
tggctgcggcatgggccggggggcg

SEQ ID NO: 2671505 - DNA, 25 bp, Homo sapien
ggcccgtggctgcggcatgggccgg

SEQ ID NO: 2671506 - DNA, 25 bp, Homo sapien
cgctgctcaacctcggcggcggcag

SEQ ID NO: 2671507 - DNA, 25 bp, Homo sapien
catgcccgtccatgcaggtctcgtg

SEQ ID NO: 2671508 - DNA, 25 bp, Homo sapien
gggctgcggcgctgctcaacctcgg

SEQ ID NO: 2671509 - DNA, 25 bp, Homo sapien
aaggtgctgctctcaagcccatgcc

SEQ ID NO: 2671510 - DNA, 25 bp, Homo sapien
gaaggcagcatggttatctgtcaac

SEQ ID NO: 2671511 - DNA, 25 bp, Homo sapien
aacacgagcttttcccgggaggctg

SEQ ID NO: 2671512 - DNA, 25 bp, Homo sapien
tggtagaaggctcatttgcaggctt

SEQ ID NO: 2671513 - DNA, 25 bp, Homo sapien
gaagacacccggctagtcacaaaac

SEQ ID NO: 2671514 - DNA, 25 bp, Homo sapien
aagaagataagaccaaacatttgta

SEQ ID NO: 2671515 - DNA, 25 bp, Homo sapien
gagttcaggtgagaagtcagggaca

SEQ ID NO: 2671516 - DNA, 25 bp, Homo sapien
ttctggattcgacattgggctggct

SEQ ID NO: 2671517 - DNA, 25 bp, Homo sapien
gacacgaagtccgtggtgcatttct

SEQ ID NO: 2671518 - DNA, 25 bp, Homo sapien
ctcagagtcaaagccgtcaacggca

SEQ ID NO: 2671519 - DNA, 25 bp, Homo sapien
tggtataccaggttgccacggcagg

SEQ ID NO: 2671520 - DNA, 25 bp, Homo sapien
gccagcataggcacgcaaggccttg

SEQ ID NO: 2671521 - DNA, 25 bp, Homo sapien
tttgaagttcgctgggtgcagccag

SEQ ID NO: 2671522 - DNA, 25 bp, Homo sapien
gatgtgggtccatccttggaacaat

SEQ ID NO: 2671523 - DNA, 25 bp, Homo sapien
tccagcgtggctgtgatagttgcaa

SEQ ID NO: 2671524 - DNA, 25 bp, Homo sapien
ccagcgtggctgtgatagttgcaag

SEQ ID NO: 2671525 - DNA, 25 bp, Homo sapien
tttgcatgtttggaagttatccttg

SEQ ID NO: 2671526 - DNA, 25 bp, Homo sapien
tatccttgaaagttctgaggtgagg

SEQ ID NO: 2671527 - DNA, 25 bp, Homo sapien
ttatttgtagcagtagcactggatc

SEQ ID NO: 2671528 - DNA, 25 bp, Homo sapien
atttgtagcagtagcactggatcca

SEQ ID NO: 2671529 - DNA, 25 bp, Homo sapien
tatttgtagcagtagcactggatcc

SEQ ID NO: 2671530 - DNA, 25 bp, Homo sapien
cttatttgtagcagtagcactggat

SEQ ID NO: 2671531 - DNA, 25 bp, Homo sapien
tcttttgaaagttgagtagggagag

SEQ ID NO: 2671532 - DNA, 25 bp, Homo sapien
tttgaaagttgagtagggagaggga

SEQ ID NO: 2671533 - DNA, 25 bp, Homo sapien
aacatcttttgaaagttgagtaggg

SEQ ID NO: 2671534 - DNA, 25 bp, Homo sapien
tgaaagttgagtagggagagggaaa

SEQ ID NO: 2671535 - DNA, 25 bp, Homo sapien
tgtttcctgatacgtcactgcctca

SEQ ID NO: 2671536 - DNA, 25 bp, Homo sapien
taatggctgaattagcactgactgc

SEQ ID NO: 2671537 - DNA, 25 bp, Homo sapien
gactgaaactgttaacctgaggccc

SEQ ID NO: 2671538 - DNA, 25 bp, Homo sapien
gaacacagaccacataaactggcag

SEQ ID NO: 2671539 - DNA, 25 bp, Homo sapien
taagatgtctagaccagtgtaacag

SEQ ID NO: 2671540 - DNA, 25 bp, Homo sapien
tgagatatggaatttggtaaggcaa

SEQ ID NO: 2671541 - DNA, 25 bp, Homo sapien
taacagtcgtctttgattagggcaa

SEQ ID NO: 2671542 - DNA, 25 bp, Homo sapien
cagatatctcccgaggtgttgtaaa

SEQ ID NO: 2671543 - DNA, 25 bp, Homo sapien
gcacaccatgaccaacaggaaaaca

SEQ ID NO: 2671544 - DNA, 25 bp, Homo sapien
gcttgtcaatgtgaaaagaaccctg

SEQ ID NO: 2671545 - DNA, 25 bp, Homo sapien
tgttagcgtgggacaggcctttgta

SEQ ID NO: 2671546 - DNA, 25 bp, Homo sapien
gagactgtgccaaatcccgggagta

SEQ ID NO: 2671547 - DNA, 25 bp, Homo sapien
cacagtgggccctttagtaccttct

SEQ ID NO: 2671548 - DNA, 25 bp, Homo sapien
aatggggggcattctgaaggtctct

SEQ ID NO: 2671549 - DNA, 25 bp, Homo sapien
gcattctgaaggtctcttcctcctt

SEQ ID NO: 2671550 - DNA, 25 bp, Homo sapien
ggggcattctgaaggtctcttcctc

SEQ ID NO: 2671551 - DNA, 25 bp, Homo sapien
aaatggggggcattctgaaggtctc

SEQ ID NO: 2671552 - DNA, 25 bp, Homo sapien
gcagctagggtggtctagagaagca

SEQ ID NO: 2671553 - DNA, 25 bp, Homo sapien
tattcttcagtgttgccgtaggtaa

SEQ ID NO: 2671554 - DNA, 25 bp, Homo sapien
ctgccttggctgctgaaggggtact

SEQ ID NO: 2671555 - DNA, 25 bp, Homo sapien
tgttgccgtaggtaataaatacatg

SEQ ID NO: 2671556 - DNA, 25 bp, Homo sapien
tgagccacaacttgatttcactacc

SEQ ID NO: 2671557 - DNA, 25 bp, Homo sapien
ggaaatttgttgtgcatccaaccat

SEQ ID NO: 2671558 - DNA, 25 bp, Homo sapien
cccaaaggaggtgcatcagagatga

SEQ ID NO: 2671559 - DNA, 25 bp, Homo sapien
tcagagatgatttcaggaaatttgt

SEQ ID NO: 2671560 - DNA, 25 bp, Homo sapien
accaccctcaagtttatgtcttaag

SEQ ID NO: 2671561 - DNA, 25 bp, Homo sapien
agtttttctccaactcggccagcat

SEQ ID NO: 2671562 - DNA, 25 bp, Homo sapien
caccctcaagtttatgtcttaagtt

SEQ ID NO: 2671563 - DNA, 25 bp, Homo sapien
caccaccctcaagtttatgtcttaa

SEQ ID NO: 2671564 - DNA, 25 bp, Homo sapien
tgataagacaggggctgctgtgtca

SEQ ID NO: 2671565 - DNA, 25 bp, Homo sapien
ctatgataagacaggggctgctgtg

SEQ ID NO: 2671566 - DNA, 25 bp, Homo sapien
atgataagacaggggctgctgtgtc

SEQ ID NO: 2671567 - DNA, 25 bp, Homo sapien
tatgataagacaggggctgctgtgt

SEQ ID NO: 2671568 - DNA, 25 bp, Homo sapien
tggtacaggtggtggagggaagaca

SEQ ID NO: 2671569 - DNA, 25 bp, Homo sapien
ctggtacaggtggtggagggaagac

SEQ ID NO: 2671570 - DNA, 25 bp, Homo sapien
ggtacaggtggtggagggaagacaa

SEQ ID NO: 2671571 - DNA, 25 bp, Homo sapien
ctctggtacaggtggtggagggaag

SEQ ID NO: 2671572 - DNA, 25 bp, Homo sapien
aaatatagctcctaagcactggcag

SEQ ID NO: 2671573 - DNA, 25 bp, Homo sapien
tcactggctaatccctgcgacaggg

SEQ ID NO: 2671574 - DNA, 25 bp, Homo sapien
tctcgattctccaaactaagcacat

SEQ ID NO: 2671575 - DNA, 25 bp, Homo sapien
gaataccctaaacctagttacagca

SEQ ID NO: 2671576 - DNA, 25 bp, Homo sapien
cttccaaagtggatgagtcatggca

SEQ ID NO: 2671577 - DNA, 25 bp, Homo sapien
aaggctcgtttctgagttattatgc

SEQ ID NO: 2671578 - DNA, 25 bp, Homo sapien
tacacaggactaagggcatatacca

SEQ ID NO: 2671579 - DNA, 25 bp, Homo sapien
tgtgccaggccagattatgggcaat

SEQ ID NO: 2671580 - DNA, 25 bp, Homo sapien
atagcgggcgtgcatctccacatag

SEQ ID NO: 2671581 - DNA, 25 bp, Homo sapien
tctgatctgtacactcatggtgggc

SEQ ID NO: 2671582 - DNA, 25 bp, Homo sapien
cactgtggtccctatatagcgggcg

SEQ ID NO: 2671583 - DNA, 25 bp, Homo sapien
cctttccacgatacgcaggctcttg

SEQ ID NO: 2671584 - DNA, 25 bp, Homo sapien
tcctcgtaggacatggccaggtctt

SEQ ID NO: 2671585 - DNA, 25 bp, Homo sapien
caggtcttcaggcatacggatggca

SEQ ID NO: 2671586 - DNA, 25 bp, Homo sapien
caggtgagtcctagactgacagaca

SEQ ID NO: 2671587 - DNA, 25 bp, Homo sapien
tgagcaggtcgaagacacaggactg

SEQ ID NO: 2671588 - DNA, 25 bp, Homo sapien
taaagtgctttctaacaggtccctg

SEQ ID NO: 2671589 - DNA, 25 bp, Homo sapien
cacagtatgtacaatctggtgggtg

SEQ ID NO: 2671590 - DNA, 25 bp, Homo sapien
tggtgggtgtcccaggacaaacatc

SEQ ID NO: 2671591 - DNA, 25 bp, Homo sapien
ctgggcagggacattataaaacatt

SEQ ID NO: 2671592 - DNA, 25 bp, Homo sapien
tacagggacaccgattacaagggca

SEQ ID NO: 2671593 - DNA, 25 bp, Homo sapien
tggcgagtaaaagctgcacaccgtg

SEQ ID NO: 2671594 - DNA, 25 bp, Homo sapien
caacacaaggtagaggtttgccacc

SEQ ID NO: 2671595 - DNA, 25 bp, Homo sapien
tgcaaagactcgacacactgttggg

SEQ ID NO: 2671596 - DNA, 25 bp, Homo sapien
ctcccccgactccctttcttctgca

SEQ ID NO: 2671597 - DNA, 25 bp, Homo sapien
tgacttatcagtaacctttagggat

SEQ ID NO: 2671598 - DNA, 25 bp, Homo sapien
atgacttatcagtaacctttaggga

SEQ ID NO: 2671599 - DNA, 25 bp, Homo sapien
tttcttgaacaaagaccaacttgtg

SEQ ID NO: 2671600 - DNA, 25 bp, Homo sapien
gaactttgggacaatactagtggac

SEQ ID NO: 2671601 - DNA, 25 bp, Homo sapien
tagtggaccaatctcactgatacgg

SEQ ID NO: 2671602 - DNA, 25 bp, Homo sapien
ccccaccaggaggaagtcgttactg

SEQ ID NO: 2671603 - DNA, 25 bp, Homo sapien
gttatcccagctagttccagacaat

SEQ ID NO: 2671604 - DNA, 25 bp, Homo sapien
acaggactcttagggttgatgtcgc

SEQ ID NO: 2671605 - DNA, 25 bp, Homo sapien
tggagttgacgtttcagtccccaaa

SEQ ID NO: 2671606 - DNA, 25 bp, Homo sapien
gctctgaactgctacatgtaaatag

SEQ ID NO: 2671607 - DNA, 25 bp, Homo sapien
catacaaatagaacagggagaaaat

SEQ ID NO: 2671608 - DNA, 25 bp, Homo sapien
gagacattggttcacatacaaatag

SEQ ID NO: 2671609 - DNA, 25 bp, Homo sapien
tctgtgggggagacattggttcaca

SEQ ID NO: 2671610 - DNA, 25 bp, Homo sapien
ccttgaacatcctgattactttctc

SEQ ID NO: 2671611 - DNA, 25 bp, Homo sapien
ataccatctaaataataacaattgc

SEQ ID NO: 2671612 - DNA, 25 bp, Homo sapien
ttcatgtgacttgtccatttggaag

SEQ ID NO: 2671613 - DNA, 25 bp, Homo sapien
gtccatttggaagacatacagaaaa

SEQ ID NO: 2671614 - DNA, 25 bp, Homo sapien
ggcatgcttattagaggtacctggg

SEQ ID NO: 2671615 - DNA, 25 bp, Homo sapien
tatcaaatggcatgcttattagagg

SEQ ID NO: 2671616 - DNA, 25 bp, Homo sapien
tatttagttgatagtatcaaatggc

SEQ ID NO: 2671617 - DNA, 25 bp, Homo sapien
gacagcatattctattatttagttg

SEQ ID NO: 2671618 - DNA, 25 bp, Homo sapien
ggtgagggcatccattctggctttg

SEQ ID NO: 2671619 - DNA, 25 bp, Homo sapien
gataggcctactttattacattgca

SEQ ID NO: 2671620 - DNA, 25 bp, Homo sapien
tgtttgttagtgtatcctgctgggt

SEQ ID NO: 2671621 - DNA, 25 bp, Homo sapien
tggcaggaccagtttactcaattgg

SEQ ID NO: 2671622 - DNA, 25 bp, Homo sapien
tcagaaaacattgccctgttgcttt

SEQ ID NO: 2671623 - DNA, 25 bp, Homo sapien
gatatgcacaggttttgcatttggt

SEQ ID NO: 2671624 - DNA, 25 bp, Homo sapien
agtaggtgctttaaagaacgtatgc

SEQ ID NO: 2671625 - DNA, 25 bp, Homo sapien
aaagaacgtatgctggatttctggg

SEQ ID NO: 2671626 - DNA, 25 bp, Homo sapien
gtaggaagcacctgatatgcacagg

SEQ ID NO: 2671627 - DNA, 25 bp, Homo sapien
ttcttcattgtctatttcaagcaat

SEQ ID NO: 2671628 - DNA, 25 bp, Homo sapien
tttcttcattgtctatttcaagcaa

SEQ ID NO: 2671629 - DNA, 25 bp, Homo sapien
tcttcattgtctatttcaagcaatt

SEQ ID NO: 2671630 - DNA, 25 bp, Homo sapien
ttttcttcattgtctatttcaagca

SEQ ID NO: 2671631 - DNA, 25 bp, Homo sapien
gccaatttaaatctgtcagccttca

SEQ ID NO: 2671632 - DNA, 25 bp, Homo sapien
ggcattgctcaattgggccaattta

SEQ ID NO: 2671633 - DNA, 25 bp, Homo sapien
gagaagggcattgctcaattgggcc

SEQ ID NO: 2671634 - DNA, 25 bp, Homo sapien
caattgggccaatttaaatctgtca

SEQ ID NO: 2671635 - DNA, 25 bp, Homo sapien
tctctgtaggtggacgaaactataa

SEQ ID NO: 2671636 - DNA, 25 bp, Homo sapien
gggattctcccctgaggatgtgaac

SEQ ID NO: 2671637 - DNA, 25 bp, Homo sapien
taagctaagccaaagggattctccc

SEQ ID NO: 2671638 - DNA, 25 bp, Homo sapien
gacgaaactataactctgtgaggtg

SEQ ID NO: 2671639 - DNA, 25 bp, Homo sapien
tgtaccacttcctccgagtgtgcct

SEQ ID NO: 2671640 - DNA, 25 bp, Homo sapien
taaatcttgctaactgggtggtgcc

SEQ ID NO: 2671641 - DNA, 25 bp, Homo sapien
tgctgggcgctggtgctttgctttc

SEQ ID NO: 2671642 - DNA, 25 bp, Homo sapien
ttttcctgaggagcttagactgtcc

SEQ ID NO: 2671643 - DNA, 25 bp, Homo sapien
tagggtgtcaaagggagagctttct

SEQ ID NO: 2671644 - DNA, 25 bp, Homo sapien
gccgggtgagccatcctgttataca

SEQ ID NO: 2671645 - DNA, 25 bp, Homo sapien
gactttgcaagataactgatcatgg

SEQ ID NO: 2671646 - DNA, 25 bp, Homo sapien
aatagatcagttaaggaagagctcc

SEQ ID NO: 2671647 - DNA, 25 bp, Homo sapien
tttatatccaagctaagcattttga

SEQ ID NO: 2671648 - DNA, 25 bp, Homo sapien
atatcctgggtactatctctggatc

SEQ ID NO: 2671649 - DNA, 25 bp, Homo sapien
ggtactatctctggatctattgttc

SEQ ID NO: 2671650 - DNA, 25 bp, Homo sapien
tattttcttctaacatctaaaagtg

SEQ ID NO: 2671651 - DNA, 25 bp, Homo sapien
aatgtttactattacagggacctca

SEQ ID NO: 2671652 - DNA, 25 bp, Homo sapien
gaactttactctgacctgtgatcat

SEQ ID NO: 2671653 - DNA, 25 bp, Homo sapien
tacattgtacactgcgaccaccttg

SEQ ID NO: 2671654 - DNA, 25 bp, Homo sapien
gatgcaaggtctattatcccaacag

SEQ ID NO: 2671655 - DNA, 25 bp, Homo sapien
tacaggcccacgctaccaggcctgg

SEQ ID NO: 2671656 - DNA, 25 bp, Homo sapien
tccacctcagtctctttggtagctg

SEQ ID NO: 2671657 - DNA, 25 bp, Homo sapien
cttccacctcagtctctttggtagc

SEQ ID NO: 2671658 - DNA, 25 bp, Homo sapien
actacaggcccacgctaccaggcct

SEQ ID NO: 2671659 - DNA, 25 bp, Homo sapien
taaacgtggactctgtagccagact

SEQ ID NO: 2671660 - DNA, 25 bp, Homo sapien
gctgtgcacaatgcatgaatttcct

SEQ ID NO: 2671661 - DNA, 25 bp, Homo sapien
taatcttcggactttttcatgtaac

SEQ ID NO: 2671662 - DNA, 25 bp, Homo sapien
tacctctaagtaaggaattccattg

SEQ ID NO: 2671663 - DNA, 25 bp, Homo sapien
atggtgacactctactaagaaaaaa

SEQ ID NO: 2671664 - DNA, 25 bp, Homo sapien
tggtgacactctactaagaaaaaaa

SEQ ID NO: 2671665 - DNA, 25 bp, Homo sapien
tatcctgtgtgttgggaacctttag

SEQ ID NO: 2671666 - DNA, 25 bp, Homo sapien
ctcccagtgtatgctttaggtcttc

SEQ ID NO: 2671667 - DNA, 25 bp, Homo sapien
gcctaaaatgggaaacactgggaga

SEQ ID NO: 2671668 - DNA, 25 bp, Homo sapien
taagtagtctagattcccctgtaaa

SEQ ID NO: 2671669 - DNA, 25 bp, Homo sapien
tagtaccatactgcttacgttcaga

SEQ ID NO: 2671670 - DNA, 25 bp, Homo sapien
tgctgtaatcgtgtgtacaagtatc

SEQ ID NO: 2671671 - DNA, 25 bp, Homo sapien
ctttttgttgattggtcttgctaga

SEQ ID NO: 2671672 - DNA, 25 bp, Homo sapien
gaagtgtcattcctttcctatcccg

SEQ ID NO: 2671673 - DNA, 25 bp, Homo sapien
tccttgtatggggaccattctaatc

SEQ ID NO: 2671674 - DNA, 25 bp, Homo sapien
ccttgtatggggaccattctaatct

SEQ ID NO: 2671675 - DNA, 25 bp, Homo sapien
gtatggggaccattctaatctctgt

SEQ ID NO: 2671676 - DNA, 25 bp, Homo sapien
ttgtatggggaccattctaatctct

SEQ ID NO: 2671677 - DNA, 25 bp, Homo sapien
gcagtagtgatggaagcagtagcca

SEQ ID NO: 2671678 - DNA, 25 bp, Homo sapien
gaatcaggcagtcagtcagagtctg

SEQ ID NO: 2671679 - DNA, 25 bp, Homo sapien
caaaaccaccgaaagttgatggagc

SEQ ID NO: 2671680 - DNA, 25 bp, Homo sapien
tctgactccggatctgaatcaggca

SEQ ID NO: 2671681 - DNA, 25 bp, Homo sapien
tgctactagcacttgccgaggtgac

SEQ ID NO: 2671682 - DNA, 25 bp, Homo sapien
gagtcttgccttgtcgctcgggatg

SEQ ID NO: 2671683 - DNA, 25 bp, Homo sapien
cagtctcttctctagtgctactagc

SEQ ID NO: 2671684 - DNA, 25 bp, Homo sapien
gaaaatctttatgtgctaaggacag

SEQ ID NO: 2671685 - DNA, 25 bp, Homo sapien
cctaggactgggcggcggagatccc

SEQ ID NO: 2671686 - DNA, 25 bp, Homo sapien
taggactgggcggcggagatcccgg

SEQ ID NO: 2671687 - DNA, 25 bp, Homo sapien
ggactgggcggcggagatcccgggc

SEQ ID NO: 2671688 - DNA, 25 bp, Homo sapien
ctaggactgggcggcggagatcccg

SEQ ID NO: 2671689 - DNA, 25 bp, Homo sapien
aagcgaggatcagcggactaaggcc

SEQ ID NO: 2671690 - DNA, 25 bp, Homo sapien
tcacaggctgtcaacaaccgggtct

SEQ ID NO: 2671691 - DNA, 25 bp, Homo sapien
agttactaacatccctcgagcagcg

SEQ ID NO: 2671692 - DNA, 25 bp, Homo sapien
tcgcagatcgcccaagcgtaagagg

SEQ ID NO: 2671693 - DNA, 25 bp, Homo sapien
ttcagtagcgcaacaccctgctggt

SEQ ID NO: 2671694 - DNA, 25 bp, Homo sapien
tcagtctagacttcacttagctcca

SEQ ID NO: 2671695 - DNA, 25 bp, Homo sapien
tgcacacacttaggctgtcttccaa

SEQ ID NO: 2671696 - DNA, 25 bp, Homo sapien
gaagccttactcatcttcagtagcg

SEQ ID NO: 2671697 - DNA, 25 bp, Homo sapien
gctgttaggtagagagtagatcctc

SEQ ID NO: 2671698 - DNA, 25 bp, Homo sapien
cacgaaacttttagtagccacatac

SEQ ID NO: 2671699 - DNA, 25 bp, Homo sapien
tctcttgcgtatacactcaggaatg

SEQ ID NO: 2671700 - DNA, 25 bp, Homo sapien
taaccaatttgcacccttaccagca

SEQ ID NO: 2671701 - DNA, 25 bp, Homo sapien
atgccctatggcctagggaatgcca

SEQ ID NO: 2671702 - DNA, 25 bp, Homo sapien
gattgcgtctctcgtggaagcaaaa

SEQ ID NO: 2671703 - DNA, 25 bp, Homo sapien
gcacagagtttatgagaagcctcag

SEQ ID NO: 2671704 - DNA, 25 bp, Homo sapien
gcccattccttaactatgccctatg

SEQ ID NO: 2671705 - DNA, 25 bp, Homo sapien
gggttcagccccacaagattgcctt

SEQ ID NO: 2671706 - DNA, 25 bp, Homo sapien
taggttggctcaccgaactcaggta

SEQ ID NO: 2671707 - DNA, 25 bp, Homo sapien
gatcccacagtttgagggttcagcc

SEQ ID NO: 2671708 - DNA, 25 bp, Homo sapien
tactctgacctgctacaaatcaggg

SEQ ID NO: 2671709 - DNA, 25 bp, Homo sapien
gcttgcatggtacctagagtgctca

SEQ ID NO: 2671710 - DNA, 25 bp, Homo sapien
tacagagtccaaaaggcttgcatgg

SEQ ID NO: 2671711 - DNA, 25 bp, Homo sapien
gaatgaggccaacaaaaggcagggt

SEQ ID NO: 2671712 - DNA, 25 bp, Homo sapien
tgtgctgctgcttatcctcaactgc

SEQ ID NO: 2671713 - DNA, 25 bp, Homo sapien
gctaatggtatatgtcttagtccat

SEQ ID NO: 2671714 - DNA, 25 bp, Homo sapien
tatatatgtaccgtgccagtaaagt

SEQ ID NO: 2671715 - DNA, 25 bp, Homo sapien
ccgtgccagtaaagtaaatcatgtt

SEQ ID NO: 2671716 - DNA, 25 bp, Homo sapien
ccaaaagtgctaatggtatatgtct

SEQ ID NO: 2671717 - DNA, 25 bp, Homo sapien
catgcctattgattaataatacccc

SEQ ID NO: 2671718 - DNA, 25 bp, Homo sapien
tggaaactaccattccttccttgaa

SEQ ID NO: 2671719 - DNA, 25 bp, Homo sapien
tgtacagcagatctatacaacttgc

SEQ ID NO: 2671720 - DNA, 25 bp, Homo sapien
ctcaaggttcatccagtggttgcat

SEQ ID NO: 2671721 - DNA, 25 bp, Homo sapien
tattttgggacatcctggatctcag

SEQ ID NO: 2671722 - DNA, 25 bp, Homo sapien
tcagaaaggtcttcaaaatatcctc

SEQ ID NO: 2671723 - DNA, 25 bp, Homo sapien
catgcccggccatggcttgtaatat

SEQ ID NO: 2671724 - DNA, 25 bp, Homo sapien
gatccaggatgaccaaaaatatgtt

SEQ ID NO: 2671725 - DNA, 25 bp, Homo sapien
tagtcatcttcaatggaatcatagt

SEQ ID NO: 2671726 - DNA, 25 bp, Homo sapien
aatcatagttatcaagccaaggagt

SEQ ID NO: 2671727 - DNA, 25 bp, Homo sapien
ccaaggagtctcaaatattagtttg

SEQ ID NO: 2671728 - DNA, 25 bp, Homo sapien
agccaaggagtctcaaatattagtt

SEQ ID NO: 2671729 - DNA, 25 bp, Homo sapien
ttcataatgggcttgagatctgtga

SEQ ID NO: 2671730 - DNA, 25 bp, Homo sapien
gatctgtgattaaaagctgtcatcg

SEQ ID NO: 2671731 - DNA, 25 bp, Homo sapien
tgtcatcgttgatggaaaacagagc

SEQ ID NO: 2671732 - DNA, 25 bp, Homo sapien
ctcattaagcgatgtcagacattaa

SEQ ID NO: 2671733 - DNA, 25 bp, Homo sapien
acagccaatatcaagccacggcact

SEQ ID NO: 2671734 - DNA, 25 bp, Homo sapien
gcagacagccaatatcaagccacgg

SEQ ID NO: 2671735 - DNA, 25 bp, Homo sapien
agacagccaatatcaagccacggca

SEQ ID NO: 2671736 - DNA, 25 bp, Homo sapien
ttgcagacagccaatatcaagccac

SEQ ID NO: 2671737 - DNA, 25 bp, Homo sapien
agactggatcttggttcagattaaa

SEQ ID NO: 2671738 - DNA, 25 bp, Homo sapien
actggatcttggttcagattaaacc

SEQ ID NO: 2671739 - DNA, 25 bp, Homo sapien
tggatcttggttcagattaaaccac

SEQ ID NO: 2671740 - DNA, 25 bp, Homo sapien
gactggatcttggttcagattaaac

SEQ ID NO: 2671741 - DNA, 25 bp, Homo sapien
tacacgtggcttaaaccaacacaga

SEQ ID NO: 2671742 - DNA, 25 bp, Homo sapien
aattagttatctcaatacacgtggc

SEQ ID NO: 2671743 - DNA, 25 bp, Homo sapien
aaggatatacctccaagattgctca

SEQ ID NO: 2671744 - DNA, 25 bp, Homo sapien
aggagaatcttagctggtgttggct

SEQ ID NO: 2671745 - DNA, 25 bp, Homo sapien
tctctatatcctttgcccttcaact

SEQ ID NO: 2671746 - DNA, 25 bp, Homo sapien
cattatttaccctgagaaacctggc

SEQ ID NO: 2671747 - DNA, 25 bp, Homo sapien
caccaaggtccaaccctaatgtggg

SEQ ID NO: 2671748 - DNA, 25 bp, Homo sapien
taatgtgggaacttaggaaccagtc

SEQ ID NO: 2671749 - DNA, 25 bp, Homo sapien
tcccataataggaaccaagaacaca

SEQ ID NO: 2671750 - DNA, 25 bp, Homo sapien
tatgcttgtagttaatgcttccacg

SEQ ID NO: 2671751 - DNA, 25 bp, Homo sapien
tagttaatgcttccacgcacactcc

SEQ ID NO: 2671752 - DNA, 25 bp, Homo sapien
agaacacagaccctatgcttgtagt

SEQ ID NO: 2671753 - DNA, 25 bp, Homo sapien
tccaactccgacaatgtcttttgca

SEQ ID NO: 2671754 - DNA, 25 bp, Homo sapien
agctccaactccgacaatgtctttt

SEQ ID NO: 2671755 - DNA, 25 bp, Homo sapien
caactccgacaatgtcttttgcaat

SEQ ID NO: 2671756 - DNA, 25 bp, Homo sapien
actccgacaatgtcttttgcaatca

SEQ ID NO: 2671757 - DNA, 25 bp, Homo sapien
ggcatgacatgaagagggccccact

SEQ ID NO: 2671758 - DNA, 25 bp, Homo sapien
ccatgatctatgcacaagaagggtg

SEQ ID NO: 2671759 - DNA, 25 bp, Homo sapien
gcctggatctatcctgggcatgaca

SEQ ID NO: 2671760 - DNA, 25 bp, Homo sapien
caaaggccagttccagcttgtcaac

SEQ ID NO: 2671761 - DNA, 25 bp, Homo sapien
cacccaggtgggtatgactgtagag

SEQ ID NO: 2671762 - DNA, 25 bp, Homo sapien
cagatattcctactaagcctcaggg

SEQ ID NO: 2671763 - DNA, 25 bp, Homo sapien
cacaggtaaccttttggcagacaca

SEQ ID NO: 2671764 - DNA, 25 bp, Homo sapien
cacttatgggtaagccagctgcaac

SEQ ID NO: 2671765 - DNA, 25 bp, Homo sapien
cctacaatttggtccactggaaata

SEQ ID NO: 2671766 - DNA, 25 bp, Homo sapien
ccctcttggattgaagaatgtcttt

SEQ ID NO: 2671767 - DNA, 25 bp, Homo sapien
acatcttgagaaaagtccctcttgg

SEQ ID NO: 2671768 - DNA, 25 bp, Homo sapien
catccaaatggcactttcggttaac

SEQ ID NO: 2671769 - DNA, 25 bp, Homo sapien
caggtgctttatgggcttttttaca

SEQ ID NO: 2671770 - DNA, 25 bp, Homo sapien
gctttatgggcttttttacacatcc

SEQ ID NO: 2671771 - DNA, 25 bp, Homo sapien
tatgggcttttttacacatcctcac

SEQ ID NO: 2671772 - DNA, 25 bp, Homo sapien
tttgtcaggtgctttatgggctttt

SEQ ID NO: 2671773 - DNA, 25 bp, Homo sapien
ttctgaatagtataactcagttggg

SEQ ID NO: 2671774 - DNA, 25 bp, Homo sapien
cagttgggatgctatcaggaagaag

SEQ ID NO: 2671775 - DNA, 25 bp, Homo sapien
aggaagaagtggttgtattgaacgg

SEQ ID NO: 2671776 - DNA, 25 bp, Homo sapien
tataactcagttgggatgctatcag

SEQ ID NO: 2671777 - DNA, 25 bp, Homo sapien
gctaatacagcttgggtctccacag

SEQ ID NO: 2671778 - DNA, 25 bp, Homo sapien
tggtcttcccgtacaatctatatac

SEQ ID NO: 2671779 - DNA, 25 bp, Homo sapien
tggatgtggtcttcccgtacaatct

SEQ ID NO: 2671780 - DNA, 25 bp, Homo sapien
aatacagcttgggtctccacagtac

SEQ ID NO: 2671781 - DNA, 25 bp, Homo sapien
tgaccactctgattcttgtgcaagt

SEQ ID NO: 2671782 - DNA, 25 bp, Homo sapien
tcttgtgcaagtgttttgataaatc

SEQ ID NO: 2671783 - DNA, 25 bp, Homo sapien
gaaagcaatttctgaccactctgat

SEQ ID NO: 2671784 - DNA, 25 bp, Homo sapien
cttgtgcaagtgttttgataaatct

SEQ ID NO: 2671785 - DNA, 25 bp, Homo sapien
caaccaaaagttgcacagttccttg

SEQ ID NO: 2671786 - DNA, 25 bp, Homo sapien
taatggttagactggtgaagtccca

SEQ ID NO: 2671787 - DNA, 25 bp, Homo sapien
attgtgtaaatcagccctaatcagc

SEQ ID NO: 2671788 - DNA, 25 bp, Homo sapien
atctaggatccaatgcttcagggca

SEQ ID NO: 2671789 - DNA, 25 bp, Homo sapien
cagtccctgtaagtaaaggacctct

SEQ ID NO: 2671790 - DNA, 25 bp, Homo sapien
gacaatcattggcatctggatggaa

SEQ ID NO: 2671791 - DNA, 25 bp, Homo sapien
ccatgatgcctctgtcctacattgt

SEQ ID NO: 2671792 - DNA, 25 bp, Homo sapien
ggatggaatttgttaacagtccctg

SEQ ID NO: 2671793 - DNA, 25 bp, Homo sapien
gtgatgtctaaaactccaatgtgta

SEQ ID NO: 2671794 - DNA, 25 bp, Homo sapien
taacatccactcaaataacatggac

SEQ ID NO: 2671795 - DNA, 25 bp, Homo sapien
cactattcaaatggtctcaactcct

SEQ ID NO: 2671796 - DNA, 25 bp, Homo sapien
tgatgtacgtttcttgggctgagga

SEQ ID NO: 2671797 - DNA, 25 bp, Homo sapien
tgatatttagccctcaagacccaaa

SEQ ID NO: 2671798 - DNA, 25 bp, Homo sapien
gccgattttgctagaagcagctcaa

SEQ ID NO: 2671799 - DNA, 25 bp, Homo sapien
cataactagtttaggcagatctgcc

SEQ ID NO: 2671800 - DNA, 25 bp, Homo sapien
tggtattgggcctagaatccctagt

SEQ ID NO: 2671801 - DNA, 25 bp, Homo sapien
gcttaggacagattgttacaattac

SEQ ID NO: 2671802 - DNA, 25 bp, Homo sapien
tatcaatgtacactgccacggacag

SEQ ID NO: 2671803 - DNA, 25 bp, Homo sapien
aaactgctatgaacagctctgttca

SEQ ID NO: 2671804 - DNA, 25 bp, Homo sapien
caagtctctagatagttgcttagga

SEQ ID NO: 2671805 - DNA, 25 bp, Homo sapien
gttacttctgaaaagcgggaatgga

SEQ ID NO: 2671806 - DNA, 25 bp, Homo sapien
cccctatgttataggccttggaagc

SEQ ID NO: 2671807 - DNA, 25 bp, Homo sapien
tgcaattccgtaagataaactaagg

SEQ ID NO: 2671808 - DNA, 25 bp, Homo sapien
tatgtactcagaatagctatcactg

SEQ ID NO: 2671809 - DNA, 25 bp, Homo sapien
ggcacctgagggatccagacccaaa

SEQ ID NO: 2671810 - DNA, 25 bp, Homo sapien
aagcatccattccagcaaaatccca

SEQ ID NO: 2671811 - DNA, 25 bp, Homo sapien
agtcatatcctcctgtcaccaaacg

SEQ ID NO: 2671812 - DNA, 25 bp, Homo sapien
tcaccaaacgggcacctgagggatc

SEQ ID NO: 2671813 - DNA, 25 bp, Homo sapien
tacaaatccttgtagatgggattcc

SEQ ID NO: 2671814 - DNA, 25 bp, Homo sapien
tccaatgtgaagatactaagtcaaa

SEQ ID NO: 2671815 - DNA, 25 bp, Homo sapien
tgtcttccaatgtgaagatactaag

SEQ ID NO: 2671816 - DNA, 25 bp, Homo sapien
ttttgatacaaatccttgtagatgg

SEQ ID NO: 2671817 - DNA, 25 bp, Homo sapien
gggaagatagtgttgagggccctca

SEQ ID NO: 2671818 - DNA, 25 bp, Homo sapien
ggaagatagtgttgagggccctcaa

SEQ ID NO: 2671819 - DNA, 25 bp, Homo sapien
aggtcatcctacaagcacccagaca

SEQ ID NO: 2671820 - DNA, 25 bp, Homo sapien
ggcaggtcatcctacaagcacccag

SEQ ID NO: 2671821 - DNA, 25 bp, Homo sapien
tggcaggtcatcctacaagcaccca

SEQ ID NO: 2671822 - DNA, 25 bp, Homo sapien
gcaggtcatcctacaagcacccaga

SEQ ID NO: 2671823 - DNA, 25 bp, Homo sapien
ggaggcaagagagaccagggcttag

SEQ ID NO: 2671824 - DNA, 25 bp, Homo sapien
caagagagaccagggcttagggagg

SEQ ID NO: 2671825 - DNA, 25 bp, Homo sapien
gagagaccagggcttagggagggac

SEQ ID NO: 2671826 - DNA, 25 bp, Homo sapien
ggcaagagagaccagggcttaggga

SEQ ID NO: 2671827 - DNA, 25 bp, Homo sapien
tgcattcaaaagatacacttccaac

SEQ ID NO: 2671828 - DNA, 25 bp, Homo sapien
ttctgcattcaaaagatacacttcc

SEQ ID NO: 2671829 - DNA, 25 bp, Homo sapien
tacggccaccagaggttggtaccca

SEQ ID NO: 2671830 - DNA, 25 bp, Homo sapien
tgtccacgaccttgttttctgcatt

SEQ ID NO: 2671831 - DNA, 25 bp, Homo sapien
cagccacacctacgacagccaaagt

SEQ ID NO: 2671832 - DNA, 25 bp, Homo sapien
acacctacgacagccaaagtgccag

SEQ ID NO: 2671833 - DNA, 25 bp, Homo sapien
gccacacctacgacagccaaagtgc

SEQ ID NO: 2671834 - DNA, 25 bp, Homo sapien
cacacctacgacagccaaagtgcca

SEQ ID NO: 2671835 - DNA, 25 bp, Homo sapien
atagaaaggtttcccactgatgagg

SEQ ID NO: 2671836 - DNA, 25 bp, Homo sapien
tgttgacgccgtggaaatagaaagg

SEQ ID NO: 2671837 - DNA, 25 bp, Homo sapien
catgcttgttgacgccgtggaaata

SEQ ID NO: 2671838 - DNA, 25 bp, Homo sapien
cctcatgcttgttgacgccgtggaa

SEQ ID NO: 2671839 - DNA, 25 bp, Homo sapien
aggaccctggagaaccaccccatga

SEQ ID NO: 2671840 - DNA, 25 bp, Homo sapien
atgaggtcccctctccagcccaagc

SEQ ID NO: 2671841 - DNA, 25 bp, Homo sapien
atttgcctcattgccttgagctgcc

SEQ ID NO: 2671842 - DNA, 25 bp, Homo sapien
caccatggggtggtttggagccatt

SEQ ID NO: 2671843 - DNA, 25 bp, Homo sapien
gaccacaatcccataccggtaacat

SEQ ID NO: 2671844 - DNA, 25 bp, Homo sapien
cacaatcccataccggtaacatatc

SEQ ID NO: 2671845 - DNA, 25 bp, Homo sapien
gtgttggcgccaagccagcaaagca

SEQ ID NO: 2671846 - DNA, 25 bp, Homo sapien
cagaaggtgttggcgccaagccagc

SEQ ID NO: 2671847 - DNA, 25 bp, Homo sapien
tccaccacccacatatggtgatgca

SEQ ID NO: 2671848 - DNA, 25 bp, Homo sapien
acacgttgttgaagagttgccagcg

SEQ ID NO: 2671849 - DNA, 25 bp, Homo sapien
tgcatagacacgttgttgaagagtt

SEQ ID NO: 2671850 - DNA, 25 bp, Homo sapien
tatggtgatgcatagacacgttgtt

SEQ ID NO: 2671851 - DNA, 25 bp, Homo sapien
accctgagatcagtgagggcgagcc

SEQ ID NO: 2671852 - DNA, 25 bp, Homo sapien
agaccctgagatcagtgagggcgag

SEQ ID NO: 2671853 - DNA, 25 bp, Homo sapien
gaccctgagatcagtgagggcgagc

SEQ ID NO: 2671854 - DNA, 25 bp, Homo sapien
cagaggcactagatgaatacagatc

SEQ ID NO: 2671855 - DNA, 25 bp, Homo sapien
gctgaaagggttcagaggcactaga

SEQ ID NO: 2671856 - DNA, 25 bp, Homo sapien
agatgaatacagatctccaccattt

SEQ ID NO: 2671857 - DNA, 25 bp, Homo sapien
tgatttaattgttggttacacggac

SEQ ID NO: 2671858 - DNA, 25 bp, Homo sapien
tctttgaggcgaagactaacaaagg

SEQ ID NO: 2671859 - DNA, 25 bp, Homo sapien
ccgagtgtaccgtctattgaaacct

SEQ ID NO: 2671860 - DNA, 25 bp, Homo sapien
cctttcttaggccttcttgctcgca

SEQ ID NO: 2671861 - DNA, 25 bp, Homo sapien
tggtctaagggaacaaccgagtgta

SEQ ID NO: 2671862 - DNA, 25 bp, Homo sapien
tagccatcgttatcagtattcacca

SEQ ID NO: 2671863 - DNA, 25 bp, Homo sapien
caacatcatagccatcgttatcagt

SEQ ID NO: 2671864 - DNA, 25 bp, Homo sapien
catcatagccatcgttatcagtatt

SEQ ID NO: 2671865 - DNA, 25 bp, Homo sapien
catagccatcgttatcagtattcac

SEQ ID NO: 2671866 - DNA, 25 bp, Homo sapien
ctagaattctcttgtgataggcact

SEQ ID NO: 2671867 - DNA, 25 bp, Homo sapien
agatgacagtagtcaatctctggag

SEQ ID NO: 2671868 - DNA, 25 bp, Homo sapien
ggcactgttagatgacagtagtcaa

SEQ ID NO: 2671869 - DNA, 25 bp, Homo sapien
atctctggagatacttcaggttgca

SEQ ID NO: 2671870 - DNA, 25 bp, Homo sapien
aattctagcaataccattcttcttg

SEQ ID NO: 2671871 - DNA, 25 bp, Homo sapien
ttaattctagcaataccattcttct

SEQ ID NO: 2671872 - DNA, 25 bp, Homo sapien
tttactaccctcatttgtttgctca

SEQ ID NO: 2671873 - DNA, 25 bp, Homo sapien
tgctcctctccaattatgcctttta

SEQ ID NO: 2671874 - DNA, 25 bp, Homo sapien
gagagagtcaagcacgaagtgagca

SEQ ID NO: 2671875 - DNA, 25 bp, Homo sapien
gaagtgagcaggcaataagacctct

SEQ ID NO: 2671876 - DNA, 25 bp, Homo sapien
tttgccttatcagaaacagccacgt

SEQ ID NO: 2671877 - DNA, 25 bp, Homo sapien
gatagggaaagctaatgtcctccaa

SEQ ID NO: 2671878 - DNA, 25 bp, Homo sapien
cttccctatcatcaaacaccttcct

SEQ ID NO: 2671879 - DNA, 25 bp, Homo sapien
ttccctatcatcaaacaccttcctg

SEQ ID NO: 2671880 - DNA, 25 bp, Homo sapien
gagtgactaatgctccttctccaac

SEQ ID NO: 2671881 - DNA, 25 bp, Homo sapien
tgagtgactaatgctccttctccaa

SEQ ID NO: 2671882 - DNA, 25 bp, Homo sapien
agtgactaatgctccttctccaaca

SEQ ID NO: 2671883 - DNA, 25 bp, Homo sapien
ctgagtgactaatgctccttctcca

SEQ ID NO: 2671884 - DNA, 25 bp, Homo sapien
actgatgaacagtgcctgttaaaac

SEQ ID NO: 2671885 - DNA, 25 bp, Homo sapien
aaatggccaacttggaggcatatgc

SEQ ID NO: 2671886 - DNA, 25 bp, Homo sapien
cacttgtgtgcggagtcacagtgga

SEQ ID NO: 2671887 - DNA, 25 bp, Homo sapien
ggcatatgccagaacagtccattcc

SEQ ID NO: 2671888 - DNA, 25 bp, Homo sapien
aatgcattgatatttccggttaaag

SEQ ID NO: 2671889 - DNA, 25 bp, Homo sapien
taatatcccaagacaacaacatctc

SEQ ID NO: 2671890 - DNA, 25 bp, Homo sapien
aattccatggctgtgaacttgttcc

SEQ ID NO: 2671891 - DNA, 25 bp, Homo sapien
tgttccaacggataaatgcattgat

SEQ ID NO: 2671892 - DNA, 25 bp, Homo sapien
tggccagtagcggtgtacttgccca

SEQ ID NO: 2671893 - DNA, 25 bp, Homo sapien
gccagtagcggtgtacttgcccaaa

SEQ ID NO: 2671894 - DNA, 25 bp, Homo sapien
ggccagtagcggtgtacttgcccaa

SEQ ID NO: 2671895 - DNA, 25 bp, Homo sapien
catacccggtgtgtgagccagagaa

SEQ ID NO: 2671896 - DNA, 25 bp, Homo sapien
tccacagagcgataccaatgatgat

SEQ ID NO: 2671897 - DNA, 25 bp, Homo sapien
tccggacaagccagtatgagatatg

SEQ ID NO: 2671898 - DNA, 25 bp, Homo sapien
tccactcttggaaaacatagcttga

SEQ ID NO: 2671899 - DNA, 25 bp, Homo sapien
catggttccaccggcattgctgtct

SEQ ID NO: 2671900 - DNA, 25 bp, Homo sapien
gctgtctttatcaatgactttccat

SEQ ID NO: 2671901 - DNA, 25 bp, Homo sapien
ttggtggtagtttgcaaaccagacc

SEQ ID NO: 2671902 - DNA, 25 bp, Homo sapien
cagatgcaatggcttgtcagctggg

SEQ ID NO: 2671903 - DNA, 25 bp, Homo sapien
agcccacgttgttcttaggaagagc

SEQ ID NO: 2671904 - DNA, 25 bp, Homo sapien
tccagcaatgtgagcagtgtgacaa

SEQ ID NO: 2671905 - DNA, 25 bp, Homo sapien
tgactcaaagaaaggtgaccaccat

SEQ ID NO: 2671906 - DNA, 25 bp, Homo sapien
gaccaccatgccagtttcagaacac

SEQ ID NO: 2671907 - DNA, 25 bp, Homo sapien
ccttcttgtcgactacgttgatgac

SEQ ID NO: 2671908 - DNA, 25 bp, Homo sapien
tcataaaccttcttgtcgactacgt

SEQ ID NO: 2671909 - DNA, 25 bp, Homo sapien
gtcgactacgttgatgacacccaag

SEQ ID NO: 2671910 - DNA, 25 bp, Homo sapien
gactacgttgatgacacccaagcaa

SEQ ID NO: 2671911 - DNA, 25 bp, Homo sapien
aattgcaagttgcagtttgatagtc

SEQ ID NO: 2671912 - DNA, 25 bp, Homo sapien
tatcaacccagcagctggcatacac

SEQ ID NO: 2671913 - DNA, 25 bp, Homo sapien
tcatgcctgaaatttaattgcaagt

SEQ ID NO: 2671914 - DNA, 25 bp, Homo sapien
gcagtttgatagtcttatcaaccca

SEQ ID NO: 2671915 - DNA, 25 bp, Homo sapien
caaataagtctgtaaactggttgtg

SEQ ID NO: 2671916 - DNA, 25 bp, Homo sapien
tcaactagtggtaaacactactgta

SEQ ID NO: 2671917 - DNA, 25 bp, Homo sapien
ctagtggtaaacactactgtactca

SEQ ID NO: 2671918 - DNA, 25 bp, Homo sapien
aaggaacaaataagtctgtaaactg

SEQ ID NO: 2671919 - DNA, 25 bp, Homo sapien
aacatcattgcatttcaactacaag

SEQ ID NO: 2671920 - DNA, 25 bp, Homo sapien
tattctcgcacggactacaaccgtg

SEQ ID NO: 2671921 - DNA, 25 bp, Homo sapien
gcacggactacaaccgtgaccaatg

SEQ ID NO: 2671922 - DNA, 25 bp, Homo sapien
cggactacaaccgtgaccaatgata

SEQ ID NO: 2671923 - DNA, 25 bp, Homo sapien
atgaaacctcctaaagctggtttca

SEQ ID NO: 2671924 - DNA, 25 bp, Homo sapien
tgaaacctcctaaagctggtttcaa

SEQ ID NO: 2671925 - DNA, 25 bp, Homo sapien
catgcccggtgttgactttttaata

SEQ ID NO: 2671926 - DNA, 25 bp, Homo sapien
tcgtggatccacaggtggtctccct

SEQ ID NO: 2671927 - DNA, 25 bp, Homo sapien
cgtggatccacaggtggtctccctc

SEQ ID NO: 2671928 - DNA, 25 bp, Homo sapien
cttgctgttttgaacgaaacatcta

SEQ ID NO: 2671929 - DNA, 25 bp, Homo sapien
aacatctaaacttagctggcagcta

SEQ ID NO: 2671930 - DNA, 25 bp, Homo sapien
agctggcagctaccatctccagcag

SEQ ID NO: 2671931 - DNA, 25 bp, Homo sapien
aaacttagctggcagctaccatctc

SEQ ID NO: 2671932 - DNA, 25 bp, Homo sapien
gtcaagggctaagccgctgacatat

SEQ ID NO: 2671933 - DNA, 25 bp, Homo sapien
gagtaggaatctttcggtcaagggc

SEQ ID NO: 2671934 - DNA, 25 bp, Homo sapien
cttccttgtaaatataagcacagct

SEQ ID NO: 2671935 - DNA, 25 bp, Homo sapien
ctatgctagagtaggaatctttcgg

SEQ ID NO: 2671936 - DNA, 25 bp, Homo sapien
tgttcaggggccgtgctgattttct

SEQ ID NO: 2671937 - DNA, 25 bp, Homo sapien
ttatgattcacaattttagtatacg

SEQ ID NO: 2671938 - DNA, 25 bp, Homo sapien
ttcaggggccgtgctgattttctct

SEQ ID NO: 2671939 - DNA, 25 bp, Homo sapien
tgattttctctttatgattcacaat

SEQ ID NO: 2671940 - DNA, 25 bp, Homo sapien
ggcagtaacaatttatccaaagcag

SEQ ID NO: 2671941 - DNA, 25 bp, Homo sapien
tgttttaagctggattcggtggaac

SEQ ID NO: 2671942 - DNA, 25 bp, Homo sapien
cttgggaacttccatggagcaggtc

SEQ ID NO: 2671943 - DNA, 25 bp, Homo sapien
gatgacttagttaacacaggcttct

SEQ ID NO: 2671944 - DNA, 25 bp, Homo sapien
cctttagtgacagcttaggaattaa

SEQ ID NO: 2671945 - DNA, 25 bp, Homo sapien
aaaaaaggacacattgccccactgc

SEQ ID NO: 2671946 - DNA, 25 bp, Homo sapien
tcttatcccatcaccagacatgtca

SEQ ID NO: 2671947 - DNA, 25 bp, Homo sapien
ttttcttagctcataacatgagggt

SEQ ID NO: 2671948 - DNA, 25 bp, Homo sapien
tcttcatatctagtgtagtaacatc

SEQ ID NO: 2671949 - DNA, 25 bp, Homo sapien
tctgacactatttggatttctgtga

SEQ ID NO: 2671950 - DNA, 25 bp, Homo sapien
aacatctgagtttgataacactcca

SEQ ID NO: 2671951 - DNA, 25 bp, Homo sapien
taacactccatacattggttcattg

SEQ ID NO: 2671952 - DNA, 25 bp, Homo sapien
ttctctggccctgttaatgttttct

SEQ ID NO: 2671953 - DNA, 25 bp, Homo sapien
tctaccatggccacttctctggccc

SEQ ID NO: 2671954 - DNA, 25 bp, Homo sapien
gtacacactctaccatggccacttc

SEQ ID NO: 2671955 - DNA, 25 bp, Homo sapien
acttctctggccctgttaatgtttt

SEQ ID NO: 2671956 - DNA, 25 bp, Homo sapien
tagcataggcaggtctgtagtaggt

SEQ ID NO: 2671957 - DNA, 25 bp, Homo sapien
caataacacctagcataggcaggtc

SEQ ID NO: 2671958 - DNA, 25 bp, Homo sapien
tgtagtaggtagagtggagctggtg

SEQ ID NO: 2671959 - DNA, 25 bp, Homo sapien
ttaaccaattgtctcaataacacct

SEQ ID NO: 2671960 - DNA, 25 bp, Homo sapien
tataagctaggtattggccctgagt

SEQ ID NO: 2671961 - DNA, 25 bp, Homo sapien
tataattatggcaaagagcaaaggg

SEQ ID NO: 2671962 - DNA, 25 bp, Homo sapien
taggtgcgtcttacattgccagaga

SEQ ID NO: 2671963 - DNA, 25 bp, Homo sapien
taatcatatcacacgagaactctgt

SEQ ID NO: 2671964 - DNA, 25 bp, Homo sapien
aaattggtggaacccataatggagt

SEQ ID NO: 2671965 - DNA, 25 bp, Homo sapien
tacataagcatgttgctaacccaca

SEQ ID NO: 2671966 - DNA, 25 bp, Homo sapien
tggagtgaaccatatatatcaggtc

SEQ ID NO: 2671967 - DNA, 25 bp, Homo sapien
atatcaggtcattcttctgctgcta

SEQ ID NO: 2671968 - DNA, 25 bp, Homo sapien
cagatgtgtccagtctccttaccca

SEQ ID NO: 2671969 - DNA, 25 bp, Homo sapien
tatcacagatgtgtccagtctcctt

SEQ ID NO: 2671970 - DNA, 25 bp, Homo sapien
cacagatgtgtccagtctccttacc

SEQ ID NO: 2671971 - DNA, 25 bp, Homo sapien
tgatatcacagatgtgtccagtctc

SEQ ID NO: 2671972 - DNA, 25 bp, Homo sapien
aggaaacctgtgacttctaactgag

SEQ ID NO: 2671973 - DNA, 25 bp, Homo sapien
ctaactgagcattccaggcacatgg

SEQ ID NO: 2671974 - DNA, 25 bp, Homo sapien
tgacttctaactgagcattccaggc

SEQ ID NO: 2671975 - DNA, 25 bp, Homo sapien
acctgtgacttctaactgagcattc

SEQ ID NO: 2671976 - DNA, 25 bp, Homo sapien
ggcttcagagtttgttatttgttta

SEQ ID NO: 2671977 - DNA, 25 bp, Homo sapien
ctgtagaggtcagaaaggaacctac

SEQ ID NO: 2671978 - DNA, 25 bp, Homo sapien
gctgtagaggtcagaaaggaaccta

SEQ ID NO: 2671979 - DNA, 25 bp, Homo sapien
tccaagactattattccagtctagg

SEQ ID NO: 2671980 - DNA, 25 bp, Homo sapien
taacaaaccagtaatggcagttgcc

SEQ ID NO: 2671981 - DNA, 25 bp, Homo sapien
tcagagctaaaggaggagattcaag

SEQ ID NO: 2671982 - DNA, 25 bp, Homo sapien
tcaagctgcttctagtcttcagagc

SEQ ID NO: 2671983 - DNA, 25 bp, Homo sapien
caagctctgcaggaatccaaggacc

SEQ ID NO: 2671984 - DNA, 25 bp, Homo sapien
ataatttcaggatttgcatctttga

SEQ ID NO: 2671985 - DNA, 25 bp, Homo sapien
tttcctccttctattgccagccagt

SEQ ID NO: 2671986 - DNA, 25 bp, Homo sapien
cctccttctattgccagccagtttc

SEQ ID NO: 2671987 - DNA, 25 bp, Homo sapien
taatttcaggatttgcatctttgat

SEQ ID NO: 2671988 - DNA, 25 bp, Homo sapien
tatataatgctgctgtaccataggg

SEQ ID NO: 2671989 - DNA, 25 bp, Homo sapien
taaatgagatacatgtggaaagcct

SEQ ID NO: 2671990 - DNA, 25 bp, Homo sapien
gattgataccctttcggaatgacag

SEQ ID NO: 2671991 - DNA, 25 bp, Homo sapien
aaatatttgcccaacctgaggatac

SEQ ID NO: 2671992 - DNA, 25 bp, Homo sapien
gtcacagagtcaagacccttatcca

SEQ ID NO: 2671993 - DNA, 25 bp, Homo sapien
gggtcacagagtcaagacccttatc

SEQ ID NO: 2671994 - DNA, 25 bp, Homo sapien
tcacagagtcaagacccttatccat

SEQ ID NO: 2671995 - DNA, 25 bp, Homo sapien
ctggggtcacagagtcaagaccctt

SEQ ID NO: 2671996 - DNA, 25 bp, Homo sapien
tatacgcaatttcgtttggtggaga

SEQ ID NO: 2671997 - DNA, 25 bp, Homo sapien
caatgactgtttagctaccagtagc

SEQ ID NO: 2671998 - DNA, 25 bp, Homo sapien
cagattccgcatttctatgagcaga

SEQ ID NO: 2671999 - DNA, 25 bp, Homo sapien
gcagacagagcacattgaaatggct

SEQ ID NO: 2672000 - DNA, 25 bp, Homo sapien
ggtgaattaccagatctccgtcaag

SEQ ID NO: 2672001 - DNA, 25 bp, Homo sapien
gtgcagtaaccagttcaagttggaa

SEQ ID NO: 2672002 - DNA, 25 bp, Homo sapien
ggtggccgtacctgatgcacgaaca

SEQ ID NO: 2672003 - DNA, 25 bp, Homo sapien
tgtgtgacccaggtcatgtccctcc

SEQ ID NO: 2672004 - DNA, 25 bp, Homo sapien
tgagcacataatggcaccagtgaca

SEQ ID NO: 2672005 - DNA, 25 bp, Homo sapien
gtgagcacataatggcaccagtgac

SEQ ID NO: 2672006 - DNA, 25 bp, Homo sapien
tggaacacaggtcttgcaggatcac

SEQ ID NO: 2672007 - DNA, 25 bp, Homo sapien
caggatggaacacaggtcttgcagg

SEQ ID NO: 2672008 - DNA, 25 bp, Homo sapien
ggatggaacacaggtcttgcaggat

SEQ ID NO: 2672009 - DNA, 25 bp, Homo sapien
gatggaacacaggtcttgcaggatc

SEQ ID NO: 2672010 - DNA, 25 bp, Homo sapien
caatggggtgactacctgctcctgg

SEQ ID NO: 2672011 - DNA, 25 bp, Homo sapien
agccgggtgttgtgaaccccaatgg

SEQ ID NO: 2672012 - DNA, 25 bp, Homo sapien
tgtgaaccccaatggggtgactacc

SEQ ID NO: 2672013 - DNA, 25 bp, Homo sapien
acagccgggtgttgtgaaccccaat

SEQ ID NO: 2672014 - DNA, 25 bp, Homo sapien
agaccgtgcatccccggtgaccttg

SEQ ID NO: 2672015 - DNA, 25 bp, Homo sapien
tggggacccttctctgatcatcagg

SEQ ID NO: 2672016 - DNA, 25 bp, Homo sapien
gggccgaaatgcagaccgtgcatcc

SEQ ID NO: 2672017 - DNA, 25 bp, Homo sapien
tcaggattctcttggactctagggt

SEQ ID NO: 2672018 - DNA, 25 bp, Homo sapien
tcccacggagctataggagctggag

SEQ ID NO: 2672019 - DNA, 25 bp, Homo sapien
atcagcattttcttggactccaggg

SEQ ID NO: 2672020 - DNA, 25 bp, Homo sapien
acgagctcgtccaggtattctggga

SEQ ID NO: 2672021 - DNA, 25 bp, Homo sapien
attttcttggactccagggtcctcg

SEQ ID NO: 2672022 - DNA, 25 bp, Homo sapien
gttgatccgctgtaatgccgcctct

SEQ ID NO: 2672023 - DNA, 25 bp, Homo sapien
gatccgctgtaatgccgcctctttt

SEQ ID NO: 2672024 - DNA, 25 bp, Homo sapien
ttttggtgcacgagctcgcccagga

SEQ ID NO: 2672025 - DNA, 25 bp, Homo sapien
atttcttttggtgcacgagctcgcc

SEQ ID NO: 2672026 - DNA, 25 bp, Homo sapien
tgcattgagtagtaaccccaacatg

SEQ ID NO: 2672027 - DNA, 25 bp, Homo sapien
ctttagaaacgctagacccaccaga

SEQ ID NO: 2672028 - DNA, 25 bp, Homo sapien
ctgcatccattgcattgagtagtaa

SEQ ID NO: 2672029 - DNA, 25 bp, Homo sapien
ttagaaacgctagacccaccagaag

SEQ ID NO: 2672030 - DNA, 25 bp, Homo sapien
tccattgcattgagtagtaacccca

SEQ ID NO: 2672031 - DNA, 25 bp, Homo sapien
ctttagaaacgctagacccaccaga

SEQ ID NO: 2672032 - DNA, 25 bp, Homo sapien
gctgtatctgcgttgttttcacagt

SEQ ID NO: 2672033 - DNA, 25 bp, Homo sapien
gcatccattgcattgagtagtaacc

SEQ ID NO: 2672034 - DNA, 25 bp, Homo sapien
catgccggcattcattctcaagccg

SEQ ID NO: 2672035 - DNA, 25 bp, Homo sapien
attcattctcaagccggcatccatg

SEQ ID NO: 2672036 - DNA, 25 bp, Homo sapien
ttcgcatgccggcattcattctcaa

SEQ ID NO: 2672037 - DNA, 25 bp, Homo sapien
aacattcttcgcatgccggcattca

SEQ ID NO: 2672038 - DNA, 25 bp, Homo sapien
ctgatggaattgaagtcatgaggca

SEQ ID NO: 2672039 - DNA, 25 bp, Homo sapien
actctgatggaattgaagtcatgag

SEQ ID NO: 2672040 - DNA, 25 bp, Homo sapien
tctgatggaattgaagtcatgaggc

SEQ ID NO: 2672041 - DNA, 25 bp, Homo sapien
gatggaattgaagtcatgaggcagc

SEQ ID NO: 2672042 - DNA, 25 bp, Homo sapien
gttttggacgattggtgatgtcttg

SEQ ID NO: 2672043 - DNA, 25 bp, Homo sapien
cactgtgttttggacgattggtgat

SEQ ID NO: 2672044 - DNA, 25 bp, Homo sapien
cgattggtgatgtcttggatattct

SEQ ID NO: 2672045 - DNA, 25 bp, Homo sapien
ggcctcctacactgtgttttggacg

SEQ ID NO: 2672046 - DNA, 25 bp, Homo sapien
gctagcagatttcggagtgaagtga

SEQ ID NO: 2672047 - DNA, 25 bp, Homo sapien
tgtctaatgactcttaatcctgtcc

SEQ ID NO: 2672048 - DNA, 25 bp, Homo sapien
acaggaatgatgagcttgatgctga

SEQ ID NO: 2672049 - DNA, 25 bp, Homo sapien
tccttaatactgtgtctaatgactc

SEQ ID NO: 2672050 - DNA, 25 bp, Homo sapien
caagggccctgggagataataatgt

SEQ ID NO: 2672051 - DNA, 25 bp, Homo sapien
gggaatgtattagcaccaggatgat

SEQ ID NO: 2672052 - DNA, 25 bp, Homo sapien
cctttgagtcctcagtgcttgggaa

SEQ ID NO: 2672053 - DNA, 25 bp, Homo sapien
tactagtgtgatggctttcgttctc

SEQ ID NO: 2672054 - DNA, 25 bp, Homo sapien
ttagctgtgtttctcagacttagca

SEQ ID NO: 2672055 - DNA, 25 bp, Homo sapien
ccggttttctggtatgaatcttcag

SEQ ID NO: 2672056 - DNA, 25 bp, Homo sapien
tagggattccggttttctggtatga

SEQ ID NO: 2672057 - DNA, 25 bp, Homo sapien
agacttagcatttccaagattttct

SEQ ID NO: 2672058 - DNA, 25 bp, Homo sapien
ctttctccacacttaagggcatctt

SEQ ID NO: 2672059 - DNA, 25 bp, Homo sapien
tgccttcaaccatcttgatcaaatc

SEQ ID NO: 2672060 - DNA, 25 bp, Homo sapien
cacacttaagggcatctttgggttc

SEQ ID NO: 2672061 - DNA, 25 bp, Homo sapien
cttaagggcatctttgggttcatag

SEQ ID NO: 2672062 - DNA, 25 bp, Homo sapien
gaatgaagcagaggtgaccaaacgc

SEQ ID NO: 2672063 - DNA, 25 bp, Homo sapien
ctccaagagggaccataggcgcggt

SEQ ID NO: 2672064 - DNA, 25 bp, Homo sapien
cagctgcccggagaaccggaagttc

SEQ ID NO: 2672065 - DNA, 25 bp, Homo sapien
ggaagttcgtacatctcagcggcca

SEQ ID NO: 2672066 - DNA, 25 bp, Homo sapien
ggcccgcttagttcaggcagcaaca

SEQ ID NO: 2672067 - DNA, 25 bp, Homo sapien
taatgtccgtggtctagggtcagga

SEQ ID NO: 2672068 - DNA, 25 bp, Homo sapien
ccgctgggtcatgggcttgtcgcca

SEQ ID NO: 2672069 - DNA, 25 bp, Homo sapien
tgaccgtcctgaccacgaagtacac

SEQ ID NO: 2672070 - DNA, 25 bp, Homo sapien
tagtgtccaaaactccatatctcct

SEQ ID NO: 2672071 - DNA, 25 bp, Homo sapien
tatctcctagtctttcggtttcttc

SEQ ID NO: 2672072 - DNA, 25 bp, Homo sapien
aactccatatctcctagtctttcgg

SEQ ID NO: 2672073 - DNA, 25 bp, Homo sapien
attttctatgttagtgtccaaaact

SEQ ID NO: 2672074 - DNA, 25 bp, Homo sapien
cttcgaggatgattggcatcaaaca

SEQ ID NO: 2672075 - DNA, 25 bp, Homo sapien
gattggcatcaaacaacgtgttgtc

SEQ ID NO: 2672076 - DNA, 25 bp, Homo sapien
aaacaacgtgttgtcatcatcctca

SEQ ID NO: 2672077 - DNA, 25 bp, Homo sapien
cctgttctaaaggtgtcaattccat

SEQ ID NO: 2672078 - DNA, 25 bp, Homo sapien
ctaccaacagtccaagaactgagat

SEQ ID NO: 2672079 - DNA, 25 bp, Homo sapien
ttagtcagcatatgcggcctctgac

SEQ ID NO: 2672080 - DNA, 25 bp, Homo sapien
ccaacagtccaagaactgagatttg

SEQ ID NO: 2672081 - DNA, 25 bp, Homo sapien
tagtcagcatatgcggcctctgact

SEQ ID NO: 2672082 - DNA, 25 bp, Homo sapien
ttttttgagatctgagacaatttga

SEQ ID NO: 2672083 - DNA, 25 bp, Homo sapien
tgaactgcatagtaccacttatgtg

SEQ ID NO: 2672084 - DNA, 25 bp, Homo sapien
ctgttgaatgacatgggtttgaact

SEQ ID NO: 2672085 - DNA, 25 bp, Homo sapien
gcatagtaccacttatgtgcagatt

SEQ ID NO: 2672086 - DNA, 25 bp, Homo sapien
caacatctctgagcccattaacaga

SEQ ID NO: 2672087 - DNA, 25 bp, Homo sapien
taagcaggaaacaaaaaccgatcag

SEQ ID NO: 2672088 - DNA, 25 bp, Homo sapien
ccaacattgatatagtggcttctta

SEQ ID NO: 2672089 - DNA, 25 bp, Homo sapien
ggatacggtatttattgcaacagca

SEQ ID NO: 2672090 - DNA, 25 bp, Homo sapien
tttataaacacataatttggaccac

SEQ ID NO: 2672091 - DNA, 25 bp, Homo sapien
ttattttataaacacataatttgga

SEQ ID NO: 2672092 - DNA, 25 bp, Homo sapien
taatttttaattctatagtcttatg

SEQ ID NO: 2672093 - DNA, 25 bp, Homo sapien
aatttttaattctatagtcttatgt

SEQ ID NO: 2672094 - DNA, 25 bp, Homo sapien
gttctcctctaacttctagaatgtg

SEQ ID NO: 2672095 - DNA, 25 bp, Homo sapien
gcaactgagttcatgacccatgctt

SEQ ID NO: 2672096 - DNA, 25 bp, Homo sapien
tacgtccctggtctcagtaagcaac

SEQ ID NO: 2672097 - DNA, 25 bp, Homo sapien
tgttcagagatcgtgaagtcagtct

SEQ ID NO: 2672098 - DNA, 25 bp, Homo sapien
gaatcatagttcataacaaacatgt

SEQ ID NO: 2672099 - DNA, 25 bp, Homo sapien
ctacaaagagcagaatcatagttca

SEQ ID NO: 2672100 - DNA, 25 bp, Homo sapien
ataaatccttgttgcaacccactgt

SEQ ID NO: 2672101 - DNA, 25 bp, Homo sapien
ggtcctggagaaaagactacaaaga

SEQ ID NO: 2672102 - DNA, 25 bp, Homo sapien
ctgctacttcatatgagaccagcat

SEQ ID NO: 2672103 - DNA, 25 bp, Homo sapien
gtttgaggaggtgttatccttggag

SEQ ID NO: 2672104 - DNA, 25 bp, Homo sapien
actgctacttcatatgagaccagca

SEQ ID NO: 2672105 - DNA, 25 bp, Homo sapien
aggtgttatccttggagaccactgc

SEQ ID NO: 2672106 - DNA, 25 bp, Homo sapien
gtgactcctagtggcttaaagtagc

SEQ ID NO: 2672107 - DNA, 25 bp, Homo sapien
tctgggtctgttgtgactcctagtg

SEQ ID NO: 2672108 - DNA, 25 bp, Homo sapien
tacctccatcaaaaatagttctggg

SEQ ID NO: 2672109 - DNA, 25 bp, Homo sapien
tctctgcttacttcataccgatgtg

SEQ ID NO: 2672110 - DNA, 25 bp, Homo sapien
gaagttgctggcctcccaccattac

SEQ ID NO: 2672111 - DNA, 25 bp, Homo sapien
acctccgtaagcaggttcagtgctg

SEQ ID NO: 2672112 - DNA, 25 bp, Homo sapien
gagcacagatggaagttgctggcct

SEQ ID NO: 2672113 - DNA, 25 bp, Homo sapien
tccagcgtcaacatcactcacagtc

SEQ ID NO: 2672114 - DNA, 25 bp, Homo sapien
cagcatcaagtagccaagtacggag

SEQ ID NO: 2672115 - DNA, 25 bp, Homo sapien
taaagaccagagcttgcattgtctg

SEQ ID NO: 2672116 - DNA, 25 bp, Homo sapien
tgtctgggtcagcagtagacctcac

SEQ ID NO: 2672117 - DNA, 25 bp, Homo sapien
tagacctcaccagaggatcagcatc

SEQ ID NO: 2672118 - DNA, 25 bp, Homo sapien
tagctactgcgatgagtgccaagcc

SEQ ID NO: 2672119 - DNA, 25 bp, Homo sapien
actgcgatgagtgccaagccagaag

SEQ ID NO: 2672120 - DNA, 25 bp, Homo sapien
attagctactgcgatgagtgccaag

SEQ ID NO: 2672121 - DNA, 25 bp, Homo sapien
gctactgcgatgagtgccaagccag

SEQ ID NO: 2672122 - DNA, 25 bp, Homo sapien
agctgctgacacactgatcagaacc

SEQ ID NO: 2672123 - DNA, 25 bp, Homo sapien
gctgacacactgatcagaaccagca

SEQ ID NO: 2672124 - DNA, 25 bp, Homo sapien
ctgctgacacactgatcagaaccag

SEQ ID NO: 2672125 - DNA, 25 bp, Homo sapien
agagctgctgacacactgatcagaa

SEQ ID NO: 2672126 - DNA, 25 bp, Homo sapien
accatatctaaccagacctgaattt

SEQ ID NO: 2672127 - DNA, 25 bp, Homo sapien
caccatatctaaccagacctgaatt

SEQ ID NO: 2672128 - DNA, 25 bp, Homo sapien
ccatatctaaccagacctgaatttg

SEQ ID NO: 2672129 - DNA, 25 bp, Homo sapien
ttaagaggacgtaaaaatctagctc

SEQ ID NO: 2672130 - DNA, 25 bp, Homo sapien
gccttgaagactaaagtgtcatatg

SEQ ID NO: 2672131 - DNA, 25 bp, Homo sapien
ttgaagactaaagtgtcatatgcta

SEQ ID NO: 2672132 - DNA, 25 bp, Homo sapien
gaagactaaagtgtcatatgctagc

SEQ ID NO: 2672133 - DNA, 25 bp, Homo sapien
aagccttgaagactaaagtgtcata

SEQ ID NO: 2672134 - DNA, 25 bp, Homo sapien
gattagaatattcatctctcattgc

SEQ ID NO: 2672135 - DNA, 25 bp, Homo sapien
gaagttgtaacaggaaccttgatta

SEQ ID NO: 2672136 - DNA, 25 bp, Homo sapien
tggtaatgtggaaggtgacagccac

SEQ ID NO: 2672137 - DNA, 25 bp, Homo sapien
aagtccaatgaccagtaggaagttg

SEQ ID NO: 2672138 - DNA, 25 bp, Homo sapien
ctataatggaatggtaaccgaaaag

SEQ ID NO: 2672139 - DNA, 25 bp, Homo sapien
acacagcattagtgtgctgactgct

SEQ ID NO: 2672140 - DNA, 25 bp, Homo sapien
gagggaccatacttatactgccagc

SEQ ID NO: 2672141 - DNA, 25 bp, Homo sapien
gctgactgctccagatgatctctgg

SEQ ID NO: 2672142 - DNA, 25 bp, Homo sapien
tctgggtgtaaatgggtgctttgac

SEQ ID NO: 2672143 - DNA, 25 bp, Homo sapien
tacgattaggtcttagagtagtctc

SEQ ID NO: 2672144 - DNA, 25 bp, Homo sapien
taaggagactccatcagtaatcaga

SEQ ID NO: 2672145 - DNA, 25 bp, Homo sapien
tctctgggctttgtagacaagaagg

SEQ ID NO: 2672146 - DNA, 25 bp, Homo sapien
tgtaagaacttgtataaagtcaagg

SEQ ID NO: 2672147 - DNA, 25 bp, Homo sapien
aaaatagagtggttgccattagcca

SEQ ID NO: 2672148 - DNA, 25 bp, Homo sapien
tcctatatgccactcaaaatccatt

SEQ ID NO: 2672149 - DNA, 25 bp, Homo sapien
aagcctacttttagtttgcaaatct

SEQ ID NO: 2672150 - DNA, 25 bp, Homo sapien
ccattagccaaaagcagctagtgca

SEQ ID NO: 2672151 - DNA, 25 bp, Homo sapien
ctgctgcctcatccagtgcctcatt

SEQ ID NO: 2672152 - DNA, 25 bp, Homo sapien
tggaagccttattacccacgtcctc

SEQ ID NO: 2672153 - DNA, 25 bp, Homo sapien
tattacccacgtcctcctacaaata

SEQ ID NO: 2672154 - DNA, 25 bp, Homo sapien
cacgtcctcctacaaatagaccttg

SEQ ID NO: 2672155 - DNA, 25 bp, Homo sapien
gcatgaggctgtgttgcgaatgatc

SEQ ID NO: 2672156 - DNA, 25 bp, Homo sapien
ttagtgaacttctatcagcaccata

SEQ ID NO: 2672157 - DNA, 25 bp, Homo sapien
tatcagcaccatataccacggtggg

SEQ ID NO: 2672158 - DNA, 25 bp, Homo sapien
gcaccatataccacggtgggccttt

SEQ ID NO: 2672159 - DNA, 25 bp, Homo sapien
tgctcctgtggcattggcttgaatg

SEQ ID NO: 2672160 - DNA, 25 bp, Homo sapien
ggcacttgctcctgtggcattggct

SEQ ID NO: 2672161 - DNA, 25 bp, Homo sapien
tggcattggcttgaatgtggtcccc

SEQ ID NO: 2672162 - DNA, 25 bp, Homo sapien
gaatgtggtccccatgagaggacat

SEQ ID NO: 2672163 - DNA, 25 bp, Homo sapien
caggaatgaatttgttctgcttgga

SEQ ID NO: 2672164 - DNA, 25 bp, Homo sapien
caaattattccatgttgtcggtttc

SEQ ID NO: 2672165 - DNA, 25 bp, Homo sapien
ttagttagtgtttgagaaagacctc

SEQ ID NO: 2672166 - DNA, 25 bp, Homo sapien
tgtcggtttcaagacttcatcagga

SEQ ID NO: 2672167 - DNA, 25 bp, Homo sapien
gagcaatttctcaacatgaccagag

SEQ ID NO: 2672168 - DNA, 25 bp, Homo sapien
gactggctgtaagcgtgcagatccc

SEQ ID NO: 2672169 - DNA, 25 bp, Homo sapien
tgcagatccctttttcgtcacagaa

SEQ ID NO: 2672170 - DNA, 25 bp, Homo sapien
ccagagtggcgcaatgtaagggaca

SEQ ID NO: 2672171 - DNA, 25 bp, Homo sapien
tgaagccaccacctcagtgctacag

SEQ ID NO: 2672172 - DNA, 25 bp, Homo sapien
ctgcagccaatctccccgaactttt

SEQ ID NO: 2672173 - DNA, 25 bp, Homo sapien
gcagttaagttcacctttctaataa

SEQ ID NO: 2672174 - DNA, 25 bp, Homo sapien
ctcagtgctacaggtggcccctgga

SEQ ID NO: 2672175 - DNA, 25 bp, Homo sapien
cagggaggctccagtaggttttgag

SEQ ID NO: 2672176 - DNA, 25 bp, Homo sapien
agggaggctccagtaggttttgagg

SEQ ID NO: 2672177 - DNA, 25 bp, Homo sapien
tttgagggagagtctgacaaagttt

SEQ ID NO: 2672178 - DNA, 25 bp, Homo sapien
tcagggaggctccagtaggttttga

SEQ ID NO: 2672179 - DNA, 25 bp, Homo sapien
tctaaagaccttttcgacatagaaa

SEQ ID NO: 2672180 - DNA, 25 bp, Homo sapien
cataatgtcagatatgcttctctaa

SEQ ID NO: 2672181 - DNA, 25 bp, Homo sapien
tcgacatagaaatcttctaactttt

SEQ ID NO: 2672182 - DNA, 25 bp, Homo sapien
tgtcagatatgcttctctaaagacc

SEQ ID NO: 2672183 - DNA, 25 bp, Homo sapien
gactccagttggcaaaccccagttc

SEQ ID NO: 2672184 - DNA, 25 bp, Homo sapien
tccagttggcaaaccccagttctga

SEQ ID NO: 2672185 - DNA, 25 bp, Homo sapien
gtcagactccagttggcaaacccca

SEQ ID NO: 2672186 - DNA, 25 bp, Homo sapien
tcaagagtcagactccagttggcaa

SEQ ID NO: 2672187 - DNA, 25 bp, Homo sapien
taatgtgaaagttgtctctaaatat

SEQ ID NO: 2672188 - DNA, 25 bp, Homo sapien
aagatgttccatgtcatcagagatg

SEQ ID NO: 2672189 - DNA, 25 bp, Homo sapien
gtttttcacaccttttgcattacat

SEQ ID NO: 2672190 - DNA, 25 bp, Homo sapien
cagagatggtaaaataggccgggaa

SEQ ID NO: 2672191 - DNA, 25 bp, Homo sapien
taatatgcgaaatctaaagcaagct

SEQ ID NO: 2672192 - DNA, 25 bp, Homo sapien
tccaaatagaagacgatagaaaaac

SEQ ID NO: 2672193 - DNA, 25 bp, Homo sapien
cataatattccccttacgtttggat

SEQ ID NO: 2672194 - DNA, 25 bp, Homo sapien
ggatggcagagcacatatctctcca

SEQ ID NO: 2672195 - DNA, 25 bp, Homo sapien
tacacaacaagtactttattatgtc

SEQ ID NO: 2672196 - DNA, 25 bp, Homo sapien
gcccggccgacatgtagtaattcta

SEQ ID NO: 2672197 - DNA, 25 bp, Homo sapien
tttagaggttatacacaacaagtac

SEQ ID NO: 2672198 - DNA, 25 bp, Homo sapien
aaaggatctgaatgtgttcgagaat

SEQ ID NO: 2672199 - DNA, 25 bp, Homo sapien
atttaacttggtgtgcacaggaaat

SEQ ID NO: 2672200 - DNA, 25 bp, Homo sapien
gaggcatactgtgattgcaaatgga

SEQ ID NO: 2672201 - DNA, 25 bp, Homo sapien
gcaactatggaaatcagtaacctgt

SEQ ID NO: 2672202 - DNA, 25 bp, Homo sapien
tgacactgagtgtgataatgaggag

SEQ ID NO: 2672203 - DNA, 25 bp, Homo sapien
aaccatccacattctcatatctcca

SEQ ID NO: 2672204 - DNA, 25 bp, Homo sapien
ccacattctcatatctccaaaggaa

SEQ ID NO: 2672205 - DNA, 25 bp, Homo sapien
catccacattctcatatctccaaag

SEQ ID NO: 2672206 - DNA, 25 bp, Homo sapien
atctccaaaggaatacctgcgacat

SEQ ID NO: 2672207 - DNA, 25 bp, Homo sapien
gatcccggtccagtattcaagtgag

SEQ ID NO: 2672208 - DNA, 25 bp, Homo sapien
aagaagggccttccatagtccttga

SEQ ID NO: 2672209 - DNA, 25 bp, Homo sapien
tggaggttcggctccagatcccggt

SEQ ID NO: 2672210 - DNA, 25 bp, Homo sapien
ccaagccacgtggagaggccagttt

SEQ ID NO: 2672211 - DNA, 25 bp, Homo sapien
aatcaaaacccgcaattacagtggg

SEQ ID NO: 2672212 - DNA, 25 bp, Homo sapien
actgtgcaaggagttggagctgcca

SEQ ID NO: 2672213 - DNA, 25 bp, Homo sapien
tgtagcgtcctgactgccttggtct

SEQ ID NO: 2672214 - DNA, 25 bp, Homo sapien
caggatgaaaggttcgtggaaaagc

SEQ ID NO: 2672215 - DNA, 25 bp, Homo sapien
gagccacttcaaagttgccccaaag

SEQ ID NO: 2672216 - DNA, 25 bp, Homo sapien
gccccaaagcaccagagttttatta

SEQ ID NO: 2672217 - DNA, 25 bp, Homo sapien
cactttcccttctaacagtactgag

SEQ ID NO: 2672218 - DNA, 25 bp, Homo sapien
tatgagtacaccgaaacttttggac

SEQ ID NO: 2672219 - DNA, 25 bp, Homo sapien
cacccatgggatatgacaatcaagc

SEQ ID NO: 2672220 - DNA, 25 bp, Homo sapien
taccactttagttgtacaaatcaca

SEQ ID NO: 2672221 - DNA, 25 bp, Homo sapien
tcagtactcacatagtttggtaaac

SEQ ID NO: 2672222 - DNA, 25 bp, Homo sapien
ggaaatctgcctattacaactggtt

SEQ ID NO: 2672223 - DNA, 25 bp, Homo sapien
atagacgacattaagtgtggcttgg

SEQ ID NO: 2672224 - DNA, 25 bp, Homo sapien
cacatagacgacattaagtgtggct

SEQ ID NO: 2672225 - DNA, 25 bp, Homo sapien
catagacgacattaagtgtggcttg

SEQ ID NO: 2672226 - DNA, 25 bp, Homo sapien
acatagacgacattaagtgtggctt

SEQ ID NO: 2672227 - DNA, 25 bp, Homo sapien
tggactccatcgcaaggcttgggga

SEQ ID NO: 2672228 - DNA, 25 bp, Homo sapien
aaactggactccatcgcaaggcttg

SEQ ID NO: 2672229 - DNA, 25 bp, Homo sapien
gactccatcgcaaggcttggggaag

SEQ ID NO: 2672230 - DNA, 25 bp, Homo sapien
actggactccatcgcaaggcttggg

SEQ ID NO: 2672231 - DNA, 25 bp, Homo sapien
tcagacagctgcgggataagatatc

SEQ ID NO: 2672232 - DNA, 25 bp, Homo sapien
tgcgggataagatatctgaatcaca

SEQ ID NO: 2672233 - DNA, 25 bp, Homo sapien
cacacaaacaggcaatccatttaga

SEQ ID NO: 2672234 - DNA, 25 bp, Homo sapien
aatcacacaaacaggcaatccattt

SEQ ID NO: 2672235 - DNA, 25 bp, Homo sapien
aactacttctaaatccacagtgtca

SEQ ID NO: 2672236 - DNA, 25 bp, Homo sapien
caactacttctaaatccacagtgtc

SEQ ID NO: 2672237 - DNA, 25 bp, Homo sapien
gagcaggagtgatagcagtaaagat

SEQ ID NO: 2672238 - DNA, 25 bp, Homo sapien
caggagtgatagcagtaaagatgga

SEQ ID NO: 2672239 - DNA, 25 bp, Homo sapien
gagtgatagcagtaaagatggagaa

SEQ ID NO: 2672240 - DNA, 25 bp, Homo sapien
ggtggagcaggagtgatagcagtaa

SEQ ID NO: 2672241 - DNA, 25 bp, Homo sapien
tttcccttggacattctttgagcat

SEQ ID NO: 2672242 - DNA, 25 bp, Homo sapien
gtttcccttggacattctttgagca

SEQ ID NO: 2672243 - DNA, 25 bp, Homo sapien
tgactggtcccttcacaatgatgga

SEQ ID NO: 2672244 - DNA, 25 bp, Homo sapien
taggggaagccaattctccagtgcc

SEQ ID NO: 2672245 - DNA, 25 bp, Homo sapien
gacttagtgcaatcctttgcccagt

SEQ ID NO: 2672246 - DNA, 25 bp, Homo sapien
tgagtaggggaagccaattctccag

SEQ ID NO: 2672247 - DNA, 25 bp, Homo sapien
ttatcatctgaagtagtagcaggct

SEQ ID NO: 2672248 - DNA, 25 bp, Homo sapien
tctgaagtagtagcaggctttagtg

SEQ ID NO: 2672249 - DNA, 25 bp, Homo sapien
agtagtagcaggctttagtgagatc

SEQ ID NO: 2672250 - DNA, 25 bp, Homo sapien
catctgaagtagtagcaggctttag

SEQ ID NO: 2672251 - DNA, 25 bp, Homo sapien
caagtttccagtcttcccaattctt

SEQ ID NO: 2672252 - DNA, 25 bp, Homo sapien
gtttccagtcttcccaattcttcta

SEQ ID NO: 2672253 - DNA, 25 bp, Homo sapien
tcttctcagaaaaatgactcaatac

SEQ ID NO: 2672254 - DNA, 25 bp, Homo sapien
agtcttcccaattcttctagaaatg

SEQ ID NO: 2672255 - DNA, 25 bp, Homo sapien
cactgatttctacatctatcatatt

SEQ ID NO: 2672256 - DNA, 25 bp, Homo sapien
tcctgttgttctttagctttcctac

SEQ ID NO: 2672257 - DNA, 25 bp, Homo sapien
ttctttagctttcctacactgattt

SEQ ID NO: 2672258 - DNA, 25 bp, Homo sapien
gctttcctacactgatttctacatc

SEQ ID NO: 2672259 - DNA, 25 bp, Homo sapien
ttgccacaggcttagagggaaaggc

SEQ ID NO: 2672260 - DNA, 25 bp, Homo sapien
tcttgccacaggcttagagggaaag

SEQ ID NO: 2672261 - DNA, 25 bp, Homo sapien
attcttgccacaggcttagagggaa

SEQ ID NO: 2672262 - DNA, 25 bp, Homo sapien
cattcttgccacaggcttagaggga

SEQ ID NO: 2672263 - DNA, 25 bp, Homo sapien
aatagcttttcttatccactgtccc

SEQ ID NO: 2672264 - DNA, 25 bp, Homo sapien
aaatagcttttcttatccactgtcc

SEQ ID NO: 2672265 - DNA, 25 bp, Homo sapien
tggtacttggggtcattccacactg

SEQ ID NO: 2672266 - DNA, 25 bp, Homo sapien
tagttgtggtacttggggtcattcc

SEQ ID NO: 2672267 - DNA, 25 bp, Homo sapien
cactgaaattatgtcattaagtcct

SEQ ID NO: 2672268 - DNA, 25 bp, Homo sapien
ggtcattccacactgaaattatgtc

SEQ ID NO: 2672269 - DNA, 25 bp, Homo sapien
gatcaagggacagatggtagttcct

SEQ ID NO: 2672270 - DNA, 25 bp, Homo sapien
gggacagatggtagttcctgatgaa

SEQ ID NO: 2672271 - DNA, 25 bp, Homo sapien
tcaagatcaagggacagatggtagt

SEQ ID NO: 2672272 - DNA, 25 bp, Homo sapien
gaatcaagatcaagggacagatggt

SEQ ID NO: 2672273 - DNA, 25 bp, Homo sapien
tcatgttccaaagttcaaaattacg

SEQ ID NO: 2672274 - DNA, 25 bp, Homo sapien
catgttccaaagttcaaaattacgt

SEQ ID NO: 2672275 - DNA, 25 bp, Homo sapien
tcaatgtttgcttgatccagtttgg

SEQ ID NO: 2672276 - DNA, 25 bp, Homo sapien
tgtcaaaataacattcttgaacaga

SEQ ID NO: 2672277 - DNA, 25 bp, Homo sapien
aatgtctctcaatgtttgcttgatc

SEQ ID NO: 2672278 - DNA, 25 bp, Homo sapien
gtctctcaatgtttgcttgatccag

SEQ ID NO: 2672279 - DNA, 25 bp, Homo sapien
taagatctttttgtagatttctgta

SEQ ID NO: 2672280 - DNA, 25 bp, Homo sapien
aagatctttttgtagatttctgtat

SEQ ID NO: 2672281 - DNA, 25 bp, Homo sapien
actgatggatcctgcagcgttacac

SEQ ID NO: 2672282 - DNA, 25 bp, Homo sapien
cagcgttacaccatcatcatattca

SEQ ID NO: 2672283 - DNA, 25 bp, Homo sapien
gaagtgcaatagagaacaactgatg

SEQ ID NO: 2672284 - DNA, 25 bp, Homo sapien
ctcccctttaggacggaagtgcaat

SEQ ID NO: 2672285 - DNA, 25 bp, Homo sapien
tctgttaatggtcacgagagtgctg

SEQ ID NO: 2672286 - DNA, 25 bp, Homo sapien
atgcatgttagggaaagctatacca

SEQ ID NO: 2672287 - DNA, 25 bp, Homo sapien
tatgccttaggaactcccatcaatg

SEQ ID NO: 2672288 - DNA, 25 bp, Homo sapien
agtgagttggtagctgaatgtgtac

SEQ ID NO: 2672289 - DNA, 25 bp, Homo sapien
aatctgtcttaaattcacaaagaaa

SEQ ID NO: 2672290 - DNA, 25 bp, Homo sapien
ttaggtgacattccaagataggcga

SEQ ID NO: 2672291 - DNA, 25 bp, Homo sapien
tgttccacatagtttttggagttcc

SEQ ID NO: 2672292 - DNA, 25 bp, Homo sapien
gacattccaagataggcgagcagca

SEQ ID NO: 2672293 - DNA, 25 bp, Homo sapien
tttttggagttccagaatgcaaagg

SEQ ID NO: 2672294 - DNA, 25 bp, Homo sapien
aacgtgtcattaggcgatgtctgca

SEQ ID NO: 2672295 - DNA, 25 bp, Homo sapien
caatgcggtgtaacagtgagcagta

SEQ ID NO: 2672296 - DNA, 25 bp, Homo sapien
tgttttagaacacatagggccatgc

SEQ ID NO: 2672297 - DNA, 25 bp, Homo sapien
tgacacagtcttctacacacttagg

SEQ ID NO: 2672298 - DNA, 25 bp, Homo sapien
ttgttgatgagtcccttcagcatga

SEQ ID NO: 2672299 - DNA, 25 bp, Homo sapien
tgttgatgagtcccttcagcatgag

SEQ ID NO: 2672300 - DNA, 25 bp, Homo sapien
cttgttgatgagtcccttcagcatg

SEQ ID NO: 2672301 - DNA, 25 bp, Homo sapien
ccttgttgatgagtcccttcagcat

SEQ ID NO: 2672302 - DNA, 25 bp, Homo sapien
ccaggatgggcccttaaaggtactg

SEQ ID NO: 2672303 - DNA, 25 bp, Homo sapien
ctggcaatggaggtgggcgacttgg

SEQ ID NO: 2672304 - DNA, 25 bp, Homo sapien
gaatgagagtggataagtgggtttg

SEQ ID NO: 2672305 - DNA, 25 bp, Homo sapien
tttgacctgtgaggcaaatcattga

SEQ ID NO: 2672306 - DNA, 25 bp, Homo sapien
cctgtgaggcaaatcattgaacatg

SEQ ID NO: 2672307 - DNA, 25 bp, Homo sapien
tctttgagaataacagttaaatcca

SEQ ID NO: 2672308 - DNA, 25 bp, Homo sapien
ggacattgcaatgaagagagtctgt

SEQ ID NO: 2672309 - DNA, 25 bp, Homo sapien
ccattctttgagaataacagttaaa

SEQ ID NO: 2672310 - DNA, 25 bp, Homo sapien
tgtatttatggccacttttttccac

SEQ ID NO: 2672311 - DNA, 25 bp, Homo sapien
cagacagtgtaggattgtggattcc

SEQ ID NO: 2672312 - DNA, 25 bp, Homo sapien
gagagtatcttcagcattggctgct

SEQ ID NO: 2672313 - DNA, 25 bp, Homo sapien
cagcatcaactttagcggcaaccac

SEQ ID NO: 2672314 - DNA, 25 bp, Homo sapien
aaaggactaggattgcattggagac

SEQ ID NO: 2672315 - DNA, 25 bp, Homo sapien
gttctctggagccttggcactaaca

SEQ ID NO: 2672316 - DNA, 25 bp, Homo sapien
cttggcactaacatcctggagacat

SEQ ID NO: 2672317 - DNA, 25 bp, Homo sapien
catcttccaggaggttctaatgcct

SEQ ID NO: 2672318 - DNA, 25 bp, Homo sapien
tcacaggacaaactttcaagctttc

SEQ ID NO: 2672319 - DNA, 25 bp, Homo sapien
gagccctttcatgcttctgttgcct

SEQ ID NO: 2672320 - DNA, 25 bp, Homo sapien
gacatagcccatctcctttaagtgg

SEQ ID NO: 2672321 - DNA, 25 bp, Homo sapien
acatagcccatctcctttaagtggc

SEQ ID NO: 2672322 - DNA, 25 bp, Homo sapien
tgctgcacttagtgtgaatgttgga

SEQ ID NO: 2672323 - DNA, 25 bp, Homo sapien
ggggtattgataagcttcccaggct

SEQ ID NO: 2672324 - DNA, 25 bp, Homo sapien
tgggagtacaagcacgcattaacat

SEQ ID NO: 2672325 - DNA, 25 bp, Homo sapien
tgtgaatgttggatcagcatagtgt

SEQ ID NO: 2672326 - DNA, 25 bp, Homo sapien
gctcccatcacatggctgataccaa

SEQ ID NO: 2672327 - DNA, 25 bp, Homo sapien
catcacatggctgataccaatagct

SEQ ID NO: 2672328 - DNA, 25 bp, Homo sapien
atcactagagatcctttctatgtgg

SEQ ID NO: 2672329 - DNA, 25 bp, Homo sapien
tcttattcccatgtatgtcagtatc

SEQ ID NO: 2672330 - DNA, 25 bp, Homo sapien
cagagtgaaaactagcttgctctgc

SEQ ID NO: 2672331 - DNA, 25 bp, Homo sapien
ggcccagagtgaaaactagcttgct

SEQ ID NO: 2672332 - DNA, 25 bp, Homo sapien
tccatggcccagagtgaaaactagc

SEQ ID NO: 2672333 - DNA, 25 bp, Homo sapien
gcttggctccatggcccagagtgaa

SEQ ID NO: 2672334 - DNA, 25 bp, Homo sapien
agaatcaatgatgccttttgccacc

SEQ ID NO: 2672335 - DNA, 25 bp, Homo sapien
acagaatcaatgatgccttttgcca

SEQ ID NO: 2672336 - DNA, 25 bp, Homo sapien
cagaatcaatgatgccttttgccac

SEQ ID NO: 2672337 - DNA, 25 bp, Homo sapien
aatcaatgatgccttttgccaccat

SEQ ID NO: 2672338 - DNA, 25 bp, Homo sapien
ttacaaagtgagaaaccgctaataa

SEQ ID NO: 2672339 - DNA, 25 bp, Homo sapien
caacaataggtgagattacaaagtg

SEQ ID NO: 2672340 - DNA, 25 bp, Homo sapien
aatccggtccacaacaataggtgag

SEQ ID NO: 2672341 - DNA, 25 bp, Homo sapien
ttctttggcaccagcaatccggtcc

SEQ ID NO: 2672342 - DNA, 25 bp, Homo sapien
gctgttcatgcctgcctggttaggg

SEQ ID NO: 2672343 - DNA, 25 bp, Homo sapien
atgagtgctgttcatgcctgcctgg

SEQ ID NO: 2672344 - DNA, 25 bp, Homo sapien
gcctgcctggttagggaattctaaa

SEQ ID NO: 2672345 - DNA, 25 bp, Homo sapien
cctggttagggaattctaaatgtgt

SEQ ID NO: 2672346 - DNA, 25 bp, Homo sapien
gatccaggttgtgtactcatgagaa

SEQ ID NO: 2672347 - DNA, 25 bp, Homo sapien
tgcctgatgatatgaagtggtgcag

SEQ ID NO: 2672348 - DNA, 25 bp, Homo sapien
gaaccacgcatgtgaggatccaggt

SEQ ID NO: 2672349 - DNA, 25 bp, Homo sapien
gacggagtctggcattaaattatct

SEQ ID NO: 2672350 - DNA, 25 bp, Homo sapien
gcagtttcatgggacttaggaggag

SEQ ID NO: 2672351 - DNA, 25 bp, Homo sapien
tttcatgggacttaggaggagtgtg

SEQ ID NO: 2672352 - DNA, 25 bp, Homo sapien
agcatctgcccctgacagtaggtgc

SEQ ID NO: 2672353 - DNA, 25 bp, Homo sapien
gagcatctgcccctgacagtaggtg

SEQ ID NO: 2672354 - DNA, 25 bp, Homo sapien
atggccatcacatttgtagacatca

SEQ ID NO: 2672355 - DNA, 25 bp, Homo sapien
catcacatttgtagacatcacattt

SEQ ID NO: 2672356 - DNA, 25 bp, Homo sapien
ggccatcacatttgtagacatcaca

SEQ ID NO: 2672357 - DNA, 25 bp, Homo sapien
tcactcatggccatcacatttgtag

SEQ ID NO: 2672358 - DNA, 25 bp, Homo sapien
cataaaaagcttcaacgatgggcag

SEQ ID NO: 2672359 - DNA, 25 bp, Homo sapien
tcaacgatgggcagtattcgttttt

SEQ ID NO: 2672360 - DNA, 25 bp, Homo sapien
aagcttcaacgatgggcagtattcg

SEQ ID NO: 2672361 - DNA, 25 bp, Homo sapien
cgatgggcagtattcgttttttcac

SEQ ID NO: 2672362 - DNA, 25 bp, Homo sapien
tagctcttggtattctacaatcagg

SEQ ID NO: 2672363 - DNA, 25 bp, Homo sapien
ttgggaggcaagacaactttctagc

SEQ ID NO: 2672364 - DNA, 25 bp, Homo sapien
taaataaaggcacgtgctttccaag

SEQ ID NO: 2672365 - DNA, 25 bp, Homo sapien
cagcagctgtgcttcaaggatacaa

SEQ ID NO: 2672366 - DNA, 25 bp, Homo sapien
ccattacaatctgtccacatgtctc

SEQ ID NO: 2672367 - DNA, 25 bp, Homo sapien
cccattacaatctgtccacatgtct

SEQ ID NO: 2672368 - DNA, 25 bp, Homo sapien
acccattacaatctgtccacatgtc

SEQ ID NO: 2672369 - DNA, 25 bp, Homo sapien
cattacaatctgtccacatgtctct

SEQ ID NO: 2672370 - DNA, 25 bp, Homo sapien
ccaactgctatgagctcctatggga

SEQ ID NO: 2672371 - DNA, 25 bp, Homo sapien
ctccaggaacatgtcagaaccagtt

SEQ ID NO: 2672372 - DNA, 25 bp, Homo sapien
cacacgcacatagatctttgattcc

SEQ ID NO: 2672373 - DNA, 25 bp, Homo sapien
ggaaaggtcacaataagctctctct

SEQ ID NO: 2672374 - DNA, 25 bp, Homo sapien
tcgttctctgatcctactatgaggg

SEQ ID NO: 2672375 - DNA, 25 bp, Homo sapien
tttaactcagcgttttggcaatgga

SEQ ID NO: 2672376 - DNA, 25 bp, Homo sapien
aattgtatgattatgaagcccctgt

SEQ ID NO: 2672377 - DNA, 25 bp, Homo sapien
tttctggaagtcaagaaggtctgtg

SEQ ID NO: 2672378 - DNA, 25 bp, Homo sapien
tgtctctatgtaaaacactgacgat

SEQ ID NO: 2672379 - DNA, 25 bp, Homo sapien
gactgtctctatgtaaaacactgac

SEQ ID NO: 2672380 - DNA, 25 bp, Homo sapien
atgactgtctctatgtaaaacactg

SEQ ID NO: 2672381 - DNA, 25 bp, Homo sapien
tctatgtaaaacactgacgattttc

SEQ ID NO: 2672382 - DNA, 25 bp, Homo sapien
cctgcaccgtgaagcagattttgtc

SEQ ID NO: 2672383 - DNA, 25 bp, Homo sapien
ctgcaccgtgaagcagattttgtcc

SEQ ID NO: 2672384 - DNA, 25 bp, Homo sapien
gcaccgtgaagcagattttgtcctt

SEQ ID NO: 2672385 - DNA, 25 bp, Homo sapien
tgcaccgtgaagcagattttgtcct

SEQ ID NO: 2672386 - DNA, 25 bp, Homo sapien
tagactctgaactgaggagctgctt

SEQ ID NO: 2672387 - DNA, 25 bp, Homo sapien
ttagcaaactggagtgggagcttcc

SEQ ID NO: 2672388 - DNA, 25 bp, Homo sapien
cacttgggaaggaattactactggc

SEQ ID NO: 2672389 - DNA, 25 bp, Homo sapien
catgtgggagctgcgagtaaaatct

SEQ ID NO: 2672390 - DNA, 25 bp, Homo sapien
aaaggcattagctgttttactgcta

SEQ ID NO: 2672391 - DNA, 25 bp, Homo sapien
tactgctaatggagcccttgccaac

SEQ ID NO: 2672392 - DNA, 25 bp, Homo sapien
acaggaaatagaaccagatgctctt

SEQ ID NO: 2672393 - DNA, 25 bp, Homo sapien
gcacagaatcaaataggttgggctg

SEQ ID NO: 2672394 - DNA, 25 bp, Homo sapien
aatgttattttcgtattggatgacg

SEQ ID NO: 2672395 - DNA, 25 bp, Homo sapien
ttggatgacgattacaaaaactgtt

SEQ ID NO: 2672396 - DNA, 25 bp, Homo sapien
tattggatgacgattacaaaaactg

SEQ ID NO: 2672397 - DNA, 25 bp, Homo sapien
agtaatgttattttcgtattggatg

SEQ ID NO: 2672398 - DNA, 25 bp, Homo sapien
taggccttctgttgacacatctgca

SEQ ID NO: 2672399 - DNA, 25 bp, Homo sapien
caacctatgtggcagattgcggcgg

SEQ ID NO: 2672400 - DNA, 25 bp, Homo sapien
tatggcatcctcaagtggaaatttg

SEQ ID NO: 2672401 - DNA, 25 bp, Homo sapien
tctgcattttgtagacgggccacta

SEQ ID NO: 2672402 - DNA, 25 bp, Homo sapien
tactccgggattggtggaagtctgt

SEQ ID NO: 2672403 - DNA, 25 bp, Homo sapien
ctaggtggcagaagagtactccggg

SEQ ID NO: 2672404 - DNA, 25 bp, Homo sapien
aagtctgtggtttgcgaccagggaa

SEQ ID NO: 2672405 - DNA, 25 bp, Homo sapien
ggaatcacggatttcagtgaaaggg

SEQ ID NO: 2672406 - DNA, 25 bp, Homo sapien
gtttaccaaaatacactgcagccat

SEQ ID NO: 2672407 - DNA, 25 bp, Homo sapien
gcatttctcacctgtaagtttacca

SEQ ID NO: 2672408 - DNA, 25 bp, Homo sapien
ttttggcatttctcacctgtaagtt

SEQ ID NO: 2672409 - DNA, 25 bp, Homo sapien
tgcaatcacagagctaaagtgattt

SEQ ID NO: 2672410 - DNA, 25 bp, Homo sapien
gattgagcaacttcagcttcagtga

SEQ ID NO: 2672411 - DNA, 25 bp, Homo sapien
cagtgaagagattgaaattttcagc

SEQ ID NO: 2672412 - DNA, 25 bp, Homo sapien
tgaggtcacctttagaaacagttga

SEQ ID NO: 2672413 - DNA, 25 bp, Homo sapien
ttatgaccgggattccattgaggtc

SEQ ID NO: 2672414 - DNA, 25 bp, Homo sapien
cgtctgtgcgattggataaattcct

SEQ ID NO: 2672415 - DNA, 25 bp, Homo sapien
gctgaaatgtacttctgcgtctgtg

SEQ ID NO: 2672416 - DNA, 25 bp, Homo sapien
tttgccagagtaagtcctcctccgt

SEQ ID NO: 2672417 - DNA, 25 bp, Homo sapien
tcctcctccgttttaatgagctgaa

SEQ ID NO: 2672418 - DNA, 25 bp, Homo sapien
tagataataaaatgggtgcttgcac

SEQ ID NO: 2672419 - DNA, 25 bp, Homo sapien
tagattaagtttgctatgggcactc

SEQ ID NO: 2672420 - DNA, 25 bp, Homo sapien
tggctcactgagcttccctaaaaca

SEQ ID NO: 2672421 - DNA, 25 bp, Homo sapien
aggagttacctcctccttaatgaag

SEQ ID NO: 2672422 - DNA, 25 bp, Homo sapien
cattgtaatgtaaatctgcatccag

SEQ ID NO: 2672423 - DNA, 25 bp, Homo sapien
tgtaatgtaaatctgcatccaggcc

SEQ ID NO: 2672424 - DNA, 25 bp, Homo sapien
taatgtaaatctgcatccaggccat

SEQ ID NO: 2672425 - DNA, 25 bp, Homo sapien
gacattgtaatgtaaatctgcatcc

SEQ ID NO: 2672426 - DNA, 25 bp, Homo sapien
aagcagttactgagatggctgcctg

SEQ ID NO: 2672427 - DNA, 25 bp, Homo sapien
ctgatttctagtaggggcctgccaa

SEQ ID NO: 2672428 - DNA, 25 bp, Homo sapien
catcctgaactgatttctagtaggg

SEQ ID NO: 2672429 - DNA, 25 bp, Homo sapien
tggctgcctgaagtgtaatgcctgc

SEQ ID NO: 2672430 - DNA, 25 bp, Homo sapien
acatctgaagtagcctccctcctct

SEQ ID NO: 2672431 - DNA, 25 bp, Homo sapien
tacatctgaagtagcctccctcctc

SEQ ID NO: 2672432 - DNA, 25 bp, Homo sapien
gtccaacctgtctactacatctgaa

SEQ ID NO: 2672433 - DNA, 25 bp, Homo sapien
agtgtccaacctgtctactacatct

SEQ ID NO: 2672434 - DNA, 25 bp, Homo sapien
cttggagtcttgttcttctctctta

SEQ ID NO: 2672435 - DNA, 25 bp, Homo sapien
gagtcttgttcttctctcttatcca

SEQ ID NO: 2672436 - DNA, 25 bp, Homo sapien
agtcttgttcttctctcttatccat

SEQ ID NO: 2672437 - DNA, 25 bp, Homo sapien
tttcttggagtcttgttcttctctc

SEQ ID NO: 2672438 - DNA, 25 bp, Homo sapien
gctccatcagaaagaggtggatgat

SEQ ID NO: 2672439 - DNA, 25 bp, Homo sapien
tgatgtgctcaagtctgctcctgat

SEQ ID NO: 2672440 - DNA, 25 bp, Homo sapien
ggcacccaatatgcgctccatcaga

SEQ ID NO: 2672441 - DNA, 25 bp, Homo sapien
ggtggatgatgtgctcaagtctgct

SEQ ID NO: 2672442 - DNA, 25 bp, Homo sapien
ccgcagcctccaccctttcagtcca

SEQ ID NO: 2672443 - DNA, 25 bp, Homo sapien
ctgcaacaggatacgtccgcagcct

SEQ ID NO: 2672444 - DNA, 25 bp, Homo sapien
cgtccgcagcctccaccctttcagt

SEQ ID NO: 2672445 - DNA, 25 bp, Homo sapien
tgcaacaggatacgtccgcagcctc

SEQ ID NO: 2672446 - DNA, 25 bp, Homo sapien
tgggccggacgcgtctgtaatctgt

SEQ ID NO: 2672447 - DNA, 25 bp, Homo sapien
gactgaggctttggtactccacgaa

SEQ ID NO: 2672448 - DNA, 25 bp, Homo sapien
tccatgcgaatgcagacagtctcag

SEQ ID NO: 2672449 - DNA, 25 bp, Homo sapien
cagggctgacaccatggactgaggc

SEQ ID NO: 2672450 - DNA, 25 bp, Homo sapien
gaggcatgagagtgcgtgtgagcgt

SEQ ID NO: 2672451 - DNA, 25 bp, Homo sapien
tgtgctgagccaagacacttggaag

SEQ ID NO: 2672452 - DNA, 25 bp, Homo sapien
gcgtgtgtgctgagccaagacactt

SEQ ID NO: 2672453 - DNA, 25 bp, Homo sapien
tgagccaagacacttggaagacagt

SEQ ID NO: 2672454 - DNA, 25 bp, Homo sapien
ctagccaaagacaacaagggaatcc

SEQ ID NO: 2672455 - DNA, 25 bp, Homo sapien
gccaaagacaacaagggaatccagg

SEQ ID NO: 2672456 - DNA, 25 bp, Homo sapien
caaagacaacaagggaatccagggg

SEQ ID NO: 2672457 - DNA, 25 bp, Homo sapien
tagccaaagacaacaagggaatcca

SEQ ID NO: 2672458 - DNA, 25 bp, Homo sapien
cacaagcctatgtacttcttactct

SEQ ID NO: 2672459 - DNA, 25 bp, Homo sapien
ctccacaagcctatgtacttcttac

SEQ ID NO: 2672460 - DNA, 25 bp, Homo sapien
agcctatgtacttcttactctccaa

SEQ ID NO: 2672461 - DNA, 25 bp, Homo sapien
caagcctatgtacttcttactctcc

SEQ ID NO: 2672462 - DNA, 25 bp, Homo sapien
gaattcctcattttgagcctctcag

SEQ ID NO: 2672463 - DNA, 25 bp, Homo sapien
cctctcaggagatccagaactgcag

SEQ ID NO: 2672464 - DNA, 25 bp, Homo sapien
ttgagcctctcaggagatccagaac

SEQ ID NO: 2672465 - DNA, 25 bp, Homo sapien
aattcctcattttgagcctctcagg

SEQ ID NO: 2672466 - DNA, 25 bp, Homo sapien
ctttagttctgttgtaataatcgaa

SEQ ID NO: 2672467 - DNA, 25 bp, Homo sapien
gttctgttgtaataatcgaatgaag

SEQ ID NO: 2672468 - DNA, 25 bp, Homo sapien
ctgttgtaataatcgaatgaagaaa

SEQ ID NO: 2672469 - DNA, 25 bp, Homo sapien
tagttctgttgtaataatcgaatga

SEQ ID NO: 2672470 - DNA, 25 bp, Homo sapien
cacacgtgtttgcattgaagaaact

SEQ ID NO: 2672471 - DNA, 25 bp, Homo sapien
aactgacacagatttggcatttgtg

SEQ ID NO: 2672472 - DNA, 25 bp, Homo sapien
cagatttggcatttgtggctttaag

SEQ ID NO: 2672473 - DNA, 25 bp, Homo sapien
ccacacgtgtttgcattgaagaaac

SEQ ID NO: 2672474 - DNA, 25 bp, Homo sapien
taaaatatgccttcggtggttctgt

SEQ ID NO: 2672475 - DNA, 25 bp, Homo sapien
gttagccattacactctgaggcaac

SEQ ID NO: 2672476 - DNA, 25 bp, Homo sapien
ctaaaatatgccttcggtggttctg

SEQ ID NO: 2672477 - DNA, 25 bp, Homo sapien
tttcttgttagccattacactctga

SEQ ID NO: 2672478 - DNA, 25 bp, Homo sapien
gtgtggcctgattctctaagggact

SEQ ID NO: 2672479 - DNA, 25 bp, Homo sapien
ggcctgattctctaagggacttctc

SEQ ID NO: 2672480 - DNA, 25 bp, Homo sapien
tccttccactcggttggggtgtggc

SEQ ID NO: 2672481 - DNA, 25 bp, Homo sapien
ttggggtgtggcctgattctctaag

SEQ ID NO: 2672482 - DNA, 25 bp, Homo sapien
tgtggctcagaagtactgagctgcg

SEQ ID NO: 2672483 - DNA, 25 bp, Homo sapien
ggctcagaagtactgagctgcgagc

SEQ ID NO: 2672484 - DNA, 25 bp, Homo sapien
cctgtggctcagaagtactgagctg

SEQ ID NO: 2672485 - DNA, 25 bp, Homo sapien
cagaagtactgagctgcgagctgtg

SEQ ID NO: 2672486 - DNA, 25 bp, Homo sapien
tagtctctgattgatactgttctaa

SEQ ID NO: 2672487 - DNA, 25 bp, Homo sapien
tgctctttctttagtctctgattga

SEQ ID NO: 2672488 - DNA, 25 bp, Homo sapien
tactgttctaattgtccacattctg

SEQ ID NO: 2672489 - DNA, 25 bp, Homo sapien
gttctaattgtccacattctgccat

SEQ ID NO: 2672490 - DNA, 25 bp, Homo sapien
ctgtagagccctaaactattattaa

SEQ ID NO: 2672491 - DNA, 25 bp, Homo sapien
cctgaggtagggatcattaagtttt

SEQ ID NO: 2672492 - DNA, 25 bp, Homo sapien
ctgaggtagggatcattaagttttc

SEQ ID NO: 2672493 - DNA, 25 bp, Homo sapien
ttttctgtagagccctaaactatta

SEQ ID NO: 2672494 - DNA, 25 bp, Homo sapien
ttagttctctagttgtgctttcttg

SEQ ID NO: 2672495 - DNA, 25 bp, Homo sapien
cttgctgtatcttcaacaagtagtt

SEQ ID NO: 2672496 - DNA, 25 bp, Homo sapien
tctagttgtgctttcttgcaactct

SEQ ID NO: 2672497 - DNA, 25 bp, Homo sapien
gaagctacataggatccagattcaa

SEQ ID NO: 2672498 - DNA, 25 bp, Homo sapien
actgttccattccctaccagggtgg

SEQ ID NO: 2672499 - DNA, 25 bp, Homo sapien
ggataagtggggtctgtatccttcc

SEQ ID NO: 2672500 - DNA, 25 bp, Homo sapien
attccctaccagggtggctccatcg

SEQ ID NO: 2672501 - DNA, 25 bp, Homo sapien
gttccattccctaccagggtggctc

SEQ ID NO: 2672502 - DNA, 25 bp, Homo sapien
gttttatggccattatcatcagcca

SEQ ID NO: 2672503 - DNA, 25 bp, Homo sapien
ctagtcaccaaatgttttatggcca

SEQ ID NO: 2672504 - DNA, 25 bp, Homo sapien
atcatcagccatttgtgtagcagct

SEQ ID NO: 2672505 - DNA, 25 bp, Homo sapien
tgtgtagcagctgaaggaaggcctc

SEQ ID NO: 2672506 - DNA, 25 bp, Homo sapien
aatttatatttcttacagctcaggg

SEQ ID NO: 2672507 - DNA, 25 bp, Homo sapien
tcttacagctcaggggatgatgatc

SEQ ID NO: 2672508 - DNA, 25 bp, Homo sapien
ctagtctgtgcatgagtactgaaga

SEQ ID NO: 2672509 - DNA, 25 bp, Homo sapien
tactgaagaatattgacataggtgg

SEQ ID NO: 2672510 - DNA, 25 bp, Homo sapien
cttgcacttggttgataggaacgtc

SEQ ID NO: 2672511 - DNA, 25 bp, Homo sapien
gataggaacgtcttctgatctgctc

SEQ ID NO: 2672512 - DNA, 25 bp, Homo sapien
ttgataggaacgtcttctgatctgc

SEQ ID NO: 2672513 - DNA, 25 bp, Homo sapien
cttggttgataggaacgtcttctga

SEQ ID NO: 2672514 - DNA, 25 bp, Homo sapien
cagatatggctgaaaggttggcttt

SEQ ID NO: 2672515 - DNA, 25 bp, Homo sapien
tcagatatggctgaaaggttggctt

SEQ ID NO: 2672516 - DNA, 25 bp, Homo sapien
gatgatgacatccttccaaggttct

SEQ ID NO: 2672517 - DNA, 25 bp, Homo sapien
catccttccaaggttctgtcagctt

SEQ ID NO: 2672518 - DNA, 25 bp, Homo sapien
gaaatgccagcaagcctgatatcat

SEQ ID NO: 2672519 - DNA, 25 bp, Homo sapien
tcagaaatgccagcaagcctgatat

SEQ ID NO: 2672520 - DNA, 25 bp, Homo sapien
caccaacgtgtcatctatcattagg

SEQ ID NO: 2672521 - DNA, 25 bp, Homo sapien
ccaccaacgtgtcatctatcattag

SEQ ID NO: 2672522 - DNA, 25 bp, Homo sapien
caacgtgtcatctatcattaggtat

SEQ ID NO: 2672523 - DNA, 25 bp, Homo sapien
acccaccaacgtgtcatctatcatt

SEQ ID NO: 2672524 - DNA, 25 bp, Homo sapien
ttgatgtctcaagtgtgtttattct

SEQ ID NO: 2672525 - DNA, 25 bp, Homo sapien
cctgggatcgctggtgttcttccac

SEQ ID NO: 2672526 - DNA, 25 bp, Homo sapien
tgttgagcgtctcctgggatcgctg

SEQ ID NO: 2672527 - DNA, 25 bp, Homo sapien
tgtttattctgttgagcgtctcctg

SEQ ID NO: 2672528 - DNA, 25 bp, Homo sapien
cgctcttttcgtggcattcacacca

SEQ ID NO: 2672529 - DNA, 25 bp, Homo sapien
gccatgcaagggcacagaagctgga

SEQ ID NO: 2672530 - DNA, 25 bp, Homo sapien
aagagaaagagataccagactcgct

SEQ ID NO: 2672531 - DNA, 25 bp, Homo sapien
tagggagccctaatctgataagact

SEQ ID NO: 2672532 - DNA, 25 bp, Homo sapien
aagattcttagctatcaagggctgc

SEQ ID NO: 2672533 - DNA, 25 bp, Homo sapien
ccaaagacggaagccaaataggtag

SEQ ID NO: 2672534 - DNA, 25 bp, Homo sapien
tggccaacgatgttagaacctagcg

SEQ ID NO: 2672535 - DNA, 25 bp, Homo sapien
gacacgttgtaaatgctgcttccta

SEQ ID NO: 2672536 - DNA, 25 bp, Homo sapien
tctgtgagcggacactctggtgatg

SEQ ID NO: 2672537 - DNA, 25 bp, Homo sapien
gaaattttagcctgttatagaggca

SEQ ID NO: 2672538 - DNA, 25 bp, Homo sapien
catctatgttatgagctctgtgagc

SEQ ID NO: 2672539 - DNA, 25 bp, Homo sapien
gactaatgtgaccaccccttgatat

SEQ ID NO: 2672540 - DNA, 25 bp, Homo sapien
gctcatgaaccaaagtatacctctg

SEQ ID NO: 2672541 - DNA, 25 bp, Homo sapien
cttccggttggtccttgaggcgacg

SEQ ID NO: 2672542 - DNA, 25 bp, Homo sapien
caggtttcatgtcagcacccaaggg

SEQ ID NO: 2672543 - DNA, 25 bp, Homo sapien
tacctctgacgtcttgattcttgga

SEQ ID NO: 2672544 - DNA, 25 bp, Homo sapien
taagtgcacgatgattatgctactc

SEQ ID NO: 2672545 - DNA, 25 bp, Homo sapien
gtcacagctgcaaaatagtcttaag

SEQ ID NO: 2672546 - DNA, 25 bp, Homo sapien
gagcaagatgtatttaagatgaagc

SEQ ID NO: 2672547 - DNA, 25 bp, Homo sapien
gcataaagaatgtaagggaacagga

SEQ ID NO: 2672548 - DNA, 25 bp, Homo sapien
ggaaggcccaaatcataagatcgct

SEQ ID NO: 2672549 - DNA, 25 bp, Homo sapien
cagtatacatatctacatggaaggc

SEQ ID NO: 2672550 - DNA, 25 bp, Homo sapien
ggaaagacctactgcacatcccaga

SEQ ID NO: 2672551 - DNA, 25 bp, Homo sapien
aataaagcattaacaacacagaggg

SEQ ID NO: 2672552 - DNA, 25 bp, Homo sapien
cagctactcctatattcttgaggga

SEQ ID NO: 2672553 - DNA, 25 bp, Homo sapien
tcttctgctagagatggttgtcctc

SEQ ID NO: 2672554 - DNA, 25 bp, Homo sapien
acacagcttccagagcaacgcacat

SEQ ID NO: 2672555 - DNA, 25 bp, Homo sapien
gaagacccgccctcttctgctagag

SEQ ID NO: 2672556 - DNA, 25 bp, Homo sapien
ttcagataatttgcctgctgcaata

SEQ ID NO: 2672557 - DNA, 25 bp, Homo sapien
ttggaagcattactggcttgttgtt

SEQ ID NO: 2672558 - DNA, 25 bp, Homo sapien
gcattactggcttgttgttcaaaat

SEQ ID NO: 2672559 - DNA, 25 bp, Homo sapien
taatttgcctgctgcaataattccc

SEQ ID NO: 2672560 - DNA, 25 bp, Homo sapien
ggatctgaggtcatctgaatctggg

SEQ ID NO: 2672561 - DNA, 25 bp, Homo sapien
ctgaatctggggctactataaacat

SEQ ID NO: 2672562 - DNA, 25 bp, Homo sapien
tcatctgaatctggggctactataa

SEQ ID NO: 2672563 - DNA, 25 bp, Homo sapien
gaggtcatctgaatctggggctact

SEQ ID NO: 2672564 - DNA, 25 bp, Homo sapien
tcttgatgcacgctagatgctggca

SEQ ID NO: 2672565 - DNA, 25 bp, Homo sapien
taaaactgcccctgaggtacttgcc

SEQ ID NO: 2672566 - DNA, 25 bp, Homo sapien
gatgctggcaatctgcactaggccc

SEQ ID NO: 2672567 - DNA, 25 bp, Homo sapien
tcaaaattccggagagagcagaagc

SEQ ID NO: 2672568 - DNA, 25 bp, Homo sapien
ttctggtttttctggtgtaccaatc

SEQ ID NO: 2672569 - DNA, 25 bp, Homo sapien
tggtttttctggtgtaccaatcgtc

SEQ ID NO: 2672570 - DNA, 25 bp, Homo sapien
ttttctggtgtaccaatcgtcttgg

SEQ ID NO: 2672571 - DNA, 25 bp, Homo sapien
tctggtgtaccaatcgtcttggcca

SEQ ID NO: 2672572 - DNA, 25 bp, Homo sapien
tctagggaatctcttttagagactt

SEQ ID NO: 2672573 - DNA, 25 bp, Homo sapien
agtaaaactgtttgaccttgatgtt

SEQ ID NO: 2672574 - DNA, 25 bp, Homo sapien
gaaggatatagctgtaacccctgcg

SEQ ID NO: 2672575 - DNA, 25 bp, Homo sapien
caggccatgaaggatatagctgtaa

SEQ ID NO: 2672576 - DNA, 25 bp, Homo sapien
gcatggactaagttcccggtttgtc

SEQ ID NO: 2672577 - DNA, 25 bp, Homo sapien
ctaagttcccggtttgtccttgatg

SEQ ID NO: 2672578 - DNA, 25 bp, Homo sapien
taataatagatctcaataagacagc

SEQ ID NO: 2672579 - DNA, 25 bp, Homo sapien
tcaataagacagctctcgtcttcca

SEQ ID NO: 2672580 - DNA, 25 bp, Homo sapien
tcactggaacatggaagtagctgga

SEQ ID NO: 2672581 - DNA, 25 bp, Homo sapien
tgctcattagtggtgaaatggataa

SEQ ID NO: 2672582 - DNA, 25 bp, Homo sapien
ggccattattctgattatctgggtg

SEQ ID NO: 2672583 - DNA, 25 bp, Homo sapien
tggaatccacctagatgctcattag

SEQ ID NO: 2672584 - DNA, 25 bp, Homo sapien
catcgaggcagaagctaggttgtcc

SEQ ID NO: 2672585 - DNA, 25 bp, Homo sapien
gcaaaactcctcatcgaggcagaag

SEQ ID NO: 2672586 - DNA, 25 bp, Homo sapien
ttcactcatgcaaaactcctcatcg

SEQ ID NO: 2672587 - DNA, 25 bp, Homo sapien
cagaagctaggttgtccctggtcca

SEQ ID NO: 2672588 - DNA, 25 bp, Homo sapien
gttcgacgtatctggagaggcctca

SEQ ID NO: 2672589 - DNA, 25 bp, Homo sapien
ggttcgacgtatctggagaggcctc

SEQ ID NO: 2672590 - DNA, 25 bp, Homo sapien
accattttacacactgaatttctga

SEQ ID NO: 2672591 - DNA, 25 bp, Homo sapien
atcagtcttctcattcgcatgttta

SEQ ID NO: 2672592 - DNA, 25 bp, Homo sapien
tcaacttcaatccactttaccattt

SEQ ID NO: 2672593 - DNA, 25 bp, Homo sapien
tctcattcgcatgtttattacttca

SEQ ID NO: 2672594 - DNA, 25 bp, Homo sapien
ctgttgaaaattggtcaaggacttt

SEQ ID NO: 2672595 - DNA, 25 bp, Homo sapien
cttggtgagtagctcattccctatc

SEQ ID NO: 2672596 - DNA, 25 bp, Homo sapien
tccctatcattgattttactgttga

SEQ ID NO: 2672597 - DNA, 25 bp, Homo sapien
aattggtcaaggactttccaagtca

SEQ ID NO: 2672598 - DNA, 25 bp, Homo sapien
tttcaatcagagctgaccatactgt

SEQ ID NO: 2672599 - DNA, 25 bp, Homo sapien
aaatggaattgaaatctgcatctgc

SEQ ID NO: 2672600 - DNA, 25 bp, Homo sapien
cctgtaagaaaaagtgcagaaatgg

SEQ ID NO: 2672601 - DNA, 25 bp, Homo sapien
tgtctctctagtctttcaatcagag

SEQ ID NO: 2672602 - DNA, 25 bp, Homo sapien
taattgctagcattaccttcagcag

SEQ ID NO: 2672603 - DNA, 25 bp, Homo sapien
ccttcagcagcacttaacactgttg

SEQ ID NO: 2672604 - DNA, 25 bp, Homo sapien
aaaaggaactccagaatgacagcca

SEQ ID NO: 2672605 - DNA, 25 bp, Homo sapien
gaagaatcagtcattcactttaggc

SEQ ID NO: 2672606 - DNA, 25 bp, Homo sapien
ccagtgcacactgttcttgtttcct

SEQ ID NO: 2672607 - DNA, 25 bp, Homo sapien
agactgtctcatgtccagtgcacac

SEQ ID NO: 2672608 - DNA, 25 bp, Homo sapien
tattaacttggagtatctgccccat

SEQ ID NO: 2672609 - DNA, 25 bp, Homo sapien
cctgttattattaacttggagtatc

SEQ ID NO: 2672610 - DNA, 25 bp, Homo sapien
taagacaagttaagtacccagcatg

SEQ ID NO: 2672611 - DNA, 25 bp, Homo sapien
tagtaaactactcaacacatttgag

SEQ ID NO: 2672612 - DNA, 25 bp, Homo sapien
gcctctatttactcatctgtagaca

SEQ ID NO: 2672613 - DNA, 25 bp, Homo sapien
tgaaaggtgaacattagagccaaat

SEQ ID NO: 2672614 - DNA, 25 bp, Homo sapien
tttactgctaagaaacgatgttgct

SEQ ID NO: 2672615 - DNA, 25 bp, Homo sapien
tatcaagccagaataatggcacgct

SEQ ID NO: 2672616 - DNA, 25 bp, Homo sapien
gctctatctctccagaaggacacct

SEQ ID NO: 2672617 - DNA, 25 bp, Homo sapien
gacctgttaatatcaagccagaata

SEQ ID NO: 2672618 - DNA, 25 bp, Homo sapien
tcacaggttcaagcgttgttcctgc

SEQ ID NO: 2672619 - DNA, 25 bp, Homo sapien
ctcacaggttcaagcgttgttcctg

SEQ ID NO: 2672620 - DNA, 25 bp, Homo sapien
cctcctgggttcaagcgattatctt

SEQ ID NO: 2672621 - DNA, 25 bp, Homo sapien
cacctcctgggttcaagcgattatc

SEQ ID NO: 2672622 - DNA, 25 bp, Homo sapien
tcctgggttcaagcgattatcttgt

SEQ ID NO: 2672623 - DNA, 25 bp, Homo sapien
ggagtgcagcgcaggatctcagctc

SEQ ID NO: 2672624 - DNA, 25 bp, Homo sapien
aatgtcaacttacgtagggtgggca

SEQ ID NO: 2672625 - DNA, 25 bp, Homo sapien
tgctcggttacaacacaaaatggtg

SEQ ID NO: 2672626 - DNA, 25 bp, Homo sapien
gctaaaccctgtgatgcctttggaa

SEQ ID NO: 2672627 - DNA, 25 bp, Homo sapien
catgatgttgcgtgcttccaagaca

SEQ ID NO: 2672628 - DNA, 25 bp, Homo sapien
tcatttcctctgaaccatcaaatgc

SEQ ID NO: 2672629 - DNA, 25 bp, Homo sapien
taaatgatagactagcgtgtaggat

SEQ ID NO: 2672630 - DNA, 25 bp, Homo sapien
aatatgcagtttactctgaaatggc

SEQ ID NO: 2672631 - DNA, 25 bp, Homo sapien
tgaaccataatccttcacttttgga

SEQ ID NO: 2672632 - DNA, 25 bp, Homo sapien
catgacccagggcttgaacagcact

SEQ ID NO: 2672633 - DNA, 25 bp, Homo sapien
tcctcacatttaccatgacccaggg

SEQ ID NO: 2672634 - DNA, 25 bp, Homo sapien
acatttaccatgacccagggcttga

SEQ ID NO: 2672635 - DNA, 25 bp, Homo sapien
taccatgacccagggcttgaacagc

SEQ ID NO: 2672636 - DNA, 25 bp, Homo sapien
atctgcaggtggagcttgcgtcact

SEQ ID NO: 2672637 - DNA, 25 bp, Homo sapien
ttgtgaatgatacgggccaatggca

SEQ ID NO: 2672638 - DNA, 25 bp, Homo sapien
tatcaacagactcatcctcttgtga

SEQ ID NO: 2672639 - DNA, 25 bp, Homo sapien
gagcttgcgtcactttatcaacaga

SEQ ID NO: 2672640 - DNA, 25 bp, Homo sapien
aaatgctttatggttgagttatgag

SEQ ID NO: 2672641 - DNA, 25 bp, Homo sapien
ttatgagtgtcagctatgtctctgc

SEQ ID NO: 2672642 - DNA, 25 bp, Homo sapien
tatgtctctgcttgccttaattaga

SEQ ID NO: 2672643 - DNA, 25 bp, Homo sapien
tgagttatgagtgtcagctatgtct

SEQ ID NO: 2672644 - DNA, 25 bp, Homo sapien
ttgcagaagactcctagccatggat

SEQ ID NO: 2672645 - DNA, 25 bp, Homo sapien
agactcctagccatggatgaggctg

SEQ ID NO: 2672646 - DNA, 25 bp, Homo sapien
atggatgaggctggcttcatccagg

SEQ ID NO: 2672647 - DNA, 25 bp, Homo sapien
ggctggcttcatccaggaggagtta

SEQ ID NO: 2672648 - DNA, 25 bp, Homo sapien
ctttacagtgagctctaggttccag

SEQ ID NO: 2672649 - DNA, 25 bp, Homo sapien
gagctctaggttccagtctccactc

SEQ ID NO: 2672650 - DNA, 25 bp, Homo sapien
tacagtgagctctaggttccagtct

SEQ ID NO: 2672651 - DNA, 25 bp, Homo sapien
cactctttcatagcttctccaccag

SEQ ID NO: 2672652 - DNA, 25 bp, Homo sapien
aaacgccactgctgtttgtagagct

SEQ ID NO: 2672653 - DNA, 25 bp, Homo sapien
cttggccttagaacatgagttatgc

SEQ ID NO: 2672654 - DNA, 25 bp, Homo sapien
catgcatggtgtatggctgctcaaa

SEQ ID NO: 2672655 - DNA, 25 bp, Homo sapien
tatacgcatctaatggctcgaggga

SEQ ID NO: 2672656 - DNA, 25 bp, Homo sapien
cagaggagcatataaggcaactcca

SEQ ID NO: 2672657 - DNA, 25 bp, Homo sapien
aactccattactgcatctcttctgc

SEQ ID NO: 2672658 - DNA, 25 bp, Homo sapien
catataaggcaactccattactgca

SEQ ID NO: 2672659 - DNA, 25 bp, Homo sapien
tctgcttcagaggagcatataaggc

SEQ ID NO: 2672660 - DNA, 25 bp, Homo sapien
tgcctacttcctaatcagtatagtt

SEQ ID NO: 2672661 - DNA, 25 bp, Homo sapien
atttgtttcatgttagagcccctta

SEQ ID NO: 2672662 - DNA, 25 bp, Homo sapien
tctgtgaagttttgcactcaatcag

SEQ ID NO: 2672663 - DNA, 25 bp, Homo sapien
gctccagttctttgtgtggttctgt

SEQ ID NO: 2672664 - DNA, 25 bp, Homo sapien
ctattagaaccatatgtcgccctca

SEQ ID NO: 2672665 - DNA, 25 bp, Homo sapien
gaagcatatggcactagatctgaac

SEQ ID NO: 2672666 - DNA, 25 bp, Homo sapien
tgaagatccggccttctgaagaaat

SEQ ID NO: 2672667 - DNA, 25 bp, Homo sapien
tggctgtgtggtaaggactcctata

SEQ ID NO: 2672668 - DNA, 25 bp, Homo sapien
tagatcaaaggtgtgaccgttgccc

SEQ ID NO: 2672669 - DNA, 25 bp, Homo sapien
tacaaaatagatcaaaggtgtgacc

SEQ ID NO: 2672670 - DNA, 25 bp, Homo sapien
accgttgccctccacgtttgtatgg

SEQ ID NO: 2672671 - DNA, 25 bp, Homo sapien
tgtatggtccggaaaactgagagca

SEQ ID NO: 2672672 - DNA, 25 bp, Homo sapien
gtcctctgatactttcccattaccc

SEQ ID NO: 2672673 - DNA, 25 bp, Homo sapien
tgtcctctgatactttcccattacc

SEQ ID NO: 2672674 - DNA, 25 bp, Homo sapien
tttctatgtcctctgatactttccc

SEQ ID NO: 2672675 - DNA, 25 bp, Homo sapien
ctatgtcctctgatactttcccatt

SEQ ID NO: 2672676 - DNA, 25 bp, Homo sapien
atgaggagataagagggaatctgct

SEQ ID NO: 2672677 - DNA, 25 bp, Homo sapien
gatattctgcgggagtgcttccaga

SEQ ID NO: 2672678 - DNA, 25 bp, Homo sapien
ggagataagagggaatctgcttttc

SEQ ID NO: 2672679 - DNA, 25 bp, Homo sapien
acttaggtagaagagtcatatgagg

SEQ ID NO: 2672680 - DNA, 25 bp, Homo sapien
tatttcttcagtactggaggtctcc

SEQ ID NO: 2672681 - DNA, 25 bp, Homo sapien
gctattgttccctcaccactggcaa

SEQ ID NO: 2672682 - DNA, 25 bp, Homo sapien
tgcgctgttttaggtcacaagctac

SEQ ID NO: 2672683 - DNA, 25 bp, Homo sapien
caagctaccatgattgtgggcaata

SEQ ID NO: 2672684 - DNA, 25 bp, Homo sapien
ctctgctgacagtgattctaccttc

SEQ ID NO: 2672685 - DNA, 25 bp, Homo sapien
agtcgttcctggcaaggactctgct

SEQ ID NO: 2672686 - DNA, 25 bp, Homo sapien
gctgacagtgattctaccttcaagg

SEQ ID NO: 2672687 - DNA, 25 bp, Homo sapien
cgttcctggcaaggactctgctgac

SEQ ID NO: 2672688 - DNA, 25 bp, Homo sapien
tgtccgggacggaagccggagcctg

SEQ ID NO: 2672689 - DNA, 25 bp, Homo sapien
agcggcgggcggagttagttggagg

SEQ ID NO: 2672690 - DNA, 25 bp, Homo sapien
acaggctgagcacgcggaggcagcg

SEQ ID NO: 2672691 - DNA, 25 bp, Homo sapien
gagttagttggaggctccggctccc

SEQ ID NO: 2672692 - DNA, 25 bp, Homo sapien
gagatcacatgtggcctacaaagcc

SEQ ID NO: 2672693 - DNA, 25 bp, Homo sapien
aattttaaacagagcaatactttgt

SEQ ID NO: 2672694 - DNA, 25 bp, Homo sapien
aagtatgctaactcctaatacagca

SEQ ID NO: 2672695 - DNA, 25 bp, Homo sapien
gaaaagtatgctaactcctaataca

SEQ ID NO: 2672696 - DNA, 25 bp, Homo sapien
cctagaaacaggctatgtgaaacta

SEQ ID NO: 2672697 - DNA, 25 bp, Homo sapien
cctacgatgtcctagataaaaccct

SEQ ID NO: 2672698 - DNA, 25 bp, Homo sapien
aaatacaactaattaattgacagga

SEQ ID NO: 2672699 - DNA, 25 bp, Homo sapien
tttactacagtatgcctatcttgca

SEQ ID NO: 2672700 - DNA, 25 bp, Homo sapien
gataaaatgatggtttcagggttcc

SEQ ID NO: 2672701 - DNA, 25 bp, Homo sapien
ccagtcagtggcaaatgggttacca

SEQ ID NO: 2672702 - DNA, 25 bp, Homo sapien
tctaatgtactgagaagagattcca

SEQ ID NO: 2672703 - DNA, 25 bp, Homo sapien
tgcacacaaagtgcccaaaggcaac

SEQ ID NO: 2672704 - DNA, 25 bp, Homo sapien
tcaacactagactccactaggaggc

SEQ ID NO: 2672705 - DNA, 25 bp, Homo sapien
tgttgtgctcctatgaggcccaaga

SEQ ID NO: 2672706 - DNA, 25 bp, Homo sapien
tcaagggatcctccgaatctgccaa

SEQ ID NO: 2672707 - DNA, 25 bp, Homo sapien
gaaaagcctaggcactttggactta

SEQ ID NO: 2672708 - DNA, 25 bp, Homo sapien
gaagacaaccttccacctactgaaa

SEQ ID NO: 2672709 - DNA, 25 bp, Homo sapien
tgttatcctgatccgcacagcatta

SEQ ID NO: 2672710 - DNA, 25 bp, Homo sapien
cagcattatgctgaactcccaagat

SEQ ID NO: 2672711 - DNA, 25 bp, Homo sapien
tcacctcagtgggaccttgttatcc

SEQ ID NO: 2672712 - DNA, 25 bp, Homo sapien
taatatacctccttcgcatgctgaa

SEQ ID NO: 2672713 - DNA, 25 bp, Homo sapien
gattaactctctagccacaaatgag

SEQ ID NO: 2672714 - DNA, 25 bp, Homo sapien
taccacgaggtactttgggcactga

SEQ ID NO: 2672715 - DNA, 25 bp, Homo sapien
cacaagctactttgatgcgggagaa

SEQ ID NO: 2672716 - DNA, 25 bp, Homo sapien
tgtacaatcatcactcagtctggca

SEQ ID NO: 2672717 - DNA, 25 bp, Homo sapien
tttgcccaaagggaccagccttgaa

SEQ ID NO: 2672718 - DNA, 25 bp, Homo sapien
tgttaaaatgccaaatccgatgtga

SEQ ID NO: 2672719 - DNA, 25 bp, Homo sapien
cctgagcctgatacatctggatgga

SEQ ID NO: 2672720 - DNA, 25 bp, Homo sapien
caaaggtcccaagacagaaattagc

SEQ ID NO: 2672721 - DNA, 25 bp, Homo sapien
tgtgaaatagtagggacttcctggt

SEQ ID NO: 2672722 - DNA, 25 bp, Homo sapien
cccaaacattgttgtggataaccaa

SEQ ID NO: 2672723 - DNA, 25 bp, Homo sapien
gctcagggagtgcaaatatatttca

SEQ ID NO: 2672724 - DNA, 25 bp, Homo sapien
tacatgcaaaatggctctgaagaac

SEQ ID NO: 2672725 - DNA, 25 bp, Homo sapien
gagaacttgtattttagagtgagag

SEQ ID NO: 2672726 - DNA, 25 bp, Homo sapien
tgactggataagagactgactggat

SEQ ID NO: 2672727 - DNA, 25 bp, Homo sapien
tagagtgagaggtaaaacaaggaaa

SEQ ID NO: 2672728 - DNA, 25 bp, Homo sapien
taattactcccctataatctgcggg

SEQ ID NO: 2672729 - DNA, 25 bp, Homo sapien
aatctgcgggctgtgaattatccca

SEQ ID NO: 2672730 - DNA, 25 bp, Homo sapien
taatcagccagtcagttccacagtg

SEQ ID NO: 2672731 - DNA, 25 bp, Homo sapien
gagccgacaagatctgacagcagga

SEQ ID NO: 2672732 - DNA, 25 bp, Homo sapien
gtctgctccaatacaacatgctatg

SEQ ID NO: 2672733 - DNA, 25 bp, Homo sapien
cattttcgtctctcaattagtggag

SEQ ID NO: 2672734 - DNA, 25 bp, Homo sapien
gcagagtgccccatgtatgggtcct

SEQ ID NO: 2672735 - DNA, 25 bp, Homo sapien
gattataagtcccaaaggaagagct

SEQ ID NO: 2672736 - DNA, 25 bp, Homo sapien
taactttatgggcagaactctcaga

SEQ ID NO: 2672737 - DNA, 25 bp, Homo sapien
taaggcataccgtcagagaaaaact

SEQ ID NO: 2672738 - DNA, 25 bp, Homo sapien
taccagggagagtagcaggcgttac

SEQ ID NO: 2672739 - DNA, 25 bp, Homo sapien
aaatcacactggaaagcgagcaacg

SEQ ID NO: 2672740 - DNA, 25 bp, Homo sapien
tgtcagcaacgccatctgcctacct

SEQ ID NO: 2672741 - DNA, 25 bp, Homo sapien
ctctagggagggacagtctaaacca

SEQ ID NO: 2672742 - DNA, 25 bp, Homo sapien
tctgcctaccttccacacagaataa

SEQ ID NO: 2672743 - DNA, 25 bp, Homo sapien
gaataaacgttcaactatataaaga

SEQ ID NO: 2672744 - DNA, 25 bp, Homo sapien
tagaaaggcgaatcatctcatgcag

SEQ ID NO: 2672745 - DNA, 25 bp, Homo sapien
gataagacatatccttcacttaaaa

SEQ ID NO: 2672746 - DNA, 25 bp, Homo sapien
ttaagcaatgtttcaccctctctca

SEQ ID NO: 2672747 - DNA, 25 bp, Homo sapien
gaaattcaaagactaagcattacga

SEQ ID NO: 2672748 - DNA, 25 bp, Homo sapien
aaaatcactgcctaaaactacttgg

SEQ ID NO: 2672749 - DNA, 25 bp, Homo sapien
gtttccaacataagtattaggtgag

SEQ ID NO: 2672750 - DNA, 25 bp, Homo sapien
tcatgctggaaaagtctacagacct

SEQ ID NO: 2672751 - DNA, 25 bp, Homo sapien
tatagtacactctttatagtgctgc

SEQ ID NO: 2672752 - DNA, 25 bp, Homo sapien
tgccactgagtgaacacagaaaact

SEQ ID NO: 2672753 - DNA, 25 bp, Homo sapien
ggtgggcaccagttccaatcagccc

SEQ ID NO: 2672754 - DNA, 25 bp, Homo sapien
tgaaaatgaaaactggcctgtagaa

SEQ ID NO: 2672755 - DNA, 25 bp, Homo sapien
gagtaaagcacttaaccagtccctc

SEQ ID NO: 2672756 - DNA, 25 bp, Homo sapien
acttacatggccgaaaggactttgc

SEQ ID NO: 2672757 - DNA, 25 bp, Homo sapien
cattttgttatccttcaatggcggg

SEQ ID NO: 2672758 - DNA, 25 bp, Homo sapien
gaatagtgtcactttacgagactcc

SEQ ID NO: 2672759 - DNA, 25 bp, Homo sapien
caatggcgggtagaataatggcccc

SEQ ID NO: 2672760 - DNA, 25 bp, Homo sapien
cgtgagcacttgcattagtatatac

SEQ ID NO: 2672761 - DNA, 25 bp, Homo sapien
gacaaatcaatctcataatgacata

SEQ ID NO: 2672762 - DNA, 25 bp, Homo sapien
tttaaacatagaatcctaaggttgc

SEQ ID NO: 2672763 - DNA, 25 bp, Homo sapien
aataaaagagccagctgattttcat

SEQ ID NO: 2672764 - DNA, 25 bp, Homo sapien
gggaccagctttctaagacatggct

SEQ ID NO: 2672765 - DNA, 25 bp, Homo sapien
tctattgacattagaccgcaggagt

SEQ ID NO: 2672766 - DNA, 25 bp, Homo sapien
gcatattttaattgggactagccat

SEQ ID NO: 2672767 - DNA, 25 bp, Homo sapien
taatagtaagtcaagggtagcaacc

SEQ ID NO: 2672768 - DNA, 25 bp, Homo sapien
actttgtagcttaaaagtgcacata

SEQ ID NO: 2672769 - DNA, 25 bp, Homo sapien
aatttcactttgtagcttaaaagtg

SEQ ID NO: 2672770 - DNA, 25 bp, Homo sapien
tttcactttgtagcttaaaagtgca

SEQ ID NO: 2672771 - DNA, 25 bp, Homo sapien
tcactttgtagcttaaaagtgcaca

SEQ ID NO: 2672772 - DNA, 25 bp, Homo sapien
taaataagtttttatgccatacatg

SEQ ID NO: 2672773 - DNA, 25 bp, Homo sapien
catgatggccattctttaagattgg

SEQ ID NO: 2672774 - DNA, 25 bp, Homo sapien
catacactcaactaaaacctcagga

SEQ ID NO: 2672775 - DNA, 25 bp, Homo sapien
tattcagctgaatttatcttttact

SEQ ID NO: 2672776 - DNA, 25 bp, Homo sapien
ttacaggcatgttttagatcattgt

SEQ ID NO: 2672777 - DNA, 25 bp, Homo sapien
catgttttagatcattgtagactca

SEQ ID NO: 2672778 - DNA, 25 bp, Homo sapien
caggcatgttttagatcattgtaga

SEQ ID NO: 2672779 - DNA, 25 bp, Homo sapien
tttagatcattgtagactcacatgc

SEQ ID NO: 2672780 - DNA, 25 bp, Homo sapien
ggctcaaggatcctctgaccataga

SEQ ID NO: 2672781 - DNA, 25 bp, Homo sapien
tcaaggatcctctgaccatagactc

SEQ ID NO: 2672782 - DNA, 25 bp, Homo sapien
gctcaaggatcctctgaccatagac

SEQ ID NO: 2672783 - DNA, 25 bp, Homo sapien
aaggatcctctgaccatagactccc

SEQ ID NO: 2672784 - DNA, 25 bp, Homo sapien
cagtgaggcttttcagttatccagg

SEQ ID NO: 2672785 - DNA, 25 bp, Homo sapien
catccatctgctgaagggttaaccc

SEQ ID NO: 2672786 - DNA, 25 bp, Homo sapien
catgaaggctacttggaacagaatc

SEQ ID NO: 2672787 - DNA, 25 bp, Homo sapien
tactctcaccggaatagtcttagga

SEQ ID NO: 2672788 - DNA, 25 bp, Homo sapien
acctgtaaaattccattgacaaaat

SEQ ID NO: 2672789 - DNA, 25 bp, Homo sapien
ttttcaaggatgtattcaaaattaa

SEQ ID NO: 2672790 - DNA, 25 bp, Homo sapien
atcagtccagaggtatatcagatac

SEQ ID NO: 2672791 - DNA, 25 bp, Homo sapien
aaataatcagtagtccccataatca

SEQ ID NO: 2672792 - DNA, 25 bp, Homo sapien
tagtattgttcgtaataacaaagac

SEQ ID NO: 2672793 - DNA, 25 bp, Homo sapien
cagaatgctatgcacccctttaaaa

SEQ ID NO: 2672794 - DNA, 25 bp, Homo sapien
gcaatttaaacgtccttcaatagga

SEQ ID NO: 2672795 - DNA, 25 bp, Homo sapien
caaagacccggatgtttataatggc

SEQ ID NO: 2672796 - DNA, 25 bp, Homo sapien
ttgtccggcccgcaggcggaagctt

SEQ ID NO: 2672797 - DNA, 25 bp, Homo sapien
aacccgcgtcagtcatcattcagaa

SEQ ID NO: 2672798 - DNA, 25 bp, Homo sapien
atccgccagcgagagcagcgagctg

SEQ ID NO: 2672799 - DNA, 25 bp, Homo sapien
ctagacgcgcgggtgccttatgact

SEQ ID NO: 2672800 - DNA, 25 bp, Homo sapien
cacgccgatacgaccccgccgggag

SEQ ID NO: 2672801 - DNA, 25 bp, Homo sapien
cgccgatacgaccccgccgggagag

SEQ ID NO: 2672802 - DNA, 25 bp, Homo sapien
aggagaactagcaggctagggacgc

SEQ ID NO: 2672803 - DNA, 25 bp, Homo sapien
cagaaagtgggcttcggaaagccaa

SEQ ID NO: 2672804 - DNA, 25 bp, Homo sapien
tgggcttcggaaagccaaacagctg

SEQ ID NO: 2672805 - DNA, 25 bp, Homo sapien
agaactagcaggctagggacgcggc

SEQ ID NO: 2672806 - DNA, 25 bp, Homo sapien
gaaagccaaccataatcttgctagg

SEQ ID NO: 2672807 - DNA, 25 bp, Homo sapien
ttcgagctgttataaacaagcaggc

SEQ ID NO: 2672808 - DNA, 25 bp, Homo sapien
ttacaaattatcacaggcatgccaa

SEQ ID NO: 2672809 - DNA, 25 bp, Homo sapien
gatctgcttctcctcgacactgatg

SEQ ID NO: 2672810 - DNA, 25 bp, Homo sapien
ggtaccaagacattcattggaaaat

SEQ ID NO: 2672811 - DNA, 25 bp, Homo sapien
tctggtggtaccaagacattcattg

SEQ ID NO: 2672812 - DNA, 25 bp, Homo sapien
caataggaactacgggtctggtggt

SEQ ID NO: 2672813 - DNA, 25 bp, Homo sapien
gcaaaatctgatgaatcaataggaa

SEQ ID NO: 2672814 - DNA, 25 bp, Homo sapien
catgacagcagtgggtttgagcttc

SEQ ID NO: 2672815 - DNA, 25 bp, Homo sapien
tcttgcgtgtacctaaaagagggaa

SEQ ID NO: 2672816 - DNA, 25 bp, Homo sapien
gggaaagccctagcagcaacctagt

SEQ ID NO: 2672817 - DNA, 25 bp, Homo sapien
tgaaacaccttgcacacatgacagc

SEQ ID NO: 2672818 - DNA, 25 bp, Homo sapien
tcatttacccagtagtttcagttgc

SEQ ID NO: 2672819 - DNA, 25 bp, Homo sapien
gaaccaagttacatactcatggcac

SEQ ID NO: 2672820 - DNA, 25 bp, Homo sapien
caaagtataagatctgtatgtcagc

SEQ ID NO: 2672821 - DNA, 25 bp, Homo sapien
cacatggtcaacagagagtgatggg

SEQ ID NO: 2672822 - DNA, 25 bp, Homo sapien
ttggtcttcctcactagaacaccaa

SEQ ID NO: 2672823 - DNA, 25 bp, Homo sapien
ggtcttcctcactagaacaccaaat

SEQ ID NO: 2672824 - DNA, 25 bp, Homo sapien
tcttggtcttcctcactagaacacc

SEQ ID NO: 2672825 - DNA, 25 bp, Homo sapien
tcttcctcactagaacaccaaattc

SEQ ID NO: 2672826 - DNA, 25 bp, Homo sapien
tcctttcctcttaaggacttgtgta

SEQ ID NO: 2672827 - DNA, 25 bp, Homo sapien
tcttccctctaatacgttttcatta

SEQ ID NO: 2672828 - DNA, 25 bp, Homo sapien
tatacatgtattgtggaggcaaggg

SEQ ID NO: 2672829 - DNA, 25 bp, Homo sapien
gcctgaaaactagacaaaagccaag

SEQ ID NO: 2672830 - DNA, 25 bp, Homo sapien
gatacacagggataggctgctttct

SEQ ID NO: 2672831 - DNA, 25 bp, Homo sapien
gacctaacgttattgtagcctgaaa

SEQ ID NO: 2672832 - DNA, 25 bp, Homo sapien
cccttctgcagtgaggtttaaactc

SEQ ID NO: 2672833 - DNA, 25 bp, Homo sapien
gcttcgcgaagagcttggatccatt

SEQ ID NO: 2672834 - DNA, 25 bp, Homo sapien
cacacagaggtgataaggaaatcca

SEQ ID NO: 2672835 - DNA, 25 bp, Homo sapien
agcaatcgcacagctgcttcgcgaa

SEQ ID NO: 2672836 - DNA, 25 bp, Homo sapien
ctagggaaggtaggctggaccatgg

SEQ ID NO: 2672837 - DNA, 25 bp, Homo sapien
gaaggtaggctggaccatggctgct

SEQ ID NO: 2672838 - DNA, 25 bp, Homo sapien
ggaaggtaggctggaccatggctgc

SEQ ID NO: 2672839 - DNA, 25 bp, Homo sapien
agggaaggtaggctggaccatggct

SEQ ID NO: 2672840 - DNA, 25 bp, Homo sapien
tcttctttctagaggctggccactg

SEQ ID NO: 2672841 - DNA, 25 bp, Homo sapien
tacttgacacttgccgacaaagcag

SEQ ID NO: 2672842 - DNA, 25 bp, Homo sapien
gatgttgtttatgggtcgctgcacc

SEQ ID NO: 2672843 - DNA, 25 bp, Homo sapien
gattcaattagacgagggtcgggcc

SEQ ID NO: 2672844 - DNA, 25 bp, Homo sapien
agttttccattgagacaaagccaag

SEQ ID NO: 2672845 - DNA, 25 bp, Homo sapien
caattgtttctatcagcgactggga

SEQ ID NO: 2672846 - DNA, 25 bp, Homo sapien
cctatatggctcacaagtcaaaaat

SEQ ID NO: 2672847 - DNA, 25 bp, Homo sapien
caaagcactgttaaccttgcattgg

SEQ ID NO: 2672848 - DNA, 25 bp, Homo sapien
gagaacccacttactgtcactggaa

SEQ ID NO: 2672849 - DNA, 25 bp, Homo sapien
aaatttcatgagaacccacttactg

SEQ ID NO: 2672850 - DNA, 25 bp, Homo sapien
gaacccacttactgtcactggaaca

SEQ ID NO: 2672851 - DNA, 25 bp, Homo sapien
ccccatgaccccatatccaatcacc

SEQ ID NO: 2672852 - DNA, 25 bp, Homo sapien
tctctttcaatggctgcacagaaag

SEQ ID NO: 2672853 - DNA, 25 bp, Homo sapien
aatctctttcaatggctgcacagaa

SEQ ID NO: 2672854 - DNA, 25 bp, Homo sapien
taaatctctttcaatggctgcacag

SEQ ID NO: 2672855 - DNA, 25 bp, Homo sapien
ctttaaatctctttcaatggctgca

SEQ ID NO: 2672856 - DNA, 25 bp, Homo sapien
ccaactttaagctagtggttcatgc

SEQ ID NO: 2672857 - DNA, 25 bp, Homo sapien
cccaactttaagctagtggttcatg

SEQ ID NO: 2672858 - DNA, 25 bp, Homo sapien
ttcccaactttaagctagtggttca

SEQ ID NO: 2672859 - DNA, 25 bp, Homo sapien
tcatccactggtattcgcatagaca

SEQ ID NO: 2672860 - DNA, 25 bp, Homo sapien
cctcatccactggtattcgcataga

SEQ ID NO: 2672861 - DNA, 25 bp, Homo sapien
catccactggtattcgcatagacat

SEQ ID NO: 2672862 - DNA, 25 bp, Homo sapien
ctcatccactggtattcgcatagac

SEQ ID NO: 2672863 - DNA, 25 bp, Homo sapien
gctgtcagagccaattccgctgagt

SEQ ID NO: 2672864 - DNA, 25 bp, Homo sapien
tgtcagagccaattccgctgagtgt

SEQ ID NO: 2672865 - DNA, 25 bp, Homo sapien
gtcagagccaattccgctgagtgtc

SEQ ID NO: 2672866 - DNA, 25 bp, Homo sapien
atttcttggctgagtgggctgctgt

SEQ ID NO: 2672867 - DNA, 25 bp, Homo sapien
ccaaaaagtaacatgtgatggacag

SEQ ID NO: 2672868 - DNA, 25 bp, Homo sapien
tgaaggcatattgcatccaaaaagt

SEQ ID NO: 2672869 - DNA, 25 bp, Homo sapien
ttccagtggatgaaggcatattgca

SEQ ID NO: 2672870 - DNA, 25 bp, Homo sapien
agtaacatgtgatggacagtatcca

SEQ ID NO: 2672871 - DNA, 25 bp, Homo sapien
gctctatagcagactaaataactgt

SEQ ID NO: 2672872 - DNA, 25 bp, Homo sapien
tgacaaaggctgatagatatgctct

SEQ ID NO: 2672873 - DNA, 25 bp, Homo sapien
taactgtgataaaccatgataacca

SEQ ID NO: 2672874 - DNA, 25 bp, Homo sapien
tgataaccacgtgatgacaatgaac

SEQ ID NO: 2672875 - DNA, 25 bp, Homo sapien
tgctacagctctggcatatgacagg

SEQ ID NO: 2672876 - DNA, 25 bp, Homo sapien
gaaccatgatgctcttcgggtagaa

SEQ ID NO: 2672877 - DNA, 25 bp, Homo sapien
gagaaaggtccatcagtctacatga

SEQ ID NO: 2672878 - DNA, 25 bp, Homo sapien
catgattatgtaaggacaggacctc

SEQ ID NO: 2672879 - DNA, 25 bp, Homo sapien
gttgggttcctatgtgatatgttcc

SEQ ID NO: 2672880 - DNA, 25 bp, Homo sapien
cctttcatcaaataacttaagccta

SEQ ID NO: 2672881 - DNA, 25 bp, Homo sapien
tccatggagatttccactaattgcc

SEQ ID NO: 2672882 - DNA, 25 bp, Homo sapien
caaatgctttgacggtacttggtcc

SEQ ID NO: 2672883 - DNA, 25 bp, Homo sapien
cgggaatgttgatattgaagggtat

SEQ ID NO: 2672884 - DNA, 25 bp, Homo sapien
gagtataaacgggaatgttgatatt

SEQ ID NO: 2672885 - DNA, 25 bp, Homo sapien
atttactgtgatttgctgactctgt

SEQ ID NO: 2672886 - DNA, 25 bp, Homo sapien
tataaacgggaatgttgatattgaa

SEQ ID NO: 2672887 - DNA, 25 bp, Homo sapien
tctctcacggaaaacagggataagt

SEQ ID NO: 2672888 - DNA, 25 bp, Homo sapien
gcgtgtttataagccctcaaaggcc

SEQ ID NO: 2672889 - DNA, 25 bp, Homo sapien
tatatggaaacctctgtgatagggc

SEQ ID NO: 2672890 - DNA, 25 bp, Homo sapien
caaagtactattccagggcaatgca

SEQ ID NO: 2672891 - DNA, 25 bp, Homo sapien
tgtgagctactgcgcccagcctctc

SEQ ID NO: 2672892 - DNA, 25 bp, Homo sapien
tagggggagcatttctcgcccaggc

SEQ ID NO: 2672893 - DNA, 25 bp, Homo sapien
gggagcatttctcgcccaggcatac

SEQ ID NO: 2672894 - DNA, 25 bp, Homo sapien
tattggctttatctgtacaggttcc

SEQ ID NO: 2672895 - DNA, 25 bp, Homo sapien
atattggctttatctgtacaggttc

SEQ ID NO: 2672896 - DNA, 25 bp, Homo sapien
taaactgttgtgtgggcaaactact

SEQ ID NO: 2672897 - DNA, 25 bp, Homo sapien
caaactacttaccaaagagaggcag

SEQ ID NO: 2672898 - DNA, 25 bp, Homo sapien
tgtctgctgtcaagaaccaatgtgc

SEQ ID NO: 2672899 - DNA, 25 bp, Homo sapien
caatgtgccttaggtcaaaggtggc

SEQ ID NO: 2672900 - DNA, 25 bp, Homo sapien
agtacaaagtatttacttccagtct

SEQ ID NO: 2672901 - DNA, 25 bp, Homo sapien
taatatccccatagtgtacctgtag

SEQ ID NO: 2672902 - DNA, 25 bp, Homo sapien
ccccatagtgtacctgtagtacaaa

SEQ ID NO: 2672903 - DNA, 25 bp, Homo sapien
ctctaaaagcactaatatccccata

SEQ ID NO: 2672904 - DNA, 25 bp, Homo sapien
tctctcagcactatagagagttaac

SEQ ID NO: 2672905 - DNA, 25 bp, Homo sapien
aaccttctctcagcactatagagag

SEQ ID NO: 2672906 - DNA, 25 bp, Homo sapien
gagagttaacagtttaagattatgt

SEQ ID NO: 2672907 - DNA, 25 bp, Homo sapien
ccttctctcagcactatagagagtt

SEQ ID NO: 2672908 - DNA, 25 bp, Homo sapien
tcctacctttcttattcatcaacca

SEQ ID NO: 2672909 - DNA, 25 bp, Homo sapien
ctggaaggtattgaaggagttaaca

SEQ ID NO: 2672910 - DNA, 25 bp, Homo sapien
gtgcagtacactaactggaaggtat

SEQ ID NO: 2672911 - DNA, 25 bp, Homo sapien
caaaatgcttctatttgtggaattt

SEQ ID NO: 2672912 - DNA, 25 bp, Homo sapien
ggagaattttcacttcggaacaaga

SEQ ID NO: 2672913 - DNA, 25 bp, Homo sapien
gagaattttcacttcggaacaagat

SEQ ID NO: 2672914 - DNA, 25 bp, Homo sapien
agaattttcacttcggaacaagatt

SEQ ID NO: 2672915 - DNA, 25 bp, Homo sapien
tcggaacaagatttcgctgaaaaaa

SEQ ID NO: 2672916 - DNA, 25 bp, Homo sapien
catagggatggtgccccagattcac

SEQ ID NO: 2672917 - DNA, 25 bp, Homo sapien
tagtgtatctacatagggatggtgc

SEQ ID NO: 2672918 - DNA, 25 bp, Homo sapien
gaaacattagtgtatctacataggg

SEQ ID NO: 2672919 - DNA, 25 bp, Homo sapien
tatctacatagggatggtgccccag

SEQ ID NO: 2672920 - DNA, 25 bp, Homo sapien
gaggacagatgaccccatgagaaga

SEQ ID NO: 2672921 - DNA, 25 bp, Homo sapien
taagacgtacttgcaaagaaatgag

SEQ ID NO: 2672922 - DNA, 25 bp, Homo sapien
tatgcatgtagtccctggtattaat

SEQ ID NO: 2672923 - DNA, 25 bp, Homo sapien
tcatgataaacaaagggagggtaac

SEQ ID NO: 2672924 - DNA, 25 bp, Homo sapien
tgaatttccttttgcgttgtcccaa

SEQ ID NO: 2672925 - DNA, 25 bp, Homo sapien
ggcctactaactgcttacctctgat

SEQ ID NO: 2672926 - DNA, 25 bp, Homo sapien
tgtagctgcaaaagtctagaaacca

SEQ ID NO: 2672927 - DNA, 25 bp, Homo sapien
catgggctttggttgggcagtttta

SEQ ID NO: 2672928 - DNA, 25 bp, Homo sapien
ccactaattgggaaagtccttcaga

SEQ ID NO: 2672929 - DNA, 25 bp, Homo sapien
cagattaaccgctgatcctgaggga

SEQ ID NO: 2672930 - DNA, 25 bp, Homo sapien
ggaataatgcacgataataacctac

SEQ ID NO: 2672931 - DNA, 25 bp, Homo sapien
taaaaagtatgcctgaaaccactgc

SEQ ID NO: 2672932 - DNA, 25 bp, Homo sapien
gcagacgtgtgaggtgtaaggacac

SEQ ID NO: 2672933 - DNA, 25 bp, Homo sapien
aggtgtaaggacacaccagaacagt

SEQ ID NO: 2672934 - DNA, 25 bp, Homo sapien
cacaccagaacagtccttgttatta

SEQ ID NO: 2672935 - DNA, 25 bp, Homo sapien
taaggacacaccagaacagtccttg

SEQ ID NO: 2672936 - DNA, 25 bp, Homo sapien
acttggcaaggatatgagggcgacc

SEQ ID NO: 2672937 - DNA, 25 bp, Homo sapien
gaggatccagctaagtgtgcccaat

SEQ ID NO: 2672938 - DNA, 25 bp, Homo sapien
tgaagcctgccgacaactatgtgag

SEQ ID NO: 2672939 - DNA, 25 bp, Homo sapien
agccttaagctgactgaagccccag

SEQ ID NO: 2672940 - DNA, 25 bp, Homo sapien
gataacagtgtcaacagacatcata

SEQ ID NO: 2672941 - DNA, 25 bp, Homo sapien
agtgtcaacagacatcataaggtac

SEQ ID NO: 2672942 - DNA, 25 bp, Homo sapien
tgggataacagtgtcaacagacatc

SEQ ID NO: 2672943 - DNA, 25 bp, Homo sapien
taacagtgtcaacagacatcataag

SEQ ID NO: 2672944 - DNA, 25 bp, Homo sapien
aatggtgagtgtgaactctataggc

SEQ ID NO: 2672945 - DNA, 25 bp, Homo sapien
tggtgagtgtgaactctataggcaa

SEQ ID NO: 2672946 - DNA, 25 bp, Homo sapien
ctaaatggtgagtgtgaactctata

SEQ ID NO: 2672947 - DNA, 25 bp, Homo sapien
gtgagtgtgaactctataggcaaag

SEQ ID NO: 2672948 - DNA, 25 bp, Homo sapien
ggctctgccgtccaatcagtgtcca

SEQ ID NO: 2672949 - DNA, 25 bp, Homo sapien
tttcttactctgtatccacttacta

SEQ ID NO: 2672950 - DNA, 25 bp, Homo sapien
gctgagggctctgccgtccaatcag

SEQ ID NO: 2672951 - DNA, 25 bp, Homo sapien
tactctgtatccacttactacctta

SEQ ID NO: 2672952 - DNA, 25 bp, Homo sapien
atacacatcttgcagccagtaggtc

SEQ ID NO: 2672953 - DNA, 25 bp, Homo sapien
gtccttccttcaccagtgaatacac

SEQ ID NO: 2672954 - DNA, 25 bp, Homo sapien
ccaaaacttacatcaactggatgcc

SEQ ID NO: 2672955 - DNA, 25 bp, Homo sapien
tacatcaactggatgccccacaggg

SEQ ID NO: 2672956 - DNA, 25 bp, Homo sapien
aaatagtggaatgtatagaatcata

SEQ ID NO: 2672957 - DNA, 25 bp, Homo sapien
aatagtggaatgtatagaatcatac

SEQ ID NO: 2672958 - DNA, 25 bp, Homo sapien
taaatagtggaatgtatagaatcat

SEQ ID NO: 2672959 - DNA, 25 bp, Homo sapien
ttaaatagtggaatgtatagaatca

SEQ ID NO: 2672960 - DNA, 25 bp, Homo sapien
cttccagatggcatcagtaaatatt

SEQ ID NO: 2672961 - DNA, 25 bp, Homo sapien
tctagcttccagatggcatcagtaa

SEQ ID NO: 2672962 - DNA, 25 bp, Homo sapien
tagcttccagatggcatcagtaaat

SEQ ID NO: 2672963 - DNA, 25 bp, Homo sapien
ctctagcttccagatggcatcagta

SEQ ID NO: 2672964 - DNA, 25 bp, Homo sapien
caacagttagtgttgctatcgcaag

SEQ ID NO: 2672965 - DNA, 25 bp, Homo sapien
taagtaaactacctatggctctgca

SEQ ID NO: 2672966 - DNA, 25 bp, Homo sapien
tagaggcctccagagatcactttgg

SEQ ID NO: 2672967 - DNA, 25 bp, Homo sapien
gactcatggaactgatagaggcctc

SEQ ID NO: 2672968 - DNA, 25 bp, Homo sapien
tcataaccatatcagacttcacggg

SEQ ID NO: 2672969 - DNA, 25 bp, Homo sapien
gctacattctgggtacaggtcatga

SEQ ID NO: 2672970 - DNA, 25 bp, Homo sapien
ggttctgaacatatctggagctaca

SEQ ID NO: 2672971 - DNA, 25 bp, Homo sapien
tcatgaaagaaactgcatgcttggc

SEQ ID NO: 2672972 - DNA, 25 bp, Homo sapien
tgtagtaaaggaatcttatctttat

SEQ ID NO: 2672973 - DNA, 25 bp, Homo sapien
aaaggaatcttatctttatattctg

SEQ ID NO: 2672974 - DNA, 25 bp, Homo sapien
ggaatcttatctttatattctgttt

SEQ ID NO: 2672975 - DNA, 25 bp, Homo sapien
ctgtagtaaaggaatcttatcttta

SEQ ID NO: 2672976 - DNA, 25 bp, Homo sapien
aacacttcttcttcttctcgttttg

SEQ ID NO: 2672977 - DNA, 25 bp, Homo sapien
cacttcttcttcttctcgttttggc

SEQ ID NO: 2672978 - DNA, 25 bp, Homo sapien
cttcttcttcttctcgttttggctg

SEQ ID NO: 2672979 - DNA, 25 bp, Homo sapien
cctggtctaacacttcttcttcttc

SEQ ID NO: 2672980 - DNA, 25 bp, Homo sapien
tacaatttggttgcctacttggaaa

SEQ ID NO: 2672981 - DNA, 25 bp, Homo sapien
tagttatagaaataagcatacatac

SEQ ID NO: 2672982 - DNA, 25 bp, Homo sapien
tagcaatacatagtgtttgaggcag

SEQ ID NO: 2672983 - DNA, 25 bp, Homo sapien
cagagagacatacaatatctcagta

SEQ ID NO: 2672984 - DNA, 25 bp, Homo sapien
ccctatgtgttgtaaggagacagac

SEQ ID NO: 2672985 - DNA, 25 bp, Homo sapien
tcttctgtaggaccaacatagatgg

SEQ ID NO: 2672986 - DNA, 25 bp, Homo sapien
gctggtggtccccatagactggtag

SEQ ID NO: 2672987 - DNA, 25 bp, Homo sapien
taaccaggtggaactatctacatca

SEQ ID NO: 2672988 - DNA, 25 bp, Homo sapien
aataaagagaacttacaaaatgtgt

SEQ ID NO: 2672989 - DNA, 25 bp, Homo sapien
taaacaatggttatagaaagttcag

SEQ ID NO: 2672990 - DNA, 25 bp, Homo sapien
aagttcaggatgtttatagctttgg

SEQ ID NO: 2672991 - DNA, 25 bp, Homo sapien
tatagtgaacgcatataagaaatta

SEQ ID NO: 2672992 - DNA, 25 bp, Homo sapien
gtttcacagaaggtgtccgaagacc

SEQ ID NO: 2672993 - DNA, 25 bp, Homo sapien
cacacagatctatattggaaagcct

SEQ ID NO: 2672994 - DNA, 25 bp, Homo sapien
ctttagcaggctttgacagtagact

SEQ ID NO: 2672995 - DNA, 25 bp, Homo sapien
tgagggcacaaagactacaatgagg

SEQ ID NO: 2672996 - DNA, 25 bp, Homo sapien
ggagagtaaataggatgttcagcag

SEQ ID NO: 2672997 - DNA, 25 bp, Homo sapien
taaccaagttaacatgattagagcc

SEQ ID NO: 2672998 - DNA, 25 bp, Homo sapien
tcagcagcagtttagccactgacaa

SEQ ID NO: 2672999 - DNA, 25 bp, Homo sapien
gattagagccatggaacataactga

SEQ ID NO: 2673000 - DNA, 25 bp, Homo sapien
tatacatacactcacttagggcttg

SEQ ID NO: 2673001 - DNA, 25 bp, Homo sapien
taatagctgctagacagacacatgg

SEQ ID NO: 2673002 - DNA, 25 bp, Homo sapien
tactttgtaaatggctagtgcacct

SEQ ID NO: 2673003 - DNA, 25 bp, Homo sapien
tctgcactgtccaacctaatagctg

SEQ ID NO: 2673004 - DNA, 25 bp, Homo sapien
tggcatcagatcgaccaagatcctt

SEQ ID NO: 2673005 - DNA, 25 bp, Homo sapien
tctcagctaccaggtctgactctga

SEQ ID NO: 2673006 - DNA, 25 bp, Homo sapien
tctggtggcctcaaggtagatacta

SEQ ID NO: 2673007 - DNA, 25 bp, Homo sapien
tgtctctgacaagaatagcattacc

SEQ ID NO: 2673008 - DNA, 25 bp, Homo sapien
tctcatgtgaacaaaaggcactgca

SEQ ID NO: 2673009 - DNA, 25 bp, Homo sapien
aatccagaatgagttagagcagggc

SEQ ID NO: 2673010 - DNA, 25 bp, Homo sapien
catagcttgctggtacggaaacctg

SEQ ID NO: 2673011 - DNA, 25 bp, Homo sapien
gaaacgcaatcaatatcacagaggc

SEQ ID NO: 2673012 - DNA, 25 bp, Homo sapien
tatagtaaattaggcacttagggaa

SEQ ID NO: 2673013 - DNA, 25 bp, Homo sapien
cagttaattcctccgaccattaggc

SEQ ID NO: 2673014 - DNA, 25 bp, Homo sapien
ttctatgcagcaaatacaattcctt

SEQ ID NO: 2673015 - DNA, 25 bp, Homo sapien
tataatattaagcaacagaccagcc

SEQ ID NO: 2673016 - DNA, 25 bp, Homo sapien
cacatccagaggtttgtaatacaga

SEQ ID NO: 2673017 - DNA, 25 bp, Homo sapien
gactgaatcaggcttccacatgcaa

SEQ ID NO: 2673018 - DNA, 25 bp, Homo sapien
tgtggtagtccaatcaaatctgcca

SEQ ID NO: 2673019 - DNA, 25 bp, Homo sapien
tctgcaagacttgaacctagaggta

SEQ ID NO: 2673020 - DNA, 25 bp, Homo sapien
tatcagtggtagcaggtccaggcag

SEQ ID NO: 2673021 - DNA, 25 bp, Homo sapien
cctgaaacttctagatgggctccaa

SEQ ID NO: 2673022 - DNA, 25 bp, Homo sapien
tatcagcactgaacctatcctcgga

SEQ ID NO: 2673023 - DNA, 25 bp, Homo sapien
gggaactcaaagctcacgacaatgc

SEQ ID NO: 2673024 - DNA, 25 bp, Homo sapien
gaagtgagtttttacgagcagcaaa

SEQ ID NO: 2673025 - DNA, 25 bp, Homo sapien
agaaagttgctgttagtccgaaggg

SEQ ID NO: 2673026 - DNA, 25 bp, Homo sapien
ttcagtctttatgcgtctttacagg

SEQ ID NO: 2673027 - DNA, 25 bp, Homo sapien
tgcgaatgaattccctcaagttttg

SEQ ID NO: 2673028 - DNA, 25 bp, Homo sapien
taggccaatttggtctaaagcgcag

SEQ ID NO: 2673029 - DNA, 25 bp, Homo sapien
gaatgtgcattctccagctgttaga

SEQ ID NO: 2673030 - DNA, 25 bp, Homo sapien
tgatctgtccgatgctgacaatggt

SEQ ID NO: 2673031 - DNA, 25 bp, Homo sapien
cccaatagttggtcatgagcatttt

SEQ ID NO: 2673032 - DNA, 25 bp, Homo sapien
tgctcatgatgcattatctctttga

SEQ ID NO: 2673033 - DNA, 25 bp, Homo sapien
gtcagccatgggtttgctctacggg

SEQ ID NO: 2673034 - DNA, 25 bp, Homo sapien
aaccatcctcatatcccagcaataa

SEQ ID NO: 2673035 - DNA, 25 bp, Homo sapien
gatagtactgtgttgaggattttgc

SEQ ID NO: 2673036 - DNA, 25 bp, Homo sapien
ttgcactggaaacatttcatatctt

SEQ ID NO: 2673037 - DNA, 25 bp, Homo sapien
tcatttctttgcactggaaacattt

SEQ ID NO: 2673038 - DNA, 25 bp, Homo sapien
ttctttgcactggaaacatttcata

SEQ ID NO: 2673039 - DNA, 25 bp, Homo sapien
ctttgcactggaaacatttcatatc

SEQ ID NO: 2673040 - DNA, 25 bp, Homo sapien
tggaaaatacgacaacatacatggc

SEQ ID NO: 2673041 - DNA, 25 bp, Homo sapien
tgataagatgcctgtaaagccagct

SEQ ID NO: 2673042 - DNA, 25 bp, Homo sapien
gactgggaacttgcattaggactgt

SEQ ID NO: 2673043 - DNA, 25 bp, Homo sapien
gaatgggcaataagcctggcactct

SEQ ID NO: 2673044 - DNA, 25 bp, Homo sapien
gaaaggtcgaattgcctcatgagga

SEQ ID NO: 2673045 - DNA, 25 bp, Homo sapien
aggtcgaattgcctcatgaggattc

SEQ ID NO: 2673046 - DNA, 25 bp, Homo sapien
agggaaaggtcgaattgcctcatga

SEQ ID NO: 2673047 - DNA, 25 bp, Homo sapien
aaagggaaaggtcgaattgcctcat

SEQ ID NO: 2673048 - DNA, 25 bp, Homo sapien
cccagaaacctggcctggtaacaag

SEQ ID NO: 2673049 - DNA, 25 bp, Homo sapien
tggtaacaagtatactccaggccaa

SEQ ID NO: 2673050 - DNA, 25 bp, Homo sapien
ccatcccagacatggtcacctctgt

SEQ ID NO: 2673051 - DNA, 25 bp, Homo sapien
caggttattcttagggtctagagcc

SEQ ID NO: 2673052 - DNA, 25 bp, Homo sapien
ctgaaaatagacacattgtaaaaag

SEQ ID NO: 2673053 - DNA, 25 bp, Homo sapien
tgaaaatagacacattgtaaaaagt

SEQ ID NO: 2673054 - DNA, 25 bp, Homo sapien
ttctgaaaatagacacattgtaaaa

SEQ ID NO: 2673055 - DNA, 25 bp, Homo sapien
gaaaatagacacattgtaaaaagtc

SEQ ID NO: 2673056 - DNA, 25 bp, Homo sapien
agtcatttggattataatatacccc

SEQ ID NO: 2673057 - DNA, 25 bp, Homo sapien
atttgacttcactctttgtctgcca

SEQ ID NO: 2673058 - DNA, 25 bp, Homo sapien
caaatgtatttgacttcactctttg

SEQ ID NO: 2673059 - DNA, 25 bp, Homo sapien
aatgtatttgacttcactctttgtc

SEQ ID NO: 2673060 - DNA, 25 bp, Homo sapien
ggtccgagtcctatttgctggtaaa

SEQ ID NO: 2673061 - DNA, 25 bp, Homo sapien
ctgcagcattatttggatctatgac

SEQ ID NO: 2673062 - DNA, 25 bp, Homo sapien
tggatctatgacaagaatagtgtct

SEQ ID NO: 2673063 - DNA, 25 bp, Homo sapien
agaatagtgtcttcttcaattggtc

SEQ ID NO: 2673064 - DNA, 25 bp, Homo sapien
tactcaagccatgtggcaagtaaaa

SEQ ID NO: 2673065 - DNA, 25 bp, Homo sapien
taattcccatctttatctatactca

SEQ ID NO: 2673066 - DNA, 25 bp, Homo sapien
tctttatctatactcaagccatgtg

SEQ ID NO: 2673067 - DNA, 25 bp, Homo sapien
gagagccacgtctgtgacccaataa

SEQ ID NO: 2673068 - DNA, 25 bp, Homo sapien
tccttcccaggattaatacagggcc

SEQ ID NO: 2673069 - DNA, 25 bp, Homo sapien
tacagggccttctttattgtttgga

SEQ ID NO: 2673070 - DNA, 25 bp, Homo sapien
ccacttggtgaaaactgcacaatcc

SEQ ID NO: 2673071 - DNA, 25 bp, Homo sapien
gaagtgattctggtcactgcctggt

SEQ ID NO: 2673072 - DNA, 25 bp, Homo sapien
tcttccaaatgatgaatgcttaatc

SEQ ID NO: 2673073 - DNA, 25 bp, Homo sapien
atgcttaatctctctcacaaattct

SEQ ID NO: 2673074 - DNA, 25 bp, Homo sapien
cacaaattctttggtgtcagtttta

SEQ ID NO: 2673075 - DNA, 25 bp, Homo sapien
taaaacactggatccgaccattttc

SEQ ID NO: 2673076 - DNA, 25 bp, Homo sapien
tatccatgtatattatgcaaagaat

SEQ ID NO: 2673077 - DNA, 25 bp, Homo sapien
taagaatggacttctaatatatcca

SEQ ID NO: 2673078 - DNA, 25 bp, Homo sapien
aaaatatgggtaagaatggacttct

SEQ ID NO: 2673079 - DNA, 25 bp, Homo sapien
tccatgtatattatgcaaagaataa

SEQ ID NO: 2673080 - DNA, 25 bp, Homo sapien
tgcaacagcaaatccagttaacctt

SEQ ID NO: 2673081 - DNA, 25 bp, Homo sapien
gcaacagcaaatccagttaaccttt

SEQ ID NO: 2673082 - DNA, 25 bp, Homo sapien
ctgcaacagcaaatccagttaacct

SEQ ID NO: 2673083 - DNA, 25 bp, Homo sapien
tgaagatgtctataatttccccatt

SEQ ID NO: 2673084 - DNA, 25 bp, Homo sapien
cttgcgcactggcttgaagatgtct

SEQ ID NO: 2673085 - DNA, 25 bp, Homo sapien
cgcactggcttgaagatgtctataa

SEQ ID NO: 2673086 - DNA, 25 bp, Homo sapien
tgcgcactggcttgaagatgtctat

SEQ ID NO: 2673087 - DNA, 25 bp, Homo sapien
tctgctagaaatacagtactttggg

SEQ ID NO: 2673088 - DNA, 25 bp, Homo sapien
cgtggtagatgggactctgtcttct

SEQ ID NO: 2673089 - DNA, 25 bp, Homo sapien
tagtatttttagagctacacagaca

SEQ ID NO: 2673090 - DNA, 25 bp, Homo sapien
ctttattagtggctctcaagtgaga

SEQ ID NO: 2673091 - DNA, 25 bp, Homo sapien
tggcagttggcaggatatagataac

SEQ ID NO: 2673092 - DNA, 25 bp, Homo sapien
caggatatagataacatctttcacc

SEQ ID NO: 2673093 - DNA, 25 bp, Homo sapien
ggatatagataacatctttcacctt

SEQ ID NO: 2673094 - DNA, 25 bp, Homo sapien
cagttggcaggatatagataacatc

SEQ ID NO: 2673095 - DNA, 25 bp, Homo sapien
gcaacaatatcatgaggcatatcaa

SEQ ID NO: 2673096 - DNA, 25 bp, Homo sapien
cccatcttcagatgcaacaatatca

SEQ ID NO: 2673097 - DNA, 25 bp, Homo sapien
ttggtatgagcatctccaatgtaca

SEQ ID NO: 2673098 - DNA, 25 bp, Homo sapien
ggtgttggtatgagcatctccaatg

SEQ ID NO: 2673099 - DNA, 25 bp, Homo sapien
tctcagtcaaggtgaacttccacac

SEQ ID NO: 2673100 - DNA, 25 bp, Homo sapien
tgtgaacaataatactgtgaaaacc

SEQ ID NO: 2673101 - DNA, 25 bp, Homo sapien
gtgaacaataatactgtgaaaacca

SEQ ID NO: 2673102 - DNA, 25 bp, Homo sapien
gaacaataatactgtgaaaaccata

SEQ ID NO: 2673103 - DNA, 25 bp, Homo sapien
tgaacaataatactgtgaaaaccat

SEQ ID NO: 2673104 - DNA, 25 bp, Homo sapien
tgtgtcctatcaagcatttggtaca

SEQ ID NO: 2673105 - DNA, 25 bp, Homo sapien
aaagtatttctggacattgaagttg

SEQ ID NO: 2673106 - DNA, 25 bp, Homo sapien
gaagctcctgatacctcaaatttat

SEQ ID NO: 2673107 - DNA, 25 bp, Homo sapien
actacctgttgaagctcctgatacc

SEQ ID NO: 2673108 - DNA, 25 bp, Homo sapien
ctggacctcaatgccagccttttta

SEQ ID NO: 2673109 - DNA, 25 bp, Homo sapien
gcctttttaactgatcgatgttcca

SEQ ID NO: 2673110 - DNA, 25 bp, Homo sapien
ggacctcaatgccagcctttttaac

SEQ ID NO: 2673111 - DNA, 25 bp, Homo sapien
tggacctcaatgccagcctttttaa

SEQ ID NO: 2673112 - DNA, 25 bp, Homo sapien
catgtcaaaaccctgcagatgctag

SEQ ID NO: 2673113 - DNA, 25 bp, Homo sapien
taaagcaactaataatggaatcccc

SEQ ID NO: 2673114 - DNA, 25 bp, Homo sapien
aatattttattaccccttgagctgg

SEQ ID NO: 2673115 - DNA, 25 bp, Homo sapien
gacaaaataagttgacagggactcc

SEQ ID NO: 2673116 - DNA, 25 bp, Homo sapien
taaaactggactgtcaaggcaagac

SEQ ID NO: 2673117 - DNA, 25 bp, Homo sapien
caggaggcacctagaatgaccattc

SEQ ID NO: 2673118 - DNA, 25 bp, Homo sapien
caattggactcagtggtgtgcacac

SEQ ID NO: 2673119 - DNA, 25 bp, Homo sapien
ctggttacgggacatgaaaagtgca

SEQ ID NO: 2673120 - DNA, 25 bp, Homo sapien
gtccaacttttggaactggctgaaa

SEQ ID NO: 2673121 - DNA, 25 bp, Homo sapien
gtttcatggataaggcagaaccaga

SEQ ID NO: 2673122 - DNA, 25 bp, Homo sapien
gtattaccagagtagttactgcctg

SEQ ID NO: 2673123 - DNA, 25 bp, Homo sapien
cacaggccaaagatgtaggttggca

SEQ ID NO: 2673124 - DNA, 25 bp, Homo sapien
tttgcttcaacgttctgagccagcc

SEQ ID NO: 2673125 - DNA, 25 bp, Homo sapien
gaatgcccttctgccctacgataca

SEQ ID NO: 2673126 - DNA, 25 bp, Homo sapien
cattggcaggtactgggtaggtatc

SEQ ID NO: 2673127 - DNA, 25 bp, Homo sapien
cagaatgcattgtaaagcctcaaga

SEQ ID NO: 2673128 - DNA, 25 bp, Homo sapien
aggcactcccgagcctggctctttg

SEQ ID NO: 2673129 - DNA, 25 bp, Homo sapien
gaacaacaggcactcccgagcctgg

SEQ ID NO: 2673130 - DNA, 25 bp, Homo sapien
ggttgtaatgagaacaacaggcact

SEQ ID NO: 2673131 - DNA, 25 bp, Homo sapien
aagggttgtaatgagaacaacaggc

SEQ ID NO: 2673132 - DNA, 25 bp, Homo sapien
tctggtattggactctgccttgttc

SEQ ID NO: 2673133 - DNA, 25 bp, Homo sapien
tctgccttgttcagttatggaaggc

SEQ ID NO: 2673134 - DNA, 25 bp, Homo sapien
gactgctactgagcggtaagaaaca

SEQ ID NO: 2673135 - DNA, 25 bp, Homo sapien
ccatggctgccttgacctgaaatag

SEQ ID NO: 2673136 - DNA, 25 bp, Homo sapien
caagggcactgaatccctgccatgg

SEQ ID NO: 2673137 - DNA, 25 bp, Homo sapien
gctatagacttgctctaggacctgg

SEQ ID NO: 2673138 - DNA, 25 bp, Homo sapien
ggcttcatcactccctcaagggcta

SEQ ID NO: 2673139 - DNA, 25 bp, Homo sapien
caggactgcctatctccataaagga

SEQ ID NO: 2673140 - DNA, 25 bp, Homo sapien
ggaaagcacatgacaccctgagtat

SEQ ID NO: 2673141 - DNA, 25 bp, Homo sapien
tcaagggctatggtcaggaaagtca

SEQ ID NO: 2673142 - DNA, 25 bp, Homo sapien
tggctgtgcagtcttgataaattac

SEQ ID NO: 2673143 - DNA, 25 bp, Homo sapien
ggctcttgtctgtatgcaattctaa

SEQ ID NO: 2673144 - DNA, 25 bp, Homo sapien
taggaactggtaaatgataaagcaa

SEQ ID NO: 2673145 - DNA, 25 bp, Homo sapien
gacatacataaagggcccaagctgg

SEQ ID NO: 2673146 - DNA, 25 bp, Homo sapien
gcacatttcaaaatgagtcccagtc

SEQ ID NO: 2673147 - DNA, 25 bp, Homo sapien
tggcacatttcaaaatgagtcccag

SEQ ID NO: 2673148 - DNA, 25 bp, Homo sapien
agatggcacatttcaaaatgagtcc

SEQ ID NO: 2673149 - DNA, 25 bp, Homo sapien
aaaaagatggcacatttcaaaatga

SEQ ID NO: 2673150 - DNA, 25 bp, Homo sapien
cctgaactcgtctcgagtttgtgtt

SEQ ID NO: 2673151 - DNA, 25 bp, Homo sapien
tactcttcctgaactcgtctcgagt

SEQ ID NO: 2673152 - DNA, 25 bp, Homo sapien
tcttcctgaactcgtctcgagtttg

SEQ ID NO: 2673153 - DNA, 25 bp, Homo sapien
aactcgtctcgagtttgtgttcaga

SEQ ID NO: 2673154 - DNA, 25 bp, Homo sapien
aaggtgcgagcgcaggcagaggtgc

SEQ ID NO: 2673155 - DNA, 25 bp, Homo sapien
gactgtagcccttacggcttgcaaa

SEQ ID NO: 2673156 - DNA, 25 bp, Homo sapien
cttttcgactgtagcccttacggct

SEQ ID NO: 2673157 - DNA, 25 bp, Homo sapien
gccctcagtgctaagccggtcaaac

SEQ ID NO: 2673158 - DNA, 25 bp, Homo sapien
ctcaaaagtgtaaatgggcaaatct

SEQ ID NO: 2673159 - DNA, 25 bp, Homo sapien
tgtgtacagtcccacacagactagt

SEQ ID NO: 2673160 - DNA, 25 bp, Homo sapien
ggcactgttatgaacttttaggaaa

SEQ ID NO: 2673161 - DNA, 25 bp, Homo sapien
cactggcaatgaaagtgctattggg

SEQ ID NO: 2673162 - DNA, 25 bp, Homo sapien
tgcaatataatgttagtgattttaa

SEQ ID NO: 2673163 - DNA, 25 bp, Homo sapien
attgcaatataatgttagtgatttt

SEQ ID NO: 2673164 - DNA, 25 bp, Homo sapien
ttgcaatataatgttagtgatttta

SEQ ID NO: 2673165 - DNA, 25 bp, Homo sapien
aatagtgttctaacagtgtaaccat

SEQ ID NO: 2673166 - DNA, 25 bp, Homo sapien
tagtgttctaacagtgtaaccatct

SEQ ID NO: 2673167 - DNA, 25 bp, Homo sapien
gtgttctaacagtgtaaccatctaa

SEQ ID NO: 2673168 - DNA, 25 bp, Homo sapien
gttctaacagtgtaaccatctaaaa

SEQ ID NO: 2673169 - DNA, 25 bp, Homo sapien
tgcaaatacgcaaaaactggaaaat

SEQ ID NO: 2673170 - DNA, 25 bp, Homo sapien
gaagacatcgagtaagtttcactaa

SEQ ID NO: 2673171 - DNA, 25 bp, Homo sapien
tgtatgtaaaatctgcaaatacgca

SEQ ID NO: 2673172 - DNA, 25 bp, Homo sapien
taatatttgtgggtttgtgtaatta

SEQ ID NO: 2673173 - DNA, 25 bp, Homo sapien
gaatatattcctatggatacatgga

SEQ ID NO: 2673174 - DNA, 25 bp, Homo sapien
tatgtaatttgagacacaggtatcc

SEQ ID NO: 2673175 - DNA, 25 bp, Homo sapien
actgtacctgccctgaaattatttt

SEQ ID NO: 2673176 - DNA, 25 bp, Homo sapien
tattattagtgatccctactgatgg

SEQ ID NO: 2673177 - DNA, 25 bp, Homo sapien
tctccaggcgattctactgtggcca

SEQ ID NO: 2673178 - DNA, 25 bp, Homo sapien
gattttggtgctaacagtcatatca

SEQ ID NO: 2673179 - DNA, 25 bp, Homo sapien
tgtaactggcaagatagaatagcta

SEQ ID NO: 2673180 - DNA, 25 bp, Homo sapien
gaatagctattctcgaagacaatgg

SEQ ID NO: 2673181 - DNA, 25 bp, Homo sapien
ctggagcaacatgcccacattggct

SEQ ID NO: 2673182 - DNA, 25 bp, Homo sapien
ggagcaacatgcccacattggctct

SEQ ID NO: 2673183 - DNA, 25 bp, Homo sapien
cctggagcaacatgcccacattggc

SEQ ID NO: 2673184 - DNA, 25 bp, Homo sapien
tggagcaacatgcccacattggctc

SEQ ID NO: 2673185 - DNA, 25 bp, Homo sapien
tccacgtagcactccagggtggcca

SEQ ID NO: 2673186 - DNA, 25 bp, Homo sapien
tctccacgtagcactccagggtggc

SEQ ID NO: 2673187 - DNA, 25 bp, Homo sapien
gcatctccacgtagcactccagggt

SEQ ID NO: 2673188 - DNA, 25 bp, Homo sapien
ggcctgcatctccacgtagcactcc

SEQ ID NO: 2673189 - DNA, 25 bp, Homo sapien
aaacactgggttggactggtacagc

SEQ ID NO: 2673190 - DNA, 25 bp, Homo sapien
aagttggtatgtggcaggttggtga

SEQ ID NO: 2673191 - DNA, 25 bp, Homo sapien
gcagtgtccgtggtctgaaaaaaca

SEQ ID NO: 2673192 - DNA, 25 bp, Homo sapien
ttggtgagggccttcagctggatct

SEQ ID NO: 2673193 - DNA, 25 bp, Homo sapien
tgagatacaaaatctgtcagatggc

SEQ ID NO: 2673194 - DNA, 25 bp, Homo sapien
cttgagatacaaaatctgtcagatg

SEQ ID NO: 2673195 - DNA, 25 bp, Homo sapien
gagatacaaaatctgtcagatggcc

SEQ ID NO: 2673196 - DNA, 25 bp, Homo sapien
ttgagatacaaaatctgtcagatgg

SEQ ID NO: 2673197 - DNA, 25 bp, Homo sapien
cctgcagttactggaagaaggccat

SEQ ID NO: 2673198 - DNA, 25 bp, Homo sapien
gacagggcagatacacattcggaca

SEQ ID NO: 2673199 - DNA, 25 bp, Homo sapien
tgggactcatcagccctccaggtgt

SEQ ID NO: 2673200 - DNA, 25 bp, Homo sapien
tgtccgacagatacccaggcatctc

SEQ ID NO: 2673201 - DNA, 25 bp, Homo sapien
ttcctgtttctctggctagtctcat

SEQ ID NO: 2673202 - DNA, 25 bp, Homo sapien
cagaacctcttctggcttttttcct

SEQ ID NO: 2673203 - DNA, 25 bp, Homo sapien
agaacctcttctggcttttttcctg

SEQ ID NO: 2673204 - DNA, 25 bp, Homo sapien
tttttcctgtttctctggctagtct

SEQ ID NO: 2673205 - DNA, 25 bp, Homo sapien
ggagattttgcgcaagcgcctttga

SEQ ID NO: 2673206 - DNA, 25 bp, Homo sapien
ttgggcgttgcgatgtcccgcgcta

SEQ ID NO: 2673207 - DNA, 25 bp, Homo sapien
cattcgcctcgaccggcctaaggaa

SEQ ID NO: 2673208 - DNA, 25 bp, Homo sapien
ctaaggaagggtttaattgagtctg

SEQ ID NO: 2673209 - DNA, 25 bp, Homo sapien
gaatgcggtcgtcacgcgagcagtt

SEQ ID NO: 2673210 - DNA, 25 bp, Homo sapien
gatttccggcaagagccaaatgatc

SEQ ID NO: 2673211 - DNA, 25 bp, Homo sapien
gacttcagttgtaggcgtggacgta

SEQ ID NO: 2673212 - DNA, 25 bp, Homo sapien
cagctatagggccacataagggaac

SEQ ID NO: 2673213 - DNA, 25 bp, Homo sapien
ctcggtggagcatgtgtttagggtc

SEQ ID NO: 2673214 - DNA, 25 bp, Homo sapien
catctccggttctcctccggttttg

SEQ ID NO: 2673215 - DNA, 25 bp, Homo sapien
catgatcaggttccgcatctccggt

SEQ ID NO: 2673216 - DNA, 25 bp, Homo sapien
tccacgcccaggctgtcattctctc

SEQ ID NO: 2673217 - DNA, 25 bp, Homo sapien
caaatgactaggtgcggcagtgccc

SEQ ID NO: 2673218 - DNA, 25 bp, Homo sapien
gaacctcgtgaatgagatccaggga

SEQ ID NO: 2673219 - DNA, 25 bp, Homo sapien
aaatcctgtcccagtgtagagcgag

SEQ ID NO: 2673220 - DNA, 25 bp, Homo sapien
cggtccctactatgaaaagctgcaa

SEQ ID NO: 2673221 - DNA, 25 bp, Homo sapien
tacctttactggtcacggccagagc

SEQ ID NO: 2673222 - DNA, 25 bp, Homo sapien
agaaactcccgtttgccactgctgt

SEQ ID NO: 2673223 - DNA, 25 bp, Homo sapien
gaacactactgcctgggataatcat

SEQ ID NO: 2673224 - DNA, 25 bp, Homo sapien
ggccagagctacctgatcctcaaaa

SEQ ID NO: 2673225 - DNA, 25 bp, Homo sapien
tcttgagttgatacagcaatcttct

SEQ ID NO: 2673226 - DNA, 25 bp, Homo sapien
tattagctgacgcacaggtctgtga

SEQ ID NO: 2673227 - DNA, 25 bp, Homo sapien
tcagaagaaagcattctccatatat

SEQ ID NO: 2673228 - DNA, 25 bp, Homo sapien
gcctctaagtaaatagtatcagaag

SEQ ID NO: 2673229 - DNA, 25 bp, Homo sapien
ctggtccaacgaagaatctgggggc

SEQ ID NO: 2673230 - DNA, 25 bp, Homo sapien
tggtccaacgaagaatctgggggct

SEQ ID NO: 2673231 - DNA, 25 bp, Homo sapien
ttctggtccaacgaagaatctgggg

SEQ ID NO: 2673232 - DNA, 25 bp, Homo sapien
tctggtccaacgaagaatctggggg

SEQ ID NO: 2673233 - DNA, 25 bp, Homo sapien
ttgacccataactgtatttattgat

SEQ ID NO: 2673234 - DNA, 25 bp, Homo sapien
tattggtcttctctcgccaaaggaa

SEQ ID NO: 2673235 - DNA, 25 bp, Homo sapien
gtaaaaagcctatactgtattggtc

SEQ ID NO: 2673236 - DNA, 25 bp, Homo sapien
gactaacagtgattagtaaaaagcc

SEQ ID NO: 2673237 - DNA, 25 bp, Homo sapien
cataaaggccagttttccactggtt

SEQ ID NO: 2673238 - DNA, 25 bp, Homo sapien
catggaacatattccaaccacaatc

SEQ ID NO: 2673239 - DNA, 25 bp, Homo sapien
tctttgccatggaacatattccaac

SEQ ID NO: 2673240 - DNA, 25 bp, Homo sapien
aagacaatcacataaaggccagttt

SEQ ID NO: 2673241 - DNA, 25 bp, Homo sapien
tttatctcatagtctacaattaata

SEQ ID NO: 2673242 - DNA, 25 bp, Homo sapien
acagagaggataaaggagtttctcc

SEQ ID NO: 2673243 - DNA, 25 bp, Homo sapien
ttataaacagagaggataaaggagt

SEQ ID NO: 2673244 - DNA, 25 bp, Homo sapien
tctgttttatctcatagtctacaat

SEQ ID NO: 2673245 - DNA, 25 bp, Homo sapien
gaagaatgctttactctcaaggagg

SEQ ID NO: 2673246 - DNA, 25 bp, Homo sapien
tatgacattagctataacacccagt

SEQ ID NO: 2673247 - DNA, 25 bp, Homo sapien
gctatggtagcaaaaccatgctcca

SEQ ID NO: 2673248 - DNA, 25 bp, Homo sapien
caattttcagatgtaccctcagcaa

SEQ ID NO: 2673249 - DNA, 25 bp, Homo sapien
gagaatcactcaaatccaggaggtg

SEQ ID NO: 2673250 - DNA, 25 bp, Homo sapien
gaggttgcggtgagtggagatcgtg

SEQ ID NO: 2673251 - DNA, 25 bp, Homo sapien
cggtgagtggagatcgtgccattgt

SEQ ID NO: 2673252 - DNA, 25 bp, Homo sapien
actccagcctgggcaacagagcaag

SEQ ID NO: 2673253 - DNA, 25 bp, Homo sapien
tgtatgagatactgcatattcaagt

SEQ ID NO: 2673254 - DNA, 25 bp, Homo sapien
atcttgtatgagatactgcatattc

SEQ ID NO: 2673255 - DNA, 25 bp, Homo sapien
gatactgcatattcaagtcattgat

SEQ ID NO: 2673256 - DNA, 25 bp, Homo sapien
gagatactgcatattcaagtcattg

SEQ ID NO: 2673257 - DNA, 25 bp, Homo sapien
atagcataacgaggaagtaaaatac

SEQ ID NO: 2673258 - DNA, 25 bp, Homo sapien
tagcataacgaggaagtaaaatacc

SEQ ID NO: 2673259 - DNA, 25 bp, Homo sapien
agcataacgaggaagtaaaatacct

SEQ ID NO: 2673260 - DNA, 25 bp, Homo sapien
aaataattacttgggtctggtggct

SEQ ID NO: 2673261 - DNA, 25 bp, Homo sapien
gaatcacttgggagtcgaggctaca

SEQ ID NO: 2673262 - DNA, 25 bp, Homo sapien
agaatcacttgggagtcgaggctac

SEQ ID NO: 2673263 - DNA, 25 bp, Homo sapien
tacttgggtctggtggcttgtgctt

SEQ ID NO: 2673264 - DNA, 25 bp, Homo sapien
acatgatcttccccttcaatcagat

SEQ ID NO: 2673265 - DNA, 25 bp, Homo sapien
ccagcagaagttgggtaataaatgt

SEQ ID NO: 2673266 - DNA, 25 bp, Homo sapien
gatcttccccttcaatcagattaca

SEQ ID NO: 2673267 - DNA, 25 bp, Homo sapien
gcagaagttgggtaataaatgtaaa

SEQ ID NO: 2673268 - DNA, 25 bp, Homo sapien
gtttttcgtacattgctttctggag

SEQ ID NO: 2673269 - DNA, 25 bp, Homo sapien
catatatatatgagcctgtttttcg

SEQ ID NO: 2673270 - DNA, 25 bp, Homo sapien
agtaccatctgtgggcataaactct

SEQ ID NO: 2673271 - DNA, 25 bp, Homo sapien
cagtaccatctgtgggcataaactc

SEQ ID NO: 2673272 - DNA, 25 bp, Homo sapien
tcagactgctaaagatgttgttgtt

SEQ ID NO: 2673273 - DNA, 25 bp, Homo sapien
aggcttcagactgctaaagatgttg

SEQ ID NO: 2673274 - DNA, 25 bp, Homo sapien
ccttgccatcaagtgctggagattt

SEQ ID NO: 2673275 - DNA, 25 bp, Homo sapien
aaggcagactttccaagcaattaat

SEQ ID NO: 2673276 - DNA, 25 bp, Homo sapien
cgtgcattgagaataacagggtatc

SEQ ID NO: 2673277 - DNA, 25 bp, Homo sapien
ttcactgtctcgttccaccttgcca

SEQ ID NO: 2673278 - DNA, 25 bp, Homo sapien
ggactgtccattggcccgtaacaaa

SEQ ID NO: 2673279 - DNA, 25 bp, Homo sapien
tccattggcccgtaacaaatcaaag

SEQ ID NO: 2673280 - DNA, 25 bp, Homo sapien
catcacagacataggactgtccatt

SEQ ID NO: 2673281 - DNA, 25 bp, Homo sapien
tttgcacagtcatcataatacttca

SEQ ID NO: 2673282 - DNA, 25 bp, Homo sapien
tacaattgggatatcttcagcttct

SEQ ID NO: 2673283 - DNA, 25 bp, Homo sapien
catggaatatgaaattgtggagcaa

SEQ ID NO: 2673284 - DNA, 25 bp, Homo sapien
tctaagggtattgaccatggaatat

SEQ ID NO: 2673285 - DNA, 25 bp, Homo sapien
tccagatgtagttggtacaattggg

SEQ ID NO: 2673286 - DNA, 25 bp, Homo sapien
gatccccatgacgtataacagctat

SEQ ID NO: 2673287 - DNA, 25 bp, Homo sapien
gacgtataacagctatgacacatct

SEQ ID NO: 2673288 - DNA, 25 bp, Homo sapien
cagctatgacacatctaagttccat

SEQ ID NO: 2673289 - DNA, 25 bp, Homo sapien
tttgttttggtgttcgatccccatg

SEQ ID NO: 2673290 - DNA, 25 bp, Homo sapien
ttttaatttccctgatttatatcca

SEQ ID NO: 2673291 - DNA, 25 bp, Homo sapien
tgagttttaatttccctgatttata

SEQ ID NO: 2673292 - DNA, 25 bp, Homo sapien
ttaatttccctgatttatatccatc

SEQ ID NO: 2673293 - DNA, 25 bp, Homo sapien
aatttccctgatttatatccatcac

SEQ ID NO: 2673294 - DNA, 25 bp, Homo sapien
cagaatcattattttgccctagctc

SEQ ID NO: 2673295 - DNA, 25 bp, Homo sapien
agaatcattattttgccctagctcc

SEQ ID NO: 2673296 - DNA, 25 bp, Homo sapien
cttaagttgttcaagttttggcttg

SEQ ID NO: 2673297 - DNA, 25 bp, Homo sapien
taatacagtcttaagttgttcaagt

SEQ ID NO: 2673298 - DNA, 25 bp, Homo sapien
ctctaatacagtcttaagttgttca

SEQ ID NO: 2673299 - DNA, 25 bp, Homo sapien
atctctaatacagtcttaagttgtt

SEQ ID NO: 2673300 - DNA, 25 bp, Homo sapien
tgaaccttacgatttattccagaaa

SEQ ID NO: 2673301 - DNA, 25 bp, Homo sapien
gagataggtcaactgaaccttacga

SEQ ID NO: 2673302 - DNA, 25 bp, Homo sapien
tgttttaggacaaccatgagggaga

SEQ ID NO: 2673303 - DNA, 25 bp, Homo sapien
cctcttcactagatgttttaggaca

SEQ ID NO: 2673304 - DNA, 25 bp, Homo sapien
cttgacctccaggatacatacacct

SEQ ID NO: 2673305 - DNA, 25 bp, Homo sapien
tgcaggagttaattcacctccccat

SEQ ID NO: 2673306 - DNA, 25 bp, Homo sapien
gcaggagttaattcacctccccatt

SEQ ID NO: 2673307 - DNA, 25 bp, Homo sapien
caggagttaattcacctccccattt

SEQ ID NO: 2673308 - DNA, 25 bp, Homo sapien
gctgcagtcatctggactcgtcctt

SEQ ID NO: 2673309 - DNA, 25 bp, Homo sapien
tcatgtctgtaggtgctatgtaatc

SEQ ID NO: 2673310 - DNA, 25 bp, Homo sapien
tctgtaggtgctatgtaatctaagt

SEQ ID NO: 2673311 - DNA, 25 bp, Homo sapien
tggactcgtccttcatcagaggcat

SEQ ID NO: 2673312 - DNA, 25 bp, Homo sapien
gccaaaaatgttttaagatacaata

SEQ ID NO: 2673313 - DNA, 25 bp, Homo sapien
agatacaatattagattaaaaactc

SEQ ID NO: 2673314 - DNA, 25 bp, Homo sapien
tgttttaagatacaatattagatta

SEQ ID NO: 2673315 - DNA, 25 bp, Homo sapien
aaatgttttaagatacaatattaga

SEQ ID NO: 2673316 - DNA, 25 bp, Homo sapien
ttcacacgttgctgacaactgctca

SEQ ID NO: 2673317 - DNA, 25 bp, Homo sapien
gaatgggtgtaagctctccttccaa

SEQ ID NO: 2673318 - DNA, 25 bp, Homo sapien
gctcagagagtcactatcactatcc

SEQ ID NO: 2673319 - DNA, 25 bp, Homo sapien
tcatgaagccttgccttcacacgtt

SEQ ID NO: 2673320 - DNA, 25 bp, Homo sapien
ccatcagagaaatgcaaatcaaaac

SEQ ID NO: 2673321 - DNA, 25 bp, Homo sapien
cagacacatggctcatcatcactgg

SEQ ID NO: 2673322 - DNA, 25 bp, Homo sapien
gccaacagacacatggctcatcatc

SEQ ID NO: 2673323 - DNA, 25 bp, Homo sapien
caacagacacatggctcatcatcac

SEQ ID NO: 2673324 - DNA, 25 bp, Homo sapien
gacattgtctctacaaaacaaaaaa

SEQ ID NO: 2673325 - DNA, 25 bp, Homo sapien
agcaagacattgtctctacaaaaca

SEQ ID NO: 2673326 - DNA, 25 bp, Homo sapien
aagacattgtctctacaaaacaaaa

SEQ ID NO: 2673327 - DNA, 25 bp, Homo sapien
gcaagacattgtctctacaaaacaa

SEQ ID NO: 2673328 - DNA, 25 bp, Homo sapien
gagccacatcaggacgacaaggtag

SEQ ID NO: 2673329 - DNA, 25 bp, Homo sapien
tcagggtcatcctggtaaaatcagt

SEQ ID NO: 2673330 - DNA, 25 bp, Homo sapien
gattcctaatgatctcccactgaaa

SEQ ID NO: 2673331 - DNA, 25 bp, Homo sapien
tgatctgagcacaatggttctggca

SEQ ID NO: 2673332 - DNA, 25 bp, Homo sapien
cacaggtcttcacagggtttttaat

SEQ ID NO: 2673333 - DNA, 25 bp, Homo sapien
tgatttaggatcttccattcgatgt

SEQ ID NO: 2673334 - DNA, 25 bp, Homo sapien
tcttccattcgatgtctgatttgag

SEQ ID NO: 2673335 - DNA, 25 bp, Homo sapien
gagaaatgcttccagatggagtaag

SEQ ID NO: 2673336 - DNA, 25 bp, Homo sapien
taacaatatctgctaatgccttcga

SEQ ID NO: 2673337 - DNA, 25 bp, Homo sapien
gccttcgaaagcctatataattcca

SEQ ID NO: 2673338 - DNA, 25 bp, Homo sapien
taacttggaccatctacgtagcata

SEQ ID NO: 2673339 - DNA, 25 bp, Homo sapien
caaggaaccattatgctggacatca

SEQ ID NO: 2673340 - DNA, 25 bp, Homo sapien
cagtttttcagctttagttatacca

SEQ ID NO: 2673341 - DNA, 25 bp, Homo sapien
tgagcgaatttttctaaccagagga

SEQ ID NO: 2673342 - DNA, 25 bp, Homo sapien
catcatcttgtgtcctctgaaggtc

SEQ ID NO: 2673343 - DNA, 25 bp, Homo sapien
tacagtagcctttggcaatctccag

SEQ ID NO: 2673344 - DNA, 25 bp, Homo sapien
tacgaacatgacgttcaggagacag

SEQ ID NO: 2673345 - DNA, 25 bp, Homo sapien
catgacgttcaggagacagaacacc

SEQ ID NO: 2673346 - DNA, 25 bp, Homo sapien
aatataatctagtacgaacatgacg

SEQ ID NO: 2673347 - DNA, 25 bp, Homo sapien
tctagtacgaacatgacgttcagga

SEQ ID NO: 2673348 - DNA, 25 bp, Homo sapien
cataaggcaccatagcgaagaatag

SEQ ID NO: 2673349 - DNA, 25 bp, Homo sapien
attgcataaggcaccatagcgaaga

SEQ ID NO: 2673350 - DNA, 25 bp, Homo sapien
ggcaccatagcgaagaatagacagc

SEQ ID NO: 2673351 - DNA, 25 bp, Homo sapien
ccatagcgaagaatagacagcaaag

SEQ ID NO: 2673352 - DNA, 25 bp, Homo sapien
gcttggtatatagtagtcccttgaa

SEQ ID NO: 2673353 - DNA, 25 bp, Homo sapien
ccttgaaagacgacattaagtagta

SEQ ID NO: 2673354 - DNA, 25 bp, Homo sapien
ctgaagagaacatctttatccctaa

SEQ ID NO: 2673355 - DNA, 25 bp, Homo sapien
aaaatctagcaaaatgcttggtata

SEQ ID NO: 2673356 - DNA, 25 bp, Homo sapien
tcctccatcttcattctgagaatca

SEQ ID NO: 2673357 - DNA, 25 bp, Homo sapien
ttcctccatcttcattctgagaatc

SEQ ID NO: 2673358 - DNA, 25 bp, Homo sapien
catctccttcaccattcctccatct

SEQ ID NO: 2673359 - DNA, 25 bp, Homo sapien
ttcaccattcctccatcttcattct

SEQ ID NO: 2673360 - DNA, 25 bp, Homo sapien
cttattaggatcctcataaagcatg

SEQ ID NO: 2673361 - DNA, 25 bp, Homo sapien
gtagttgagctcattgacaacgttt

SEQ ID NO: 2673362 - DNA, 25 bp, Homo sapien
aaataatccatagctcgtttccact

SEQ ID NO: 2673363 - DNA, 25 bp, Homo sapien
aacaatctgagtcatgtagttgagc

SEQ ID NO: 2673364 - DNA, 25 bp, Homo sapien
acatgaaagcgttcttctgaggaaa

SEQ ID NO: 2673365 - DNA, 25 bp, Homo sapien
tggaagctggtctatatccatagcc

SEQ ID NO: 2673366 - DNA, 25 bp, Homo sapien
ggctcccggactaaagtgtaattca

SEQ ID NO: 2673367 - DNA, 25 bp, Homo sapien
gaaagcgttcttctgaggaaagatc

SEQ ID NO: 2673368 - DNA, 25 bp, Homo sapien
tggtttaaacaatatcacagctcga

SEQ ID NO: 2673369 - DNA, 25 bp, Homo sapien
tatgaattggctctgataccattgg

SEQ ID NO: 2673370 - DNA, 25 bp, Homo sapien
tttgtagccgtcttcctagatcttg

SEQ ID NO: 2673371 - DNA, 25 bp, Homo sapien
gagacttcctgtgtatatgaattgg

SEQ ID NO: 2673372 - DNA, 25 bp, Homo sapien
tattcttgatccattaaatcaggct

SEQ ID NO: 2673373 - DNA, 25 bp, Homo sapien
gatcaacctaatgtaaatattccta

SEQ ID NO: 2673374 - DNA, 25 bp, Homo sapien
cattattgaagatcaacctaatgta

SEQ ID NO: 2673375 - DNA, 25 bp, Homo sapien
gcccggcttgctctctaactaaaat

SEQ ID NO: 2673376 - DNA, 25 bp, Homo sapien
tagtatcacttgaatcagttattgc

SEQ ID NO: 2673377 - DNA, 25 bp, Homo sapien
gactttgcaattaggctaacaattt

SEQ ID NO: 2673378 - DNA, 25 bp, Homo sapien
aatcagttattgctaaagcatctcc

SEQ ID NO: 2673379 - DNA, 25 bp, Homo sapien
taggctaacaatttagaatttcatt

SEQ ID NO: 2673380 - DNA, 25 bp, Homo sapien
cccgagacactaaagaattgtgcaa

SEQ ID NO: 2673381 - DNA, 25 bp, Homo sapien
catgtttgcatgttcaggtttcaga

SEQ ID NO: 2673382 - DNA, 25 bp, Homo sapien
tgtgcaaagggtcaaagggatttca

SEQ ID NO: 2673383 - DNA, 25 bp, Homo sapien
cataagatggactcaaattgcacct

SEQ ID NO: 2673384 - DNA, 25 bp, Homo sapien
ccacaccactggtataatgcagcca

SEQ ID NO: 2673385 - DNA, 25 bp, Homo sapien
ggtaccagtaccctctgggctagac

SEQ ID NO: 2673386 - DNA, 25 bp, Homo sapien
gaagaagtgatttgttcccctgatc

SEQ ID NO: 2673387 - DNA, 25 bp, Homo sapien
gttcccctgatctgcgtcttcgacg

SEQ ID NO: 2673388 - DNA, 25 bp, Homo sapien
tttgttgctctgaatgcagggagga

SEQ ID NO: 2673389 - DNA, 25 bp, Homo sapien
ctgtttgttgctctgaatgcaggga

SEQ ID NO: 2673390 - DNA, 25 bp, Homo sapien
gtttgttgctctgaatgcagggagg

SEQ ID NO: 2673391 - DNA, 25 bp, Homo sapien
tgtttgttgctctgaatgcagggag

SEQ ID NO: 2673392 - DNA, 25 bp, Homo sapien
ggtccttgcaatgaagtggtgcgaa

SEQ ID NO: 2673393 - DNA, 25 bp, Homo sapien
gagtccatttcatgaggtccttgca

SEQ ID NO: 2673394 - DNA, 25 bp, Homo sapien
gatcatgcaagatccccttttgaag

SEQ ID NO: 2673395 - DNA, 25 bp, Homo sapien
gacagagactcttgagatcaccata

SEQ ID NO: 2673396 - DNA, 25 bp, Homo sapien
tgttccacaagagttcttggtgttc

SEQ ID NO: 2673397 - DNA, 25 bp, Homo sapien
agttcttggtgttctcaggtaatta

SEQ ID NO: 2673398 - DNA, 25 bp, Homo sapien
ttctgttccacaagagttcttggtg

SEQ ID NO: 2673399 - DNA, 25 bp, Homo sapien
tcttggtgttctcaggtaattagca

SEQ ID NO: 2673400 - DNA, 25 bp, Homo sapien
tgtgagaccaggtccttttcagtca

SEQ ID NO: 2673401 - DNA, 25 bp, Homo sapien
ataacttaggacaagaaaggactct

SEQ ID NO: 2673402 - DNA, 25 bp, Homo sapien
gatgcccctgaattgagaattacta

SEQ ID NO: 2673403 - DNA, 25 bp, Homo sapien
taatcaatttccaagggcaagccat

SEQ ID NO: 2673404 - DNA, 25 bp, Homo sapien
acacaacgggtgttcttccattcac

SEQ ID NO: 2673405 - DNA, 25 bp, Homo sapien
aaatacatacacaacgggtgttctt

SEQ ID NO: 2673406 - DNA, 25 bp, Homo sapien
tcacattgggaattcatgcagcatg

SEQ ID NO: 2673407 - DNA, 25 bp, Homo sapien
ttccattcacattgggaattcatgc

SEQ ID NO: 2673408 - DNA, 25 bp, Homo sapien
tacgatgagtacgagcataatcctg

SEQ ID NO: 2673409 - DNA, 25 bp, Homo sapien
cataatcctgtaggttaggtgcgct

SEQ ID NO: 2673410 - DNA, 25 bp, Homo sapien
gaggtcagctttttacgatgagtac

SEQ ID NO: 2673411 - DNA, 25 bp, Homo sapien
gaggtgctaaacaggcccgcacagt

SEQ ID NO: 2673412 - DNA, 25 bp, Homo sapien
ggatttcactcgaatcagtcagtgg

SEQ ID NO: 2673413 - DNA, 25 bp, Homo sapien
cactgatagtcatttaggcaaaaga

SEQ ID NO: 2673414 - DNA, 25 bp, Homo sapien
ccaagttgtagataacagagagcac

SEQ ID NO: 2673415 - DNA, 25 bp, Homo sapien
taactgtctgatgaaacatggatcc

SEQ ID NO: 2673416 - DNA, 25 bp, Homo sapien
ttgggtgtcgagcaaatgagataga

SEQ ID NO: 2673417 - DNA, 25 bp, Homo sapien
ttaacagcagaaccgcgtgtggcgt

SEQ ID NO: 2673418 - DNA, 25 bp, Homo sapien
tttaacagcagaaccgcgtgtggcg

SEQ ID NO: 2673419 - DNA, 25 bp, Homo sapien
cattggttgggtgtcgagcaaatga

SEQ ID NO: 2673420 - DNA, 25 bp, Homo sapien
cacaatgaaagggttagcgcagcaa

SEQ ID NO: 2673421 - DNA, 25 bp, Homo sapien
taggtgttctgcacagaggcccaga

SEQ ID NO: 2673422 - DNA, 25 bp, Homo sapien
ggaaacggaccagcacctatagagg

SEQ ID NO: 2673423 - DNA, 25 bp, Homo sapien
gcatttgtatgtgcggaaaacccac

SEQ ID NO: 2673424 - DNA, 25 bp, Homo sapien
tctgcttcaataggcgtgtgctcat

SEQ ID NO: 2673425 - DNA, 25 bp, Homo sapien
gattttcaggtgcaaaccaaagcat

SEQ ID NO: 2673426 - DNA, 25 bp, Homo sapien
taacctcagactgcaacattctgct

SEQ ID NO: 2673427 - DNA, 25 bp, Homo sapien
tactataacagcaactaaagcacct

SEQ ID NO: 2673428 - DNA, 25 bp, Homo sapien
aatttcagcggtcttccgtggaacg

SEQ ID NO: 2673429 - DNA, 25 bp, Homo sapien
taaagatagggcattatgaagagtt

SEQ ID NO: 2673430 - DNA, 25 bp, Homo sapien
tctagaggacaaatagatggcacca

SEQ ID NO: 2673431 - DNA, 25 bp, Homo sapien
tcttccgtggaacgtcagatgatgg

SEQ ID NO: 2673432 - DNA, 25 bp, Homo sapien
tctaagcaaagcactctctcccaaa

SEQ ID NO: 2673433 - DNA, 25 bp, Homo sapien
tcagaaaaagaggaatgatacacaa

SEQ ID NO: 2673434 - DNA, 25 bp, Homo sapien
ttccaaagtactgaggaatcctata

SEQ ID NO: 2673435 - DNA, 25 bp, Homo sapien
tatagagctgaaaacgacaactggc

SEQ ID NO: 2673436 - DNA, 25 bp, Homo sapien
ttcttataatttagtgaccctacga

SEQ ID NO: 2673437 - DNA, 25 bp, Homo sapien
attatctcttaacatcatagaaagt

SEQ ID NO: 2673438 - DNA, 25 bp, Homo sapien
atctcttaacatcatagaaagtttc

SEQ ID NO: 2673439 - DNA, 25 bp, Homo sapien
tataatttagtgaccctacgaatat

SEQ ID NO: 2673440 - DNA, 25 bp, Homo sapien
tggactggaacgtaaagctgtagag

SEQ ID NO: 2673441 - DNA, 25 bp, Homo sapien
tagtgctctttaaggtagctggtgg

SEQ ID NO: 2673442 - DNA, 25 bp, Homo sapien
tttttctcattattggactggaacg

SEQ ID NO: 2673443 - DNA, 25 bp, Homo sapien
tctttgcaggtgtatacgtatttaa

SEQ ID NO: 2673444 - DNA, 25 bp, Homo sapien
agaagacagtccgtaaattagtttg

SEQ ID NO: 2673445 - DNA, 25 bp, Homo sapien
ctctagggaagtgcaaagatactaa

SEQ ID NO: 2673446 - DNA, 25 bp, Homo sapien
tatatcaattgactacaataatcga

SEQ ID NO: 2673447 - DNA, 25 bp, Homo sapien
tttaacccttaggatcattacgctc

SEQ ID NO: 2673448 - DNA, 25 bp, Homo sapien
gagatgaggtattaggaacaactgc

SEQ ID NO: 2673449 - DNA, 25 bp, Homo sapien
taggaacaactgcactagaaggtcc

SEQ ID NO: 2673450 - DNA, 25 bp, Homo sapien
ttgtgttcatgcgtttctgttttgc

SEQ ID NO: 2673451 - DNA, 25 bp, Homo sapien
tctttttccgagatgaggtattagg

SEQ ID NO: 2673452 - DNA, 25 bp, Homo sapien
tagcttccttatgacctccacagtg

SEQ ID NO: 2673453 - DNA, 25 bp, Homo sapien
tgcacaaaggtgtagttctcccagc

SEQ ID NO: 2673454 - DNA, 25 bp, Homo sapien
tgactttggtacgagcctgctgggc

SEQ ID NO: 2673455 - DNA, 25 bp, Homo sapien
ttttcctgatgaacaaggcaccttg

SEQ ID NO: 2673456 - DNA, 25 bp, Homo sapien
caatggaaaaagttagttgtactgt

SEQ ID NO: 2673457 - DNA, 25 bp, Homo sapien
tacaaatagagtgtctagtctacag

SEQ ID NO: 2673458 - DNA, 25 bp, Homo sapien
tacagagcaatactactgagtttgg

SEQ ID NO: 2673459 - DNA, 25 bp, Homo sapien
tgactacaggaaagtaatagttctt

SEQ ID NO: 2673460 - DNA, 25 bp, Homo sapien
gcaacaggagcagccataaaagagc

SEQ ID NO: 2673461 - DNA, 25 bp, Homo sapien
agattgttactaggcaggctgttgc

SEQ ID NO: 2673462 - DNA, 25 bp, Homo sapien
tgtagaatgacaaaagagactgctt

SEQ ID NO: 2673463 - DNA, 25 bp, Homo sapien
ataaaaatgctgaagaggcctggtt

SEQ ID NO: 2673464 - DNA, 25 bp, Homo sapien
tatccattagagcagacaactttgc

SEQ ID NO: 2673465 - DNA, 25 bp, Homo sapien
tagagtctcccagatagtctaccac

SEQ ID NO: 2673466 - DNA, 25 bp, Homo sapien
tagagctgagattaatacccaggtc

SEQ ID NO: 2673467 - DNA, 25 bp, Homo sapien
catatgcagtgggaacacgaaacac

SEQ ID NO: 2673468 - DNA, 25 bp, Homo sapien
gaatggagcccaattccagcaatct

SEQ ID NO: 2673469 - DNA, 25 bp, Homo sapien
tttcatatcccttggacaggaagac

SEQ ID NO: 2673470 - DNA, 25 bp, Homo sapien
gcctgttttcaggtcactgtgagaa

SEQ ID NO: 2673471 - DNA, 25 bp, Homo sapien
tttgtggtccagtcaagagaaaccc

SEQ ID NO: 2673472 - DNA, 25 bp, Homo sapien
cagcccaggcacatttatgaagtca

SEQ ID NO: 2673473 - DNA, 25 bp, Homo sapien
cacttcctttgggattctattagca

SEQ ID NO: 2673474 - DNA, 25 bp, Homo sapien
gccagaataacataccaccatctag

SEQ ID NO: 2673475 - DNA, 25 bp, Homo sapien
cctcaggcaacaactctcctgggat

SEQ ID NO: 2673476 - DNA, 25 bp, Homo sapien
gactctcttgaggatccctttctca

SEQ ID NO: 2673477 - DNA, 25 bp, Homo sapien
aactcccagtgactctcttgaggat

SEQ ID NO: 2673478 - DNA, 25 bp, Homo sapien
agtgactctcttgaggatccctttc

SEQ ID NO: 2673479 - DNA, 25 bp, Homo sapien
ccagtgactctcttgaggatccctt

SEQ ID NO: 2673480 - DNA, 25 bp, Homo sapien
catgccctgtgcatgtatctgatgg

SEQ ID NO: 2673481 - DNA, 25 bp, Homo sapien
tgtacattacttccagtgcagctct

SEQ ID NO: 2673482 - DNA, 25 bp, Homo sapien
tgtgccctcagccttaagcagccat

SEQ ID NO: 2673483 - DNA, 25 bp, Homo sapien
tgccggttagccatacaagtgtaca

SEQ ID NO: 2673484 - DNA, 25 bp, Homo sapien
aagtccaacttgataagtatgaaca

SEQ ID NO: 2673485 - DNA, 25 bp, Homo sapien
gaacactttgtgtcagctattattg

SEQ ID NO: 2673486 - DNA, 25 bp, Homo sapien
catatgtacacactccttaagctgt

SEQ ID NO: 2673487 - DNA, 25 bp, Homo sapien
taagctgtcacaacaatcaagataa

SEQ ID NO: 2673488 - DNA, 25 bp, Homo sapien
acatatatgcagtggtcttttaaca

SEQ ID NO: 2673489 - DNA, 25 bp, Homo sapien
gagtggtgattttcataaatagcag

SEQ ID NO: 2673490 - DNA, 25 bp, Homo sapien
gcaactttctggctatgggatcaaa

SEQ ID NO: 2673491 - DNA, 25 bp, Homo sapien
caactagagactatacaaagagtgg

SEQ ID NO: 2673492 - DNA, 25 bp, Homo sapien
tggcctaataccacacagtgctgaa

SEQ ID NO: 2673493 - DNA, 25 bp, Homo sapien
cagatttcatgtagatgtcaccacc

SEQ ID NO: 2673494 - DNA, 25 bp, Homo sapien
taaactatacattccctgaggtctc

SEQ ID NO: 2673495 - DNA, 25 bp, Homo sapien
tagcctatttttactgcgaggagtg

SEQ ID NO: 2673496 - DNA, 25 bp, Homo sapien
ccgagccagccgggtaccctctcct

SEQ ID NO: 2673497 - DNA, 25 bp, Homo sapien
cggcgccagctaccgccctgcttag

SEQ ID NO: 2673498 - DNA, 25 bp, Homo sapien
gaggcgcaggactgcggcgccgaga

SEQ ID NO: 2673499 - DNA, 25 bp, Homo sapien
cagggctccgctgcctccgccgtgc

SEQ ID NO: 2673500 - DNA, 25 bp, Homo sapien
tcgcacgcgggttgcaaccaggacg

SEQ ID NO: 2673501 - DNA, 25 bp, Homo sapien
gacatctgccgcttaagcttctggc

SEQ ID NO: 2673502 - DNA, 25 bp, Homo sapien
gcgagggtggcaatgcccgacatct

SEQ ID NO: 2673503 - DNA, 25 bp, Homo sapien
tgaggtgctatctgacccgggcagt

SEQ ID NO: 2673504 - DNA, 25 bp, Homo sapien
gcttcacaatggggccgcgttgctg

SEQ ID NO: 2673505 - DNA, 25 bp, Homo sapien
gccatcattcccttcgcgttcccat

SEQ ID NO: 2673506 - DNA, 25 bp, Homo sapien
aggtctgactgccacccgcctcgaa

SEQ ID NO: 2673507 - DNA, 25 bp, Homo sapien
ctttctggcggagacctgcagattc

SEQ ID NO: 2673508 - DNA, 25 bp, Homo sapien
tttccaatgagtcccaagggaacac

SEQ ID NO: 2673509 - DNA, 25 bp, Homo sapien
aatgagtcccaagggaacacagaca

SEQ ID NO: 2673510 - DNA, 25 bp, Homo sapien
tacaatttccaatgagtcccaaggg

SEQ ID NO: 2673511 - DNA, 25 bp, Homo sapien
ctgtacaatttccaatgagtcccaa

SEQ ID NO: 2673512 - DNA, 25 bp, Homo sapien
taggatctggtagcctgacacggtc

SEQ ID NO: 2673513 - DNA, 25 bp, Homo sapien
tttatacaaacgagaggaacgggca

SEQ ID NO: 2673514 - DNA, 25 bp, Homo sapien
tcaggagttcctcgccagtcgtgaa

SEQ ID NO: 2673515 - DNA, 25 bp, Homo sapien
gaacgggcaagtcctgcatctagct

SEQ ID NO: 2673516 - DNA, 25 bp, Homo sapien
ctagattgaggtagtccagagattt

SEQ ID NO: 2673517 - DNA, 25 bp, Homo sapien
tagattgaggtagtccagagatttg

SEQ ID NO: 2673518 - DNA, 25 bp, Homo sapien
cctcggagggttaggtgttgaagct

SEQ ID NO: 2673519 - DNA, 25 bp, Homo sapien
attattcctagcaaacacacggtcc

SEQ ID NO: 2673520 - DNA, 25 bp, Homo sapien
cggagggttaggtgttgaagctggt

SEQ ID NO: 2673521 - DNA, 25 bp, Homo sapien
ttattcctagcaaacacacggtccc

SEQ ID NO: 2673522 - DNA, 25 bp, Homo sapien
gtacagcagtgggttttttctagcc

SEQ ID NO: 2673523 - DNA, 25 bp, Homo sapien
aagtggtccaattcagcaatgttca

SEQ ID NO: 2673524 - DNA, 25 bp, Homo sapien
ggaacacttagctgatataaccatc

SEQ ID NO: 2673525 - DNA, 25 bp, Homo sapien
ttttctagccaagcgtaggctgacc

SEQ ID NO: 2673526 - DNA, 25 bp, Homo sapien
gcgaaacatttccagcccaacgaga

SEQ ID NO: 2673527 - DNA, 25 bp, Homo sapien
gcaatgacctgatgccatgctgaat

SEQ ID NO: 2673528 - DNA, 25 bp, Homo sapien
tcacaattgcaccaggaatgaccca

SEQ ID NO: 2673529 - DNA, 25 bp, Homo sapien
aacagtagaagcacgttaggctcct

SEQ ID NO: 2673530 - DNA, 25 bp, Homo sapien
tagaaataatacagttccacagggt

SEQ ID NO: 2673531 - DNA, 25 bp, Homo sapien
tagttagaaataatacagttccaca

SEQ ID NO: 2673532 - DNA, 25 bp, Homo sapien
gaaataatacagttccacagggtaa

SEQ ID NO: 2673533 - DNA, 25 bp, Homo sapien
tcatagttagaaataatacagttcc

SEQ ID NO: 2673534 - DNA, 25 bp, Homo sapien
tattaaggaacgtaggcacacggac

SEQ ID NO: 2673535 - DNA, 25 bp, Homo sapien
cagaacaggtctcataggtaaccag

SEQ ID NO: 2673536 - DNA, 25 bp, Homo sapien
taagtagcctgttgatagtggacct

SEQ ID NO: 2673537 - DNA, 25 bp, Homo sapien
ggacctagtttaaagcaccacacaa

SEQ ID NO: 2673538 - DNA, 25 bp, Homo sapien
gcaccagagacccacaaaagatgag

SEQ ID NO: 2673539 - DNA, 25 bp, Homo sapien
tggctacctggtccaaaagcttgtc

SEQ ID NO: 2673540 - DNA, 25 bp, Homo sapien
cagttatgtccccaaatagggccca

SEQ ID NO: 2673541 - DNA, 25 bp, Homo sapien
ggagcacctctgactttctctcggg

SEQ ID NO: 2673542 - DNA, 25 bp, Homo sapien
aacagcccccaagtatttccacttg

SEQ ID NO: 2673543 - DNA, 25 bp, Homo sapien
tgtagctggccccttaaagagagaa

SEQ ID NO: 2673544 - DNA, 25 bp, Homo sapien
tatatgaaggttctagcattttaat

SEQ ID NO: 2673545 - DNA, 25 bp, Homo sapien
tcaaaatggtcacaactatcggaca

SEQ ID NO: 2673546 - DNA, 25 bp, Homo sapien
gttgattagccgtatcttgcaaaaa

SEQ ID NO: 2673547 - DNA, 25 bp, Homo sapien
tatacctaattctcataagaactgg

SEQ ID NO: 2673548 - DNA, 25 bp, Homo sapien
tggcaactattacgtcacagatatt

SEQ ID NO: 2673549 - DNA, 25 bp, Homo sapien
aaacatggcaaattaagggtttcag

SEQ ID NO: 2673550 - DNA, 25 bp, Homo sapien
tatgagggacaacatatattcacac

SEQ ID NO: 2673551 - DNA, 25 bp, Homo sapien
ctggcatgtcaacacacactcagaa

SEQ ID NO: 2673552 - DNA, 25 bp, Homo sapien
tagaccagtggttgtgaagctctta

SEQ ID NO: 2673553 - DNA, 25 bp, Homo sapien
tacccaattggatcatctctacacc

SEQ ID NO: 2673554 - DNA, 25 bp, Homo sapien
ccataaatatctaaaaatggtcact

SEQ ID NO: 2673555 - DNA, 25 bp, Homo sapien
tccaagaaggtaaattggactcaac

SEQ ID NO: 2673556 - DNA, 25 bp, Homo sapien
gactcaacgagaaggactttcatgt

SEQ ID NO: 2673557 - DNA, 25 bp, Homo sapien
taaattggactcaacgagaaggact

SEQ ID NO: 2673558 - DNA, 25 bp, Homo sapien
gatgcaaacctcagacacctattga

SEQ ID NO: 2673559 - DNA, 25 bp, Homo sapien
aacctcagacacctattgagacagg

SEQ ID NO: 2673560 - DNA, 25 bp, Homo sapien
tgcaaacctcagacacctattgaga

SEQ ID NO: 2673561 - DNA, 25 bp, Homo sapien
cagatgcaaacctcagacacctatt

SEQ ID NO: 2673562 - DNA, 25 bp, Homo sapien
tgtgtctgtccaatgtgattcaggg

SEQ ID NO: 2673563 - DNA, 25 bp, Homo sapien
gaatacagtatctttccatgcgtct

SEQ ID NO: 2673564 - DNA, 25 bp, Homo sapien
ctgctagacttctgggcaacaagaa

SEQ ID NO: 2673565 - DNA, 25 bp, Homo sapien
gattcagggatgaacatggctctgg

SEQ ID NO: 2673566 - DNA, 25 bp, Homo sapien
ccaattgtattcctaagaaggagcc

SEQ ID NO: 2673567 - DNA, 25 bp, Homo sapien
taagctactcccaccagtttcattc

SEQ ID NO: 2673568 - DNA, 25 bp, Homo sapien
ctttatcggcactaaggcaccttca

SEQ ID NO: 2673569 - DNA, 25 bp, Homo sapien
caatcaaagacattggcctctaagc

SEQ ID NO: 2673570 - DNA, 25 bp, Homo sapien
ttctatccataaatgcaggtaagtt

SEQ ID NO: 2673571 - DNA, 25 bp, Homo sapien
tctatccataaatgcaggtaagttt

SEQ ID NO: 2673572 - DNA, 25 bp, Homo sapien
tttctatccataaatgcaggtaagt

SEQ ID NO: 2673573 - DNA, 25 bp, Homo sapien
ctatccataaatgcaggtaagtttg

SEQ ID NO: 2673574 - DNA, 25 bp, Homo sapien
gttttgcttctttaaatgctccttc

SEQ ID NO: 2673575 - DNA, 25 bp, Homo sapien
ctttaaatgctccttctggacccac

SEQ ID NO: 2673576 - DNA, 25 bp, Homo sapien
tgcttctttaaatgctccttctgga

SEQ ID NO: 2673577 - DNA, 25 bp, Homo sapien
ttaaatgctccttctggacccactg

SEQ ID NO: 2673578 - DNA, 25 bp, Homo sapien
caatagaaagccagacatttattat

SEQ ID NO: 2673579 - DNA, 25 bp, Homo sapien
ttattatctgagaaactgaaccggg

SEQ ID NO: 2673580 - DNA, 25 bp, Homo sapien
cccttccatgggcacatctttctcc

SEQ ID NO: 2673581 - DNA, 25 bp, Homo sapien
ttctcccactgtttacaactaagta

SEQ ID NO: 2673582 - DNA, 25 bp, Homo sapien
tgcatatgcacaagtaaggcgagaa

SEQ ID NO: 2673583 - DNA, 25 bp, Homo sapien
acatggattcaaaggatcaccaggg

SEQ ID NO: 2673584 - DNA, 25 bp, Homo sapien
ggaaacaagattcaggccaagcaat

SEQ ID NO: 2673585 - DNA, 25 bp, Homo sapien
tctgttagtagtgcactgaagtggc

SEQ ID NO: 2673586 - DNA, 25 bp, Homo sapien
atggtggagagagaaaatgaagcag

SEQ ID NO: 2673587 - DNA, 25 bp, Homo sapien
catggtggagagagaaaatgaagca

SEQ ID NO: 2673588 - DNA, 25 bp, Homo sapien
gagagaaaatgaagcagcatctcag

SEQ ID NO: 2673589 - DNA, 25 bp, Homo sapien
tggagagagaaaatgaagcagcatc

SEQ ID NO: 2673590 - DNA, 25 bp, Homo sapien
gctcttacagttgtacccaaactat

SEQ ID NO: 2673591 - DNA, 25 bp, Homo sapien
caaactataggaaccccttgcctct

SEQ ID NO: 2673592 - DNA, 25 bp, Homo sapien
gaagatgtcacaggggttctgcttt

SEQ ID NO: 2673593 - DNA, 25 bp, Homo sapien
aaaggaatgaagatgtcacaggggt

SEQ ID NO: 2673594 - DNA, 25 bp, Homo sapien
gtcacaggggttctgctttaaggaa

SEQ ID NO: 2673595 - DNA, 25 bp, Homo sapien
ctgctttaaggaatccgaagctctg

SEQ ID NO: 2673596 - DNA, 25 bp, Homo sapien
gctatgtaaatagaaggaatggcca

SEQ ID NO: 2673597 - DNA, 25 bp, Homo sapien
gaatagtagatgtgatagtgccgtg

SEQ ID NO: 2673598 - DNA, 25 bp, Homo sapien
aactcttaaattgccaacctctgag

SEQ ID NO: 2673599 - DNA, 25 bp, Homo sapien
ggaatggccagttcaaaagaatagt

SEQ ID NO: 2673600 - DNA, 25 bp, Homo sapien
cctttaagttgtcaatatatggttt

SEQ ID NO: 2673601 - DNA, 25 bp, Homo sapien
gttacctttaagttgtcaatatatg

SEQ ID NO: 2673602 - DNA, 25 bp, Homo sapien
gaatttttagcttgtattagcttga

SEQ ID NO: 2673603 - DNA, 25 bp, Homo sapien
gcttgagttagctggcattgatttt

SEQ ID NO: 2673604 - DNA, 25 bp, Homo sapien
gaaaatgcagatctcactatgacta

SEQ ID NO: 2673605 - DNA, 25 bp, Homo sapien
tatgactaccaaggacttcttgtag

SEQ ID NO: 2673606 - DNA, 25 bp, Homo sapien
aatgtagcacaatttttctaactta

SEQ ID NO: 2673607 - DNA, 25 bp, Homo sapien
gtaagtatccactgtctcttaactt

SEQ ID NO: 2673608 - DNA, 25 bp, Homo sapien
gctggtaacccagaaccacccacag

SEQ ID NO: 2673609 - DNA, 25 bp, Homo sapien
tgtggagatgctggtaacccagaac

SEQ ID NO: 2673610 - DNA, 25 bp, Homo sapien
ctggggctgcaatagatgtggagat

SEQ ID NO: 2673611 - DNA, 25 bp, Homo sapien
tggagatgctggtaacccagaacca

SEQ ID NO: 2673612 - DNA, 25 bp, Homo sapien
ccaagcaaggagagaatagcatttt

SEQ ID NO: 2673613 - DNA, 25 bp, Homo sapien
ggaacaatgagatctagcagggtca

SEQ ID NO: 2673614 - DNA, 25 bp, Homo sapien
gaatctgataggagctggaggaaca

SEQ ID NO: 2673615 - DNA, 25 bp, Homo sapien
tccctgggagttaaagagaatctga

SEQ ID NO: 2673616 - DNA, 25 bp, Homo sapien
tcttctactgaccacaagtgcttca

SEQ ID NO: 2673617 - DNA, 25 bp, Homo sapien
aagagcctttcaagactcgctctaa

SEQ ID NO: 2673618 - DNA, 25 bp, Homo sapien
gactcgctctaaaagaaggctgctt

SEQ ID NO: 2673619 - DNA, 25 bp, Homo sapien
ggctgctttggaaccgatcttctac

SEQ ID NO: 2673620 - DNA, 25 bp, Homo sapien
cctcctctgatcagcccaacaggcc

SEQ ID NO: 2673621 - DNA, 25 bp, Homo sapien
gagtccccaactcgtagcttctaac

SEQ ID NO: 2673622 - DNA, 25 bp, Homo sapien
taggagtccccaactcgtagcttct

SEQ ID NO: 2673623 - DNA, 25 bp, Homo sapien
cttaggagtccccaactcgtagctt

SEQ ID NO: 2673624 - DNA, 25 bp, Homo sapien
tccccaactcgtagcttctaacttg

SEQ ID NO: 2673625 - DNA, 25 bp, Homo sapien
ggcacacagtgcctactaaacgcag

SEQ ID NO: 2673626 - DNA, 25 bp, Homo sapien
caattgataaaggagactataaaac

SEQ ID NO: 2673627 - DNA, 25 bp, Homo sapien
cagtgcctactaaacgcaggttttt

SEQ ID NO: 2673628 - DNA, 25 bp, Homo sapien
aaaacctgagattacaaaaagatgg

SEQ ID NO: 2673629 - DNA, 25 bp, Homo sapien
tacccgtggtacaaatttgcatgaa

SEQ ID NO: 2673630 - DNA, 25 bp, Homo sapien
gggaattggccaaaccagtaatata

SEQ ID NO: 2673631 - DNA, 25 bp, Homo sapien
gtatgctctaccctccctctttatg

SEQ ID NO: 2673632 - DNA, 25 bp, Homo sapien
tgggactgtcagcagattgctttct

SEQ ID NO: 2673633 - DNA, 25 bp, Homo sapien
aaacataatggagcctctatgagga

SEQ ID NO: 2673634 - DNA, 25 bp, Homo sapien
gaaaacataatggagcctctatgag

SEQ ID NO: 2673635 - DNA, 25 bp, Homo sapien
aaaacataatggagcctctatgagg

SEQ ID NO: 2673636 - DNA, 25 bp, Homo sapien
caaatgccaccaatggtgctactcc

SEQ ID NO: 2673637 - DNA, 25 bp, Homo sapien
gctactcccagagctactgcttctg

SEQ ID NO: 2673638 - DNA, 25 bp, Homo sapien
tgccaccaatggtgctactcccaga

SEQ ID NO: 2673639 - DNA, 25 bp, Homo sapien
tcccagagctactgcttctgagagc

SEQ ID NO: 2673640 - DNA, 25 bp, Homo sapien
gagtcaaacgctggtcatcatggtg

SEQ ID NO: 2673641 - DNA, 25 bp, Homo sapien
gcaagatggtgtcacctttaccatg

SEQ ID NO: 2673642 - DNA, 25 bp, Homo sapien
ctttaccatgcaataggctgttttc

SEQ ID NO: 2673643 - DNA, 25 bp, Homo sapien
tgcaagagtcaaacgctggtcatca

SEQ ID NO: 2673644 - DNA, 25 bp, Homo sapien
cagtgaagttcggttgttacttgga

SEQ ID NO: 2673645 - DNA, 25 bp, Homo sapien
cccagtgaagttcggttgttacttg

SEQ ID NO: 2673646 - DNA, 25 bp, Homo sapien
tagcacccagtgaagttcggttgtt

SEQ ID NO: 2673647 - DNA, 25 bp, Homo sapien
cacccagtgaagttcggttgttact

SEQ ID NO: 2673648 - DNA, 25 bp, Homo sapien
gcagaatgaatcagcatccagcttg

SEQ ID NO: 2673649 - DNA, 25 bp, Homo sapien
cagtggaataaactactaggcagaa

SEQ ID NO: 2673650 - DNA, 25 bp, Homo sapien
gtctgcccggtcaagtatctttttc

SEQ ID NO: 2673651 - DNA, 25 bp, Homo sapien
atcacgctgatcctgtctgcccggt

SEQ ID NO: 2673652 - DNA, 25 bp, Homo sapien
tgactagcttgccaaccacaggagc

SEQ ID NO: 2673653 - DNA, 25 bp, Homo sapien
caggagccccaacctttgatggtaa

SEQ ID NO: 2673654 - DNA, 25 bp, Homo sapien
gatggtaagttttgcaacagcctcc

SEQ ID NO: 2673655 - DNA, 25 bp, Homo sapien
taagttttgcaacagcctccaactg

SEQ ID NO: 2673656 - DNA, 25 bp, Homo sapien
cattctctgaaggatatttcctttt

SEQ ID NO: 2673657 - DNA, 25 bp, Homo sapien
aactcacattctctgaaggatattt

SEQ ID NO: 2673658 - DNA, 25 bp, Homo sapien
cacattctctgaaggatatttcctt

SEQ ID NO: 2673659 - DNA, 25 bp, Homo sapien
agaactcacattctctgaaggatat

SEQ ID NO: 2673660 - DNA, 25 bp, Homo sapien
gcagcatttaacataatcgaatcca

SEQ ID NO: 2673661 - DNA, 25 bp, Homo sapien
tccaaggtgcagactaatcaactct

SEQ ID NO: 2673662 - DNA, 25 bp, Homo sapien
tattgagacaatgccacaacttctc

SEQ ID NO: 2673663 - DNA, 25 bp, Homo sapien
tagagaatgcaattcttttgtaact

SEQ ID NO: 2673664 - DNA, 25 bp, Homo sapien
cttcaaccatggcatgtctgtctat

SEQ ID NO: 2673665 - DNA, 25 bp, Homo sapien
tgtctatcttgaattcgtacttcca

SEQ ID NO: 2673666 - DNA, 25 bp, Homo sapien
atcttgaattcgtacttccaaactg

SEQ ID NO: 2673667 - DNA, 25 bp, Homo sapien
ggcatgtctgtctatcttgaattcg

SEQ ID NO: 2673668 - DNA, 25 bp, Homo sapien
aatcgtcttagaccaacagcctcag

SEQ ID NO: 2673669 - DNA, 25 bp, Homo sapien
ccaacagcctcaggggatactttcc

SEQ ID NO: 2673670 - DNA, 25 bp, Homo sapien
ttcagcaggcctacataatcgtctt

SEQ ID NO: 2673671 - DNA, 25 bp, Homo sapien
tacataatcgtcttagaccaacagc

SEQ ID NO: 2673672 - DNA, 25 bp, Homo sapien
agaatgtcgccctgtggatgcccat

SEQ ID NO: 2673673 - DNA, 25 bp, Homo sapien
gtgagaatgtcgccctgtggatgcc

SEQ ID NO: 2673674 - DNA, 25 bp, Homo sapien
taggtgagaatgtcgccctgtggat

SEQ ID NO: 2673675 - DNA, 25 bp, Homo sapien
tgtaggtgagaatgtcgccctgtgg

SEQ ID NO: 2673676 - DNA, 25 bp, Homo sapien
cagggggaaggcatgctggcatgat

SEQ ID NO: 2673677 - DNA, 25 bp, Homo sapien
gggaaggcatgctggcatgatgcca

SEQ ID NO: 2673678 - DNA, 25 bp, Homo sapien
aaggcatgctggcatgatgccactg

SEQ ID NO: 2673679 - DNA, 25 bp, Homo sapien
gcatgctggcatgatgccactgaag

SEQ ID NO: 2673680 - DNA, 25 bp, Homo sapien
tcctccatggtagttgagggccaca

SEQ ID NO: 2673681 - DNA, 25 bp, Homo sapien
gatccctgggccccattttcttctc

SEQ ID NO: 2673682 - DNA, 25 bp, Homo sapien
tctcctccatggtagttgagggcca

SEQ ID NO: 2673683 - DNA, 25 bp, Homo sapien
cttctcctccatggtagttgagggc

SEQ ID NO: 2673684 - DNA, 25 bp, Homo sapien
caaagctctgggttgctgggcaaca

SEQ ID NO: 2673685 - DNA, 25 bp, Homo sapien
ttcatcccctctatatggtcattgg

SEQ ID NO: 2673686 - DNA, 25 bp, Homo sapien
cagagaaccctccagagtggagaca

SEQ ID NO: 2673687 - DNA, 25 bp, Homo sapien
aagtcccactggcaagagtaaatga

SEQ ID NO: 2673688 - DNA, 25 bp, Homo sapien
aattttcagtgaagagttagtgttg

SEQ ID NO: 2673689 - DNA, 25 bp, Homo sapien
tgaattttcagtgaagagttagtgt

SEQ ID NO: 2673690 - DNA, 25 bp, Homo sapien
tttcagtgaagagttagtgttgttt

SEQ ID NO: 2673691 - DNA, 25 bp, Homo sapien
ttttcagtgaagagttagtgttgtt

SEQ ID NO: 2673692 - DNA, 25 bp, Homo sapien
gtctgatgttgaggtcgtcagtcat

SEQ ID NO: 2673693 - DNA, 25 bp, Homo sapien
cagtctgatgttgaggtcgtcagtc

SEQ ID NO: 2673694 - DNA, 25 bp, Homo sapien
catcagtctgatgttgaggtcgtca

SEQ ID NO: 2673695 - DNA, 25 bp, Homo sapien
atcagtctgatgttgaggtcgtcag

SEQ ID NO: 2673696 - DNA, 25 bp, Homo sapien
gacatcgatattgtcaagctgaaaa

SEQ ID NO: 2673697 - DNA, 25 bp, Homo sapien
tggttgagacatattgtatatcatg

SEQ ID NO: 2673698 - DNA, 25 bp, Homo sapien
catgtgtagtgtagtcctggtctca

SEQ ID NO: 2673699 - DNA, 25 bp, Homo sapien
taatgtatactgacagcttctgcat

SEQ ID NO: 2673700 - DNA, 25 bp, Homo sapien
agatttaggaccgtaatatttattg

SEQ ID NO: 2673701 - DNA, 25 bp, Homo sapien
cgtaatatttattgtccaggtcttt

SEQ ID NO: 2673702 - DNA, 25 bp, Homo sapien
tgagatttaggaccgtaatatttat

SEQ ID NO: 2673703 - DNA, 25 bp, Homo sapien
ctgagatttaggaccgtaatattta

SEQ ID NO: 2673704 - DNA, 25 bp, Homo sapien
gattaaccaacgaaggattactcca

SEQ ID NO: 2673705 - DNA, 25 bp, Homo sapien
ctagattaaccaacgaaggattact

SEQ ID NO: 2673706 - DNA, 25 bp, Homo sapien
tagattaaccaacgaaggattactc

SEQ ID NO: 2673707 - DNA, 25 bp, Homo sapien
gctgaatggctgctctttaatggag

SEQ ID NO: 2673708 - DNA, 25 bp, Homo sapien
ggctgctctttaatggagaagtgca

SEQ ID NO: 2673709 - DNA, 25 bp, Homo sapien
aagtgcaggacgatggtggcagaag

SEQ ID NO: 2673710 - DNA, 25 bp, Homo sapien
tggagaagtgcaggacgatggtggc

SEQ ID NO: 2673711 - DNA, 25 bp, Homo sapien
gggcagtcgtggcagccccataagc

SEQ ID NO: 2673712 - DNA, 25 bp, Homo sapien
tactctcttatacatacctgagggc

SEQ ID NO: 2673713 - DNA, 25 bp, Homo sapien
ccgtgggctgtactttactctctta

SEQ ID NO: 2673714 - DNA, 25 bp, Homo sapien
ctagaggacagctttgctcaaccct

SEQ ID NO: 2673715 - DNA, 25 bp, Homo sapien
aacaccttatacttaaagagccaag

SEQ ID NO: 2673716 - DNA, 25 bp, Homo sapien
ggactcttccaaatctttccatgta

SEQ ID NO: 2673717 - DNA, 25 bp, Homo sapien
ttccatgtataggaaattcttgaag

SEQ ID NO: 2673718 - DNA, 25 bp, Homo sapien
gcattcactatctcttctccaatga

SEQ ID NO: 2673719 - DNA, 25 bp, Homo sapien
gctagcacctactgatgcagatgtg

SEQ ID NO: 2673720 - DNA, 25 bp, Homo sapien
aatgagcgcgcagtgtaaaggtgta

SEQ ID NO: 2673721 - DNA, 25 bp, Homo sapien
tttgccaggatcgttaggtatgccc

SEQ ID NO: 2673722 - DNA, 25 bp, Homo sapien
cctgtggtagaacttaatctaggca

SEQ ID NO: 2673723 - DNA, 25 bp, Homo sapien
tttgcaggtggacaaatcctttttg

SEQ ID NO: 2673724 - DNA, 25 bp, Homo sapien
ccaactggtactcttgtgaaattca

SEQ ID NO: 2673725 - DNA, 25 bp, Homo sapien
taattgaatgacgtgaatttcctgg

SEQ ID NO: 2673726 - DNA, 25 bp, Homo sapien
caaaattgtgctatcatcagctaag

SEQ ID NO: 2673727 - DNA, 25 bp, Homo sapien
tctgttttgccaaggattttccggc

SEQ ID NO: 2673728 - DNA, 25 bp, Homo sapien
gccaaggattttccggccttgctgt

SEQ ID NO: 2673729 - DNA, 25 bp, Homo sapien
gaaaggtgttaaagtagccagctct

SEQ ID NO: 2673730 - DNA, 25 bp, Homo sapien
taggaatgagaaaggtgttaaagta

SEQ ID NO: 2673731 - DNA, 25 bp, Homo sapien
tgtagttaacgggaggccagattca

SEQ ID NO: 2673732 - DNA, 25 bp, Homo sapien
gacagtagcactgtagttaacggga

SEQ ID NO: 2673733 - DNA, 25 bp, Homo sapien
tgaatgctgcgctcactggagcaga

SEQ ID NO: 2673734 - DNA, 25 bp, Homo sapien
agttggagaaaaggtgccgctgctc

SEQ ID NO: 2673735 - DNA, 25 bp, Homo sapien
gcataagtccaatattaagcttagt

SEQ ID NO: 2673736 - DNA, 25 bp, Homo sapien
aaaagctgaataataccaatatgga

SEQ ID NO: 2673737 - DNA, 25 bp, Homo sapien
ctatgagcagcataagtccaatatt

SEQ ID NO: 2673738 - DNA, 25 bp, Homo sapien
caattgttaaagtcagattatgaga

SEQ ID NO: 2673739 - DNA, 25 bp, Homo sapien
agccagtcagtcattatttcaagaa

SEQ ID NO: 2673740 - DNA, 25 bp, Homo sapien
ttcactcagaatgaagcgttccagc

SEQ ID NO: 2673741 - DNA, 25 bp, Homo sapien
gcacatttgtgatttctcccacagg

SEQ ID NO: 2673742 - DNA, 25 bp, Homo sapien
caagaaatatattgtagtgcacatt

SEQ ID NO: 2673743 - DNA, 25 bp, Homo sapien
cctcatgacttctcaattttaagaa

SEQ ID NO: 2673744 - DNA, 25 bp, Homo sapien
aagaaagtgtgcttaagtttatcag

SEQ ID NO: 2673745 - DNA, 25 bp, Homo sapien
tctacctcatgacttctcaatttta

SEQ ID NO: 2673746 - DNA, 25 bp, Homo sapien
gaaagtgtgcttaagtttatcagga

SEQ ID NO: 2673747 - DNA, 25 bp, Homo sapien
ttcagacgtacagtcttaggtaatt

SEQ ID NO: 2673748 - DNA, 25 bp, Homo sapien
taatttcattgacaatcctggtttc

SEQ ID NO: 2673749 - DNA, 25 bp, Homo sapien
cagtcatctattactctcagccaga

SEQ ID NO: 2673750 - DNA, 25 bp, Homo sapien
tcagccagacatgtaatttcattga

SEQ ID NO: 2673751 - DNA, 25 bp, Homo sapien
tcaaccaagagatagagtcctcaca

SEQ ID NO: 2673752 - DNA, 25 bp, Homo sapien
cacatcctgtactggacttatgacc

SEQ ID NO: 2673753 - DNA, 25 bp, Homo sapien
tggaccctctttcggccgtataaga

SEQ ID NO: 2673754 - DNA, 25 bp, Homo sapien
taagaataggagttgagcttgcaac

SEQ ID NO: 2673755 - DNA, 25 bp, Homo sapien
atctggctttatggattttaaagac

SEQ ID NO: 2673756 - DNA, 25 bp, Homo sapien
tctggctttatggattttaaagaca

SEQ ID NO: 2673757 - DNA, 25 bp, Homo sapien
aatctggctttatggattttaaaga

SEQ ID NO: 2673758 - DNA, 25 bp, Homo sapien
tggaggtattgcactttcctccacc

SEQ ID NO: 2673759 - DNA, 25 bp, Homo sapien
tctctggaggtattgcactttcctc

SEQ ID NO: 2673760 - DNA, 25 bp, Homo sapien
ctcactgggttttgcacaactcatc

SEQ ID NO: 2673761 - DNA, 25 bp, Homo sapien
actgggttttgcacaactcatctct

SEQ ID NO: 2673762 - DNA, 25 bp, Homo sapien
aattagataaggctttgaggttgta

SEQ ID NO: 2673763 - DNA, 25 bp, Homo sapien
ttagtcatcccccagcagttttaga

SEQ ID NO: 2673764 - DNA, 25 bp, Homo sapien
tagaattagataaggctttgaggtt

SEQ ID NO: 2673765 - DNA, 25 bp, Homo sapien
agtcatcccccagcagttttagaat

SEQ ID NO: 2673766 - DNA, 25 bp, Homo sapien
ggagattatgaatgcagtccaccac

SEQ ID NO: 2673767 - DNA, 25 bp, Homo sapien
ggtatctccccggccagataagcag

SEQ ID NO: 2673768 - DNA, 25 bp, Homo sapien
gggagattatgaatgcagtccacca

SEQ ID NO: 2673769 - DNA, 25 bp, Homo sapien
atggcattgaatgcttcagatactt

SEQ ID NO: 2673770 - DNA, 25 bp, Homo sapien
tggcattgaatgcttcagatacttt

SEQ ID NO: 2673771 - DNA, 25 bp, Homo sapien
tttttctttgcctaacatatctgac

SEQ ID NO: 2673772 - DNA, 25 bp, Homo sapien
tctttgcctaacatatctgactttt

SEQ ID NO: 2673773 - DNA, 25 bp, Homo sapien
caaggagttccctagagtctggcag

SEQ ID NO: 2673774 - DNA, 25 bp, Homo sapien
ttatggcaaggagttccctagagtc

SEQ ID NO: 2673775 - DNA, 25 bp, Homo sapien
aggagttccctagagtctggcagtc

SEQ ID NO: 2673776 - DNA, 25 bp, Homo sapien
tggcaaggagttccctagagtctgg

SEQ ID NO: 2673777 - DNA, 25 bp, Homo sapien
tcagcatttagaagtagtagcactc

SEQ ID NO: 2673778 - DNA, 25 bp, Homo sapien
caggaaacagtatcaagaaagagca

SEQ ID NO: 2673779 - DNA, 25 bp, Homo sapien
tgatggacagagatataggaacaac

SEQ ID NO: 2673780 - DNA, 25 bp, Homo sapien
gacattacattcacaacagattaca

SEQ ID NO: 2673781 - DNA, 25 bp, Homo sapien
gaaagaagcattatatcctccgata

SEQ ID NO: 2673782 - DNA, 25 bp, Homo sapien
tctgtagagatatccccaagcttgg

SEQ ID NO: 2673783 - DNA, 25 bp, Homo sapien
taagggcattcctcatgtctgctaa

SEQ ID NO: 2673784 - DNA, 25 bp, Homo sapien
cacttcaagtgggacagaatatctt

SEQ ID NO: 2673785 - DNA, 25 bp, Homo sapien
ggttccagcttgtgatacttttaca

SEQ ID NO: 2673786 - DNA, 25 bp, Homo sapien
tacctcttttagtggtggttccagc

SEQ ID NO: 2673787 - DNA, 25 bp, Homo sapien
cagagcaggtcaaaattctcgtgct

SEQ ID NO: 2673788 - DNA, 25 bp, Homo sapien
gaattggcccaagtcagaaacagag

SEQ ID NO: 2673789 - DNA, 25 bp, Homo sapien
aaagctttctatgaacagctcttcc

SEQ ID NO: 2673790 - DNA, 25 bp, Homo sapien
taaaccagcactcagagaattcagt

SEQ ID NO: 2673791 - DNA, 25 bp, Homo sapien
tactgcagtgtgatcagaagagcac

SEQ ID NO: 2673792 - DNA, 25 bp, Homo sapien
tccagacatggcaaagaggcttaaa

SEQ ID NO: 2673793 - DNA, 25 bp, Homo sapien
gaatagccaggcagttctagggccc

SEQ ID NO: 2673794 - DNA, 25 bp, Homo sapien
aacatcaggaaagattatatctctc

SEQ ID NO: 2673795 - DNA, 25 bp, Homo sapien
ggaaagattatatctctctgagcat

SEQ ID NO: 2673796 - DNA, 25 bp, Homo sapien
ctctgagcattctgagcattgggca

SEQ ID NO: 2673797 - DNA, 25 bp, Homo sapien
tctctgagcattctgagcattgggc

SEQ ID NO: 2673798 - DNA, 25 bp, Homo sapien
gaatatcagatgatgggtctcactg

SEQ ID NO: 2673799 - DNA, 25 bp, Homo sapien
cagtctactactgtgtgtcccagaa

SEQ ID NO: 2673800 - DNA, 25 bp, Homo sapien
gagtttgacaacagtccatcattgt

SEQ ID NO: 2673801 - DNA, 25 bp, Homo sapien
ccatcattgtcaaaatcgtgagaat

SEQ ID NO: 2673802 - DNA, 25 bp, Homo sapien
tgaccagttcaagcaggatgatttc

SEQ ID NO: 2673803 - DNA, 25 bp, Homo sapien
gatctgttagttccctccgtggctg

SEQ ID NO: 2673804 - DNA, 25 bp, Homo sapien
ccgtgccagaatgtgcagggcagtc

SEQ ID NO: 2673805 - DNA, 25 bp, Homo sapien
gatgatttctgcaatgccgtgccag

SEQ ID NO: 2673806 - DNA, 25 bp, Homo sapien
ccattaatttggtacatggtcccaa

SEQ ID NO: 2673807 - DNA, 25 bp, Homo sapien
taatttggtacatggtcccaaacaa

SEQ ID NO: 2673808 - DNA, 25 bp, Homo sapien
ttggtacatggtcccaaacaactaa

SEQ ID NO: 2673809 - DNA, 25 bp, Homo sapien
atgttcccattaatttggtacatgg

SEQ ID NO: 2673810 - DNA, 25 bp, Homo sapien
cttccagttatttctacgttgtctt

SEQ ID NO: 2673811 - DNA, 25 bp, Homo sapien
tgccttttacccatgggtccttcta

SEQ ID NO: 2673812 - DNA, 25 bp, Homo sapien
tcagtgaaagcacttccttgccttt

SEQ ID NO: 2673813 - DNA, 25 bp, Homo sapien
tgcaggcagccaacttttacagatg

SEQ ID NO: 2673814 - DNA, 25 bp, Homo sapien
taactccatgaccttccgcaggtag

SEQ ID NO: 2673815 - DNA, 25 bp, Homo sapien
tttgccgtggaagaaacctgtgtgc

SEQ ID NO: 2673816 - DNA, 25 bp, Homo sapien
cagaagcccgcaggtagcagaaaat

SEQ ID NO: 2673817 - DNA, 25 bp, Homo sapien
ggtatttctccagttgctacccctc

SEQ ID NO: 2673818 - DNA, 25 bp, Homo sapien
ttatcgtgaaatcaattgcacagcc

SEQ ID NO: 2673819 - DNA, 25 bp, Homo sapien
taatggctgtggacaattctgtagg

SEQ ID NO: 2673820 - DNA, 25 bp, Homo sapien
cacagcctgatgcacagaataatgg

SEQ ID NO: 2673821 - DNA, 25 bp, Homo sapien
attctgtaggagttggcccatctgg

SEQ ID NO: 2673822 - DNA, 25 bp, Homo sapien
taatctgatgggctgtctgggctct

SEQ ID NO: 2673823 - DNA, 25 bp, Homo sapien
tgatgggctgtctgggctctcttgt

SEQ ID NO: 2673824 - DNA, 25 bp, Homo sapien
ctattacgtggttaatctgatgggc

SEQ ID NO: 2673825 - DNA, 25 bp, Homo sapien
cttctgggtctattacgtggttaat

SEQ ID NO: 2673826 - DNA, 25 bp, Homo sapien
tgtggcatggcctacaaacatcttt

SEQ ID NO: 2673827 - DNA, 25 bp, Homo sapien
tagtagctgacaaaaggactgaccc

SEQ ID NO: 2673828 - DNA, 25 bp, Homo sapien
tcatgagataacaagatgcgataat

SEQ ID NO: 2673829 - DNA, 25 bp, Homo sapien
tacacatgtaagcaaatgtacacag

SEQ ID NO: 2673830 - DNA, 25 bp, Homo sapien
gcatccatttcaacatatttaggaa

SEQ ID NO: 2673831 - DNA, 25 bp, Homo sapien
cagaagaagttaggactggatgctc

SEQ ID NO: 2673832 - DNA, 25 bp, Homo sapien
gctctctaagggaatctgcatccat

SEQ ID NO: 2673833 - DNA, 25 bp, Homo sapien
taggaaaatcgcttgctgtgtagcc

SEQ ID NO: 2673834 - DNA, 25 bp, Homo sapien
ctccttttgtatcgttgtggtagat

SEQ ID NO: 2673835 - DNA, 25 bp, Homo sapien
ccttttgtatcgttgtggtagattt

SEQ ID NO: 2673836 - DNA, 25 bp, Homo sapien
tcgttgtggtagattttttactgac

SEQ ID NO: 2673837 - DNA, 25 bp, Homo sapien
tgtatcgttgtggtagattttttac

SEQ ID NO: 2673838 - DNA, 25 bp, Homo sapien
ccactcctccggttctacgcaacca

SEQ ID NO: 2673839 - DNA, 25 bp, Homo sapien
ctctgaggcacttggaagttgcagg

SEQ ID NO: 2673840 - DNA, 25 bp, Homo sapien
ctcctccggttctacgcaaccacat

SEQ ID NO: 2673841 - DNA, 25 bp, Homo sapien
cacttggaagttgcaggttggttag

SEQ ID NO: 2673842 - DNA, 25 bp, Homo sapien
tgaaggattggtgaaaaacaattaa

SEQ ID NO: 2673843 - DNA, 25 bp, Homo sapien
ctgtctcctcaaattcataaaagaa

SEQ ID NO: 2673844 - DNA, 25 bp, Homo sapien
ttgaaggattggtgaaaaacaatta

SEQ ID NO: 2673845 - DNA, 25 bp, Homo sapien
gctgtctcctcaaattcataaaaga

SEQ ID NO: 2673846 - DNA, 25 bp, Homo sapien
gcaattatttagaagccaatagcaa

SEQ ID NO: 2673847 - DNA, 25 bp, Homo sapien
tggccttttagctgataaagaactg

SEQ ID NO: 2673848 - DNA, 25 bp, Homo sapien
gtgtgtgatttctgtaaatgcaaac

SEQ ID NO: 2673849 - DNA, 25 bp, Homo sapien
tccttaagcttctcatttctggcct

SEQ ID NO: 2673850 - DNA, 25 bp, Homo sapien
ttaaagtccacgttgactgaattgt

SEQ ID NO: 2673851 - DNA, 25 bp, Homo sapien
aagtccacgttgactgaattgtgga

SEQ ID NO: 2673852 - DNA, 25 bp, Homo sapien
aaagtccacgttgactgaattgtgg

SEQ ID NO: 2673853 - DNA, 25 bp, Homo sapien
taaagtccacgttgactgaattgtg

SEQ ID NO: 2673854 - DNA, 25 bp, Homo sapien
actacactgtgtcacccccaagcaa

SEQ ID NO: 2673855 - DNA, 25 bp, Homo sapien
ctacactgtgtcacccccaagcaaa

SEQ ID NO: 2673856 - DNA, 25 bp, Homo sapien
gactacactgtgtcacccccaagca

SEQ ID NO: 2673857 - DNA, 25 bp, Homo sapien
tctgtagacagcaacttgaacaaag

SEQ ID NO: 2673858 - DNA, 25 bp, Homo sapien
ctgagttgagcttaagaaatctgta

SEQ ID NO: 2673859 - DNA, 25 bp, Homo sapien
aagaaatctgtagacagcaacttga

SEQ ID NO: 2673860 - DNA, 25 bp, Homo sapien
acagcaacttgaacaaaggtgtcat

SEQ ID NO: 2673861 - DNA, 25 bp, Homo sapien
cattctcaagagcttatgaacataa

SEQ ID NO: 2673862 - DNA, 25 bp, Homo sapien
acacaatggttgcttcctggagaaa

SEQ ID NO: 2673863 - DNA, 25 bp, Homo sapien
tgtataagcctcttaggaaagatat

SEQ ID NO: 2673864 - DNA, 25 bp, Homo sapien
ggaataatgcacatcatacatcact

SEQ ID NO: 2673865 - DNA, 25 bp, Homo sapien
gtgccttcttgtgccgagggcggga

SEQ ID NO: 2673866 - DNA, 25 bp, Homo sapien
catgtgccttcttgtgccgagggcg

SEQ ID NO: 2673867 - DNA, 25 bp, Homo sapien
ttcttgtgccgagggcgggagctct

SEQ ID NO: 2673868 - DNA, 25 bp, Homo sapien
ccttcttgtgccgagggcgggagct

SEQ ID NO: 2673869 - DNA, 25 bp, Homo sapien
cttcacaacgaccttgaatttcctc

SEQ ID NO: 2673870 - DNA, 25 bp, Homo sapien
cttgtaacatcaacccagatttgaa

SEQ ID NO: 2673871 - DNA, 25 bp, Homo sapien
cacaacgaccttgaatttcctccat

SEQ ID NO: 2673872 - DNA, 25 bp, Homo sapien
cttttacttgtaacatcaacccaga

SEQ ID NO: 2673873 - DNA, 25 bp, Homo sapien
ttcaggtattaagtccacttgatca

SEQ ID NO: 2673874 - DNA, 25 bp, Homo sapien
tgtaaatgtgctcatagtagtcttg

SEQ ID NO: 2673875 - DNA, 25 bp, Homo sapien
cactgcgtgctattggtttgttcaa

SEQ ID NO: 2673876 - DNA, 25 bp, Homo sapien
agggaagattctctgtttctctagc

SEQ ID NO: 2673877 - DNA, 25 bp, Homo sapien
tattcctgaaacaagagtactcatg

SEQ ID NO: 2673878 - DNA, 25 bp, Homo sapien
taatgccactctgtagaatccgacc

SEQ ID NO: 2673879 - DNA, 25 bp, Homo sapien
tgaaacaagagtactcatgctgaac

SEQ ID NO: 2673880 - DNA, 25 bp, Homo sapien
cagtgagatagacctctgattccta

SEQ ID NO: 2673881 - DNA, 25 bp, Homo sapien
gagtcattcgaagttgctttgcagt

SEQ ID NO: 2673882 - DNA, 25 bp, Homo sapien
taggagtcattcgaagttgctttgc

SEQ ID NO: 2673883 - DNA, 25 bp, Homo sapien
ttaggagtcattcgaagttgctttg

SEQ ID NO: 2673884 - DNA, 25 bp, Homo sapien
ggagtcattcgaagttgctttgcag

SEQ ID NO: 2673885 - DNA, 25 bp, Homo sapien
tgtggtagcaactgaagttctggaa

SEQ ID NO: 2673886 - DNA, 25 bp, Homo sapien
ttttgttgtggtagcaactgaagtt

SEQ ID NO: 2673887 - DNA, 25 bp, Homo sapien
tgttgtggtagcaactgaagttctg

SEQ ID NO: 2673888 - DNA, 25 bp, Homo sapien
ttgtggtagcaactgaagttctgga

SEQ ID NO: 2673889 - DNA, 25 bp, Homo sapien
cccgaacggccatgaaatgatagcc

SEQ ID NO: 2673890 - DNA, 25 bp, Homo sapien
ccaatccccgaacggccatgaaatg

SEQ ID NO: 2673891 - DNA, 25 bp, Homo sapien
tccccaatccccgaacggccatgaa

SEQ ID NO: 2673892 - DNA, 25 bp, Homo sapien
aggaaggggactgacacatccagaa

SEQ ID NO: 2673893 - DNA, 25 bp, Homo sapien
tgttgatttccaacccatttctttg

SEQ ID NO: 2673894 - DNA, 25 bp, Homo sapien
gatctgtatctgtaagcttttctaa

SEQ ID NO: 2673895 - DNA, 25 bp, Homo sapien
ttttctccatagatccaaaataagc

SEQ ID NO: 2673896 - DNA, 25 bp, Homo sapien
aaataagccttttcattgacttgct

SEQ ID NO: 2673897 - DNA, 25 bp, Homo sapien
tcattgctcctttggcctgaccctg

SEQ ID NO: 2673898 - DNA, 25 bp, Homo sapien
tgtatccatgttgttctgggtttca

SEQ ID NO: 2673899 - DNA, 25 bp, Homo sapien
ctgggtttcattgctcctttggcct

SEQ ID NO: 2673900 - DNA, 25 bp, Homo sapien
gtactgtatccatgttgttctgggt

SEQ ID NO: 2673901 - DNA, 25 bp, Homo sapien
ctccacttgccttgtaaccctgatg

SEQ ID NO: 2673902 - DNA, 25 bp, Homo sapien
cacttgccttgtaaccctgatggag

SEQ ID NO: 2673903 - DNA, 25 bp, Homo sapien
gacttttcaactctatggccttaaa

SEQ ID NO: 2673904 - DNA, 25 bp, Homo sapien
aaaattgatggcctcaattctccac

SEQ ID NO: 2673905 - DNA, 25 bp, Homo sapien
tccgaatttagctttggggagcaca

SEQ ID NO: 2673906 - DNA, 25 bp, Homo sapien
ttccgaatttagctttggggagcac

SEQ ID NO: 2673907 - DNA, 25 bp, Homo sapien
ttgttacttcctgagtagagccacg

SEQ ID NO: 2673908 - DNA, 25 bp, Homo sapien
tgttacttcctgagtagagccacga

SEQ ID NO: 2673909 - DNA, 25 bp, Homo sapien
tccttccaatgtcaccgttagctga

SEQ ID NO: 2673910 - DNA, 25 bp, Homo sapien
tccaatgtcaccgttagctgaccag

SEQ ID NO: 2673911 - DNA, 25 bp, Homo sapien
ttaccatccttccaatgtcaccgtt

SEQ ID NO: 2673912 - DNA, 25 bp, Homo sapien
aatgtcaccgttagctgaccagggc

SEQ ID NO: 2673913 - DNA, 25 bp, Homo sapien
gtgacttgtgcagtcaatatctgga

SEQ ID NO: 2673914 - DNA, 25 bp, Homo sapien
taaaagtgacttgtgcagtcaatat

SEQ ID NO: 2673915 - DNA, 25 bp, Homo sapien
ttaaaagtgacttgtgcagtcaata

SEQ ID NO: 2673916 - DNA, 25 bp, Homo sapien
aagtgacttgtgcagtcaatatctg

SEQ ID NO: 2673917 - DNA, 25 bp, Homo sapien
tttctctgtgacacatccatccact

SEQ ID NO: 2673918 - DNA, 25 bp, Homo sapien
caggtattccagatactcatgtcat

SEQ ID NO: 2673919 - DNA, 25 bp, Homo sapien
cagatactcatgtcatacaccaagg

SEQ ID NO: 2673920 - DNA, 25 bp, Homo sapien
tcatgtcatacaccaaggttgtacc

SEQ ID NO: 2673921 - DNA, 25 bp, Homo sapien
ctttgtagggttttgcatctactag

SEQ ID NO: 2673922 - DNA, 25 bp, Homo sapien
tctttgtagggttttgcatctacta

SEQ ID NO: 2673923 - DNA, 25 bp, Homo sapien
tatctttgtagggttttgcatctac

SEQ ID NO: 2673924 - DNA, 25 bp, Homo sapien
atctttgtagggttttgcatctact

SEQ ID NO: 2673925 - DNA, 25 bp, Homo sapien
catctcaggattttgcagtccagca

SEQ ID NO: 2673926 - DNA, 25 bp, Homo sapien
tagatcccagatcgttctcaccagt

SEQ ID NO: 2673927 - DNA, 25 bp, Homo sapien
caaactcgtgtgaatctggtgagac

SEQ ID NO: 2673928 - DNA, 25 bp, Homo sapien
tcatgaagggcaaacccaagggtga

SEQ ID NO: 2673929 - DNA, 25 bp, Homo sapien
ccgcatgctcagcaatgtctttcat

SEQ ID NO: 2673930 - DNA, 25 bp, Homo sapien
atccttctccgcatgctcagcaatg

SEQ ID NO: 2673931 - DNA, 25 bp, Homo sapien
tttaacatccttctccgcatgctca

SEQ ID NO: 2673932 - DNA, 25 bp, Homo sapien
tctccgcatgctcagcaatgtcttt

SEQ ID NO: 2673933 - DNA, 25 bp, Homo sapien
ttgggctctgaagcaataaagggca

SEQ ID NO: 2673934 - DNA, 25 bp, Homo sapien
tgagatttcgccgatcacgaagcat

SEQ ID NO: 2673935 - DNA, 25 bp, Homo sapien
taatctcgtccttgtaatagtgcaa

SEQ ID NO: 2673936 - DNA, 25 bp, Homo sapien
taaagggcaagcctatgagatttcg

SEQ ID NO: 2673937 - DNA, 25 bp, Homo sapien
ttttttaggaatttcagcttgaaca

SEQ ID NO: 2673938 - DNA, 25 bp, Homo sapien
gggagaaactggctatatgcaaagt

SEQ ID NO: 2673939 - DNA, 25 bp, Homo sapien
gagggagaaactggctatatgcaaa

SEQ ID NO: 2673940 - DNA, 25 bp, Homo sapien
cacaagcagatgctcttgagggaga

SEQ ID NO: 2673941 - DNA, 25 bp, Homo sapien
ccacaagcagatgctcttgagggag

SEQ ID NO: 2673942 - DNA, 25 bp, Homo sapien
cctctgtgactcgttctttgaagat

SEQ ID NO: 2673943 - DNA, 25 bp, Homo sapien
ctgtgactcgttctttgaagatctc

SEQ ID NO: 2673944 - DNA, 25 bp, Homo sapien
tttcctctgtgactcgttctttgaa

SEQ ID NO: 2673945 - DNA, 25 bp, Homo sapien
tcctctgtgactcgttctttgaaga

SEQ ID NO: 2673946 - DNA, 25 bp, Homo sapien
gccatgtgatgagtgtatcctccaa

SEQ ID NO: 2673947 - DNA, 25 bp, Homo sapien
tgatgagtgtatcctccaaatgctt

SEQ ID NO: 2673948 - DNA, 25 bp, Homo sapien
tatgaatcttgtaagtattgccatg

SEQ ID NO: 2673949 - DNA, 25 bp, Homo sapien
gaatcttgtaagtattgccatgtga

SEQ ID NO: 2673950 - DNA, 25 bp, Homo sapien
gaacattgctcttaacccaacactc

SEQ ID NO: 2673951 - DNA, 25 bp, Homo sapien
tcttaacccaacactcaagccgtta

SEQ ID NO: 2673952 - DNA, 25 bp, Homo sapien
cattgctcttaacccaacactcaag

SEQ ID NO: 2673953 - DNA, 25 bp, Homo sapien
cttaacccaacactcaagccgttat

SEQ ID NO: 2673954 - DNA, 25 bp, Homo sapien
ctttcaatgaatcagcataaatagg

SEQ ID NO: 2673955 - DNA, 25 bp, Homo sapien
tgttctttctcactagaagcagttt

SEQ ID NO: 2673956 - DNA, 25 bp, Homo sapien
ttctccaggagctatttcaatattg

SEQ ID NO: 2673957 - DNA, 25 bp, Homo sapien
gatataataaaatccgacatctttc

SEQ ID NO: 2673958 - DNA, 25 bp, Homo sapien
cctcttctactgaagtgagcaatac

SEQ ID NO: 2673959 - DNA, 25 bp, Homo sapien
tctactgaagtgagcaatacaagtt

SEQ ID NO: 2673960 - DNA, 25 bp, Homo sapien
tcatcataggtaccctcttctactg

SEQ ID NO: 2673961 - DNA, 25 bp, Homo sapien
accatttcatcataggtaccctctt

SEQ ID NO: 2673962 - DNA, 25 bp, Homo sapien
gcaaagactactcccattggagaag

SEQ ID NO: 2673963 - DNA, 25 bp, Homo sapien
gagcaaagactactcccattggaga

SEQ ID NO: 2673964 - DNA, 25 bp, Homo sapien
aagactactcccattggagaagtca

SEQ ID NO: 2673965 - DNA, 25 bp, Homo sapien
tctgagcaaagactactcccattgg

SEQ ID NO: 2673966 - DNA, 25 bp, Homo sapien
tcctaaagcagaacggatggcagtg

SEQ ID NO: 2673967 - DNA, 25 bp, Homo sapien
cgtgatgtccaacccctgacttggt

SEQ ID NO: 2673968 - DNA, 25 bp, Homo sapien
taaagaccatatggagatttgctcc

SEQ ID NO: 2673969 - DNA, 25 bp, Homo sapien
ctcccattgtataaggagcccaggg

SEQ ID NO: 2673970 - DNA, 25 bp, Homo sapien
cgtaggagagaagattgcaatatat

SEQ ID NO: 2673971 - DNA, 25 bp, Homo sapien
gagcacaaagcgtaggagagaagat

SEQ ID NO: 2673972 - DNA, 25 bp, Homo sapien
taggctttcgcctcagggagcacaa

SEQ ID NO: 2673973 - DNA, 25 bp, Homo sapien
tcaaatgcggtccataggctttcgc

SEQ ID NO: 2673974 - DNA, 25 bp, Homo sapien
catagatgaggcacactttgccagg

SEQ ID NO: 2673975 - DNA, 25 bp, Homo sapien
tcatagatgaggcacactttgccag

SEQ ID NO: 2673976 - DNA, 25 bp, Homo sapien
atatgggtagaagccttgggtccac

SEQ ID NO: 2673977 - DNA, 25 bp, Homo sapien
ctccacaaagtcaggtatatgggta

SEQ ID NO: 2673978 - DNA, 25 bp, Homo sapien
cttggctaggtgagtggttcagtgg

SEQ ID NO: 2673979 - DNA, 25 bp, Homo sapien
taagtatagtaaccatccccttggc

SEQ ID NO: 2673980 - DNA, 25 bp, Homo sapien
taaacagctgtaatctcaatcaagc

SEQ ID NO: 2673981 - DNA, 25 bp, Homo sapien
agctgtaatctcaatcaagctggat

SEQ ID NO: 2673982 - DNA, 25 bp, Homo sapien
atgtttggaggggtgatactgccag

SEQ ID NO: 2673983 - DNA, 25 bp, Homo sapien
accataaacagctgtaatctcaatc

SEQ ID NO: 2673984 - DNA, 25 bp, Homo sapien
aatatagcagatctttaaccttctc

SEQ ID NO: 2673985 - DNA, 25 bp, Homo sapien
tatagcagatctttaaccttctctt

SEQ ID NO: 2673986 - DNA, 25 bp, Homo sapien
ttaatatagcagatctttaaccttc

SEQ ID NO: 2673987 - DNA, 25 bp, Homo sapien
taatatagcagatctttaaccttct

SEQ ID NO: 2673988 - DNA, 25 bp, Homo sapien
aatttagaacccatgattgggtagc

SEQ ID NO: 2673989 - DNA, 25 bp, Homo sapien
agaactatattttgccctccacccg

SEQ ID NO: 2673990 - DNA, 25 bp, Homo sapien
catagtgagttgacccctgtgctcc

SEQ ID NO: 2673991 - DNA, 25 bp, Homo sapien
ccaggatgttggatcagaaagagga

SEQ ID NO: 2673992 - DNA, 25 bp, Homo sapien
cttatctctgttatctgaggccatc

SEQ ID NO: 2673993 - DNA, 25 bp, Homo sapien
ctctgttatctgaggccatcaagcc

SEQ ID NO: 2673994 - DNA, 25 bp, Homo sapien
aagcctagaattctgacttctgatt

SEQ ID NO: 2673995 - DNA, 25 bp, Homo sapien
tctgaggccatcaagcctagaattc

SEQ ID NO: 2673996 - DNA, 25 bp, Homo sapien
attacatatctgtgcataagataac

SEQ ID NO: 2673997 - DNA, 25 bp, Homo sapien
ttaattacatatctgtgcataagat

SEQ ID NO: 2673998 - DNA, 25 bp, Homo sapien
tacatatctgtgcataagataactc

SEQ ID NO: 2673999 - DNA, 25 bp, Homo sapien
taattacatatctgtgcataagata

SEQ ID NO: 2674000 - DNA, 25 bp, Homo sapien
ctttggaattgtcaacactaaaagt

SEQ ID NO: 2674001 - DNA, 25 bp, Homo sapien
gcttcagaatcactcctgacctgct

SEQ ID NO: 2674002 - DNA, 25 bp, Homo sapien
tggaattgtcaacactaaaagtaag

SEQ ID NO: 2674003 - DNA, 25 bp, Homo sapien
ttcagaatcactcctgacctgctgt

SEQ ID NO: 2674004 - DNA, 25 bp, Homo sapien
tgttcactgtcagtcttgttaccca

SEQ ID NO: 2674005 - DNA, 25 bp, Homo sapien
cacatcagcgaaatataagaattct

SEQ ID NO: 2674006 - DNA, 25 bp, Homo sapien
ttaaggatagtcgctgccgtccctg

SEQ ID NO: 2674007 - DNA, 25 bp, Homo sapien
gggttctttcacatcagcgaaatat

SEQ ID NO: 2674008 - DNA, 25 bp, Homo sapien
cccttttcaaatgctactgccacat

SEQ ID NO: 2674009 - DNA, 25 bp, Homo sapien
agaccatcactctctgagtcaagtg

SEQ ID NO: 2674010 - DNA, 25 bp, Homo sapien
tatccctggtagtaagaactcttgg

SEQ ID NO: 2674011 - DNA, 25 bp, Homo sapien
ccaatggtttcgatgaagtcagacc

SEQ ID NO: 2674012 - DNA, 25 bp, Homo sapien
gattatcataagcttaaccaagtgc

SEQ ID NO: 2674013 - DNA, 25 bp, Homo sapien
ttggagaacaacagtggattatcat

SEQ ID NO: 2674014 - DNA, 25 bp, Homo sapien
gaagacaaatggatcttggagaaca

SEQ ID NO: 2674015 - DNA, 25 bp, Homo sapien
atccccattcaactctcacatttgg

SEQ ID NO: 2674016 - DNA, 25 bp, Homo sapien
tgtcatccttattgtttcatcttga

SEQ ID NO: 2674017 - DNA, 25 bp, Homo sapien
ctggaagatgtaagagcttgttgtt

SEQ ID NO: 2674018 - DNA, 25 bp, Homo sapien
tataacatgtgttatatcccagttt

SEQ ID NO: 2674019 - DNA, 25 bp, Homo sapien
gatataacatgtgttatatcccagt

SEQ ID NO: 2674020 - DNA, 25 bp, Homo sapien
catgtgttatatcccagtttatcat

SEQ ID NO: 2674021 - DNA, 25 bp, Homo sapien
tattctgggatataacatctgtgga

SEQ ID NO: 2674022 - DNA, 25 bp, Homo sapien
gaattgtcattgttcccatatgtca

SEQ ID NO: 2674023 - DNA, 25 bp, Homo sapien
ccatatgtcacaattactagagata

SEQ ID NO: 2674024 - DNA, 25 bp, Homo sapien
tttcatcagggcttcaatcgtactc

SEQ ID NO: 2674025 - DNA, 25 bp, Homo sapien
cactttgctctttgggcctgaacat

SEQ ID NO: 2674026 - DNA, 25 bp, Homo sapien
gctctttgggcctgaacatctaaac

SEQ ID NO: 2674027 - DNA, 25 bp, Homo sapien
tttgctctttgggcctgaacatcta

SEQ ID NO: 2674028 - DNA, 25 bp, Homo sapien
tcactttgctctttgggcctgaaca

SEQ ID NO: 2674029 - DNA, 25 bp, Homo sapien
tttcaacactatcccaaaattctga

SEQ ID NO: 2674030 - DNA, 25 bp, Homo sapien
caagtcgaaactttgcactcctttc

SEQ ID NO: 2674031 - DNA, 25 bp, Homo sapien
ggacaatggttccaagaagtttcca

SEQ ID NO: 2674032 - DNA, 25 bp, Homo sapien
gtttcttatcaagtcgaaactttgc

SEQ ID NO: 2674033 - DNA, 25 bp, Homo sapien
aagtgtctaagccacagggggtaat

SEQ ID NO: 2674034 - DNA, 25 bp, Homo sapien
gtctaagccacagggggtaatgacc

SEQ ID NO: 2674035 - DNA, 25 bp, Homo sapien
gggggtaatgaccaggtgtgctggc

SEQ ID NO: 2674036 - DNA, 25 bp, Homo sapien
tttggaaagtgtctaagccacaggg

SEQ ID NO: 2674037 - DNA, 25 bp, Homo sapien
ttaaagtgtctcaaatgtgaagcag

SEQ ID NO: 2674038 - DNA, 25 bp, Homo sapien
aaatgtgaagcagaagttctttcag

SEQ ID NO: 2674039 - DNA, 25 bp, Homo sapien
tcatggtcctcccaatttaaagtgt

SEQ ID NO: 2674040 - DNA, 25 bp, Homo sapien
gaagttctttcagccagcttaattg

SEQ ID NO: 2674041 - DNA, 25 bp, Homo sapien
gcacgtccttcattctgagcatata

SEQ ID NO: 2674042 - DNA, 25 bp, Homo sapien
tgacaaagtaatcggtggttccctg

SEQ ID NO: 2674043 - DNA, 25 bp, Homo sapien
gactaccaggctgcgttaggagcta

SEQ ID NO: 2674044 - DNA, 25 bp, Homo sapien
ggtagaatccacaaccggaagtgag

SEQ ID NO: 2674045 - DNA, 25 bp, Homo sapien
ctgtctctctagaactttctctttg

SEQ ID NO: 2674046 - DNA, 25 bp, Homo sapien
ttctgtctctctagaactttctctt

SEQ ID NO: 2674047 - DNA, 25 bp, Homo sapien
ttttaccaacttatatttctgtctc

SEQ ID NO: 2674048 - DNA, 25 bp, Homo sapien
ctccttcctgagaagtgaggatttt

SEQ ID NO: 2674049 - DNA, 25 bp, Homo sapien
tgcaggtggttcattattgttggaa

SEQ ID NO: 2674050 - DNA, 25 bp, Homo sapien
gcaggtggttcattattgttggaac

SEQ ID NO: 2674051 - DNA, 25 bp, Homo sapien
tcaggtgacatacacataaggaact

SEQ ID NO: 2674052 - DNA, 25 bp, Homo sapien
ggtgacatacacataaggaactgca

SEQ ID NO: 2674053 - DNA, 25 bp, Homo sapien
tcccagatgagttgtgtagcaggtg

SEQ ID NO: 2674054 - DNA, 25 bp, Homo sapien
caggtggcctgccttgcatgtgcca

SEQ ID NO: 2674055 - DNA, 25 bp, Homo sapien
gtaaagacaattctaattcatccaa

SEQ ID NO: 2674056 - DNA, 25 bp, Homo sapien
gcctctctgtatatgccaaatccca

SEQ ID NO: 2674057 - DNA, 25 bp, Homo sapien
agaaagtgaacgctaaggcagaggt

SEQ ID NO: 2674058 - DNA, 25 bp, Homo sapien
agagagacattctgtaaaaactggt

SEQ ID NO: 2674059 - DNA, 25 bp, Homo sapien
aacgctaaggcagaggtaagttgcc

SEQ ID NO: 2674060 - DNA, 25 bp, Homo sapien
taagttgcctaagcattcagaagtg

SEQ ID NO: 2674061 - DNA, 25 bp, Homo sapien
tctgtaccagatgtcagccatcttg

SEQ ID NO: 2674062 - DNA, 25 bp, Homo sapien
taaacagctcagtatcgcattgagg

SEQ ID NO: 2674063 - DNA, 25 bp, Homo sapien
tactgatggcacgaaatgtaattgc

SEQ ID NO: 2674064 - DNA, 25 bp, Homo sapien
cacagtctgacgttaacctaagatc

SEQ ID NO: 2674065 - DNA, 25 bp, Homo sapien
ttttcctacacgctacttccctggc

SEQ ID NO: 2674066 - DNA, 25 bp, Homo sapien
ggtaatacacttcctcatacttgtt

SEQ ID NO: 2674067 - DNA, 25 bp, Homo sapien
agccatcttggtaatacacttcctc

SEQ ID NO: 2674068 - DNA, 25 bp, Homo sapien
tacacgctacttccctggcaatgca

SEQ ID NO: 2674069 - DNA, 25 bp, Homo sapien
accttcatcataggctctgttcttg

SEQ ID NO: 2674070 - DNA, 25 bp, Homo sapien
ccttcatcataggctctgttcttgc

SEQ ID NO: 2674071 - DNA, 25 bp, Homo sapien
cttcatcataggctctgttcttgcc

SEQ ID NO: 2674072 - DNA, 25 bp, Homo sapien
tgccaccttcatcataggctctgtt

SEQ ID NO: 2674073 - DNA, 25 bp, Homo sapien
ctggaaatttggtcacataagaagg

SEQ ID NO: 2674074 - DNA, 25 bp, Homo sapien
gtagtaaccccacataactctatgc

SEQ ID NO: 2674075 - DNA, 25 bp, Homo sapien
cataactctatgctcagtaccttca

SEQ ID NO: 2674076 - DNA, 25 bp, Homo sapien
catgagaagtagtaaccccacataa

SEQ ID NO: 2674077 - DNA, 25 bp, Homo sapien
cttagttatatctttccttctgcta

SEQ ID NO: 2674078 - DNA, 25 bp, Homo sapien
tcttagttatatctttccttctgct

SEQ ID NO: 2674079 - DNA, 25 bp, Homo sapien
gatcttagttatatctttccttctg

SEQ ID NO: 2674080 - DNA, 25 bp, Homo sapien
tctgatcttagttatatctttcctt

SEQ ID NO: 2674081 - DNA, 25 bp, Homo sapien
caaaagcattctgttgatagtaaag

SEQ ID NO: 2674082 - DNA, 25 bp, Homo sapien
tggcaatcatgagaaggccaacacc

SEQ ID NO: 2674083 - DNA, 25 bp, Homo sapien
tatattccccttgagatcaaagcct

SEQ ID NO: 2674084 - DNA, 25 bp, Homo sapien
gaatactttaggcataatggcaatc

SEQ ID NO: 2674085 - DNA, 25 bp, Homo sapien
tcaacattctgctcttgacgagcat

SEQ ID NO: 2674086 - DNA, 25 bp, Homo sapien
cattctgctcttgacgagcattttg

SEQ ID NO: 2674087 - DNA, 25 bp, Homo sapien
gccagttcaacattctgctcttgac

SEQ ID NO: 2674088 - DNA, 25 bp, Homo sapien
tgctcttgacgagcattttgtcata

SEQ ID NO: 2674089 - DNA, 25 bp, Homo sapien
cacggcgcctctcaagaagattttc

SEQ ID NO: 2674090 - DNA, 25 bp, Homo sapien
agtgacttgctgtgccacggcgcct

SEQ ID NO: 2674091 - DNA, 25 bp, Homo sapien
ccagtgtagtctgtcctattccaga

SEQ ID NO: 2674092 - DNA, 25 bp, Homo sapien
tggacacccttcctttgccagaatg

SEQ ID NO: 2674093 - DNA, 25 bp, Homo sapien
ggtaggttttagaagatgcttgcat

SEQ ID NO: 2674094 - DNA, 25 bp, Homo sapien
caggtaggttttagaagatgcttgc

SEQ ID NO: 2674095 - DNA, 25 bp, Homo sapien
tcgcaggtaggttttagaagatgct

SEQ ID NO: 2674096 - DNA, 25 bp, Homo sapien
agttcgcaggtaggttttagaagat

SEQ ID NO: 2674097 - DNA, 25 bp, Homo sapien
ccaatctccaagatggacagaacct

SEQ ID NO: 2674098 - DNA, 25 bp, Homo sapien
gatggacagaacctttttgcttgtc

SEQ ID NO: 2674099 - DNA, 25 bp, Homo sapien
ctaaccaatctccaagatggacaga

SEQ ID NO: 2674100 - DNA, 25 bp, Homo sapien
gaacctttttgcttgtctggatatc

SEQ ID NO: 2674101 - DNA, 25 bp, Homo sapien
tgcccatgatttagcaatagggact

SEQ ID NO: 2674102 - DNA, 25 bp, Homo sapien
tagggactcgatatcttctgtgtgc

SEQ ID NO: 2674103 - DNA, 25 bp, Homo sapien
tatctttctattggtaacatcctgt

SEQ ID NO: 2674104 - DNA, 25 bp, Homo sapien
tctgaccatttgtcgtaaagtccct

SEQ ID NO: 2674105 - DNA, 25 bp, Homo sapien
tttttcaaagatgtacatggtgtat

SEQ ID NO: 2674106 - DNA, 25 bp, Homo sapien
gccagatgactttcagcgtgaattg

SEQ ID NO: 2674107 - DNA, 25 bp, Homo sapien
tgtacatggtgtattgccagatgac

SEQ ID NO: 2674108 - DNA, 25 bp, Homo sapien
gactttcagcgtgaattgcatctga

SEQ ID NO: 2674109 - DNA, 25 bp, Homo sapien
cctcctgggtttaaggcattcttgt

SEQ ID NO: 2674110 - DNA, 25 bp, Homo sapien
acaggtatgagccaccatgcccggc

SEQ ID NO: 2674111 - DNA, 25 bp, Homo sapien
tacaggtatgagccaccatgcccgg

SEQ ID NO: 2674112 - DNA, 25 bp, Homo sapien
tcctgggtttaaggcattcttgtgc

SEQ ID NO: 2674113 - DNA, 25 bp, Homo sapien
gctttctttcatatttcgactcacc

SEQ ID NO: 2674114 - DNA, 25 bp, Homo sapien
ttctttcatatttcgactcacccct

SEQ ID NO: 2674115 - DNA, 25 bp, Homo sapien
atatttcgactcaccccttcactaa

SEQ ID NO: 2674116 - DNA, 25 bp, Homo sapien
tttcatatttcgactcaccccttca

SEQ ID NO: 2674117 - DNA, 25 bp, Homo sapien
tgtgaattaaaagcatagaacagat

SEQ ID NO: 2674118 - DNA, 25 bp, Homo sapien
tacagttccacaagctaatgccaag

SEQ ID NO: 2674119 - DNA, 25 bp, Homo sapien
ctacagcgagttcccaaataagcct

SEQ ID NO: 2674120 - DNA, 25 bp, Homo sapien
ggtgttgtgagttaggctccaagtt

SEQ ID NO: 2674121 - DNA, 25 bp, Homo sapien
catggttttgtcacgtgaagcattc

SEQ ID NO: 2674122 - DNA, 25 bp, Homo sapien
ggagggcacctaacccaagaagatc

SEQ ID NO: 2674123 - DNA, 25 bp, Homo sapien
gatccaatcagtacaccagacagcc

SEQ ID NO: 2674124 - DNA, 25 bp, Homo sapien
cattggccctggtgaaagaagatct

SEQ ID NO: 2674125 - DNA, 25 bp, Homo sapien
tacagctggatcagaggagggcacc

SEQ ID NO: 2674126 - DNA, 25 bp, Homo sapien
taattacgtagcgtgggtccgccat

SEQ ID NO: 2674127 - DNA, 25 bp, Homo sapien
tgattaacgtgaggattttcaaatg

SEQ ID NO: 2674128 - DNA, 25 bp, Homo sapien
ctggttgttaattacgtagcgtggg

SEQ ID NO: 2674129 - DNA, 25 bp, Homo sapien
tcaaatgctggttgttaattacgta

SEQ ID NO: 2674130 - DNA, 25 bp, Homo sapien
tcaaagatgtgtatgcgtgcatgca

SEQ ID NO: 2674131 - DNA, 25 bp, Homo sapien
caaagatgtgtatgcgtgcatgcat

SEQ ID NO: 2674132 - DNA, 25 bp, Homo sapien
cgttgaaatccatggaatgcaagtg

SEQ ID NO: 2674133 - DNA, 25 bp, Homo sapien
caagatttgatccagttgtgtttga

SEQ ID NO: 2674134 - DNA, 25 bp, Homo sapien
caaatttaataggagagtacacaag

SEQ ID NO: 2674135 - DNA, 25 bp, Homo sapien
tctatagccctataccatctttcca

SEQ ID NO: 2674136 - DNA, 25 bp, Homo sapien
ttctgccacagttatgaaagctcat

SEQ ID NO: 2674137 - DNA, 25 bp, Homo sapien
cagttctgccacagttatgaaagct

SEQ ID NO: 2674138 - DNA, 25 bp, Homo sapien
agttctgccacagttatgaaagctc

SEQ ID NO: 2674139 - DNA, 25 bp, Homo sapien
gttctgccacagttatgaaagctca

SEQ ID NO: 2674140 - DNA, 25 bp, Homo sapien
tttgctattgacaattcttctcttt

SEQ ID NO: 2674141 - DNA, 25 bp, Homo sapien
gttggatataaaatttgctattgac

SEQ ID NO: 2674142 - DNA, 25 bp, Homo sapien
gccaatcttgataggtgtacagtaa

SEQ ID NO: 2674143 - DNA, 25 bp, Homo sapien
tctatcttataggagttctgtttca

SEQ ID NO: 2674144 - DNA, 25 bp, Homo sapien
agctttacttacaagtgtgtggttg

SEQ ID NO: 2674145 - DNA, 25 bp, Homo sapien
taatgctgaaacttagtctgagccg

SEQ ID NO: 2674146 - DNA, 25 bp, Homo sapien
caccatgggtacaaatgctatgttt

SEQ ID NO: 2674147 - DNA, 25 bp, Homo sapien
gccggtcagtgctgatgattgatat

SEQ ID NO: 2674148 - DNA, 25 bp, Homo sapien
cctcttttaaagtgtgacttcttat

SEQ ID NO: 2674149 - DNA, 25 bp, Homo sapien
tgtgatatttttgtttcggagagta

SEQ ID NO: 2674150 - DNA, 25 bp, Homo sapien
tgatatttttgtttcggagagtatt

SEQ ID NO: 2674151 - DNA, 25 bp, Homo sapien
aagtgtgacttcttatcagatccca

SEQ ID NO: 2674152 - DNA, 25 bp, Homo sapien
atggtgacgtgactcttgaaagcct

SEQ ID NO: 2674153 - DNA, 25 bp, Homo sapien
agcctgtggaatatcacaggtagac

SEQ ID NO: 2674154 - DNA, 25 bp, Homo sapien
tcaatggtgacgtgactcttgaaag

SEQ ID NO: 2674155 - DNA, 25 bp, Homo sapien
aagcctgtggaatatcacaggtaga

SEQ ID NO: 2674156 - DNA, 25 bp, Homo sapien
tactctcatgaagtaagacctctct

SEQ ID NO: 2674157 - DNA, 25 bp, Homo sapien
tctaaagtgcatcacaaatgggctg

SEQ ID NO: 2674158 - DNA, 25 bp, Homo sapien
tcacgtactgggtcataaactgtat

SEQ ID NO: 2674159 - DNA, 25 bp, Homo sapien
taaaaggcaacatcaggattcactc

SEQ ID NO: 2674160 - DNA, 25 bp, Homo sapien
tctccatgatgaaagaggatcttac

SEQ ID NO: 2674161 - DNA, 25 bp, Homo sapien
gatctaaagagtacatcctcattac

SEQ ID NO: 2674162 - DNA, 25 bp, Homo sapien
ctctccatgatgaaagaggatctta

SEQ ID NO: 2674163 - DNA, 25 bp, Homo sapien
aatacatttatgatctaaagagtac

SEQ ID NO: 2674164 - DNA, 25 bp, Homo sapien
cacctggtccatattgactgtttgg

SEQ ID NO: 2674165 - DNA, 25 bp, Homo sapien
ccacacctggtccatattgactgtt

SEQ ID NO: 2674166 - DNA, 25 bp, Homo sapien
cctggtccatattgactgtttggca

SEQ ID NO: 2674167 - DNA, 25 bp, Homo sapien
ccccacacctggtccatattgactg

SEQ ID NO: 2674168 - DNA, 25 bp, Homo sapien
taatcaagcattctgtgattatgca

SEQ ID NO: 2674169 - DNA, 25 bp, Homo sapien
ttacactcgaagtttccattcctta

SEQ ID NO: 2674170 - DNA, 25 bp, Homo sapien
actcgaagtttccattccttaatca

SEQ ID NO: 2674171 - DNA, 25 bp, Homo sapien
gcaaatttgagagataatgaggtac

SEQ ID NO: 2674172 - DNA, 25 bp, Homo sapien
tactcagatctagaaaaaagaaatt

SEQ ID NO: 2674173 - DNA, 25 bp, Homo sapien
tttacttgaggatactcagatctag

SEQ ID NO: 2674174 - DNA, 25 bp, Homo sapien
tttctaaatttacttgaggatactc

SEQ ID NO: 2674175 - DNA, 25 bp, Homo sapien
gaggatactcagatctagaaaaaag

SEQ ID NO: 2674176 - DNA, 25 bp, Homo sapien
tcccaaccagaccaaggtggaactg

SEQ ID NO: 2674177 - DNA, 25 bp, Homo sapien
ccagaccaaggtggaactggaccca

SEQ ID NO: 2674178 - DNA, 25 bp, Homo sapien
caaccagaccaaggtggaactggac

SEQ ID NO: 2674179 - DNA, 25 bp, Homo sapien
cagaccaaggtggaactggacccat

SEQ ID NO: 2674180 - DNA, 25 bp, Homo sapien
aagaatattaactgccattgaagct

SEQ ID NO: 2674181 - DNA, 25 bp, Homo sapien
ttagcaaagttgccatattcatttt

SEQ ID NO: 2674182 - DNA, 25 bp, Homo sapien
caagaatattaactgccattgaagc

SEQ ID NO: 2674183 - DNA, 25 bp, Homo sapien
agaatttagcaaagttgccatattc

SEQ ID NO: 2674184 - DNA, 25 bp, Homo sapien
gcttctatgcccaaaatggtgagct

SEQ ID NO: 2674185 - DNA, 25 bp, Homo sapien
taagatcaccaaaagtcccaactct

SEQ ID NO: 2674186 - DNA, 25 bp, Homo sapien
cacaggagcttctatgcccaaaatg

SEQ ID NO: 2674187 - DNA, 25 bp, Homo sapien
tatgcccaaaatggtgagctttggt

SEQ ID NO: 2674188 - DNA, 25 bp, Homo sapien
tctcatattcctcaaacttttccct

SEQ ID NO: 2674189 - DNA, 25 bp, Homo sapien
tcatattcctcaaacttttccctca

SEQ ID NO: 2674190 - DNA, 25 bp, Homo sapien
tagtctcaatccattcttctcatat

SEQ ID NO: 2674191 - DNA, 25 bp, Homo sapien
tcttctcatattcctcaaacttttc

SEQ ID NO: 2674192 - DNA, 25 bp, Homo sapien
atctggtggagtttgaatttctcca

SEQ ID NO: 2674193 - DNA, 25 bp, Homo sapien
tctggtggagtttgaatttctccat

SEQ ID NO: 2674194 - DNA, 25 bp, Homo sapien
catctggtggagtttgaatttctcc

SEQ ID NO: 2674195 - DNA, 25 bp, Homo sapien
tccggaaggtcctgttacaattcca

SEQ ID NO: 2674196 - DNA, 25 bp, Homo sapien
ttttctttgtacctgtgtaaatgta

SEQ ID NO: 2674197 - DNA, 25 bp, Homo sapien
cacatccggaaggtcctgttacaat

SEQ ID NO: 2674198 - DNA, 25 bp, Homo sapien
ctttgtacctgtgtaaatgtaagca

SEQ ID NO: 2674199 - DNA, 25 bp, Homo sapien
ccataaatctgagaccttctttagt

SEQ ID NO: 2674200 - DNA, 25 bp, Homo sapien
atccataaatctgagaccttcttta

SEQ ID NO: 2674201 - DNA, 25 bp, Homo sapien
atctttgaagactctcctctcacac

SEQ ID NO: 2674202 - DNA, 25 bp, Homo sapien
tctttgaagactctcctctcacact

SEQ ID NO: 2674203 - DNA, 25 bp, Homo sapien
gagtcatggctagatttggaaacac

SEQ ID NO: 2674204 - DNA, 25 bp, Homo sapien
cacagacacgcagacttcttggcct

SEQ ID NO: 2674205 - DNA, 25 bp, Homo sapien
cactgctgtaggtaacggtgcatcc

SEQ ID NO: 2674206 - DNA, 25 bp, Homo sapien
ttcaggaaacccaatattaacaggc

SEQ ID NO: 2674207 - DNA, 25 bp, Homo sapien
agatatcaacattgtgtaatatcat

SEQ ID NO: 2674208 - DNA, 25 bp, Homo sapien
cagatatcaacattgtgtaatatca

SEQ ID NO: 2674209 - DNA, 25 bp, Homo sapien
cagtactgtataactaactataagt

SEQ ID NO: 2674210 - DNA, 25 bp, Homo sapien
tggcaactccccataggaagacata

SEQ ID NO: 2674211 - DNA, 25 bp, Homo sapien
aactataagtctctattcctttgaa

SEQ ID NO: 2674212 - DNA, 25 bp, Homo sapien
gaatgagctttagtggactctccag

SEQ ID NO: 2674213 - DNA, 25 bp, Homo sapien
ccttcacctcctatcactgaaactg

SEQ ID NO: 2674214 - DNA, 25 bp, Homo sapien
ttccttcacctcctatcactgaaac

SEQ ID NO: 2674215 - DNA, 25 bp, Homo sapien
ttcacctcctatcactgaaactgtt

SEQ ID NO: 2674216 - DNA, 25 bp, Homo sapien
cttcacctcctatcactgaaactgt

SEQ ID NO: 2674217 - DNA, 25 bp, Homo sapien
gagcatattcttgaattgactgagc

SEQ ID NO: 2674218 - DNA, 25 bp, Homo sapien
tgactgagcttcagaaaatgttggc

SEQ ID NO: 2674219 - DNA, 25 bp, Homo sapien
tctcttagcagtttgagattgggaa

SEQ ID NO: 2674220 - DNA, 25 bp, Homo sapien
aagcagcttgtgcatattgataccc

SEQ ID NO: 2674221 - DNA, 25 bp, Homo sapien
ggttgcagtaatagaaccatccttg

SEQ ID NO: 2674222 - DNA, 25 bp, Homo sapien
tgcagtaatagaaccatccttgttt

SEQ ID NO: 2674223 - DNA, 25 bp, Homo sapien
gttgcagtaatagaaccatccttgt

SEQ ID NO: 2674224 - DNA, 25 bp, Homo sapien
gcagtaatagaaccatccttgtttc

SEQ ID NO: 2674225 - DNA, 25 bp, Homo sapien
taacaaccaagagaaatactggcgg

SEQ ID NO: 2674226 - DNA, 25 bp, Homo sapien
gaatgacgaacgttcacctcctgta

SEQ ID NO: 2674227 - DNA, 25 bp, Homo sapien
tactggcggcaaagtagcaccaatg

SEQ ID NO: 2674228 - DNA, 25 bp, Homo sapien
ggaaattcctggttactgactcaaa

SEQ ID NO: 2674229 - DNA, 25 bp, Homo sapien
gctgaatttcaccttctaaacaatg

SEQ ID NO: 2674230 - DNA, 25 bp, Homo sapien
taaaggcttacagatcagtgtgtct

SEQ ID NO: 2674231 - DNA, 25 bp, Homo sapien
aatcactctgcctatgttggctctg

SEQ ID NO: 2674232 - DNA, 25 bp, Homo sapien
tctatatgtttatgcagctttaggc

SEQ ID NO: 2674233 - DNA, 25 bp, Homo sapien
gctgaagtttaagagttctagggaa

SEQ ID NO: 2674234 - DNA, 25 bp, Homo sapien
gggctgactgtactcatacaacttt

SEQ ID NO: 2674235 - DNA, 25 bp, Homo sapien
tattggcagttctacatggatgtag

SEQ ID NO: 2674236 - DNA, 25 bp, Homo sapien
gagagggcaactcagtctagttata

SEQ ID NO: 2674237 - DNA, 25 bp, Homo sapien
gagcttgcggttgcaaacaacagga

SEQ ID NO: 2674238 - DNA, 25 bp, Homo sapien
cagattactgcgattctggaccaga

SEQ ID NO: 2674239 - DNA, 25 bp, Homo sapien
ttttcaatgtatctcaaggacggga

SEQ ID NO: 2674240 - DNA, 25 bp, Homo sapien
tgtagaagaacccaacagacatttg

SEQ ID NO: 2674241 - DNA, 25 bp, Homo sapien
agggtagtggtagttgtttatgatc

SEQ ID NO: 2674242 - DNA, 25 bp, Homo sapien
ggtagtggtagttgtttatgatcat

SEQ ID NO: 2674243 - DNA, 25 bp, Homo sapien
gtagggtagtggtagttgtttatga

SEQ ID NO: 2674244 - DNA, 25 bp, Homo sapien
gggtagtggtagttgtttatgatca

SEQ ID NO: 2674245 - DNA, 25 bp, Homo sapien
atagtatcgtgcacttgtttccagg

SEQ ID NO: 2674246 - DNA, 25 bp, Homo sapien
caggtgagacttggtctgacaagga

SEQ ID NO: 2674247 - DNA, 25 bp, Homo sapien
cagggtaggtctgaaatctggattg

SEQ ID NO: 2674248 - DNA, 25 bp, Homo sapien
gcaagttttattctgcaggtgagac

SEQ ID NO: 2674249 - DNA, 25 bp, Homo sapien
aagcacaagggtaccctttcttgca

SEQ ID NO: 2674250 - DNA, 25 bp, Homo sapien
tgccacaactagacaaacagaaagc

SEQ ID NO: 2674251 - DNA, 25 bp, Homo sapien
ggtagaaaccttagcagcacacact

SEQ ID NO: 2674252 - DNA, 25 bp, Homo sapien
ccctttcttgcatctagaggtagaa

SEQ ID NO: 2674253 - DNA, 25 bp, Homo sapien
tattctcgcatggactacaaccacg

SEQ ID NO: 2674254 - DNA, 25 bp, Homo sapien
gcatggactacaaccacgaccagtg

SEQ ID NO: 2674255 - DNA, 25 bp, Homo sapien
ttctcgcatggactacaaccacgac

SEQ ID NO: 2674256 - DNA, 25 bp, Homo sapien
tcgcatggactacaaccacgaccag

SEQ ID NO: 2674257 - DNA, 25 bp, Homo sapien
gaagtttttcagccatggtcccttc

SEQ ID NO: 2674258 - DNA, 25 bp, Homo sapien
caagaatggcttctagctgcatcca

SEQ ID NO: 2674259 - DNA, 25 bp, Homo sapien
tgagctttgggcttttgttgatacc

SEQ ID NO: 2674260 - DNA, 25 bp, Homo sapien
ttgttgataccacaccccaggtaga

SEQ ID NO: 2674261 - DNA, 25 bp, Homo sapien
tgtacacattaatgagcaccttgga

SEQ ID NO: 2674262 - DNA, 25 bp, Homo sapien
taagtgaaactccatatataatgcc

SEQ ID NO: 2674263 - DNA, 25 bp, Homo sapien
taatgccactcagaagtagtaaaga

SEQ ID NO: 2674264 - DNA, 25 bp, Homo sapien
taaatggttcaagactcaagattgc

SEQ ID NO: 2674265 - DNA, 25 bp, Homo sapien
tatgttctgttcttttgtctcaata

SEQ ID NO: 2674266 - DNA, 25 bp, Homo sapien
atgttctgttcttttgtctcaatag

SEQ ID NO: 2674267 - DNA, 25 bp, Homo sapien
tgttctgttcttttgtctcaatagt

SEQ ID NO: 2674268 - DNA, 25 bp, Homo sapien
cagctgctgtgctcgtattgctact

SEQ ID NO: 2674269 - DNA, 25 bp, Homo sapien
gattttataattggcttacatttgg

SEQ ID NO: 2674270 - DNA, 25 bp, Homo sapien
tgctgtgctcgtattgctacttgtg

SEQ ID NO: 2674271 - DNA, 25 bp, Homo sapien
taattggcttacatttgggaagaaa

SEQ ID NO: 2674272 - DNA, 25 bp, Homo sapien
tattcaactgtccaggccaggaccc

SEQ ID NO: 2674273 - DNA, 25 bp, Homo sapien
cagtaagtcctgttaggctatccag

SEQ ID NO: 2674274 - DNA, 25 bp, Homo sapien
ccctgaggagggtgatatcagtaag

SEQ ID NO: 2674275 - DNA, 25 bp, Homo sapien
ggttaatgtgagctgagttccagca

SEQ ID NO: 2674276 - DNA, 25 bp, Homo sapien
ctggggtataggtcatgacactagc

SEQ ID NO: 2674277 - DNA, 25 bp, Homo sapien
tggggtataggtcatgacactagcc

SEQ ID NO: 2674278 - DNA, 25 bp, Homo sapien
gggtataggtcatgacactagccat

SEQ ID NO: 2674279 - DNA, 25 bp, Homo sapien
ggggtataggtcatgacactagcca

SEQ ID NO: 2674280 - DNA, 25 bp, Homo sapien
gagtatactccaagtgacactgaag

SEQ ID NO: 2674281 - DNA, 25 bp, Homo sapien
gctagagagctgctacaggaaagat

SEQ ID NO: 2674282 - DNA, 25 bp, Homo sapien
tgataacgatgaagtgccggagaaa

SEQ ID NO: 2674283 - DNA, 25 bp, Homo sapien
gcttctttgctctggaatgaccata

SEQ ID NO: 2674284 - DNA, 25 bp, Homo sapien
ccattgtttagatgccaagatgctg

SEQ ID NO: 2674285 - DNA, 25 bp, Homo sapien
tcactgtaagttatcctgttgcaag

SEQ ID NO: 2674286 - DNA, 25 bp, Homo sapien
tatcctgttgcaagtaatttggagg

SEQ ID NO: 2674287 - DNA, 25 bp, Homo sapien
gacttgagcagagctttgaccgctg

SEQ ID NO: 2674288 - DNA, 25 bp, Homo sapien
ctgaaagtttcagctctctccagtc

SEQ ID NO: 2674289 - DNA, 25 bp, Homo sapien
ttcctccaaaaatatcacagtaatt

SEQ ID NO: 2674290 - DNA, 25 bp, Homo sapien
atatcacagtaatttcagtttcccc

SEQ ID NO: 2674291 - DNA, 25 bp, Homo sapien
agtctctggataacccttcctccaa

SEQ ID NO: 2674292 - DNA, 25 bp, Homo sapien
tctggagagagcactttagagggcc

SEQ ID NO: 2674293 - DNA, 25 bp, Homo sapien
ctagttaggaagtctggagagagca

SEQ ID NO: 2674294 - DNA, 25 bp, Homo sapien
tagttaggaagtctggagagagcac

SEQ ID NO: 2674295 - DNA, 25 bp, Homo sapien
ggagagagcactttagagggcccag

SEQ ID NO: 2674296 - DNA, 25 bp, Homo sapien
tgtgctgttgtatatgcccctgcag

SEQ ID NO: 2674297 - DNA, 25 bp, Homo sapien
gttggaaccataagcggacacctgc

SEQ ID NO: 2674298 - DNA, 25 bp, Homo sapien
tcaatgtcaccagagccaaggtcgg

SEQ ID NO: 2674299 - DNA, 25 bp, Homo sapien
ggtcggcaactacttcttttagagc

SEQ ID NO: 2674300 - DNA, 25 bp, Homo sapien
tgatccgagaaaagtcactgccatc

SEQ ID NO: 2674301 - DNA, 25 bp, Homo sapien
gataacaatcaaccatgatccgaga

SEQ ID NO: 2674302 - DNA, 25 bp, Homo sapien
tctgagggtttctgactggtcagcc

SEQ ID NO: 2674303 - DNA, 25 bp, Homo sapien
gagaatatgcatgttctctgagggt

SEQ ID NO: 2674304 - DNA, 25 bp, Homo sapien
ctacatttccagtgcgatgagaagt

SEQ ID NO: 2674305 - DNA, 25 bp, Homo sapien
ccagtgcgatgagaagtaagagaaa

SEQ ID NO: 2674306 - DNA, 25 bp, Homo sapien
tgcgatgagaagtaagagaaaaccc

SEQ ID NO: 2674307 - DNA, 25 bp, Homo sapien
cactgaatgacacccaaagcatctg

SEQ ID NO: 2674308 - DNA, 25 bp, Homo sapien
cctgattaaatcttcactactgtta

SEQ ID NO: 2674309 - DNA, 25 bp, Homo sapien
ctgattaaatcttcactactgttaa

SEQ ID NO: 2674310 - DNA, 25 bp, Homo sapien
tgattaaatcttcactactgttaaa

SEQ ID NO: 2674311 - DNA, 25 bp, Homo sapien
gattaaatcttcactactgttaaac

SEQ ID NO: 2674312 - DNA, 25 bp, Homo sapien
tgtatgtctcctgagaagtttgaac

SEQ ID NO: 2674313 - DNA, 25 bp, Homo sapien
ttgtatgtctcctgagaagtttgaa

SEQ ID NO: 2674314 - DNA, 25 bp, Homo sapien
gtatgtctcctgagaagtttgaact

SEQ ID NO: 2674315 - DNA, 25 bp, Homo sapien
gataagtcgtatcttcttataaaaa

SEQ ID NO: 2674316 - DNA, 25 bp, Homo sapien
tactgcttgtttccgagaaacgtta

SEQ ID NO: 2674317 - DNA, 25 bp, Homo sapien
aaaatatactgcttgtttccgagaa

SEQ ID NO: 2674318 - DNA, 25 bp, Homo sapien
cgagaaacgttaattctctcctcca

SEQ ID NO: 2674319 - DNA, 25 bp, Homo sapien
aatgattaaaagatgacttgtccag

SEQ ID NO: 2674320 - DNA, 25 bp, Homo sapien
tgtccagagcaacatggttcagaag

SEQ ID NO: 2674321 - DNA, 25 bp, Homo sapien
tcaagttgctcggttgctgtataaa

SEQ ID NO: 2674322 - DNA, 25 bp, Homo sapien
gattgaatctgaagagaatagcaaa

SEQ ID NO: 2674323 - DNA, 25 bp, Homo sapien
caaataggactgttcactgaaggag

SEQ ID NO: 2674324 - DNA, 25 bp, Homo sapien
ttcaggtgcctggatgttgaggggc

SEQ ID NO: 2674325 - DNA, 25 bp, Homo sapien
gggcaaataggactgttcactgaag

SEQ ID NO: 2674326 - DNA, 25 bp, Homo sapien
tgttgaggggcaaataggactgttc

SEQ ID NO: 2674327 - DNA, 25 bp, Homo sapien
gaatccagtgctatttgagtaccta

SEQ ID NO: 2674328 - DNA, 25 bp, Homo sapien
gtcccatatatggtggagaagcagc

SEQ ID NO: 2674329 - DNA, 25 bp, Homo sapien
tagtcatccagaatcctgtaagcac

SEQ ID NO: 2674330 - DNA, 25 bp, Homo sapien
tgagtacctatctgcgtcaggacat

SEQ ID NO: 2674331 - DNA, 25 bp, Homo sapien
tgatggaccgcttgacagaactggg

SEQ ID NO: 2674332 - DNA, 25 bp, Homo sapien
catgggagggcacaaatggactttc

SEQ ID NO: 2674333 - DNA, 25 bp, Homo sapien
tgtatctcgcacctaggcattggcc

SEQ ID NO: 2674334 - DNA, 25 bp, Homo sapien
tgggcaaggttgcatagacagctct

SEQ ID NO: 2674335 - DNA, 25 bp, Homo sapien
aagatgtgttgctggtttggtctct

SEQ ID NO: 2674336 - DNA, 25 bp, Homo sapien
tgctcttcaaaagtattgtatgtgt

SEQ ID NO: 2674337 - DNA, 25 bp, Homo sapien
tgttgacgacagtgccctttgccat

SEQ ID NO: 2674338 - DNA, 25 bp, Homo sapien
catggaatagccaaagaccgcaaat

SEQ ID NO: 2674339 - DNA, 25 bp, Homo sapien
tcactgataacaaatgggcctgtca

SEQ ID NO: 2674340 - DNA, 25 bp, Homo sapien
gactggatggatgttcattaagttc

SEQ ID NO: 2674341 - DNA, 25 bp, Homo sapien
gatgttcattaagttcactgataac

SEQ ID NO: 2674342 - DNA, 25 bp, Homo sapien
cactgataacaaatgggcctgtcac

SEQ ID NO: 2674343 - DNA, 25 bp, Homo sapien
gctgacccttgttgccctgtcatta

SEQ ID NO: 2674344 - DNA, 25 bp, Homo sapien
tggctgacccttgttgccctgtcat

SEQ ID NO: 2674345 - DNA, 25 bp, Homo sapien
tctgggggctgattaactggttttc

SEQ ID NO: 2674346 - DNA, 25 bp, Homo sapien
tttgtctgggggctgattaactggt

SEQ ID NO: 2674347 - DNA, 25 bp, Homo sapien
tgcaagttgaaggagcgacagaagt

SEQ ID NO: 2674348 - DNA, 25 bp, Homo sapien
caaagggagagcaggttgacagaaa

SEQ ID NO: 2674349 - DNA, 25 bp, Homo sapien
tttacccgatgtaggtgcaagttga

SEQ ID NO: 2674350 - DNA, 25 bp, Homo sapien
gagcgacagaagttttggttagcaa

SEQ ID NO: 2674351 - DNA, 25 bp, Homo sapien
tatacttgaatgttttagcagccat

SEQ ID NO: 2674352 - DNA, 25 bp, Homo sapien
tcacaatttctactatacttgaatg

SEQ ID NO: 2674353 - DNA, 25 bp, Homo sapien
ttcttcacaatttctactatacttg

SEQ ID NO: 2674354 - DNA, 25 bp, Homo sapien
tctactatacttgaatgttttagca

SEQ ID NO: 2674355 - DNA, 25 bp, Homo sapien
cagctgagatagatctaatattgat

SEQ ID NO: 2674356 - DNA, 25 bp, Homo sapien
gatagatctaatattgataatctct

SEQ ID NO: 2674357 - DNA, 25 bp, Homo sapien
taggttttacagctgagatagatct

SEQ ID NO: 2674358 - DNA, 25 bp, Homo sapien
ggttttacagctgagatagatctaa

SEQ ID NO: 2674359 - DNA, 25 bp, Homo sapien
ggttggctgagccttagaccacaat

SEQ ID NO: 2674360 - DNA, 25 bp, Homo sapien
caatgtagctaagagtctcggtcac

SEQ ID NO: 2674361 - DNA, 25 bp, Homo sapien
ccaggaggcctaaagcaatgtagct

SEQ ID NO: 2674362 - DNA, 25 bp, Homo sapien
gaccacaatgctcttaagacacctg

SEQ ID NO: 2674363 - DNA, 25 bp, Homo sapien
ggcattcatattttaacactgtacg

SEQ ID NO: 2674364 - DNA, 25 bp, Homo sapien
caccatttacaagtcctgtggctgc

SEQ ID NO: 2674365 - DNA, 25 bp, Homo sapien
tacgtccaacagcatgatttaaggc

SEQ ID NO: 2674366 - DNA, 25 bp, Homo sapien
cataacttggtacattatttgctga

SEQ ID NO: 2674367 - DNA, 25 bp, Homo sapien
taaatttgttgcagaggtttttaca

SEQ ID NO: 2674368 - DNA, 25 bp, Homo sapien
aatttgttgcagaggtttttacatt

SEQ ID NO: 2674369 - DNA, 25 bp, Homo sapien
tcactgattaatagctggtgagcac

SEQ ID NO: 2674370 - DNA, 25 bp, Homo sapien
ttatcttggttgtagtaaactctca

SEQ ID NO: 2674371 - DNA, 25 bp, Homo sapien
aagaatggctgttttggcctttgcc

SEQ ID NO: 2674372 - DNA, 25 bp, Homo sapien
cctctgagctcatggactgggtgaa

SEQ ID NO: 2674373 - DNA, 25 bp, Homo sapien
gacaccctcgggtggagtgagcata

SEQ ID NO: 2674374 - DNA, 25 bp, Homo sapien
cagtgttgtttggaagacaccctcg

SEQ ID NO: 2674375 - DNA, 25 bp, Homo sapien
aacccatgtaggcagttggctttta

SEQ ID NO: 2674376 - DNA, 25 bp, Homo sapien
atgtccacaactggaacccatgtag

SEQ ID NO: 2674377 - DNA, 25 bp, Homo sapien
caaaggcagaacccatgtccacaac

SEQ ID NO: 2674378 - DNA, 25 bp, Homo sapien
tctgcttatgttcttatcaccattt

SEQ ID NO: 2674379 - DNA, 25 bp, Homo sapien
tgcacacttgggagcacacactgac

SEQ ID NO: 2674380 - DNA, 25 bp, Homo sapien
tttcttatgcaaaccacactcaggc

SEQ ID NO: 2674381 - DNA, 25 bp, Homo sapien
gacacgtcttcactgatccggagag

SEQ ID NO: 2674382 - DNA, 25 bp, Homo sapien
tatgtgttaaaatgtgcgggcagtc

SEQ ID NO: 2674383 - DNA, 25 bp, Homo sapien
cagtagatgtggaataattatacac

SEQ ID NO: 2674384 - DNA, 25 bp, Homo sapien
agtagatgtggaataattatacact

SEQ ID NO: 2674385 - DNA, 25 bp, Homo sapien
acagtagatgtggaataattataca

SEQ ID NO: 2674386 - DNA, 25 bp, Homo sapien
tatactcccctttacatcttgtaga

SEQ ID NO: 2674387 - DNA, 25 bp, Homo sapien
gcttcctaggttcatctctgttcac

SEQ ID NO: 2674388 - DNA, 25 bp, Homo sapien
gcttcactgaggctttgagtaatcc

SEQ ID NO: 2674389 - DNA, 25 bp, Homo sapien
gatttatgtcacttttgaagggagc

SEQ ID NO: 2674390 - DNA, 25 bp, Homo sapien
tctgtgcagccgtggctataaagtg

SEQ ID NO: 2674391 - DNA, 25 bp, Homo sapien
gtgcagccgtggctataaagtgcca

SEQ ID NO: 2674392 - DNA, 25 bp, Homo sapien
agccgtggctataaagtgccactgc

SEQ ID NO: 2674393 - DNA, 25 bp, Homo sapien
gcagccgtggctataaagtgccact

SEQ ID NO: 2674394 - DNA, 25 bp, Homo sapien
tggctggcttgaggtgtatatggtt

SEQ ID NO: 2674395 - DNA, 25 bp, Homo sapien
gtttggctggcttgaggtgtatatg

SEQ ID NO: 2674396 - DNA, 25 bp, Homo sapien
ctggcttgaggtgtatatggtttgt

SEQ ID NO: 2674397 - DNA, 25 bp, Homo sapien
gaggtgtgggcaagtgcagggccat

SEQ ID NO: 2674398 - DNA, 25 bp, Homo sapien
taactccatacttgtctttagtatc

SEQ ID NO: 2674399 - DNA, 25 bp, Homo sapien
ggactggcttgtctaactccatact

SEQ ID NO: 2674400 - DNA, 25 bp, Homo sapien
ctggggaaggctttagtgacgcttt

SEQ ID NO: 2674401 - DNA, 25 bp, Homo sapien
gctttagtgacgctttatttgaaaa

SEQ ID NO: 2674402 - DNA, 25 bp, Homo sapien
gatgtgatatgagcaactttattag

SEQ ID NO: 2674403 - DNA, 25 bp, Homo sapien
aaacttcagcaacaggtaccttgga

SEQ ID NO: 2674404 - DNA, 25 bp, Homo sapien
ggtaccttggaatctgatgtgatat

SEQ ID NO: 2674405 - DNA, 25 bp, Homo sapien
gcaacaggtaccttggaatctgatg

SEQ ID NO: 2674406 - DNA, 25 bp, Homo sapien
agtgctgaagtgacacatgtctcca

SEQ ID NO: 2674407 - DNA, 25 bp, Homo sapien
tggtcaaatattggggaatcacaag

SEQ ID NO: 2674408 - DNA, 25 bp, Homo sapien
atcacaagttggtgctgtagtgctg

SEQ ID NO: 2674409 - DNA, 25 bp, Homo sapien
tctggcatccagacattgtaatggt

SEQ ID NO: 2674410 - DNA, 25 bp, Homo sapien
gttgataatgaatcaggtttctcta

SEQ ID NO: 2674411 - DNA, 25 bp, Homo sapien
tttctctttcaataccttttgcaat

SEQ ID NO: 2674412 - DNA, 25 bp, Homo sapien
aatcaggtttctctacattctcaaa

SEQ ID NO: 2674413 - DNA, 25 bp, Homo sapien
tccagaatcaacagtttccttatat

SEQ ID NO: 2674414 - DNA, 25 bp, Homo sapien
tggttgggactcttcaaggtgcttt

SEQ ID NO: 2674415 - DNA, 25 bp, Homo sapien
gttgggactcttcaaggtgcttttc

SEQ ID NO: 2674416 - DNA, 25 bp, Homo sapien
ttggttgggactcttcaaggtgctt

SEQ ID NO: 2674417 - DNA, 25 bp, Homo sapien
cgtacttgttagcagcaccaggcat

SEQ ID NO: 2674418 - DNA, 25 bp, Homo sapien
gcacagcgtacttgttagcagcacc

SEQ ID NO: 2674419 - DNA, 25 bp, Homo sapien
agatgcttgcacagcgtacttgtta

SEQ ID NO: 2674420 - DNA, 25 bp, Homo sapien
gcttgcacagcgtacttgttagcag

SEQ ID NO: 2674421 - DNA, 25 bp, Homo sapien
ttaatagaagattaaagtgcccatc

SEQ ID NO: 2674422 - DNA, 25 bp, Homo sapien
ttgctgctatttcaatgagtctcca

SEQ ID NO: 2674423 - DNA, 25 bp, Homo sapien
gaagattaaagtgcccatcaagtat

SEQ ID NO: 2674424 - DNA, 25 bp, Homo sapien
atcaagtattctgaagcagttactt

SEQ ID NO: 2674425 - DNA, 25 bp, Homo sapien
caagttggcatcttcgtttctgtcc

SEQ ID NO: 2674426 - DNA, 25 bp, Homo sapien
cagagtagtttctagtaggctcaaa

SEQ ID NO: 2674427 - DNA, 25 bp, Homo sapien
ggctcaaattcttgacgaggttaat

SEQ ID NO: 2674428 - DNA, 25 bp, Homo sapien
gaagtggtacttgataattgtgatt

SEQ ID NO: 2674429 - DNA, 25 bp, Homo sapien
tgccttttggtcactatatgtcaga

SEQ ID NO: 2674430 - DNA, 25 bp, Homo sapien
cttttggtcactatatgtcagagtg

SEQ ID NO: 2674431 - DNA, 25 bp, Homo sapien
tatgccttttggtcactatatgtca

SEQ ID NO: 2674432 - DNA, 25 bp, Homo sapien
gccttttggtcactatatgtcagag

SEQ ID NO: 2674433 - DNA, 25 bp, Homo sapien
tcccctcttcatgtcggcagagcaa

SEQ ID NO: 2674434 - DNA, 25 bp, Homo sapien
gcaaccacttgattgtctaactgaa

SEQ ID NO: 2674435 - DNA, 25 bp, Homo sapien
tcggcagagcaacaaaggcaaactt

SEQ ID NO: 2674436 - DNA, 25 bp, Homo sapien
aaggcaaactttggcaaccacttga

SEQ ID NO: 2674437 - DNA, 25 bp, Homo sapien
aactggactgttttacacttgacac

SEQ ID NO: 2674438 - DNA, 25 bp, Homo sapien
aaactggactgttttacacttgaca

SEQ ID NO: 2674439 - DNA, 25 bp, Homo sapien
ggacatattcaagggatctggctga

SEQ ID NO: 2674440 - DNA, 25 bp, Homo sapien
taagagtctaatggggtacagagag

SEQ ID NO: 2674441 - DNA, 25 bp, Homo sapien
tcaactgtccattgccaaacatcat

SEQ ID NO: 2674442 - DNA, 25 bp, Homo sapien
tgttcagattaaccatggcatttcc

SEQ ID NO: 2674443 - DNA, 25 bp, Homo sapien
tcatgctctttgcaactaaattcct

SEQ ID NO: 2674444 - DNA, 25 bp, Homo sapien
gtacagtccttaagtgaacatcctg

SEQ ID NO: 2674445 - DNA, 25 bp, Homo sapien
gttttcaggacttctaaaactgcat

SEQ ID NO: 2674446 - DNA, 25 bp, Homo sapien
gctgacagttggaagaatgaacatt

SEQ ID NO: 2674447 - DNA, 25 bp, Homo sapien
cataattatcaagctcagttaaaat

SEQ ID NO: 2674448 - DNA, 25 bp, Homo sapien
ttatcaagctcagttaaaatttcat

SEQ ID NO: 2674449 - DNA, 25 bp, Homo sapien
atcaagctcagttaaaatttcatag

SEQ ID NO: 2674450 - DNA, 25 bp, Homo sapien
aattatcaagctcagttaaaatttc

SEQ ID NO: 2674451 - DNA, 25 bp, Homo sapien
tcttcaaaagaaaagatctgggtct

SEQ ID NO: 2674452 - DNA, 25 bp, Homo sapien
tactcagcgagaatctcttcaaaag

SEQ ID NO: 2674453 - DNA, 25 bp, Homo sapien
tcatcgaaagtactcagcgagaatc

SEQ ID NO: 2674454 - DNA, 25 bp, Homo sapien
gatctgggtcttgatagcaaaaagt

SEQ ID NO: 2674455 - DNA, 25 bp, Homo sapien
aataaatgccagatcctcatcttgt

SEQ ID NO: 2674456 - DNA, 25 bp, Homo sapien
ccccaaatgacctgctaataaatgc

SEQ ID NO: 2674457 - DNA, 25 bp, Homo sapien
tgccagatcctcatcttgtaaaact

SEQ ID NO: 2674458 - DNA, 25 bp, Homo sapien
catatggtgaagataaagtgcagac

SEQ ID NO: 2674459 - DNA, 25 bp, Homo sapien
catcattgtcacaccggaataaacc

SEQ ID NO: 2674460 - DNA, 25 bp, Homo sapien
attgtcacaccggaataaaccagac

SEQ ID NO: 2674461 - DNA, 25 bp, Homo sapien
tcacaccggaataaaccagacacct

SEQ ID NO: 2674462 - DNA, 25 bp, Homo sapien
accggaataaaccagacacctccat

SEQ ID NO: 2674463 - DNA, 25 bp, Homo sapien
tttaacagaggatgccttacacagc

SEQ ID NO: 2674464 - DNA, 25 bp, Homo sapien
tgtgagttagctttaacagaggatg

SEQ ID NO: 2674465 - DNA, 25 bp, Homo sapien
tttctctgtgagttagctttaacag

SEQ ID NO: 2674466 - DNA, 25 bp, Homo sapien
ttaacagaggatgccttacacagca

SEQ ID NO: 2674467 - DNA, 25 bp, Homo sapien
taggcaaagatctatggagcctcag

SEQ ID NO: 2674468 - DNA, 25 bp, Homo sapien
gatgcttaggcaaagatctatggag

SEQ ID NO: 2674469 - DNA, 25 bp, Homo sapien
gacgggtatgagatgcttaggcaaa

SEQ ID NO: 2674470 - DNA, 25 bp, Homo sapien
gatctatggagcctcagctgtttga

SEQ ID NO: 2674471 - DNA, 25 bp, Homo sapien
gaagtaaaattctttcactgaaaca

SEQ ID NO: 2674472 - DNA, 25 bp, Homo sapien
aattctttcactgaaacagaaatat

SEQ ID NO: 2674473 - DNA, 25 bp, Homo sapien
aaaattctttcactgaaacagaaat

SEQ ID NO: 2674474 - DNA, 25 bp, Homo sapien
gtaaaattctttcactgaaacagaa

SEQ ID NO: 2674475 - DNA, 25 bp, Homo sapien
tattttgggtaatgagaaggcgtct

SEQ ID NO: 2674476 - DNA, 25 bp, Homo sapien
tatttgtctacataatgccaaacac

SEQ ID NO: 2674477 - DNA, 25 bp, Homo sapien
aacctggccatcatccatatatttg

SEQ ID NO: 2674478 - DNA, 25 bp, Homo sapien
ttcataaactatctccagcatttta

SEQ ID NO: 2674479 - DNA, 25 bp, Homo sapien
tccaataaattgactatccatttca

SEQ ID NO: 2674480 - DNA, 25 bp, Homo sapien
ggattcatgtccatcagaaggattt

SEQ ID NO: 2674481 - DNA, 25 bp, Homo sapien
catttcaaaatgactccaatcggat

SEQ ID NO: 2674482 - DNA, 25 bp, Homo sapien
aaggtattcatctgattagaagaga

SEQ ID NO: 2674483 - DNA, 25 bp, Homo sapien
taacatgtgtagtttgctggaggcc

SEQ ID NO: 2674484 - DNA, 25 bp, Homo sapien
gactgtggctctattggcaacacca

SEQ ID NO: 2674485 - DNA, 25 bp, Homo sapien
tgtgcagcaacaaaagactgtggct

SEQ ID NO: 2674486 - DNA, 25 bp, Homo sapien
gtttgccaaggcagtgcgaatccat

SEQ ID NO: 2674487 - DNA, 25 bp, Homo sapien
cacatggtttttagccaaggagcca

SEQ ID NO: 2674488 - DNA, 25 bp, Homo sapien
gttgaatagaatcacacagatggag

SEQ ID NO: 2674489 - DNA, 25 bp, Homo sapien
gatggagccaccctattctattgag

SEQ ID NO: 2674490 - DNA, 25 bp, Homo sapien
caatgaggtctgttggacaaatgat

SEQ ID NO: 2674491 - DNA, 25 bp, Homo sapien
atttcagtgttgagcgggtaatgct

SEQ ID NO: 2674492 - DNA, 25 bp, Homo sapien
ctatttcagtgttgagcgggtaatg

SEQ ID NO: 2674493 - DNA, 25 bp, Homo sapien
tatttcagtgttgagcgggtaatgc

SEQ ID NO: 2674494 - DNA, 25 bp, Homo sapien
aatcagtcagatagctgtctgtgaa

SEQ ID NO: 2674495 - DNA, 25 bp, Homo sapien
agatagctgtctgtgaaatgattag

SEQ ID NO: 2674496 - DNA, 25 bp, Homo sapien
ctacaaatcagtcagatagctgtct

SEQ ID NO: 2674497 - DNA, 25 bp, Homo sapien
tcagatagctgtctgtgaaatgatt

SEQ ID NO: 2674498 - DNA, 25 bp, Homo sapien
cctgcttgtgtgaatctgaaagatg

SEQ ID NO: 2674499 - DNA, 25 bp, Homo sapien
gcttgtgtgaatctgaaagatgcgc

SEQ ID NO: 2674500 - DNA, 25 bp, Homo sapien
ctgcttgtgtgaatctgaaagatgc

SEQ ID NO: 2674501 - DNA, 25 bp, Homo sapien
ttgtgtgaatctgaaagatgcgctt

SEQ ID NO: 2674502 - DNA, 25 bp, Homo sapien
ctttagccatgatcaggtcgtccag

SEQ ID NO: 2674503 - DNA, 25 bp, Homo sapien
tagccatgatcaggtcgtccagggt

SEQ ID NO: 2674504 - DNA, 25 bp, Homo sapien
gggttacatcatcagccagcgtcat

SEQ ID NO: 2674505 - DNA, 25 bp, Homo sapien
ccagggttacatcatcagccagcgt

SEQ ID NO: 2674506 - DNA, 25 bp, Homo sapien
ttaaggccatcagaccagcttctgt

SEQ ID NO: 2674507 - DNA, 25 bp, Homo sapien
aaggccatcagaccagcttctgtac

SEQ ID NO: 2674508 - DNA, 25 bp, Homo sapien
tttcattctacgttctcttaaggcc

SEQ ID NO: 2674509 - DNA, 25 bp, Homo sapien
tcattctacgttctcttaaggccat

SEQ ID NO: 2674510 - DNA, 25 bp, Homo sapien
tattttagaaaagtcaatgtagtct

SEQ ID NO: 2674511 - DNA, 25 bp, Homo sapien
tctattttagaaaagtcaatgtagt

SEQ ID NO: 2674512 - DNA, 25 bp, Homo sapien
tttagaaaagtcaatgtagtcttca

SEQ ID NO: 2674513 - DNA, 25 bp, Homo sapien
tagaaaagtcaatgtagtcttcatt

SEQ ID NO: 2674514 - DNA, 25 bp, Homo sapien
cctgtggtggatatgtatcgaacat

SEQ ID NO: 2674515 - DNA, 25 bp, Homo sapien
tggtttcctgtggtggatatgtatc

SEQ ID NO: 2674516 - DNA, 25 bp, Homo sapien
ttcctgtggtggatatgtatcgaac

SEQ ID NO: 2674517 - DNA, 25 bp, Homo sapien
ggtggatatgtatcgaacataagaa

SEQ ID NO: 2674518 - DNA, 25 bp, Homo sapien
tggctgggctgtcgaacttcagctt

SEQ ID NO: 2674519 - DNA, 25 bp, Homo sapien
ctaatggctgggctgtcgaacttca

SEQ ID NO: 2674520 - DNA, 25 bp, Homo sapien
ggctgtcgaacttcagcttttcctg

SEQ ID NO: 2674521 - DNA, 25 bp, Homo sapien
gctgggctgtcgaacttcagctttt

SEQ ID NO: 2674522 - DNA, 25 bp, Homo sapien
caacacactccttgtcaaagtacat

SEQ ID NO: 2674523 - DNA, 25 bp, Homo sapien
cacaggctggcagtcgtttccaaca

SEQ ID NO: 2674524 - DNA, 25 bp, Homo sapien
tatttgtagctgagtggagttggca

SEQ ID NO: 2674525 - DNA, 25 bp, Homo sapien
ttctatttgtagctgagtggagttg

SEQ ID NO: 2674526 - DNA, 25 bp, Homo sapien
gtttggactgaaaccatcaacatgt

SEQ ID NO: 2674527 - DNA, 25 bp, Homo sapien
taaagcaaagcagatgtgtaacagc

SEQ ID NO: 2674528 - DNA, 25 bp, Homo sapien
tgtaacagctttcggtagaatccag

SEQ ID NO: 2674529 - DNA, 25 bp, Homo sapien
tagcaattagctgaacattctgcat

SEQ ID NO: 2674530 - DNA, 25 bp, Homo sapien
gctaaactcatccatggtctgactc

SEQ ID NO: 2674531 - DNA, 25 bp, Homo sapien
tcatccatggtctgactcacacctt

SEQ ID NO: 2674532 - DNA, 25 bp, Homo sapien
cacaccttccttaagggaagatatt

SEQ ID NO: 2674533 - DNA, 25 bp, Homo sapien
tcacaccttccttaagggaagatat

SEQ ID NO: 2674534 - DNA, 25 bp, Homo sapien
aatgtgggacagcccgttctccact

SEQ ID NO: 2674535 - DNA, 25 bp, Homo sapien
tgtgggacagcccgttctccactct

SEQ ID NO: 2674536 - DNA, 25 bp, Homo sapien
tgctgctgtcactacaagagagtcc

SEQ ID NO: 2674537 - DNA, 25 bp, Homo sapien
tgggacagcccgttctccactcttg

SEQ ID NO: 2674538 - DNA, 25 bp, Homo sapien
gggagccgctctgttcgtgatggca

SEQ ID NO: 2674539 - DNA, 25 bp, Homo sapien
gagccgctctgttcgtgatggcagt

SEQ ID NO: 2674540 - DNA, 25 bp, Homo sapien
ccgctctgttcgtgatggcagtctc

SEQ ID NO: 2674541 - DNA, 25 bp, Homo sapien
tcaggggagccgctctgttcgtgat

SEQ ID NO: 2674542 - DNA, 25 bp, Homo sapien
ttggatttagccttctgtggtcatt

SEQ ID NO: 2674543 - DNA, 25 bp, Homo sapien
ctgtggtcattttgaatagcaagca

SEQ ID NO: 2674544 - DNA, 25 bp, Homo sapien
ccacggtcaaaaggatcgtcatcca

SEQ ID NO: 2674545 - DNA, 25 bp, Homo sapien
tgagacagcaaaggtgggcgcaact

SEQ ID NO: 2674546 - DNA, 25 bp, Homo sapien
ctgaaacaaaaggtgcgaagttctt

SEQ ID NO: 2674547 - DNA, 25 bp, Homo sapien
gctgttttgtgaagtccagggccct

SEQ ID NO: 2674548 - DNA, 25 bp, Homo sapien
taatcttcccttcctaaatcagtgc

SEQ ID NO: 2674549 - DNA, 25 bp, Homo sapien
tctggttgtgcagataatcttccct

SEQ ID NO: 2674550 - DNA, 25 bp, Homo sapien
aaccaagtgggcttcggatccccat

SEQ ID NO: 2674551 - DNA, 25 bp, Homo sapien
ctgagtaggcttccccaccaacagc

SEQ ID NO: 2674552 - DNA, 25 bp, Homo sapien
tgttgataaatagccagagtcctga

SEQ ID NO: 2674553 - DNA, 25 bp, Homo sapien
ctgttgataaatagccagagtcctg

SEQ ID NO: 2674554 - DNA, 25 bp, Homo sapien
cagagtcctgagtaggcttccccac

SEQ ID NO: 2674555 - DNA, 25 bp, Homo sapien
acttggagagaggaccaatctgttc

SEQ ID NO: 2674556 - DNA, 25 bp, Homo sapien
ttttagcacagtcacgggcagctac

SEQ ID NO: 2674557 - DNA, 25 bp, Homo sapien
ttagcacagtcacgggcagctacaa

SEQ ID NO: 2674558 - DNA, 25 bp, Homo sapien
gggcagctacaatacttggagagag

SEQ ID NO: 2674559 - DNA, 25 bp, Homo sapien
ctggattattgtcaacttcgggata

SEQ ID NO: 2674560 - DNA, 25 bp, Homo sapien
agcaggcctggattattgtcaactt

SEQ ID NO: 2674561 - DNA, 25 bp, Homo sapien
tattgtcaacttcgggatactcttc

SEQ ID NO: 2674562 - DNA, 25 bp, Homo sapien
gtcaacttcgggatactcttctgaa

SEQ ID NO: 2674563 - DNA, 25 bp, Homo sapien
ccactccttttgagttgttgtcaat

SEQ ID NO: 2674564 - DNA, 25 bp, Homo sapien
gtttgggtctagcagaagcctcctc

SEQ ID NO: 2674565 - DNA, 25 bp, Homo sapien
acactgtttgggtctagcagaagcc

SEQ ID NO: 2674566 - DNA, 25 bp, Homo sapien
tgttgtcaatatctttgacagcacc

SEQ ID NO: 2674567 - DNA, 25 bp, Homo sapien
tctttgacaaaaggagccggctaac

SEQ ID NO: 2674568 - DNA, 25 bp, Homo sapien
tgagcagtaattctggcagggcact

SEQ ID NO: 2674569 - DNA, 25 bp, Homo sapien
cattagacggtggtagtctttgaca

SEQ ID NO: 2674570 - DNA, 25 bp, Homo sapien
gctgaaagcaagaatgatgagcagt

SEQ ID NO: 2674571 - DNA, 25 bp, Homo sapien
ttttctgcacacttctgactcaaac

SEQ ID NO: 2674572 - DNA, 25 bp, Homo sapien
taccatgggtacttaacggaatggc

SEQ ID NO: 2674573 - DNA, 25 bp, Homo sapien
gtcttaagctttgatcttcgacgaa

SEQ ID NO: 2674574 - DNA, 25 bp, Homo sapien
gatcttcgacgaagtgcagaatccc

SEQ ID NO: 2674575 - DNA, 25 bp, Homo sapien
gctttgatcttcgacgaagtgcaga

SEQ ID NO: 2674576 - DNA, 25 bp, Homo sapien
taagctttgatcttcgacgaagtgc

SEQ ID NO: 2674577 - DNA, 25 bp, Homo sapien
tctggctttcttcagagttgacatc

SEQ ID NO: 2674578 - DNA, 25 bp, Homo sapien
ggctttcttcagagttgacatcatt

SEQ ID NO: 2674579 - DNA, 25 bp, Homo sapien
tcagagttgacatcattaacccact

SEQ ID NO: 2674580 - DNA, 25 bp, Homo sapien
ttcagagttgacatcattaacccac

SEQ ID NO: 2674581 - DNA, 25 bp, Homo sapien
ttaaagcctgctgtgcgggaatttc

SEQ ID NO: 2674582 - DNA, 25 bp, Homo sapien
agcctgctgtgcgggaatttccttt

SEQ ID NO: 2674583 - DNA, 25 bp, Homo sapien
cctgctgtgcgggaatttcctttct

SEQ ID NO: 2674584 - DNA, 25 bp, Homo sapien
aaagcctgctgtgcgggaatttcct

SEQ ID NO: 2674585 - DNA, 25 bp, Homo sapien
acctacagggttctccaatattcag

SEQ ID NO: 2674586 - DNA, 25 bp, Homo sapien
tactctggcagggagcatcacttgg

SEQ ID NO: 2674587 - DNA, 25 bp, Homo sapien
aaaccatctactctggcagggagca

SEQ ID NO: 2674588 - DNA, 25 bp, Homo sapien
agctgacttccgcacctacagggtt

SEQ ID NO: 2674589 - DNA, 25 bp, Homo sapien
ccttcctaagaacttaagagctcca

SEQ ID NO: 2674590 - DNA, 25 bp, Homo sapien
tccttcctaagaacttaagagctcc

SEQ ID NO: 2674591 - DNA, 25 bp, Homo sapien
gccagggaaagaacgagagtcaagt

SEQ ID NO: 2674592 - DNA, 25 bp, Homo sapien
agagtcaagttgatccaggatttgg

SEQ ID NO: 2674593 - DNA, 25 bp, Homo sapien
aagaattaactggaaaggaggattg

SEQ ID NO: 2674594 - DNA, 25 bp, Homo sapien
tctgtttttctccggtgccttagca

SEQ ID NO: 2674595 - DNA, 25 bp, Homo sapien
ctccggtgccttagcaacggcagca

SEQ ID NO: 2674596 - DNA, 25 bp, Homo sapien
tttctccggtgccttagcaacggca

SEQ ID NO: 2674597 - DNA, 25 bp, Homo sapien
tgtttttctccggtgccttagcaac

SEQ ID NO: 2674598 - DNA, 25 bp, Homo sapien
ttccctctctgtgtcgttgtgaaag

SEQ ID NO: 2674599 - DNA, 25 bp, Homo sapien
tctctgtgtcgttgtgaaaggaaga

SEQ ID NO: 2674600 - DNA, 25 bp, Homo sapien
ggaaatggttgcaaaccaatcagtg

SEQ ID NO: 2674601 - DNA, 25 bp, Homo sapien
aatcagtgtaggaagcttaaatggg

SEQ ID NO: 2674602 - DNA, 25 bp, Homo sapien
ctttaatagaccaggtaacagttcg

SEQ ID NO: 2674603 - DNA, 25 bp, Homo sapien
aatagaccaggtaacagttcgtgtt

SEQ ID NO: 2674604 - DNA, 25 bp, Homo sapien
agaccaggtaacagttcgtgttagt

SEQ ID NO: 2674605 - DNA, 25 bp, Homo sapien
ttaatagaccaggtaacagttcgtg

SEQ ID NO: 2674606 - DNA, 25 bp, Homo sapien
agccccagttagtcaaaccccagtg

SEQ ID NO: 2674607 - DNA, 25 bp, Homo sapien
cccagtgacctttgcccctggttgc

SEQ ID NO: 2674608 - DNA, 25 bp, Homo sapien
cagggaaataaggatctgtctgttt

SEQ ID NO: 2674609 - DNA, 25 bp, Homo sapien
ctgtctgtttagtggataccgtgta

SEQ ID NO: 2674610 - DNA, 25 bp, Homo sapien
tccacaccagtagacagtaagcttc

SEQ ID NO: 2674611 - DNA, 25 bp, Homo sapien
gaaaatagcaagagtgtccacacca

SEQ ID NO: 2674612 - DNA, 25 bp, Homo sapien
ggcagagtcttatcacagaaggcag

SEQ ID NO: 2674613 - DNA, 25 bp, Homo sapien
tctgaaggacagtcatagctgccac

SEQ ID NO: 2674614 - DNA, 25 bp, Homo sapien
atcctattcccctctgacataagga

SEQ ID NO: 2674615 - DNA, 25 bp, Homo sapien
tgccagcctcacagatacaatcaat

SEQ ID NO: 2674616 - DNA, 25 bp, Homo sapien
gcctcacagatacaatcaatcctat

SEQ ID NO: 2674617 - DNA, 25 bp, Homo sapien
gggttgccagcctcacagatacaat

SEQ ID NO: 2674618 - DNA, 25 bp, Homo sapien
tggagtggatgtcactgccgagtct

SEQ ID NO: 2674619 - DNA, 25 bp, Homo sapien
tgtcactgccgagtctgttctcaca

SEQ ID NO: 2674620 - DNA, 25 bp, Homo sapien
tccatttggagtggatgtcactgcc

SEQ ID NO: 2674621 - DNA, 25 bp, Homo sapien
gtggatgtcactgccgagtctgttc

SEQ ID NO: 2674622 - DNA, 25 bp, Homo sapien
gctgtaaacgtattgtgccctggag

SEQ ID NO: 2674623 - DNA, 25 bp, Homo sapien
tgccctggagagttgtacacatgtt

SEQ ID NO: 2674624 - DNA, 25 bp, Homo sapien
gagaaggtcgcattatggacagact

SEQ ID NO: 2674625 - DNA, 25 bp, Homo sapien
tggacagacttcgtgaatgggaatt

SEQ ID NO: 2674626 - DNA, 25 bp, Homo sapien
ccacgttttgctccacactccttga

SEQ ID NO: 2674627 - DNA, 25 bp, Homo sapien
cctagtacccacgttttgctccaca

SEQ ID NO: 2674628 - DNA, 25 bp, Homo sapien
gttttgctccacactccttgaccgc

SEQ ID NO: 2674629 - DNA, 25 bp, Homo sapien
tagtacccacgttttgctccacact

SEQ ID NO: 2674630 - DNA, 25 bp, Homo sapien
taagaactcacctccgttagcgcac

SEQ ID NO: 2674631 - DNA, 25 bp, Homo sapien
tgccaaattgtcatagtgacaccag

SEQ ID NO: 2674632 - DNA, 25 bp, Homo sapien
tagtgacaccagtggttcgtcagct

SEQ ID NO: 2674633 - DNA, 25 bp, Homo sapien
tcccaaattaaatggactccagatg

SEQ ID NO: 2674634 - DNA, 25 bp, Homo sapien
caaggatacccagccgccttttggc

SEQ ID NO: 2674635 - DNA, 25 bp, Homo sapien
cctcctggcgatgcttttgacatta

SEQ ID NO: 2674636 - DNA, 25 bp, Homo sapien
gacattatagcacagtctcctccca

SEQ ID NO: 2674637 - DNA, 25 bp, Homo sapien
ttggcaatcctactgttcctcctgg

SEQ ID NO: 2674638 - DNA, 25 bp, Homo sapien
gctgagtggacctggaataatggat

SEQ ID NO: 2674639 - DNA, 25 bp, Homo sapien
agtggacctggaataatggatagcc

SEQ ID NO: 2674640 - DNA, 25 bp, Homo sapien
gacctggaataatggatagccctca

SEQ ID NO: 2674641 - DNA, 25 bp, Homo sapien
gaataatggatagccctcactgagt

SEQ ID NO: 2674642 - DNA, 25 bp, Homo sapien
tcatacttcacttagatgaaaaaca

SEQ ID NO: 2674643 - DNA, 25 bp, Homo sapien
catacttcacttagatgaaaaacaa

SEQ ID NO: 2674644 - DNA, 25 bp, Homo sapien
atacttcacttagatgaaaaacaaa

SEQ ID NO: 2674645 - DNA, 25 bp, Homo sapien
gtgttctctccgttaaccattgaaa

SEQ ID NO: 2674646 - DNA, 25 bp, Homo sapien
taacatgctccaaaatatcgctagt

SEQ ID NO: 2674647 - DNA, 25 bp, Homo sapien
tgatctcagggcagacatatgccac

SEQ ID NO: 2674648 - DNA, 25 bp, Homo sapien
ccagtttcctatcatcagggatgca

SEQ ID NO: 2674649 - DNA, 25 bp, Homo sapien
ttttgccggcactttcaccttgggc

SEQ ID NO: 2674650 - DNA, 25 bp, Homo sapien
ggcctgcaacctgtacccaagctat

SEQ ID NO: 2674651 - DNA, 25 bp, Homo sapien
taaagatgcccacgttcccattcct

SEQ ID NO: 2674652 - DNA, 25 bp, Homo sapien
ggattctaatctcactttgctttta

SEQ ID NO: 2674653 - DNA, 25 bp, Homo sapien
catatctttggatctaaagatgccc

SEQ ID NO: 2674654 - DNA, 25 bp, Homo sapien
tctcgggtcatcaaagggatcacaa

SEQ ID NO: 2674655 - DNA, 25 bp, Homo sapien
tcgggtcatcaaagggatcacaagt

SEQ ID NO: 2674656 - DNA, 25 bp, Homo sapien
gtcatcaaagggatcacaagttgtg

SEQ ID NO: 2674657 - DNA, 25 bp, Homo sapien
cttctcgggtcatcaaagggatcac

SEQ ID NO: 2674658 - DNA, 25 bp, Homo sapien
tccttttggttctcgtggcacagca

SEQ ID NO: 2674659 - DNA, 25 bp, Homo sapien
tcagagacatccagaaaggccctgg

SEQ ID NO: 2674660 - DNA, 25 bp, Homo sapien
ttccggccagggctgaggcatcaca

SEQ ID NO: 2674661 - DNA, 25 bp, Homo sapien
tctcagttgggtttggataacagac

SEQ ID NO: 2674662 - DNA, 25 bp, Homo sapien
atagtaaccagtactttcagtgacc

SEQ ID NO: 2674663 - DNA, 25 bp, Homo sapien
tttatagaaccatagtaaccagtac

SEQ ID NO: 2674664 - DNA, 25 bp, Homo sapien
ctggccagcacatgtcatgttattt

SEQ ID NO: 2674665 - DNA, 25 bp, Homo sapien
tattttccctaatcacgtttataga

SEQ ID NO: 2674666 - DNA, 25 bp, Homo sapien
ttgattagcagagtaggccattcct

SEQ ID NO: 2674667 - DNA, 25 bp, Homo sapien
ttcctgcatggaattccttattggc

SEQ ID NO: 2674668 - DNA, 25 bp, Homo sapien
ctcttgattagcagagtaggccatt

SEQ ID NO: 2674669 - DNA, 25 bp, Homo sapien
ggccattcctgcatggaattcctta

SEQ ID NO: 2674670 - DNA, 25 bp, Homo sapien
gcattactgttaacggtgttcgcat

SEQ ID NO: 2674671 - DNA, 25 bp, Homo sapien
gaaatgatgctagaattcagaggtg

SEQ ID NO: 2674672 - DNA, 25 bp, Homo sapien
cctaatttggaggaaatcatcacct

SEQ ID NO: 2674673 - DNA, 25 bp, Homo sapien
tcctattgccctttgtggaatacag

SEQ ID NO: 2674674 - DNA, 25 bp, Homo sapien
tccgtagaagtctggccactgtgcc

SEQ ID NO: 2674675 - DNA, 25 bp, Homo sapien
tcggtggttatcactaaaaatggcc

SEQ ID NO: 2674676 - DNA, 25 bp, Homo sapien
aaaccctgctcatgtatttcggtgg

SEQ ID NO: 2674677 - DNA, 25 bp, Homo sapien
tatgactatggatctcttgcctgcc

SEQ ID NO: 2674678 - DNA, 25 bp, Homo sapien
ttgtctttctgggaccgctgactgc

SEQ ID NO: 2674679 - DNA, 25 bp, Homo sapien
tttgtccccattgctcgttccttcc

SEQ ID NO: 2674680 - DNA, 25 bp, Homo sapien
gactgcaagagtcttgtatctgttt

SEQ ID NO: 2674681 - DNA, 25 bp, Homo sapien
cctttgagacctgtttgtccccatt

SEQ ID NO: 2674682 - DNA, 25 bp, Homo sapien
gcagttgacacttctcagtctgtat

SEQ ID NO: 2674683 - DNA, 25 bp, Homo sapien
ctgaatacaggagaaccgagggttt

SEQ ID NO: 2674684 - DNA, 25 bp, Homo sapien
tcatttgcagttgacacttctcagt

SEQ ID NO: 2674685 - DNA, 25 bp, Homo sapien
caggagaaccgagggtttttctcat

SEQ ID NO: 2674686 - DNA, 25 bp, Homo sapien
aatcggttaagttcagttctcatcc

SEQ ID NO: 2674687 - DNA, 25 bp, Homo sapien
caaaggcacacttgctgtgatctcc

SEQ ID NO: 2674688 - DNA, 25 bp, Homo sapien
cctgtattcagtgttgtagcctctc

SEQ ID NO: 2674689 - DNA, 25 bp, Homo sapien
tcatccagccagattgtttccccaa

SEQ ID NO: 2674690 - DNA, 25 bp, Homo sapien
catgacaacaaagaggattagggcc

SEQ ID NO: 2674691 - DNA, 25 bp, Homo sapien
tgtgacttatagctaggattcggga

SEQ ID NO: 2674692 - DNA, 25 bp, Homo sapien
tccgagacggatacagcagctggag

SEQ ID NO: 2674693 - DNA, 25 bp, Homo sapien
cagggaaaacctgcatgccatgtgg

SEQ ID NO: 2674694 - DNA, 25 bp, Homo sapien
agttctgaatcagatcctcaaagtt

SEQ ID NO: 2674695 - DNA, 25 bp, Homo sapien
atcagatcctcaaagttatttggca

SEQ ID NO: 2674696 - DNA, 25 bp, Homo sapien
gaatcagatcctcaaagttatttgg

SEQ ID NO: 2674697 - DNA, 25 bp, Homo sapien
gttagttctgaatcagatcctcaaa

SEQ ID NO: 2674698 - DNA, 25 bp, Homo sapien
tgttgcaatggatccatttaaatct

SEQ ID NO: 2674699 - DNA, 25 bp, Homo sapien
gccaacatgcaaaacgtctgttgca

SEQ ID NO: 2674700 - DNA, 25 bp, Homo sapien
agaattctcaagagaccatctggta

SEQ ID NO: 2674701 - DNA, 25 bp, Homo sapien
tctcaagagaccatctggtaccact

SEQ ID NO: 2674702 - DNA, 25 bp, Homo sapien
gcaattatacagtttgtctcattgg

SEQ ID NO: 2674703 - DNA, 25 bp, Homo sapien
tatacagtttgtctcattggctcac

SEQ ID NO: 2674704 - DNA, 25 bp, Homo sapien
caattatacagtttgtctcattggc

SEQ ID NO: 2674705 - DNA, 25 bp, Homo sapien
attatacagtttgtctcattggctc

SEQ ID NO: 2674706 - DNA, 25 bp, Homo sapien
gcttgcaaatattcctcaactcaga

SEQ ID NO: 2674707 - DNA, 25 bp, Homo sapien
cttgcaaatattcctcaactcagaa

SEQ ID NO: 2674708 - DNA, 25 bp, Homo sapien
ctgcttgcaaatattcctcaactca

SEQ ID NO: 2674709 - DNA, 25 bp, Homo sapien
tgcaaatattcctcaactcagaaat

SEQ ID NO: 2674710 - DNA, 25 bp, Homo sapien
gcagacttctttacctgtatcagtg

SEQ ID NO: 2674711 - DNA, 25 bp, Homo sapien
ctgagtagccgctgtaaggcattgg

SEQ ID NO: 2674712 - DNA, 25 bp, Homo sapien
gcattggtcatgacagtgcacatgc

SEQ ID NO: 2674713 - DNA, 25 bp, Homo sapien
tactgaggtgcttttccccactgga

SEQ ID NO: 2674714 - DNA, 25 bp, Homo sapien
tgtcgtatgcctgcgagtcgttcca

SEQ ID NO: 2674715 - DNA, 25 bp, Homo sapien
gagatagtccttcccgcctttcaat

SEQ ID NO: 2674716 - DNA, 25 bp, Homo sapien
tcagagatagtccttcccgcctttc

SEQ ID NO: 2674717 - DNA, 25 bp, Homo sapien
tctctgtattgatggagtgtcgtat

SEQ ID NO: 2674718 - DNA, 25 bp, Homo sapien
gttgactggcgtgcctctctgagga

SEQ ID NO: 2674719 - DNA, 25 bp, Homo sapien
tgctgctattagtaagcagatgcac

SEQ ID NO: 2674720 - DNA, 25 bp, Homo sapien
tctctgaggagtggttcctgtaggc

SEQ ID NO: 2674721 - DNA, 25 bp, Homo sapien
ggaagagggttggagtgctgctgct

SEQ ID NO: 2674722 - DNA, 25 bp, Homo sapien
acgatcctgcatagtagacaagttt

SEQ ID NO: 2674723 - DNA, 25 bp, Homo sapien
tggtgacaattttaccaatcctgga

SEQ ID NO: 2674724 - DNA, 25 bp, Homo sapien
tgatcttgaggggaaacgatcctgc

SEQ ID NO: 2674725 - DNA, 25 bp, Homo sapien
taactggtgacaattttaccaatcc

SEQ ID NO: 2674726 - DNA, 25 bp, Homo sapien
caaagaagcagtttgggaggaacag

SEQ ID NO: 2674727 - DNA, 25 bp, Homo sapien
tttacggccatatgtgtagtgtatc

SEQ ID NO: 2674728 - DNA, 25 bp, Homo sapien
agatgtgggcttcatggtatttaaa

SEQ ID NO: 2674729 - DNA, 25 bp, Homo sapien
taattaagtacttagatgtgggctt

SEQ ID NO: 2674730 - DNA, 25 bp, Homo sapien
aacgtcatttgcaatccttgaacat

SEQ ID NO: 2674731 - DNA, 25 bp, Homo sapien
cccaggctttgcctgttccattgtt

SEQ ID NO: 2674732 - DNA, 25 bp, Homo sapien
tcccccaggctttgcctgttccatt

SEQ ID NO: 2674733 - DNA, 25 bp, Homo sapien
atttgcaatccttgaacatccttct

SEQ ID NO: 2674734 - DNA, 25 bp, Homo sapien
ctgtccccgtaagccctgagatggt

SEQ ID NO: 2674735 - DNA, 25 bp, Homo sapien
tatgaagtgtcaaaccctcttgccg

SEQ ID NO: 2674736 - DNA, 25 bp, Homo sapien
tgtggaccttgtagcaaatgaatgg

SEQ ID NO: 2674737 - DNA, 25 bp, Homo sapien
tttatttcagttgccctggtgacac

SEQ ID NO: 2674738 - DNA, 25 bp, Homo sapien
cactgatggatgaatttagctcctg

SEQ ID NO: 2674739 - DNA, 25 bp, Homo sapien
tgttgtgtaactctgccgggaagcc

SEQ ID NO: 2674740 - DNA, 25 bp, Homo sapien
tagctcctgtcggagtggaggctcc

SEQ ID NO: 2674741 - DNA, 25 bp, Homo sapien
gctccgggagtgtgcacagatgtat

SEQ ID NO: 2674742 - DNA, 25 bp, Homo sapien
gcttgattgaaacagtccactggtg

SEQ ID NO: 2674743 - DNA, 25 bp, Homo sapien
tcagacaggccaatggtacagtgta

SEQ ID NO: 2674744 - DNA, 25 bp, Homo sapien
catgtgtacagtaggcgaatgaagc

SEQ ID NO: 2674745 - DNA, 25 bp, Homo sapien
ccactggtggttgcttggttgtcag

SEQ ID NO: 2674746 - DNA, 25 bp, Homo sapien
gagcagaaaccccacagcaggtgct

SEQ ID NO: 2674747 - DNA, 25 bp, Homo sapien
ggattacaagttgccccagtgctgg

SEQ ID NO: 2674748 - DNA, 25 bp, Homo sapien
gaacgcctgagccactaggttcctg

SEQ ID NO: 2674749 - DNA, 25 bp, Homo sapien
acaatgtggtgctttatgactggga

SEQ ID NO: 2674750 - DNA, 25 bp, Homo sapien
tcacagtgcaaccccggggcttgtt

SEQ ID NO: 2674751 - DNA, 25 bp, Homo sapien
cacagtgcaaccccggggcttgtta

SEQ ID NO: 2674752 - DNA, 25 bp, Homo sapien
tgggaatgagcttaacacacaagcc

SEQ ID NO: 2674753 - DNA, 25 bp, Homo sapien
cgctgcagtgtccatgtgctaataa

SEQ ID NO: 2674754 - DNA, 25 bp, Homo sapien
gcatgcttatgcaagaccccaacag

SEQ ID NO: 2674755 - DNA, 25 bp, Homo sapien
gaatcatcataagggacagcgggct

SEQ ID NO: 2674756 - DNA, 25 bp, Homo sapien
tgtgtggacatcaaaatggggttca

SEQ ID NO: 2674757 - DNA, 25 bp, Homo sapien
ggactgtgccttggctatactcctt

SEQ ID NO: 2674758 - DNA, 25 bp, Homo sapien
tgaatttggggctgtgtggacatca

SEQ ID NO: 2674759 - DNA, 25 bp, Homo sapien
ctttttctgaaaggactgaatttgg

SEQ ID NO: 2674760 - DNA, 25 bp, Homo sapien
ctttggcagtcatgttctgactgcg

SEQ ID NO: 2674761 - DNA, 25 bp, Homo sapien
tggcagtcatgttctgactgcggcc

SEQ ID NO: 2674762 - DNA, 25 bp, Homo sapien
catgttctgactgcggcctggtgct

SEQ ID NO: 2674763 - DNA, 25 bp, Homo sapien
cagtcatgttctgactgcggcctgg

SEQ ID NO: 2674764 - DNA, 25 bp, Homo sapien
ttccccaggcctataaggcctgtca

SEQ ID NO: 2674765 - DNA, 25 bp, Homo sapien
ggcctataaggcctgtcaggggagt

SEQ ID NO: 2674766 - DNA, 25 bp, Homo sapien
cccaggcctataaggcctgtcaggg

SEQ ID NO: 2674767 - DNA, 25 bp, Homo sapien
gcctataaggcctgtcaggggagtg

SEQ ID NO: 2674768 - DNA, 25 bp, Homo sapien
atgaacggttgagcaatggaaaggc

SEQ ID NO: 2674769 - DNA, 25 bp, Homo sapien
tctgctttggtatccaggtcatgag

SEQ ID NO: 2674770 - DNA, 25 bp, Homo sapien
tcaccggtgctggtcagtgcatacg

SEQ ID NO: 2674771 - DNA, 25 bp, Homo sapien
ctgggtgttgtaatttcaccggtgc

SEQ ID NO: 2674772 - DNA, 25 bp, Homo sapien
ctaacgctctgctttatgggttacg

SEQ ID NO: 2674773 - DNA, 25 bp, Homo sapien
tatgggttacgttatcttcctttga

SEQ ID NO: 2674774 - DNA, 25 bp, Homo sapien
gctctgctttatgggttacgttatc

SEQ ID NO: 2674775 - DNA, 25 bp, Homo sapien
tgctttatgggttacgttatcttcc

SEQ ID NO: 2674776 - DNA, 25 bp, Homo sapien
gccgttctgtaaagctatacatata

SEQ ID NO: 2674777 - DNA, 25 bp, Homo sapien
tgctatcactttggcttgctcttgt

SEQ ID NO: 2674778 - DNA, 25 bp, Homo sapien
gcaggaaccacattgccgttctgta

SEQ ID NO: 2674779 - DNA, 25 bp, Homo sapien
tttctgctatcactttggcttgctc

SEQ ID NO: 2674780 - DNA, 25 bp, Homo sapien
gcattgatttggagcatgtgggccc

SEQ ID NO: 2674781 - DNA, 25 bp, Homo sapien
tgtctgagcacgtagaattcttaag

SEQ ID NO: 2674782 - DNA, 25 bp, Homo sapien
gggccctgttgagtgctattcacaa

SEQ ID NO: 2674783 - DNA, 25 bp, Homo sapien
tattcacaagtgtagtccactgctc

SEQ ID NO: 2674784 - DNA, 25 bp, Homo sapien
gggccatcattaatgccattgtgga

SEQ ID NO: 2674785 - DNA, 25 bp, Homo sapien
ccattgtggataaagggtgaaggct

SEQ ID NO: 2674786 - DNA, 25 bp, Homo sapien
ccatgaagtcgtgggtgtgtcttgc

SEQ ID NO: 2674787 - DNA, 25 bp, Homo sapien
ataaaccgagcgttgggaccagcct

SEQ ID NO: 2674788 - DNA, 25 bp, Homo sapien
ggatttgttatcacgacctttcaag

SEQ ID NO: 2674789 - DNA, 25 bp, Homo sapien
aattggatttgttatcacgaccttt

SEQ ID NO: 2674790 - DNA, 25 bp, Homo sapien
tatcacgacctttcaagaggcacca

SEQ ID NO: 2674791 - DNA, 25 bp, Homo sapien
tgtccctttgataatcgtaaattgg

SEQ ID NO: 2674792 - DNA, 25 bp, Homo sapien
ctgctctggcccctttgaaagaagg

SEQ ID NO: 2674793 - DNA, 25 bp, Homo sapien
ctgaataactcttcgaagggctgct

SEQ ID NO: 2674794 - DNA, 25 bp, Homo sapien
gaataactcttcgaagggctgctct

SEQ ID NO: 2674795 - DNA, 25 bp, Homo sapien
gctctggcccctttgaaagaaggca

SEQ ID NO: 2674796 - DNA, 25 bp, Homo sapien
tgataaagctgtgttgctaggcaga

SEQ ID NO: 2674797 - DNA, 25 bp, Homo sapien
gctctggcttcatatgcgtggtgga

SEQ ID NO: 2674798 - DNA, 25 bp, Homo sapien
catatctgtcattgccccactttca

SEQ ID NO: 2674799 - DNA, 25 bp, Homo sapien
tatttttgtcggtgggctctggctt

SEQ ID NO: 2674800 - DNA, 25 bp, Homo sapien
atgccttctcaatcagtagtgcctg

SEQ ID NO: 2674801 - DNA, 25 bp, Homo sapien
gcttgattgactccagctaaatgac

SEQ ID NO: 2674802 - DNA, 25 bp, Homo sapien
aaaatagggatcatcacggaatgcc

SEQ ID NO: 2674803 - DNA, 25 bp, Homo sapien
gcatcctcatgatggaacagagcat

SEQ ID NO: 2674804 - DNA, 25 bp, Homo sapien
cagagcacttcagtccaaatcctgc

SEQ ID NO: 2674805 - DNA, 25 bp, Homo sapien
actctagccgcaacagagcacttca

SEQ ID NO: 2674806 - DNA, 25 bp, Homo sapien
aacagagcacttcagtccaaatcct

SEQ ID NO: 2674807 - DNA, 25 bp, Homo sapien
tgaatttcactctagccgcaacaga

SEQ ID NO: 2674808 - DNA, 25 bp, Homo sapien
tgtcaggagacttttcccttcttgc

SEQ ID NO: 2674809 - DNA, 25 bp, Homo sapien
gagacttttcccttcttgctttgtc

SEQ ID NO: 2674810 - DNA, 25 bp, Homo sapien
cttgtcaggagacttttcccttctt

SEQ ID NO: 2674811 - DNA, 25 bp, Homo sapien
acttttcccttcttgctttgtccat

SEQ ID NO: 2674812 - DNA, 25 bp, Homo sapien
gaaaagcagttaatgggttgcatgt

SEQ ID NO: 2674813 - DNA, 25 bp, Homo sapien
ttgcatgttggtgcaaccagaggca

SEQ ID NO: 2674814 - DNA, 25 bp, Homo sapien
aaccaggaacccgttatgtgagaag

SEQ ID NO: 2674815 - DNA, 25 bp, Homo sapien
tccttcattcgtggtggtttgacat

SEQ ID NO: 2674816 - DNA, 25 bp, Homo sapien
ttaaggagtgcacaaaatgcttgcc

SEQ ID NO: 2674817 - DNA, 25 bp, Homo sapien
aaaaggatagtttcatggagattgc

SEQ ID NO: 2674818 - DNA, 25 bp, Homo sapien
catttctcttaaacacccatcatta

SEQ ID NO: 2674819 - DNA, 25 bp, Homo sapien
gagattgcttcttgggtatgtgtca

SEQ ID NO: 2674820 - DNA, 25 bp, Homo sapien
cctgaagtttctcaccgttttggat

SEQ ID NO: 2674821 - DNA, 25 bp, Homo sapien
ttaaattctgttcgccatccttgca

SEQ ID NO: 2674822 - DNA, 25 bp, Homo sapien
gtgctttgggctccatgaaatatta

SEQ ID NO: 2674823 - DNA, 25 bp, Homo sapien
tgataaagcattttcttgtattgaa

SEQ ID NO: 2674824 - DNA, 25 bp, Homo sapien
tttaccaaatgaatgctgccaattc

SEQ ID NO: 2674825 - DNA, 25 bp, Homo sapien
taccaaatgaatgctgccaattcac

SEQ ID NO: 2674826 - DNA, 25 bp, Homo sapien
cgaatttaccaaatgaatgctgcca

SEQ ID NO: 2674827 - DNA, 25 bp, Homo sapien
aatttaccaaatgaatgctgccaat

SEQ ID NO: 2674828 - DNA, 25 bp, Homo sapien
ttcagtaaggattcgcccctcaggc

SEQ ID NO: 2674829 - DNA, 25 bp, Homo sapien
tttcagtaaggattcgcccctcagg

SEQ ID NO: 2674830 - DNA, 25 bp, Homo sapien
ctttcagtaaggattcgcccctcag

SEQ ID NO: 2674831 - DNA, 25 bp, Homo sapien
ctggtgaagctgaatgatctctctg

SEQ ID NO: 2674832 - DNA, 25 bp, Homo sapien
tggtgaagctgaatgatctctctgt

SEQ ID NO: 2674833 - DNA, 25 bp, Homo sapien
gtgaagctgaatgatctctctgttt

SEQ ID NO: 2674834 - DNA, 25 bp, Homo sapien
tctggtgaagctgaatgatctctct

SEQ ID NO: 2674835 - DNA, 25 bp, Homo sapien
cttccaaattgacagggctggctgc

SEQ ID NO: 2674836 - DNA, 25 bp, Homo sapien
tgtttcattagcctcttccaaattg

SEQ ID NO: 2674837 - DNA, 25 bp, Homo sapien
cattagcctcttccaaattgacagg

SEQ ID NO: 2674838 - DNA, 25 bp, Homo sapien
ctgcagataatgtttcattagcctc

SEQ ID NO: 2674839 - DNA, 25 bp, Homo sapien
cttaaaatgccatctgtttgggcca

SEQ ID NO: 2674840 - DNA, 25 bp, Homo sapien
aatgccatctgtttgggccaggcct

SEQ ID NO: 2674841 - DNA, 25 bp, Homo sapien
ccacttaatccagctcatggctttt

SEQ ID NO: 2674842 - DNA, 25 bp, Homo sapien
atggcttttagatactgcccttttt

SEQ ID NO: 2674843 - DNA, 25 bp, Homo sapien
caataaacttttacgcctatttcag

SEQ ID NO: 2674844 - DNA, 25 bp, Homo sapien
gggtacagttcaaatagtggtgctt

SEQ ID NO: 2674845 - DNA, 25 bp, Homo sapien
tcagtagttttctggcgggagctcc

SEQ ID NO: 2674846 - DNA, 25 bp, Homo sapien
atttagtgacccagcactaagaggg

SEQ ID NO: 2674847 - DNA, 25 bp, Homo sapien
tgaatttgggatatcttgctctcgg

SEQ ID NO: 2674848 - DNA, 25 bp, Homo sapien
tcttaacctgtcaagctagtctgag

SEQ ID NO: 2674849 - DNA, 25 bp, Homo sapien
tattaggcagcatatacgaagcaga

SEQ ID NO: 2674850 - DNA, 25 bp, Homo sapien
cacaccaagctccacattgtgatct

SEQ ID NO: 2674851 - DNA, 25 bp, Homo sapien
gtgcacagaagtcggccccgctagg

SEQ ID NO: 2674852 - DNA, 25 bp, Homo sapien
cctgtgcacagaagtcggccccgct

SEQ ID NO: 2674853 - DNA, 25 bp, Homo sapien
tgcacagaagtcggccccgctaggc

SEQ ID NO: 2674854 - DNA, 25 bp, Homo sapien
tgtgcacagaagtcggccccgctag

SEQ ID NO: 2674855 - DNA, 25 bp, Homo sapien
tggaaccgatttgtaggcgtcccga

SEQ ID NO: 2674856 - DNA, 25 bp, Homo sapien
gaggaaatcattcggcccctgagtc

SEQ ID NO: 2674857 - DNA, 25 bp, Homo sapien
ccagaaagtttgatctaatgccggg

SEQ ID NO: 2674858 - DNA, 25 bp, Homo sapien
taatgccgggttacgtcatgtgtgc

SEQ ID NO: 2674859 - DNA, 25 bp, Homo sapien
ttgacgctggtgtttctggtgctct

SEQ ID NO: 2674860 - DNA, 25 bp, Homo sapien
taagccgataacaggcggagagcca

SEQ ID NO: 2674861 - DNA, 25 bp, Homo sapien
ccgaccgctacgctgtctactggaa

SEQ ID NO: 2674862 - DNA, 25 bp, Homo sapien
tacgctgtctactggaacagcagca

SEQ ID NO: 2674863 - DNA, 25 bp, Homo sapien
tgggggtgcgagtttgtctttatca

SEQ ID NO: 2674864 - DNA, 25 bp, Homo sapien
ggggtgcgagtttgtctttatcacc

SEQ ID NO: 2674865 - DNA, 25 bp, Homo sapien
cctccagtgggggtgcgagtttgtc

SEQ ID NO: 2674866 - DNA, 25 bp, Homo sapien
cagtgggggtgcgagtttgtcttta

SEQ ID NO: 2674867 - DNA, 25 bp, Homo sapien
gcccgagacacagcttggcacctct

SEQ ID NO: 2674868 - DNA, 25 bp, Homo sapien
cgccgccgcccgagacacagcttgg

SEQ ID NO: 2674869 - DNA, 25 bp, Homo sapien
cgagacacagcttggcacctcttcc

SEQ ID NO: 2674870 - DNA, 25 bp, Homo sapien
ccgcccgagacacagcttggcacct

SEQ ID NO: 2674871 - DNA, 25 bp, Homo sapien
aactcccggtgactgtgcagcgcgc

SEQ ID NO: 2674872 - DNA, 25 bp, Homo sapien
gtgcgtagcctgctgcgccgacgct

SEQ ID NO: 2674873 - DNA, 25 bp, Homo sapien
caccggccgccaaagtaacttggag

SEQ ID NO: 2674874 - DNA, 25 bp, Homo sapien
ggccggtgtatgtctccccgcggct

SEQ ID NO: 2674875 - DNA, 25 bp, Homo sapien
tgacatcggcccatccaggagttgg

SEQ ID NO: 2674876 - DNA, 25 bp, Homo sapien
tcggaaggcgatcggagactgacat

SEQ ID NO: 2674877 - DNA, 25 bp, Homo sapien
aacagttgggttggcgtcgtcttgc

SEQ ID NO: 2674878 - DNA, 25 bp, Homo sapien
ccggaagacgcgaagagccaaactt

SEQ ID NO: 2674879 - DNA, 25 bp, Homo sapien
tcccgcgcaacacgcccgggcggag

SEQ ID NO: 2674880 - DNA, 25 bp, Homo sapien
ccgcgtcccgcgcaacacgcccggg

SEQ ID NO: 2674881 - DNA, 25 bp, Homo sapien
cgcccgtcccgcgtcccgcgcaaca

SEQ ID NO: 2674882 - DNA, 25 bp, Homo sapien
cccgtcccgcgtcccgcgcaacacg

SEQ ID NO: 2674883 - DNA, 25 bp, Homo sapien
tgggcgcgggctggcggcacctccc

SEQ ID NO: 2674884 - DNA, 25 bp, Homo sapien
gcgggctggcggcacctccccctgc

SEQ ID NO: 2674885 - DNA, 25 bp, Homo sapien
gcacctccccctgcttcgtccggag

SEQ ID NO: 2674886 - DNA, 25 bp, Homo sapien
cggcagcagcgctggctgggcgcgg

SEQ ID NO: 2674887 - DNA, 25 bp, Homo sapien
ggtcatagccctagatttcccatca

SEQ ID NO: 2674888 - DNA, 25 bp, Homo sapien
taaacagctctgaagcgcctggaaa

SEQ ID NO: 2674889 - DNA, 25 bp, Homo sapien
ggcgtctggacgcttctaaacagct

SEQ ID NO: 2674890 - DNA, 25 bp, Homo sapien
attcaacccggcctgagcggcaggc

SEQ ID NO: 2674891 - DNA, 25 bp, Homo sapien
tagccaagagcccataacatccagg

SEQ ID NO: 2674892 - DNA, 25 bp, Homo sapien
ccaagagcccataacatccaggtac

SEQ ID NO: 2674893 - DNA, 25 bp, Homo sapien
ttttagccaagagcccataacatcc

SEQ ID NO: 2674894 - DNA, 25 bp, Homo sapien
aacttttagccaagagcccataaca

SEQ ID NO: 2674895 - DNA, 25 bp, Homo sapien
gatcttagcttcttggagcttcaga

SEQ ID NO: 2674896 - DNA, 25 bp, Homo sapien
gactgaggaatttgatttgccagct

SEQ ID NO: 2674897 - DNA, 25 bp, Homo sapien
acagtttggtgataggatcttagct

SEQ ID NO: 2674898 - DNA, 25 bp, Homo sapien
aatagcagagttagcttaaatacca

SEQ ID NO: 2674899 - DNA, 25 bp, Homo sapien
gataactagatcagggatagaaaag

SEQ ID NO: 2674900 - DNA, 25 bp, Homo sapien
aagagataactagatcagggataga

SEQ ID NO: 2674901 - DNA, 25 bp, Homo sapien
gagataactagatcagggatagaaa

SEQ ID NO: 2674902 - DNA, 25 bp, Homo sapien
aactagatcagggatagaaaaggag

SEQ ID NO: 2674903 - DNA, 25 bp, Homo sapien
ttttcccagactcgaaaaatactga

SEQ ID NO: 2674904 - DNA, 25 bp, Homo sapien
ctgcagtaggagaacaatttttccc

SEQ ID NO: 2674905 - DNA, 25 bp, Homo sapien
cagactcgaaaaatactgacaccaa

SEQ ID NO: 2674906 - DNA, 25 bp, Homo sapien
tataaatctgcagtaggagaacaat

SEQ ID NO: 2674907 - DNA, 25 bp, Homo sapien
gccttttgtataaccctgagatctc

SEQ ID NO: 2674908 - DNA, 25 bp, Homo sapien
gagagtcacttgactgtccctccct

SEQ ID NO: 2674909 - DNA, 25 bp, Homo sapien
tttgtataaccctgagatctcgttc

SEQ ID NO: 2674910 - DNA, 25 bp, Homo sapien
ttccaaatctttgagagtcacttga

SEQ ID NO: 2674911 - DNA, 25 bp, Homo sapien
ggctgaatacctctatctgttgcat

SEQ ID NO: 2674912 - DNA, 25 bp, Homo sapien
ccaggaggccaattcaggataatct

SEQ ID NO: 2674913 - DNA, 25 bp, Homo sapien
tatggatcggaaatatggctagccc

SEQ ID NO: 2674914 - DNA, 25 bp, Homo sapien
ttccaggagccaatttgtgacaaga

SEQ ID NO: 2674915 - DNA, 25 bp, Homo sapien
gagtaattcttcatgggtcatctgt

SEQ ID NO: 2674916 - DNA, 25 bp, Homo sapien
ttcatgggtcatctgtatctccagc

SEQ ID NO: 2674917 - DNA, 25 bp, Homo sapien
tcttcatgggtcatctgtatctcca

SEQ ID NO: 2674918 - DNA, 25 bp, Homo sapien
catgggtcatctgtatctccagctt

SEQ ID NO: 2674919 - DNA, 25 bp, Homo sapien
gccctcctccttgttgttgtgtcca

SEQ ID NO: 2674920 - DNA, 25 bp, Homo sapien
tggtttcgtcctccatgccctcctc

SEQ ID NO: 2674921 - DNA, 25 bp, Homo sapien
tgtccatcacgcagggccacgttcc

SEQ ID NO: 2674922 - DNA, 25 bp, Homo sapien
gccacgttcccattgatcacagcgt

SEQ ID NO: 2674923 - DNA, 25 bp, Homo sapien
ggcagatttcgcacaaaacacggag

SEQ ID NO: 2674924 - DNA, 25 bp, Homo sapien
acgacgactgaacgattttccgtca

SEQ ID NO: 2674925 - DNA, 25 bp, Homo sapien
ccgtgacgtggagtcagattcagca

SEQ ID NO: 2674926 - DNA, 25 bp, Homo sapien
ttccgtcatctccataatttattat

SEQ ID NO: 2674927 - DNA, 25 bp, Homo sapien
tatcttcagcatcgcttgtgcatga

SEQ ID NO: 2674928 - DNA, 25 bp, Homo sapien
tcaagccaacacagcctgtgtgctt

SEQ ID NO: 2674929 - DNA, 25 bp, Homo sapien
aagccaacacagcctgtgtgcttct

SEQ ID NO: 2674930 - DNA, 25 bp, Homo sapien
tttgcatcatgtacacagactttcg

SEQ ID NO: 2674931 - DNA, 25 bp, Homo sapien
ttgcatcatgtacacagactttcgt

SEQ ID NO: 2674932 - DNA, 25 bp, Homo sapien
gagctgttcttctgccatataattc

SEQ ID NO: 2674933 - DNA, 25 bp, Homo sapien
tgagctgttcttctgccatataatt

SEQ ID NO: 2674934 - DNA, 25 bp, Homo sapien
tggtggtgatgttagaaatttcacc

SEQ ID NO: 2674935 - DNA, 25 bp, Homo sapien
aaatttcacctttctctgcttcctg

SEQ ID NO: 2674936 - DNA, 25 bp, Homo sapien
ctggtggtgatgttagaaatttcac

SEQ ID NO: 2674937 - DNA, 25 bp, Homo sapien
cctttctctgcttcctgtgagccat

SEQ ID NO: 2674938 - DNA, 25 bp, Homo sapien
tcgtctgagggtcatacataaatct

SEQ ID NO: 2674939 - DNA, 25 bp, Homo sapien
aatctcatcagttgtagatgtaaca

SEQ ID NO: 2674940 - DNA, 25 bp, Homo sapien
tattttggttcgtctgagggtcata

SEQ ID NO: 2674941 - DNA, 25 bp, Homo sapien
tcattgatcttgatattttggttcg

SEQ ID NO: 2674942 - DNA, 25 bp, Homo sapien
gcatgaagaatataatttgcagggt

SEQ ID NO: 2674943 - DNA, 25 bp, Homo sapien
ctgcatgaagaatataatttgcagg

SEQ ID NO: 2674944 - DNA, 25 bp, Homo sapien
catgaagaatataatttgcagggtc

SEQ ID NO: 2674945 - DNA, 25 bp, Homo sapien
tgcatgaagaatataatttgcaggg

SEQ ID NO: 2674946 - DNA, 25 bp, Homo sapien
gataaaccacataatgtctaccatg

SEQ ID NO: 2674947 - DNA, 25 bp, Homo sapien
ccacatcatcatcaaatttacacca

SEQ ID NO: 2674948 - DNA, 25 bp, Homo sapien
tgattatctctactatgaaccagga

SEQ ID NO: 2674949 - DNA, 25 bp, Homo sapien
tacaccatttgccatcccctttggg

SEQ ID NO: 2674950 - DNA, 25 bp, Homo sapien
tagtgcagcgtcggacagacaggtt

SEQ ID NO: 2674951 - DNA, 25 bp, Homo sapien
tataggctaacacgtaagcattagt

SEQ ID NO: 2674952 - DNA, 25 bp, Homo sapien
ttgattccctgatataggctaacac

SEQ ID NO: 2674953 - DNA, 25 bp, Homo sapien
ttgtgctcaattacttcctttctag

SEQ ID NO: 2674954 - DNA, 25 bp, Homo sapien
ctggaatatcatggttggtgactac

SEQ ID NO: 2674955 - DNA, 25 bp, Homo sapien
tgtccaccttctgagcgttgatcct

SEQ ID NO: 2674956 - DNA, 25 bp, Homo sapien
tctcttcttagagtcgttccaccaa

SEQ ID NO: 2674957 - DNA, 25 bp, Homo sapien
caccttctgagcgttgatccttttc

SEQ ID NO: 2674958 - DNA, 25 bp, Homo sapien
atggacttcctgccattctgtccac

SEQ ID NO: 2674959 - DNA, 25 bp, Homo sapien
catttccctggtggccacaaaactg

SEQ ID NO: 2674960 - DNA, 25 bp, Homo sapien
tccctggtggccacaaaactggtcc

SEQ ID NO: 2674961 - DNA, 25 bp, Homo sapien
ttccctggtggccacaaaactggtc

SEQ ID NO: 2674962 - DNA, 25 bp, Homo sapien
gtcatttccctggtggccacaaaac

SEQ ID NO: 2674963 - DNA, 25 bp, Homo sapien
tcttcaatactttgaacacagtata

SEQ ID NO: 2674964 - DNA, 25 bp, Homo sapien
aagtgaggagttcttcaatactttg

SEQ ID NO: 2674965 - DNA, 25 bp, Homo sapien
agcaagtgaggagttcttcaatact

SEQ ID NO: 2674966 - DNA, 25 bp, Homo sapien
tcagcaagtgaggagttcttcaata

SEQ ID NO: 2674967 - DNA, 25 bp, Homo sapien
tactccttgcttgcatgggccacaa

SEQ ID NO: 2674968 - DNA, 25 bp, Homo sapien
cattactccttgcttgcatgggcca

SEQ ID NO: 2674969 - DNA, 25 bp, Homo sapien
actccttgcttgcatgggccacaat

SEQ ID NO: 2674970 - DNA, 25 bp, Homo sapien
ttactccttgcttgcatgggccaca

SEQ ID NO: 2674971 - DNA, 25 bp, Homo sapien
gatattggtgtgtagatatgcccac

SEQ ID NO: 2674972 - DNA, 25 bp, Homo sapien
tattggtgtgtagatatgcccacag

SEQ ID NO: 2674973 - DNA, 25 bp, Homo sapien
atattggtgtgtagatatgcccaca

SEQ ID NO: 2674974 - DNA, 25 bp, Homo sapien
taacttcctcatagaggataaggct

SEQ ID NO: 2674975 - DNA, 25 bp, Homo sapien
actgggagcaagtcacgtatttcac

SEQ ID NO: 2674976 - DNA, 25 bp, Homo sapien
taaattcagtttaacttcctcatag

SEQ ID NO: 2674977 - DNA, 25 bp, Homo sapien
tgaataaatcctgctctgttacaca

SEQ ID NO: 2674978 - DNA, 25 bp, Homo sapien
tcctccaaagcgtcctctcaaagtg

SEQ ID NO: 2674979 - DNA, 25 bp, Homo sapien
ttgagtttggctacaaatgattctt

SEQ ID NO: 2674980 - DNA, 25 bp, Homo sapien
tccctaagagctctttcatccctgc

SEQ ID NO: 2674981 - DNA, 25 bp, Homo sapien
ctgaagtgtcctcactttgccattg

SEQ ID NO: 2674982 - DNA, 25 bp, Homo sapien
gtctttgttgctgttggctttcctt

SEQ ID NO: 2674983 - DNA, 25 bp, Homo sapien
tattgtattgttggtgggggtggtc

SEQ ID NO: 2674984 - DNA, 25 bp, Homo sapien
tcatattgtattgttggtgggggtg

SEQ ID NO: 2674985 - DNA, 25 bp, Homo sapien
ctttgttgctgttggctttccttct

SEQ ID NO: 2674986 - DNA, 25 bp, Homo sapien
tttagcttcagagcactatagtctc

SEQ ID NO: 2674987 - DNA, 25 bp, Homo sapien
tcaaagcccttttagcttcagagca

SEQ ID NO: 2674988 - DNA, 25 bp, Homo sapien
cccttttagcttcagagcactatag

SEQ ID NO: 2674989 - DNA, 25 bp, Homo sapien
gcttcagagcactatagtctccatg

SEQ ID NO: 2674990 - DNA, 25 bp, Homo sapien
tcccagatgtcaaagacgtgctgca

SEQ ID NO: 2674991 - DNA, 25 bp, Homo sapien
tgtcccagatgtcaaagacgtgctg

SEQ ID NO: 2674992 - DNA, 25 bp, Homo sapien
gatgtcaaagacgtgctgcagatat

SEQ ID NO: 2674993 - DNA, 25 bp, Homo sapien
aaagacgtgctgcagatatcaggga

SEQ ID NO: 2674994 - DNA, 25 bp, Homo sapien
tgtcaccttcgataccatccagtct

SEQ ID NO: 2674995 - DNA, 25 bp, Homo sapien
ggaagtatgtacctagctgaagaaa

SEQ ID NO: 2674996 - DNA, 25 bp, Homo sapien
tgttgaagttgtgaaggaagtatgt

SEQ ID NO: 2674997 - DNA, 25 bp, Homo sapien
gaaatgtcaccttcgataccatcca

SEQ ID NO: 2674998 - DNA, 25 bp, Homo sapien
agcaccactttctgtctacggcaag

SEQ ID NO: 2674999 - DNA, 25 bp, Homo sapien
tctttgctctggatatgctgaaact

SEQ ID NO: 2675000 - DNA, 25 bp, Homo sapien
ggatatgctgaaacttgtgatgtga

SEQ ID NO: 2675001 - DNA, 25 bp, Homo sapien
gagcaggattgtccccgttctaccc

SEQ ID NO: 2675002 - DNA, 25 bp, Homo sapien
gataaattgtgcaagtttggttcag

SEQ ID NO: 2675003 - DNA, 25 bp, Homo sapien
tggtgatatattgtggcccttgaag

SEQ ID NO: 2675004 - DNA, 25 bp, Homo sapien
tatggctgaccgaccctcaaaaata

SEQ ID NO: 2675005 - DNA, 25 bp, Homo sapien
caaaaatagacactgtgatggtgat

SEQ ID NO: 2675006 - DNA, 25 bp, Homo sapien
gataaaactaccatgtgtagaagag

SEQ ID NO: 2675007 - DNA, 25 bp, Homo sapien
cagtttgtcagaagatagtatcaca

SEQ ID NO: 2675008 - DNA, 25 bp, Homo sapien
gaagatagtatcacatcaatgccaa

SEQ ID NO: 2675009 - DNA, 25 bp, Homo sapien
gccgcattgggccatggcaacacta

SEQ ID NO: 2675010 - DNA, 25 bp, Homo sapien
caatgccaaatatctgagtggtggg

SEQ ID NO: 2675011 - DNA, 25 bp, Homo sapien
tggatgtagctccattgtcaatggc

SEQ ID NO: 2675012 - DNA, 25 bp, Homo sapien
tcttccgttggatgtagctccattg

SEQ ID NO: 2675013 - DNA, 25 bp, Homo sapien
cttctctcttccgttggatgtagct

SEQ ID NO: 2675014 - DNA, 25 bp, Homo sapien
tccgttggatgtagctccattgtca

SEQ ID NO: 2675015 - DNA, 25 bp, Homo sapien
gatactttgtctcatgatctctgcc

SEQ ID NO: 2675016 - DNA, 25 bp, Homo sapien
cctgggacattcataggaccagtgc

SEQ ID NO: 2675017 - DNA, 25 bp, Homo sapien
tctacagttggcatttgaagtcttc

SEQ ID NO: 2675018 - DNA, 25 bp, Homo sapien
gccttctctgctatcctgggacatt

SEQ ID NO: 2675019 - DNA, 25 bp, Homo sapien
gatttctaaagtgactgatcttgtc

SEQ ID NO: 2675020 - DNA, 25 bp, Homo sapien
atttctaaagtgactgatcttgtct

SEQ ID NO: 2675021 - DNA, 25 bp, Homo sapien
gctgctccacctgactgcatggagc

SEQ ID NO: 2675022 - DNA, 25 bp, Homo sapien
cctgtggcatttgggcggtccttag

SEQ ID NO: 2675023 - DNA, 25 bp, Homo sapien
ctccacctgactgcatggagcctgt

SEQ ID NO: 2675024 - DNA, 25 bp, Homo sapien
taccttggttacccggctctgtagc

SEQ ID NO: 2675025 - DNA, 25 bp, Homo sapien
tgtgagagaaactggaccacctgtg

SEQ ID NO: 2675026 - DNA, 25 bp, Homo sapien
ttgtagatcaaagcaaaggcactgt

SEQ ID NO: 2675027 - DNA, 25 bp, Homo sapien
tgccgtgtcacccatagtcatgaag

SEQ ID NO: 2675028 - DNA, 25 bp, Homo sapien
tgttaacatgacaaggcccaaaaga

SEQ ID NO: 2675029 - DNA, 25 bp, Homo sapien
tgtgtagtaggagagctagcctcac

SEQ ID NO: 2675030 - DNA, 25 bp, Homo sapien
aaaaatagggttctagcccagccag

SEQ ID NO: 2675031 - DNA, 25 bp, Homo sapien
tcgatgacaagtggaacctgccaac

SEQ ID NO: 2675032 - DNA, 25 bp, Homo sapien
taagcatggagtgacagacgttgca

SEQ ID NO: 2675033 - DNA, 25 bp, Homo sapien
taggcccttggagtgatgaccttgg

SEQ ID NO: 2675034 - DNA, 25 bp, Homo sapien
ctaacatgaccagaggaagggctag

SEQ ID NO: 2675035 - DNA, 25 bp, Homo sapien
taatcatcccacgtgaaagggcagg

SEQ ID NO: 2675036 - DNA, 25 bp, Homo sapien
tgatctaaacaagccacccagaatg

SEQ ID NO: 2675037 - DNA, 25 bp, Homo sapien
cttcaccagtgaagcaagcattgct

SEQ ID NO: 2675038 - DNA, 25 bp, Homo sapien
gatttcctgtgcaactgccctgtcc

SEQ ID NO: 2675039 - DNA, 25 bp, Homo sapien
ctggcacctggtgccatagctcttc

SEQ ID NO: 2675040 - DNA, 25 bp, Homo sapien
caaactttatccattgggctaaatc

SEQ ID NO: 2675041 - DNA, 25 bp, Homo sapien
acctggaagctttttgcctctagcc

SEQ ID NO: 2675042 - DNA, 25 bp, Homo sapien
ctacaaacctggaagctttttgcct

SEQ ID NO: 2675043 - DNA, 25 bp, Homo sapien
caaacctggaagctttttgcctcta

SEQ ID NO: 2675044 - DNA, 25 bp, Homo sapien
aaacctggaagctttttgcctctag

SEQ ID NO: 2675045 - DNA, 25 bp, Homo sapien
tgcagtgccaagcatagagcctatc

SEQ ID NO: 2675046 - DNA, 25 bp, Homo sapien
taaggcatctcagggcatcagtcta

SEQ ID NO: 2675047 - DNA, 25 bp, Homo sapien
tatggctctaactaaaactctggga

SEQ ID NO: 2675048 - DNA, 25 bp, Homo sapien
taagaacagcactgatgacctctgg

SEQ ID NO: 2675049 - DNA, 25 bp, Homo sapien
tagtggacagatccctctgggtgga

SEQ ID NO: 2675050 - DNA, 25 bp, Homo sapien
cagcatagtggacagatgactcccc

SEQ ID NO: 2675051 - DNA, 25 bp, Homo sapien
tctttcagggaaggacttgccaccc

SEQ ID NO: 2675052 - DNA, 25 bp, Homo sapien
ccagtgtgctgtaccgtgaatttcc

SEQ ID NO: 2675053 - DNA, 25 bp, Homo sapien
catcggatcctgtgcaatgccactg

SEQ ID NO: 2675054 - DNA, 25 bp, Homo sapien
ccttcccagagggacgtagggccag

SEQ ID NO: 2675055 - DNA, 25 bp, Homo sapien
aatgccactgccctgtttcatgagg

SEQ ID NO: 2675056 - DNA, 25 bp, Homo sapien
tggagggaatgaccacatcggatcc

SEQ ID NO: 2675057 - DNA, 25 bp, Homo sapien
gacatttgtgctgtcaactctgagg

SEQ ID NO: 2675058 - DNA, 25 bp, Homo sapien
gagggtcagcaatccctgactcaac

SEQ ID NO: 2675059 - DNA, 25 bp, Homo sapien
tgaattttcagtggcatgtggacca

SEQ ID NO: 2675060 - DNA, 25 bp, Homo sapien
tgactcaacgcatcttcatgcagat

SEQ ID NO: 2675061 - DNA, 25 bp, Homo sapien
cccactcagcactgccaggttggga

SEQ ID NO: 2675062 - DNA, 25 bp, Homo sapien
caggataagccctcttctaagaaca

SEQ ID NO: 2675063 - DNA, 25 bp, Homo sapien
agagctacaggataagccctcttct

SEQ ID NO: 2675064 - DNA, 25 bp, Homo sapien
gctacaggataagccctcttctaag

SEQ ID NO: 2675065 - DNA, 25 bp, Homo sapien
tgctgggtcagcaggtaaagtgatg

SEQ ID NO: 2675066 - DNA, 25 bp, Homo sapien
ctgggcatgatcttcaaacaaagaa

SEQ ID NO: 2675067 - DNA, 25 bp, Homo sapien
tcaaaacctcttcgaagaatacaga

SEQ ID NO: 2675068 - DNA, 25 bp, Homo sapien
aacctcttcgaagaatacagagact

SEQ ID NO: 2675069 - DNA, 25 bp, Homo sapien
agagactcatccgataatgtgataa

SEQ ID NO: 2675070 - DNA, 25 bp, Homo sapien
aatacagagactcatccgataatgt

SEQ ID NO: 2675071 - DNA, 25 bp, Homo sapien
taagcgccatgagtattcttcccat

SEQ ID NO: 2675072 - DNA, 25 bp, Homo sapien
atcccaatcggttaggaaaatctag

SEQ ID NO: 2675073 - DNA, 25 bp, Homo sapien
gagtattcttcccataactaaatgg

SEQ ID NO: 2675074 - DNA, 25 bp, Homo sapien
aaaatctagtcagtaagcgccatga

SEQ ID NO: 2675075 - DNA, 25 bp, Homo sapien
tagatcgtttcctgacagagaagcc

SEQ ID NO: 2675076 - DNA, 25 bp, Homo sapien
tgtatcctcgggtggccaacttgct

SEQ ID NO: 2675077 - DNA, 25 bp, Homo sapien
tcctggccagctcacgaaagttaat

SEQ ID NO: 2675078 - DNA, 25 bp, Homo sapien
tcttccaggccactaaggtagcatg

SEQ ID NO: 2675079 - DNA, 25 bp, Homo sapien
cacccatgtgcgcagagaaaatgtg

SEQ ID NO: 2675080 - DNA, 25 bp, Homo sapien
cctggctttctagacagagggagga

SEQ ID NO: 2675081 - DNA, 25 bp, Homo sapien
gattcagtaaacctgggtcaaacca

SEQ ID NO: 2675082 - DNA, 25 bp, Homo sapien
tatgtgactgtaccttccctggctt

SEQ ID NO: 2675083 - DNA, 25 bp, Homo sapien
agcaggtggcatgcagtttgctgtc

SEQ ID NO: 2675084 - DNA, 25 bp, Homo sapien
gctatggtgatacaatctttgcttc

SEQ ID NO: 2675085 - DNA, 25 bp, Homo sapien
cagttctaattgattagcaggtggc

SEQ ID NO: 2675086 - DNA, 25 bp, Homo sapien
ttcttgagcttgcaaacagttctaa

SEQ ID NO: 2675087 - DNA, 25 bp, Homo sapien
ttaaatctgccaaggtagaaggtgg

SEQ ID NO: 2675088 - DNA, 25 bp, Homo sapien
ttctaatgtagcatcatcaatagtt

SEQ ID NO: 2675089 - DNA, 25 bp, Homo sapien
tcaagaatagttgttaaatctgcca

SEQ ID NO: 2675090 - DNA, 25 bp, Homo sapien
caaattcaagaatagttgttaaatc

SEQ ID NO: 2675091 - DNA, 25 bp, Homo sapien
tggcaggccatcgtccagatgccca

SEQ ID NO: 2675092 - DNA, 25 bp, Homo sapien
tattaggacattagtggcaggccat

SEQ ID NO: 2675093 - DNA, 25 bp, Homo sapien
caccacatgatgacagcctttctag

SEQ ID NO: 2675094 - DNA, 25 bp, Homo sapien
tctagtgtgtgcctgccatttatta

SEQ ID NO: 2675095 - DNA, 25 bp, Homo sapien
taattggattgtaaggtactttcat

SEQ ID NO: 2675096 - DNA, 25 bp, Homo sapien
gagtttccccaattagccagccatc

SEQ ID NO: 2675097 - DNA, 25 bp, Homo sapien
attggattgtaaggtactttcatga

SEQ ID NO: 2675098 - DNA, 25 bp, Homo sapien
agtttccccaattagccagccatcc

SEQ ID NO: 2675099 - DNA, 25 bp, Homo sapien
cagccgtagttcttgaaaaatgcca

SEQ ID NO: 2675100 - DNA, 25 bp, Homo sapien
tctacagtcctgagactgtggatca

SEQ ID NO: 2675101 - DNA, 25 bp, Homo sapien
taggcaacatgaggcttctacagtc

SEQ ID NO: 2675102 - DNA, 25 bp, Homo sapien
tccagtgtgctcagtttaggcaaca

SEQ ID NO: 2675103 - DNA, 25 bp, Homo sapien
caggtagtttttcttgccgtcagag

SEQ ID NO: 2675104 - DNA, 25 bp, Homo sapien
ttggcaaaacaggtgaaggccgtgg

SEQ ID NO: 2675105 - DNA, 25 bp, Homo sapien
acctgcagggaacttggcaaaacag

SEQ ID NO: 2675106 - DNA, 25 bp, Homo sapien
gcttttctaacacggggagcacctg

SEQ ID NO: 2675107 - DNA, 25 bp, Homo sapien
tgagggcacctttgaacattgtcca

SEQ ID NO: 2675108 - DNA, 25 bp, Homo sapien
ctgaagccccagttcagtgagctgg

SEQ ID NO: 2675109 - DNA, 25 bp, Homo sapien
tagagaaagtgtgggtgccaggccc

SEQ ID NO: 2675110 - DNA, 25 bp, Homo sapien
cacccattcagggagcgcatgagga

SEQ ID NO: 2675111 - DNA, 25 bp, Homo sapien
caagcttgctctaaaacaaggctga

SEQ ID NO: 2675112 - DNA, 25 bp, Homo sapien
gaaaaggctagctttgctctgcata

SEQ ID NO: 2675113 - DNA, 25 bp, Homo sapien
tcctagactgcatgtggtccacagg

SEQ ID NO: 2675114 - DNA, 25 bp, Homo sapien
taaggcacgtttagctcttctgtgg

SEQ ID NO: 2675115 - DNA, 25 bp, Homo sapien
aactgtggaacaaattcaaggttat

SEQ ID NO: 2675116 - DNA, 25 bp, Homo sapien
caaaactgtggaacaaattcaaggt

SEQ ID NO: 2675117 - DNA, 25 bp, Homo sapien
tgtggaacaaattcaaggttatatc

SEQ ID NO: 2675118 - DNA, 25 bp, Homo sapien
tcaaaactgtggaacaaattcaagg

SEQ ID NO: 2675119 - DNA, 25 bp, Homo sapien
ctttagctttgaacaggatccagtc

SEQ ID NO: 2675120 - DNA, 25 bp, Homo sapien
acaggatccagtccataggattcat

SEQ ID NO: 2675121 - DNA, 25 bp, Homo sapien
ggcctttagctttgaacaggatcca

SEQ ID NO: 2675122 - DNA, 25 bp, Homo sapien
aaggcctttagctttgaacaggatc

SEQ ID NO: 2675123 - DNA, 25 bp, Homo sapien
tgtgtttgttcattggtttttctcc

SEQ ID NO: 2675124 - DNA, 25 bp, Homo sapien
tcattggtttttctcccctccgcat

SEQ ID NO: 2675125 - DNA, 25 bp, Homo sapien
ttcattggtttttctcccctccgca

SEQ ID NO: 2675126 - DNA, 25 bp, Homo sapien
cacttctttgggatggacccgagag

SEQ ID NO: 2675127 - DNA, 25 bp, Homo sapien
gacccgagaggatatggttttattc

SEQ ID NO: 2675128 - DNA, 25 bp, Homo sapien
ttttattctctgaattttctggtaa

SEQ ID NO: 2675129 - DNA, 25 bp, Homo sapien
tctttgggatggacccgagaggata

SEQ ID NO: 2675130 - DNA, 25 bp, Homo sapien
ccaaccagggtttcatagcatctat

SEQ ID NO: 2675131 - DNA, 25 bp, Homo sapien
tattcattgtttggcctgaccagag

SEQ ID NO: 2675132 - DNA, 25 bp, Homo sapien
catcctaagggtattcaaaagctct

SEQ ID NO: 2675133 - DNA, 25 bp, Homo sapien
gtctcagctatcagcatcaattcag

SEQ ID NO: 2675134 - DNA, 25 bp, Homo sapien
tattaagatggtaattcgcctccgg

SEQ ID NO: 2675135 - DNA, 25 bp, Homo sapien
tgagagtcgatgtttgttataagga

SEQ ID NO: 2675136 - DNA, 25 bp, Homo sapien
caaatcctaccagtctcggagaaga

SEQ ID NO: 2675137 - DNA, 25 bp, Homo sapien
tcgcctccggaagtctgagactgag

SEQ ID NO: 2675138 - DNA, 25 bp, Homo sapien
tacgtatcgtccagacatagccaca

SEQ ID NO: 2675139 - DNA, 25 bp, Homo sapien
tcacctgggactctgatactttacg

SEQ ID NO: 2675140 - DNA, 25 bp, Homo sapien
tagagggcagatatttaaccaccat

SEQ ID NO: 2675141 - DNA, 25 bp, Homo sapien
ctaatacgaggcagcaaaatcaccc

SEQ ID NO: 2675142 - DNA, 25 bp, Homo sapien
tcaagtataaggaggtaagatccac

SEQ ID NO: 2675143 - DNA, 25 bp, Homo sapien
caggtaatcgaaagcaatggtgtcc

SEQ ID NO: 2675144 - DNA, 25 bp, Homo sapien
gaattgccacacgttataagtccag

SEQ ID NO: 2675145 - DNA, 25 bp, Homo sapien
catagatacaggcattaccctggct

SEQ ID NO: 2675146 - DNA, 25 bp, Homo sapien
ataacttttaagaacgctcctgatg

SEQ ID NO: 2675147 - DNA, 25 bp, Homo sapien
agttggtttggaatgccactgtgca

SEQ ID NO: 2675148 - DNA, 25 bp, Homo sapien
taaaagttggtttggaatgccactg

SEQ ID NO: 2675149 - DNA, 25 bp, Homo sapien
taagaacgctcctgatgtcttcaaa

SEQ ID NO: 2675150 - DNA, 25 bp, Homo sapien
acttattcactataactttgccatg

SEQ ID NO: 2675151 - DNA, 25 bp, Homo sapien
tataactaacttatgaaagaagtag

SEQ ID NO: 2675152 - DNA, 25 bp, Homo sapien
aaagcgctaccccatgagatctaat

SEQ ID NO: 2675153 - DNA, 25 bp, Homo sapien
ccaaatgtaagttgcatgccatgat

SEQ ID NO: 2675154 - DNA, 25 bp, Homo sapien
tgtctatcgtcacttatgctcattg

SEQ ID NO: 2675155 - DNA, 25 bp, Homo sapien
tatttggtgtcctgtaaaatcacag

SEQ ID NO: 2675156 - DNA, 25 bp, Homo sapien
cacagattatggtaggtaatgaacc

SEQ ID NO: 2675157 - DNA, 25 bp, Homo sapien
aggacaaaacctgaaagagctatat

SEQ ID NO: 2675158 - DNA, 25 bp, Homo sapien
atttcatcaaatgtttcaggtgcat

SEQ ID NO: 2675159 - DNA, 25 bp, Homo sapien
tatttcatcaaatgtttcaggtgca

SEQ ID NO: 2675160 - DNA, 25 bp, Homo sapien
ctgttgcttttcatatttcatcaaa

SEQ ID NO: 2675161 - DNA, 25 bp, Homo sapien
aagtaacctttctgttgcttttcat

SEQ ID NO: 2675162 - DNA, 25 bp, Homo sapien
taggacactcctattgcaagcgatg

SEQ ID NO: 2675163 - DNA, 25 bp, Homo sapien
cacaaacagtaacaaggtctcctag

SEQ ID NO: 2675164 - DNA, 25 bp, Homo sapien
cacatactaatgcatctctgctggg

SEQ ID NO: 2675165 - DNA, 25 bp, Homo sapien
tctttagggtttgaagcacatcaca

SEQ ID NO: 2675166 - DNA, 25 bp, Homo sapien
tgtaccacaggtctgaaccttgaga

SEQ ID NO: 2675167 - DNA, 25 bp, Homo sapien
ggagccagttctcaatccctgtaga

SEQ ID NO: 2675168 - DNA, 25 bp, Homo sapien
ggcctctgtcaggtctaatattcag

SEQ ID NO: 2675169 - DNA, 25 bp, Homo sapien
gagatgataactcctaaggcctctg

SEQ ID NO: 2675170 - DNA, 25 bp, Homo sapien
tccaggttgtgcaagatgggttgcc

SEQ ID NO: 2675171 - DNA, 25 bp, Homo sapien
gagagaacaagagtatcctgaggcg

SEQ ID NO: 2675172 - DNA, 25 bp, Homo sapien
tgcctctgaaatgccatcctgctga

SEQ ID NO: 2675173 - DNA, 25 bp, Homo sapien
agtgctcatagctgttcctccttag

SEQ ID NO: 2675174 - DNA, 25 bp, Homo sapien
ccatggaatatcagacacctgcctg

SEQ ID NO: 2675175 - DNA, 25 bp, Homo sapien
gttgtaaaattgtacgtgtattagc

SEQ ID NO: 2675176 - DNA, 25 bp, Homo sapien
tagttgtaaaattgtacgtgtatta

SEQ ID NO: 2675177 - DNA, 25 bp, Homo sapien
accatggaatatcagacacctgcct

SEQ ID NO: 2675178 - DNA, 25 bp, Homo sapien
tattctgactgcttgttactcattt

SEQ ID NO: 2675179 - DNA, 25 bp, Homo sapien
ttattctgactgcttgttactcatt

SEQ ID NO: 2675180 - DNA, 25 bp, Homo sapien
caaagcgatcgggtaatgtaataca

SEQ ID NO: 2675181 - DNA, 25 bp, Homo sapien
tcattagacgtcctctgtagatcct

SEQ ID NO: 2675182 - DNA, 25 bp, Homo sapien
tggtacccacaaaagccaaagcgat

SEQ ID NO: 2675183 - DNA, 25 bp, Homo sapien
gaatctgtccatgactttagactcc

SEQ ID NO: 2675184 - DNA, 25 bp, Homo sapien
tagcttttaatttgatctctttccc

SEQ ID NO: 2675185 - DNA, 25 bp, Homo sapien
ggtagcttttaatttgatctctttc

SEQ ID NO: 2675186 - DNA, 25 bp, Homo sapien
gtagcttttaatttgatctctttcc

SEQ ID NO: 2675187 - DNA, 25 bp, Homo sapien
aggtagcttttaatttgatctcttt

SEQ ID NO: 2675188 - DNA, 25 bp, Homo sapien
cacatgattgaagcccttatggaat

SEQ ID NO: 2675189 - DNA, 25 bp, Homo sapien
agatgattttgtgttagttagagga

SEQ ID NO: 2675190 - DNA, 25 bp, Homo sapien
caaacaacacgggattcaaactgtg

SEQ ID NO: 2675191 - DNA, 25 bp, Homo sapien
aaagtttatctgtttcacatgattg

SEQ ID NO: 2675192 - DNA, 25 bp, Homo sapien
gatgcttatgtttgacatacttctc

SEQ ID NO: 2675193 - DNA, 25 bp, Homo sapien
gacatacttctcttgcctttcatcc

SEQ ID NO: 2675194 - DNA, 25 bp, Homo sapien
aaagcccaaagcaggatgcttatgt

SEQ ID NO: 2675195 - DNA, 25 bp, Homo sapien
ttttaacttccagtgcaaagcccaa

SEQ ID NO: 2675196 - DNA, 25 bp, Homo sapien
caattacaatctttcacaagtgcca

SEQ ID NO: 2675197 - DNA, 25 bp, Homo sapien
cttttcagataaaggcaactttgag

SEQ ID NO: 2675198 - DNA, 25 bp, Homo sapien
gcctgaatcaccttttgaagccaaa

SEQ ID NO: 2675199 - DNA, 25 bp, Homo sapien
taatatcttcaaaacagcatgtggc

SEQ ID NO: 2675200 - DNA, 25 bp, Homo sapien
tgaagcaagtctaatgccagggcct

SEQ ID NO: 2675201 - DNA, 25 bp, Homo sapien
gctttggagccaatgggtgacccat

SEQ ID NO: 2675202 - DNA, 25 bp, Homo sapien
taataatgaatgcacactatgaagc

SEQ ID NO: 2675203 - DNA, 25 bp, Homo sapien
gccagggcctgatcaagcagtgctt

SEQ ID NO: 2675204 - DNA, 25 bp, Homo sapien
caataccatgcttcagaatttcccc

SEQ ID NO: 2675205 - DNA, 25 bp, Homo sapien
caatgacagtggtttgatgttaatc

SEQ ID NO: 2675206 - DNA, 25 bp, Homo sapien
tttccccaagagaacaaccattatg

SEQ ID NO: 2675207 - DNA, 25 bp, Homo sapien
tatgttttgaacaggacaatgacag

SEQ ID NO: 2675208 - DNA, 25 bp, Homo sapien
tctcttgaataatatcaggcccaat

SEQ ID NO: 2675209 - DNA, 25 bp, Homo sapien
tttgaccaattgaagaggagatgtt

SEQ ID NO: 2675210 - DNA, 25 bp, Homo sapien
cctttgaccaattgaagaggagatg

SEQ ID NO: 2675211 - DNA, 25 bp, Homo sapien
tatcaggcccaattgtactaggcat

SEQ ID NO: 2675212 - DNA, 25 bp, Homo sapien
gctgtatctcaggtgctaaatggac

SEQ ID NO: 2675213 - DNA, 25 bp, Homo sapien
tctatgtaatgtttcctatccagga

SEQ ID NO: 2675214 - DNA, 25 bp, Homo sapien
cagatttgtatatgacaatagactg

SEQ ID NO: 2675215 - DNA, 25 bp, Homo sapien
ctaaaattagcgaatgctgtatctc

SEQ ID NO: 2675216 - DNA, 25 bp, Homo sapien
aatgtcatttgtaagcggtaggcag

SEQ ID NO: 2675217 - DNA, 25 bp, Homo sapien
tcaggattgctatggcatgagggcc

SEQ ID NO: 2675218 - DNA, 25 bp, Homo sapien
cagccttgggtgtggatatattctc

SEQ ID NO: 2675219 - DNA, 25 bp, Homo sapien
ttgaatgtacggagtagaacctggg

SEQ ID NO: 2675220 - DNA, 25 bp, Homo sapien
tctgtctgattctagcagttctgag

SEQ ID NO: 2675221 - DNA, 25 bp, Homo sapien
tctgtgatgctcttgtgttcaggga

SEQ ID NO: 2675222 - DNA, 25 bp, Homo sapien
tatgaactttagagttctgtctgat

SEQ ID NO: 2675223 - DNA, 25 bp, Homo sapien
ttgtgttcagggaatacagttctgc

SEQ ID NO: 2675224 - DNA, 25 bp, Homo sapien
acctgtagcatgaactgccacttag

SEQ ID NO: 2675225 - DNA, 25 bp, Homo sapien
tccagaacctgtagcatgaactgcc

SEQ ID NO: 2675226 - DNA, 25 bp, Homo sapien
catgaactgccacttagtggcagcc

SEQ ID NO: 2675227 - DNA, 25 bp, Homo sapien
gtagcatgaactgccacttagtggc

SEQ ID NO: 2675228 - DNA, 25 bp, Homo sapien
aacactggagatgtgacagacaacc

SEQ ID NO: 2675229 - DNA, 25 bp, Homo sapien
tagagctgataaagtaagatccaca

SEQ ID NO: 2675230 - DNA, 25 bp, Homo sapien
ttaggagtttgattgacagattgtc

SEQ ID NO: 2675231 - DNA, 25 bp, Homo sapien
gtgtagtttgcttcattagagctga

SEQ ID NO: 2675232 - DNA, 25 bp, Homo sapien
tgctgtgatttctgctgaccattta

SEQ ID NO: 2675233 - DNA, 25 bp, Homo sapien
tgatttctgctgaccatttaggctt

SEQ ID NO: 2675234 - DNA, 25 bp, Homo sapien
atttctgctgaccatttaggctttc

SEQ ID NO: 2675235 - DNA, 25 bp, Homo sapien
tgtgatttctgctgaccatttaggc

SEQ ID NO: 2675236 - DNA, 25 bp, Homo sapien
aagctctccatagctatatttatct

SEQ ID NO: 2675237 - DNA, 25 bp, Homo sapien
gctctccatagctatatttatctct

SEQ ID NO: 2675238 - DNA, 25 bp, Homo sapien
ttgaagctctccatagctatattta

SEQ ID NO: 2675239 - DNA, 25 bp, Homo sapien
gaagctctccatagctatatttatc

SEQ ID NO: 2675240 - DNA, 25 bp, Homo sapien
cttctgatttagagtgatcatgttt

SEQ ID NO: 2675241 - DNA, 25 bp, Homo sapien
tttcacttggtgcaccacagtcctg

SEQ ID NO: 2675242 - DNA, 25 bp, Homo sapien
agtcctggttcgtgtatggcttaat

SEQ ID NO: 2675243 - DNA, 25 bp, Homo sapien
ctggttcgtgtatggcttaatgtca

SEQ ID NO: 2675244 - DNA, 25 bp, Homo sapien
ttagacatccacgcagacattgctg

SEQ ID NO: 2675245 - DNA, 25 bp, Homo sapien
tagacatccacgcagacattgctgc

SEQ ID NO: 2675246 - DNA, 25 bp, Homo sapien
gctgctgcttgatggccgtcttcca

SEQ ID NO: 2675247 - DNA, 25 bp, Homo sapien
cttgatggccgtcttccattgtgac

SEQ ID NO: 2675248 - DNA, 25 bp, Homo sapien
cataatagtgaagcttgttagaggg

SEQ ID NO: 2675249 - DNA, 25 bp, Homo sapien
gccatccatctgtaagtaggacata

SEQ ID NO: 2675250 - DNA, 25 bp, Homo sapien
tgtaaagtattaccaagcaggccct

SEQ ID NO: 2675251 - DNA, 25 bp, Homo sapien
tttgtgtgatagctcttggcagcca

SEQ ID NO: 2675252 - DNA, 25 bp, Homo sapien
gctggaacttgattggtaataatta

SEQ ID NO: 2675253 - DNA, 25 bp, Homo sapien
aattgctggaacttgattggtaata

SEQ ID NO: 2675254 - DNA, 25 bp, Homo sapien
gaaattgctggaacttgattggtaa

SEQ ID NO: 2675255 - DNA, 25 bp, Homo sapien
ttgctggaacttgattggtaataat

SEQ ID NO: 2675256 - DNA, 25 bp, Homo sapien
gagggcactggaatgcactaatgcg

SEQ ID NO: 2675257 - DNA, 25 bp, Homo sapien
ggaatgcactaatgcgtttagccta

SEQ ID NO: 2675258 - DNA, 25 bp, Homo sapien
gcactaatgcgtttagcctatcaat

SEQ ID NO: 2675259 - DNA, 25 bp, Homo sapien
atatagagggcactggaatgcacta

SEQ ID NO: 2675260 - DNA, 25 bp, Homo sapien
gaaaccgtgatggaaattgtcaaga

SEQ ID NO: 2675261 - DNA, 25 bp, Homo sapien
ctggataatgaaaccgtgatggaaa

SEQ ID NO: 2675262 - DNA, 25 bp, Homo sapien
taaatgacaggtaaccattgtaaca

SEQ ID NO: 2675263 - DNA, 25 bp, Homo sapien
actgaactggataatgaaaccgtga

SEQ ID NO: 2675264 - DNA, 25 bp, Homo sapien
ctctgtgcttttgtgagcataagta

SEQ ID NO: 2675265 - DNA, 25 bp, Homo sapien
tcactctgtgcttttgtgagcataa

SEQ ID NO: 2675266 - DNA, 25 bp, Homo sapien
tctgtgcttttgtgagcataagtat

SEQ ID NO: 2675267 - DNA, 25 bp, Homo sapien
cactctgtgcttttgtgagcataag

SEQ ID NO: 2675268 - DNA, 25 bp, Homo sapien
caaagttgtttcaagaagattaatc

SEQ ID NO: 2675269 - DNA, 25 bp, Homo sapien
tggagggccttgatagggaagctct

SEQ ID NO: 2675270 - DNA, 25 bp, Homo sapien
caaaaaggagttagaagggacagct

SEQ ID NO: 2675271 - DNA, 25 bp, Homo sapien
gaaggtgggagatttgatcaaagtt

SEQ ID NO: 2675272 - DNA, 25 bp, Homo sapien
agattgatcctgagcagcacagtct

SEQ ID NO: 2675273 - DNA, 25 bp, Homo sapien
cagatgtttgtgatgagagattgat

SEQ ID NO: 2675274 - DNA, 25 bp, Homo sapien
gatgagagattgatcctgagcagca

SEQ ID NO: 2675275 - DNA, 25 bp, Homo sapien
gagagattgatcctgagcagcacag

SEQ ID NO: 2675276 - DNA, 25 bp, Homo sapien
tcactctacttcccctagtcttgtg

SEQ ID NO: 2675277 - DNA, 25 bp, Homo sapien
gtcttgtggtttatacataaagagt

SEQ ID NO: 2675278 - DNA, 25 bp, Homo sapien
gatattgaacatggaaggggtccca

SEQ ID NO: 2675279 - DNA, 25 bp, Homo sapien
catggaaggggtcccatttctaaat

SEQ ID NO: 2675280 - DNA, 25 bp, Homo sapien
cctcagtccactctgaatgtttatc

SEQ ID NO: 2675281 - DNA, 25 bp, Homo sapien
cacacttgtttgtaaattgtggttt

SEQ ID NO: 2675282 - DNA, 25 bp, Homo sapien
aactctattttatctggtctctaac

SEQ ID NO: 2675283 - DNA, 25 bp, Homo sapien
tttgcttatattatcctcagtccac

SEQ ID NO: 2675284 - DNA, 25 bp, Homo sapien
gaagagtctcttaagcacatggtgc

SEQ ID NO: 2675285 - DNA, 25 bp, Homo sapien
tatccgtatccaaaagagtgaaact

SEQ ID NO: 2675286 - DNA, 25 bp, Homo sapien
gtcaatggaaaaggatcgagcgtcc

SEQ ID NO: 2675287 - DNA, 25 bp, Homo sapien
ggacaactgaagagccgtaactatc

SEQ ID NO: 2675288 - DNA, 25 bp, Homo sapien
tctggaatgggagtatccactgtgg

SEQ ID NO: 2675289 - DNA, 25 bp, Homo sapien
taatgctgggagttcttgtcctacc

SEQ ID NO: 2675290 - DNA, 25 bp, Homo sapien
tccaagactattaaggagcatggtc

SEQ ID NO: 2675291 - DNA, 25 bp, Homo sapien
cagctcagagggttgagaaaactac

SEQ ID NO: 2675292 - DNA, 25 bp, Homo sapien
tgacgatttgtgagatcgtggtgca

SEQ ID NO: 2675293 - DNA, 25 bp, Homo sapien
ttcagtgacgatttgtgagatcgtg

SEQ ID NO: 2675294 - DNA, 25 bp, Homo sapien
gagttcttcagtgacgatttgtgag

SEQ ID NO: 2675295 - DNA, 25 bp, Homo sapien
gagtgagttcttcagtgacgatttg

SEQ ID NO: 2675296 - DNA, 25 bp, Homo sapien
atctgagggttatctttctctttgt

SEQ ID NO: 2675297 - DNA, 25 bp, Homo sapien
tctgagggttatctttctctttgtc

SEQ ID NO: 2675298 - DNA, 25 bp, Homo sapien
gaatctgagggttatctttctcttt

SEQ ID NO: 2675299 - DNA, 25 bp, Homo sapien
aatctgagggttatctttctctttg

SEQ ID NO: 2675300 - DNA, 25 bp, Homo sapien
caccttcacttcacaagagtcctta

SEQ ID NO: 2675301 - DNA, 25 bp, Homo sapien
ttgccgtttcctccctttcctatgc

SEQ ID NO: 2675302 - DNA, 25 bp, Homo sapien
cctgattggaatgatcggtctggga

SEQ ID NO: 2675303 - DNA, 25 bp, Homo sapien
taaaatgcgagactgtgtgataccg

SEQ ID NO: 2675304 - DNA, 25 bp, Homo sapien
ccttgtaatacgatgttgcctggca

SEQ ID NO: 2675305 - DNA, 25 bp, Homo sapien
tagcaaacttgtgcaaaagtcctgg

SEQ ID NO: 2675306 - DNA, 25 bp, Homo sapien
tgaatgttgtgtagatcatcaaggt

SEQ ID NO: 2675307 - DNA, 25 bp, Homo sapien
aatgaatgttgtgtagatcatcaag

SEQ ID NO: 2675308 - DNA, 25 bp, Homo sapien
cagtctataatgaatgttgtgtaga

SEQ ID NO: 2675309 - DNA, 25 bp, Homo sapien
tataatgaatgttgtgtagatcatc

SEQ ID NO: 2675310 - DNA, 25 bp, Homo sapien
tgaaacctaatgaacggccaataat

SEQ ID NO: 2675311 - DNA, 25 bp, Homo sapien
ttgaaacctaatgaacggccaataa

SEQ ID NO: 2675312 - DNA, 25 bp, Homo sapien
cagattctcgactgacattttgtcg

SEQ ID NO: 2675313 - DNA, 25 bp, Homo sapien
tcacatgcactgcttcaatcagctc

SEQ ID NO: 2675314 - DNA, 25 bp, Homo sapien
cattttgtcgtgttattgtgtccac

SEQ ID NO: 2675315 - DNA, 25 bp, Homo sapien
tggagccttccgaatttcacatgca

SEQ ID NO: 2675316 - DNA, 25 bp, Homo sapien
gtacttctctgaatagaatggattg

SEQ ID NO: 2675317 - DNA, 25 bp, Homo sapien
gatgtttatccaatccaggtgtcca

SEQ ID NO: 2675318 - DNA, 25 bp, Homo sapien
gaagttgtgatcactggtacttctc

SEQ ID NO: 2675319 - DNA, 25 bp, Homo sapien
tataagtggtagataggcttcttcc

SEQ ID NO: 2675320 - DNA, 25 bp, Homo sapien
ccatttttgagttgcactgaactca

SEQ ID NO: 2675321 - DNA, 25 bp, Homo sapien
gagatggaggcaaacgccatttttg

SEQ ID NO: 2675322 - DNA, 25 bp, Homo sapien
gacttctcttagagtcctttgactg

SEQ ID NO: 2675323 - DNA, 25 bp, Homo sapien
tcatcctttggaggcttacatgaat

SEQ ID NO: 2675324 - DNA, 25 bp, Homo sapien
gtatagctgtagtgagggtctagca

SEQ ID NO: 2675325 - DNA, 25 bp, Homo sapien
tacacatagatttgaggagtatagc

SEQ ID NO: 2675326 - DNA, 25 bp, Homo sapien
gacaggtgtcatgtacctacatagg

SEQ ID NO: 2675327 - DNA, 25 bp, Homo sapien
gtaaaactcttgtgtcgactataca

SEQ ID NO: 2675328 - DNA, 25 bp, Homo sapien
tcccatagattttgctatatgtgtt

SEQ ID NO: 2675329 - DNA, 25 bp, Homo sapien
ttctgcttagtttgtattgagtttt

SEQ ID NO: 2675330 - DNA, 25 bp, Homo sapien
tcaaccattgtgctcggcctcatca

SEQ ID NO: 2675331 - DNA, 25 bp, Homo sapien
ggttttgttgatcatctattatttt

SEQ ID NO: 2675332 - DNA, 25 bp, Homo sapien
aagctggcggggacgctgtccgagc

SEQ ID NO: 2675333 - DNA, 25 bp, Homo sapien
cagcagcatgaatgtggcgacgcgg

SEQ ID NO: 2675334 - DNA, 25 bp, Homo sapien
catgaatgtggcgacgcggactgtc

SEQ ID NO: 2675335 - DNA, 25 bp, Homo sapien
gcgacgcggactgtcgggagtcccc

SEQ ID NO: 2675336 - DNA, 25 bp, Homo sapien
ccccgaaatggtgtgcaagcggaag

SEQ ID NO: 2675337 - DNA, 25 bp, Homo sapien
gccccccgaaatggtgtgcaagcgg

SEQ ID NO: 2675338 - DNA, 25 bp, Homo sapien
tccccgcctgcaccccctgcaagca

SEQ ID NO: 2675339 - DNA, 25 bp, Homo sapien
gtccccgcctgcaccccctgcaagc

SEQ ID NO: 2675340 - DNA, 25 bp, Homo sapien
ggacggggcctacgctgccgcctcc

SEQ ID NO: 2675341 - DNA, 25 bp, Homo sapien
ccgccgaggactgcgccgctgctgc

SEQ ID NO: 2675342 - DNA, 25 bp, Homo sapien
tggcgcggcgctacgcggccctggc

SEQ ID NO: 2675343 - DNA, 25 bp, Homo sapien
ctcctctcagcacctggcgcggcgc

SEQ ID NO: 2675344 - DNA, 25 bp, Homo sapien
acagctggctcggaagtgtctcctc

SEQ ID NO: 2675345 - DNA, 25 bp, Homo sapien
gaacttacacctcgagacgtcagcg

SEQ ID NO: 2675346 - DNA, 25 bp, Homo sapien
gccaatggcagctcttgaacttaca

SEQ ID NO: 2675347 - DNA, 25 bp, Homo sapien
tcagcgcggctgtgtaaacggatgt

SEQ ID NO: 2675348 - DNA, 25 bp, Homo sapien
gctgctcaagatggactacggtggc

SEQ ID NO: 2675349 - DNA, 25 bp, Homo sapien
gactgtgtttcgctacgctgctcaa

SEQ ID NO: 2675350 - DNA, 25 bp, Homo sapien
ccttttgtgaaagtgcagcctagta

SEQ ID NO: 2675351 - DNA, 25 bp, Homo sapien
tgcataatcataacaagctgggctt

SEQ ID NO: 2675352 - DNA, 25 bp, Homo sapien
gtttattaatccgttctcccactga

SEQ ID NO: 2675353 - DNA, 25 bp, Homo sapien
catctgggcagtttatagtttttgg

SEQ ID NO: 2675354 - DNA, 25 bp, Homo sapien
ttaatccgttctcccactgatggac

SEQ ID NO: 2675355 - DNA, 25 bp, Homo sapien
tgatggacatctgggcagtttatag

SEQ ID NO: 2675356 - DNA, 25 bp, Homo sapien
aatcacatagggagcctgttaccag

SEQ ID NO: 2675357 - DNA, 25 bp, Homo sapien
ttagcaacgacttcagaactctcag

SEQ ID NO: 2675358 - DNA, 25 bp, Homo sapien
tgtcagcacagagtccaataggtag

SEQ ID NO: 2675359 - DNA, 25 bp, Homo sapien
ttaccaggtagcgattcgagggccc

SEQ ID NO: 2675360 - DNA, 25 bp, Homo sapien
cctggctgtccggagttggtttcca

SEQ ID NO: 2675361 - DNA, 25 bp, Homo sapien
gctaatagtgccagtccagctcctg

SEQ ID NO: 2675362 - DNA, 25 bp, Homo sapien
caaagccatcagctgctacaactgt

SEQ ID NO: 2675363 - DNA, 25 bp, Homo sapien
ggacagctgccagtaccacaaatgc

SEQ ID NO: 2675364 - DNA, 25 bp, Homo sapien
ttgggcaggagcactctcagtaaga

SEQ ID NO: 2675365 - DNA, 25 bp, Homo sapien
agtccgtattccacacagtagcctg

SEQ ID NO: 2675366 - DNA, 25 bp, Homo sapien
gctaagcctgtaattggccaagaaa

SEQ ID NO: 2675367 - DNA, 25 bp, Homo sapien
gaagaatggatcaaggctaagcctg

SEQ ID NO: 2675368 - DNA, 25 bp, Homo sapien
tcagttcttagaggccacttgccat

SEQ ID NO: 2675369 - DNA, 25 bp, Homo sapien
tgttggcagaattaagaatcctgta

SEQ ID NO: 2675370 - DNA, 25 bp, Homo sapien
cttcttcacggctaaaagaaaagca

SEQ ID NO: 2675371 - DNA, 25 bp, Homo sapien
tgctgttgctttcaatctccctgac

SEQ ID NO: 2675372 - DNA, 25 bp, Homo sapien
tagtccccaacctgaaggtggattg

SEQ ID NO: 2675373 - DNA, 25 bp, Homo sapien
gatggaccagaagtgggtagtcccc

SEQ ID NO: 2675374 - DNA, 25 bp, Homo sapien
cacccaaaggcaggtagtatcccca

SEQ ID NO: 2675375 - DNA, 25 bp, Homo sapien
tccccatgtggctgagtgtgaggtt

SEQ ID NO: 2675376 - DNA, 25 bp, Homo sapien
tacttccaagttgctggtccagggt

SEQ ID NO: 2675377 - DNA, 25 bp, Homo sapien
caacatggcaggcactagctgtact

SEQ ID NO: 2675378 - DNA, 25 bp, Homo sapien
aactctgcgatgacgcctgtgcctg

SEQ ID NO: 2675379 - DNA, 25 bp, Homo sapien
gaacagcaatgactgcaaggacact

SEQ ID NO: 2675380 - DNA, 25 bp, Homo sapien
cactggtggtctaatagtgtgagtt

SEQ ID NO: 2675381 - DNA, 25 bp, Homo sapien
tgtttcactggtggtctaatagtgt

SEQ ID NO: 2675382 - DNA, 25 bp, Homo sapien
tctaatagtgtgagttagctttggg

SEQ ID NO: 2675383 - DNA, 25 bp, Homo sapien
ttctctttgtttcactggtggtcta

SEQ ID NO: 2675384 - DNA, 25 bp, Homo sapien
cctgactgtgaacacgcttaacttc

SEQ ID NO: 2675385 - DNA, 25 bp, Homo sapien
gaaatcctggtattcagacacttca

SEQ ID NO: 2675386 - DNA, 25 bp, Homo sapien
ctttgtctaagaagcaggtatgcaa

SEQ ID NO: 2675387 - DNA, 25 bp, Homo sapien
taggttggagaattgcctcagaaga

SEQ ID NO: 2675388 - DNA, 25 bp, Homo sapien
tctggatggaattgcttatgggaaa

SEQ ID NO: 2675389 - DNA, 25 bp, Homo sapien
gaaaggtccttacactctcttgaca

SEQ ID NO: 2675390 - DNA, 25 bp, Homo sapien
gagtttcttaccaacatctatgcat

SEQ ID NO: 2675391 - DNA, 25 bp, Homo sapien
ttatggtctgatgataactggccca

SEQ ID NO: 2675392 - DNA, 25 bp, Homo sapien
tggttactgcgtggcttcctgaccg

SEQ ID NO: 2675393 - DNA, 25 bp, Homo sapien
gttactgcgtggcttcctgaccgac

SEQ ID NO: 2675394 - DNA, 25 bp, Homo sapien
catggttactgcgtggcttcctgac

SEQ ID NO: 2675395 - DNA, 25 bp, Homo sapien
cttaaaagccatggttactgcgtgg

SEQ ID NO: 2675396 - DNA, 25 bp, Homo sapien
gctccacgggtgtttttccagtatc

SEQ ID NO: 2675397 - DNA, 25 bp, Homo sapien
agggtgattcgaattcggtgaattg

SEQ ID NO: 2675398 - DNA, 25 bp, Homo sapien
tgattcgaattcggtgaattgccac

SEQ ID NO: 2675399 - DNA, 25 bp, Homo sapien
ggtgattcgaattcggtgaattgcc

SEQ ID NO: 2675400 - DNA, 25 bp, Homo sapien
cttagggtgattcgaattcggtgaa

SEQ ID NO: 2675401 - DNA, 25 bp, Homo sapien
attcttctcctttgcgcttctaatc

SEQ ID NO: 2675402 - DNA, 25 bp, Homo sapien
ctcctttgcgcttctaatcaagtca

SEQ ID NO: 2675403 - DNA, 25 bp, Homo sapien
tctcctttgcgcttctaatcaagtc

SEQ ID NO: 2675404 - DNA, 25 bp, Homo sapien
cttctcctttgcgcttctaatcaag

SEQ ID NO: 2675405 - DNA, 25 bp, Homo sapien
aagtcgcttgtgaattctcatttgg

SEQ ID NO: 2675406 - DNA, 25 bp, Homo sapien
aataagtcgcttgtgaattctcatt

SEQ ID NO: 2675407 - DNA, 25 bp, Homo sapien
gtgcaagtcaataagtcgcttgtga

SEQ ID NO: 2675408 - DNA, 25 bp, Homo sapien
aattctcatttggaaacgatcccat

SEQ ID NO: 2675409 - DNA, 25 bp, Homo sapien
ctggtaatcaatttattgaaatagt

SEQ ID NO: 2675410 - DNA, 25 bp, Homo sapien
tttacaactggtaatcaatttattg

SEQ ID NO: 2675411 - DNA, 25 bp, Homo sapien
taatcaatttattgaaatagttgac

SEQ ID NO: 2675412 - DNA, 25 bp, Homo sapien
ggtaatcaatttattgaaatagttg

SEQ ID NO: 2675413 - DNA, 25 bp, Homo sapien
aacttgccatttgctcagtctgagc

SEQ ID NO: 2675414 - DNA, 25 bp, Homo sapien
cctgaacttgccatttgctcagtct

SEQ ID NO: 2675415 - DNA, 25 bp, Homo sapien
tgttctgcatcaatctctttaatta

SEQ ID NO: 2675416 - DNA, 25 bp, Homo sapien
gttctgcatcaatctctttaattaa

SEQ ID NO: 2675417 - DNA, 25 bp, Homo sapien
tctgcagagggtccctcgacaccac

SEQ ID NO: 2675418 - DNA, 25 bp, Homo sapien
tgcagagggtccctcgacaccactt

SEQ ID NO: 2675419 - DNA, 25 bp, Homo sapien
gagggtccctcgacaccacttcaca

SEQ ID NO: 2675420 - DNA, 25 bp, Homo sapien
cgcacacaccctggaatttagagac

SEQ ID NO: 2675421 - DNA, 25 bp, Homo sapien
ccagacaagccactctctgctccag

SEQ ID NO: 2675422 - DNA, 25 bp, Homo sapien
tgtagggaccccacatacaatcgct

SEQ ID NO: 2675423 - DNA, 25 bp, Homo sapien
gaccccacatacaatcgctgggtgt

SEQ ID NO: 2675424 - DNA, 25 bp, Homo sapien
gaacagagaaaccatccagacaagc

SEQ ID NO: 2675425 - DNA, 25 bp, Homo sapien
caaactgagcttttccatgtgattc

SEQ ID NO: 2675426 - DNA, 25 bp, Homo sapien
catgggtttgagagttcctgctaac

SEQ ID NO: 2675427 - DNA, 25 bp, Homo sapien
cattgggatcaattctgtctacagg

SEQ ID NO: 2675428 - DNA, 25 bp, Homo sapien
tgaaggtcgtcaccccattgggatc

SEQ ID NO: 2675429 - DNA, 25 bp, Homo sapien
cttggttggaacgaatgctaaaata

SEQ ID NO: 2675430 - DNA, 25 bp, Homo sapien
cgaatgctaaaatagtgttctgctt

SEQ ID NO: 2675431 - DNA, 25 bp, Homo sapien
aaaatagtgttctgctttattcagg

SEQ ID NO: 2675432 - DNA, 25 bp, Homo sapien
ggaacgaatgctaaaatagtgttct

SEQ ID NO: 2675433 - DNA, 25 bp, Homo sapien
gacttctccctgttatgaccaggct

SEQ ID NO: 2675434 - DNA, 25 bp, Homo sapien
tcccacagtgctccaagacttgact

SEQ ID NO: 2675435 - DNA, 25 bp, Homo sapien
cctgttatgaccaggctgtttccca

SEQ ID NO: 2675436 - DNA, 25 bp, Homo sapien
cacagtgctccaagacttgacttct

SEQ ID NO: 2675437 - DNA, 25 bp, Homo sapien
ttggcactggcctggtcccactgtg

SEQ ID NO: 2675438 - DNA, 25 bp, Homo sapien
tgtggaatccacattgttgtgcatg

SEQ ID NO: 2675439 - DNA, 25 bp, Homo sapien
cctgcttccctctaaggtgacctga

SEQ ID NO: 2675440 - DNA, 25 bp, Homo sapien
gcctggtcccactgtggcaatgtgg

SEQ ID NO: 2675441 - DNA, 25 bp, Homo sapien
tacttcaaggagcataccaagctga

SEQ ID NO: 2675442 - DNA, 25 bp, Homo sapien
tctattgtcccttaaatctggttca

SEQ ID NO: 2675443 - DNA, 25 bp, Homo sapien
gctggatgaccaaataggagggtga

SEQ ID NO: 2675444 - DNA, 25 bp, Homo sapien
gtggctgagaacagagctctattgt

SEQ ID NO: 2675445 - DNA, 25 bp, Homo sapien
ttggtcccactgtcccaaatcctga

SEQ ID NO: 2675446 - DNA, 25 bp, Homo sapien
tgtcccaaatcctgatcatcactct

SEQ ID NO: 2675447 - DNA, 25 bp, Homo sapien
gtcccactgtcccaaatcctgatca

SEQ ID NO: 2675448 - DNA, 25 bp, Homo sapien
aaatcctgatcatcactctctgcca

SEQ ID NO: 2675449 - DNA, 25 bp, Homo sapien
acccctttacttcttctaggctctg

SEQ ID NO: 2675450 - DNA, 25 bp, Homo sapien
ttcttctaggctctggaaagcgtcc

SEQ ID NO: 2675451 - DNA, 25 bp, Homo sapien
cctttacttcttctaggctctggaa

SEQ ID NO: 2675452 - DNA, 25 bp, Homo sapien
cttctaggctctggaaagcgtccat

SEQ ID NO: 2675453 - DNA, 25 bp, Homo sapien
gaggaggctctaaagactgaggcat

SEQ ID NO: 2675454 - DNA, 25 bp, Homo sapien
ctctgcaccgaagtcagccactggg

SEQ ID NO: 2675455 - DNA, 25 bp, Homo sapien
ttcttgcaccagtcccatcagacat

SEQ ID NO: 2675456 - DNA, 25 bp, Homo sapien
caaacaggcattcttgcaccagtcc

SEQ ID NO: 2675457 - DNA, 25 bp, Homo sapien
tacatggcactctgctgattgtggc

SEQ ID NO: 2675458 - DNA, 25 bp, Homo sapien
ttacatggcactctgctgattgtgg

SEQ ID NO: 2675459 - DNA, 25 bp, Homo sapien
acatggcactctgctgattgtggca

SEQ ID NO: 2675460 - DNA, 25 bp, Homo sapien
catggcactctgctgattgtggcac

SEQ ID NO: 2675461 - DNA, 25 bp, Homo sapien
gacaagtgattgaggactagtgtga

SEQ ID NO: 2675462 - DNA, 25 bp, Homo sapien
gcacctgcaatacttgtgataaact

SEQ ID NO: 2675463 - DNA, 25 bp, Homo sapien
tgcttttttacaagcccatggctca

SEQ ID NO: 2675464 - DNA, 25 bp, Homo sapien
tgaggagtgcatggtagtggcagca

SEQ ID NO: 2675465 - DNA, 25 bp, Homo sapien
gctgccacgatcagtgtggactgaa

SEQ ID NO: 2675466 - DNA, 25 bp, Homo sapien
agaagctgccacgatcagtgtggac

SEQ ID NO: 2675467 - DNA, 25 bp, Homo sapien
aagctgccacgatcagtgtggactg

SEQ ID NO: 2675468 - DNA, 25 bp, Homo sapien
ctagaagctgccacgatcagtgtgg

SEQ ID NO: 2675469 - DNA, 25 bp, Homo sapien
gaacaggtccctgaaattacaaatg

SEQ ID NO: 2675470 - DNA, 25 bp, Homo sapien
tacaagcatttcaggaagcacttgg

SEQ ID NO: 2675471 - DNA, 25 bp, Homo sapien
aattacaaatgacccatgagttggg

SEQ ID NO: 2675472 - DNA, 25 bp, Homo sapien
tgagcaggaggtacaagcatttcag

SEQ ID NO: 2675473 - DNA, 25 bp, Homo sapien
ctctagctgcaagagaatttgagaa

SEQ ID NO: 2675474 - DNA, 25 bp, Homo sapien
gaactctagctgcaagagaatttga

SEQ ID NO: 2675475 - DNA, 25 bp, Homo sapien
ccagaactctagctgcaagagaatt

SEQ ID NO: 2675476 - DNA, 25 bp, Homo sapien
aactctagctgcaagagaatttgag

SEQ ID NO: 2675477 - DNA, 25 bp, Homo sapien
ttctgtatcccaagtatctccctgc

SEQ ID NO: 2675478 - DNA, 25 bp, Homo sapien
tctgtatcccaagtatctccctgcc

SEQ ID NO: 2675479 - DNA, 25 bp, Homo sapien
gccatgcagcaaaggagggtcgaat

SEQ ID NO: 2675480 - DNA, 25 bp, Homo sapien
ttctgacggcggaaaggagcttcac

SEQ ID NO: 2675481 - DNA, 25 bp, Homo sapien
cgagtactgtcctcaggcggaacgg

SEQ ID NO: 2675482 - DNA, 25 bp, Homo sapien
tctcttgcgttcctgtggcgggcac

SEQ ID NO: 2675483 - DNA, 25 bp, Homo sapien
tagtagactccaaatgccaaaaagg

SEQ ID NO: 2675484 - DNA, 25 bp, Homo sapien
taaaatgtctatcaaggtggctggc

SEQ ID NO: 2675485 - DNA, 25 bp, Homo sapien
ggttgaatcttacaagctccaggca

SEQ ID NO: 2675486 - DNA, 25 bp, Homo sapien
caggtaatcgaatgcaatggccaca

SEQ ID NO: 2675487 - DNA, 25 bp, Homo sapien
ggagtacagtgtcgtgatcttagct

SEQ ID NO: 2675488 - DNA, 25 bp, Homo sapien
tagaacgagatacttagggatacag

SEQ ID NO: 2675489 - DNA, 25 bp, Homo sapien
tagatgctactatggaggagggaaa

SEQ ID NO: 2675490 - DNA, 25 bp, Homo sapien
aggcctagccggtagccatgactca

SEQ ID NO: 2675491 - DNA, 25 bp, Homo sapien
ctagagaaggactgtgattggctcc

SEQ ID NO: 2675492 - DNA, 25 bp, Homo sapien
taaataatcattgggaactctggag

SEQ ID NO: 2675493 - DNA, 25 bp, Homo sapien
tctccaattggttagcaggtgaaga

SEQ ID NO: 2675494 - DNA, 25 bp, Homo sapien
taatatatcccaggttttctgcctg

SEQ ID NO: 2675495 - DNA, 25 bp, Homo sapien
tattactcatacagtatccctgccc

SEQ ID NO: 2675496 - DNA, 25 bp, Homo sapien
gagttctcacctattcattccaaaa

SEQ ID NO: 2675497 - DNA, 25 bp, Homo sapien
tggagactgcttcatgactgaatac

SEQ ID NO: 2675498 - DNA, 25 bp, Homo sapien
taaaagctgtctaccatatgccagt

SEQ ID NO: 2675499 - DNA, 25 bp, Homo sapien
gccagtcattgtgctaggaaatgca

SEQ ID NO: 2675500 - DNA, 25 bp, Homo sapien
agcaaattgcctgtgatgtgtatca

SEQ ID NO: 2675501 - DNA, 25 bp, Homo sapien
aatgtcaggtcctcttacttgagga

SEQ ID NO: 2675502 - DNA, 25 bp, Homo sapien
tgtaatgggtcgtatatacttggct

SEQ ID NO: 2675503 - DNA, 25 bp, Homo sapien
gatggtcaccccaattattaagtaa

SEQ ID NO: 2675504 - DNA, 25 bp, Homo sapien
tgtcaactgtatgctcagtcaggaa

SEQ ID NO: 2675505 - DNA, 25 bp, Homo sapien
catatcaacggagtagcatccttcc

SEQ ID NO: 2675506 - DNA, 25 bp, Homo sapien
taaatccacttgaggactagatagg

SEQ ID NO: 2675507 - DNA, 25 bp, Homo sapien
ccagtttctgtgagagagtaggagc

SEQ ID NO: 2675508 - DNA, 25 bp, Homo sapien
cagtgatggccgtttctgaagcgtc

SEQ ID NO: 2675509 - DNA, 25 bp, Homo sapien
acccaaacgggtctgctcttcagtg

SEQ ID NO: 2675510 - DNA, 25 bp, Homo sapien
tcagtaacagtaggataggtatgcg

SEQ ID NO: 2675511 - DNA, 25 bp, Homo sapien
tagaatgcgtggagaacccaaacgg

SEQ ID NO: 2675512 - DNA, 25 bp, Homo sapien
ctgacaagcccgaacccctcagact

SEQ ID NO: 2675513 - DNA, 25 bp, Homo sapien
gaacctgacaagcccgaacccctca

SEQ ID NO: 2675514 - DNA, 25 bp, Homo sapien
cctgacaagcccgaacccctcagac

SEQ ID NO: 2675515 - DNA, 25 bp, Homo sapien
acctgacaagcccgaacccctcaga

SEQ ID NO: 2675516 - DNA, 25 bp, Homo sapien
gaagatacttgagaaaacgtgcagt

SEQ ID NO: 2675517 - DNA, 25 bp, Homo sapien
gaagtctagcgaaaatggtcatagg

SEQ ID NO: 2675518 - DNA, 25 bp, Homo sapien
gctggtcatgccttagctaaagtag

SEQ ID NO: 2675519 - DNA, 25 bp, Homo sapien
gatgaggtgtcacacattagggaca

SEQ ID NO: 2675520 - DNA, 25 bp, Homo sapien
gccaaagcaggcatattgcttgagc

SEQ ID NO: 2675521 - DNA, 25 bp, Homo sapien
ctaggcaacaaagcgcgaccccatc

SEQ ID NO: 2675522 - DNA, 25 bp, Homo sapien
gcctaggcaacaaagcgcgacccca

SEQ ID NO: 2675523 - DNA, 25 bp, Homo sapien
caaagcaggcatattgcttgagccc

SEQ ID NO: 2675524 - DNA, 25 bp, Homo sapien
gtgccacaaagggtcatctgctcag

SEQ ID NO: 2675525 - DNA, 25 bp, Homo sapien
agggtgccacaaagggtcatctgct

SEQ ID NO: 2675526 - DNA, 25 bp, Homo sapien
cgttggggccctgagggtgccacaa

SEQ ID NO: 2675527 - DNA, 25 bp, Homo sapien
cacaaagggtcatctgctcagtcat

SEQ ID NO: 2675528 - DNA, 25 bp, Homo sapien
gttaggcaagaagcgaacacaagac

SEQ ID NO: 2675529 - DNA, 25 bp, Homo sapien
tgttaggcaagaagcgaacacaaga

SEQ ID NO: 2675530 - DNA, 25 bp, Homo sapien
aggcaagaagcgaacacaagacacc

SEQ ID NO: 2675531 - DNA, 25 bp, Homo sapien
taggcaagaagcgaacacaagacac

SEQ ID NO: 2675532 - DNA, 25 bp, Homo sapien
gttagccagattccataccttgacc

SEQ ID NO: 2675533 - DNA, 25 bp, Homo sapien
aagcacagggtgttgataatgcccc

SEQ ID NO: 2675534 - DNA, 25 bp, Homo sapien
tgtagccagcaaacaaatgaccacc

SEQ ID NO: 2675535 - DNA, 25 bp, Homo sapien
tgatatttacccctaagtcccagat

SEQ ID NO: 2675536 - DNA, 25 bp, Homo sapien
tttgtaaggcactggttatcctcca

SEQ ID NO: 2675537 - DNA, 25 bp, Homo sapien
agtgagccttctaatcagcacatat

SEQ ID NO: 2675538 - DNA, 25 bp, Homo sapien
cactgcacaagtgagccttctaatc

SEQ ID NO: 2675539 - DNA, 25 bp, Homo sapien
aaggcactggttatcctccacactg

SEQ ID NO: 2675540 - DNA, 25 bp, Homo sapien
tacaaaggttctgtaaagtagatgc

SEQ ID NO: 2675541 - DNA, 25 bp, Homo sapien
cttggatacgttgctgacataattc

SEQ ID NO: 2675542 - DNA, 25 bp, Homo sapien
cagtaaccgtaattcccagtcttgc

SEQ ID NO: 2675543 - DNA, 25 bp, Homo sapien
tcatgtgaattcttcaggtcactcc

SEQ ID NO: 2675544 - DNA, 25 bp, Homo sapien
taagtcagagcatcagagaggtaca

SEQ ID NO: 2675545 - DNA, 25 bp, Homo sapien
aagtcagagcatcagagaggtacag

SEQ ID NO: 2675546 - DNA, 25 bp, Homo sapien
ttaagtcagagcatcagagaggtac

SEQ ID NO: 2675547 - DNA, 25 bp, Homo sapien
gcttgcttgtcaaagtcgacttcag

SEQ ID NO: 2675548 - DNA, 25 bp, Homo sapien
tcgacttcagaaaggttgcaacttg

SEQ ID NO: 2675549 - DNA, 25 bp, Homo sapien
tgtcaaagtcgacttcagaaaggtt

SEQ ID NO: 2675550 - DNA, 25 bp, Homo sapien
tcagaaaggttgcaacttgcgaatt

SEQ ID NO: 2675551 - DNA, 25 bp, Homo sapien
tatgcttaggaagactatagaggta

SEQ ID NO: 2675552 - DNA, 25 bp, Homo sapien
tattctcatctaccccaaaaacgag

SEQ ID NO: 2675553 - DNA, 25 bp, Homo sapien
cgtcagctaccgcatatggccaatt

SEQ ID NO: 2675554 - DNA, 25 bp, Homo sapien
tcttaaatgcgattctttggcagtg

SEQ ID NO: 2675555 - DNA, 25 bp, Homo sapien
gaagtaaatcgcctaacctcagcag

SEQ ID NO: 2675556 - DNA, 25 bp, Homo sapien
tagctcacgtccagagaagattcct

SEQ ID NO: 2675557 - DNA, 25 bp, Homo sapien
gaagattcctttgttgatccagctc

SEQ ID NO: 2675558 - DNA, 25 bp, Homo sapien
gctctagtagaggactgttaaaaca

SEQ ID NO: 2675559 - DNA, 25 bp, Homo sapien
cccaatacttttccagcttcttggt

SEQ ID NO: 2675560 - DNA, 25 bp, Homo sapien
tattcctcttggacttaagggccac

SEQ ID NO: 2675561 - DNA, 25 bp, Homo sapien
cttggtgctcctcaattgcttttat

SEQ ID NO: 2675562 - DNA, 25 bp, Homo sapien
tcttcttttgaagaacagtaaccag

SEQ ID NO: 2675563 - DNA, 25 bp, Homo sapien
cacagaacaggccagaaaagaaatt

SEQ ID NO: 2675564 - DNA, 25 bp, Homo sapien
aacacagaacaggccagaaaagaaa

SEQ ID NO: 2675565 - DNA, 25 bp, Homo sapien
ctaaacacagaacaggccagaaaag

SEQ ID NO: 2675566 - DNA, 25 bp, Homo sapien
agaacaggccagaaaagaaattaag

SEQ ID NO: 2675567 - DNA, 25 bp, Homo sapien
gttagagaaccacatgactaccggg

SEQ ID NO: 2675568 - DNA, 25 bp, Homo sapien
atgactggtaccaaagatgctgagc

SEQ ID NO: 2675569 - DNA, 25 bp, Homo sapien
tgactaccgggatattactactggt

SEQ ID NO: 2675570 - DNA, 25 bp, Homo sapien
gctgcattagctcagttacggtcca

SEQ ID NO: 2675571 - DNA, 25 bp, Homo sapien
tctgtctgctgaatcataagtagcc

SEQ ID NO: 2675572 - DNA, 25 bp, Homo sapien
cattatcctactaagttgttctgtc

SEQ ID NO: 2675573 - DNA, 25 bp, Homo sapien
ctctgcatgtgtcttcattatccta

SEQ ID NO: 2675574 - DNA, 25 bp, Homo sapien
tctgctgaatcataagtagccaaga

SEQ ID NO: 2675575 - DNA, 25 bp, Homo sapien
tctctgcctctatctgctgatgaac

SEQ ID NO: 2675576 - DNA, 25 bp, Homo sapien
tgaacacctatgtaacttttcttca

SEQ ID NO: 2675577 - DNA, 25 bp, Homo sapien
tctgctgatgaacacctatgtaact

SEQ ID NO: 2675578 - DNA, 25 bp, Homo sapien
tgatgaacacctatgtaacttttct

SEQ ID NO: 2675579 - DNA, 25 bp, Homo sapien
tagattgatcaggttgacaacactg

SEQ ID NO: 2675580 - DNA, 25 bp, Homo sapien
aatagattgatcaggttgacaacac

SEQ ID NO: 2675581 - DNA, 25 bp, Homo sapien
agattgatcaggttgacaacactgg

SEQ ID NO: 2675582 - DNA, 25 bp, Homo sapien
atagattgatcaggttgacaacact

SEQ ID NO: 2675583 - DNA, 25 bp, Homo sapien
tttattaattgtctatagctgcatt

SEQ ID NO: 2675584 - DNA, 25 bp, Homo sapien
tcagattctctcgttgccttccaac

SEQ ID NO: 2675585 - DNA, 25 bp, Homo sapien
taatgattttccataatcttttcta

SEQ ID NO: 2675586 - DNA, 25 bp, Homo sapien
aatttattacaagtatgatcttcag

SEQ ID NO: 2675587 - DNA, 25 bp, Homo sapien
atacaatactaaatggtgtttcatc

SEQ ID NO: 2675588 - DNA, 25 bp, Homo sapien
acataatttattcccacaaccatcc

SEQ ID NO: 2675589 - DNA, 25 bp, Homo sapien
cataatttattcccacaaccatcca

SEQ ID NO: 2675590 - DNA, 25 bp, Homo sapien
aacataatttattcccacaaccatc

SEQ ID NO: 2675591 - DNA, 25 bp, Homo sapien
ttcttactgattcgttgtagattct

SEQ ID NO: 2675592 - DNA, 25 bp, Homo sapien
cataggtttgttacctatttgtata

SEQ ID NO: 2675593 - DNA, 25 bp, Homo sapien
taggtttgttacctatttgtatatc

SEQ ID NO: 2675594 - DNA, 25 bp, Homo sapien
tgatttccatatccacgccaacatc

SEQ ID NO: 2675595 - DNA, 25 bp, Homo sapien
aatgtagtgtgtagtttgtaacata

SEQ ID NO: 2675596 - DNA, 25 bp, Homo sapien
aacaaaaacaatgtagtgtgtagtt

SEQ ID NO: 2675597 - DNA, 25 bp, Homo sapien
aaacaatacatgcattgcattccag

SEQ ID NO: 2675598 - DNA, 25 bp, Homo sapien
actttcaatatatggtagattttca

SEQ ID NO: 2675599 - DNA, 25 bp, Homo sapien
aggtcagttacaggcatgccatgtg

SEQ ID NO: 2675600 - DNA, 25 bp, Homo sapien
gtccagcccgctctactttcaatat

SEQ ID NO: 2675601 - DNA, 25 bp, Homo sapien
gccaatacatactgattgtgcaaca

SEQ ID NO: 2675602 - DNA, 25 bp, Homo sapien
agctgtgcccctttcaacgccaata

SEQ ID NO: 2675603 - DNA, 25 bp, Homo sapien
cattgtggctttgtcgtatcgttcc

SEQ ID NO: 2675604 - DNA, 25 bp, Homo sapien
catcttttgtaaggagtccagaagc

SEQ ID NO: 2675605 - DNA, 25 bp, Homo sapien
tctatctgttcaaccgacatttgaa

SEQ ID NO: 2675606 - DNA, 25 bp, Homo sapien
tgtgacaagactggttatctggctg

SEQ ID NO: 2675607 - DNA, 25 bp, Homo sapien
aattattgtattctgtactaggatc

SEQ ID NO: 2675608 - DNA, 25 bp, Homo sapien
gaatctctttatggacattcactat

SEQ ID NO: 2675609 - DNA, 25 bp, Homo sapien
ccagtaaggaagtatcaaactctat

SEQ ID NO: 2675610 - DNA, 25 bp, Homo sapien
gaagtatcaaactctatttcttgtt

SEQ ID NO: 2675611 - DNA, 25 bp, Homo sapien
ggaagtatcaaactctatttcttgt

SEQ ID NO: 2675612 - DNA, 25 bp, Homo sapien
gatacaagcttcagttattgagaga

SEQ ID NO: 2675613 - DNA, 25 bp, Homo sapien
taataatgatcgagagtcatcaggg

SEQ ID NO: 2675614 - DNA, 25 bp, Homo sapien
gaattggcttgcatggaatagttca

SEQ ID NO: 2675615 - DNA, 25 bp, Homo sapien
cagtaagtctctgacggcatttgat

SEQ ID NO: 2675616 - DNA, 25 bp, Homo sapien
tcttctctaactccaaaacagcctc

SEQ ID NO: 2675617 - DNA, 25 bp, Homo sapien
tgcataagttcttccgctaacgttt

SEQ ID NO: 2675618 - DNA, 25 bp, Homo sapien
tttgcataagttcttccgctaacgt

SEQ ID NO: 2675619 - DNA, 25 bp, Homo sapien
ttctcttctctaactccaaaacagc

SEQ ID NO: 2675620 - DNA, 25 bp, Homo sapien
gagaaggagtaaaacgaggagttca

SEQ ID NO: 2675621 - DNA, 25 bp, Homo sapien
catagatgtaactgatcgtgcatct

SEQ ID NO: 2675622 - DNA, 25 bp, Homo sapien
ctgtttttggcttagcagaagcaca

SEQ ID NO: 2675623 - DNA, 25 bp, Homo sapien
gctctagtaattccttctgtgctga

SEQ ID NO: 2675624 - DNA, 25 bp, Homo sapien
atgtaactgatcgtgcatcttcttc

SEQ ID NO: 2675625 - DNA, 25 bp, Homo sapien
ctattttgcatttacaaacaagttt

SEQ ID NO: 2675626 - DNA, 25 bp, Homo sapien
tattttgcatttacaaacaagttta

SEQ ID NO: 2675627 - DNA, 25 bp, Homo sapien
tttgcatttacaaacaagtttaata

SEQ ID NO: 2675628 - DNA, 25 bp, Homo sapien
gcatttacaaacaagtttaatagga

SEQ ID NO: 2675629 - DNA, 25 bp, Homo sapien
ctgaaagtgctctccaggtgacctg

SEQ ID NO: 2675630 - DNA, 25 bp, Homo sapien
ggcaagagaagaactttttcctctg

SEQ ID NO: 2675631 - DNA, 25 bp, Homo sapien
tgtctcccaggaataaaaacaactg

SEQ ID NO: 2675632 - DNA, 25 bp, Homo sapien
cctctgactctacaggtggttcctg

SEQ ID NO: 2675633 - DNA, 25 bp, Homo sapien
tgtctggtgatactaccaaatgtcc

SEQ ID NO: 2675634 - DNA, 25 bp, Homo sapien
tgtgcattctaagaggtttaccagc

SEQ ID NO: 2675635 - DNA, 25 bp, Homo sapien
tgccaaggatgtagctcagactttt

SEQ ID NO: 2675636 - DNA, 25 bp, Homo sapien
gttacccacaggaaatgccaaggat

SEQ ID NO: 2675637 - DNA, 25 bp, Homo sapien
tcatagtaccctgtgtcaagcaggg

SEQ ID NO: 2675638 - DNA, 25 bp, Homo sapien
caacccatgagcgaacatgatagag

SEQ ID NO: 2675639 - DNA, 25 bp, Homo sapien
taacgcaagtctatactcatccagg

SEQ ID NO: 2675640 - DNA, 25 bp, Homo sapien
gggaagtgggtcatatcatagtacc

SEQ ID NO: 2675641 - DNA, 25 bp, Homo sapien
gaaagtgcctaccttctgagagcta

SEQ ID NO: 2675642 - DNA, 25 bp, Homo sapien
gctacagtttaaggaacaagcaggg

SEQ ID NO: 2675643 - DNA, 25 bp, Homo sapien
gatactaaagtaagtgctttgcaag

SEQ ID NO: 2675644 - DNA, 25 bp, Homo sapien
caagcagggattatagaagacagat

SEQ ID NO: 2675645 - DNA, 25 bp, Homo sapien
cagtgggcccaaggaagtcaattta

SEQ ID NO: 2675646 - DNA, 25 bp, Homo sapien
aagagatagtgacagtgggcccaag

SEQ ID NO: 2675647 - DNA, 25 bp, Homo sapien
ctaagagatagtgacagtgggccca

SEQ ID NO: 2675648 - DNA, 25 bp, Homo sapien
gcccaaggaagtcaatttaccaaca

SEQ ID NO: 2675649 - DNA, 25 bp, Homo sapien
ttacaggattgggagccgaaaccag

SEQ ID NO: 2675650 - DNA, 25 bp, Homo sapien
tcagagctgaacattaaagcacatg

SEQ ID NO: 2675651 - DNA, 25 bp, Homo sapien
ggagccgaaaccagactccagctga

SEQ ID NO: 2675652 - DNA, 25 bp, Homo sapien
tgatccttacaatgaggacatttca

SEQ ID NO: 2675653 - DNA, 25 bp, Homo sapien
tataagcagcagctaccttaaatgt

SEQ ID NO: 2675654 - DNA, 25 bp, Homo sapien
cttataagcagcagctaccttaaat

SEQ ID NO: 2675655 - DNA, 25 bp, Homo sapien
ttataagcagcagctaccttaaatg

SEQ ID NO: 2675656 - DNA, 25 bp, Homo sapien
taattattccagcaattgaatgacg

SEQ ID NO: 2675657 - DNA, 25 bp, Homo sapien
ccagcaattgaatgacgaatagatt

SEQ ID NO: 2675658 - DNA, 25 bp, Homo sapien
tcaaatttggatagcctctcctttc

SEQ ID NO: 2675659 - DNA, 25 bp, Homo sapien
attttggagacctaattattccagc

SEQ ID NO: 2675660 - DNA, 25 bp, Homo sapien
ctgcttccttcagtacctttggggt

SEQ ID NO: 2675661 - DNA, 25 bp, Homo sapien
ctttctttctttctaacaattctgc

SEQ ID NO: 2675662 - DNA, 25 bp, Homo sapien
ttctgcttccttcagtacctttggg

SEQ ID NO: 2675663 - DNA, 25 bp, Homo sapien
cggcttcttttgttcccttactcat

SEQ ID NO: 2675664 - DNA, 25 bp, Homo sapien
gcaccatggtaccagtcctgttctg

SEQ ID NO: 2675665 - DNA, 25 bp, Homo sapien
gagcttctattctgggaattgcacc

SEQ ID NO: 2675666 - DNA, 25 bp, Homo sapien
accatggtaccagtcctgttctgcc

SEQ ID NO: 2675667 - DNA, 25 bp, Homo sapien
agtcctgttctgccaaaggcttctc

SEQ ID NO: 2675668 - DNA, 25 bp, Homo sapien
caggtttcccatgactctctcgcac

SEQ ID NO: 2675669 - DNA, 25 bp, Homo sapien
tcaacatattgtatgataaaatgtc

SEQ ID NO: 2675670 - DNA, 25 bp, Homo sapien
tctgtccatcagaatatacagaaag

SEQ ID NO: 2675671 - DNA, 25 bp, Homo sapien
tcctctgtccatcagaatatacaga

SEQ ID NO: 2675672 - DNA, 25 bp, Homo sapien
aacatattgtatgataaaatgtctc

SEQ ID NO: 2675673 - DNA, 25 bp, Homo sapien
taggattcagcagaactacacctga

SEQ ID NO: 2675674 - DNA, 25 bp, Homo sapien
tagtgatgatctataagttgaggaa

SEQ ID NO: 2675675 - DNA, 25 bp, Homo sapien
cacctgatttcttagtgatgacctg

SEQ ID NO: 2675676 - DNA, 25 bp, Homo sapien
aatgtttgaaaacccagtgccctcg

SEQ ID NO: 2675677 - DNA, 25 bp, Homo sapien
taacctgaacctttcaaagtatgaa

SEQ ID NO: 2675678 - DNA, 25 bp, Homo sapien
gaaagccaagccacaagtcaaacta

SEQ ID NO: 2675679 - DNA, 25 bp, Homo sapien
caatctatgtgatagcagcaagagg

SEQ ID NO: 2675680 - DNA, 25 bp, Homo sapien
tattatgtgatttctccacaatcta

SEQ ID NO: 2675681 - DNA, 25 bp, Homo sapien
caaactatggactacattgagagcc

SEQ ID NO: 2675682 - DNA, 25 bp, Homo sapien
tatgaagtatgtggtatcaccatca

SEQ ID NO: 2675683 - DNA, 25 bp, Homo sapien
tacacaagtactatttgaaacatgg

SEQ ID NO: 2675684 - DNA, 25 bp, Homo sapien
taggaattggttttagctacacaag

SEQ ID NO: 2675685 - DNA, 25 bp, Homo sapien
tctgttaagtgtgccaatgaattcc

SEQ ID NO: 2675686 - DNA, 25 bp, Homo sapien
tgtgtcctcaatgtctaagttcaaa

SEQ ID NO: 2675687 - DNA, 25 bp, Homo sapien
gtgtcctcaatgtctaagttcaaaa

SEQ ID NO: 2675688 - DNA, 25 bp, Homo sapien
atgtgtcctcaatgtctaagttcaa

SEQ ID NO: 2675689 - DNA, 25 bp, Homo sapien
tgtcctcaatgtctaagttcaaaat

SEQ ID NO: 2675690 - DNA, 25 bp, Homo sapien
tgatcttgcaaagggcctgaaaaac

SEQ ID NO: 2675691 - DNA, 25 bp, Homo sapien
tcattatgacttctaaatgcttcct

SEQ ID NO: 2675692 - DNA, 25 bp, Homo sapien
aaccaaccaatttcaaacagattag

SEQ ID NO: 2675693 - DNA, 25 bp, Homo sapien
tatcggtctaaacctataaacactg

SEQ ID NO: 2675694 - DNA, 25 bp, Homo sapien
gtatttctgcaccactgattcttga

SEQ ID NO: 2675695 - DNA, 25 bp, Homo sapien
aaataggtatttctgcaccactgat

SEQ ID NO: 2675696 - DNA, 25 bp, Homo sapien
tttggaacatcaacttctccaaaaa

SEQ ID NO: 2675697 - DNA, 25 bp, Homo sapien
ccactgattcttgatcattaggatg

SEQ ID NO: 2675698 - DNA, 25 bp, Homo sapien
agcaaacagacaacacatagagtgg

SEQ ID NO: 2675699 - DNA, 25 bp, Homo sapien
aatatttgatgaaatgctcaacatc

SEQ ID NO: 2675700 - DNA, 25 bp, Homo sapien
cagacaacacatagagtggaagaaa

SEQ ID NO: 2675701 - DNA, 25 bp, Homo sapien
tactcctacaagagtggccataata

SEQ ID NO: 2675702 - DNA, 25 bp, Homo sapien
taccaatcctagtgacactattctc

SEQ ID NO: 2675703 - DNA, 25 bp, Homo sapien
agagaaaatactccctaaatcattc

SEQ ID NO: 2675704 - DNA, 25 bp, Homo sapien
taaagagaaaatactccctaaatca

SEQ ID NO: 2675705 - DNA, 25 bp, Homo sapien
agtgacactattctccaagataaag

SEQ ID NO: 2675706 - DNA, 25 bp, Homo sapien
cacagggaatttcgaactgggagga

SEQ ID NO: 2675707 - DNA, 25 bp, Homo sapien
gccacagggaatttcgaactgggag

SEQ ID NO: 2675708 - DNA, 25 bp, Homo sapien
agccaagtggtctggtacggcaggt

SEQ ID NO: 2675709 - DNA, 25 bp, Homo sapien
agtggtctggtacggcaggtcccac

SEQ ID NO: 2675710 - DNA, 25 bp, Homo sapien
tatacattaaaagactatgccagcg

SEQ ID NO: 2675711 - DNA, 25 bp, Homo sapien
ttaatataaactatggttcttccat

SEQ ID NO: 2675712 - DNA, 25 bp, Homo sapien
aaggtcaacattaaccagtaaatat

SEQ ID NO: 2675713 - DNA, 25 bp, Homo sapien
ttttcctaagtcaatttagtctcaa

SEQ ID NO: 2675714 - DNA, 25 bp, Homo sapien
gagaagagatggttactttgatcaa

SEQ ID NO: 2675715 - DNA, 25 bp, Homo sapien
tgatcaaggactgagggctaaagat

SEQ ID NO: 2675716 - DNA, 25 bp, Homo sapien
gctgcacagtagagaagtaggctct

SEQ ID NO: 2675717 - DNA, 25 bp, Homo sapien
taagtgcggagcaccaaagagtgcg

SEQ ID NO: 2675718 - DNA, 25 bp, Homo sapien
tctgattactgaagaagtgcacaac

SEQ ID NO: 2675719 - DNA, 25 bp, Homo sapien
cacaacttaggtcagatatagaggg

SEQ ID NO: 2675720 - DNA, 25 bp, Homo sapien
gcttccctacacaggatgccttgga

SEQ ID NO: 2675721 - DNA, 25 bp, Homo sapien
tagaaacagatactgacagggctat

SEQ ID NO: 2675722 - DNA, 25 bp, Homo sapien
gacatcttcatgactgagaatccat

SEQ ID NO: 2675723 - DNA, 25 bp, Homo sapien
tatgacatcttcatgactgagaatc

SEQ ID NO: 2675724 - DNA, 25 bp, Homo sapien
tcttcatgactgagaatccatttct

SEQ ID NO: 2675725 - DNA, 25 bp, Homo sapien
ccaatatgacatcttcatgactgag

SEQ ID NO: 2675726 - DNA, 25 bp, Homo sapien
tgtgttccaccttaaattccatggt

SEQ ID NO: 2675727 - DNA, 25 bp, Homo sapien
tttataggaactgccaatctttcgg

SEQ ID NO: 2675728 - DNA, 25 bp, Homo sapien
gcacctataaagctaatatggctgg

SEQ ID NO: 2675729 - DNA, 25 bp, Homo sapien
aattcatgaacacaaacccttaggg

SEQ ID NO: 2675730 - DNA, 25 bp, Homo sapien
tcttcctggctatattacttttttc

SEQ ID NO: 2675731 - DNA, 25 bp, Homo sapien
cttcctggctatattacttttttcg

SEQ ID NO: 2675732 - DNA, 25 bp, Homo sapien
gattcttcctggctatattactttt

SEQ ID NO: 2675733 - DNA, 25 bp, Homo sapien
aaagattcttcctggctatattact

SEQ ID NO: 2675734 - DNA, 25 bp, Homo sapien
ttatcctttaatgtgcccttatata

SEQ ID NO: 2675735 - DNA, 25 bp, Homo sapien
tgtgcccttatatacttcaccaaaa

SEQ ID NO: 2675736 - DNA, 25 bp, Homo sapien
ctcctataagtttgacaatattggg

SEQ ID NO: 2675737 - DNA, 25 bp, Homo sapien
gtctttgtgtgcaaactcctataag

SEQ ID NO: 2675738 - DNA, 25 bp, Homo sapien
cagttccataatgatgtagacaggc

SEQ ID NO: 2675739 - DNA, 25 bp, Homo sapien
gacaatattgggatgatcatattgc

SEQ ID NO: 2675740 - DNA, 25 bp, Homo sapien
ttctgataagtctgggaagacgttc

SEQ ID NO: 2675741 - DNA, 25 bp, Homo sapien
gatcatgaatgatattggtctgcag

SEQ ID NO: 2675742 - DNA, 25 bp, Homo sapien
aaaagatatggtactatgcaggttc

SEQ ID NO: 2675743 - DNA, 25 bp, Homo sapien
catgaatgagattaggtagttcgta

SEQ ID NO: 2675744 - DNA, 25 bp, Homo sapien
attcttaaaagctaaccaagtctat

SEQ ID NO: 2675745 - DNA, 25 bp, Homo sapien
gatggtcttgagaaatcccataatt

SEQ ID NO: 2675746 - DNA, 25 bp, Homo sapien
gttttgattttgtagtggaaattca

SEQ ID NO: 2675747 - DNA, 25 bp, Homo sapien
tggtatagtagatgttaaacagcaa

SEQ ID NO: 2675748 - DNA, 25 bp, Homo sapien
agttacactagtcctgctcacacct

SEQ ID NO: 2675749 - DNA, 25 bp, Homo sapien
caaatataagtagactgccaataat

SEQ ID NO: 2675750 - DNA, 25 bp, Homo sapien
ttcaattgaattcaccagttacact

SEQ ID NO: 2675751 - DNA, 25 bp, Homo sapien
ttgcatcaaatataagtagactgcc

SEQ ID NO: 2675752 - DNA, 25 bp, Homo sapien
cataatgaatttgtgaacccctggg

SEQ ID NO: 2675753 - DNA, 25 bp, Homo sapien
tggctaatgctgaccagatcatggc

SEQ ID NO: 2675754 - DNA, 25 bp, Homo sapien
ctgacaagaggctatacaatgctta

SEQ ID NO: 2675755 - DNA, 25 bp, Homo sapien
tgacaatctagttttacaggaaagg

SEQ ID NO: 2675756 - DNA, 25 bp, Homo sapien
gctgtgctccaagagatagctgtaa

SEQ ID NO: 2675757 - DNA, 25 bp, Homo sapien
tgaaatcaggtttcctgaccgccct

SEQ ID NO: 2675758 - DNA, 25 bp, Homo sapien
cagctatgggtccagggaaaattta

SEQ ID NO: 2675759 - DNA, 25 bp, Homo sapien
actccaagtatatggaattccaggc

SEQ ID NO: 2675760 - DNA, 25 bp, Homo sapien
gaatactggatgcacactccactca

SEQ ID NO: 2675761 - DNA, 25 bp, Homo sapien
tcagacagacctccaaaaaaccaga

SEQ ID NO: 2675762 - DNA, 25 bp, Homo sapien
taagagcttgtaatctctcactcca

SEQ ID NO: 2675763 - DNA, 25 bp, Homo sapien
tgtactaccgcaggttctgtggcat

SEQ ID NO: 2675764 - DNA, 25 bp, Homo sapien
tgaccaaggaacactacaccaggat

SEQ ID NO: 2675765 - DNA, 25 bp, Homo sapien
ggttttaggagtagcactgagcccc

SEQ ID NO: 2675766 - DNA, 25 bp, Homo sapien
ttaaaagtgtactgccctcaaggtc

SEQ ID NO: 2675767 - DNA, 25 bp, Homo sapien
cctcaaggtcctgataatatgggcc

SEQ ID NO: 2675768 - DNA, 25 bp, Homo sapien
tgatctttgattccaagctggtacc

SEQ ID NO: 2675769 - DNA, 25 bp, Homo sapien
tcattttaggcaactccaagataaa

SEQ ID NO: 2675770 - DNA, 25 bp, Homo sapien
gcattagttgcctaggcttttggtg

SEQ ID NO: 2675771 - DNA, 25 bp, Homo sapien
taagattgatgtactctccctgtct

SEQ ID NO: 2675772 - DNA, 25 bp, Homo sapien
gaatcacaccgaaatgaacacaagt

SEQ ID NO: 2675773 - DNA, 25 bp, Homo sapien
catctgtccgtggatattacactgc

SEQ ID NO: 2675774 - DNA, 25 bp, Homo sapien
gaagctccatactgtttgccatcac

SEQ ID NO: 2675775 - DNA, 25 bp, Homo sapien
tcacgattataacggcaatgcacag

SEQ ID NO: 2675776 - DNA, 25 bp, Homo sapien
tataaccaatagcagttatgataac

SEQ ID NO: 2675777 - DNA, 25 bp, Homo sapien
gagaatataaccaatagcagttatg

SEQ ID NO: 2675778 - DNA, 25 bp, Homo sapien
cttggcaggtgatttttgagaatat

SEQ ID NO: 2675779 - DNA, 25 bp, Homo sapien
aaccaatagcagttatgataacagt

SEQ ID NO: 2675780 - DNA, 25 bp, Homo sapien
cataccagcagcagcgtctaatgaa

SEQ ID NO: 2675781 - DNA, 25 bp, Homo sapien
ataccagcagcagcgtctaatgaaa

SEQ ID NO: 2675782 - DNA, 25 bp, Homo sapien
gtgtatacagtttttactctcgaga

SEQ ID NO: 2675783 - DNA, 25 bp, Homo sapien
tttactctcgagatacaacatacca

SEQ ID NO: 2675784 - DNA, 25 bp, Homo sapien
taagggcctatatcaacaaagtgga

SEQ ID NO: 2675785 - DNA, 25 bp, Homo sapien
caaggacagaccataaattaggaag

SEQ ID NO: 2675786 - DNA, 25 bp, Homo sapien
cctgctacaattgatatggaaacac

SEQ ID NO: 2675787 - DNA, 25 bp, Homo sapien
gtttagagctgtaagggcctatatc

SEQ ID NO: 2675788 - DNA, 25 bp, Homo sapien
caccagaatgatgacaagctgtcct

SEQ ID NO: 2675789 - DNA, 25 bp, Homo sapien
cattactgagactaaaggcaactgt

SEQ ID NO: 2675790 - DNA, 25 bp, Homo sapien
tgagaagtgcatgctacaagagagt

SEQ ID NO: 2675791 - DNA, 25 bp, Homo sapien
tggttaacctatgggtattgctgaa

SEQ ID NO: 2675792 - DNA, 25 bp, Homo sapien
cctttccatcagacatgagttcttt

SEQ ID NO: 2675793 - DNA, 25 bp, Homo sapien
gtttgtggctcctttccatcagaca

SEQ ID NO: 2675794 - DNA, 25 bp, Homo sapien
cttcgtttgtggctcctttccatca

SEQ ID NO: 2675795 - DNA, 25 bp, Homo sapien
ctttctctttctggtacctgtgcat

SEQ ID NO: 2675796 - DNA, 25 bp, Homo sapien
ttagttccgatatgacagaaagact

SEQ ID NO: 2675797 - DNA, 25 bp, Homo sapien
ttccgatatgacagaaagacttcag

SEQ ID NO: 2675798 - DNA, 25 bp, Homo sapien
gttccgatatgacagaaagacttca

SEQ ID NO: 2675799 - DNA, 25 bp, Homo sapien
tagttccgatatgacagaaagactt

SEQ ID NO: 2675800 - DNA, 25 bp, Homo sapien
tttcacgggctcatagcaacacacc

SEQ ID NO: 2675801 - DNA, 25 bp, Homo sapien
aagccacattttctagctacatagg

SEQ ID NO: 2675802 - DNA, 25 bp, Homo sapien
tgtttttctatttcacgggctcata

SEQ ID NO: 2675803 - DNA, 25 bp, Homo sapien
tactcttacaaatgatagccaaact

SEQ ID NO: 2675804 - DNA, 25 bp, Homo sapien
gaacaggccatgaagtccaaggcct

SEQ ID NO: 2675805 - DNA, 25 bp, Homo sapien
tgggaagaacaggccatgaagtcca

SEQ ID NO: 2675806 - DNA, 25 bp, Homo sapien
aaggcctctcccacttgatgtgtct

SEQ ID NO: 2675807 - DNA, 25 bp, Homo sapien
caggccatgaagtccaaggcctctc

SEQ ID NO: 2675808 - DNA, 25 bp, Homo sapien
tattcacatcgattcatagcattct

SEQ ID NO: 2675809 - DNA, 25 bp, Homo sapien
gcatgtctgttttcccatatcctta

SEQ ID NO: 2675810 - DNA, 25 bp, Homo sapien
tatccttattcacatcgattcatag

SEQ ID NO: 2675811 - DNA, 25 bp, Homo sapien
cccactgccggcatatgcatgtctg

SEQ ID NO: 2675812 - DNA, 25 bp, Homo sapien
cagctgggataaagtaaaggcaaat

SEQ ID NO: 2675813 - DNA, 25 bp, Homo sapien
aggcaaatttgcatggttttagaaa

SEQ ID NO: 2675814 - DNA, 25 bp, Homo sapien
cctagacataaaacagctgggataa

SEQ ID NO: 2675815 - DNA, 25 bp, Homo sapien
tagtctttctgcatgcctgtaattt

SEQ ID NO: 2675816 - DNA, 25 bp, Homo sapien
tctgtggctaatgaatagattttcc

SEQ ID NO: 2675817 - DNA, 25 bp, Homo sapien
aatcacttgagtttagctatacaca

SEQ ID NO: 2675818 - DNA, 25 bp, Homo sapien
gcttgagaaatagcaccaccatggt

SEQ ID NO: 2675819 - DNA, 25 bp, Homo sapien
caccatggtataatgaaattttctc

SEQ ID NO: 2675820 - DNA, 25 bp, Homo sapien
gcagaggctctgataactgaagtga

SEQ ID NO: 2675821 - DNA, 25 bp, Homo sapien
gacttgagaaagatcgctgagaata

SEQ ID NO: 2675822 - DNA, 25 bp, Homo sapien
cccaatatgagagacggtatactgc

SEQ ID NO: 2675823 - DNA, 25 bp, Homo sapien
aataaaacattctggagccagtcac

SEQ ID NO: 2675824 - DNA, 25 bp, Homo sapien
aactgcttcttggaatacctctggc

SEQ ID NO: 2675825 - DNA, 25 bp, Homo sapien
tctggatctgatgacctttggttaa

SEQ ID NO: 2675826 - DNA, 25 bp, Homo sapien
cagcaaatgccatactccgaggatt

SEQ ID NO: 2675827 - DNA, 25 bp, Homo sapien
tccgaggattctactactaccactt

SEQ ID NO: 2675828 - DNA, 25 bp, Homo sapien
ctctctctggcaagttctgtgccca

SEQ ID NO: 2675829 - DNA, 25 bp, Homo sapien
tctctctggcaagttctgtgcccat

SEQ ID NO: 2675830 - DNA, 25 bp, Homo sapien
aaaactgtacgttcatcataggaag

SEQ ID NO: 2675831 - DNA, 25 bp, Homo sapien
caaagcccgtaagcggaggaaagca

SEQ ID NO: 2675832 - DNA, 25 bp, Homo sapien
gaagcccaggaagctaatcaacttg

SEQ ID NO: 2675833 - DNA, 25 bp, Homo sapien
ttagcctcagaaacaatgcatcggg

SEQ ID NO: 2675834 - DNA, 25 bp, Homo sapien
ttttgttgacaactgcgagtatacg

SEQ ID NO: 2675835 - DNA, 25 bp, Homo sapien
gcgagtatacggttccattacttct

SEQ ID NO: 2675836 - DNA, 25 bp, Homo sapien
cacacaggccaagtgtactccttgg

SEQ ID NO: 2675837 - DNA, 25 bp, Homo sapien
tttcccctattattcttagttgaca

SEQ ID NO: 2675838 - DNA, 25 bp, Homo sapien
tcctgattctggctgaaacatggca

SEQ ID NO: 2675839 - DNA, 25 bp, Homo sapien
gtatttatatagttagctgcaagca

SEQ ID NO: 2675840 - DNA, 25 bp, Homo sapien
catggcataaaaccaacaacccagg

SEQ ID NO: 2675841 - DNA, 25 bp, Homo sapien
taactactagcacttatgaggagaa

SEQ ID NO: 2675842 - DNA, 25 bp, Homo sapien
caatggagatgagtaaattttcttc

SEQ ID NO: 2675843 - DNA, 25 bp, Homo sapien
ctgtctagaaagcacaatggtgcac

SEQ ID NO: 2675844 - DNA, 25 bp, Homo sapien
ggcaatggagatgagtaaattttct

SEQ ID NO: 2675845 - DNA, 25 bp, Homo sapien
tgcacgtcttgttctgtggctatgt

SEQ ID NO: 2675846 - DNA, 25 bp, Homo sapien
ccaactctagtcagtgggccaaatg

SEQ ID NO: 2675847 - DNA, 25 bp, Homo sapien
aactctagtcagtgggccaaatgcc

SEQ ID NO: 2675848 - DNA, 25 bp, Homo sapien
cccaactctagtcagtgggccaaat

SEQ ID NO: 2675849 - DNA, 25 bp, Homo sapien
caactctagtcagtgggccaaatgc

SEQ ID NO: 2675850 - DNA, 25 bp, Homo sapien
gtcataggtaaaaaacatccatgag

SEQ ID NO: 2675851 - DNA, 25 bp, Homo sapien
ccagaagatgaatacactccaccat

SEQ ID NO: 2675852 - DNA, 25 bp, Homo sapien
tgtcattccagggtacggacaaacc

SEQ ID NO: 2675853 - DNA, 25 bp, Homo sapien
atttgtcattccagggtacggacaa

SEQ ID NO: 2675854 - DNA, 25 bp, Homo sapien
gacaaacccctaagctgaaggtctc

SEQ ID NO: 2675855 - DNA, 25 bp, Homo sapien
tttgtcattccagggtacggacaaa

SEQ ID NO: 2675856 - DNA, 25 bp, Homo sapien
cgtctgttggttggcagtgtttcag

SEQ ID NO: 2675857 - DNA, 25 bp, Homo sapien
tcatccacttctacaaccatgcccc

SEQ ID NO: 2675858 - DNA, 25 bp, Homo sapien
tgtttcagcagtgcattgggtagtg

SEQ ID NO: 2675859 - DNA, 25 bp, Homo sapien
cattgggtagtgtgtaaaggtagga

SEQ ID NO: 2675860 - DNA, 25 bp, Homo sapien
tcactgaacttagggcgattttcag

SEQ ID NO: 2675861 - DNA, 25 bp, Homo sapien
agttcactgaacttagggcgatttt

SEQ ID NO: 2675862 - DNA, 25 bp, Homo sapien
tgctggggagctgacatccggtatc

SEQ ID NO: 2675863 - DNA, 25 bp, Homo sapien
gttttctcttgatgatagtgagctc

SEQ ID NO: 2675864 - DNA, 25 bp, Homo sapien
taagaaagcccttggtaggactgcc

SEQ ID NO: 2675865 - DNA, 25 bp, Homo sapien
tgtttatagcaccaacggagtaggg

SEQ ID NO: 2675866 - DNA, 25 bp, Homo sapien
taggatggcagcctacaaactgtgc

SEQ ID NO: 2675867 - DNA, 25 bp, Homo sapien
caataatgttactctgctggaggac

SEQ ID NO: 2675868 - DNA, 25 bp, Homo sapien
tccttgctgagagcttagcatgaag

SEQ ID NO: 2675869 - DNA, 25 bp, Homo sapien
taatcctgaactataccactgcctg

SEQ ID NO: 2675870 - DNA, 25 bp, Homo sapien
tagcatgaagccactatgagatggg

SEQ ID NO: 2675871 - DNA, 25 bp, Homo sapien
tattctatatgactgagagactccc

SEQ ID NO: 2675872 - DNA, 25 bp, Homo sapien
taacactagtattgtgaagccatag

SEQ ID NO: 2675873 - DNA, 25 bp, Homo sapien
tacatgagacctttcactggagacc

SEQ ID NO: 2675874 - DNA, 25 bp, Homo sapien
cgaaaggagaattttattgcccaca

SEQ ID NO: 2675875 - DNA, 25 bp, Homo sapien
cactggagacctcatggcaggacag

SEQ ID NO: 2675876 - DNA, 25 bp, Homo sapien
tagtccaaaggtgaaatagggcgga

SEQ ID NO: 2675877 - DNA, 25 bp, Homo sapien
catcatagtaagctccctctgtggg

SEQ ID NO: 2675878 - DNA, 25 bp, Homo sapien
gagccatttagtcaacgttagtcca

SEQ ID NO: 2675879 - DNA, 25 bp, Homo sapien
cctctgtgggtaactctaggagcca

SEQ ID NO: 2675880 - DNA, 25 bp, Homo sapien
tacttggtcaagtcaataggctgcc

SEQ ID NO: 2675881 - DNA, 25 bp, Homo sapien
taaatcggcaaaccacagcagtgct

SEQ ID NO: 2675882 - DNA, 25 bp, Homo sapien
tttaccagaagtgcctgagggcccc

SEQ ID NO: 2675883 - DNA, 25 bp, Homo sapien
gagggccacccacagtcaaatgaat

SEQ ID NO: 2675884 - DNA, 25 bp, Homo sapien
caggctcatgtatcctaagtacctt

SEQ ID NO: 2675885 - DNA, 25 bp, Homo sapien
aggctcatgtatcctaagtaccttc

SEQ ID NO: 2675886 - DNA, 25 bp, Homo sapien
tcctcagagacccgctgtgctgcat

SEQ ID NO: 2675887 - DNA, 25 bp, Homo sapien
ttcctcagagacccgctgtgctgca

SEQ ID NO: 2675888 - DNA, 25 bp, Homo sapien
gctgctccctcactttactttgtcg

SEQ ID NO: 2675889 - DNA, 25 bp, Homo sapien
atgccaaaaacaggtaagatgtccc

SEQ ID NO: 2675890 - DNA, 25 bp, Homo sapien
aagatgtccccatcgctggcattcc

SEQ ID NO: 2675891 - DNA, 25 bp, Homo sapien
actttgtcgagatgaaaagtaatgc

SEQ ID NO: 2675892 - DNA, 25 bp, Homo sapien
ggactcatttcagaccaggagaaag

SEQ ID NO: 2675893 - DNA, 25 bp, Homo sapien
tactgatagaggactcatttcagac

SEQ ID NO: 2675894 - DNA, 25 bp, Homo sapien
gatagaggactcatttcagaccagg

SEQ ID NO: 2675895 - DNA, 25 bp, Homo sapien
ggtgtatactgatagaggactcatt

SEQ ID NO: 2675896 - DNA, 25 bp, Homo sapien
aatgggaccatccagggtcctggca

SEQ ID NO: 2675897 - DNA, 25 bp, Homo sapien
gcaacttgagtgtctatgttccgcc

SEQ ID NO: 2675898 - DNA, 25 bp, Homo sapien
cagacaaggttcttgtgggagctga

SEQ ID NO: 2675899 - DNA, 25 bp, Homo sapien
ccatctcctgtgatgaatgggacca

SEQ ID NO: 2675900 - DNA, 25 bp, Homo sapien
caactgatggcgaactataccatca

SEQ ID NO: 2675901 - DNA, 25 bp, Homo sapien
ctgatggcgaactataccatcatta

SEQ ID NO: 2675902 - DNA, 25 bp, Homo sapien
gatggcgaactataccatcattagc

SEQ ID NO: 2675903 - DNA, 25 bp, Homo sapien
aactgatggcgaactataccatcat

SEQ ID NO: 2675904 - DNA, 25 bp, Homo sapien
gcattctgcattcgtgggcacctga

SEQ ID NO: 2675905 - DNA, 25 bp, Homo sapien
cattcgtgggcacctgaagcaaaaa

SEQ ID NO: 2675906 - DNA, 25 bp, Homo sapien
ccaaggcattctatgctggaacaga

SEQ ID NO: 2675907 - DNA, 25 bp, Homo sapien
caaaaacacatcatcccaaggcatt

SEQ ID NO: 2675908 - DNA, 25 bp, Homo sapien
catacctggacttcacaagactcaa

SEQ ID NO: 2675909 - DNA, 25 bp, Homo sapien
tccccatgcgcaagtagcttttgca

SEQ ID NO: 2675910 - DNA, 25 bp, Homo sapien
gaatcagccagtccacttagatgcc

SEQ ID NO: 2675911 - DNA, 25 bp, Homo sapien
acattctggccgcagtaccgtggca

SEQ ID NO: 2675912 - DNA, 25 bp, Homo sapien
agaaggtggccacgcgcagtccctg

SEQ ID NO: 2675913 - DNA, 25 bp, Homo sapien
aggaattgagccgtgcgctgacacg

SEQ ID NO: 2675914 - DNA, 25 bp, Homo sapien
tattctgattgatgaagagtgtagc

SEQ ID NO: 2675915 - DNA, 25 bp, Homo sapien
tgagccgtgcgctgacacggcagaa

SEQ ID NO: 2675916 - DNA, 25 bp, Homo sapien
gggagaagaataggtaggctctgca

SEQ ID NO: 2675917 - DNA, 25 bp, Homo sapien
ccactcagtgcctccgggttggaaa

SEQ ID NO: 2675918 - DNA, 25 bp, Homo sapien
cagtgcctccgggttggaaattacg

SEQ ID NO: 2675919 - DNA, 25 bp, Homo sapien
aaattacgagtactgacttcttagg

SEQ ID NO: 2675920 - DNA, 25 bp, Homo sapien
ccaggtccgtgagccctcttcccag

SEQ ID NO: 2675921 - DNA, 25 bp, Homo sapien
caaatggattgatgtatgtactggg

SEQ ID NO: 2675922 - DNA, 25 bp, Homo sapien
gaacaatccctgcatggggacctga

SEQ ID NO: 2675923 - DNA, 25 bp, Homo sapien
gacctgagacaccaagtcatggctt

SEQ ID NO: 2675924 - DNA, 25 bp, Homo sapien
tatgtactgggaattctctctcgtc

SEQ ID NO: 2675925 - DNA, 25 bp, Homo sapien
agaaacctggaaaacctccacattg

SEQ ID NO: 2675926 - DNA, 25 bp, Homo sapien
taaagccatgacaggcagtgtcact

SEQ ID NO: 2675927 - DNA, 25 bp, Homo sapien
cacaagggattggatggtaaagcca

SEQ ID NO: 2675928 - DNA, 25 bp, Homo sapien
gattcagggaccatagattccaatt

SEQ ID NO: 2675929 - DNA, 25 bp, Homo sapien
atttcataggccgtggcttcacctt

SEQ ID NO: 2675930 - DNA, 25 bp, Homo sapien
gcgccgtttcttaagccggtctgaa

SEQ ID NO: 2675931 - DNA, 25 bp, Homo sapien
cttaagccggtctgaaaagcgcaat

SEQ ID NO: 2675932 - DNA, 25 bp, Homo sapien
cgcgcacggtgcgcacacacactgg

SEQ ID NO: 2675933 - DNA, 25 bp, Homo sapien
cgcacggtgcgcacacacactggcc

SEQ ID NO: 2675934 - DNA, 25 bp, Homo sapien
aagatggaagctaagggaaaggcga

SEQ ID NO: 2675935 - DNA, 25 bp, Homo sapien
agctaagggaaaggcgatggtggac

SEQ ID NO: 2675936 - DNA, 25 bp, Homo sapien
gatggaagctaagggaaaggcgatg

SEQ ID NO: 2675937 - DNA, 25 bp, Homo sapien
tggaagctaagggaaaggcgatggt

SEQ ID NO: 2675938 - DNA, 25 bp, Homo sapien
tagatagcagctgtcccaaagaaaa

SEQ ID NO: 2675939 - DNA, 25 bp, Homo sapien
gctctggtataagctaaggctggca

SEQ ID NO: 2675940 - DNA, 25 bp, Homo sapien
gatcagttagtgtcaaggagtcaaa

SEQ ID NO: 2675941 - DNA, 25 bp, Homo sapien
caaccagcaatgttgagagctgaac

SEQ ID NO: 2675942 - DNA, 25 bp, Homo sapien
gaaggcccagaacactcatggcaca

SEQ ID NO: 2675943 - DNA, 25 bp, Homo sapien
aatattgcttatagttagtttaagg

SEQ ID NO: 2675944 - DNA, 25 bp, Homo sapien
attatacttgaaggcccagaacact

SEQ ID NO: 2675945 - DNA, 25 bp, Homo sapien
tacttgaaggcccagaacactcatg

SEQ ID NO: 2675946 - DNA, 25 bp, Homo sapien
taacctcttggttcatatgctgaga

SEQ ID NO: 2675947 - DNA, 25 bp, Homo sapien
taaagtatgctttttcactagtccc

SEQ ID NO: 2675948 - DNA, 25 bp, Homo sapien
aaccagtggatgtgcttaacgtaag

SEQ ID NO: 2675949 - DNA, 25 bp, Homo sapien
caaagaatctagtgtgctcagggct

SEQ ID NO: 2675950 - DNA, 25 bp, Homo sapien
aaaggattatagttgccagggtgcc

SEQ ID NO: 2675951 - DNA, 25 bp, Homo sapien
agatggtgatgctagtcttctcagg

SEQ ID NO: 2675952 - DNA, 25 bp, Homo sapien
taatatggtgccagctaaaggttgg

SEQ ID NO: 2675953 - DNA, 25 bp, Homo sapien
gatggaaagtataagagctgctgct

SEQ ID NO: 2675954 - DNA, 25 bp, Homo sapien
ggaccaagaatctggtaaggctgtc

SEQ ID NO: 2675955 - DNA, 25 bp, Homo sapien
acaggcaggagatatggaagaagac

SEQ ID NO: 2675956 - DNA, 25 bp, Homo sapien
ccagcaggagggtatcagacaatta

SEQ ID NO: 2675957 - DNA, 25 bp, Homo sapien
ggctgtctggcccaaaccagcagga

SEQ ID NO: 2675958 - DNA, 25 bp, Homo sapien
ccaagtatctgcgatcacaggctcc

SEQ ID NO: 2675959 - DNA, 25 bp, Homo sapien
ggcatgtgtcatttggtttttttgt

SEQ ID NO: 2675960 - DNA, 25 bp, Homo sapien
agtatctgcgatcacaggctcccgc

SEQ ID NO: 2675961 - DNA, 25 bp, Homo sapien
tggtggtagcggttgtttttgagac

SEQ ID NO: 2675962 - DNA, 25 bp, Homo sapien
tttattactcttgttgaaaatattc

SEQ ID NO: 2675963 - DNA, 25 bp, Homo sapien
ctttattactcttgttgaaaatatt

SEQ ID NO: 2675964 - DNA, 25 bp, Homo sapien
tctttattactcttgttgaaaatat

SEQ ID NO: 2675965 - DNA, 25 bp, Homo sapien
ctctttattactcttgttgaaaata

SEQ ID NO: 2675966 - DNA, 25 bp, Homo sapien
cttccacttctagtcctgcttgcat

SEQ ID NO: 2675967 - DNA, 25 bp, Homo sapien
gcttccacttctagtcctgcttgca

SEQ ID NO: 2675968 - DNA, 25 bp, Homo sapien
cgcttccacttctagtcctgcttgc

SEQ ID NO: 2675969 - DNA, 25 bp, Homo sapien
gtcagtgaggctcggcacgcagaca

SEQ ID NO: 2675970 - DNA, 25 bp, Homo sapien
tccccgattgtcagtgaggctcggc

SEQ ID NO: 2675971 - DNA, 25 bp, Homo sapien
cgattgtcagtgaggctcggcacgc

SEQ ID NO: 2675972 - DNA, 25 bp, Homo sapien
tttccccgattgtcagtgaggctcg

SEQ ID NO: 2675973 - DNA, 25 bp, Homo sapien
gagccttctgttgccgtcgttttgc

SEQ ID NO: 2675974 - DNA, 25 bp, Homo sapien
tgccgtcgttttgctgggcgtctgc

SEQ ID NO: 2675975 - DNA, 25 bp, Homo sapien
ccgtcgttttgctgggcgtctgcat

SEQ ID NO: 2675976 - DNA, 25 bp, Homo sapien
tctgttgccgtcgttttgctgggcg

SEQ ID NO: 2675977 - DNA, 25 bp, Homo sapien
ttcccgtcaccccgcgtagagcgga

SEQ ID NO: 2675978 - DNA, 25 bp, Homo sapien
accccgcgtagagcggaaccatctt

SEQ ID NO: 2675979 - DNA, 25 bp, Homo sapien
gtcaccccgcgtagagcggaaccat

SEQ ID NO: 2675980 - DNA, 25 bp, Homo sapien
cgtcaccccgcgtagagcggaacca

SEQ ID NO: 2675981 - DNA, 25 bp, Homo sapien
tcttcgctgccgctctttactgctg

SEQ ID NO: 2675982 - DNA, 25 bp, Homo sapien
atggctgtgggaggccttcttcgcc

SEQ ID NO: 2675983 - DNA, 25 bp, Homo sapien
tctgtctctagcttcggaaggagcg

SEQ ID NO: 2675984 - DNA, 25 bp, Homo sapien
acagatgacattggttggtatcggg

SEQ ID NO: 2675985 - DNA, 25 bp, Homo sapien
tcggcttcgtctttccgctcttcag

SEQ ID NO: 2675986 - DNA, 25 bp, Homo sapien
tcttcagccaattggtgaactcccc

SEQ ID NO: 2675987 - DNA, 25 bp, Homo sapien
ggactgagtcggcttcgtctttccg

SEQ ID NO: 2675988 - DNA, 25 bp, Homo sapien
tctttccgctcttcagccaattggt

SEQ ID NO: 2675989 - DNA, 25 bp, Homo sapien
tcaggtttccagtcgaatcaggatc

SEQ ID NO: 2675990 - DNA, 25 bp, Homo sapien
cgaaaaagcctaactgcgccagtct

SEQ ID NO: 2675991 - DNA, 25 bp, Homo sapien
caaaccacaaaaggccgcgcagttt

SEQ ID NO: 2675992 - DNA, 25 bp, Homo sapien
gcgcagttttagctcctacacggtg

SEQ ID NO: 2675993 - DNA, 25 bp, Homo sapien
tcaccgatatctgcattgtaactga

SEQ ID NO: 2675994 - DNA, 25 bp, Homo sapien
ccgatatctgcattgtaactgaact

SEQ ID NO: 2675995 - DNA, 25 bp, Homo sapien
gatatctgcattgtaactgaacttt

SEQ ID NO: 2675996 - DNA, 25 bp, Homo sapien
caccgatatctgcattgtaactgaa

SEQ ID NO: 2675997 - DNA, 25 bp, Homo sapien
tgactctggactgccacagaactca

SEQ ID NO: 2675998 - DNA, 25 bp, Homo sapien
cacagaactcaatatcagatactag

SEQ ID NO: 2675999 - DNA, 25 bp, Homo sapien
acaagatgatgtcccaacctgactc

SEQ ID NO: 2676000 - DNA, 25 bp, Homo sapien
caacaagatgatgtcccaacctgac

SEQ ID NO: 2676001 - DNA, 25 bp, Homo sapien
acacaatctctagcacaattcgtac

SEQ ID NO: 2676002 - DNA, 25 bp, Homo sapien
cacacaatctctagcacaattcgta

SEQ ID NO: 2676003 - DNA, 25 bp, Homo sapien
agtaccacacaatctctagcacaat

SEQ ID NO: 2676004 - DNA, 25 bp, Homo sapien
accacacaatctctagcacaattcg

SEQ ID NO: 2676005 - DNA, 25 bp, Homo sapien
acactgactattaacctcttttcaa

SEQ ID NO: 2676006 - DNA, 25 bp, Homo sapien
tattaacctcttttcaatcttccta

SEQ ID NO: 2676007 - DNA, 25 bp, Homo sapien
gactattaacctcttttcaatcttc

SEQ ID NO: 2676008 - DNA, 25 bp, Homo sapien
ctgactattaacctcttttcaatct

SEQ ID NO: 2676009 - DNA, 25 bp, Homo sapien
gccagaacagcagcgttatgcaaat

SEQ ID NO: 2676010 - DNA, 25 bp, Homo sapien
gaacagcagcgttatgcaaatcgta

SEQ ID NO: 2676011 - DNA, 25 bp, Homo sapien
gcagcgttatgcaaatcgtacctat

SEQ ID NO: 2676012 - DNA, 25 bp, Homo sapien
aatcgtacctattctgccaccgggg

SEQ ID NO: 2676013 - DNA, 25 bp, Homo sapien
caattatcctgattttgtgggtgga

SEQ ID NO: 2676014 - DNA, 25 bp, Homo sapien
ggcacatggcatcaattatcctgat

SEQ ID NO: 2676015 - DNA, 25 bp, Homo sapien
ctataaaaggcacatggcatcaatt

SEQ ID NO: 2676016 - DNA, 25 bp, Homo sapien
gcatcaattatcctgattttgtggg

SEQ ID NO: 2676017 - DNA, 25 bp, Homo sapien
gtcacttcatttccctggattccat

SEQ ID NO: 2676018 - DNA, 25 bp, Homo sapien
tttccctggattccattatcttcca

SEQ ID NO: 2676019 - DNA, 25 bp, Homo sapien
ttgtcctgtcacttcatttccctgg

SEQ ID NO: 2676020 - DNA, 25 bp, Homo sapien
gattccattatcttccactgtgcta

SEQ ID NO: 2676021 - DNA, 25 bp, Homo sapien
tagtaacaaatacgctaggtgctgg

SEQ ID NO: 2676022 - DNA, 25 bp, Homo sapien
gaatcgttcatctgtatggagccaa

SEQ ID NO: 2676023 - DNA, 25 bp, Homo sapien
caaagtctagattaccaccagtgca

SEQ ID NO: 2676024 - DNA, 25 bp, Homo sapien
ccagtgcaataccaatcgctagggc

SEQ ID NO: 2676025 - DNA, 25 bp, Homo sapien
gaaataccttggcactattggaggg

SEQ ID NO: 2676026 - DNA, 25 bp, Homo sapien
taactagaagatcacaccagatgtg

SEQ ID NO: 2676027 - DNA, 25 bp, Homo sapien
taagatgtagtatagggaagcatgc

SEQ ID NO: 2676028 - DNA, 25 bp, Homo sapien
tatcagttagaaaccagcagatgtt

SEQ ID NO: 2676029 - DNA, 25 bp, Homo sapien
gtccagtacattcctagaagggtct

SEQ ID NO: 2676030 - DNA, 25 bp, Homo sapien
catgaagaacggatttgagagatgt

SEQ ID NO: 2676031 - DNA, 25 bp, Homo sapien
ttgggtggatgaaagcatgaagaac

SEQ ID NO: 2676032 - DNA, 25 bp, Homo sapien
tgattcactggcactgctgatgaag

SEQ ID NO: 2676033 - DNA, 25 bp, Homo sapien
tagaaacaacggcaatagggctttg

SEQ ID NO: 2676034 - DNA, 25 bp, Homo sapien
tttctcttagaaacaacggcaatag

SEQ ID NO: 2676035 - DNA, 25 bp, Homo sapien
tttactttgacctctccaattgagg

SEQ ID NO: 2676036 - DNA, 25 bp, Homo sapien
tggagttttactttgacctctccaa

SEQ ID NO: 2676037 - DNA, 25 bp, Homo sapien
ggttggtaaaactcttgtctgtctc

SEQ ID NO: 2676038 - DNA, 25 bp, Homo sapien
ctgtctccaggaccagtatgatgca

SEQ ID NO: 2676039 - DNA, 25 bp, Homo sapien
tctgggttggtgatggttggtaaaa

SEQ ID NO: 2676040 - DNA, 25 bp, Homo sapien
ttgtctgtctccaggaccagtatga

SEQ ID NO: 2676041 - DNA, 25 bp, Homo sapien
tgtgtccaatgacatccaggatgtg

SEQ ID NO: 2676042 - DNA, 25 bp, Homo sapien
catggtaaagataacatcactggga

SEQ ID NO: 2676043 - DNA, 25 bp, Homo sapien
catatcatacattaccccagaggtg

SEQ ID NO: 2676044 - DNA, 25 bp, Homo sapien
tggtcagttctaggccatatcatac

SEQ ID NO: 2676045 - DNA, 25 bp, Homo sapien
caaatgtttgttggcgatataaatg

SEQ ID NO: 2676046 - DNA, 25 bp, Homo sapien
agccagagctactaaaggggcctcc

SEQ ID NO: 2676047 - DNA, 25 bp, Homo sapien
tttacatatctgcatcctgtggata

SEQ ID NO: 2676048 - DNA, 25 bp, Homo sapien
gctgtaggaatttaactccccttgc

SEQ ID NO: 2676049 - DNA, 25 bp, Homo sapien
aggtccagccagagctactaaaggg

SEQ ID NO: 2676050 - DNA, 25 bp, Homo sapien
ccaggtggtctgaacattcattact

SEQ ID NO: 2676051 - DNA, 25 bp, Homo sapien
gtggtctgaacattcattactgctc

SEQ ID NO: 2676052 - DNA, 25 bp, Homo sapien
ggtggtctgaacattcattactgct

SEQ ID NO: 2676053 - DNA, 25 bp, Homo sapien
caggtggtctgaacattcattactg

SEQ ID NO: 2676054 - DNA, 25 bp, Homo sapien
gagtactccatacttgaggtgccaa

SEQ ID NO: 2676055 - DNA, 25 bp, Homo sapien
tagttttattcatcgggacaggcaa

SEQ ID NO: 2676056 - DNA, 25 bp, Homo sapien
gaaactatactgtgcactagaggaa

SEQ ID NO: 2676057 - DNA, 25 bp, Homo sapien
cacttggaagctatgcgggattgcc

SEQ ID NO: 2676058 - DNA, 25 bp, Homo sapien
gctgtactgaagtcagctttaggat

SEQ ID NO: 2676059 - DNA, 25 bp, Homo sapien
ggcacacatccaagatgtctgctgt

SEQ ID NO: 2676060 - DNA, 25 bp, Homo sapien
gaaggtggtaatgcaggcaggcaca

SEQ ID NO: 2676061 - DNA, 25 bp, Homo sapien
ttaggtagtcatccaaagtttccac

SEQ ID NO: 2676062 - DNA, 25 bp, Homo sapien
tatcctagggccctaaagaatgatg

SEQ ID NO: 2676063 - DNA, 25 bp, Homo sapien
tatagaagccatagatggtgattcc

SEQ ID NO: 2676064 - DNA, 25 bp, Homo sapien
tggatggcagcacatctaattacag

SEQ ID NO: 2676065 - DNA, 25 bp, Homo sapien
aaatggagcctaaagatctgactga

SEQ ID NO: 2676066 - DNA, 25 bp, Homo sapien
caacagctttgtaagttttgtaatt

SEQ ID NO: 2676067 - DNA, 25 bp, Homo sapien
tgtaattcccttcgtatttagtcat

SEQ ID NO: 2676068 - DNA, 25 bp, Homo sapien
ttgtaattcccttcgtatttagtca

SEQ ID NO: 2676069 - DNA, 25 bp, Homo sapien
ccaacagctttgtaagttttgtaat

SEQ ID NO: 2676070 - DNA, 25 bp, Homo sapien
gaaggtggagcgagtggtgaagctc

SEQ ID NO: 2676071 - DNA, 25 bp, Homo sapien
ctggtaattggtggagaaggtggag

SEQ ID NO: 2676072 - DNA, 25 bp, Homo sapien
gagaaggtggagcgagtggtgaagc

SEQ ID NO: 2676073 - DNA, 25 bp, Homo sapien
aggtggagcgagtggtgaagctcat

SEQ ID NO: 2676074 - DNA, 25 bp, Homo sapien
gcagggaaccgtagctgggctccag

SEQ ID NO: 2676075 - DNA, 25 bp, Homo sapien
tgctgactggcagggaaccgtagct

SEQ ID NO: 2676076 - DNA, 25 bp, Homo sapien
gcactgctgactggcagggaaccgt

SEQ ID NO: 2676077 - DNA, 25 bp, Homo sapien
gggaaccgtagctgggctccaggac

SEQ ID NO: 2676078 - DNA, 25 bp, Homo sapien
ggaaccggagcccccggctcctgca

SEQ ID NO: 2676079 - DNA, 25 bp, Homo sapien
gaaccggagcccccggctcctgcat

SEQ ID NO: 2676080 - DNA, 25 bp, Homo sapien
gcagatctgggaaccggagcccccg

SEQ ID NO: 2676081 - DNA, 25 bp, Homo sapien
cagatctgggaaccggagcccccgg

SEQ ID NO: 2676082 - DNA, 25 bp, Homo sapien
tcctcactcgtccaggtaggtcgtt

SEQ ID NO: 2676083 - DNA, 25 bp, Homo sapien
gctcctcactcgtccaggtaggtcg

SEQ ID NO: 2676084 - DNA, 25 bp, Homo sapien
cactcgtccaggtaggtcgttcagg

SEQ ID NO: 2676085 - DNA, 25 bp, Homo sapien
ctcactcgtccaggtaggtcgttca

SEQ ID NO: 2676086 - DNA, 25 bp, Homo sapien
agtatttgcaaagatctgagccctc

SEQ ID NO: 2676087 - DNA, 25 bp, Homo sapien
aaagatctgagccctcaggtcctcg

SEQ ID NO: 2676088 - DNA, 25 bp, Homo sapien
tgtccacagtatttgcaaagatctg

SEQ ID NO: 2676089 - DNA, 25 bp, Homo sapien
ctgcagaatgatgcgggcattgtcc

SEQ ID NO: 2676090 - DNA, 25 bp, Homo sapien
agcagcagcaaggcagtcattgttg

SEQ ID NO: 2676091 - DNA, 25 bp, Homo sapien
tcagcagcagcaaggcagtcattgt

SEQ ID NO: 2676092 - DNA, 25 bp, Homo sapien
agtcagcagcagcaaggcagtcatt

SEQ ID NO: 2676093 - DNA, 25 bp, Homo sapien
cagcagcaaggcagtcattgttgac

SEQ ID NO: 2676094 - DNA, 25 bp, Homo sapien
ccacggatgtcgctttccgcagact

SEQ ID NO: 2676095 - DNA, 25 bp, Homo sapien
gcccacggatgtcgctttccgcaga

SEQ ID NO: 2676096 - DNA, 25 bp, Homo sapien
tggagcccacggatgtcgctttccg

SEQ ID NO: 2676097 - DNA, 25 bp, Homo sapien
agcccacggatgtcgctttccgcag

SEQ ID NO: 2676098 - DNA, 25 bp, Homo sapien
gggccagatgtctgccacgatcttg

SEQ ID NO: 2676099 - DNA, 25 bp, Homo sapien
tccgagccaggtcgtcatattgggg

SEQ ID NO: 2676100 - DNA, 25 bp, Homo sapien
tcagttcttccgagccaggtcgtca

SEQ ID NO: 2676101 - DNA, 25 bp, Homo sapien
cgagccaggtcgtcatattggggcc

SEQ ID NO: 2676102 - DNA, 25 bp, Homo sapien
agctccatgagcgtcatctcagtag

SEQ ID NO: 2676103 - DNA, 25 bp, Homo sapien
tagctccaaccttggcggactgcat

SEQ ID NO: 2676104 - DNA, 25 bp, Homo sapien
ccatgagcgtcatctcagtagctcc

SEQ ID NO: 2676105 - DNA, 25 bp, Homo sapien
agtagctccaaccttggcggactgc

SEQ ID NO: 2676106 - DNA, 25 bp, Homo sapien
ggtgcagcaaaatcccattgacctt

SEQ ID NO: 2676107 - DNA, 25 bp, Homo sapien
aaaatcccattgaccttctccatct

SEQ ID NO: 2676108 - DNA, 25 bp, Homo sapien
caggtgcagcaaaatcccattgacc

SEQ ID NO: 2676109 - DNA, 25 bp, Homo sapien
gcagcaaaatcccattgaccttctc

SEQ ID NO: 2676110 - DNA, 25 bp, Homo sapien
ctatccagcgggtagtggtatttgg

SEQ ID NO: 2676111 - DNA, 25 bp, Homo sapien
tatccagcgggtagtggtatttgga

SEQ ID NO: 2676112 - DNA, 25 bp, Homo sapien
tccagcgggtagtggtatttggatg

SEQ ID NO: 2676113 - DNA, 25 bp, Homo sapien
atccagcgggtagtggtatttggat

SEQ ID NO: 2676114 - DNA, 25 bp, Homo sapien
gggagaccgatgacaatttccaagg

SEQ ID NO: 2676115 - DNA, 25 bp, Homo sapien
tgatatatgactctgtagccccacc

SEQ ID NO: 2676116 - DNA, 25 bp, Homo sapien
caatagatatggtagtgaacaagac

SEQ ID NO: 2676117 - DNA, 25 bp, Homo sapien
tctagagcggctctgtcatgtagct

SEQ ID NO: 2676118 - DNA, 25 bp, Homo sapien
ttcatctgccctgaatgccttctca

SEQ ID NO: 2676119 - DNA, 25 bp, Homo sapien
gggcactggatggtaagaccccatt

SEQ ID NO: 2676120 - DNA, 25 bp, Homo sapien
tcgtaccatcagtatgcctgcaggt

SEQ ID NO: 2676121 - DNA, 25 bp, Homo sapien
actggatggtaagaccccattcctg

SEQ ID NO: 2676122 - DNA, 25 bp, Homo sapien
tgtccaaagacctttctgtacagtt

SEQ ID NO: 2676123 - DNA, 25 bp, Homo sapien
gttgtccaaagacctttctgtacag

SEQ ID NO: 2676124 - DNA, 25 bp, Homo sapien
tctgtacagtttgaaccataaactg

SEQ ID NO: 2676125 - DNA, 25 bp, Homo sapien
cataaactggattttggtgaacaaa

SEQ ID NO: 2676126 - DNA, 25 bp, Homo sapien
ttatgatgagagctaaacacgcagc

SEQ ID NO: 2676127 - DNA, 25 bp, Homo sapien
tggtttgattgctgagtttgtgttg

SEQ ID NO: 2676128 - DNA, 25 bp, Homo sapien
tgtgttgggtcaaaactccttggaa

SEQ ID NO: 2676129 - DNA, 25 bp, Homo sapien
gggggcacctccatgcaacaagctt

SEQ ID NO: 2676130 - DNA, 25 bp, Homo sapien
ttaatatatgaaaggggtcttaatg

SEQ ID NO: 2676131 - DNA, 25 bp, Homo sapien
agtcatcactctctgtcaatttagg

SEQ ID NO: 2676132 - DNA, 25 bp, Homo sapien
tcatcactctctgtcaatttaggag

SEQ ID NO: 2676133 - DNA, 25 bp, Homo sapien
gtcatcactctctgtcaatttagga

SEQ ID NO: 2676134 - DNA, 25 bp, Homo sapien
aagtcatcactctctgtcaatttag

SEQ ID NO: 2676135 - DNA, 25 bp, Homo sapien
tgagagtactgtgctcactgtgttt

SEQ ID NO: 2676136 - DNA, 25 bp, Homo sapien
gtccctgaactgagagtactgtgct

SEQ ID NO: 2676137 - DNA, 25 bp, Homo sapien
tgaactgagagtactgtgctcactg

SEQ ID NO: 2676138 - DNA, 25 bp, Homo sapien
cctgaactgagagtactgtgctcac

SEQ ID NO: 2676139 - DNA, 25 bp, Homo sapien
gattcacacactcatatttctctgt

SEQ ID NO: 2676140 - DNA, 25 bp, Homo sapien
tcttgattcacacactcatatttct

SEQ ID NO: 2676141 - DNA, 25 bp, Homo sapien
tcatttatcttgattcacacactca

SEQ ID NO: 2676142 - DNA, 25 bp, Homo sapien
tatcttgattcacacactcatattt

SEQ ID NO: 2676143 - DNA, 25 bp, Homo sapien
cttgtgctcatggttctcacagttc

SEQ ID NO: 2676144 - DNA, 25 bp, Homo sapien
tctgaaattgtgaggtgagcggctc

SEQ ID NO: 2676145 - DNA, 25 bp, Homo sapien
tcgatagggctgaatgctgaaggct

SEQ ID NO: 2676146 - DNA, 25 bp, Homo sapien
gccacgttttgacactgaagcttct

SEQ ID NO: 2676147 - DNA, 25 bp, Homo sapien
tggtttgacaatggtatcaggaggt

SEQ ID NO: 2676148 - DNA, 25 bp, Homo sapien
aatggtatcaggaggtcttcagaag

SEQ ID NO: 2676149 - DNA, 25 bp, Homo sapien
gacaatggtatcaggaggtcttcag

SEQ ID NO: 2676150 - DNA, 25 bp, Homo sapien
ttgacaatggtatcaggaggtcttc

SEQ ID NO: 2676151 - DNA, 25 bp, Homo sapien
gaggatcattcaaaccctcgtctcc

SEQ ID NO: 2676152 - DNA, 25 bp, Homo sapien
ctgactgcactgacaggaaatgagg

SEQ ID NO: 2676153 - DNA, 25 bp, Homo sapien
gggacagacttggagagtagaatat

SEQ ID NO: 2676154 - DNA, 25 bp, Homo sapien
cagacttggagagtagaatatgtat

SEQ ID NO: 2676155 - DNA, 25 bp, Homo sapien
gatccctgttgtaaatgacagctgc

SEQ ID NO: 2676156 - DNA, 25 bp, Homo sapien
cagggtggctccaagtgactggctg

SEQ ID NO: 2676157 - DNA, 25 bp, Homo sapien
ttgaaatactcttgagcagctgccc

SEQ ID NO: 2676158 - DNA, 25 bp, Homo sapien
ctcacagcagggtggctccaagtga

SEQ ID NO: 2676159 - DNA, 25 bp, Homo sapien
cggtggttcccctctgcgtatgacc

SEQ ID NO: 2676160 - DNA, 25 bp, Homo sapien
caaggatggcagttgcggtggttcc

SEQ ID NO: 2676161 - DNA, 25 bp, Homo sapien
gacagtcgtagctgtagacaaggat

SEQ ID NO: 2676162 - DNA, 25 bp, Homo sapien
cttcgggcagcaggttcaaagtgac

SEQ ID NO: 2676163 - DNA, 25 bp, Homo sapien
aagaagtatcaaacaatgaggtagg

SEQ ID NO: 2676164 - DNA, 25 bp, Homo sapien
agaagtatcaaacaatgaggtaggt

SEQ ID NO: 2676165 - DNA, 25 bp, Homo sapien
gaagtatcaaacaatgaggtaggtt

SEQ ID NO: 2676166 - DNA, 25 bp, Homo sapien
aagtatcaaacaatgaggtaggttt

SEQ ID NO: 2676167 - DNA, 25 bp, Homo sapien
cagcaacagcatgtctaaaggcaaa

SEQ ID NO: 2676168 - DNA, 25 bp, Homo sapien
caacagcatgtctaaaggcaaaagc

SEQ ID NO: 2676169 - DNA, 25 bp, Homo sapien
tggcagcaacagcatgtctaaaggc

SEQ ID NO: 2676170 - DNA, 25 bp, Homo sapien
acagcatgtctaaaggcaaaagcct

SEQ ID NO: 2676171 - DNA, 25 bp, Homo sapien
tcatcagatgtgtcaactgtttcac

SEQ ID NO: 2676172 - DNA, 25 bp, Homo sapien
gccaaactgtgtctgttatcatcag

SEQ ID NO: 2676173 - DNA, 25 bp, Homo sapien
ctgtttcactcctttcagcattcat

SEQ ID NO: 2676174 - DNA, 25 bp, Homo sapien
gcactgggccaaactgtgtctgtta

SEQ ID NO: 2676175 - DNA, 25 bp, Homo sapien
tcattttgcctgaccaaaacttgtg

SEQ ID NO: 2676176 - DNA, 25 bp, Homo sapien
tatttactgggtatactgggatgta

SEQ ID NO: 2676177 - DNA, 25 bp, Homo sapien
tgtatgcacatgtatccaaatgcca

SEQ ID NO: 2676178 - DNA, 25 bp, Homo sapien
gcctgaccaaaacttgtgaagcata

SEQ ID NO: 2676179 - DNA, 25 bp, Homo sapien
tccccttcagagttcaaacaagact

SEQ ID NO: 2676180 - DNA, 25 bp, Homo sapien
gtttcacggaagtcaactgcagctg

SEQ ID NO: 2676181 - DNA, 25 bp, Homo sapien
aacaagactcttgtttagctctggc

SEQ ID NO: 2676182 - DNA, 25 bp, Homo sapien
gagagaagaccacagattcgcttac

SEQ ID NO: 2676183 - DNA, 25 bp, Homo sapien
ccaatcacagcgcgtcgcccggcgg

SEQ ID NO: 2676184 - DNA, 25 bp, Homo sapien
atcacagcgcgtcgcccggcggacc

SEQ ID NO: 2676185 - DNA, 25 bp, Homo sapien
gcccaatcacagcgcgtcgcccggc

SEQ ID NO: 2676186 - DNA, 25 bp, Homo sapien
cctcccgacgctccgagatgagggg

SEQ ID NO: 2676187 - DNA, 25 bp, Homo sapien
cacaaacgcggagatggcggcggaa

SEQ ID NO: 2676188 - DNA, 25 bp, Homo sapien
cacggattgatgagtttcctcagag

SEQ ID NO: 2676189 - DNA, 25 bp, Homo sapien
gaaaggaacaagatcgcgaggagcc

SEQ ID NO: 2676190 - DNA, 25 bp, Homo sapien
ctacaacttctgggcgggacggtcg

SEQ ID NO: 2676191 - DNA, 25 bp, Homo sapien
gaggcgcgggttcggcagctcccgg

SEQ ID NO: 2676192 - DNA, 25 bp, Homo sapien
cggcaggaaaagttttctcgacgag

SEQ ID NO: 2676193 - DNA, 25 bp, Homo sapien
tgagtcggcaggaaaagttttctcg

SEQ ID NO: 2676194 - DNA, 25 bp, Homo sapien
ttttctcgacgagggcaggcgtgtc

SEQ ID NO: 2676195 - DNA, 25 bp, Homo sapien
aacttgatcgcaagctcagcgccga

SEQ ID NO: 2676196 - DNA, 25 bp, Homo sapien
tcgaggcgagactcgccggcaactg

SEQ ID NO: 2676197 - DNA, 25 bp, Homo sapien
tcagcgccgacctccggcagggcgc

SEQ ID NO: 2676198 - DNA, 25 bp, Homo sapien
cacaaacttgatcgcaagctcagcg

SEQ ID NO: 2676199 - DNA, 25 bp, Homo sapien
acgcccttggccttcgccctggcct

SEQ ID NO: 2676200 - DNA, 25 bp, Homo sapien
ggcgccaccacacgcccttggcctt

SEQ ID NO: 2676201 - DNA, 25 bp, Homo sapien
agtctccggcgccaccacacgccct

SEQ ID NO: 2676202 - DNA, 25 bp, Homo sapien
ttggccttcgccctggcctgccgcc

SEQ ID NO: 2676203 - DNA, 25 bp, Homo sapien
agccaaaggagacagcgcactgtgg

SEQ ID NO: 2676204 - DNA, 25 bp, Homo sapien
ctgtggactctaggaagcagccgcc

SEQ ID NO: 2676205 - DNA, 25 bp, Homo sapien
tgcgggtgcgagtccccgccttgct

SEQ ID NO: 2676206 - DNA, 25 bp, Homo sapien
gaggctcccttctcccgggctgcgc

SEQ ID NO: 2676207 - DNA, 25 bp, Homo sapien
gcatcaggtagagcgagaaaatcac

SEQ ID NO: 2676208 - DNA, 25 bp, Homo sapien
aacacggtgaactggcggcttaact

SEQ ID NO: 2676209 - DNA, 25 bp, Homo sapien
atcaccacacagaagatcgcactgc

SEQ ID NO: 2676210 - DNA, 25 bp, Homo sapien
tagtctaagtgaccccggtccagca

SEQ ID NO: 2676211 - DNA, 25 bp, Homo sapien
caggaacttttaccaagacagaagg

SEQ ID NO: 2676212 - DNA, 25 bp, Homo sapien
taaaccaggtgatcagcaacagcta

SEQ ID NO: 2676213 - DNA, 25 bp, Homo sapien
tccagcaaatacaggtcatcagagc

SEQ ID NO: 2676214 - DNA, 25 bp, Homo sapien
taaaagctgctgctatcaggaactt

SEQ ID NO: 2676215 - DNA, 25 bp, Homo sapien
cttaatactactcgatgagacgcat

SEQ ID NO: 2676216 - DNA, 25 bp, Homo sapien
ccccattttgttcggactcagtata

SEQ ID NO: 2676217 - DNA, 25 bp, Homo sapien
cggactcagtatactgcaatttaaa

SEQ ID NO: 2676218 - DNA, 25 bp, Homo sapien
tactactcgatgagacgcattaccc

SEQ ID NO: 2676219 - DNA, 25 bp, Homo sapien
agtgcaccagcaagaacataggaca

SEQ ID NO: 2676220 - DNA, 25 bp, Homo sapien
tgaagtgcaccagcaagaacatagg

SEQ ID NO: 2676221 - DNA, 25 bp, Homo sapien
accagcaagaacataggacagggtc

SEQ ID NO: 2676222 - DNA, 25 bp, Homo sapien
tgcaccagcaagaacataggacagg

SEQ ID NO: 2676223 - DNA, 25 bp, Homo sapien
attcttcatctcttataaagggaaa

SEQ ID NO: 2676224 - DNA, 25 bp, Homo sapien
taggcctaaagttgatgaatcaaga

SEQ ID NO: 2676225 - DNA, 25 bp, Homo sapien
gaaggctgagaagtaccaaattcct

SEQ ID NO: 2676226 - DNA, 25 bp, Homo sapien
gtcagagtacataacacattcagtc

SEQ ID NO: 2676227 - DNA, 25 bp, Homo sapien
taactgacaaataggatgtgagggc

SEQ ID NO: 2676228 - DNA, 25 bp, Homo sapien
atccctgatggaggacgggtcttcg

SEQ ID NO: 2676229 - DNA, 25 bp, Homo sapien
ctatgtgagcccctcctgaagctgc

SEQ ID NO: 2676230 - DNA, 25 bp, Homo sapien
gctcagtcgtagaggatgaccatcc

SEQ ID NO: 2676231 - DNA, 25 bp, Homo sapien
cctttagtcaacttaagccaggcca

SEQ ID NO: 2676232 - DNA, 25 bp, Homo sapien
tatgctacaaatctctgtccattgg

SEQ ID NO: 2676233 - DNA, 25 bp, Homo sapien
gcttctttaccctctcctttagtca

SEQ ID NO: 2676234 - DNA, 25 bp, Homo sapien
aaggcctttgtctttatatcaggaa

SEQ ID NO: 2676235 - DNA, 25 bp, Homo sapien
cctgaaatctgtgaataccttgcct

SEQ ID NO: 2676236 - DNA, 25 bp, Homo sapien
tgtttagtcaaagatatccctgtcc

SEQ ID NO: 2676237 - DNA, 25 bp, Homo sapien
ctttattttagtccagtagggcctg

SEQ ID NO: 2676238 - DNA, 25 bp, Homo sapien
tagaatatctgagtaggcccaatgt

SEQ ID NO: 2676239 - DNA, 25 bp, Homo sapien
taagcattggctcctgttcaggcta

SEQ ID NO: 2676240 - DNA, 25 bp, Homo sapien
tagtttccgcacttattggccatgt

SEQ ID NO: 2676241 - DNA, 25 bp, Homo sapien
tgtgcccaccatgtaagagcaaaga

SEQ ID NO: 2676242 - DNA, 25 bp, Homo sapien
cattgcttggactggctgtgaaaga

SEQ ID NO: 2676243 - DNA, 25 bp, Homo sapien
caagataattctggactatttccta

SEQ ID NO: 2676244 - DNA, 25 bp, Homo sapien
aagaaccccaagataattctggact

SEQ ID NO: 2676245 - DNA, 25 bp, Homo sapien
tattattttcacctcttgtggggag

SEQ ID NO: 2676246 - DNA, 25 bp, Homo sapien
ccccaagataattctggactatttc

SEQ ID NO: 2676247 - DNA, 25 bp, Homo sapien
cagctggcagggttgaaacaccaat

SEQ ID NO: 2676248 - DNA, 25 bp, Homo sapien
tgggtccctggaatcactgtacaac

SEQ ID NO: 2676249 - DNA, 25 bp, Homo sapien
aaattatgtggttgcctacgagggc

SEQ ID NO: 2676250 - DNA, 25 bp, Homo sapien
cagaaaatcttctccgcggctgcaa

SEQ ID NO: 2676251 - DNA, 25 bp, Homo sapien
ctcaaattgatgactgagtctctaa

SEQ ID NO: 2676252 - DNA, 25 bp, Homo sapien
gatctcattattctcagctagcaaa

SEQ ID NO: 2676253 - DNA, 25 bp, Homo sapien
gtctctaatatttgagatgatctca

SEQ ID NO: 2676254 - DNA, 25 bp, Homo sapien
ctccaaatggtctattttttcttgc

SEQ ID NO: 2676255 - DNA, 25 bp, Homo sapien
attgctttgtgaacttttcggacca

SEQ ID NO: 2676256 - DNA, 25 bp, Homo sapien
tcaactgagagggataattgtgagg

SEQ ID NO: 2676257 - DNA, 25 bp, Homo sapien
gcacatctgaattgtgacttccact

SEQ ID NO: 2676258 - DNA, 25 bp, Homo sapien
agacagtctgcagtgtcaactgaga

SEQ ID NO: 2676259 - DNA, 25 bp, Homo sapien
gccctaatttgcagagccaatgtga

SEQ ID NO: 2676260 - DNA, 25 bp, Homo sapien
ccctcagcagttagtggaaagtaca

SEQ ID NO: 2676261 - DNA, 25 bp, Homo sapien
gacaacaaggctaggtactcaagaa

SEQ ID NO: 2676262 - DNA, 25 bp, Homo sapien
catattcgaaaacgaggccagaagc

SEQ ID NO: 2676263 - DNA, 25 bp, Homo sapien
gtcccattcattagattcataagta

SEQ ID NO: 2676264 - DNA, 25 bp, Homo sapien
tccaccatctggattgtcaaaagaa

SEQ ID NO: 2676265 - DNA, 25 bp, Homo sapien
taagtaatgtcaaatccttgcttcc

SEQ ID NO: 2676266 - DNA, 25 bp, Homo sapien
tcgttatgggaatgaggcaccacaa

SEQ ID NO: 2676267 - DNA, 25 bp, Homo sapien
caagtgttcagctaggccatgagga

SEQ ID NO: 2676268 - DNA, 25 bp, Homo sapien
taatgactcagtaccatgtgccagt

SEQ ID NO: 2676269 - DNA, 25 bp, Homo sapien
ttacatctgcgaagacctgcaagcg

SEQ ID NO: 2676270 - DNA, 25 bp, Homo sapien
tctaggcattcccaacacagcagtg

SEQ ID NO: 2676271 - DNA, 25 bp, Homo sapien
aaaattaaccaaatatttcagcagt

SEQ ID NO: 2676272 - DNA, 25 bp, Homo sapien
aaattaaccaaatatttcagcagtt

SEQ ID NO: 2676273 - DNA, 25 bp, Homo sapien
tcaccctctgagtcaataaaaagtt

SEQ ID NO: 2676274 - DNA, 25 bp, Homo sapien
ctaatcaccctctgagtcaataaaa

SEQ ID NO: 2676275 - DNA, 25 bp, Homo sapien
aatcaccctctgagtcaataaaaag

SEQ ID NO: 2676276 - DNA, 25 bp, Homo sapien
taatcaccctctgagtcaataaaaa

SEQ ID NO: 2676277 - DNA, 25 bp, Homo sapien
caatgagagaccaaaccatctattc

SEQ ID NO: 2676278 - DNA, 25 bp, Homo sapien
tgtcagataaaatgcacagccaagt

SEQ ID NO: 2676279 - DNA, 25 bp, Homo sapien
gctgcttaacatatgtgctcctcaa

SEQ ID NO: 2676280 - DNA, 25 bp, Homo sapien
gaattctaaatagccatacagcgcc

SEQ ID NO: 2676281 - DNA, 25 bp, Homo sapien
tagatgttgacagtttgcttctcct

SEQ ID NO: 2676282 - DNA, 25 bp, Homo sapien
tagaagcacaaagtaacactaatca

SEQ ID NO: 2676283 - DNA, 25 bp, Homo sapien
taatcaaacaacaaatgcgaatgca

SEQ ID NO: 2676284 - DNA, 25 bp, Homo sapien
tacaggcatttgttcccaaaagctg

SEQ ID NO: 2676285 - DNA, 25 bp, Homo sapien
tagtcattgaaagtcttcaaccaac

SEQ ID NO: 2676286 - DNA, 25 bp, Homo sapien
caaataaacttcctccgtgagtctt

SEQ ID NO: 2676287 - DNA, 25 bp, Homo sapien
gagtcttgtctctaaagtagtcatt

SEQ ID NO: 2676288 - DNA, 25 bp, Homo sapien
ctttgaaaggtaagagatctcagac

SEQ ID NO: 2676289 - DNA, 25 bp, Homo sapien
atataaagctaagaattttcaccat

SEQ ID NO: 2676290 - DNA, 25 bp, Homo sapien
gcagtaagccactgcttccagtgga

SEQ ID NO: 2676291 - DNA, 25 bp, Homo sapien
tcaacgaaaacggtatgtgaagaaa

SEQ ID NO: 2676292 - DNA, 25 bp, Homo sapien
ccaaaatcaacgaaaacggtatgtg

SEQ ID NO: 2676293 - DNA, 25 bp, Homo sapien
cttcaatgaagcattatataagaaa

SEQ ID NO: 2676294 - DNA, 25 bp, Homo sapien
ttcaatgaagcattatataagaaag

SEQ ID NO: 2676295 - DNA, 25 bp, Homo sapien
aggtaacaagatccctaatcctaat

SEQ ID NO: 2676296 - DNA, 25 bp, Homo sapien
ttgtctattgggtattcctttgcca

SEQ ID NO: 2676297 - DNA, 25 bp, Homo sapien
tctattgggtattcctttgccataa

SEQ ID NO: 2676298 - DNA, 25 bp, Homo sapien
ccataccaggtaacaagatccctaa

SEQ ID NO: 2676299 - DNA, 25 bp, Homo sapien
tagcacccggtgtctcaggtaaccc

SEQ ID NO: 2676300 - DNA, 25 bp, Homo sapien
ctgcaggaaaagccacgcaggtcat

SEQ ID NO: 2676301 - DNA, 25 bp, Homo sapien
tgatagcacccggtgtctcaggtaa

SEQ ID NO: 2676302 - DNA, 25 bp, Homo sapien
ctcatgatagcacccggtgtctcag

SEQ ID NO: 2676303 - DNA, 25 bp, Homo sapien
caattagttgatcaattaaggcaaa

SEQ ID NO: 2676304 - DNA, 25 bp, Homo sapien
agccacctgtcacaatttcaagctg

SEQ ID NO: 2676305 - DNA, 25 bp, Homo sapien
gcttcatcaggcataacccagccac

SEQ ID NO: 2676306 - DNA, 25 bp, Homo sapien
cactgatgtccttcaattagttgat

SEQ ID NO: 2676307 - DNA, 25 bp, Homo sapien
tccagcacggtttagaagataagcc

SEQ ID NO: 2676308 - DNA, 25 bp, Homo sapien
taactgcataatgaactctctggat

SEQ ID NO: 2676309 - DNA, 25 bp, Homo sapien
gataagcatgtgagaaagtccagca

SEQ ID NO: 2676310 - DNA, 25 bp, Homo sapien
caaagggatcaatagcccagccgga

SEQ ID NO: 2676311 - DNA, 25 bp, Homo sapien
gaatgcctgcgtggccacagaacac

SEQ ID NO: 2676312 - DNA, 25 bp, Homo sapien
gagctgcacaagtatatccttagaa

SEQ ID NO: 2676313 - DNA, 25 bp, Homo sapien
taggaggacaggattaaggctttaa

SEQ ID NO: 2676314 - DNA, 25 bp, Homo sapien
gaacacactgtgaagacaggtggta

SEQ ID NO: 2676315 - DNA, 25 bp, Homo sapien
taaaataaagagccaacacacaaac

SEQ ID NO: 2676316 - DNA, 25 bp, Homo sapien
ctaaaataaagagccaacacacaaa

SEQ ID NO: 2676317 - DNA, 25 bp, Homo sapien
aggtccacaagtgtgagggatgtca

SEQ ID NO: 2676318 - DNA, 25 bp, Homo sapien
tattttaggatcaggtccacaagtg

SEQ ID NO: 2676319 - DNA, 25 bp, Homo sapien
tggcagcatattttaggatcaggtc

SEQ ID NO: 2676320 - DNA, 25 bp, Homo sapien
caagtgtgagggatgtcatagctgt

SEQ ID NO: 2676321 - DNA, 25 bp, Homo sapien
ggagccaggagaactttggtacgaa

SEQ ID NO: 2676322 - DNA, 25 bp, Homo sapien
gaaatcatctcctagtggagccagg

SEQ ID NO: 2676323 - DNA, 25 bp, Homo sapien
tgtattcacagtagcggaaatcatc

SEQ ID NO: 2676324 - DNA, 25 bp, Homo sapien
ggtactgatctagtagcatccgagc

SEQ ID NO: 2676325 - DNA, 25 bp, Homo sapien
taaaacagggaacatcgattggccc

SEQ ID NO: 2676326 - DNA, 25 bp, Homo sapien
agccactccagtaatgatcatctcg

SEQ ID NO: 2676327 - DNA, 25 bp, Homo sapien
gatcatctcgatcggcataagtgaa

SEQ ID NO: 2676328 - DNA, 25 bp, Homo sapien
ggtctggatgtaaaatagccactcc

SEQ ID NO: 2676329 - DNA, 25 bp, Homo sapien
tatttgtgagcttgtctcagggcga

SEQ ID NO: 2676330 - DNA, 25 bp, Homo sapien
gcagttcctgtgatagcatcatgat

SEQ ID NO: 2676331 - DNA, 25 bp, Homo sapien
gcatcatgatgttgaaacagtccca

SEQ ID NO: 2676332 - DNA, 25 bp, Homo sapien
tctggcttctgtcagtgccgtgtaa

SEQ ID NO: 2676333 - DNA, 25 bp, Homo sapien
gagtcgtatgtgagtttgtccttca

SEQ ID NO: 2676334 - DNA, 25 bp, Homo sapien
gagagtaagagtcgtatgtgagttt

SEQ ID NO: 2676335 - DNA, 25 bp, Homo sapien
gtaagagtcgtatgtgagtttgtcc

SEQ ID NO: 2676336 - DNA, 25 bp, Homo sapien
gtcgtatgtgagtttgtccttcaaa

SEQ ID NO: 2676337 - DNA, 25 bp, Homo sapien
ttttatgatgaccatagatgaaatt

SEQ ID NO: 2676338 - DNA, 25 bp, Homo sapien
catttttatgatgaccatagatgaa

SEQ ID NO: 2676339 - DNA, 25 bp, Homo sapien
atttttatgatgaccatagatgaaa

SEQ ID NO: 2676340 - DNA, 25 bp, Homo sapien
tttttatgatgaccatagatgaaat

SEQ ID NO: 2676341 - DNA, 25 bp, Homo sapien
gctccgcactcagccttattatatt

SEQ ID NO: 2676342 - DNA, 25 bp, Homo sapien
tgtggcagagaatcttgtgattttt

SEQ ID NO: 2676343 - DNA, 25 bp, Homo sapien
tggcagagaatcttgtgatttttgt

SEQ ID NO: 2676344 - DNA, 25 bp, Homo sapien
tttgtggcagagaatcttgtgattt

SEQ ID NO: 2676345 - DNA, 25 bp, Homo sapien
taacatattccattcagtcttttgg

SEQ ID NO: 2676346 - DNA, 25 bp, Homo sapien
tttctgaaaacactccagtagacta

SEQ ID NO: 2676347 - DNA, 25 bp, Homo sapien
ccagtagactacagacaagatgaaa

SEQ ID NO: 2676348 - DNA, 25 bp, Homo sapien
ggataatcagggaactagccaacct

SEQ ID NO: 2676349 - DNA, 25 bp, Homo sapien
tcaatgatctatcgttaagtttcct

SEQ ID NO: 2676350 - DNA, 25 bp, Homo sapien
caaaatatggacacagtggaagccc

SEQ ID NO: 2676351 - DNA, 25 bp, Homo sapien
gcggactttcctagctcaatgatct

SEQ ID NO: 2676352 - DNA, 25 bp, Homo sapien
caacagcaatttccttgagcggact

SEQ ID NO: 2676353 - DNA, 25 bp, Homo sapien
gcctgattggtattcagtcttctat

SEQ ID NO: 2676354 - DNA, 25 bp, Homo sapien
gtcttctataccagctctgattctg

SEQ ID NO: 2676355 - DNA, 25 bp, Homo sapien
gtttaatatccaaggtggctgtgcc

SEQ ID NO: 2676356 - DNA, 25 bp, Homo sapien
gcctgatcgcaagtttccaaaaggt

SEQ ID NO: 2676357 - DNA, 25 bp, Homo sapien
gcattaatataacctgaagctgcag

SEQ ID NO: 2676358 - DNA, 25 bp, Homo sapien
gccagtgggtctagaacttaggaga

SEQ ID NO: 2676359 - DNA, 25 bp, Homo sapien
tacgaaatatcactctcaccagaag

SEQ ID NO: 2676360 - DNA, 25 bp, Homo sapien
aagagagctatccacttggccagtg

SEQ ID NO: 2676361 - DNA, 25 bp, Homo sapien
ctgctttgggttaataattagcttt

SEQ ID NO: 2676362 - DNA, 25 bp, Homo sapien
gaactgctttgggttaataattagc

SEQ ID NO: 2676363 - DNA, 25 bp, Homo sapien
tctgaactgctttgggttaataatt

SEQ ID NO: 2676364 - DNA, 25 bp, Homo sapien
ctttgggttaataattagctttatg

SEQ ID NO: 2676365 - DNA, 25 bp, Homo sapien
cacaaagttgtgaggtgttctgaag

SEQ ID NO: 2676366 - DNA, 25 bp, Homo sapien
ttcaggatcaggataccttcactaa

SEQ ID NO: 2676367 - DNA, 25 bp, Homo sapien
ctccctgactttttcaggatcagga

SEQ ID NO: 2676368 - DNA, 25 bp, Homo sapien
gaagtccaagatgggcttgaagccc

SEQ ID NO: 2676369 - DNA, 25 bp, Homo sapien
gggttaccagcaaacttgtactgaa

SEQ ID NO: 2676370 - DNA, 25 bp, Homo sapien
tagaaatttagtgtaaggaggccag

SEQ ID NO: 2676371 - DNA, 25 bp, Homo sapien
caaaaactgagtgtatgggttacca

SEQ ID NO: 2676372 - DNA, 25 bp, Homo sapien
caatacttattgttaggtggcagca

SEQ ID NO: 2676373 - DNA, 25 bp, Homo sapien
gattcctgggctcttgagtcagaca

SEQ ID NO: 2676374 - DNA, 25 bp, Homo sapien
cagtgaacgatttaacaaacccagg

SEQ ID NO: 2676375 - DNA, 25 bp, Homo sapien
tggtatcctgaccaaggaccctggc

SEQ ID NO: 2676376 - DNA, 25 bp, Homo sapien
tgtttagaaaaccacctagctcaga

SEQ ID NO: 2676377 - DNA, 25 bp, Homo sapien
gttctttgggtgctccactacagcc

SEQ ID NO: 2676378 - DNA, 25 bp, Homo sapien
agaatccctactggcatgttctttg

SEQ ID NO: 2676379 - DNA, 25 bp, Homo sapien
taggcacactaagcctagaatccct

SEQ ID NO: 2676380 - DNA, 25 bp, Homo sapien
tctttgggtgctccactacagccaa

SEQ ID NO: 2676381 - DNA, 25 bp, Homo sapien
cgagattcggtcttgttctaaagga

SEQ ID NO: 2676382 - DNA, 25 bp, Homo sapien
catagactgagaccaacgagattcg

SEQ ID NO: 2676383 - DNA, 25 bp, Homo sapien
caaactgcgctgacttgaacttcca

SEQ ID NO: 2676384 - DNA, 25 bp, Homo sapien
tagtatttgctgtatcccaaactgc

SEQ ID NO: 2676385 - DNA, 25 bp, Homo sapien
ggagttctctagtgttataccttct

SEQ ID NO: 2676386 - DNA, 25 bp, Homo sapien
tctttatggtgaaaattccgctatc

SEQ ID NO: 2676387 - DNA, 25 bp, Homo sapien
ccaatggcggtatatgtgctcgaaa

SEQ ID NO: 2676388 - DNA, 25 bp, Homo sapien
tatacactttcagtcccaatggcgg

SEQ ID NO: 2676389 - DNA, 25 bp, Homo sapien
catcaggtaagaagaggtaggcacc

SEQ ID NO: 2676390 - DNA, 25 bp, Homo sapien
cttggcattaccatcaggtaagaag

SEQ ID NO: 2676391 - DNA, 25 bp, Homo sapien
catttacttcatggtgtttaccatc

SEQ ID NO: 2676392 - DNA, 25 bp, Homo sapien
ggttccataccatgaaaattgcaca

SEQ ID NO: 2676393 - DNA, 25 bp, Homo sapien
ccgaataaatccttccatgtgtcac

SEQ ID NO: 2676394 - DNA, 25 bp, Homo sapien
acaaagggcggtgttgtgtaaacat

SEQ ID NO: 2676395 - DNA, 25 bp, Homo sapien
catgtgtcactctgacaaagggcgg

SEQ ID NO: 2676396 - DNA, 25 bp, Homo sapien
cctgtatgtggtatagtcggactct

SEQ ID NO: 2676397 - DNA, 25 bp, Homo sapien
tacattccagtgatacaggctatat

SEQ ID NO: 2676398 - DNA, 25 bp, Homo sapien
cagggttaagttctcaaaaggatca

SEQ ID NO: 2676399 - DNA, 25 bp, Homo sapien
aaatctgtagttggaaaagcacacc

SEQ ID NO: 2676400 - DNA, 25 bp, Homo sapien
gcaagtctttggaaaccacagctcc

SEQ ID NO: 2676401 - DNA, 25 bp, Homo sapien
gaatattttgtcaggtatgcgttag

SEQ ID NO: 2676402 - DNA, 25 bp, Homo sapien
gtaggttgaactatacggcctctca

SEQ ID NO: 2676403 - DNA, 25 bp, Homo sapien
atctggtactaacaacaaataggct

SEQ ID NO: 2676404 - DNA, 25 bp, Homo sapien
tcttcctggattgaaaatctggtac

SEQ ID NO: 2676405 - DNA, 25 bp, Homo sapien
cttgggatgctgttaatctatggcc

SEQ ID NO: 2676406 - DNA, 25 bp, Homo sapien
ttgggatgctgttaatctatggcct

SEQ ID NO: 2676407 - DNA, 25 bp, Homo sapien
gccttgggatgctgttaatctatgg

SEQ ID NO: 2676408 - DNA, 25 bp, Homo sapien
gggatgctgttaatctatggcctta

SEQ ID NO: 2676409 - DNA, 25 bp, Homo sapien
ggcactggcagttactctgaactta

SEQ ID NO: 2676410 - DNA, 25 bp, Homo sapien
ttttggagggatcataataccgaca

SEQ ID NO: 2676411 - DNA, 25 bp, Homo sapien
cactcccctacgaggtgaataaaat

SEQ ID NO: 2676412 - DNA, 25 bp, Homo sapien
taaggcacctttaggcaggaaaaga

SEQ ID NO: 2676413 - DNA, 25 bp, Homo sapien
acaatagcaaatggcccacggtcac

SEQ ID NO: 2676414 - DNA, 25 bp, Homo sapien
ccaagtaggtcaccgtcaggaggct

SEQ ID NO: 2676415 - DNA, 25 bp, Homo sapien
caggcttacagggttttagcaccac

SEQ ID NO: 2676416 - DNA, 25 bp, Homo sapien
cacacgccatgcctgaaatatgagg

SEQ ID NO: 2676417 - DNA, 25 bp, Homo sapien
caaaaagcgtgctccctcgtgtggg

SEQ ID NO: 2676418 - DNA, 25 bp, Homo sapien
tcactcgcccaaggacaagactggc

SEQ ID NO: 2676419 - DNA, 25 bp, Homo sapien
gaccaactattggagaaggctcaag

SEQ ID NO: 2676420 - DNA, 25 bp, Homo sapien
taagcgagtagagagaagacctcca

SEQ ID NO: 2676421 - DNA, 25 bp, Homo sapien
gctcaagttactctgggaccaaggg

SEQ ID NO: 2676422 - DNA, 25 bp, Homo sapien
gaaagcctgtcctttatcatgcaga

SEQ ID NO: 2676423 - DNA, 25 bp, Homo sapien
tatactgagtgaagggtggtaaacg

SEQ ID NO: 2676424 - DNA, 25 bp, Homo sapien
catgggaggaaagtaaactgggcta

SEQ ID NO: 2676425 - DNA, 25 bp, Homo sapien
tgttcccagcacgtagacatgtaca

SEQ ID NO: 2676426 - DNA, 25 bp, Homo sapien
caacgcaaggtagaacagagccagt

SEQ ID NO: 2676427 - DNA, 25 bp, Homo sapien
gaaatatgtgccctcttgctgctaa

SEQ ID NO: 2676428 - DNA, 25 bp, Homo sapien
tgcaaaccagcagtatccagtggtc

SEQ ID NO: 2676429 - DNA, 25 bp, Homo sapien
gaaagaaaggagtgatgccattccc

SEQ ID NO: 2676430 - DNA, 25 bp, Homo sapien
gaaattttcattgcaatctcacggt

SEQ ID NO: 2676431 - DNA, 25 bp, Homo sapien
tattggaaacttccacagactgtcc

SEQ ID NO: 2676432 - DNA, 25 bp, Homo sapien
ggttatatacttttcggatgtccac

SEQ ID NO: 2676433 - DNA, 25 bp, Homo sapien
ctggtacccatttaggtcagtataa

SEQ ID NO: 2676434 - DNA, 25 bp, Homo sapien
tttgcttgaagaggcaatttgctca

SEQ ID NO: 2676435 - DNA, 25 bp, Homo sapien
gaagaggcaatttgctcagtgtcat

SEQ ID NO: 2676436 - DNA, 25 bp, Homo sapien
catttgcttgaagaggcaatttgct

SEQ ID NO: 2676437 - DNA, 25 bp, Homo sapien
gcttgaagaggcaatttgctcagtg

SEQ ID NO: 2676438 - DNA, 25 bp, Homo sapien
aactcgaaacccctaatgactgagc

SEQ ID NO: 2676439 - DNA, 25 bp, Homo sapien
atgtttggcatcctggatataggcc

SEQ ID NO: 2676440 - DNA, 25 bp, Homo sapien
agagcagtgtcaaacgatgtttggc

SEQ ID NO: 2676441 - DNA, 25 bp, Homo sapien
gaaacccctaatgactgagcagaga

SEQ ID NO: 2676442 - DNA, 25 bp, Homo sapien
aaggccacgattatcatcttgcatg

SEQ ID NO: 2676443 - DNA, 25 bp, Homo sapien
ccacgattatcatcttgcatgagtc

SEQ ID NO: 2676444 - DNA, 25 bp, Homo sapien
tgctcaaggccacgattatcatctt

SEQ ID NO: 2676445 - DNA, 25 bp, Homo sapien
tcaaggccacgattatcatcttgca

SEQ ID NO: 2676446 - DNA, 25 bp, Homo sapien
gattagctgtaatcttgttatcctg

SEQ ID NO: 2676447 - DNA, 25 bp, Homo sapien
tagattagctgtaatcttgttatcc

SEQ ID NO: 2676448 - DNA, 25 bp, Homo sapien
tttttctagtagtattcgaaataga

SEQ ID NO: 2676449 - DNA, 25 bp, Homo sapien
agtagtattcgaaatagattagctg

SEQ ID NO: 2676450 - DNA, 25 bp, Homo sapien
aaatctcttcctattcagggagtat

SEQ ID NO: 2676451 - DNA, 25 bp, Homo sapien
tctctgaggacaggacttacttcca

SEQ ID NO: 2676452 - DNA, 25 bp, Homo sapien
cacctgcacatattacacagtggat

SEQ ID NO: 2676453 - DNA, 25 bp, Homo sapien
tagtcagctcgggattatttccatg

SEQ ID NO: 2676454 - DNA, 25 bp, Homo sapien
ctcattaaccaaccagtagcaggaa

SEQ ID NO: 2676455 - DNA, 25 bp, Homo sapien
gcaggcattcagtcctattgtggaa

SEQ ID NO: 2676456 - DNA, 25 bp, Homo sapien
gggttcctagctcagtgcctcatta

SEQ ID NO: 2676457 - DNA, 25 bp, Homo sapien
ttgtggaaacaatcagctggagctg

SEQ ID NO: 2676458 - DNA, 25 bp, Homo sapien
taaggctcagataaaaggcttggct

SEQ ID NO: 2676459 - DNA, 25 bp, Homo sapien
aaattttaagacagcagagggacac

SEQ ID NO: 2676460 - DNA, 25 bp, Homo sapien
tataaataacataggcggcatgcct

SEQ ID NO: 2676461 - DNA, 25 bp, Homo sapien
caaaaagtgactagcatcgtgccag

SEQ ID NO: 2676462 - DNA, 25 bp, Homo sapien
ggagaacttatttgccattggaatg

SEQ ID NO: 2676463 - DNA, 25 bp, Homo sapien
agaagaagttatgtggctaaggaga

SEQ ID NO: 2676464 - DNA, 25 bp, Homo sapien
gctaaggagagaaggataactgacc

SEQ ID NO: 2676465 - DNA, 25 bp, Homo sapien
gactggatgattcatgagagaagaa

SEQ ID NO: 2676466 - DNA, 25 bp, Homo sapien
tgttctcaaattaaccagatgaatg

SEQ ID NO: 2676467 - DNA, 25 bp, Homo sapien
aaggcaaagatgactgtaatggaga

SEQ ID NO: 2676468 - DNA, 25 bp, Homo sapien
aagatgactgtaatggagagaattc

SEQ ID NO: 2676469 - DNA, 25 bp, Homo sapien
tgactgtattgttctcaaattaacc

SEQ ID NO: 2676470 - DNA, 25 bp, Homo sapien
caagttccaggcttcgtttacagaa

SEQ ID NO: 2676471 - DNA, 25 bp, Homo sapien
taaaacaactacagtggaggagcca

SEQ ID NO: 2676472 - DNA, 25 bp, Homo sapien
gaaggtaaaaccctatgctcactga

SEQ ID NO: 2676473 - DNA, 25 bp, Homo sapien
tgaaccaattcagtaggcaacggga

SEQ ID NO: 2676474 - DNA, 25 bp, Homo sapien
ccagcatggtagttatcaataggca

SEQ ID NO: 2676475 - DNA, 25 bp, Homo sapien
taaatatgtgctaagagtcaaaggc

SEQ ID NO: 2676476 - DNA, 25 bp, Homo sapien
gtcaaaggctaacacaggaactggc

SEQ ID NO: 2676477 - DNA, 25 bp, Homo sapien
ccttcctttggattactagtgggct

SEQ ID NO: 2676478 - DNA, 25 bp, Homo sapien
cactagctatgaatttgtgctcata

SEQ ID NO: 2676479 - DNA, 25 bp, Homo sapien
ttgcactagctatgaatttgtgctc

SEQ ID NO: 2676480 - DNA, 25 bp, Homo sapien
ctttgcactagctatgaatttgtgc

SEQ ID NO: 2676481 - DNA, 25 bp, Homo sapien
ctagctatgaatttgtgctcataga

SEQ ID NO: 2676482 - DNA, 25 bp, Homo sapien
caaatagcaatgaccaccagtgatc

SEQ ID NO: 2676483 - DNA, 25 bp, Homo sapien
tgtgtgccatatcctgtacagaatg

SEQ ID NO: 2676484 - DNA, 25 bp, Homo sapien
gcaagctaagctggacctgtgaaga

SEQ ID NO: 2676485 - DNA, 25 bp, Homo sapien
tctgaagactgagggtcaaccgcag

SEQ ID NO: 2676486 - DNA, 25 bp, Homo sapien
ggaatatgcccaaacgcctgatcat

SEQ ID NO: 2676487 - DNA, 25 bp, Homo sapien
ggagatctggatccttgctctgcaa

SEQ ID NO: 2676488 - DNA, 25 bp, Homo sapien
gacaagtcagctaagagggtcagta

SEQ ID NO: 2676489 - DNA, 25 bp, Homo sapien
cagaatgcgctagtgcacgagctgt

SEQ ID NO: 2676490 - DNA, 25 bp, Homo sapien
ttttctgtggaggatcaaggctgcc

SEQ ID NO: 2676491 - DNA, 25 bp, Homo sapien
acagccctgtgcctttgctagagaa

SEQ ID NO: 2676492 - DNA, 25 bp, Homo sapien
caaggctgcctcattggagtgccca

SEQ ID NO: 2676493 - DNA, 25 bp, Homo sapien
gctagagaaccgacaatcaaaccct

SEQ ID NO: 2676494 - DNA, 25 bp, Homo sapien
tttcaaagcacactaacagtaagca

SEQ ID NO: 2676495 - DNA, 25 bp, Homo sapien
gccttcaaatgtgcataaattccag

SEQ ID NO: 2676496 - DNA, 25 bp, Homo sapien
tgagacagtaaagaagcaatgaaac

SEQ ID NO: 2676497 - DNA, 25 bp, Homo sapien
attgtcaagatcctttgcagaaaga

SEQ ID NO: 2676498 - DNA, 25 bp, Homo sapien
atttagatcaactttgaagattagc

SEQ ID NO: 2676499 - DNA, 25 bp, Homo sapien
tacatatttagatcaactttgaaga

SEQ ID NO: 2676500 - DNA, 25 bp, Homo sapien
gatcaactttgaagattagcagcac

SEQ ID NO: 2676501 - DNA, 25 bp, Homo sapien
tagatcaactttgaagattagcagc

SEQ ID NO: 2676502 - DNA, 25 bp, Homo sapien
tgatgaaggtgtgagactttcgaca

SEQ ID NO: 2676503 - DNA, 25 bp, Homo sapien
gaaggtgtgagactttcgacaataa

SEQ ID NO: 2676504 - DNA, 25 bp, Homo sapien
gtgagactttcgacaataaacttgt

SEQ ID NO: 2676505 - DNA, 25 bp, Homo sapien
ggtgtgagactttcgacaataaact

SEQ ID NO: 2676506 - DNA, 25 bp, Homo sapien
ctcaactggattcggaatgtgctga

SEQ ID NO: 2676507 - DNA, 25 bp, Homo sapien
ttatattctgagtgccgggaggtga

SEQ ID NO: 2676508 - DNA, 25 bp, Homo sapien
ctcacttatattctgagtgccggga

SEQ ID NO: 2676509 - DNA, 25 bp, Homo sapien
ccattggactcaagttgatctcact

SEQ ID NO: 2676510 - DNA, 25 bp, Homo sapien
gatccatcgcaaacaaccagaagtg

SEQ ID NO: 2676511 - DNA, 25 bp, Homo sapien
tattgcacgtcaaaccaagaaaggt

SEQ ID NO: 2676512 - DNA, 25 bp, Homo sapien
tatgtgtcatagaaagtacccaccc

SEQ ID NO: 2676513 - DNA, 25 bp, Homo sapien
tggcacacgggctcagaacttcact

SEQ ID NO: 2676514 - DNA, 25 bp, Homo sapien
ttttggttgacatttggaagggtca

SEQ ID NO: 2676515 - DNA, 25 bp, Homo sapien
tttggttgacatttggaagggtcat

SEQ ID NO: 2676516 - DNA, 25 bp, Homo sapien
ctccagtttttggttgacatttgga

SEQ ID NO: 2676517 - DNA, 25 bp, Homo sapien
cagtttttggttgacatttggaagg

SEQ ID NO: 2676518 - DNA, 25 bp, Homo sapien
tatggctgaaaaatccatcccaaga

SEQ ID NO: 2676519 - DNA, 25 bp, Homo sapien
ttccatatagctggtccgaaattat

SEQ ID NO: 2676520 - DNA, 25 bp, Homo sapien
ctgcatatggctgaaaaatccatcc

SEQ ID NO: 2676521 - DNA, 25 bp, Homo sapien
catatagctggtccgaaattatttc

SEQ ID NO: 2676522 - DNA, 25 bp, Homo sapien
agtggacccatggaccttcagatcc

SEQ ID NO: 2676523 - DNA, 25 bp, Homo sapien
tccatgggatgcccccgggcagtag

SEQ ID NO: 2676524 - DNA, 25 bp, Homo sapien
gtctttgctcccacaatcccctcca

SEQ ID NO: 2676525 - DNA, 25 bp, Homo sapien
tggacccatggaccttcagatccac

SEQ ID NO: 2676526 - DNA, 25 bp, Homo sapien
aattggttaacaaggattccagtca

SEQ ID NO: 2676527 - DNA, 25 bp, Homo sapien
tcatagcatattatagcattctgct

SEQ ID NO: 2676528 - DNA, 25 bp, Homo sapien
tattatagcattctgctggctggac

SEQ ID NO: 2676529 - DNA, 25 bp, Homo sapien
gaattggttaacaaggattccagtc

SEQ ID NO: 2676530 - DNA, 25 bp, Homo sapien
gagcttcgaccttcatgctggtctc

SEQ ID NO: 2676531 - DNA, 25 bp, Homo sapien
ggtggtgtgagcttcgaccttcatg

SEQ ID NO: 2676532 - DNA, 25 bp, Homo sapien
ttcatgctggtctcaacggggaggc

SEQ ID NO: 2676533 - DNA, 25 bp, Homo sapien
tgtgagcttcgaccttcatgctggt

SEQ ID NO: 2676534 - DNA, 25 bp, Homo sapien
ccgtaggcaggtgaggggtgaaatg

SEQ ID NO: 2676535 - DNA, 25 bp, Homo sapien
cgtaggcaggtgaggggtgaaatga

SEQ ID NO: 2676536 - DNA, 25 bp, Homo sapien
caggtgaccgtaggcaggtgagggg

SEQ ID NO: 2676537 - DNA, 25 bp, Homo sapien
tgaccgtaggcaggtgaggggtgaa

SEQ ID NO: 2676538 - DNA, 25 bp, Homo sapien
acagaggccatcacttggacgacca

SEQ ID NO: 2676539 - DNA, 25 bp, Homo sapien
aaaactcagacgaaactcgggcctg

SEQ ID NO: 2676540 - DNA, 25 bp, Homo sapien
atgacctgccaggacgaccgtgtgg

SEQ ID NO: 2676541 - DNA, 25 bp, Homo sapien
caaagccttgtcaggcacgagggta

SEQ ID NO: 2676542 - DNA, 25 bp, Homo sapien
tcgaggaggcaacagacaagtagaa

SEQ ID NO: 2676543 - DNA, 25 bp, Homo sapien
cgaggaggcaacagacaagtagaaa

SEQ ID NO: 2676544 - DNA, 25 bp, Homo sapien
caaatgctgcgtttgggtatttgtt

SEQ ID NO: 2676545 - DNA, 25 bp, Homo sapien
ctcgaggaggcaacagacaagtaga

SEQ ID NO: 2676546 - DNA, 25 bp, Homo sapien
ggctgcattgcagttacgtgctgtt

SEQ ID NO: 2676547 - DNA, 25 bp, Homo sapien
acccaatggccgagtggcgctcagg

SEQ ID NO: 2676548 - DNA, 25 bp, Homo sapien
ctcacagcatcacccagtcctgagg

SEQ ID NO: 2676549 - DNA, 25 bp, Homo sapien
gacacggggttcatgctccctcaca

SEQ ID NO: 2676550 - DNA, 25 bp, Homo sapien
tcgagggagcgctccgaaactacat

SEQ ID NO: 2676551 - DNA, 25 bp, Homo sapien
cgccagtgtcattcgctgcagatga

SEQ ID NO: 2676552 - DNA, 25 bp, Homo sapien
gatgacaggacacagcgctgcagtt

SEQ ID NO: 2676553 - DNA, 25 bp, Homo sapien
gagatcttccgatgtcacgccagtg

SEQ ID NO: 2676554 - DNA, 25 bp, Homo sapien
ggcgggaaccctcctcgtcaagcca

SEQ ID NO: 2676555 - DNA, 25 bp, Homo sapien
gcagcgtatcactggaagcggccgc

SEQ ID NO: 2676556 - DNA, 25 bp, Homo sapien
cctcctcgtcaagccagcctggcag

SEQ ID NO: 2676557 - DNA, 25 bp, Homo sapien
cagcctggcagcgtatcactggaag

SEQ ID NO: 2676558 - DNA, 25 bp, Homo sapien
aacccactgggtcgtgaacaggtcg

SEQ ID NO: 2676559 - DNA, 25 bp, Homo sapien
ctggactccgacttgcaagcttggg

SEQ ID NO: 2676560 - DNA, 25 bp, Homo sapien
caagcgtcttcaaaggccgcacaga

SEQ ID NO: 2676561 - DNA, 25 bp, Homo sapien
aacaggtcgaactaactggactccg

SEQ ID NO: 2676562 - DNA, 25 bp, Homo sapien
cctaaggaagaggaacgtggaatct

SEQ ID NO: 2676563 - DNA, 25 bp, Homo sapien
cactgtctctgaacaacctaaggaa

SEQ ID NO: 2676564 - DNA, 25 bp, Homo sapien
tctggagaatagctggcttccaggc

SEQ ID NO: 2676565 - DNA, 25 bp, Homo sapien
aggctggaccactgcagagccaagg

SEQ ID NO: 2676566 - DNA, 25 bp, Homo sapien
cactattgccggtgccgtttggata

SEQ ID NO: 2676567 - DNA, 25 bp, Homo sapien
ccagcactattgccggtgccgtttg

SEQ ID NO: 2676568 - DNA, 25 bp, Homo sapien
actattgccggtgccgtttggataa

SEQ ID NO: 2676569 - DNA, 25 bp, Homo sapien
agcactattgccggtgccgtttgga

SEQ ID NO: 2676570 - DNA, 25 bp, Homo sapien
cagcaaagcagccattgaaggggtt

SEQ ID NO: 2676571 - DNA, 25 bp, Homo sapien
tcagcaaagcagccattgaaggggt

SEQ ID NO: 2676572 - DNA, 25 bp, Homo sapien
aaagcagccattgaaggggttttgt

SEQ ID NO: 2676573 - DNA, 25 bp, Homo sapien
gcaaagcagccattgaaggggtttt

SEQ ID NO: 2676574 - DNA, 25 bp, Homo sapien
ggccatttgtgactgatgcctcagt

SEQ ID NO: 2676575 - DNA, 25 bp, Homo sapien
gtgactgatgcctcagtcaggcgca

SEQ ID NO: 2676576 - DNA, 25 bp, Homo sapien
ccatttgtgactgatgcctcagtca

SEQ ID NO: 2676577 - DNA, 25 bp, Homo sapien
tttgtgactgatgcctcagtcaggc

SEQ ID NO: 2676578 - DNA, 25 bp, Homo sapien
tcattaacaatggagccgctacagc

SEQ ID NO: 2676579 - DNA, 25 bp, Homo sapien
tgtaaattcgcaaaagactccccag

SEQ ID NO: 2676580 - DNA, 25 bp, Homo sapien
tgatcggcccttgatgaaagaagac

SEQ ID NO: 2676581 - DNA, 25 bp, Homo sapien
cttatgaatcggagacaacctggta

SEQ ID NO: 2676582 - DNA, 25 bp, Homo sapien
ggaaggtgatccacaaatagggtaa

SEQ ID NO: 2676583 - DNA, 25 bp, Homo sapien
gatgttgacgtgtcctggctttctc

SEQ ID NO: 2676584 - DNA, 25 bp, Homo sapien
cactagcacattggttcctgcaaac

SEQ ID NO: 2676585 - DNA, 25 bp, Homo sapien
acttcagtccactttgatgttgacg

SEQ ID NO: 2676586 - DNA, 25 bp, Homo sapien
ttaggaaatggagcatctgctgaat

SEQ ID NO: 2676587 - DNA, 25 bp, Homo sapien
tctagactaagtgttttaggaaatg

SEQ ID NO: 2676588 - DNA, 25 bp, Homo sapien
taggtgctttcatgaggagaagttc

SEQ ID NO: 2676589 - DNA, 25 bp, Homo sapien
ggctgtcatttgtttatctagacta

SEQ ID NO: 2676590 - DNA, 25 bp, Homo sapien
cagcagatccgtcagtttgcagaaa

SEQ ID NO: 2676591 - DNA, 25 bp, Homo sapien
agcaacaccgttccctgagttttgg

SEQ ID NO: 2676592 - DNA, 25 bp, Homo sapien
tccagcaacaccgttccctgagttt

SEQ ID NO: 2676593 - DNA, 25 bp, Homo sapien
gaagcagaaatacaacagcagatcc

SEQ ID NO: 2676594 - DNA, 25 bp, Homo sapien
gcaaaagcaagggcgttttcacagg

SEQ ID NO: 2676595 - DNA, 25 bp, Homo sapien
tctaggtctattttgtccagtgcac

SEQ ID NO: 2676596 - DNA, 25 bp, Homo sapien
cggcgcccttgttcagcaaaagcaa

SEQ ID NO: 2676597 - DNA, 25 bp, Homo sapien
gaactctgtactgtccacctgtggg

SEQ ID NO: 2676598 - DNA, 25 bp, Homo sapien
gttcaattgtgaaatccaagtgaat

SEQ ID NO: 2676599 - DNA, 25 bp, Homo sapien
tacatttagtaaggccttctcccca

SEQ ID NO: 2676600 - DNA, 25 bp, Homo sapien
tccagcaatcacaagttcaattgtg

SEQ ID NO: 2676601 - DNA, 25 bp, Homo sapien
tttgtccaagcctagacttatctgt

SEQ ID NO: 2676602 - DNA, 25 bp, Homo sapien
ctgtgaggagttagcactcacagaa

SEQ ID NO: 2676603 - DNA, 25 bp, Homo sapien
cagaagtaagcttactcacaggagt

SEQ ID NO: 2676604 - DNA, 25 bp, Homo sapien
tagcactcacagaagtaagcttact

SEQ ID NO: 2676605 - DNA, 25 bp, Homo sapien
gcttactcacaggagtaagctggct

SEQ ID NO: 2676606 - DNA, 25 bp, Homo sapien
tctctggttgccacttattccagat

SEQ ID NO: 2676607 - DNA, 25 bp, Homo sapien
ttctctggttgccacttattccaga

SEQ ID NO: 2676608 - DNA, 25 bp, Homo sapien
agagcctgcgcctccaagcccaagt

SEQ ID NO: 2676609 - DNA, 25 bp, Homo sapien
cactgtaatgagtacaatcagcttc

SEQ ID NO: 2676610 - DNA, 25 bp, Homo sapien
caagtctcgagcactgtaatgagta

SEQ ID NO: 2676611 - DNA, 25 bp, Homo sapien
tccaagcccaagtctcgagcactgt

SEQ ID NO: 2676612 - DNA, 25 bp, Homo sapien
ctttgtgtcctccaggtttggcatt

SEQ ID NO: 2676613 - DNA, 25 bp, Homo sapien
tgtcctccaggtttggcattaacct

SEQ ID NO: 2676614 - DNA, 25 bp, Homo sapien
tgtgtcctccaggtttggcattaac

SEQ ID NO: 2676615 - DNA, 25 bp, Homo sapien
tttgtgtcctccaggtttggcatta

SEQ ID NO: 2676616 - DNA, 25 bp, Homo sapien
cactcaggactatcttctccaactg

SEQ ID NO: 2676617 - DNA, 25 bp, Homo sapien
gttctcagctctaaataatggctcc

SEQ ID NO: 2676618 - DNA, 25 bp, Homo sapien
taatggctccataactccagttatg

SEQ ID NO: 2676619 - DNA, 25 bp, Homo sapien
ttttgctgtgataaagtgttctcag

SEQ ID NO: 2676620 - DNA, 25 bp, Homo sapien
taaaacccgttctatgctgacactg

SEQ ID NO: 2676621 - DNA, 25 bp, Homo sapien
ggaggtgtcgaccagaaatgcgata

SEQ ID NO: 2676622 - DNA, 25 bp, Homo sapien
gatagtatcatatgggcaggagagt

SEQ ID NO: 2676623 - DNA, 25 bp, Homo sapien
gaagattctctaattcatcccgact

SEQ ID NO: 2676624 - DNA, 25 bp, Homo sapien
ttttctcctctctgagtggttctta

SEQ ID NO: 2676625 - DNA, 25 bp, Homo sapien
gcaagtgacactgcacctaggaaac

SEQ ID NO: 2676626 - DNA, 25 bp, Homo sapien
cctggaggcatcagctattgttgtt

SEQ ID NO: 2676627 - DNA, 25 bp, Homo sapien
tgggtttgatcacccccgactgctt

SEQ ID NO: 2676628 - DNA, 25 bp, Homo sapien
gtaatgtgttcacaatctgggtttg

SEQ ID NO: 2676629 - DNA, 25 bp, Homo sapien
aatttctacaaatgaggaccctcca

SEQ ID NO: 2676630 - DNA, 25 bp, Homo sapien
tagactcagaagtaagtccgtgagc

SEQ ID NO: 2676631 - DNA, 25 bp, Homo sapien
atctgtcctgcaagggcccatggaa

SEQ ID NO: 2676632 - DNA, 25 bp, Homo sapien
gcagagcagtacatgtaacgagcat

SEQ ID NO: 2676633 - DNA, 25 bp, Homo sapien
gtgcttcttgcatcctgaattccag

SEQ ID NO: 2676634 - DNA, 25 bp, Homo sapien
attcggtcaccccgcaccaaaagtg

SEQ ID NO: 2676635 - DNA, 25 bp, Homo sapien
cagaaaaagccacccgagagcagtg

SEQ ID NO: 2676636 - DNA, 25 bp, Homo sapien
attccactctgtgccattcggtcac

SEQ ID NO: 2676637 - DNA, 25 bp, Homo sapien
aagtgccacgctggattctgcaggg

SEQ ID NO: 2676638 - DNA, 25 bp, Homo sapien
gcttggtattttgcaactctgacaa

SEQ ID NO: 2676639 - DNA, 25 bp, Homo sapien
ttggtattttgcaactctgacaagc

SEQ ID NO: 2676640 - DNA, 25 bp, Homo sapien
ggtattttgcaactctgacaagcac

SEQ ID NO: 2676641 - DNA, 25 bp, Homo sapien
ctgcttggtattttgcaactctgac

SEQ ID NO: 2676642 - DNA, 25 bp, Homo sapien
tttaagagtcgccaaggtagattca

SEQ ID NO: 2676643 - DNA, 25 bp, Homo sapien
tcccctcaataccaagatggtgttt

SEQ ID NO: 2676644 - DNA, 25 bp, Homo sapien
taccaagatggtgtttaagagtcgc

SEQ ID NO: 2676645 - DNA, 25 bp, Homo sapien
tggtgtttaagagtcgccaaggtag

SEQ ID NO: 2676646 - DNA, 25 bp, Homo sapien
tggctggacttgcacagcggtcacc

SEQ ID NO: 2676647 - DNA, 25 bp, Homo sapien
tccaggagtaatgttgtgtgtcagc

SEQ ID NO: 2676648 - DNA, 25 bp, Homo sapien
tgtgtcagcactgtgaggtccctgg

SEQ ID NO: 2676649 - DNA, 25 bp, Homo sapien
tcacttggggaatgcagttatggct

SEQ ID NO: 2676650 - DNA, 25 bp, Homo sapien
gctgtgaacgtgaggcaaacataca

SEQ ID NO: 2676651 - DNA, 25 bp, Homo sapien
caaatttctactgtgcacagctgtg

SEQ ID NO: 2676652 - DNA, 25 bp, Homo sapien
gcaaacatacaagacactgacgtct

SEQ ID NO: 2676653 - DNA, 25 bp, Homo sapien
cctgacaccattggtattccaagga

SEQ ID NO: 2676654 - DNA, 25 bp, Homo sapien
agtcagaccaatcttcctgaagttc

SEQ ID NO: 2676655 - DNA, 25 bp, Homo sapien
aaagtcagaccaatcttcctgaagt

SEQ ID NO: 2676656 - DNA, 25 bp, Homo sapien
acatcaaagtcagaccaatcttcct

SEQ ID NO: 2676657 - DNA, 25 bp, Homo sapien
tcaaagtcagaccaatcttcctgaa

SEQ ID NO: 2676658 - DNA, 25 bp, Homo sapien
ctaaaggatctaagtgttatgccac

SEQ ID NO: 2676659 - DNA, 25 bp, Homo sapien
ttctaaaggatctaagtgttatgcc

SEQ ID NO: 2676660 - DNA, 25 bp, Homo sapien
atttctaaaggatctaagtgttatg

SEQ ID NO: 2676661 - DNA, 25 bp, Homo sapien
taaaggatctaagtgttatgccaca

SEQ ID NO: 2676662 - DNA, 25 bp, Homo sapien
tgcacattaactcagaggcagctct

SEQ ID NO: 2676663 - DNA, 25 bp, Homo sapien
tagttttcgctacagccctacaggt

SEQ ID NO: 2676664 - DNA, 25 bp, Homo sapien
gaagatccaacagacttgccaaagg

SEQ ID NO: 2676665 - DNA, 25 bp, Homo sapien
gactggtcagacaaacctggataat

SEQ ID NO: 2676666 - DNA, 25 bp, Homo sapien
tgaatgtacttccactgatacagct

SEQ ID NO: 2676667 - DNA, 25 bp, Homo sapien
tacagctgggcgtagctaacatgct

SEQ ID NO: 2676668 - DNA, 25 bp, Homo sapien
ttattttcatagtcacgggtctgca

SEQ ID NO: 2676669 - DNA, 25 bp, Homo sapien
gatggttggctgaactttagctcca

SEQ ID NO: 2676670 - DNA, 25 bp, Homo sapien
agatgccaatggaccatggctgtca

SEQ ID NO: 2676671 - DNA, 25 bp, Homo sapien
ccaaagttcatgactgacacagatg

SEQ ID NO: 2676672 - DNA, 25 bp, Homo sapien
gctgtcatggttgccaacattcaat

SEQ ID NO: 2676673 - DNA, 25 bp, Homo sapien
ctccattcaccaaagttcatgactg

SEQ ID NO: 2676674 - DNA, 25 bp, Homo sapien
cattccaagagggatgtgtgaaaca

SEQ ID NO: 2676675 - DNA, 25 bp, Homo sapien
tgactcttggatgtggaagtgcctg

SEQ ID NO: 2676676 - DNA, 25 bp, Homo sapien
gggaatgggattaactttgctttga

SEQ ID NO: 2676677 - DNA, 25 bp, Homo sapien
cacagccgaacattccaagagggat

SEQ ID NO: 2676678 - DNA, 25 bp, Homo sapien
tgattttaatatccagctggccaac

SEQ ID NO: 2676679 - DNA, 25 bp, Homo sapien
cagctggccaactagcataagagta

SEQ ID NO: 2676680 - DNA, 25 bp, Homo sapien
ggccaactagcataagagtaaccat

SEQ ID NO: 2676681 - DNA, 25 bp, Homo sapien
tatccagctggccaactagcataag

SEQ ID NO: 2676682 - DNA, 25 bp, Homo sapien
ggagtcttggatagggtaccttctc

SEQ ID NO: 2676683 - DNA, 25 bp, Homo sapien
gagtcttggatagggtaccttctcc

SEQ ID NO: 2676684 - DNA, 25 bp, Homo sapien
tcagagcctgaggatgtttccaaca

SEQ ID NO: 2676685 - DNA, 25 bp, Homo sapien
tccaacagagcttctggtcctagct

SEQ ID NO: 2676686 - DNA, 25 bp, Homo sapien
ctagcttatcaagggtataccttac

SEQ ID NO: 2676687 - DNA, 25 bp, Homo sapien
tggtcctagcttatcaagggtatac

SEQ ID NO: 2676688 - DNA, 25 bp, Homo sapien
tatattttctggcaataagagtgat

SEQ ID NO: 2676689 - DNA, 25 bp, Homo sapien
ttgtttcccaacacaatatattttc

SEQ ID NO: 2676690 - DNA, 25 bp, Homo sapien
tcttttattgtttcccaacacaata

SEQ ID NO: 2676691 - DNA, 25 bp, Homo sapien
ttatccaatgaagtcctgttcatct

SEQ ID NO: 2676692 - DNA, 25 bp, Homo sapien
ccctagaagtattttggagtcacag

SEQ ID NO: 2676693 - DNA, 25 bp, Homo sapien
ggctctaagccctcaaatgagaaag

SEQ ID NO: 2676694 - DNA, 25 bp, Homo sapien
tggcccctacacctgatggttggag

SEQ ID NO: 2676695 - DNA, 25 bp, Homo sapien
cacaggccttagactgtgaggccac

SEQ ID NO: 2676696 - DNA, 25 bp, Homo sapien
ttatcctagaacagataagggatgg

SEQ ID NO: 2676697 - DNA, 25 bp, Homo sapien
ctagaacagataagggatggccttg

SEQ ID NO: 2676698 - DNA, 25 bp, Homo sapien
gaacagataagggatggccttgcag

SEQ ID NO: 2676699 - DNA, 25 bp, Homo sapien
tcctagaacagataagggatggcct

SEQ ID NO: 2676700 - DNA, 25 bp, Homo sapien
ttcaaggaaggatgtccaaaaggtc

SEQ ID NO: 2676701 - DNA, 25 bp, Homo sapien
tgccatacctgaaactaaggcatgt

SEQ ID NO: 2676702 - DNA, 25 bp, Homo sapien
ggaaggatgtccaaaaggtcttgga

SEQ ID NO: 2676703 - DNA, 25 bp, Homo sapien
gtagttgccatacctgaaactaagg

SEQ ID NO: 2676704 - DNA, 25 bp, Homo sapien
ataataagtttcagcaagaccttgc

SEQ ID NO: 2676705 - DNA, 25 bp, Homo sapien
tctgggccccttgcactaggatcaa

SEQ ID NO: 2676706 - DNA, 25 bp, Homo sapien
gggagcctgatgctgtctatctctt

SEQ ID NO: 2676707 - DNA, 25 bp, Homo sapien
ggatcaatccttctctagaccttct

SEQ ID NO: 2676708 - DNA, 25 bp, Homo sapien
tcattctgacagataaggttgtagg

SEQ ID NO: 2676709 - DNA, 25 bp, Homo sapien
tccaggggtttatacaaaggcctca

SEQ ID NO: 2676710 - DNA, 25 bp, Homo sapien
tgaactcgtaatcttaaggtcccag

SEQ ID NO: 2676711 - DNA, 25 bp, Homo sapien
ctctccactgagacatgaactcgta

SEQ ID NO: 2676712 - DNA, 25 bp, Homo sapien
caaagctgtttgagtttccagaata

SEQ ID NO: 2676713 - DNA, 25 bp, Homo sapien
tcaaagctgtttgagtttccagaat

SEQ ID NO: 2676714 - DNA, 25 bp, Homo sapien
aaagctgtttgagtttccagaatac

SEQ ID NO: 2676715 - DNA, 25 bp, Homo sapien
ccaccagggataaatgtataagtaa

SEQ ID NO: 2676716 - DNA, 25 bp, Homo sapien
ttttctgtgataacaaacaacctcc

SEQ ID NO: 2676717 - DNA, 25 bp, Homo sapien
caccagggataaatgtataagtaaa

SEQ ID NO: 2676718 - DNA, 25 bp, Homo sapien
acaggttaggttttctgtgataaca

SEQ ID NO: 2676719 - DNA, 25 bp, Homo sapien
catgccaatgggtacaggtgctgcc

SEQ ID NO: 2676720 - DNA, 25 bp, Homo sapien
ccagagtcaatctttttgcgatatc

SEQ ID NO: 2676721 - DNA, 25 bp, Homo sapien
ggatctattttcaatccgattgcaa

SEQ ID NO: 2676722 - DNA, 25 bp, Homo sapien
aaccacctccacctgtaggatctat

SEQ ID NO: 2676723 - DNA, 25 bp, Homo sapien
cttccctgtggtgtacaccaatcgt

SEQ ID NO: 2676724 - DNA, 25 bp, Homo sapien
gcttctcagctgctaagatttgtgt

SEQ ID NO: 2676725 - DNA, 25 bp, Homo sapien
ccaatcgtctctgccctgtgttaac

SEQ ID NO: 2676726 - DNA, 25 bp, Homo sapien
ctcagctgctaagatttgtgttttc

SEQ ID NO: 2676727 - DNA, 25 bp, Homo sapien
gttataagagttatattcccggaca

SEQ ID NO: 2676728 - DNA, 25 bp, Homo sapien
caccagctttacgaaaattaccatt

SEQ ID NO: 2676729 - DNA, 25 bp, Homo sapien
taagagttatattcccggacaagct

SEQ ID NO: 2676730 - DNA, 25 bp, Homo sapien
ccaccagctttacgaaaattaccat

SEQ ID NO: 2676731 - DNA, 25 bp, Homo sapien
gaagaagtctttcatagcaccatca

SEQ ID NO: 2676732 - DNA, 25 bp, Homo sapien
tgccataatactggaagaagtcttt

SEQ ID NO: 2676733 - DNA, 25 bp, Homo sapien
tactggaagaagtctttcatagcac

SEQ ID NO: 2676734 - DNA, 25 bp, Homo sapien
gaagtctttcatagcaccatcaaaa

SEQ ID NO: 2676735 - DNA, 25 bp, Homo sapien
gcctatcgtatactgatggatggca

SEQ ID NO: 2676736 - DNA, 25 bp, Homo sapien
tatactgatggatggcataggccgg

SEQ ID NO: 2676737 - DNA, 25 bp, Homo sapien
tacatctagatgtaagcctatcgta

SEQ ID NO: 2676738 - DNA, 25 bp, Homo sapien
taggccggggcatacaatggcttaa

SEQ ID NO: 2676739 - DNA, 25 bp, Homo sapien
tcctcttggccttcgaagtcttttc

SEQ ID NO: 2676740 - DNA, 25 bp, Homo sapien
ctcttggaaggcctagagtagttcc

SEQ ID NO: 2676741 - DNA, 25 bp, Homo sapien
agtagctccactgtcctcttggaag

SEQ ID NO: 2676742 - DNA, 25 bp, Homo sapien
tggaggacctagaggacagtagctc

SEQ ID NO: 2676743 - DNA, 25 bp, Homo sapien
tggatagaatgatagaagaacctgg

SEQ ID NO: 2676744 - DNA, 25 bp, Homo sapien
ctcaaacactagctctaagtgcttt

SEQ ID NO: 2676745 - DNA, 25 bp, Homo sapien
tggttccacagcttagcagtatttg

SEQ ID NO: 2676746 - DNA, 25 bp, Homo sapien
gaacctggatgtaaaagaccaacga

SEQ ID NO: 2676747 - DNA, 25 bp, Homo sapien
tgggagagtcaagcctgttaacagt

SEQ ID NO: 2676748 - DNA, 25 bp, Homo sapien
caagtatgagttggattaacccagg

SEQ ID NO: 2676749 - DNA, 25 bp, Homo sapien
taacagtcagcaaggtgatatggcc

SEQ ID NO: 2676750 - DNA, 25 bp, Homo sapien
gcttctgaggcattttagccaagta

SEQ ID NO: 2676751 - DNA, 25 bp, Homo sapien
agtagcttttggagcttaagtctaa

SEQ ID NO: 2676752 - DNA, 25 bp, Homo sapien
ccgtggtggattggctaatgaaatg

SEQ ID NO: 2676753 - DNA, 25 bp, Homo sapien
gcttaagtctaatgtccgtggtgga

SEQ ID NO: 2676754 - DNA, 25 bp, Homo sapien
ctaatgtccgtggtggattggctaa

SEQ ID NO: 2676755 - DNA, 25 bp, Homo sapien
tgattttgattactgcgtggcccca

SEQ ID NO: 2676756 - DNA, 25 bp, Homo sapien
cctggtgagggcttagtacagtcct

SEQ ID NO: 2676757 - DNA, 25 bp, Homo sapien
gctgccataatttttgcctgccatt

SEQ ID NO: 2676758 - DNA, 25 bp, Homo sapien
tgttatacaccataacagcagtatc

SEQ ID NO: 2676759 - DNA, 25 bp, Homo sapien
actgtcactgcaatatatttgtata

SEQ ID NO: 2676760 - DNA, 25 bp, Homo sapien
ttttactgttactggttacctctga

SEQ ID NO: 2676761 - DNA, 25 bp, Homo sapien
tggtggttacacattattttactgt

SEQ ID NO: 2676762 - DNA, 25 bp, Homo sapien
ttactgtcttcaaattgaaacagtt

SEQ ID NO: 2676763 - DNA, 25 bp, Homo sapien
ttcacaaagccccacataaccagga

SEQ ID NO: 2676764 - DNA, 25 bp, Homo sapien
atcatcttcacaaagccccacataa

SEQ ID NO: 2676765 - DNA, 25 bp, Homo sapien
caaagccccacataaccaggatgaa

SEQ ID NO: 2676766 - DNA, 25 bp, Homo sapien
tcatcatcttcacaaagccccacat

SEQ ID NO: 2676767 - DNA, 25 bp, Homo sapien
agccttgggttgagctgtcacccag

SEQ ID NO: 2676768 - DNA, 25 bp, Homo sapien
cagccttgggttgagctgtcaccca

SEQ ID NO: 2676769 - DNA, 25 bp, Homo sapien
gccttgggttgagctgtcacccaga

SEQ ID NO: 2676770 - DNA, 25 bp, Homo sapien
ccttgggttgagctgtcacccagag

SEQ ID NO: 2676771 - DNA, 25 bp, Homo sapien
gcatggatcactttcagaaaacacc

SEQ ID NO: 2676772 - DNA, 25 bp, Homo sapien
ttcacagcatggatcactttcagaa

SEQ ID NO: 2676773 - DNA, 25 bp, Homo sapien
catcactctagttaaattttcacag

SEQ ID NO: 2676774 - DNA, 25 bp, Homo sapien
ctttcccgatagtctcttccacatc

SEQ ID NO: 2676775 - DNA, 25 bp, Homo sapien
caaggtagccttctatgtggcttcc

SEQ ID NO: 2676776 - DNA, 25 bp, Homo sapien
tgtttgtctagggtataaatctggg

SEQ ID NO: 2676777 - DNA, 25 bp, Homo sapien
gggatcttgcaagacattacatact

SEQ ID NO: 2676778 - DNA, 25 bp, Homo sapien
gtataaatctgggttgggaccaatc

SEQ ID NO: 2676779 - DNA, 25 bp, Homo sapien
agtgatcggcactccttttcgtccc

SEQ ID NO: 2676780 - DNA, 25 bp, Homo sapien
caggttggctatatgtccccattca

SEQ ID NO: 2676781 - DNA, 25 bp, Homo sapien
cagtctggttgtttgataggtgtct

SEQ ID NO: 2676782 - DNA, 25 bp, Homo sapien
gagtgagtccttatgcagtctggtt

SEQ ID NO: 2676783 - DNA, 25 bp, Homo sapien
tagaggtactctgcttccatttgaa

SEQ ID NO: 2676784 - DNA, 25 bp, Homo sapien
tccatttgaattagcatggtcagca

SEQ ID NO: 2676785 - DNA, 25 bp, Homo sapien
tgcatccaaaatggttggtcatgtt

SEQ ID NO: 2676786 - DNA, 25 bp, Homo sapien
cagcaaaccttgttgagtttggaca

SEQ ID NO: 2676787 - DNA, 25 bp, Homo sapien
cgagtgggctatacaaggcacagtt

SEQ ID NO: 2676788 - DNA, 25 bp, Homo sapien
ctgagaatatgtcctcgagtgggct

SEQ ID NO: 2676789 - DNA, 25 bp, Homo sapien
caaactgagaatatgtcctcgagtg

SEQ ID NO: 2676790 - DNA, 25 bp, Homo sapien
tatgtcctcgagtgggctatacaag

SEQ ID NO: 2676791 - DNA, 25 bp, Homo sapien
tggggacaatcccaggtgaacccag

SEQ ID NO: 2676792 - DNA, 25 bp, Homo sapien
gaataaccactaccccttcactctg

SEQ ID NO: 2676793 - DNA, 25 bp, Homo sapien
gcttgggcttctgccataaccatga

SEQ ID NO: 2676794 - DNA, 25 bp, Homo sapien
ttgctcagttggcttgcccgcttgg

SEQ ID NO: 2676795 - DNA, 25 bp, Homo sapien
cagatctgaggaagacttccatggt

SEQ ID NO: 2676796 - DNA, 25 bp, Homo sapien
tgttttcattagctccacgggctct

SEQ ID NO: 2676797 - DNA, 25 bp, Homo sapien
ctccccagatctgaggaagacttcc

SEQ ID NO: 2676798 - DNA, 25 bp, Homo sapien
cccagatctgaggaagacttccatg

SEQ ID NO: 2676799 - DNA, 25 bp, Homo sapien
cacgacctaagcacacacagcttcc

SEQ ID NO: 2676800 - DNA, 25 bp, Homo sapien
acgacctaagcacacacagcttccc

SEQ ID NO: 2676801 - DNA, 25 bp, Homo sapien
acacacagcttcccgtcggccgccg

SEQ ID NO: 2676802 - DNA, 25 bp, Homo sapien
agcacacacagcttcccgtcggccg

SEQ ID NO: 2676803 - DNA, 25 bp, Homo sapien
gggggcaggatgacgcgagcccgcc

SEQ ID NO: 2676804 - DNA, 25 bp, Homo sapien
gcgggggcaggatgacgcgagcccg

SEQ ID NO: 2676805 - DNA, 25 bp, Homo sapien
gcaggatgacgcgagcccgcccgga

SEQ ID NO: 2676806 - DNA, 25 bp, Homo sapien
aggatgacgcgagcccgcccggagc

SEQ ID NO: 2676807 - DNA, 25 bp, Homo sapien
gcaccaccccggtagcccaagccat

SEQ ID NO: 2676808 - DNA, 25 bp, Homo sapien
ggcaccaccccggtagcccaagcca

SEQ ID NO: 2676809 - DNA, 25 bp, Homo sapien
accccggtagcccaagccatcaaat

SEQ ID NO: 2676810 - DNA, 25 bp, Homo sapien
accaccccggtagcccaagccatca

SEQ ID NO: 2676811 - DNA, 25 bp, Homo sapien
ccttgcagggaaggcgccgccaaag

SEQ ID NO: 2676812 - DNA, 25 bp, Homo sapien
gcccaggtccgacccggtgctgaag

SEQ ID NO: 2676813 - DNA, 25 bp, Homo sapien
cccagtgcaggttgcggctgccggg

SEQ ID NO: 2676814 - DNA, 25 bp, Homo sapien
tagggcgggctcttctcgccccagt

SEQ ID NO: 2676815 - DNA, 25 bp, Homo sapien
tacgagtggcacaaccaagtttgaa

SEQ ID NO: 2676816 - DNA, 25 bp, Homo sapien
tatctacatcatgcagtgttgcagc

SEQ ID NO: 2676817 - DNA, 25 bp, Homo sapien
tttgaacccaagtatgcttatgctg

SEQ ID NO: 2676818 - DNA, 25 bp, Homo sapien
taattatgtcatgattccgaagtcc

SEQ ID NO: 2676819 - DNA, 25 bp, Homo sapien
caagtccaataccaaatccagcaaa

SEQ ID NO: 2676820 - DNA, 25 bp, Homo sapien
cttgcaagtccaataccaaatccag

SEQ ID NO: 2676821 - DNA, 25 bp, Homo sapien
aaatccagcaaatctattcagctgt

SEQ ID NO: 2676822 - DNA, 25 bp, Homo sapien
ccaaatccagcaaatctattcagct

SEQ ID NO: 2676823 - DNA, 25 bp, Homo sapien
taagctgctgcttcaaagaaacaac

SEQ ID NO: 2676824 - DNA, 25 bp, Homo sapien
ttaagctgctgcttcaaagaaacaa

SEQ ID NO: 2676825 - DNA, 25 bp, Homo sapien
ttggcggcgtagaacaatgcaagga

SEQ ID NO: 2676826 - DNA, 25 bp, Homo sapien
cgtagaacaatgcaaggatgtgcca

SEQ ID NO: 2676827 - DNA, 25 bp, Homo sapien
gacattggcggcgtagaacaatgca

SEQ ID NO: 2676828 - DNA, 25 bp, Homo sapien
caatgcaaggatgtgccaatacatt

SEQ ID NO: 2676829 - DNA, 25 bp, Homo sapien
tggtaatgctgagcatggtaattaa

SEQ ID NO: 2676830 - DNA, 25 bp, Homo sapien
atggtaatgctgagcatggtaatta

SEQ ID NO: 2676831 - DNA, 25 bp, Homo sapien
ggtaatgctgagcatggtaattaac

SEQ ID NO: 2676832 - DNA, 25 bp, Homo sapien
gatggtaatgctgagcatggtaatt

SEQ ID NO: 2676833 - DNA, 25 bp, Homo sapien
ggcaaaggtgtaaattcactaatta

SEQ ID NO: 2676834 - DNA, 25 bp, Homo sapien
ttctgctccaagtgtgactccctgg

SEQ ID NO: 2676835 - DNA, 25 bp, Homo sapien
tccctggacaataaatgtacttccc

SEQ ID NO: 2676836 - DNA, 25 bp, Homo sapien
ttcactaattatgccttctgctcca

SEQ ID NO: 2676837 - DNA, 25 bp, Homo sapien
catgtaccgcctgcatctaaaaaca

SEQ ID NO: 2676838 - DNA, 25 bp, Homo sapien
ggcacatagcagtagaagctgaaag

SEQ ID NO: 2676839 - DNA, 25 bp, Homo sapien
aaagagcgggaattgctcacatacc

SEQ ID NO: 2676840 - DNA, 25 bp, Homo sapien
tcagctggcagttgctggcacatag

SEQ ID NO: 2676841 - DNA, 25 bp, Homo sapien
ctcagcctcgcctagattattacaa

SEQ ID NO: 2676842 - DNA, 25 bp, Homo sapien
taatgaccatcgactatacttcaga

SEQ ID NO: 2676843 - DNA, 25 bp, Homo sapien
tgttccacagttcagaaccttctca

SEQ ID NO: 2676844 - DNA, 25 bp, Homo sapien
tccaaccaaatatgagacatgtccc

SEQ ID NO: 2676845 - DNA, 25 bp, Homo sapien
taaggcacttcaagactacgaggtc

SEQ ID NO: 2676846 - DNA, 25 bp, Homo sapien
taaggactaaatcccaacattgggc

SEQ ID NO: 2676847 - DNA, 25 bp, Homo sapien
tgggcatatgcgttacactagtagc

SEQ ID NO: 2676848 - DNA, 25 bp, Homo sapien
tacgaggtccttcaaaagcaatcac

SEQ ID NO: 2676849 - DNA, 25 bp, Homo sapien
agcgacgctcatatctagggttaga

SEQ ID NO: 2676850 - DNA, 25 bp, Homo sapien
agtgtatccttcttccctagcgacg

SEQ ID NO: 2676851 - DNA, 25 bp, Homo sapien
cacacaggtagccttggttacagga

SEQ ID NO: 2676852 - DNA, 25 bp, Homo sapien
tgtgagagactgaaccacacaggta

SEQ ID NO: 2676853 - DNA, 25 bp, Homo sapien
taagtaactctaatgcaggctgaca

SEQ ID NO: 2676854 - DNA, 25 bp, Homo sapien
taaacacttaggactgggtagcctc

SEQ ID NO: 2676855 - DNA, 25 bp, Homo sapien
tgccaggtctggaaccaaggtgtag

SEQ ID NO: 2676856 - DNA, 25 bp, Homo sapien
taagaccttagagcaccttctgggc

SEQ ID NO: 2676857 - DNA, 25 bp, Homo sapien
tcagtagaaggtgttctcctatttg

SEQ ID NO: 2676858 - DNA, 25 bp, Homo sapien
gatttcagtagaaggtgttctccta

SEQ ID NO: 2676859 - DNA, 25 bp, Homo sapien
gttctcctatttgtttaggactcca

SEQ ID NO: 2676860 - DNA, 25 bp, Homo sapien
agaaggtgttctcctatttgtttag

SEQ ID NO: 2676861 - DNA, 25 bp, Homo sapien
gcactgtttcaatcagacttgctga

SEQ ID NO: 2676862 - DNA, 25 bp, Homo sapien
ctgcactgtttcaatcagacttgct

SEQ ID NO: 2676863 - DNA, 25 bp, Homo sapien
tgtttcaatcagacttgctgaataa

SEQ ID NO: 2676864 - DNA, 25 bp, Homo sapien
cactgtttcaatcagacttgctgaa

SEQ ID NO: 2676865 - DNA, 25 bp, Homo sapien
gctaatttttagagggacagatgag

SEQ ID NO: 2676866 - DNA, 25 bp, Homo sapien
cagagggtcaaggattgggccttaa

SEQ ID NO: 2676867 - DNA, 25 bp, Homo sapien
gattagagctaatgattcctgtgaa

SEQ ID NO: 2676868 - DNA, 25 bp, Homo sapien
cttaaggtataagacaagagatggc

SEQ ID NO: 2676869 - DNA, 25 bp, Homo sapien
cccacctaggcctcaaggattctta

SEQ ID NO: 2676870 - DNA, 25 bp, Homo sapien
catgatgactgggtaattatgaagg

SEQ ID NO: 2676871 - DNA, 25 bp, Homo sapien
tgggtaattatgaaggatgaaagaa

SEQ ID NO: 2676872 - DNA, 25 bp, Homo sapien
actgggtaattatgaaggatgaaag

SEQ ID NO: 2676873 - DNA, 25 bp, Homo sapien
gctagtgctctcagctaggtggcta

SEQ ID NO: 2676874 - DNA, 25 bp, Homo sapien
gaactccatgaagcaccgtagggaa

SEQ ID NO: 2676875 - DNA, 25 bp, Homo sapien
tccaatgggtaaagtataacgtcag

SEQ ID NO: 2676876 - DNA, 25 bp, Homo sapien
agtcgtttgctatgaggcactccca

SEQ ID NO: 2676877 - DNA, 25 bp, Homo sapien
tgcttctgcctacgatcatgtttac

SEQ ID NO: 2676878 - DNA, 25 bp, Homo sapien
ttgatgttcaagcagaaagcgcgtg

SEQ ID NO: 2676879 - DNA, 25 bp, Homo sapien
ttgctagcactgaaacactgggttt

SEQ ID NO: 2676880 - DNA, 25 bp, Homo sapien
gataatcagtatgggctttagtacc

SEQ ID NO: 2676881 - DNA, 25 bp, Homo sapien
atttagtggtgactatatactagac

SEQ ID NO: 2676882 - DNA, 25 bp, Homo sapien
gactatatactagacaagaggcaca

SEQ ID NO: 2676883 - DNA, 25 bp, Homo sapien
aacggaagccattatttagtggtga

SEQ ID NO: 2676884 - DNA, 25 bp, Homo sapien
aaacggaagccattatttagtggtg

SEQ ID NO: 2676885 - DNA, 25 bp, Homo sapien
aagtgtatcacaagctccatggcca

SEQ ID NO: 2676886 - DNA, 25 bp, Homo sapien
ccagtgggcctgtggaacatttaat

SEQ ID NO: 2676887 - DNA, 25 bp, Homo sapien
gcttatataagaggaccagtgggcc

SEQ ID NO: 2676888 - DNA, 25 bp, Homo sapien
cagacaaaacatctctaggtgaggc

SEQ ID NO: 2676889 - DNA, 25 bp, Homo sapien
agaaattaagctaagaagcaattca

SEQ ID NO: 2676890 - DNA, 25 bp, Homo sapien
agccttccattgttggctccagtag

SEQ ID NO: 2676891 - DNA, 25 bp, Homo sapien
gaagcaattcatcagttagtgagaa

SEQ ID NO: 2676892 - DNA, 25 bp, Homo sapien
gcaattcatcagttagtgagaacat

SEQ ID NO: 2676893 - DNA, 25 bp, Homo sapien
tgagatggagtggtaaattgttgtt

SEQ ID NO: 2676894 - DNA, 25 bp, Homo sapien
gtgattatcaaaaggacctcttcta

SEQ ID NO: 2676895 - DNA, 25 bp, Homo sapien
gctacttgcttatagtaagtaaact

SEQ ID NO: 2676896 - DNA, 25 bp, Homo sapien
aatgtcctaaatgctggagtgagat

SEQ ID NO: 2676897 - DNA, 25 bp, Homo sapien
agagatatttactcttagggttggt

SEQ ID NO: 2676898 - DNA, 25 bp, Homo sapien
cttgttgagagatatttactcttag

SEQ ID NO: 2676899 - DNA, 25 bp, Homo sapien
tgagagatatttactcttagggttg

SEQ ID NO: 2676900 - DNA, 25 bp, Homo sapien
tgttgagagatatttactcttaggg

SEQ ID NO: 2676901 - DNA, 25 bp, Homo sapien
ttgtttcaggtgtcgtatacgcatg

SEQ ID NO: 2676902 - DNA, 25 bp, Homo sapien
ccttgtttcaggtgtcgtatacgca

SEQ ID NO: 2676903 - DNA, 25 bp, Homo sapien
cagccttgtttcaggtgtcgtatac

SEQ ID NO: 2676904 - DNA, 25 bp, Homo sapien
tttcaggtgtcgtatacgcatgcat

SEQ ID NO: 2676905 - DNA, 25 bp, Homo sapien
aacctagaggcactgtgaaggactg

SEQ ID NO: 2676906 - DNA, 25 bp, Homo sapien
tcaaggatctttcagaacgtagtat

SEQ ID NO: 2676907 - DNA, 25 bp, Homo sapien
gaacgtagtattgaagccacaaacc

SEQ ID NO: 2676908 - DNA, 25 bp, Homo sapien
cacaaacctagaggcactgtgaagg

SEQ ID NO: 2676909 - DNA, 25 bp, Homo sapien
caagttcccttatcaggactaaagg

SEQ ID NO: 2676910 - DNA, 25 bp, Homo sapien
ttgaagagatatcgtgcagtactgc

SEQ ID NO: 2676911 - DNA, 25 bp, Homo sapien
tccctgtgaggttggctgaagcatt

SEQ ID NO: 2676912 - DNA, 25 bp, Homo sapien
ccttcagccctgttggagaattgct

SEQ ID NO: 2676913 - DNA, 25 bp, Homo sapien
gatgccaacaatatgagtgccagga

SEQ ID NO: 2676914 - DNA, 25 bp, Homo sapien
cagtttagcagctgcctggatgcca

SEQ ID NO: 2676915 - DNA, 25 bp, Homo sapien
cagattgtttttcacgggttccctg

SEQ ID NO: 2676916 - DNA, 25 bp, Homo sapien
tgccaggagatgattggtagcaccc

SEQ ID NO: 2676917 - DNA, 25 bp, Homo sapien
aaacaactccagacgtcctgcctta

SEQ ID NO: 2676918 - DNA, 25 bp, Homo sapien
cagacgtcctgccttaagagctgta

SEQ ID NO: 2676919 - DNA, 25 bp, Homo sapien
cacgagctcaccaggaggaacaaac

SEQ ID NO: 2676920 - DNA, 25 bp, Homo sapien
agcgagaccacgagctcaccaggag

SEQ ID NO: 2676921 - DNA, 25 bp, Homo sapien
tcatctgaccgctgaagtagatgtc

SEQ ID NO: 2676922 - DNA, 25 bp, Homo sapien
tgtccagtgaaagcagcaacttgcc

SEQ ID NO: 2676923 - DNA, 25 bp, Homo sapien
gtgaaagcagcaacttgcccatgct

SEQ ID NO: 2676924 - DNA, 25 bp, Homo sapien
ccctgagcagtcatctgaccgctga

SEQ ID NO: 2676925 - DNA, 25 bp, Homo sapien
cattagtttaaagacctctagagag

SEQ ID NO: 2676926 - DNA, 25 bp, Homo sapien
tctctgtcaccattaggaatgggac

SEQ ID NO: 2676927 - DNA, 25 bp, Homo sapien
gacctctagagagagcatatgccac

SEQ ID NO: 2676928 - DNA, 25 bp, Homo sapien
gccacaaacatatgggtccacagcc

SEQ ID NO: 2676929 - DNA, 25 bp, Homo sapien
acacataaggatagcaactctttca

SEQ ID NO: 2676930 - DNA, 25 bp, Homo sapien
aaggatagcaactctttcattgtca

SEQ ID NO: 2676931 - DNA, 25 bp, Homo sapien
aggatagcaactctttcattgtcat

SEQ ID NO: 2676932 - DNA, 25 bp, Homo sapien
ttcacacataaggatagcaactctt

SEQ ID NO: 2676933 - DNA, 25 bp, Homo sapien
atagcttgataattgtgatgtagac

SEQ ID NO: 2676934 - DNA, 25 bp, Homo sapien
gacaatggcaatagcttgataattg

SEQ ID NO: 2676935 - DNA, 25 bp, Homo sapien
tatttggagagtaaaggttgagaca

SEQ ID NO: 2676936 - DNA, 25 bp, Homo sapien
gatgtagacatacttctgacttagg

SEQ ID NO: 2676937 - DNA, 25 bp, Homo sapien
gctggccgctataaatccaactggt

SEQ ID NO: 2676938 - DNA, 25 bp, Homo sapien
tgtcttatgacctgatgaagctggc

SEQ ID NO: 2676939 - DNA, 25 bp, Homo sapien
gctataaatccaactggtgaagaat

SEQ ID NO: 2676940 - DNA, 25 bp, Homo sapien
tgaagctggccgctataaatccaac

SEQ ID NO: 2676941 - DNA, 25 bp, Homo sapien
gtgaatgagtataaattgcatgggc

SEQ ID NO: 2676942 - DNA, 25 bp, Homo sapien
ctttgggtgaatgagtataaattgc

SEQ ID NO: 2676943 - DNA, 25 bp, Homo sapien
gtataaattgcatgggcaactgaaa

SEQ ID NO: 2676944 - DNA, 25 bp, Homo sapien
aattgcatgggcaactgaaatacaa

SEQ ID NO: 2676945 - DNA, 25 bp, Homo sapien
aaatttgcctgcatcagtcccaagg

SEQ ID NO: 2676946 - DNA, 25 bp, Homo sapien
gaggtggtcccgtaggacctcagaa

SEQ ID NO: 2676947 - DNA, 25 bp, Homo sapien
cactggctcttgtgcagatggtctc

SEQ ID NO: 2676948 - DNA, 25 bp, Homo sapien
tgcaggctacagcaaaaagtaagtt

SEQ ID NO: 2676949 - DNA, 25 bp, Homo sapien
gcctacactgagcttcgacttgcat

SEQ ID NO: 2676950 - DNA, 25 bp, Homo sapien
acagaaagcagcctacactgagctt

SEQ ID NO: 2676951 - DNA, 25 bp, Homo sapien
gaaagcagcctacactgagcttcga

SEQ ID NO: 2676952 - DNA, 25 bp, Homo sapien
cttgattgctgatgggggcaagaac

SEQ ID NO: 2676953 - DNA, 25 bp, Homo sapien
tctagtggcttgctgtagggccaga

SEQ ID NO: 2676954 - DNA, 25 bp, Homo sapien
gtgagtgcccactagaaccttcggc

SEQ ID NO: 2676955 - DNA, 25 bp, Homo sapien
acatgccttcccctctagtggcttg

SEQ ID NO: 2676956 - DNA, 25 bp, Homo sapien
tgcccactagaaccttcggcttcat

SEQ ID NO: 2676957 - DNA, 25 bp, Homo sapien
tgttgtactcgagtcaccacagcat

SEQ ID NO: 2676958 - DNA, 25 bp, Homo sapien
gaaaacctctgattcaccgctgact

SEQ ID NO: 2676959 - DNA, 25 bp, Homo sapien
ttcatagaaggcactcgagagggtc

SEQ ID NO: 2676960 - DNA, 25 bp, Homo sapien
gaagttcctaggagtcatcgctcgg

SEQ ID NO: 2676961 - DNA, 25 bp, Homo sapien
cacggagacgatgctgtcctgagct

SEQ ID NO: 2676962 - DNA, 25 bp, Homo sapien
tgttgatccagaaaagagcgcttaa

SEQ ID NO: 2676963 - DNA, 25 bp, Homo sapien
cattaaatgtgcaaccgtgaccaga

SEQ ID NO: 2676964 - DNA, 25 bp, Homo sapien
cagccactgtaaggatttggagtcc

SEQ ID NO: 2676965 - DNA, 25 bp, Homo sapien
agaaacggataccagtgtctttctc

SEQ ID NO: 2676966 - DNA, 25 bp, Homo sapien
taagaaacggataccagtgtctttc

SEQ ID NO: 2676967 - DNA, 25 bp, Homo sapien
ctttaagaaacggataccagtgtct

SEQ ID NO: 2676968 - DNA, 25 bp, Homo sapien
aagaaacggataccagtgtctttct

SEQ ID NO: 2676969 - DNA, 25 bp, Homo sapien
tttttgctttgccctaaacacttca

SEQ ID NO: 2676970 - DNA, 25 bp, Homo sapien
ttttgctttgccctaaacacttcat

SEQ ID NO: 2676971 - DNA, 25 bp, Homo sapien
tgctcaagcaccaggttttgcctct

SEQ ID NO: 2676972 - DNA, 25 bp, Homo sapien
aggaagcccttattcacccatgctg

SEQ ID NO: 2676973 - DNA, 25 bp, Homo sapien
catgctgttgccttaagttggagtc

SEQ ID NO: 2676974 - DNA, 25 bp, Homo sapien
ccaccacgagtgtaagagatctgta

SEQ ID NO: 2676975 - DNA, 25 bp, Homo sapien
catatagtaaggcaaaagggaacat

SEQ ID NO: 2676976 - DNA, 25 bp, Homo sapien
acatatagtaaggcaaaagggaaca

SEQ ID NO: 2676977 - DNA, 25 bp, Homo sapien
gaacatatagtaaggcaaaagggaa

SEQ ID NO: 2676978 - DNA, 25 bp, Homo sapien
actgagataggctgctttaatcttc

SEQ ID NO: 2676979 - DNA, 25 bp, Homo sapien
ttagtgaagtcgtaagttaacacca

SEQ ID NO: 2676980 - DNA, 25 bp, Homo sapien
caggtctttagaaatagtactgaga

SEQ ID NO: 2676981 - DNA, 25 bp, Homo sapien
cagccctacaagttgtaagatgaag

SEQ ID NO: 2676982 - DNA, 25 bp, Homo sapien
agacggtgttgttgaactcggtact

SEQ ID NO: 2676983 - DNA, 25 bp, Homo sapien
gagacggtgttgttgaactcggtac

SEQ ID NO: 2676984 - DNA, 25 bp, Homo sapien
tgctacaagagacggtgttgttgaa

SEQ ID NO: 2676985 - DNA, 25 bp, Homo sapien
ccgattgctacaagagacggtgttg

SEQ ID NO: 2676986 - DNA, 25 bp, Homo sapien
acagaagtgttgtcccaagctaggc

SEQ ID NO: 2676987 - DNA, 25 bp, Homo sapien
caatttgcctttcctccggatagag

SEQ ID NO: 2676988 - DNA, 25 bp, Homo sapien
acgtagcaggatactccctctccaa

SEQ ID NO: 2676989 - DNA, 25 bp, Homo sapien
tctcggagttctgcacgtagcagga

SEQ ID NO: 2676990 - DNA, 25 bp, Homo sapien
gctgccaaaattccgagcccgagcg

SEQ ID NO: 2676991 - DNA, 25 bp, Homo sapien
ctgccaaaattccgagcccgagcgc

SEQ ID NO: 2676992 - DNA, 25 bp, Homo sapien
ggctgccaaaattccgagcccgagc

SEQ ID NO: 2676993 - DNA, 25 bp, Homo sapien
tgccaaaattccgagcccgagcgcg

SEQ ID NO: 2676994 - DNA, 25 bp, Homo sapien
tcgagagtcagagagaagaggtcag

SEQ ID NO: 2676995 - DNA, 25 bp, Homo sapien
cagggttgagtagagcaaggaagaa

SEQ ID NO: 2676996 - DNA, 25 bp, Homo sapien
aaagagttggtgagaattgagtgaa

SEQ ID NO: 2676997 - DNA, 25 bp, Homo sapien
cggggaacacaagtcgagagtcaga

SEQ ID NO: 2676998 - DNA, 25 bp, Homo sapien
catttctttggcgagcgacgcgcag

SEQ ID NO: 2676999 - DNA, 25 bp, Homo sapien
cgcagccggcggtgggattgaaggt

SEQ ID NO: 2677000 - DNA, 25 bp, Homo sapien
cggcggtgggattgaaggttaggct

SEQ ID NO: 2677001 - DNA, 25 bp, Homo sapien
ggcgaacatttctttggcgagcgac

SEQ ID NO: 2677002 - DNA, 25 bp, Homo sapien
ctgagtttccgaatagcctgggcac

SEQ ID NO: 2677003 - DNA, 25 bp, Homo sapien
gcaccagatagctaaggcagcctta

SEQ ID NO: 2677004 - DNA, 25 bp, Homo sapien
tccgaatagcctgggcaccagatag

SEQ ID NO: 2677005 - DNA, 25 bp, Homo sapien
tagcctgggcaccagatagctaagg

SEQ ID NO: 2677006 - DNA, 25 bp, Homo sapien
ttgtttgtgctcttatttaaatgaa

SEQ ID NO: 2677007 - DNA, 25 bp, Homo sapien
tttgtttgtgctcttatttaaatga

SEQ ID NO: 2677008 - DNA, 25 bp, Homo sapien
gccatctgcagatttgccagggtct

SEQ ID NO: 2677009 - DNA, 25 bp, Homo sapien
cctcttcttcattgcctgagtagca

SEQ ID NO: 2677010 - DNA, 25 bp, Homo sapien
acatttattggttgtgactttcctt

SEQ ID NO: 2677011 - DNA, 25 bp, Homo sapien
tgttccagacatttattggttgtga

SEQ ID NO: 2677012 - DNA, 25 bp, Homo sapien
tgtaattgtgacacttgttccagac

SEQ ID NO: 2677013 - DNA, 25 bp, Homo sapien
cagtaaaggtcgattgaagcgacgc

SEQ ID NO: 2677014 - DNA, 25 bp, Homo sapien
taaaggtcgattgaagcgacgccac

SEQ ID NO: 2677015 - DNA, 25 bp, Homo sapien
tgttgtttcagtaaaggtcgattga

SEQ ID NO: 2677016 - DNA, 25 bp, Homo sapien
tcgattgaagcgacgccacaatcct

SEQ ID NO: 2677017 - DNA, 25 bp, Homo sapien
gaggagtagtacttcccctgcatta

SEQ ID NO: 2677018 - DNA, 25 bp, Homo sapien
tcattacatgtagaaggaatgtctg

SEQ ID NO: 2677019 - DNA, 25 bp, Homo sapien
gcaatgcttatgcaactacagccga

SEQ ID NO: 2677020 - DNA, 25 bp, Homo sapien
catcaatgttatggaagcttccctc

SEQ ID NO: 2677021 - DNA, 25 bp, Homo sapien
aatattctctcctataggcagggcc

SEQ ID NO: 2677022 - DNA, 25 bp, Homo sapien
ggctctagcttgcagcgggaattca

SEQ ID NO: 2677023 - DNA, 25 bp, Homo sapien
gattgcaatgcatcctgaagctgcc

SEQ ID NO: 2677024 - DNA, 25 bp, Homo sapien
tgagcttctctggacaaaggctgag

SEQ ID NO: 2677025 - DNA, 25 bp, Homo sapien
ccctaagatactggggcctgtcttc

SEQ ID NO: 2677026 - DNA, 25 bp, Homo sapien
atcccaggtcataatttttggcttg

SEQ ID NO: 2677027 - DNA, 25 bp, Homo sapien
cttgttccctaagatactggggcct

SEQ ID NO: 2677028 - DNA, 25 bp, Homo sapien
catcccaggtcataatttttggctt

SEQ ID NO: 2677029 - DNA, 25 bp, Homo sapien
tttgtaccccggatttctcaatagc

SEQ ID NO: 2677030 - DNA, 25 bp, Homo sapien
tttcatttgtaccccggatttctca

SEQ ID NO: 2677031 - DNA, 25 bp, Homo sapien
tgtaccccggatttctcaatagcag

SEQ ID NO: 2677032 - DNA, 25 bp, Homo sapien
accccggatttctcaatagcagtgc

SEQ ID NO: 2677033 - DNA, 25 bp, Homo sapien
ccagagctcacatgggaggcgtgac

SEQ ID NO: 2677034 - DNA, 25 bp, Homo sapien
gaggcgtgacttgggttccgagggc

SEQ ID NO: 2677035 - DNA, 25 bp, Homo sapien
ccagcacgttgcctagcattgttct

SEQ ID NO: 2677036 - DNA, 25 bp, Homo sapien
tccagctcttttgcggtggaaggaa

SEQ ID NO: 2677037 - DNA, 25 bp, Homo sapien
tgcagacacaacaccgcttccggcg

SEQ ID NO: 2677038 - DNA, 25 bp, Homo sapien
cgtttccggagactgccctcagtgc

SEQ ID NO: 2677039 - DNA, 25 bp, Homo sapien
ggcgcccgctgcgaatcgcgtttcc

SEQ ID NO: 2677040 - DNA, 25 bp, Homo sapien
gcccgctgcgaatcgcgtttccgga

SEQ ID NO: 2677041 - DNA, 25 bp, Homo sapien
ccagtcccttcagcgtgtctagtgg

SEQ ID NO: 2677042 - DNA, 25 bp, Homo sapien
gcgtgtctagtggaacagtcctctg

SEQ ID NO: 2677043 - DNA, 25 bp, Homo sapien
ctagtggaacagtcctctgccagag

SEQ ID NO: 2677044 - DNA, 25 bp, Homo sapien
cccttcagcgtgtctagtggaacag

SEQ ID NO: 2677045 - DNA, 25 bp, Homo sapien
cgatcccagctcctctcagctctgg

SEQ ID NO: 2677046 - DNA, 25 bp, Homo sapien
cgccgcgatcccagctcctctcagc

SEQ ID NO: 2677047 - DNA, 25 bp, Homo sapien
tgccgccgcgatcccagctcctctc

SEQ ID NO: 2677048 - DNA, 25 bp, Homo sapien
atcccagctcctctcagctctggtc

SEQ ID NO: 2677049 - DNA, 25 bp, Homo sapien
tcataggtgtggaaactcttgccca

SEQ ID NO: 2677050 - DNA, 25 bp, Homo sapien
tgttacatagaaccggcgcttgagc

SEQ ID NO: 2677051 - DNA, 25 bp, Homo sapien
gaatgtcgttgctgaaaagtcccaa

SEQ ID NO: 2677052 - DNA, 25 bp, Homo sapien
cgctgaaccgcaccacgtgtggaat

SEQ ID NO: 2677053 - DNA, 25 bp, Homo sapien
gggaagctaacaaaagaagtcactc

SEQ ID NO: 2677054 - DNA, 25 bp, Homo sapien
tgaccggatggcgaaatattaatag

SEQ ID NO: 2677055 - DNA, 25 bp, Homo sapien
ccggatggcgaaatattaataggac

SEQ ID NO: 2677056 - DNA, 25 bp, Homo sapien
cgaaatattaataggacagggaggg

SEQ ID NO: 2677057 - DNA, 25 bp, Homo sapien
tggacgtgaccggatggcgaaatat

SEQ ID NO: 2677058 - DNA, 25 bp, Homo sapien
gaactagaggagaacttaaaagcca

SEQ ID NO: 2677059 - DNA, 25 bp, Homo sapien
gaacaagtgcagagaatggtaacac

SEQ ID NO: 2677060 - DNA, 25 bp, Homo sapien
gaggtcacagcccaatgcattggtt

SEQ ID NO: 2677061 - DNA, 25 bp, Homo sapien
tgtgtaatgcagtgtcaggaaagac

SEQ ID NO: 2677062 - DNA, 25 bp, Homo sapien
ttactgcaaccagactaagtttctg

SEQ ID NO: 2677063 - DNA, 25 bp, Homo sapien
ctgcaaccagactaagtttctgaac

SEQ ID NO: 2677064 - DNA, 25 bp, Homo sapien
actgcaaccagactaagtttctgaa

SEQ ID NO: 2677065 - DNA, 25 bp, Homo sapien
tactgcaaccagactaagtttctga

SEQ ID NO: 2677066 - DNA, 25 bp, Homo sapien
tctctaactctaccctttggaccaa

SEQ ID NO: 2677067 - DNA, 25 bp, Homo sapien
ttctccaagggaaatatgcctatca

SEQ ID NO: 2677068 - DNA, 25 bp, Homo sapien
tagcatttctcacgtgacatatgat

SEQ ID NO: 2677069 - DNA, 25 bp, Homo sapien
acccatgtgagtatcttctggaaca

SEQ ID NO: 2677070 - DNA, 25 bp, Homo sapien
caaagactaatctgccatcagctgc

SEQ ID NO: 2677071 - DNA, 25 bp, Homo sapien
ccataagcagcaaagactaatctgc

SEQ ID NO: 2677072 - DNA, 25 bp, Homo sapien
gcagcaaagactaatctgccatcag

SEQ ID NO: 2677073 - DNA, 25 bp, Homo sapien
taagcagcaaagactaatctgccat

SEQ ID NO: 2677074 - DNA, 25 bp, Homo sapien
caaagggttgcaagaaatggatttc

SEQ ID NO: 2677075 - DNA, 25 bp, Homo sapien
gatttctgccttatgacccttaaag

SEQ ID NO: 2677076 - DNA, 25 bp, Homo sapien
tgccaaataataagaatgccatcag

SEQ ID NO: 2677077 - DNA, 25 bp, Homo sapien
gccatcagtatcaacagagataatg

SEQ ID NO: 2677078 - DNA, 25 bp, Homo sapien
tcaagtaggtacttggatgcaaaat

SEQ ID NO: 2677079 - DNA, 25 bp, Homo sapien
gcaggcttccttgttcactgcccag

SEQ ID NO: 2677080 - DNA, 25 bp, Homo sapien
tcaaaagtcaactgcaggtattctt

SEQ ID NO: 2677081 - DNA, 25 bp, Homo sapien
tactgatttatcaaaagtcaactgc

SEQ ID NO: 2677082 - DNA, 25 bp, Homo sapien
aataacacatccatggagcaaacag

SEQ ID NO: 2677083 - DNA, 25 bp, Homo sapien
caaggttagtaatattgtccagaca

SEQ ID NO: 2677084 - DNA, 25 bp, Homo sapien
tctcaatttcagaagcaagtcatga

SEQ ID NO: 2677085 - DNA, 25 bp, Homo sapien
gatgattaagctaatgtcacaaggt

SEQ ID NO: 2677086 - DNA, 25 bp, Homo sapien
ctgaagagctgtcactccaactttc

SEQ ID NO: 2677087 - DNA, 25 bp, Homo sapien
tgtcactccaactttccatcctgga

SEQ ID NO: 2677088 - DNA, 25 bp, Homo sapien
ctgctgaagagctgtcactccaact

SEQ ID NO: 2677089 - DNA, 25 bp, Homo sapien
agagctgtcactccaactttccatc

SEQ ID NO: 2677090 - DNA, 25 bp, Homo sapien
tgacctgacataagaccaatagcaa

SEQ ID NO: 2677091 - DNA, 25 bp, Homo sapien
ggtccccagtcttgacgaaacttca

SEQ ID NO: 2677092 - DNA, 25 bp, Homo sapien
aatagcaacaacatccacggctggt

SEQ ID NO: 2677093 - DNA, 25 bp, Homo sapien
taaatttaatgttgtgaatgataac

SEQ ID NO: 2677094 - DNA, 25 bp, Homo sapien
ccggcaattgctgtagagtgtgcat

SEQ ID NO: 2677095 - DNA, 25 bp, Homo sapien
gacaagaagtggctctctatggaga

SEQ ID NO: 2677096 - DNA, 25 bp, Homo sapien
tagatcccagagtccaatatggcca

SEQ ID NO: 2677097 - DNA, 25 bp, Homo sapien
cctaagagcattgtcagcgccattt

SEQ ID NO: 2677098 - DNA, 25 bp, Homo sapien
tatctgatattggtaagaggagcac

SEQ ID NO: 2677099 - DNA, 25 bp, Homo sapien
cacctgtaggaccatcaaatatcca

SEQ ID NO: 2677100 - DNA, 25 bp, Homo sapien
tcaaaagtcggccttcacctgtagg

SEQ ID NO: 2677101 - DNA, 25 bp, Homo sapien
gaggagcactatgacccattctgaa

SEQ ID NO: 2677102 - DNA, 25 bp, Homo sapien
ttttcatgtaccgtggaaaatgact

SEQ ID NO: 2677103 - DNA, 25 bp, Homo sapien
aatttttcatgtaccgtggaaaatg

SEQ ID NO: 2677104 - DNA, 25 bp, Homo sapien
aatgactgaagagttccatcttgac

SEQ ID NO: 2677105 - DNA, 25 bp, Homo sapien
tcatgtaccgtggaaaatgactgaa

SEQ ID NO: 2677106 - DNA, 25 bp, Homo sapien
cactgacatggtattctgaagtcct

SEQ ID NO: 2677107 - DNA, 25 bp, Homo sapien
tcactgacatggtattctgaagtcc

SEQ ID NO: 2677108 - DNA, 25 bp, Homo sapien
gtgatgggtggaagtctcactgaca

SEQ ID NO: 2677109 - DNA, 25 bp, Homo sapien
gggtggaagtctcactgacatggta

SEQ ID NO: 2677110 - DNA, 25 bp, Homo sapien
gcaatgataccatcccagtcacttt

SEQ ID NO: 2677111 - DNA, 25 bp, Homo sapien
aagcaatgataccatcccagtcact

SEQ ID NO: 2677112 - DNA, 25 bp, Homo sapien
tgataccatcccagtcactttcacg

SEQ ID NO: 2677113 - DNA, 25 bp, Homo sapien
ataccatcccagtcactttcacgag

SEQ ID NO: 2677114 - DNA, 25 bp, Homo sapien
cttttggcttgagaaagtaagcgcc

SEQ ID NO: 2677115 - DNA, 25 bp, Homo sapien
cctattgtagatttctgataattcc

SEQ ID NO: 2677116 - DNA, 25 bp, Homo sapien
aaagtaagcgcctattgtagatttc

SEQ ID NO: 2677117 - DNA, 25 bp, Homo sapien
ggcttgagaaagtaagcgcctattg

SEQ ID NO: 2677118 - DNA, 25 bp, Homo sapien
ttgccaaaacttcctcgatgtatgc

SEQ ID NO: 2677119 - DNA, 25 bp, Homo sapien
acttcctcgatgtatgccagactgc

SEQ ID NO: 2677120 - DNA, 25 bp, Homo sapien
gagaggccaattacagcaaagtttc

SEQ ID NO: 2677121 - DNA, 25 bp, Homo sapien
tacatctacagttcctgatgagagg

SEQ ID NO: 2677122 - DNA, 25 bp, Homo sapien
gtttaatccatccactgcgacacct

SEQ ID NO: 2677123 - DNA, 25 bp, Homo sapien
gagtaatccttcactaccagttgta

SEQ ID NO: 2677124 - DNA, 25 bp, Homo sapien
taaagttccagaatttgagtaatcc

SEQ ID NO: 2677125 - DNA, 25 bp, Homo sapien
tgtaactgtcaactggtttaatcca

SEQ ID NO: 2677126 - DNA, 25 bp, Homo sapien
aaactctctgacaatcttcctagtt

SEQ ID NO: 2677127 - DNA, 25 bp, Homo sapien
cttcctagtttctatgtccagaaca

SEQ ID NO: 2677128 - DNA, 25 bp, Homo sapien
cagaacactaatggagaagtcatcc

SEQ ID NO: 2677129 - DNA, 25 bp, Homo sapien
tcatttatttggccttggtgtccag

SEQ ID NO: 2677130 - DNA, 25 bp, Homo sapien
ttgataaccacctcatataatgatt

SEQ ID NO: 2677131 - DNA, 25 bp, Homo sapien
ggctattaaaggataacacacccaa

SEQ ID NO: 2677132 - DNA, 25 bp, Homo sapien
ctttggccttgtttagagttaatga

SEQ ID NO: 2677133 - DNA, 25 bp, Homo sapien
tgatcgcatcaactccctgaaaaat

SEQ ID NO: 2677134 - DNA, 25 bp, Homo sapien
ccagggaaatggtcttctactatta

SEQ ID NO: 2677135 - DNA, 25 bp, Homo sapien
ttcattccatacatagtaaatcaga

SEQ ID NO: 2677136 - DNA, 25 bp, Homo sapien
atattccagggaaatggtcttctac

SEQ ID NO: 2677137 - DNA, 25 bp, Homo sapien
aatgagttctcccagcctattttaa

SEQ ID NO: 2677138 - DNA, 25 bp, Homo sapien
ttaagatatgtaaactctagaaata

SEQ ID NO: 2677139 - DNA, 25 bp, Homo sapien
agatatgtaaactctagaaatagca

SEQ ID NO: 2677140 - DNA, 25 bp, Homo sapien
gatatgtaaactctagaaatagcac

SEQ ID NO: 2677141 - DNA, 25 bp, Homo sapien
aagatatgtaaactctagaaatagc

SEQ ID NO: 2677142 - DNA, 25 bp, Homo sapien
tggtcctcaagtgacaaatttattt

SEQ ID NO: 2677143 - DNA, 25 bp, Homo sapien
caattgatgaaagatgataatatac

SEQ ID NO: 2677144 - DNA, 25 bp, Homo sapien
taatatggtcctcaagtgacaaatt

SEQ ID NO: 2677145 - DNA, 25 bp, Homo sapien
atctgcaattgatgaaagatgataa

SEQ ID NO: 2677146 - DNA, 25 bp, Homo sapien
gtcctaatagagcaatccatcgcag

SEQ ID NO: 2677147 - DNA, 25 bp, Homo sapien
ggaaggtcccaagtcctaatagagc

SEQ ID NO: 2677148 - DNA, 25 bp, Homo sapien
gcagcacttattaaccaacgaccat

SEQ ID NO: 2677149 - DNA, 25 bp, Homo sapien
aaccaacgaccatcaggactaaaag

SEQ ID NO: 2677150 - DNA, 25 bp, Homo sapien
aagtctccagtaggagacatagaaa

SEQ ID NO: 2677151 - DNA, 25 bp, Homo sapien
catagaaacattgagaggagccgag

SEQ ID NO: 2677152 - DNA, 25 bp, Homo sapien
catagataaattccaaggtggtcca

SEQ ID NO: 2677153 - DNA, 25 bp, Homo sapien
tgggaagttgccagaaagtctccag

SEQ ID NO: 2677154 - DNA, 25 bp, Homo sapien
tgaagggacataatctgcaggaagt

SEQ ID NO: 2677155 - DNA, 25 bp, Homo sapien
tctgcaggaagtggccgtaatgaaa

SEQ ID NO: 2677156 - DNA, 25 bp, Homo sapien
caggaagcatgactattgaagggac

SEQ ID NO: 2677157 - DNA, 25 bp, Homo sapien
cttgggtttgacaagtaccaggaag

SEQ ID NO: 2677158 - DNA, 25 bp, Homo sapien
tactgtttcttctgatacttctaca

SEQ ID NO: 2677159 - DNA, 25 bp, Homo sapien
caattcatcacttggttctactgtt

SEQ ID NO: 2677160 - DNA, 25 bp, Homo sapien
ctatcaattcatcacttggttctac

SEQ ID NO: 2677161 - DNA, 25 bp, Homo sapien
ctactgtttcttctgatacttctac

SEQ ID NO: 2677162 - DNA, 25 bp, Homo sapien
gtttttccatcgtgattcaggaaga

SEQ ID NO: 2677163 - DNA, 25 bp, Homo sapien
ggtttttccatcgtgattcaggaag

SEQ ID NO: 2677164 - DNA, 25 bp, Homo sapien
cttaataacatcaaggttaagaagg

SEQ ID NO: 2677165 - DNA, 25 bp, Homo sapien
ttttccatcgtgattcaggaagaag

SEQ ID NO: 2677166 - DNA, 25 bp, Homo sapien
tacaaggccaggaattgttggaatg

SEQ ID NO: 2677167 - DNA, 25 bp, Homo sapien
aaaaatggtgctgatttgggtactt

SEQ ID NO: 2677168 - DNA, 25 bp, Homo sapien
aatggtgctgatttgggtactttgg

SEQ ID NO: 2677169 - DNA, 25 bp, Homo sapien
gcatatctgggtacaaggccaggaa

SEQ ID NO: 2677170 - DNA, 25 bp, Homo sapien
tcttcaagtttcaagcagaaatctg

SEQ ID NO: 2677171 - DNA, 25 bp, Homo sapien
caagcagaaatctgatttttgagcc

SEQ ID NO: 2677172 - DNA, 25 bp, Homo sapien
cttattatttaccagtccttcttca

SEQ ID NO: 2677173 - DNA, 25 bp, Homo sapien
tgatttttgagccaaaactccaaga

SEQ ID NO: 2677174 - DNA, 25 bp, Homo sapien
tctaatgccttgcaacaggcacgtt

SEQ ID NO: 2677175 - DNA, 25 bp, Homo sapien
ttaagaagcctataacgatacatac

SEQ ID NO: 2677176 - DNA, 25 bp, Homo sapien
taatagtggttagcattgggaatct

SEQ ID NO: 2677177 - DNA, 25 bp, Homo sapien
cagagtaaatcctaattaagaagcc

SEQ ID NO: 2677178 - DNA, 25 bp, Homo sapien
atccagttatgacttgattataatc

SEQ ID NO: 2677179 - DNA, 25 bp, Homo sapien
attttaatccagttatgacttgatt

SEQ ID NO: 2677180 - DNA, 25 bp, Homo sapien
taatccagttatgacttgattataa

SEQ ID NO: 2677181 - DNA, 25 bp, Homo sapien
ccagttatgacttgattataatcat

SEQ ID NO: 2677182 - DNA, 25 bp, Homo sapien
ttcagaaggttgagagcagtgtcat

SEQ ID NO: 2677183 - DNA, 25 bp, Homo sapien
tttcagaaggttgagagcagtgtca

SEQ ID NO: 2677184 - DNA, 25 bp, Homo sapien
ctttcagaaggttgagagcagtgtc

SEQ ID NO: 2677185 - DNA, 25 bp, Homo sapien
ggctaactcaaaatcacgctttctg

SEQ ID NO: 2677186 - DNA, 25 bp, Homo sapien
caatcaggagacaagcttcgcagct

SEQ ID NO: 2677187 - DNA, 25 bp, Homo sapien
gcataacttctatggacccaccaca

SEQ ID NO: 2677188 - DNA, 25 bp, Homo sapien
tagaaacaatgcaaggtatgcctgg

SEQ ID NO: 2677189 - DNA, 25 bp, Homo sapien
ggttcagcacattggatcaagcaga

SEQ ID NO: 2677190 - DNA, 25 bp, Homo sapien
cactgtctagctgtccaatgtggta

SEQ ID NO: 2677191 - DNA, 25 bp, Homo sapien
gaattaaagtggtcatcactcctct

SEQ ID NO: 2677192 - DNA, 25 bp, Homo sapien
taaagtagaccctcaaaacatgagt

SEQ ID NO: 2677193 - DNA, 25 bp, Homo sapien
ttcttctaggagtactggctctgaa

SEQ ID NO: 2677194 - DNA, 25 bp, Homo sapien
ccacctgggatgacaaatttgttat

SEQ ID NO: 2677195 - DNA, 25 bp, Homo sapien
gctttgattgaagagtgattgcaaa

SEQ ID NO: 2677196 - DNA, 25 bp, Homo sapien
ttgcaaatgggtccagttttcttcc

SEQ ID NO: 2677197 - DNA, 25 bp, Homo sapien
aatgagttcaattgaacccatttaa

SEQ ID NO: 2677198 - DNA, 25 bp, Homo sapien
tgagttcaattgaacccatttaata

SEQ ID NO: 2677199 - DNA, 25 bp, Homo sapien
agaaatgagttcaattgaacccatt

SEQ ID NO: 2677200 - DNA, 25 bp, Homo sapien
agttcaattgaacccatttaatatg

SEQ ID NO: 2677201 - DNA, 25 bp, Homo sapien
tgaaataccagcagactttagcctg

SEQ ID NO: 2677202 - DNA, 25 bp, Homo sapien
caacagggctgtgctagaagatgat

SEQ ID NO: 2677203 - DNA, 25 bp, Homo sapien
tcaaaggccaccgaggaaaaaagca

SEQ ID NO: 2677204 - DNA, 25 bp, Homo sapien
gccgggaggtgcgattttatttcaa

SEQ ID NO: 2677205 - DNA, 25 bp, Homo sapien
catctacagcgacttgccttgggca

SEQ ID NO: 2677206 - DNA, 25 bp, Homo sapien
cagtgtcagtaaaaggccatcttcc

SEQ ID NO: 2677207 - DNA, 25 bp, Homo sapien
taacaacgaacgagaatgctactgg

SEQ ID NO: 2677208 - DNA, 25 bp, Homo sapien
ggctttgaaatacccattcttggct

SEQ ID NO: 2677209 - DNA, 25 bp, Homo sapien
atttctgtcagtggctttaataagt

SEQ ID NO: 2677210 - DNA, 25 bp, Homo sapien
aacgaaattgagtacaataaccaca

SEQ ID NO: 2677211 - DNA, 25 bp, Homo sapien
cgaaattgagtacaataaccacatt

SEQ ID NO: 2677212 - DNA, 25 bp, Homo sapien
ggctttaataagtcaatacacattt

SEQ ID NO: 2677213 - DNA, 25 bp, Homo sapien
tacttctacagaggatattgggact

SEQ ID NO: 2677214 - DNA, 25 bp, Homo sapien
gcagatgctcatatcttgctcaggg

SEQ ID NO: 2677215 - DNA, 25 bp, Homo sapien
tagaagattacctgccaaaatgatg

SEQ ID NO: 2677216 - DNA, 25 bp, Homo sapien
aaaaatggttatactctggcctgaa

SEQ ID NO: 2677217 - DNA, 25 bp, Homo sapien
gcataggtcccatgatctgcagggc

SEQ ID NO: 2677218 - DNA, 25 bp, Homo sapien
gaaggctttacccaaatctgagaac

SEQ ID NO: 2677219 - DNA, 25 bp, Homo sapien
aggaccgacttttcatatgcatagg

SEQ ID NO: 2677220 - DNA, 25 bp, Homo sapien
ccaagggaggactgcactcggtatt

SEQ ID NO: 2677221 - DNA, 25 bp, Homo sapien
gaagaggctgcacatcaagtggatt

SEQ ID NO: 2677222 - DNA, 25 bp, Homo sapien
agtggattgttgactgcctttggca

SEQ ID NO: 2677223 - DNA, 25 bp, Homo sapien
agtgtgcaatcttggactttaggaa

SEQ ID NO: 2677224 - DNA, 25 bp, Homo sapien
tgtgcaatcttggactttaggaaga

SEQ ID NO: 2677225 - DNA, 25 bp, Homo sapien
gcatgattgtcatttcccagcagga

SEQ ID NO: 2677226 - DNA, 25 bp, Homo sapien
agtatggtgtatttgctgcatgatt

SEQ ID NO: 2677227 - DNA, 25 bp, Homo sapien
tttcaagtgacacaaagtatggtgt

SEQ ID NO: 2677228 - DNA, 25 bp, Homo sapien
atgattgtcatttcccagcaggatg

SEQ ID NO: 2677229 - DNA, 25 bp, Homo sapien
tgaatatagtaaggagtgttgggca

SEQ ID NO: 2677230 - DNA, 25 bp, Homo sapien
ctgaatatagtaaggagtgttgggc

SEQ ID NO: 2677231 - DNA, 25 bp, Homo sapien
gaagtaatgtgaagaataggtctca

SEQ ID NO: 2677232 - DNA, 25 bp, Homo sapien
tccattggaagtaatgtgaagaata

SEQ ID NO: 2677233 - DNA, 25 bp, Homo sapien
gaagaataggtctcaggaagtcatt

SEQ ID NO: 2677234 - DNA, 25 bp, Homo sapien
tcattttccaaagaattcaatattc

SEQ ID NO: 2677235 - DNA, 25 bp, Homo sapien
cttggggcagttccataatatgaaa

SEQ ID NO: 2677236 - DNA, 25 bp, Homo sapien
gcagttccataatatgaaagtcgta

SEQ ID NO: 2677237 - DNA, 25 bp, Homo sapien
tttggagagaggaaacttgcttggg

SEQ ID NO: 2677238 - DNA, 25 bp, Homo sapien
tccataatatgaaagtcgtaagtac

SEQ ID NO: 2677239 - DNA, 25 bp, Homo sapien
aaattggctgttccccagcaggtgc

SEQ ID NO: 2677240 - DNA, 25 bp, Homo sapien
taaattggctgttccccagcaggtg

SEQ ID NO: 2677241 - DNA, 25 bp, Homo sapien
ttaaattggctgttccccagcaggt

SEQ ID NO: 2677242 - DNA, 25 bp, Homo sapien
actagctttgggagagtataacccg

SEQ ID NO: 2677243 - DNA, 25 bp, Homo sapien
gatagccagggatcttgcaaaaccc

SEQ ID NO: 2677244 - DNA, 25 bp, Homo sapien
gcaaaacccacgctgaagaacagca

SEQ ID NO: 2677245 - DNA, 25 bp, Homo sapien
tataacccgagatacagcacgtggg

SEQ ID NO: 2677246 - DNA, 25 bp, Homo sapien
gtttctaggggctcccaagatcgac

SEQ ID NO: 2677247 - DNA, 25 bp, Homo sapien
ctaggggctcccaagatcgacttca

SEQ ID NO: 2677248 - DNA, 25 bp, Homo sapien
tctaggggctcccaagatcgacttc

SEQ ID NO: 2677249 - DNA, 25 bp, Homo sapien
tttctaggggctcccaagatcgact

SEQ ID NO: 2677250 - DNA, 25 bp, Homo sapien
gaagtcttcagttggaataaatgct

SEQ ID NO: 2677251 - DNA, 25 bp, Homo sapien
tgctgtcgtcgctgctggtggcact

SEQ ID NO: 2677252 - DNA, 25 bp, Homo sapien
gtgaagtcttcagttggaataaatg

SEQ ID NO: 2677253 - DNA, 25 bp, Homo sapien
tgaagtcttcagttggaataaatgc

SEQ ID NO: 2677254 - DNA, 25 bp, Homo sapien
gtggcgcaactcatccctccttgag

SEQ ID NO: 2677255 - DNA, 25 bp, Homo sapien
gtggtggtggcgcaactcatccctc

SEQ ID NO: 2677256 - DNA, 25 bp, Homo sapien
cttgagcgcgtctccgtggcgagtc

SEQ ID NO: 2677257 - DNA, 25 bp, Homo sapien
gtggcgagtccctcccacctaacac

SEQ ID NO: 2677258 - DNA, 25 bp, Homo sapien
cgcgctcgcagggacggtgggcggg

SEQ ID NO: 2677259 - DNA, 25 bp, Homo sapien
gagagagaggcggcgtccttcacgc

SEQ ID NO: 2677260 - DNA, 25 bp, Homo sapien
cgcccgcgctcgcagggacggtggg

SEQ ID NO: 2677261 - DNA, 25 bp, Homo sapien
agaggcggcgtccttcacgcgcgca

SEQ ID NO: 2677262 - DNA, 25 bp, Homo sapien
cgccgctgcccgagcgagaagccgg

SEQ ID NO: 2677263 - DNA, 25 bp, Homo sapien
cgctgcccgagcgagaagccggccg

SEQ ID NO: 2677264 - DNA, 25 bp, Homo sapien
cccgagcgagaagccggccgccagc

SEQ ID NO: 2677265 - DNA, 25 bp, Homo sapien
tgcccgagcgagaagccggccgcca

SEQ ID NO: 2677266 - DNA, 25 bp, Homo sapien
tggcggtgaccgaagagcaggacga

SEQ ID NO: 2677267 - DNA, 25 bp, Homo sapien
ctggcggtgaccgaagagcaggacg

SEQ ID NO: 2677268 - DNA, 25 bp, Homo sapien
gactccacctcgaagaaatcgctca

SEQ ID NO: 2677269 - DNA, 25 bp, Homo sapien
gagccgtcgatccagtaatccggga

SEQ ID NO: 2677270 - DNA, 25 bp, Homo sapien
taatccgggacgaggctcgcggtcc

SEQ ID NO: 2677271 - DNA, 25 bp, Homo sapien
aatcgctcagcgcatccctgttgga

SEQ ID NO: 2677272 - DNA, 25 bp, Homo sapien
cagacaactgtaatggaggagccaa

SEQ ID NO: 2677273 - DNA, 25 bp, Homo sapien
caacttgatctctagtgtaggaaga

SEQ ID NO: 2677274 - DNA, 25 bp, Homo sapien
gcaacacgtaacaccagaagcactg

SEQ ID NO: 2677275 - DNA, 25 bp, Homo sapien
tgaattagagtcacactagcaggtg

SEQ ID NO: 2677276 - DNA, 25 bp, Homo sapien
tagtccaacttgatttaactcctaa

SEQ ID NO: 2677277 - DNA, 25 bp, Homo sapien
gatacacctgtggtaaagtgacagt

SEQ ID NO: 2677278 - DNA, 25 bp, Homo sapien
gtggatggtatagcttggaggcatt

SEQ ID NO: 2677279 - DNA, 25 bp, Homo sapien
taactcctaattctgatacacctgt

SEQ ID NO: 2677280 - DNA, 25 bp, Homo sapien
taaagttagtgtaaataagacctca

SEQ ID NO: 2677281 - DNA, 25 bp, Homo sapien
gaaccacatgcagcagttattttaa

SEQ ID NO: 2677282 - DNA, 25 bp, Homo sapien
taacttcccggtgaagaatgcaaca

SEQ ID NO: 2677283 - DNA, 25 bp, Homo sapien
tttctaaatcacaggtaagttgcag

SEQ ID NO: 2677284 - DNA, 25 bp, Homo sapien
atattcatcaatccatctgctcaaa

SEQ ID NO: 2677285 - DNA, 25 bp, Homo sapien
taatatattcatcaatccatcaata

SEQ ID NO: 2677286 - DNA, 25 bp, Homo sapien
ttcatcaatccatctgctcaaacgt

SEQ ID NO: 2677287 - DNA, 25 bp, Homo sapien
aatatattcatcaatccatcaatat

SEQ ID NO: 2677288 - DNA, 25 bp, Homo sapien
tggccaatttgctcataatttagtt

SEQ ID NO: 2677289 - DNA, 25 bp, Homo sapien
gccaatttgctcataatttagtttc

SEQ ID NO: 2677290 - DNA, 25 bp, Homo sapien
aatttgtgtgcatggccaatttgct

SEQ ID NO: 2677291 - DNA, 25 bp, Homo sapien
caaatttgtgtgcatggccaatttg

SEQ ID NO: 2677292 - DNA, 25 bp, Homo sapien
caggaaaccttcattagtgaataca

SEQ ID NO: 2677293 - DNA, 25 bp, Homo sapien
aggaaaccttcattagtgaatacat

SEQ ID NO: 2677294 - DNA, 25 bp, Homo sapien
tgctggcttgagaggtctgcctaga

SEQ ID NO: 2677295 - DNA, 25 bp, Homo sapien
tggcttgagaggtctgcctagaaaa

SEQ ID NO: 2677296 - DNA, 25 bp, Homo sapien
tgcagcagaacagcccaaccctgtc

SEQ ID NO: 2677297 - DNA, 25 bp, Homo sapien
caaccctgtccggaactggaaatgt

SEQ ID NO: 2677298 - DNA, 25 bp, Homo sapien
ctaatgatgtagagcggtgtgcatg

SEQ ID NO: 2677299 - DNA, 25 bp, Homo sapien
agcggtgtgcatgatgcattgatgg

SEQ ID NO: 2677300 - DNA, 25 bp, Homo sapien
aatgatgtagagcggtgtgcatgat

SEQ ID NO: 2677301 - DNA, 25 bp, Homo sapien
tgatgtagagcggtgtgcatgatgc

SEQ ID NO: 2677302 - DNA, 25 bp, Homo sapien
tgcagtaccctttttacccaatgat

SEQ ID NO: 2677303 - DNA, 25 bp, Homo sapien
tttttacccaatgatccacacatac

SEQ ID NO: 2677304 - DNA, 25 bp, Homo sapien
gaacctgactgcagtacccttttta

SEQ ID NO: 2677305 - DNA, 25 bp, Homo sapien
cctttttacccaatgatccacacat

SEQ ID NO: 2677306 - DNA, 25 bp, Homo sapien
gacaaagtatagctttaggagtact

SEQ ID NO: 2677307 - DNA, 25 bp, Homo sapien
cagcatctgatgtgggcctcatcac

SEQ ID NO: 2677308 - DNA, 25 bp, Homo sapien
caaagtatagctttaggagtactgg

SEQ ID NO: 2677309 - DNA, 25 bp, Homo sapien
ggcctcatcacagtatttgcacaga

SEQ ID NO: 2677310 - DNA, 25 bp, Homo sapien
cagcaaagataaacagttcggtaaa

SEQ ID NO: 2677311 - DNA, 25 bp, Homo sapien
gctgaagttgtcagcaaagataaac

SEQ ID NO: 2677312 - DNA, 25 bp, Homo sapien
tgtcagcaaagataaacagttcggt

SEQ ID NO: 2677313 - DNA, 25 bp, Homo sapien
ctagctgaagttgtcagcaaagata

SEQ ID NO: 2677314 - DNA, 25 bp, Homo sapien
ttgattcttctaaagcgttcagaaa

SEQ ID NO: 2677315 - DNA, 25 bp, Homo sapien
aacactcgatgtcacttttgattga

SEQ ID NO: 2677316 - DNA, 25 bp, Homo sapien
tgtacaagtgtatttaatcgatatg

SEQ ID NO: 2677317 - DNA, 25 bp, Homo sapien
gcgttcagaaacactcgatgtcact

SEQ ID NO: 2677318 - DNA, 25 bp, Homo sapien
ttggaagcagaaaaagtcattgtgg

SEQ ID NO: 2677319 - DNA, 25 bp, Homo sapien
gaagcagaaaaagtcattgtggtga

SEQ ID NO: 2677320 - DNA, 25 bp, Homo sapien
agatggctcttttccaactttggaa

SEQ ID NO: 2677321 - DNA, 25 bp, Homo sapien
aaaagatggctcttttccaactttg

SEQ ID NO: 2677322 - DNA, 25 bp, Homo sapien
gaggtggccatactccatagatgcc

SEQ ID NO: 2677323 - DNA, 25 bp, Homo sapien
actggagcttctcagtcaaggagac

SEQ ID NO: 2677324 - DNA, 25 bp, Homo sapien
tatatgccctgatataaagagcctg

SEQ ID NO: 2677325 - DNA, 25 bp, Homo sapien
gggtttgtgttccacgtgttccaga

SEQ ID NO: 2677326 - DNA, 25 bp, Homo sapien
cactgtggcattgtcatagtgtaac

SEQ ID NO: 2677327 - DNA, 25 bp, Homo sapien
ggccttggggatgtattagcaaaca

SEQ ID NO: 2677328 - DNA, 25 bp, Homo sapien
ccattcactgttctaaggccttggg

SEQ ID NO: 2677329 - DNA, 25 bp, Homo sapien
aatccaccctggagatatatatgta

SEQ ID NO: 2677330 - DNA, 25 bp, Homo sapien
gagcttcatgcgttctgtctgtaaa

SEQ ID NO: 2677331 - DNA, 25 bp, Homo sapien
tgcaacaagcaactggccgaatgaa

SEQ ID NO: 2677332 - DNA, 25 bp, Homo sapien
tagccaactgctacaagatcaagcc

SEQ ID NO: 2677333 - DNA, 25 bp, Homo sapien
tactagactccagtgtaagtggttg

SEQ ID NO: 2677334 - DNA, 25 bp, Homo sapien
tttgaactgcacacactacctggtg

SEQ ID NO: 2677335 - DNA, 25 bp, Homo sapien
aacacgactgagtttcatggccagc

SEQ ID NO: 2677336 - DNA, 25 bp, Homo sapien
taagagaactaacgcatacagagga

SEQ ID NO: 2677337 - DNA, 25 bp, Homo sapien
tttccaacacaaaggtaggcactcc

SEQ ID NO: 2677338 - DNA, 25 bp, Homo sapien
aatggcacacctatacaacaccgga

SEQ ID NO: 2677339 - DNA, 25 bp, Homo sapien
ataagatgatatgtgcaggctgctc

SEQ ID NO: 2677340 - DNA, 25 bp, Homo sapien
caagtctatgagtaatgaagggtcc

SEQ ID NO: 2677341 - DNA, 25 bp, Homo sapien
tctgtcatcacacgggaaactaccc

SEQ ID NO: 2677342 - DNA, 25 bp, Homo sapien
tagtctccctgctgattccatcact

SEQ ID NO: 2677343 - DNA, 25 bp, Homo sapien
tgctgattccatcactcgaccccat

SEQ ID NO: 2677344 - DNA, 25 bp, Homo sapien
ctgctgattccatcactcgacccca

SEQ ID NO: 2677345 - DNA, 25 bp, Homo sapien
catgtagtctccctgctgattccat

SEQ ID NO: 2677346 - DNA, 25 bp, Homo sapien
atttgtatttgtttccaggagtcat

SEQ ID NO: 2677347 - DNA, 25 bp, Homo sapien
ctgtcagctctgtcaaatatttgta

SEQ ID NO: 2677348 - DNA, 25 bp, Homo sapien
tctgtcagctctgtcaaatatttgt

SEQ ID NO: 2677349 - DNA, 25 bp, Homo sapien
aatatttgtatttgtttccaggagt

SEQ ID NO: 2677350 - DNA, 25 bp, Homo sapien
cctttattgagatgactgtatgatt

SEQ ID NO: 2677351 - DNA, 25 bp, Homo sapien
tggctacttccactaatcaagcagc

SEQ ID NO: 2677352 - DNA, 25 bp, Homo sapien
gggataatccccatttgctgatgat

SEQ ID NO: 2677353 - DNA, 25 bp, Homo sapien
cagctaatgttaagctcaccttgca

SEQ ID NO: 2677354 - DNA, 25 bp, Homo sapien
tctgggtccccttctgtttgcatct

SEQ ID NO: 2677355 - DNA, 25 bp, Homo sapien
gagagcataaggcttctgggtcccc

SEQ ID NO: 2677356 - DNA, 25 bp, Homo sapien
acactttgagagcataaggcttctg

SEQ ID NO: 2677357 - DNA, 25 bp, Homo sapien
cccttctgtttgcatctgtacacaa

SEQ ID NO: 2677358 - DNA, 25 bp, Homo sapien
ttgccaatcttctccccagaaccac

SEQ ID NO: 2677359 - DNA, 25 bp, Homo sapien
catgcaatttccaccagacaacaac

SEQ ID NO: 2677360 - DNA, 25 bp, Homo sapien
gaaccacatccaatctgagatccag

SEQ ID NO: 2677361 - DNA, 25 bp, Homo sapien
gctgctttcaaagactcatgcaatt

SEQ ID NO: 2677362 - DNA, 25 bp, Homo sapien
gcacttgcccaacgaatatacgtca

SEQ ID NO: 2677363 - DNA, 25 bp, Homo sapien
gacacttcattctcgttcacatgct

SEQ ID NO: 2677364 - DNA, 25 bp, Homo sapien
gtaaggacgaaccagagcggcactt

SEQ ID NO: 2677365 - DNA, 25 bp, Homo sapien
ttcacaacagcgagaagacagtaag

SEQ ID NO: 2677366 - DNA, 25 bp, Homo sapien
cattccatttggcacagtagtaact

SEQ ID NO: 2677367 - DNA, 25 bp, Homo sapien
ctgtgtttgacaacatctgccttac

SEQ ID NO: 2677368 - DNA, 25 bp, Homo sapien
tttggcacagtagtaactgtgtttg

SEQ ID NO: 2677369 - DNA, 25 bp, Homo sapien
aagctgaggtttttccagggcattt

SEQ ID NO: 2677370 - DNA, 25 bp, Homo sapien
tcccaaatctggaccaaaatcattc

SEQ ID NO: 2677371 - DNA, 25 bp, Homo sapien
ggcttaatcatcctttatcaggtaa

SEQ ID NO: 2677372 - DNA, 25 bp, Homo sapien
tctgtgcctgtgtcaataaaggctt

SEQ ID NO: 2677373 - DNA, 25 bp, Homo sapien
atctagttttagtcccaaatctgga

SEQ ID NO: 2677374 - DNA, 25 bp, Homo sapien
tggcagtggccctggtatgtggcct

SEQ ID NO: 2677375 - DNA, 25 bp, Homo sapien
agtggccctggtatgtggcctcttc

SEQ ID NO: 2677376 - DNA, 25 bp, Homo sapien
cctcttcatgctcaccacgcttccc

SEQ ID NO: 2677377 - DNA, 25 bp, Homo sapien
tggccctggtatgtggcctcttcat

SEQ ID NO: 2677378 - DNA, 25 bp, Homo sapien
tgtgagtttaggctcaacaaagaag

SEQ ID NO: 2677379 - DNA, 25 bp, Homo sapien
tcacttggcacttgatagtactctg

SEQ ID NO: 2677380 - DNA, 25 bp, Homo sapien
ccaggatagtctccactgttgggtc

SEQ ID NO: 2677381 - DNA, 25 bp, Homo sapien
tttaggctcaacaaagaagagaatg

SEQ ID NO: 2677382 - DNA, 25 bp, Homo sapien
gaggcgaagaagaactcctatctca

SEQ ID NO: 2677383 - DNA, 25 bp, Homo sapien
gatgtgagaggcgaagaagaactcc

SEQ ID NO: 2677384 - DNA, 25 bp, Homo sapien
aatgtttggatgtgagaggcgaaga

SEQ ID NO: 2677385 - DNA, 25 bp, Homo sapien
gaactcctatctcagttcttacgat

SEQ ID NO: 2677386 - DNA, 25 bp, Homo sapien
tcctgtgacgagttctaggaccaga

SEQ ID NO: 2677387 - DNA, 25 bp, Homo sapien
tctaggaccagactgatttctgtag

SEQ ID NO: 2677388 - DNA, 25 bp, Homo sapien
gttctaggaccagactgatttctgt

SEQ ID NO: 2677389 - DNA, 25 bp, Homo sapien
agttctcctcctgtgacgagttcta

SEQ ID NO: 2677390 - DNA, 25 bp, Homo sapien
agcacgaaggtggtacatttcccca

SEQ ID NO: 2677391 - DNA, 25 bp, Homo sapien
gagactccagttcctacaggtccct

SEQ ID NO: 2677392 - DNA, 25 bp, Homo sapien
cactgaaagcgtctggcttcaacag

SEQ ID NO: 2677393 - DNA, 25 bp, Homo sapien
ggcctagcagacatctggagatctg

SEQ ID NO: 2677394 - DNA, 25 bp, Homo sapien
cttcgaccacttctattccaggcag

SEQ ID NO: 2677395 - DNA, 25 bp, Homo sapien
ctcatttcagtgtgaactccgcaca

SEQ ID NO: 2677396 - DNA, 25 bp, Homo sapien
aaggagctttgttcccagatgattc

SEQ ID NO: 2677397 - DNA, 25 bp, Homo sapien
cagatgattccttaaacagattgtc

SEQ ID NO: 2677398 - DNA, 25 bp, Homo sapien
tgcagtacttttccagagggcacta

SEQ ID NO: 2677399 - DNA, 25 bp, Homo sapien
gcaaatggcactccttgtggttgaa

SEQ ID NO: 2677400 - DNA, 25 bp, Homo sapien
gagggcactactcatgcaaatggca

SEQ ID NO: 2677401 - DNA, 25 bp, Homo sapien
aaccatgagctgtctcccttaggtg

SEQ ID NO: 2677402 - DNA, 25 bp, Homo sapien
actgtaatatcccttttccacaatc

SEQ ID NO: 2677403 - DNA, 25 bp, Homo sapien
tcgctcactgtaatatcccttttcc

SEQ ID NO: 2677404 - DNA, 25 bp, Homo sapien
tctcgctcactgtaatatccctttt

SEQ ID NO: 2677405 - DNA, 25 bp, Homo sapien
gctcactgtaatatcccttttccac

SEQ ID NO: 2677406 - DNA, 25 bp, Homo sapien
tcacagatgcgcatttcttaaatga

SEQ ID NO: 2677407 - DNA, 25 bp, Homo sapien
catcttcctacaagggagatcggct

SEQ ID NO: 2677408 - DNA, 25 bp, Homo sapien
cactgggcacagtcaggtaatatga

SEQ ID NO: 2677409 - DNA, 25 bp, Homo sapien
cctccctgagatatcaagaagttgg

SEQ ID NO: 2677410 - DNA, 25 bp, Homo sapien
cccaaccaggccagtgaaaaggaga

SEQ ID NO: 2677411 - DNA, 25 bp, Homo sapien
tgcctttgtacctttattatgttcc

SEQ ID NO: 2677412 - DNA, 25 bp, Homo sapien
tagatcctgctgcctttagcccaac

SEQ ID NO: 2677413 - DNA, 25 bp, Homo sapien
tttagcccaacctacaactgctgtc

SEQ ID NO: 2677414 - DNA, 25 bp, Homo sapien
actgactcttttgcaattatgagac

SEQ ID NO: 2677415 - DNA, 25 bp, Homo sapien
ttagaactaatacttccatagatcc

SEQ ID NO: 2677416 - DNA, 25 bp, Homo sapien
agtctcgttatgtagccaggctaca

SEQ ID NO: 2677417 - DNA, 25 bp, Homo sapien
tcgttatgtagccaggctacagtgc

SEQ ID NO: 2677418 - DNA, 25 bp, Homo sapien
tctcgttatgtagccaggctacagt

SEQ ID NO: 2677419 - DNA, 25 bp, Homo sapien
acagagtctcgttatgtagccaggc

SEQ ID NO: 2677420 - DNA, 25 bp, Homo sapien
ccggccttggccaatcagtcataat

SEQ ID NO: 2677421 - DNA, 25 bp, Homo sapien
tctatttcgggcaaagtagccaagc

SEQ ID NO: 2677422 - DNA, 25 bp, Homo sapien
gcatcccaggaccagaagaatctat

SEQ ID NO: 2677423 - DNA, 25 bp, Homo sapien
caggcctggttaggactgtctggct

SEQ ID NO: 2677424 - DNA, 25 bp, Homo sapien
tgtcactttgagaaaggccaaaaac

SEQ ID NO: 2677425 - DNA, 25 bp, Homo sapien
tgagaaaggccaaaaaccgataaga

SEQ ID NO: 2677426 - DNA, 25 bp, Homo sapien
cttgtcactttgagaaaggccaaaa

SEQ ID NO: 2677427 - DNA, 25 bp, Homo sapien
ttgtcactttgagaaaggccaaaaa

SEQ ID NO: 2677428 - DNA, 25 bp, Homo sapien
gattctctggtttgagatcacgatg

SEQ ID NO: 2677429 - DNA, 25 bp, Homo sapien
ctctggtttgagatcacgatggaca

SEQ ID NO: 2677430 - DNA, 25 bp, Homo sapien
gagatcacgatggacaatcccattt

SEQ ID NO: 2677431 - DNA, 25 bp, Homo sapien
tttgagatcacgatggacaatccca

SEQ ID NO: 2677432 - DNA, 25 bp, Homo sapien
cttcatgagcacttgatgttccaca

SEQ ID NO: 2677433 - DNA, 25 bp, Homo sapien
gcacttgatgttccacaattttaga

SEQ ID NO: 2677434 - DNA, 25 bp, Homo sapien
cacaattttagagagtccaaaatca

SEQ ID NO: 2677435 - DNA, 25 bp, Homo sapien
acatactgtcttcatgagcacttga

SEQ ID NO: 2677436 - DNA, 25 bp, Homo sapien
caacgtagttgtggtccatctgcag

SEQ ID NO: 2677437 - DNA, 25 bp, Homo sapien
aagtccttgtcttagtgaggctagg

SEQ ID NO: 2677438 - DNA, 25 bp, Homo sapien
tgattgcaatgccttcagcccactc

SEQ ID NO: 2677439 - DNA, 25 bp, Homo sapien
caggttttatgctagtatgggtcaa

SEQ ID NO: 2677440 - DNA, 25 bp, Homo sapien
tggggcaggggtgacctcaaatata

SEQ ID NO: 2677441 - DNA, 25 bp, Homo sapien
ggggcaggggtgacctcaaatataa

SEQ ID NO: 2677442 - DNA, 25 bp, Homo sapien
ggcaggggtgacctcaaatataagc

SEQ ID NO: 2677443 - DNA, 25 bp, Homo sapien
gcaggggtgacctcaaatataagcg

SEQ ID NO: 2677444 - DNA, 25 bp, Homo sapien
gaaagataagaaagcgtccagcctg

SEQ ID NO: 2677445 - DNA, 25 bp, Homo sapien
gcgattcacttataggagagccctg

SEQ ID NO: 2677446 - DNA, 25 bp, Homo sapien
cacagtgcacttaaggataatcgac

SEQ ID NO: 2677447 - DNA, 25 bp, Homo sapien
taaacacccagtctctcacaagatg

SEQ ID NO: 2677448 - DNA, 25 bp, Homo sapien
gggacgattttggtcattgactgta

SEQ ID NO: 2677449 - DNA, 25 bp, Homo sapien
gacgattttggtcattgactgtact

SEQ ID NO: 2677450 - DNA, 25 bp, Homo sapien
cgattttggtcattgactgtacttt

SEQ ID NO: 2677451 - DNA, 25 bp, Homo sapien
aagggacgattttggtcattgactg

SEQ ID NO: 2677452 - DNA, 25 bp, Homo sapien
agggaccactggtgctaaatttgcc

SEQ ID NO: 2677453 - DNA, 25 bp, Homo sapien
gaccactggtgctaaatttgccttc

SEQ ID NO: 2677454 - DNA, 25 bp, Homo sapien
ggaccactggtgctaaatttgcctt

SEQ ID NO: 2677455 - DNA, 25 bp, Homo sapien
gggaccactggtgctaaatttgcct

SEQ ID NO: 2677456 - DNA, 25 bp, Homo sapien
tgctacaacagctactgtgtatgct

SEQ ID NO: 2677457 - DNA, 25 bp, Homo sapien
tacaacagctactgtgtatgctgcc

SEQ ID NO: 2677458 - DNA, 25 bp, Homo sapien
tgtatgctgccctatggggactcat

SEQ ID NO: 2677459 - DNA, 25 bp, Homo sapien
aacagctactgtgtatgctgcccta

SEQ ID NO: 2677460 - DNA, 25 bp, Homo sapien
ggttggaatgcaagtaaacaggatt

SEQ ID NO: 2677461 - DNA, 25 bp, Homo sapien
taggggttggaatgcaagtaaacag

SEQ ID NO: 2677462 - DNA, 25 bp, Homo sapien
gataggggttggaatgcaagtaaac

SEQ ID NO: 2677463 - DNA, 25 bp, Homo sapien
ctgggataggggttggaatgcaagt

SEQ ID NO: 2677464 - DNA, 25 bp, Homo sapien
tgattttgaacacaagtgcggcagg

SEQ ID NO: 2677465 - DNA, 25 bp, Homo sapien
gctcaggcctattgtccagagtggc

SEQ ID NO: 2677466 - DNA, 25 bp, Homo sapien
tctatggagaaatagagctcaggcc

SEQ ID NO: 2677467 - DNA, 25 bp, Homo sapien
tgccagcagcgtacttgaagaagga

SEQ ID NO: 2677468 - DNA, 25 bp, Homo sapien
cataggcacaacctctaagaatttc

SEQ ID NO: 2677469 - DNA, 25 bp, Homo sapien
aggtccataggcacaacctctaaga

SEQ ID NO: 2677470 - DNA, 25 bp, Homo sapien
aagatgtaggtgattattcctacag

SEQ ID NO: 2677471 - DNA, 25 bp, Homo sapien
taggtgattattcctacagaccaca

SEQ ID NO: 2677472 - DNA, 25 bp, Homo sapien
ctgaacatgaactgatcgcctcttt

SEQ ID NO: 2677473 - DNA, 25 bp, Homo sapien
gataaagtaatattcacaattcaga

SEQ ID NO: 2677474 - DNA, 25 bp, Homo sapien
ttagagatacttcatcccaccaggg

SEQ ID NO: 2677475 - DNA, 25 bp, Homo sapien
tttcatcatagaatggttcaaatcc

SEQ ID NO: 2677476 - DNA, 25 bp, Homo sapien
ggcagtcaataaattcccaggaagg

SEQ ID NO: 2677477 - DNA, 25 bp, Homo sapien
taatccacagtcctgggcttagtag

SEQ ID NO: 2677478 - DNA, 25 bp, Homo sapien
tttacccctgcttgtgaggatgggc

SEQ ID NO: 2677479 - DNA, 25 bp, Homo sapien
aataattctgggctgcgcttcacaa

SEQ ID NO: 2677480 - DNA, 25 bp, Homo sapien
ttaggatgacctgggcttgccctca

SEQ ID NO: 2677481 - DNA, 25 bp, Homo sapien
gccctcagcttacaaacttccagat

SEQ ID NO: 2677482 - DNA, 25 bp, Homo sapien
ggcagacggctttccaacagaagtc

SEQ ID NO: 2677483 - DNA, 25 bp, Homo sapien
gaagacagggccatgtaccacctga

SEQ ID NO: 2677484 - DNA, 25 bp, Homo sapien
tatccatgtgtacaaaattggctgc

SEQ ID NO: 2677485 - DNA, 25 bp, Homo sapien
tagtcagccgtttctttggatccaa

SEQ ID NO: 2677486 - DNA, 25 bp, Homo sapien
cttacgccgggcattgaattcttgg

SEQ ID NO: 2677487 - DNA, 25 bp, Homo sapien
ttacctgtgacccacggatgctgga

SEQ ID NO: 2677488 - DNA, 25 bp, Homo sapien
ggcttgggccccatcgccttgaatt

SEQ ID NO: 2677489 - DNA, 25 bp, Homo sapien
attggagaagggtctcggctagcct

SEQ ID NO: 2677490 - DNA, 25 bp, Homo sapien
tcgttgccatcttggattggagaag

SEQ ID NO: 2677491 - DNA, 25 bp, Homo sapien
tctaaggcttgcaccttcatcagct

SEQ ID NO: 2677492 - DNA, 25 bp, Homo sapien
tgctaggccctcctctagttccagg

SEQ ID NO: 2677493 - DNA, 25 bp, Homo sapien
ttagtactctggcaggatcacatct

SEQ ID NO: 2677494 - DNA, 25 bp, Homo sapien
aggccctcctctagttccaggtcag

SEQ ID NO: 2677495 - DNA, 25 bp, Homo sapien
tgtggaacttcaaaacccacagcag

SEQ ID NO: 2677496 - DNA, 25 bp, Homo sapien
aagtacataaaatgccggtgtttgg

SEQ ID NO: 2677497 - DNA, 25 bp, Homo sapien
ctttcttgctgaaggacaaagtaca

SEQ ID NO: 2677498 - DNA, 25 bp, Homo sapien
tcttgctgaaggacaaagtacataa

SEQ ID NO: 2677499 - DNA, 25 bp, Homo sapien
aaaatgccggtgtttggcttccaga

SEQ ID NO: 2677500 - DNA, 25 bp, Homo sapien
gggaacatgtcttttagcactacct

SEQ ID NO: 2677501 - DNA, 25 bp, Homo sapien
gggtactttcattccaaatacgaga

SEQ ID NO: 2677502 - DNA, 25 bp, Homo sapien
cagaaagtcatcttattggagagca

SEQ ID NO: 2677503 - DNA, 25 bp, Homo sapien
caaatatgtgccactggttgctgaa

SEQ ID NO: 2677504 - DNA, 25 bp, Homo sapien
gggctccatatcagtgacctgtcag

SEQ ID NO: 2677505 - DNA, 25 bp, Homo sapien
tgaaagataagaagtcctaccttgt

SEQ ID NO: 2677506 - DNA, 25 bp, Homo sapien
cagtagtagagagagatttgtgatt

SEQ ID NO: 2677507 - DNA, 25 bp, Homo sapien
gaatgtctactgaggtccaacagcc

SEQ ID NO: 2677508 - DNA, 25 bp, Homo sapien
tcctactgaaacaatgaaattagtc

SEQ ID NO: 2677509 - DNA, 25 bp, Homo sapien
gaatcttatctttaacatgagtcaa

SEQ ID NO: 2677510 - DNA, 25 bp, Homo sapien
cacatggaggaatggtaatatgcac

SEQ ID NO: 2677511 - DNA, 25 bp, Homo sapien
tatcaactcgagtactcacatggag

SEQ ID NO: 2677512 - DNA, 25 bp, Homo sapien
catcatggcagtactcaggagactc

SEQ ID NO: 2677513 - DNA, 25 bp, Homo sapien
tctaggctgtagtcaagactccagg

SEQ ID NO: 2677514 - DNA, 25 bp, Homo sapien
gatggcatgaagcttaatccaggcc

SEQ ID NO: 2677515 - DNA, 25 bp, Homo sapien
gagcacttgatgtcccaaaggccta

SEQ ID NO: 2677516 - DNA, 25 bp, Homo sapien
ggcactatgattaattgactctgct

SEQ ID NO: 2677517 - DNA, 25 bp, Homo sapien
ttatacattgagtcaaccatcaaga

SEQ ID NO: 2677518 - DNA, 25 bp, Homo sapien
aaaatgctagtgctgattcactttg

SEQ ID NO: 2677519 - DNA, 25 bp, Homo sapien
gaaacaaaatggctctctccaaatc

SEQ ID NO: 2677520 - DNA, 25 bp, Homo sapien
aaaattcaccctgagtgtgtcaggg

SEQ ID NO: 2677521 - DNA, 25 bp, Homo sapien
gctcaactactagcaatgaccctga

SEQ ID NO: 2677522 - DNA, 25 bp, Homo sapien
tgatctcaggtaatagccacaagga

SEQ ID NO: 2677523 - DNA, 25 bp, Homo sapien
cagaatatggactaataggcaggaa

SEQ ID NO: 2677524 - DNA, 25 bp, Homo sapien
gaaccagacaacagggaacagactg

SEQ ID NO: 2677525 - DNA, 25 bp, Homo sapien
ctgaaccagacaacagggaacagac

SEQ ID NO: 2677526 - DNA, 25 bp, Homo sapien
caacagggaacagactgagttcttg

SEQ ID NO: 2677527 - DNA, 25 bp, Homo sapien
acagggaacagactgagttcttgaa

SEQ ID NO: 2677528 - DNA, 25 bp, Homo sapien
caagaaaagagtaacccactggtgg

SEQ ID NO: 2677529 - DNA, 25 bp, Homo sapien
gatctgggataaggcatagcaaacc

SEQ ID NO: 2677530 - DNA, 25 bp, Homo sapien
aagacagttcactttctcggcaagg

SEQ ID NO: 2677531 - DNA, 25 bp, Homo sapien
gaactgctctacatctatcaaggaa

SEQ ID NO: 2677532 - DNA, 25 bp, Homo sapien
caaatgggaatacgaaccttaagct

SEQ ID NO: 2677533 - DNA, 25 bp, Homo sapien
tgcaagtcaccaaaaaggcattggg

SEQ ID NO: 2677534 - DNA, 25 bp, Homo sapien
tactgtaagggtccagatacacatt

SEQ ID NO: 2677535 - DNA, 25 bp, Homo sapien
cactaagttgtatctatctccagca

SEQ ID NO: 2677536 - DNA, 25 bp, Homo sapien
tacgtaacactcaggaaagcgtggg

SEQ ID NO: 2677537 - DNA, 25 bp, Homo sapien
tacacataatgatgcggactggcag

SEQ ID NO: 2677538 - DNA, 25 bp, Homo sapien
cagcgagtgtatcctagtggctata

SEQ ID NO: 2677539 - DNA, 25 bp, Homo sapien
ggtcactagcttcccttaaggtgga

SEQ ID NO: 2677540 - DNA, 25 bp, Homo sapien
ctctttccattcctagggcttatca

SEQ ID NO: 2677541 - DNA, 25 bp, Homo sapien
tatcatctgcctaaatgcagcatag

SEQ ID NO: 2677542 - DNA, 25 bp, Homo sapien
tacaggttgtatctataaggttggc

SEQ ID NO: 2677543 - DNA, 25 bp, Homo sapien
ttctctccaactacaaagctcactc

SEQ ID NO: 2677544 - DNA, 25 bp, Homo sapien
ttcacccatctttcacatacagcct

SEQ ID NO: 2677545 - DNA, 25 bp, Homo sapien
acccatctttcacatacagcctgtg

SEQ ID NO: 2677546 - DNA, 25 bp, Homo sapien
cccatctttcacatacagcctgtgt

SEQ ID NO: 2677547 - DNA, 25 bp, Homo sapien
tcacccatctttcacatacagcctg

SEQ ID NO: 2677548 - DNA, 25 bp, Homo sapien
tgcacatggacctacccagagtaag

SEQ ID NO: 2677549 - DNA, 25 bp, Homo sapien
cacagcagatgagccaagtatgtca

SEQ ID NO: 2677550 - DNA, 25 bp, Homo sapien
tgacttgcagcctaaactattggag

SEQ ID NO: 2677551 - DNA, 25 bp, Homo sapien
tatgtacatttatgcccaggccaga

SEQ ID NO: 2677552 - DNA, 25 bp, Homo sapien
ccaacctgaatccaagaagaagcca

SEQ ID NO: 2677553 - DNA, 25 bp, Homo sapien
caacctgaatccaagaagaagccac

SEQ ID NO: 2677554 - DNA, 25 bp, Homo sapien
gagacagcccatgactgttgtgtcc

SEQ ID NO: 2677555 - DNA, 25 bp, Homo sapien
tgagacagcccatgactgttgtgtc

SEQ ID NO: 2677556 - DNA, 25 bp, Homo sapien
tcccagcagcaagatataggcttct

SEQ ID NO: 2677557 - DNA, 25 bp, Homo sapien
catgtctgtctgagtgaacttacac

SEQ ID NO: 2677558 - DNA, 25 bp, Homo sapien
gaacttacaccaagtaacattggcc

SEQ ID NO: 2677559 - DNA, 25 bp, Homo sapien
tatcgtattctacatgccaactgct

SEQ ID NO: 2677560 - DNA, 25 bp, Homo sapien
cacgatctatgttataagaaggcag

SEQ ID NO: 2677561 - DNA, 25 bp, Homo sapien
tgtgaagcagggagttactttcctc

SEQ ID NO: 2677562 - DNA, 25 bp, Homo sapien
tgtgttcccctaaaacgcagatgtt

SEQ ID NO: 2677563 - DNA, 25 bp, Homo sapien
gattacaaggacacccacgatctat

SEQ ID NO: 2677564 - DNA, 25 bp, Homo sapien
tgtagtgatccctaccctgtagaga

SEQ ID NO: 2677565 - DNA, 25 bp, Homo sapien
aagggcttgatcaggtttcccctag

SEQ ID NO: 2677566 - DNA, 25 bp, Homo sapien
tgtaccaccgtccttagaatcaggt

SEQ ID NO: 2677567 - DNA, 25 bp, Homo sapien
tttaagcccttaattgtctgttgag

SEQ ID NO: 2677568 - DNA, 25 bp, Homo sapien
cattttacaaatttgggcaagccac

SEQ ID NO: 2677569 - DNA, 25 bp, Homo sapien
gccacatgaggccagtggatactgt

SEQ ID NO: 2677570 - DNA, 25 bp, Homo sapien
cattgcttgataaataggacatcta

SEQ ID NO: 2677571 - DNA, 25 bp, Homo sapien
ggaaatctttgttagtctctagagc

SEQ ID NO: 2677572 - DNA, 25 bp, Homo sapien
taattcaccgttaaacatggaccca

SEQ ID NO: 2677573 - DNA, 25 bp, Homo sapien
gctgggctctagctgtgtactttaa

SEQ ID NO: 2677574 - DNA, 25 bp, Homo sapien
caaaggtgcctaacttgagtaaggg

SEQ ID NO: 2677575 - DNA, 25 bp, Homo sapien
tagatggccccttagatctgctggg

SEQ ID NO: 2677576 - DNA, 25 bp, Homo sapien
caggtatccaggcaaatctttgtat

SEQ ID NO: 2677577 - DNA, 25 bp, Homo sapien
tgtacatgcacacatctcgaaatcc

SEQ ID NO: 2677578 - DNA, 25 bp, Homo sapien
tatgtgttagtattcctgtgtctac

SEQ ID NO: 2677579 - DNA, 25 bp, Homo sapien
tcgaaatccatttccgtgtttaatg

SEQ ID NO: 2677580 - DNA, 25 bp, Homo sapien
aaatacagtcttagatttacccaag

SEQ ID NO: 2677581 - DNA, 25 bp, Homo sapien
atcagtctgtaactagaacaaatac

SEQ ID NO: 2677582 - DNA, 25 bp, Homo sapien
gagactcttaaaagcatcagtctgt

SEQ ID NO: 2677583 - DNA, 25 bp, Homo sapien
ggtgtccaagacttatcttgagact

SEQ ID NO: 2677584 - DNA, 25 bp, Homo sapien
cagctttgatctgaccgctcaaggg

SEQ ID NO: 2677585 - DNA, 25 bp, Homo sapien
tgtttttggttcactagtacaatgt

SEQ ID NO: 2677586 - DNA, 25 bp, Homo sapien
gcatagccggtagaaaaatttgaaa

SEQ ID NO: 2677587 - DNA, 25 bp, Homo sapien
cctaaagtaaatagctatctaagag

SEQ ID NO: 2677588 - DNA, 25 bp, Homo sapien
gatgtactcatttgccaaacctggg

SEQ ID NO: 2677589 - DNA, 25 bp, Homo sapien
ctgggtcatctggtcattggcgaat

SEQ ID NO: 2677590 - DNA, 25 bp, Homo sapien
gagcgaaactcacttaaccaactgg

SEQ ID NO: 2677591 - DNA, 25 bp, Homo sapien
gctgccgaggaatgtggaaaccttg

SEQ ID NO: 2677592 - DNA, 25 bp, Homo sapien
gtgaccaaggtacgggcagcaacat

SEQ ID NO: 2677593 - DNA, 25 bp, Homo sapien
catgccgcatgaagagtgtcctcct

SEQ ID NO: 2677594 - DNA, 25 bp, Homo sapien
ctccttctggtagggaagcacatca

SEQ ID NO: 2677595 - DNA, 25 bp, Homo sapien
tgttttcaaaacaagcgtgcatgga

SEQ ID NO: 2677596 - DNA, 25 bp, Homo sapien
tccggtgtttgagatggtctgtatg

SEQ ID NO: 2677597 - DNA, 25 bp, Homo sapien
atgtgtggacttttttcacgctgtc

SEQ ID NO: 2677598 - DNA, 25 bp, Homo sapien
tttcccatactcctccatccaagca

SEQ ID NO: 2677599 - DNA, 25 bp, Homo sapien
cttcatttccggtgtttgagatggt

SEQ ID NO: 2677600 - DNA, 25 bp, Homo sapien
ctacagcctccatagcaagggccat

SEQ ID NO: 2677601 - DNA, 25 bp, Homo sapien
tctgctccgatctagagtcagctcc

SEQ ID NO: 2677602 - DNA, 25 bp, Homo sapien
tccatcctctcagtgactacagcct

SEQ ID NO: 2677603 - DNA, 25 bp, Homo sapien
gacttgtcccccattggcatctgag

SEQ ID NO: 2677604 - DNA, 25 bp, Homo sapien
ttcagaagcaaaccactacatccag

SEQ ID NO: 2677605 - DNA, 25 bp, Homo sapien
gttatacaacagcacaaatatcagg

SEQ ID NO: 2677606 - DNA, 25 bp, Homo sapien
tagagaaccattttagaaggctgtc

SEQ ID NO: 2677607 - DNA, 25 bp, Homo sapien
cacactcataggagggagttataca

SEQ ID NO: 2677608 - DNA, 25 bp, Homo sapien
tcctcctcctatgaaaggccacttg

SEQ ID NO: 2677609 - DNA, 25 bp, Homo sapien
cctcacatttgacaaggagctcctc

SEQ ID NO: 2677610 - DNA, 25 bp, Homo sapien
ggccacttgtcccatagctttcttc

SEQ ID NO: 2677611 - DNA, 25 bp, Homo sapien
tcctgtcctgcttcgctcctcacat

SEQ ID NO: 2677612 - DNA, 25 bp, Homo sapien
tcttgtttcgtgcctctttttcact

SEQ ID NO: 2677613 - DNA, 25 bp, Homo sapien
ttgtttcgtgcctctttttcactta

SEQ ID NO: 2677614 - DNA, 25 bp, Homo sapien
cttgtttcgtgcctctttttcactt

SEQ ID NO: 2677615 - DNA, 25 bp, Homo sapien
agttggggctgtcagccctagcagc

SEQ ID NO: 2677616 - DNA, 25 bp, Homo sapien
tcaggttggttcttctggtcatgtg

SEQ ID NO: 2677617 - DNA, 25 bp, Homo sapien
ctccaaggactgtgcaaaaaactta

SEQ ID NO: 2677618 - DNA, 25 bp, Homo sapien
actgagatggcctgttgctacagtc

SEQ ID NO: 2677619 - DNA, 25 bp, Homo sapien
caagtcttcacccaactcttctgca

SEQ ID NO: 2677620 - DNA, 25 bp, Homo sapien
tttcaagtcttcacccaactcttct

SEQ ID NO: 2677621 - DNA, 25 bp, Homo sapien
tcaagtcttcacccaactcttctgc

SEQ ID NO: 2677622 - DNA, 25 bp, Homo sapien
ttttcaagtcttcacccaactcttc

SEQ ID NO: 2677623 - DNA, 25 bp, Homo sapien
tcaaagtcactctattctatagtca

SEQ ID NO: 2677624 - DNA, 25 bp, Homo sapien
tagcttaagctatccaaatacctga

SEQ ID NO: 2677625 - DNA, 25 bp, Homo sapien
gagttttaatttgctatgctacgtt

SEQ ID NO: 2677626 - DNA, 25 bp, Homo sapien
gcctatcattaggtatccttccatg

SEQ ID NO: 2677627 - DNA, 25 bp, Homo sapien
tacttctagggagtgatatccatcc

SEQ ID NO: 2677628 - DNA, 25 bp, Homo sapien
tccactgagcacaaggctgggatgt

SEQ ID NO: 2677629 - DNA, 25 bp, Homo sapien
tcttgggttggaaaacgatgtcaac

SEQ ID NO: 2677630 - DNA, 25 bp, Homo sapien
tactgatcctatccctaagagggac

SEQ ID NO: 2677631 - DNA, 25 bp, Homo sapien
tcagtgacggtttgagcgcttcgcc

SEQ ID NO: 2677632 - DNA, 25 bp, Homo sapien
gaatgaagtattggatgcctccaga

SEQ ID NO: 2677633 - DNA, 25 bp, Homo sapien
ggcctttggctattacttgctgaca

SEQ ID NO: 2677634 - DNA, 25 bp, Homo sapien
taagcctgggccaactaagcctatt

SEQ ID NO: 2677635 - DNA, 25 bp, Homo sapien
tcttgagaacatggttctttgctga

SEQ ID NO: 2677636 - DNA, 25 bp, Homo sapien
tatttggtccaacagcacaagccag

SEQ ID NO: 2677637 - DNA, 25 bp, Homo sapien
cagagccaggactaatgaataccac

SEQ ID NO: 2677638 - DNA, 25 bp, Homo sapien
tcggatggatggtgttcttgagaac

SEQ ID NO: 2677639 - DNA, 25 bp, Homo sapien
ttcttgggggccatagaccacctcc

SEQ ID NO: 2677640 - DNA, 25 bp, Homo sapien
ctgggctttgtgacaatgtaactgg

SEQ ID NO: 2677641 - DNA, 25 bp, Homo sapien
gctttgtgacaatgtaactggatat

SEQ ID NO: 2677642 - DNA, 25 bp, Homo sapien
gggccatagaccacctcctgttttc

SEQ ID NO: 2677643 - DNA, 25 bp, Homo sapien
aatttcttgctcttgagggaaagcc

SEQ ID NO: 2677644 - DNA, 25 bp, Homo sapien
tgcagtagacagatagaacccaagg

SEQ ID NO: 2677645 - DNA, 25 bp, Homo sapien
gctaaagcagtatagatttgccatg

SEQ ID NO: 2677646 - DNA, 25 bp, Homo sapien
caaagaaaattagtagaaggcactg

SEQ ID NO: 2677647 - DNA, 25 bp, Homo sapien
aaagctgggagcaagctaaaatgcc

SEQ ID NO: 2677648 - DNA, 25 bp, Homo sapien
tgctcccaatacaggttagtccatg

SEQ ID NO: 2677649 - DNA, 25 bp, Homo sapien
cttacgtggagctggagaatctgct

SEQ ID NO: 2677650 - DNA, 25 bp, Homo sapien
ggatgcctcagttcttctactcatg

SEQ ID NO: 2677651 - DNA, 25 bp, Homo sapien
aattcatgtgtacccagatacctgg

SEQ ID NO: 2677652 - DNA, 25 bp, Homo sapien
ccctacagtgggagcttagcctcta

SEQ ID NO: 2677653 - DNA, 25 bp, Homo sapien
tcaacagagactaaggaacagacct

SEQ ID NO: 2677654 - DNA, 25 bp, Homo sapien
tctcatgtgaccctgaaacctggca

SEQ ID NO: 2677655 - DNA, 25 bp, Homo sapien
gtatatcagctgtgtaaatagagca

SEQ ID NO: 2677656 - DNA, 25 bp, Homo sapien
tgcaggcttttgtaacagtgtgatc

SEQ ID NO: 2677657 - DNA, 25 bp, Homo sapien
ccttcgttagaataggtatatcagc

SEQ ID NO: 2677658 - DNA, 25 bp, Homo sapien
actgatgcactcatgacaagtaccc

SEQ ID NO: 2677659 - DNA, 25 bp, Homo sapien
tcttcttttgacagggcaggccttg

SEQ ID NO: 2677660 - DNA, 25 bp, Homo sapien
gcatgcactgcacttcttcgttttc

SEQ ID NO: 2677661 - DNA, 25 bp, Homo sapien
tgttctgaactgtttcgcttctgac

SEQ ID NO: 2677662 - DNA, 25 bp, Homo sapien
cgcttctgactgttaaacaccgatg

SEQ ID NO: 2677663 - DNA, 25 bp, Homo sapien
ttttacaggcattttgaggtgtctc

SEQ ID NO: 2677664 - DNA, 25 bp, Homo sapien
tgtccttgctcccaacgaaatggat

SEQ ID NO: 2677665 - DNA, 25 bp, Homo sapien
aaaacactggcatctgagtgggaat

SEQ ID NO: 2677666 - DNA, 25 bp, Homo sapien
catggaatgttgttgtgttagccag

SEQ ID NO: 2677667 - DNA, 25 bp, Homo sapien
tcttcctttccgtagcctcgcctgc

SEQ ID NO: 2677668 - DNA, 25 bp, Homo sapien
cttcctttccgtagcctcgcctgcc

SEQ ID NO: 2677669 - DNA, 25 bp, Homo sapien
ctcttcctttccgtagcctcgcctg

SEQ ID NO: 2677670 - DNA, 25 bp, Homo sapien
gcgctcacggacatgcagtcacggt

SEQ ID NO: 2677671 - DNA, 25 bp, Homo sapien
tcacggacatgcagtcacggtagcg

SEQ ID NO: 2677672 - DNA, 25 bp, Homo sapien
cggtagcgggagcaatcacaaaact

SEQ ID NO: 2677673 - DNA, 25 bp, Homo sapien
catgcagtcacggtagcgggagcaa

SEQ ID NO: 2677674 - DNA, 25 bp, Homo sapien
ccagagtgtgagagaccattgtctc

SEQ ID NO: 2677675 - DNA, 25 bp, Homo sapien
gtgtgagagaccattgtctcgttgg

SEQ ID NO: 2677676 - DNA, 25 bp, Homo sapien
ctaccagagtgtgagagaccattgt

SEQ ID NO: 2677677 - DNA, 25 bp, Homo sapien
gagtgtgagagaccattgtctcgtt

SEQ ID NO: 2677678 - DNA, 25 bp, Homo sapien
ttgttctctagactggattgacttg

SEQ ID NO: 2677679 - DNA, 25 bp, Homo sapien
gttctctagactggattgacttgtt

SEQ ID NO: 2677680 - DNA, 25 bp, Homo sapien
gaatgttgttctctagactggattg

SEQ ID NO: 2677681 - DNA, 25 bp, Homo sapien
tgttgttctctagactggattgact

SEQ ID NO: 2677682 - DNA, 25 bp, Homo sapien
tatagaagtagtttgaaactcattg

SEQ ID NO: 2677683 - DNA, 25 bp, Homo sapien
tccttggcgaggtagctctgatgga

SEQ ID NO: 2677684 - DNA, 25 bp, Homo sapien
cgaggtagctctgatggagttattt

SEQ ID NO: 2677685 - DNA, 25 bp, Homo sapien
aacatgctccttggcgaggtagctc

SEQ ID NO: 2677686 - DNA, 25 bp, Homo sapien
tcaattgtctgtatatctctatatt

SEQ ID NO: 2677687 - DNA, 25 bp, Homo sapien
caattgtctgtatatctctatattt

SEQ ID NO: 2677688 - DNA, 25 bp, Homo sapien
atcaattgtctgtatatctctatat

SEQ ID NO: 2677689 - DNA, 25 bp, Homo sapien
gggaatgctgcctcacacatggctg

SEQ ID NO: 2677690 - DNA, 25 bp, Homo sapien
gaagaacgatgagacaaacgctgcc

SEQ ID NO: 2677691 - DNA, 25 bp, Homo sapien
cacccagtctaaggttgggccctat

SEQ ID NO: 2677692 - DNA, 25 bp, Homo sapien
tactgaagcaaaggtggccagtgtt

SEQ ID NO: 2677693 - DNA, 25 bp, Homo sapien
cagctgaaagagagaccatcgtcaa

SEQ ID NO: 2677694 - DNA, 25 bp, Homo sapien
ctgcagcagtgtgtccgggaagcca

SEQ ID NO: 2677695 - DNA, 25 bp, Homo sapien
cctgtacagggcataaaatctatct

SEQ ID NO: 2677696 - DNA, 25 bp, Homo sapien
acgtggcggcggatcagtagtcaca

SEQ ID NO: 2677697 - DNA, 25 bp, Homo sapien
ctagtagtcatctgtcgggagggct

SEQ ID NO: 2677698 - DNA, 25 bp, Homo sapien
tctagtaaatgcaggactccatagg

SEQ ID NO: 2677699 - DNA, 25 bp, Homo sapien
tagagtactccagccatagtaggca

SEQ ID NO: 2677700 - DNA, 25 bp, Homo sapien
taactggcgtgactttcaggacggc

SEQ ID NO: 2677701 - DNA, 25 bp, Homo sapien
cagtggcaacgtgttttccccactg

SEQ ID NO: 2677702 - DNA, 25 bp, Homo sapien
ttgtcttccagtggcaacgtgtttt

SEQ ID NO: 2677703 - DNA, 25 bp, Homo sapien
gtcttccagtggcaacgtgttttcc

SEQ ID NO: 2677704 - DNA, 25 bp, Homo sapien
ttccagtggcaacgtgttttcccca

SEQ ID NO: 2677705 - DNA, 25 bp, Homo sapien
tttatggagtctttaggtggattgc

SEQ ID NO: 2677706 - DNA, 25 bp, Homo sapien
gctttgtgctaaatgtgctcttatt

SEQ ID NO: 2677707 - DNA, 25 bp, Homo sapien
ctccagtccaagggagggtgccttg

SEQ ID NO: 2677708 - DNA, 25 bp, Homo sapien
tctgagaattcctcgatcagtgact

SEQ ID NO: 2677709 - DNA, 25 bp, Homo sapien
tactttgggctgttaccagccattt

SEQ ID NO: 2677710 - DNA, 25 bp, Homo sapien
ttactttgggctgttaccagccatt

SEQ ID NO: 2677711 - DNA, 25 bp, Homo sapien
aaaatatccactctgaggcattaca

SEQ ID NO: 2677712 - DNA, 25 bp, Homo sapien
tcctattctgtcgtcttgattgcaa

SEQ ID NO: 2677713 - DNA, 25 bp, Homo sapien
tatgtaatgcagtgccatttccaaa

SEQ ID NO: 2677714 - DNA, 25 bp, Homo sapien
tacacggtggaaggctgattcctat

SEQ ID NO: 2677715 - DNA, 25 bp, Homo sapien
cttctgggtttggataaagccctgg

SEQ ID NO: 2677716 - DNA, 25 bp, Homo sapien
tggacgtataacttctttagcttca

SEQ ID NO: 2677717 - DNA, 25 bp, Homo sapien
gcattgtagaatatccgaaacctca

SEQ ID NO: 2677718 - DNA, 25 bp, Homo sapien
tcttcctcagactttgcattgtaga

SEQ ID NO: 2677719 - DNA, 25 bp, Homo sapien
taatacgaagacactgagcatactc

SEQ ID NO: 2677720 - DNA, 25 bp, Homo sapien
gaagacactgagcatactcttggtg

SEQ ID NO: 2677721 - DNA, 25 bp, Homo sapien
gacactgagcatactcttggtgtgg

SEQ ID NO: 2677722 - DNA, 25 bp, Homo sapien
tgaatcgtctaatacgaagacactg

SEQ ID NO: 2677723 - DNA, 25 bp, Homo sapien
ctgaggttgtagggaggaagcaaca

SEQ ID NO: 2677724 - DNA, 25 bp, Homo sapien
gaggttgtagggaggaagcaacaga

SEQ ID NO: 2677725 - DNA, 25 bp, Homo sapien
tgaggttgtagggaggaagcaacag

SEQ ID NO: 2677726 - DNA, 25 bp, Homo sapien
ttcaccagaaccagaaggaaaccca

SEQ ID NO: 2677727 - DNA, 25 bp, Homo sapien
gagttagtacatgatccctgctcct

SEQ ID NO: 2677728 - DNA, 25 bp, Homo sapien
tagtctggagggttgcttctttctg

SEQ ID NO: 2677729 - DNA, 25 bp, Homo sapien
tgataagtctgttgagagtgtcacc

SEQ ID NO: 2677730 - DNA, 25 bp, Homo sapien
gattttaaggagagatactgtgact

SEQ ID NO: 2677731 - DNA, 25 bp, Homo sapien
ctttcttttctttctccaatacttg

SEQ ID NO: 2677732 - DNA, 25 bp, Homo sapien
tttctttctccaatacttgtttcca

SEQ ID NO: 2677733 - DNA, 25 bp, Homo sapien
tctttctccaatacttgtttccacc

SEQ ID NO: 2677734 - DNA, 25 bp, Homo sapien
ctttctccaatacttgtttccacct

SEQ ID NO: 2677735 - DNA, 25 bp, Homo sapien
agtttccactacattctgctttgca

SEQ ID NO: 2677736 - DNA, 25 bp, Homo sapien
ccttgtaaagcagagtcagcaaaat

SEQ ID NO: 2677737 - DNA, 25 bp, Homo sapien
ctgctttgcagtccttccttgtaaa

SEQ ID NO: 2677738 - DNA, 25 bp, Homo sapien
tttgccaaatgatggccaagtttcc

SEQ ID NO: 2677739 - DNA, 25 bp, Homo sapien
gaacacacgatcgtaaatccattac

SEQ ID NO: 2677740 - DNA, 25 bp, Homo sapien
cagaatatgaacacacgatcgtaaa

SEQ ID NO: 2677741 - DNA, 25 bp, Homo sapien
tatgaacacacgatcgtaaatccat

SEQ ID NO: 2677742 - DNA, 25 bp, Homo sapien
cacgatcgtaaatccattacccttt

SEQ ID NO: 2677743 - DNA, 25 bp, Homo sapien
ccaaaatactggtgagaaatcattt

SEQ ID NO: 2677744 - DNA, 25 bp, Homo sapien
ccccaaaatactggtgagaaatcat

SEQ ID NO: 2677745 - DNA, 25 bp, Homo sapien
ctctcccccaaaatactggtgagaa

SEQ ID NO: 2677746 - DNA, 25 bp, Homo sapien
ctcccccaaaatactggtgagaaat

SEQ ID NO: 2677747 - DNA, 25 bp, Homo sapien
acatcaccacctatgactctggtca

SEQ ID NO: 2677748 - DNA, 25 bp, Homo sapien
catcaccacctatgactctggtcat

SEQ ID NO: 2677749 - DNA, 25 bp, Homo sapien
ctcttgatttctgtccggggacatt

SEQ ID NO: 2677750 - DNA, 25 bp, Homo sapien
tatctcttgatttctgtccggggac

SEQ ID NO: 2677751 - DNA, 25 bp, Homo sapien
cttatctcttgatttctgtccgggg

SEQ ID NO: 2677752 - DNA, 25 bp, Homo sapien
atctcttgatttctgtccggggaca

SEQ ID NO: 2677753 - DNA, 25 bp, Homo sapien
ggtataacttaacaatacttcagct

SEQ ID NO: 2677754 - DNA, 25 bp, Homo sapien
ttttagtccagctactgctatagag

SEQ ID NO: 2677755 - DNA, 25 bp, Homo sapien
cttttagtccagctactgctataga

SEQ ID NO: 2677756 - DNA, 25 bp, Homo sapien
ctgctatagagaccagctttctaaa

SEQ ID NO: 2677757 - DNA, 25 bp, Homo sapien
tcactgctgtttcttaggctcaggc

SEQ ID NO: 2677758 - DNA, 25 bp, Homo sapien
ctctgctacataatgaggaacttgt

SEQ ID NO: 2677759 - DNA, 25 bp, Homo sapien
tgtttcttaggctcaggctcctctg

SEQ ID NO: 2677760 - DNA, 25 bp, Homo sapien
ggctcctctgctacataatgaggaa

SEQ ID NO: 2677761 - DNA, 25 bp, Homo sapien
tactcattttctctctgctgccatc

SEQ ID NO: 2677762 - DNA, 25 bp, Homo sapien
ctactcattttctctctgctgccat

SEQ ID NO: 2677763 - DNA, 25 bp, Homo sapien
tattccagacaacacactctcctag

SEQ ID NO: 2677764 - DNA, 25 bp, Homo sapien
cagataggaccatattccagacaac

SEQ ID NO: 2677765 - DNA, 25 bp, Homo sapien
tgtacaaaacgttcactcaagcaga

SEQ ID NO: 2677766 - DNA, 25 bp, Homo sapien
cactctcctagccttacagctggca

SEQ ID NO: 2677767 - DNA, 25 bp, Homo sapien
cctgagagttcaattagggcccctt

SEQ ID NO: 2677768 - DNA, 25 bp, Homo sapien
caactcaacttggtctgtctgagct

SEQ ID NO: 2677769 - DNA, 25 bp, Homo sapien
ccctatgtgtggtacctggtaacac

SEQ ID NO: 2677770 - DNA, 25 bp, Homo sapien
catactccagtgtggccctatgtgt

SEQ ID NO: 2677771 - DNA, 25 bp, Homo sapien
agaatggaaacagcttgcaaaagta

SEQ ID NO: 2677772 - DNA, 25 bp, Homo sapien
aaagatatcttgatcctgtcttcag

SEQ ID NO: 2677773 - DNA, 25 bp, Homo sapien
gctcatctggggaattactggtctg

SEQ ID NO: 2677774 - DNA, 25 bp, Homo sapien
aagtaagacgcaagtagggtagcag

SEQ ID NO: 2677775 - DNA, 25 bp, Homo sapien
aattacgtgaccttttagttggcag

SEQ ID NO: 2677776 - DNA, 25 bp, Homo sapien
tgaattacgtgaccttttagttggc

SEQ ID NO: 2677777 - DNA, 25 bp, Homo sapien
ttacgtgaccttttagttggcagag

SEQ ID NO: 2677778 - DNA, 25 bp, Homo sapien
cgtgaccttttagttggcagaggca

SEQ ID NO: 2677779 - DNA, 25 bp, Homo sapien
gactttcgggcttaacatgatagaa

SEQ ID NO: 2677780 - DNA, 25 bp, Homo sapien
gaatccagggattctgttgccaagg

SEQ ID NO: 2677781 - DNA, 25 bp, Homo sapien
tggcttccgcggcagtatgaatcat

SEQ ID NO: 2677782 - DNA, 25 bp, Homo sapien
tgccaaggcactaccagtcaagagg

SEQ ID NO: 2677783 - DNA, 25 bp, Homo sapien
ccacatggaactgcggccatacatt

SEQ ID NO: 2677784 - DNA, 25 bp, Homo sapien
tccccacatggaactgcggccatac

SEQ ID NO: 2677785 - DNA, 25 bp, Homo sapien
ttaagacagcaagtaatgtaggctg

SEQ ID NO: 2677786 - DNA, 25 bp, Homo sapien
agacagcaagtaatgtaggctgatt

SEQ ID NO: 2677787 - DNA, 25 bp, Homo sapien
tccaggacaggcttgttgccgccag

SEQ ID NO: 2677788 - DNA, 25 bp, Homo sapien
gacagtagctcccataggcaaagca

SEQ ID NO: 2677789 - DNA, 25 bp, Homo sapien
caggaggttctccatatttccagga

SEQ ID NO: 2677790 - DNA, 25 bp, Homo sapien
gaatgtgttcttccatgacagtagc

SEQ ID NO: 2677791 - DNA, 25 bp, Homo sapien
ctggtgggacaggaagagggaagga

SEQ ID NO: 2677792 - DNA, 25 bp, Homo sapien
tggtgggacaggaagagggaaggat

SEQ ID NO: 2677793 - DNA, 25 bp, Homo sapien
cagtaccctgtgagattatgtgggt

SEQ ID NO: 2677794 - DNA, 25 bp, Homo sapien
ggactgttgggtccagtaccctgtg

SEQ ID NO: 2677795 - DNA, 25 bp, Homo sapien
tccagtaccctgtgagattatgtgg

SEQ ID NO: 2677796 - DNA, 25 bp, Homo sapien
accctgtgagattatgtgggtgaca

SEQ ID NO: 2677797 - DNA, 25 bp, Homo sapien
ctccatggactgtttgtcaggaata

SEQ ID NO: 2677798 - DNA, 25 bp, Homo sapien
aggctccatggactgtttgtcagga

SEQ ID NO: 2677799 - DNA, 25 bp, Homo sapien
caggaataaaagtagtcgtagggag

SEQ ID NO: 2677800 - DNA, 25 bp, Homo sapien
tttgtcaggaataaaagtagtcgta

SEQ ID NO: 2677801 - DNA, 25 bp, Homo sapien
gctattcttgtagagtggctagcag

SEQ ID NO: 2677802 - DNA, 25 bp, Homo sapien
ctttgaatgcagtaattcagattgg

SEQ ID NO: 2677803 - DNA, 25 bp, Homo sapien
tcagattgggatgtacacttgattc

SEQ ID NO: 2677804 - DNA, 25 bp, Homo sapien
tagagtggctagcagtggtaatttt

SEQ ID NO: 2677805 - DNA, 25 bp, Homo sapien
tatctttgctggatgagttttggtc

SEQ ID NO: 2677806 - DNA, 25 bp, Homo sapien
ctttgtacatcctaggaagagatta

SEQ ID NO: 2677807 - DNA, 25 bp, Homo sapien
gattaatcagcaatattgttctttg

SEQ ID NO: 2677808 - DNA, 25 bp, Homo sapien
tggtcaccaagtcttcaagttaggt

SEQ ID NO: 2677809 - DNA, 25 bp, Homo sapien
ctcatccatggtagaagcaatttaa

SEQ ID NO: 2677810 - DNA, 25 bp, Homo sapien
tgaagagaagcctagttaaattcct

SEQ ID NO: 2677811 - DNA, 25 bp, Homo sapien
aatttgtattagagtggtgcaaaag

SEQ ID NO: 2677812 - DNA, 25 bp, Homo sapien
caacctaataggagtttctgctatt

SEQ ID NO: 2677813 - DNA, 25 bp, Homo sapien
atagaagatgggggaacgtttatct

SEQ ID NO: 2677814 - DNA, 25 bp, Homo sapien
tatagaagatgggggaacgtttatc

SEQ ID NO: 2677815 - DNA, 25 bp, Homo sapien
aaattatgtcatgctcctggcccag

SEQ ID NO: 2677816 - DNA, 25 bp, Homo sapien
caattgtcccatgctacagatatgt

SEQ ID NO: 2677817 - DNA, 25 bp, Homo sapien
cctggcccagtcgtcttctaggcag

SEQ ID NO: 2677818 - DNA, 25 bp, Homo sapien
gatgcgttctaatgtcaccgtgctt

SEQ ID NO: 2677819 - DNA, 25 bp, Homo sapien
gatataatcaggcacaccctgacac

SEQ ID NO: 2677820 - DNA, 25 bp, Homo sapien
atcctatagatataatcaggcacac

SEQ ID NO: 2677821 - DNA, 25 bp, Homo sapien
ctatagatataatcaggcacaccct

SEQ ID NO: 2677822 - DNA, 25 bp, Homo sapien
tagatataatcaggcacaccctgac

SEQ ID NO: 2677823 - DNA, 25 bp, Homo sapien
gctgtcctcgtgatgccgtcctaga

SEQ ID NO: 2677824 - DNA, 25 bp, Homo sapien
cctgatgctgtcctcgtgatgccgt

SEQ ID NO: 2677825 - DNA, 25 bp, Homo sapien
agagcctcatgtggttggatttctg

SEQ ID NO: 2677826 - DNA, 25 bp, Homo sapien
aagagcctcatgtggttggatttct

SEQ ID NO: 2677827 - DNA, 25 bp, Homo sapien
tcccactctcctcgtgcaagcatgg

SEQ ID NO: 2677828 - DNA, 25 bp, Homo sapien
ccactctcctcgtgcaagcatggca

SEQ ID NO: 2677829 - DNA, 25 bp, Homo sapien
cactctcctcgtgcaagcatggcat

SEQ ID NO: 2677830 - DNA, 25 bp, Homo sapien
ttcccactctcctcgtgcaagcatg

SEQ ID NO: 2677831 - DNA, 25 bp, Homo sapien
ggaccagtacgtctactcagcagtt

SEQ ID NO: 2677832 - DNA, 25 bp, Homo sapien
ggcggagttgggcaactcttcttca

SEQ ID NO: 2677833 - DNA, 25 bp, Homo sapien
actgcagtttgatctaggctggcgg

SEQ ID NO: 2677834 - DNA, 25 bp, Homo sapien
caagggtgtacatttgactgcagtt

SEQ ID NO: 2677835 - DNA, 25 bp, Homo sapien
ggggctccacaccagaatgatgcag

SEQ ID NO: 2677836 - DNA, 25 bp, Homo sapien
ggtcagcaattgcttagtgcagtca

SEQ ID NO: 2677837 - DNA, 25 bp, Homo sapien
gcagtcagatcaggatggaaggtct

SEQ ID NO: 2677838 - DNA, 25 bp, Homo sapien
tagttgtggccaaggattctttgct

SEQ ID NO: 2677839 - DNA, 25 bp, Homo sapien
gaactctttttgtctgctctgcctt

SEQ ID NO: 2677840 - DNA, 25 bp, Homo sapien
cttgaactctttttgtctgctctgc

SEQ ID NO: 2677841 - DNA, 25 bp, Homo sapien
cttgctcttgaactctttttgtctg

SEQ ID NO: 2677842 - DNA, 25 bp, Homo sapien
gctcttgaactctttttgtctgctc

SEQ ID NO: 2677843 - DNA, 25 bp, Homo sapien
gccccaatgtctatcacctgggatg

SEQ ID NO: 2677844 - DNA, 25 bp, Homo sapien
caatgtctatcacctgggatgtcat

SEQ ID NO: 2677845 - DNA, 25 bp, Homo sapien
cccaatgtctatcacctgggatgtc

SEQ ID NO: 2677846 - DNA, 25 bp, Homo sapien
ggccccaatgtctatcacctgggat

SEQ ID NO: 2677847 - DNA, 25 bp, Homo sapien
attcaactataacagcagtagcaac

SEQ ID NO: 2677848 - DNA, 25 bp, Homo sapien
catgtccacacattgccaaggatat

SEQ ID NO: 2677849 - DNA, 25 bp, Homo sapien
ctgttagcttgatggtgcaagagtc

SEQ ID NO: 2677850 - DNA, 25 bp, Homo sapien
aacagcgttggaagatcctctgctc

SEQ ID NO: 2677851 - DNA, 25 bp, Homo sapien
tctgtttccgtcagtaaccttgctg

SEQ ID NO: 2677852 - DNA, 25 bp, Homo sapien
ctgcgctatggcgagacgccgccgt

SEQ ID NO: 2677853 - DNA, 25 bp, Homo sapien
ttctttccacagaggaggtatccag

SEQ ID NO: 2677854 - DNA, 25 bp, Homo sapien
ccagggtcaagagcatatgatcagt

SEQ ID NO: 2677855 - DNA, 25 bp, Homo sapien
gcccgagtcacctctgcggatgtgt

SEQ ID NO: 2677856 - DNA, 25 bp, Homo sapien
aaggacccactgtccgagagcgcga

SEQ ID NO: 2677857 - DNA, 25 bp, Homo sapien
gcttttctacaagtggaaggaccca

SEQ ID NO: 2677858 - DNA, 25 bp, Homo sapien
gacaggcttccgtcccacaatgctt

SEQ ID NO: 2677859 - DNA, 25 bp, Homo sapien
cagcaagctcgcaccaaaaggaaga

SEQ ID NO: 2677860 - DNA, 25 bp, Homo sapien
ttatctggagaactccctggcatag

SEQ ID NO: 2677861 - DNA, 25 bp, Homo sapien
ccctggcatagtcgatgatgtaaac

SEQ ID NO: 2677862 - DNA, 25 bp, Homo sapien
tgatgtaaacacaaatcgacgaagc

SEQ ID NO: 2677863 - DNA, 25 bp, Homo sapien
ttccaaacgtgggaacgcaggcctg

SEQ ID NO: 2677864 - DNA, 25 bp, Homo sapien
gtaggtgatcactcccgacgagcac

SEQ ID NO: 2677865 - DNA, 25 bp, Homo sapien
ggcagggcaagcataaagtcagtta

SEQ ID NO: 2677866 - DNA, 25 bp, Homo sapien
taaccaggcacgctgcttttaagtt

SEQ ID NO: 2677867 - DNA, 25 bp, Homo sapien
gcaccgcacgtggaaacagctgtaa

SEQ ID NO: 2677868 - DNA, 25 bp, Homo sapien
aactgttacttatgcagctcctaca

SEQ ID NO: 2677869 - DNA, 25 bp, Homo sapien
tttccaaagtgaatgggcaacacaa

SEQ ID NO: 2677870 - DNA, 25 bp, Homo sapien
ggcaggaaaaggctgcaaagcgttt

SEQ ID NO: 2677871 - DNA, 25 bp, Homo sapien
ttttttgacaccacattcactagtt

SEQ ID NO: 2677872 - DNA, 25 bp, Homo sapien
tttatgctcccagatggtattcagc

SEQ ID NO: 2677873 - DNA, 25 bp, Homo sapien
ggtattcagctagcagcagtctaca

SEQ ID NO: 2677874 - DNA, 25 bp, Homo sapien
ttcaggtcacctttatgctcccaga

SEQ ID NO: 2677875 - DNA, 25 bp, Homo sapien
cagcagtctacacttcaggcatcca

SEQ ID NO: 2677876 - DNA, 25 bp, Homo sapien
gagcaacactacgaatgtaccactg

SEQ ID NO: 2677877 - DNA, 25 bp, Homo sapien
tcaagaacttggtaatatgcctgcg

SEQ ID NO: 2677878 - DNA, 25 bp, Homo sapien
gatgcagaatgccagtactatgcgt

SEQ ID NO: 2677879 - DNA, 25 bp, Homo sapien
aaaataagctgtggaggctatccca

SEQ ID NO: 2677880 - DNA, 25 bp, Homo sapien
tactcctcagactcccagaaatttc

SEQ ID NO: 2677881 - DNA, 25 bp, Homo sapien
tgatccaggcaactcttgtgaagat

SEQ ID NO: 2677882 - DNA, 25 bp, Homo sapien
ccagcaggtaattatgtcagtactc

SEQ ID NO: 2677883 - DNA, 25 bp, Homo sapien
aaatgatccaggcaactcttgtgaa

SEQ ID NO: 2677884 - DNA, 25 bp, Homo sapien
tacgcattgagtgcagtaaagcaca

SEQ ID NO: 2677885 - DNA, 25 bp, Homo sapien
cacggaactcatctcatagtgaagt

SEQ ID NO: 2677886 - DNA, 25 bp, Homo sapien
gaactgtgttgtgctcatcatcgtg

SEQ ID NO: 2677887 - DNA, 25 bp, Homo sapien
tagccacgatttttgagtcactgga

SEQ ID NO: 2677888 - DNA, 25 bp, Homo sapien
tgctccccagctgaatctagggtca

SEQ ID NO: 2677889 - DNA, 25 bp, Homo sapien
cactgtgttacttaatcccagggag

SEQ ID NO: 2677890 - DNA, 25 bp, Homo sapien
tggacacctagcagttatggacacc

SEQ ID NO: 2677891 - DNA, 25 bp, Homo sapien
gatgactttgcaatctacagggaaa

SEQ ID NO: 2677892 - DNA, 25 bp, Homo sapien
gctagcctgctgtgcaatagtacaa

SEQ ID NO: 2677893 - DNA, 25 bp, Homo sapien
catttctggaacaggatagcaatca

SEQ ID NO: 2677894 - DNA, 25 bp, Homo sapien
tagtacaagtgggaggacgtcttcc

SEQ ID NO: 2677895 - DNA, 25 bp, Homo sapien
tcaactagtgcccagatgcaaaagg

SEQ ID NO: 2677896 - DNA, 25 bp, Homo sapien
tcactttgcgggatacaagaactca

SEQ ID NO: 2677897 - DNA, 25 bp, Homo sapien
gggatacaagaactcacatgcatct

SEQ ID NO: 2677898 - DNA, 25 bp, Homo sapien
aagaatagctttcactttgcgggat

SEQ ID NO: 2677899 - DNA, 25 bp, Homo sapien
tagttggtttcaatacaagtagtaa

SEQ ID NO: 2677900 - DNA, 25 bp, Homo sapien
tcttctttgttgtagagccaggctg

SEQ ID NO: 2677901 - DNA, 25 bp, Homo sapien
taaaacgcgccatccatgtagatgt

SEQ ID NO: 2677902 - DNA, 25 bp, Homo sapien
tatggttgattcagcgcctcagtgg

SEQ ID NO: 2677903 - DNA, 25 bp, Homo sapien
tttgaagccatagaagttgaagcac

SEQ ID NO: 2677904 - DNA, 25 bp, Homo sapien
tgccaacccctccatcccatcatta

SEQ ID NO: 2677905 - DNA, 25 bp, Homo sapien
gccctgcagtctcttcagcctcatt

SEQ ID NO: 2677906 - DNA, 25 bp, Homo sapien
catcccacatgaggatgcataggtc

SEQ ID NO: 2677907 - DNA, 25 bp, Homo sapien
catgaggatgcataggtctggatat

SEQ ID NO: 2677908 - DNA, 25 bp, Homo sapien
ccagcagtggtagtgaatcagaaaa

SEQ ID NO: 2677909 - DNA, 25 bp, Homo sapien
cacgttcacgctgtaacaccagcag

SEQ ID NO: 2677910 - DNA, 25 bp, Homo sapien
aggtcacgttcacgctgtaacacca

SEQ ID NO: 2677911 - DNA, 25 bp, Homo sapien
ttgtcttcaggtcacgttcacgctg

SEQ ID NO: 2677912 - DNA, 25 bp, Homo sapien
tttgtgtgactccttccagcactgc

SEQ ID NO: 2677913 - DNA, 25 bp, Homo sapien
tcatttgctgaaacaggagtactgt

SEQ ID NO: 2677914 - DNA, 25 bp, Homo sapien
aaacttgcatagttggattcaccca

SEQ ID NO: 2677915 - DNA, 25 bp, Homo sapien
ggtgtggccccacttgaagttaatg

SEQ ID NO: 2677916 - DNA, 25 bp, Homo sapien
gaggctgccctcatattactgtgag

SEQ ID NO: 2677917 - DNA, 25 bp, Homo sapien
ctgtgaggccattaattaacgtgca

SEQ ID NO: 2677918 - DNA, 25 bp, Homo sapien
acgtgcactgcaccatccaaagggc

SEQ ID NO: 2677919 - DNA, 25 bp, Homo sapien
tccagtgaaatgattgaggctgccc

SEQ ID NO: 2677920 - DNA, 25 bp, Homo sapien
tagtttgcagcatatacactcccaa

SEQ ID NO: 2677921 - DNA, 25 bp, Homo sapien
gcttgaaatagtttgcagcatatac

SEQ ID NO: 2677922 - DNA, 25 bp, Homo sapien
gacttctacactgaggttcattttc

SEQ ID NO: 2677923 - DNA, 25 bp, Homo sapien
ccaaatccagacttgacttctacac

SEQ ID NO: 2677924 - DNA, 25 bp, Homo sapien
cacctttgagcaggcaatcctgagc

SEQ ID NO: 2677925 - DNA, 25 bp, Homo sapien
tggagaccagaagccgcttccacct

SEQ ID NO: 2677926 - DNA, 25 bp, Homo sapien
accgtgatggatgctagacagggac

SEQ ID NO: 2677927 - DNA, 25 bp, Homo sapien
gacaatgctgcaggcaccgtgatgg

SEQ ID NO: 2677928 - DNA, 25 bp, Homo sapien
gatcgcactaagtcgccaaagttcc

SEQ ID NO: 2677929 - DNA, 25 bp, Homo sapien
gtctgggctgcggtgtgttttcccc

SEQ ID NO: 2677930 - DNA, 25 bp, Homo sapien
ctctgggctctttttgaccattttt

SEQ ID NO: 2677931 - DNA, 25 bp, Homo sapien
cagtggactctacaattctcccagt

SEQ ID NO: 2677932 - DNA, 25 bp, Homo sapien
agaaccacgtgcccctggtgcatgt

SEQ ID NO: 2677933 - DNA, 25 bp, Homo sapien
acgtgcccctggtgcatgtgcctct

SEQ ID NO: 2677934 - DNA, 25 bp, Homo sapien
aaccacgtgcccctggtgcatgtgc

SEQ ID NO: 2677935 - DNA, 25 bp, Homo sapien
gtgcccctggtgcatgtgcctctgg

SEQ ID NO: 2677936 - DNA, 25 bp, Homo sapien
ctgcttagaattgctttggctgttt

SEQ ID NO: 2677937 - DNA, 25 bp, Homo sapien
tttctgcttagaattgctttggctg

SEQ ID NO: 2677938 - DNA, 25 bp, Homo sapien
tgctttggctgtttgggcttttttg

SEQ ID NO: 2677939 - DNA, 25 bp, Homo sapien
tggagggagggtccattttagaata

SEQ ID NO: 2677940 - DNA, 25 bp, Homo sapien
gaattgttggatcaaatggtggttc

SEQ ID NO: 2677941 - DNA, 25 bp, Homo sapien
tgtagaatgatttgtttccctttga

SEQ ID NO: 2677942 - DNA, 25 bp, Homo sapien
cattgcgcccagccatatgtctttt

SEQ ID NO: 2677943 - DNA, 25 bp, Homo sapien
tccctttgagtatatatccagtagt

SEQ ID NO: 2677944 - DNA, 25 bp, Homo sapien
tctgctagaatcaaacagcatcagt

SEQ ID NO: 2677945 - DNA, 25 bp, Homo sapien
cctcctctgctagaatcaaacagca

SEQ ID NO: 2677946 - DNA, 25 bp, Homo sapien
tcctctgctagaatcaaacagcatc

SEQ ID NO: 2677947 - DNA, 25 bp, Homo sapien
ctgctagaatcaaacagcatcagta

SEQ ID NO: 2677948 - DNA, 25 bp, Homo sapien
gcttggaccaagccagttgtttctg

SEQ ID NO: 2677949 - DNA, 25 bp, Homo sapien
cgcttggaccaagccagttgtttct

SEQ ID NO: 2677950 - DNA, 25 bp, Homo sapien
tgtgcagcggagtggacctagtgtt

SEQ ID NO: 2677951 - DNA, 25 bp, Homo sapien
cttggaccaagccagttgtttctgt

SEQ ID NO: 2677952 - DNA, 25 bp, Homo sapien
aaattcattagccaggtggaaactc

SEQ ID NO: 2677953 - DNA, 25 bp, Homo sapien
ttcattagccaggtggaaactcagg

SEQ ID NO: 2677954 - DNA, 25 bp, Homo sapien
cctaaattcattagccaggtggaaa

SEQ ID NO: 2677955 - DNA, 25 bp, Homo sapien
ttagccaggtggaaactcaggatgc

SEQ ID NO: 2677956 - DNA, 25 bp, Homo sapien
cacatgggccacttattcagaagtg

SEQ ID NO: 2677957 - DNA, 25 bp, Homo sapien
ccaggttttcaggcccatggctttt

SEQ ID NO: 2677958 - DNA, 25 bp, Homo sapien
tcctttgcttcacttactggtgtgt

SEQ ID NO: 2677959 - DNA, 25 bp, Homo sapien
gaatagcttgtgttatggcaggaag

SEQ ID NO: 2677960 - DNA, 25 bp, Homo sapien
gcttggggtcctaatgatcccgtca

SEQ ID NO: 2677961 - DNA, 25 bp, Homo sapien
ggtatattgtgtgacggtgaggctt

SEQ ID NO: 2677962 - DNA, 25 bp, Homo sapien
ttcacatttggtcattgggaaccct

SEQ ID NO: 2677963 - DNA, 25 bp, Homo sapien
cttgcattagttcacacaggtacct

SEQ ID NO: 2677964 - DNA, 25 bp, Homo sapien
tctggctgtgagtaatgagatccac

SEQ ID NO: 2677965 - DNA, 25 bp, Homo sapien
cccgtgtgacaggatgtagaaccaa

SEQ ID NO: 2677966 - DNA, 25 bp, Homo sapien
caaaaggttcctggcaactctggct

SEQ ID NO: 2677967 - DNA, 25 bp, Homo sapien
agtacacgggaagcgatgatggcca

SEQ ID NO: 2677968 - DNA, 25 bp, Homo sapien
cccatcacttggaacagtaatcaca

SEQ ID NO: 2677969 - DNA, 25 bp, Homo sapien
ttatggaggcctaactgtactcaca

SEQ ID NO: 2677970 - DNA, 25 bp, Homo sapien
tatggtcattgcatttaggccaaat

SEQ ID NO: 2677971 - DNA, 25 bp, Homo sapien
tgctggtttgctggtctggtcagaa

SEQ ID NO: 2677972 - DNA, 25 bp, Homo sapien
tggacttcatgattaggcaaaaaca

SEQ ID NO: 2677973 - DNA, 25 bp, Homo sapien
ctgtgtactcggcttaggtgtctcc

SEQ ID NO: 2677974 - DNA, 25 bp, Homo sapien
gcacacttctaggtcattaagctca

SEQ ID NO: 2677975 - DNA, 25 bp, Homo sapien
tccatcgaatgaccctgtttcctgt

SEQ ID NO: 2677976 - DNA, 25 bp, Homo sapien
ctgcaaagccatccgaaagtcctgt

SEQ ID NO: 2677977 - DNA, 25 bp, Homo sapien
gcttgtttcctgtgatagtattggt

SEQ ID NO: 2677978 - DNA, 25 bp, Homo sapien
tgctccatggatccaagggcaggaa

SEQ ID NO: 2677979 - DNA, 25 bp, Homo sapien
ccaagggcaggaatgtagctctgct

SEQ ID NO: 2677980 - DNA, 25 bp, Homo sapien
tccctcaaatggttgattgcagtag

SEQ ID NO: 2677981 - DNA, 25 bp, Homo sapien
tttccctcaaatggttgattgcagt

SEQ ID NO: 2677982 - DNA, 25 bp, Homo sapien
cttctttccctcaaatggttgattg

SEQ ID NO: 2677983 - DNA, 25 bp, Homo sapien
ctcaaatggttgattgcagtaggca

SEQ ID NO: 2677984 - DNA, 25 bp, Homo sapien
tcagtttgttgattttgacacggac

SEQ ID NO: 2677985 - DNA, 25 bp, Homo sapien
cccaggtttgtgtaggatcacctcc

SEQ ID NO: 2677986 - DNA, 25 bp, Homo sapien
gacacggactcaaaaacggctcttg

SEQ ID NO: 2677987 - DNA, 25 bp, Homo sapien
gcatgctttgactgattggtcttca

SEQ ID NO: 2677988 - DNA, 25 bp, Homo sapien
ctattgatggtgatcacttgtgact

SEQ ID NO: 2677989 - DNA, 25 bp, Homo sapien
tcttgagctggttccttaatctttt

SEQ ID NO: 2677990 - DNA, 25 bp, Homo sapien
gtttccactattgatggtgatcact

SEQ ID NO: 2677991 - DNA, 25 bp, Homo sapien
agtgaagaacatgattttctgagtg

SEQ ID NO: 2677992 - DNA, 25 bp, Homo sapien
cacagcttctgtacatgtgtagtcg

SEQ ID NO: 2677993 - DNA, 25 bp, Homo sapien
tgtagtcgtctttgcagatggcata

SEQ ID NO: 2677994 - DNA, 25 bp, Homo sapien
tcttctgccaaaagtctgtagagtt

SEQ ID NO: 2677995 - DNA, 25 bp, Homo sapien
taggtggttaggttctttgtcactg

SEQ ID NO: 2677996 - DNA, 25 bp, Homo sapien
tctcattgtcatacgtaatttcagg

SEQ ID NO: 2677997 - DNA, 25 bp, Homo sapien
ttcctctttgttcacgaaccacttc

SEQ ID NO: 2677998 - DNA, 25 bp, Homo sapien
catacgtaatttcaggcataattgt

SEQ ID NO: 2677999 - DNA, 25 bp, Homo sapien
tctttgttcacgaaccacttcttgt

SEQ ID NO: 2678000 - DNA, 25 bp, Homo sapien
aatgtatcataaaacccatacttgc

SEQ ID NO: 2678001 - DNA, 25 bp, Homo sapien
tgttgtatgatggaatgcagatgac

SEQ ID NO: 2678002 - DNA, 25 bp, Homo sapien
tgtatgatggaatgcagatgactgc

SEQ ID NO: 2678003 - DNA, 25 bp, Homo sapien
cagaatcctggattatgttgtatga

SEQ ID NO: 2678004 - DNA, 25 bp, Homo sapien
tctttggctttgaaatgacctcctc

SEQ ID NO: 2678005 - DNA, 25 bp, Homo sapien
ggctggatgaaacctacgtccccaa

SEQ ID NO: 2678006 - DNA, 25 bp, Homo sapien
tacctctgaacattggtctgtgctg

SEQ ID NO: 2678007 - DNA, 25 bp, Homo sapien
gaaactgagtggttaagcagcctgc

SEQ ID NO: 2678008 - DNA, 25 bp, Homo sapien
tgaactgccacacataacatccttt

SEQ ID NO: 2678009 - DNA, 25 bp, Homo sapien
tcaggagagtactggcattttgcag

SEQ ID NO: 2678010 - DNA, 25 bp, Homo sapien
caatggtaaatgaaatagcagcgca

SEQ ID NO: 2678011 - DNA, 25 bp, Homo sapien
acatcctttttaggagtgccgaagt

SEQ ID NO: 2678012 - DNA, 25 bp, Homo sapien
tcctctgcggtgtcatttgaagttg

SEQ ID NO: 2678013 - DNA, 25 bp, Homo sapien
cttccgatgccagatttgtcctctg

SEQ ID NO: 2678014 - DNA, 25 bp, Homo sapien
tgggtccatgacagtctgtgctctg

SEQ ID NO: 2678015 - DNA, 25 bp, Homo sapien
tctctgttgggtccatgacagtctg

SEQ ID NO: 2678016 - DNA, 25 bp, Homo sapien
cttatcagagatccttgcgctgatc

SEQ ID NO: 2678017 - DNA, 25 bp, Homo sapien
ttatcagagatccttgcgctgatca

SEQ ID NO: 2678018 - DNA, 25 bp, Homo sapien
tatcagagatccttgcgctgatcat

SEQ ID NO: 2678019 - DNA, 25 bp, Homo sapien
taagtttagttttctattgcgtaga

SEQ ID NO: 2678020 - DNA, 25 bp, Homo sapien
gggtccttttgaattgtccttctgc

SEQ ID NO: 2678021 - DNA, 25 bp, Homo sapien
tctattgcgtagagtctctgtagta

SEQ ID NO: 2678022 - DNA, 25 bp, Homo sapien
ataaatggggagataaaggctaaca

SEQ ID NO: 2678023 - DNA, 25 bp, Homo sapien
tctgagcaagtaagtctcaactctg

SEQ ID NO: 2678024 - DNA, 25 bp, Homo sapien
agtgtttcttttggatcctctgagc

SEQ ID NO: 2678025 - DNA, 25 bp, Homo sapien
gtgttcctgcaccactctgggctca

SEQ ID NO: 2678026 - DNA, 25 bp, Homo sapien
ggctcactctgggaccgtagtgttt

SEQ ID NO: 2678027 - DNA, 25 bp, Homo sapien
ggtcagtgtcttcaagatagttagg

SEQ ID NO: 2678028 - DNA, 25 bp, Homo sapien
gtttaggaagggacaacgtgatcat

SEQ ID NO: 2678029 - DNA, 25 bp, Homo sapien
cttgttatggtctgtgggtcagtgt

SEQ ID NO: 2678030 - DNA, 25 bp, Homo sapien
ggtttaggaagggacaacgtgatca

SEQ ID NO: 2678031 - DNA, 25 bp, Homo sapien
tggctgcggcagaaagttctcaggc

SEQ ID NO: 2678032 - DNA, 25 bp, Homo sapien
tgagtggagattttactgatgattg

SEQ ID NO: 2678033 - DNA, 25 bp, Homo sapien
tggagattttactgatgattggttg

SEQ ID NO: 2678034 - DNA, 25 bp, Homo sapien
atatgtgtttggctgcggcagaaag

SEQ ID NO: 2678035 - DNA, 25 bp, Homo sapien
gttcgtgcatctgccttacatcctg

SEQ ID NO: 2678036 - DNA, 25 bp, Homo sapien
gctggatctggccacgatggaactg

SEQ ID NO: 2678037 - DNA, 25 bp, Homo sapien
gatacttaaattgatgggaagctgg

SEQ ID NO: 2678038 - DNA, 25 bp, Homo sapien
tctcagacatgaggagttcgtgcat

SEQ ID NO: 2678039 - DNA, 25 bp, Homo sapien
ggaccagatctttgagatagctgtc

SEQ ID NO: 2678040 - DNA, 25 bp, Homo sapien
accagatctttgagatagctgtcca

SEQ ID NO: 2678041 - DNA, 25 bp, Homo sapien
ctatccctgcatgtaatagttgagc

SEQ ID NO: 2678042 - DNA, 25 bp, Homo sapien
gcatgtaatagttgagcaggtggat

SEQ ID NO: 2678043 - DNA, 25 bp, Homo sapien
cctatgaactcgaataagattggca

SEQ ID NO: 2678044 - DNA, 25 bp, Homo sapien
tgaactcgaataagattggcagtct

SEQ ID NO: 2678045 - DNA, 25 bp, Homo sapien
tttgttaatactcacaggggctagc

SEQ ID NO: 2678046 - DNA, 25 bp, Homo sapien
tcactcagagcctatgaactcgaat

SEQ ID NO: 2678047 - DNA, 25 bp, Homo sapien
ttttcagcacaaagtgaaagacagg

SEQ ID NO: 2678048 - DNA, 25 bp, Homo sapien
ggttttcagcacaaagtgaaagaca

SEQ ID NO: 2678049 - DNA, 25 bp, Homo sapien
gctgcagtaactggtgagttgacca

SEQ ID NO: 2678050 - DNA, 25 bp, Homo sapien
tgcagtaactggtgagttgaccaaa

SEQ ID NO: 2678051 - DNA, 25 bp, Homo sapien
cgactaaccgctttctaggaaggct

SEQ ID NO: 2678052 - DNA, 25 bp, Homo sapien
acaggtatgtattcaagaagatgtg

SEQ ID NO: 2678053 - DNA, 25 bp, Homo sapien
tgggtcagttgtgtttaagagtaaa

SEQ ID NO: 2678054 - DNA, 25 bp, Homo sapien
gaactgattcatgttttgaaatgct

SEQ ID NO: 2678055 - DNA, 25 bp, Homo sapien
tcaacgaaccaagaagagcttgatc

SEQ ID NO: 2678056 - DNA, 25 bp, Homo sapien
aaccaagaagagcttgatcctagac

SEQ ID NO: 2678057 - DNA, 25 bp, Homo sapien
tacatgcattgggaaagcaggtttt

SEQ ID NO: 2678058 - DNA, 25 bp, Homo sapien
tttcatccattacatgcattgggaa

SEQ ID NO: 2678059 - DNA, 25 bp, Homo sapien
gattgtaggttaaggcatttggagc

SEQ ID NO: 2678060 - DNA, 25 bp, Homo sapien
attgtaggttaaggcatttggagca

SEQ ID NO: 2678061 - DNA, 25 bp, Homo sapien
tagcaggattgtaggttaaggcatt

SEQ ID NO: 2678062 - DNA, 25 bp, Homo sapien
caggattgtaggttaaggcatttgg

SEQ ID NO: 2678063 - DNA, 25 bp, Homo sapien
gctgccttaattgcgacttgtcgaa

SEQ ID NO: 2678064 - DNA, 25 bp, Homo sapien
aacctctgctgccttaattgcgact

SEQ ID NO: 2678065 - DNA, 25 bp, Homo sapien
gagaagcaggcttggaacctctgct

SEQ ID NO: 2678066 - DNA, 25 bp, Homo sapien
tgcgacttgtcgaaattggtttttc

SEQ ID NO: 2678067 - DNA, 25 bp, Homo sapien
tgtttcagcggttggttagaaagtg

SEQ ID NO: 2678068 - DNA, 25 bp, Homo sapien
ctcgggaaagcgcatttagtaatgt

SEQ ID NO: 2678069 - DNA, 25 bp, Homo sapien
ttaggaacgacaccttctgagccct

SEQ ID NO: 2678070 - DNA, 25 bp, Homo sapien
tcctcatcttgagggggactatgtt

SEQ ID NO: 2678071 - DNA, 25 bp, Homo sapien
cgggtgcgggggtccatcgctttga

SEQ ID NO: 2678072 - DNA, 25 bp, Homo sapien
atcaaggtgggtgcggcccggagcg

SEQ ID NO: 2678073 - DNA, 25 bp, Homo sapien
tgtcaccggtgggtcgagggcggcg

SEQ ID NO: 2678074 - DNA, 25 bp, Homo sapien
ccatcgctttgagggctgtcaccgg

SEQ ID NO: 2678075 - DNA, 25 bp, Homo sapien
cacaaaagaaaagccgagcgcttca

SEQ ID NO: 2678076 - DNA, 25 bp, Homo sapien
acaaaagaaaagccgagcgcttcat

SEQ ID NO: 2678077 - DNA, 25 bp, Homo sapien
cggctcctcggcgcttgcggctggg

SEQ ID NO: 2678078 - DNA, 25 bp, Homo sapien
ggtagcggacggagcgacgaccttc

SEQ ID NO: 2678079 - DNA, 25 bp, Homo sapien
cccctcgctggtctgggtaaggagc

SEQ ID NO: 2678080 - DNA, 25 bp, Homo sapien
gacggagcgacgaccttcgcctctg

SEQ ID NO: 2678081 - DNA, 25 bp, Homo sapien
cggacgggagccacaccccgcgacg

SEQ ID NO: 2678082 - DNA, 25 bp, Homo sapien
acgggagccacaccccgcgacgagc

SEQ ID NO: 2678083 - DNA, 25 bp, Homo sapien
ggccacccgtaatgagctcgggagt

SEQ ID NO: 2678084 - DNA, 25 bp, Homo sapien
tgagctcgggagtccccggacggga

SEQ ID NO: 2678085 - DNA, 25 bp, Homo sapien
ttgctgaatgtcctgaagaagccgt

SEQ ID NO: 2678086 - DNA, 25 bp, Homo sapien
ttcccggagggagagcttgaacttg

SEQ ID NO: 2678087 - DNA, 25 bp, Homo sapien
ccgcctccccgctttgctgaatgtc

SEQ ID NO: 2678088 - DNA, 25 bp, Homo sapien
aagaagccgtattccgccgccgcgg

SEQ ID NO: 2678089 - DNA, 25 bp, Homo sapien
gggcgccaccactcgcgcggccaag

SEQ ID NO: 2678090 - DNA, 25 bp, Homo sapien
caccactcgcgcggccaagagaact

SEQ ID NO: 2678091 - DNA, 25 bp, Homo sapien
cgcccggggcgccaccactcgcgcg

SEQ ID NO: 2678092 - DNA, 25 bp, Homo sapien
ccactcgcgcggccaagagaacttt

SEQ ID NO: 2678093 - DNA, 25 bp, Homo sapien
gctttttgcagacgcctggaccggg

SEQ ID NO: 2678094 - DNA, 25 bp, Homo sapien
gagggcgtgggattgggaccgccga

SEQ ID NO: 2678095 - DNA, 25 bp, Homo sapien
tcgccgctgggaccacggtctctgc

SEQ ID NO: 2678096 - DNA, 25 bp, Homo sapien
gcggcttgggcgcagtgtgcggctt

SEQ ID NO: 2678097 - DNA, 25 bp, Homo sapien
tgcagcttcagagctattgtgcccc

SEQ ID NO: 2678098 - DNA, 25 bp, Homo sapien
aggggtcactgcagcttcagagcta

SEQ ID NO: 2678099 - DNA, 25 bp, Homo sapien
actgcagcttcagagctattgtgcc

SEQ ID NO: 2678100 - DNA, 25 bp, Homo sapien
tcactgcagcttcagagctattgtg

SEQ ID NO: 2678101 - DNA, 25 bp, Homo sapien
tcaacctcggctgcctgtgcacgga

SEQ ID NO: 2678102 - DNA, 25 bp, Homo sapien
caacctcggctgcctgtgcacggac

SEQ ID NO: 2678103 - DNA, 25 bp, Homo sapien
aacctcggctgcctgtgcacggaca

SEQ ID NO: 2678104 - DNA, 25 bp, Homo sapien
tttctactgtgctacggaagcctgg

SEQ ID NO: 2678105 - DNA, 25 bp, Homo sapien
acaatagcagggaaggccgaggctt

SEQ ID NO: 2678106 - DNA, 25 bp, Homo sapien
tttggctacccagctaacaagcagt

SEQ ID NO: 2678107 - DNA, 25 bp, Homo sapien
caaaactacgtctgatgccaaagct

SEQ ID NO: 2678108 - DNA, 25 bp, Homo sapien
acaaagtcttgatgccccttgcttg

SEQ ID NO: 2678109 - DNA, 25 bp, Homo sapien
gcatatagtgacatgtacagaattc

SEQ ID NO: 2678110 - DNA, 25 bp, Homo sapien
ctatatggttattggctggaaatcc

SEQ ID NO: 2678111 - DNA, 25 bp, Homo sapien
gtcttgatgccccttgcttggcatt

SEQ ID NO: 2678112 - DNA, 25 bp, Homo sapien
ctgagtgtatcaagtgatgtgacgg

SEQ ID NO: 2678113 - DNA, 25 bp, Homo sapien
gcctacagataagtaggaaagatag

SEQ ID NO: 2678114 - DNA, 25 bp, Homo sapien
gtttcagctgagtgtatcaagtgat

SEQ ID NO: 2678115 - DNA, 25 bp, Homo sapien
gataattaaggcaaaagtttcagct

SEQ ID NO: 2678116 - DNA, 25 bp, Homo sapien
aggagagacaggcattcttcccatt

SEQ ID NO: 2678117 - DNA, 25 bp, Homo sapien
aggcattcttcccattctgtaatca

SEQ ID NO: 2678118 - DNA, 25 bp, Homo sapien
ggcattcttcccattctgtaatcat

SEQ ID NO: 2678119 - DNA, 25 bp, Homo sapien
gacaggcattcttcccattctgtaa

SEQ ID NO: 2678120 - DNA, 25 bp, Homo sapien
ttggggatgggagcacatagttcag

SEQ ID NO: 2678121 - DNA, 25 bp, Homo sapien
gggatgggagcacatagttcaggtt

SEQ ID NO: 2678122 - DNA, 25 bp, Homo sapien
tggggatgggagcacatagttcagg

SEQ ID NO: 2678123 - DNA, 25 bp, Homo sapien
gatgggagcacatagttcaggttct

SEQ ID NO: 2678124 - DNA, 25 bp, Homo sapien
gaccttgccggtcagtcttttacaa

SEQ ID NO: 2678125 - DNA, 25 bp, Homo sapien
agtaaaggtgaccttgccggtcagt

SEQ ID NO: 2678126 - DNA, 25 bp, Homo sapien
taaaggtgaccttgccggtcagtct

SEQ ID NO: 2678127 - DNA, 25 bp, Homo sapien
cggtcagtcttttacaagatctaga

SEQ ID NO: 2678128 - DNA, 25 bp, Homo sapien
ccaaacctgtcatatctaggatcct

SEQ ID NO: 2678129 - DNA, 25 bp, Homo sapien
gagtccagctcattaccaaacctgt

SEQ ID NO: 2678130 - DNA, 25 bp, Homo sapien
ccacagagtccagctcattaccaaa

SEQ ID NO: 2678131 - DNA, 25 bp, Homo sapien
tctcgtctgcatcccacagagtcca

SEQ ID NO: 2678132 - DNA, 25 bp, Homo sapien
tgtcctctccctgccaacctcctct

SEQ ID NO: 2678133 - DNA, 25 bp, Homo sapien
ctctccctgccaacctcctctaacc

SEQ ID NO: 2678134 - DNA, 25 bp, Homo sapien
ctgtcctctccctgccaacctcctc

SEQ ID NO: 2678135 - DNA, 25 bp, Homo sapien
tcctctccctgccaacctcctctaa

SEQ ID NO: 2678136 - DNA, 25 bp, Homo sapien
gagatacagccactggaagaccagt

SEQ ID NO: 2678137 - DNA, 25 bp, Homo sapien
tgccaaggcatggagtccctgctgt

SEQ ID NO: 2678138 - DNA, 25 bp, Homo sapien
gctgacaggtagaccaaggactgcc

SEQ ID NO: 2678139 - DNA, 25 bp, Homo sapien
agaccagtcccaatctccactgtga

SEQ ID NO: 2678140 - DNA, 25 bp, Homo sapien
gatgtcagatatgagtcatgaaaat

SEQ ID NO: 2678141 - DNA, 25 bp, Homo sapien
gctctgccacagtcgtttgctgcca

SEQ ID NO: 2678142 - DNA, 25 bp, Homo sapien
tgccaaactctcagcaaggatgtca

SEQ ID NO: 2678143 - DNA, 25 bp, Homo sapien
tgccacagtcgtttgctgccaaact

SEQ ID NO: 2678144 - DNA, 25 bp, Homo sapien
ttttaaagtaagttccaggcatcca

SEQ ID NO: 2678145 - DNA, 25 bp, Homo sapien
catctgctgccttcaggagacctct

SEQ ID NO: 2678146 - DNA, 25 bp, Homo sapien
caaccatctgctgccttcaggagac

SEQ ID NO: 2678147 - DNA, 25 bp, Homo sapien
tctgctgccttcaggagacctctct

SEQ ID NO: 2678148 - DNA, 25 bp, Homo sapien
tgctgccttcaggagacctctctag

SEQ ID NO: 2678149 - DNA, 25 bp, Homo sapien
tccctgggaactggatactgctttt

SEQ ID NO: 2678150 - DNA, 25 bp, Homo sapien
tcaaggccattgcttagctagagct

SEQ ID NO: 2678151 - DNA, 25 bp, Homo sapien
gattccttcaagagcttccctggga

SEQ ID NO: 2678152 - DNA, 25 bp, Homo sapien
ggattatcctctgcccatattcaag

SEQ ID NO: 2678153 - DNA, 25 bp, Homo sapien
tataaggaaagtgagtcccacaatg

SEQ ID NO: 2678154 - DNA, 25 bp, Homo sapien
tgagagcagtcctacatgtgaggaa

SEQ ID NO: 2678155 - DNA, 25 bp, Homo sapien
gtcataacacacatctggccagtca

SEQ ID NO: 2678156 - DNA, 25 bp, Homo sapien
ttcagcggctgcaggattcacatgg

SEQ ID NO: 2678157 - DNA, 25 bp, Homo sapien
cccttttctccagcgtggatcaagg

SEQ ID NO: 2678158 - DNA, 25 bp, Homo sapien
tggcaccgggttgtctgtttgtaga

SEQ ID NO: 2678159 - DNA, 25 bp, Homo sapien
tcaagattgtgcatctgggcacccc

SEQ ID NO: 2678160 - DNA, 25 bp, Homo sapien
cccactgttcggataatttggcata

SEQ ID NO: 2678161 - DNA, 25 bp, Homo sapien
tcttgttggaggagggttagctgct

SEQ ID NO: 2678162 - DNA, 25 bp, Homo sapien
ggtattgatcagctgtggatatagc

SEQ ID NO: 2678163 - DNA, 25 bp, Homo sapien
attgttaataccattctctgtctgc

SEQ ID NO: 2678164 - DNA, 25 bp, Homo sapien
tagctgctggttcaaggcagtggtc

SEQ ID NO: 2678165 - DNA, 25 bp, Homo sapien
caaagagaaccgttagctccctggg

SEQ ID NO: 2678166 - DNA, 25 bp, Homo sapien
gaaccgttagctccctgggatctct

SEQ ID NO: 2678167 - DNA, 25 bp, Homo sapien
cgttagctccctgggatctcttggt

SEQ ID NO: 2678168 - DNA, 25 bp, Homo sapien
gagaaccgttagctccctgggatct

SEQ ID NO: 2678169 - DNA, 25 bp, Homo sapien
agggatagatgctgactattggtga

SEQ ID NO: 2678170 - DNA, 25 bp, Homo sapien
aactcagttgccttcgtagatgcca

SEQ ID NO: 2678171 - DNA, 25 bp, Homo sapien
attaggagatgcttcgtattgggaa

SEQ ID NO: 2678172 - DNA, 25 bp, Homo sapien
tccttgcatcaaaggccagatggga

SEQ ID NO: 2678173 - DNA, 25 bp, Homo sapien
tcttgatctttttgttggtccttcc

SEQ ID NO: 2678174 - DNA, 25 bp, Homo sapien
gatccttgggacttggatctgaacc

SEQ ID NO: 2678175 - DNA, 25 bp, Homo sapien
aaaattctaaatgttgatccttggg

SEQ ID NO: 2678176 - DNA, 25 bp, Homo sapien
tccttcctccgttagcaaaattcta

SEQ ID NO: 2678177 - DNA, 25 bp, Homo sapien
ctcagagttttcagcggcattgaca

SEQ ID NO: 2678178 - DNA, 25 bp, Homo sapien
tccaaccgcttgtagaactttctct

SEQ ID NO: 2678179 - DNA, 25 bp, Homo sapien
gactaatggccataaacctggatgg

SEQ ID NO: 2678180 - DNA, 25 bp, Homo sapien
tcagtgcaagaagcaaagaagtaca

SEQ ID NO: 2678181 - DNA, 25 bp, Homo sapien
ccagcagggctagttgtttcctggg

SEQ ID NO: 2678182 - DNA, 25 bp, Homo sapien
gacttcaactcaccagactttctct

SEQ ID NO: 2678183 - DNA, 25 bp, Homo sapien
tctctgataaatactattctcttgt

SEQ ID NO: 2678184 - DNA, 25 bp, Homo sapien
tattctcttgtttcattcgccagga

SEQ ID NO: 2678185 - DNA, 25 bp, Homo sapien
gaatgttccagacgacaggttgtag

SEQ ID NO: 2678186 - DNA, 25 bp, Homo sapien
cattctgtgacgtggattggcctga

SEQ ID NO: 2678187 - DNA, 25 bp, Homo sapien
actcactgaagaagattgctgcaag

SEQ ID NO: 2678188 - DNA, 25 bp, Homo sapien
tgataaaagtggctcctggaatgtt

SEQ ID NO: 2678189 - DNA, 25 bp, Homo sapien
tagggtcctcgacaaatcagtttcc

SEQ ID NO: 2678190 - DNA, 25 bp, Homo sapien
cttgcccagaaagttgtagtgtgcc

SEQ ID NO: 2678191 - DNA, 25 bp, Homo sapien
gctacataggctccatcagttctgt

SEQ ID NO: 2678192 - DNA, 25 bp, Homo sapien
cataagtgtgtcgaggatgactcct

SEQ ID NO: 2678193 - DNA, 25 bp, Homo sapien
caccctctcccagcatttctgcttt

SEQ ID NO: 2678194 - DNA, 25 bp, Homo sapien
tttctgctttctggtttcagttcac

SEQ ID NO: 2678195 - DNA, 25 bp, Homo sapien
gcatttctgctttctggtttcagtt

SEQ ID NO: 2678196 - DNA, 25 bp, Homo sapien
tcaccctctcccagcatttctgctt

SEQ ID NO: 2678197 - DNA, 25 bp, Homo sapien
ttcagtcactgacgccattactgct

SEQ ID NO: 2678198 - DNA, 25 bp, Homo sapien
gaaagctttaatgtagcctccaaaa

SEQ ID NO: 2678199 - DNA, 25 bp, Homo sapien
tggattctctggattcttaataact

SEQ ID NO: 2678200 - DNA, 25 bp, Homo sapien
cacctacttctaacaatcctcttgg

SEQ ID NO: 2678201 - DNA, 25 bp, Homo sapien
ttattcagtgtgtccttccccctca

SEQ ID NO: 2678202 - DNA, 25 bp, Homo sapien
gtgtgtccttccccctcacatttta

SEQ ID NO: 2678203 - DNA, 25 bp, Homo sapien
attcagtgtgtccttccccctcaca

SEQ ID NO: 2678204 - DNA, 25 bp, Homo sapien
cagtgtgtccttccccctcacattt

SEQ ID NO: 2678205 - DNA, 25 bp, Homo sapien
tgtcagggctgctaaatgcacatcc

SEQ ID NO: 2678206 - DNA, 25 bp, Homo sapien
caaatcgtagatgtcagggctgcta

SEQ ID NO: 2678207 - DNA, 25 bp, Homo sapien
gctaaatgcacatcctttcacacct

SEQ ID NO: 2678208 - DNA, 25 bp, Homo sapien
taaaatccttcagtcaaatcgtaga

SEQ ID NO: 2678209 - DNA, 25 bp, Homo sapien
gaggcttgggttcttggggcagaac

SEQ ID NO: 2678210 - DNA, 25 bp, Homo sapien
agtaaagtcttgaggcttgggttct

SEQ ID NO: 2678211 - DNA, 25 bp, Homo sapien
gcttgggttcttggggcagaacaga

SEQ ID NO: 2678212 - DNA, 25 bp, Homo sapien
ttcttggggcagaacagaggtccac

SEQ ID NO: 2678213 - DNA, 25 bp, Homo sapien
gagtgatatgagctctgcactgaac

SEQ ID NO: 2678214 - DNA, 25 bp, Homo sapien
gatatgagctctgcactgaacagcc

SEQ ID NO: 2678215 - DNA, 25 bp, Homo sapien
ccatttaataccagagtgatatgag

SEQ ID NO: 2678216 - DNA, 25 bp, Homo sapien
taccagagtgatatgagctctgcac

SEQ ID NO: 2678217 - DNA, 25 bp, Homo sapien
caccagcgtctgatgactcatgcaa

SEQ ID NO: 2678218 - DNA, 25 bp, Homo sapien
attctatcattttcaccagcgtctg

SEQ ID NO: 2678219 - DNA, 25 bp, Homo sapien
gtctgatgactcatgcaactcttca

SEQ ID NO: 2678220 - DNA, 25 bp, Homo sapien
attttcaccagcgtctgatgactca

SEQ ID NO: 2678221 - DNA, 25 bp, Homo sapien
acagccagacgaacccctgtacaca

SEQ ID NO: 2678222 - DNA, 25 bp, Homo sapien
cagacgaacccctgtacacagatat

SEQ ID NO: 2678223 - DNA, 25 bp, Homo sapien
gccagacgaacccctgtacacagat

SEQ ID NO: 2678224 - DNA, 25 bp, Homo sapien
gacgaacccctgtacacagatatat

SEQ ID NO: 2678225 - DNA, 25 bp, Homo sapien
catttagacaacaggctacaagtta

SEQ ID NO: 2678226 - DNA, 25 bp, Homo sapien
gggtggccatagtgggcctttatca

SEQ ID NO: 2678227 - DNA, 25 bp, Homo sapien
gccatagtgggcctttatcacattt

SEQ ID NO: 2678228 - DNA, 25 bp, Homo sapien
gggcctttatcacatttagacaaca

SEQ ID NO: 2678229 - DNA, 25 bp, Homo sapien
gaagtagttacaacctttccgcagc

SEQ ID NO: 2678230 - DNA, 25 bp, Homo sapien
tatctgctgtctgtatttgaagtag

SEQ ID NO: 2678231 - DNA, 25 bp, Homo sapien
tccgcagcctcgctgtaggagatag

SEQ ID NO: 2678232 - DNA, 25 bp, Homo sapien
aggagatagatacccctagatgaac

SEQ ID NO: 2678233 - DNA, 25 bp, Homo sapien
cctctgcctgcgggtgcaagcaatt

SEQ ID NO: 2678234 - DNA, 25 bp, Homo sapien
gcaacctctgcctgcgggtgcaagc

SEQ ID NO: 2678235 - DNA, 25 bp, Homo sapien
cctctcaaattgctgggaattatag

SEQ ID NO: 2678236 - DNA, 25 bp, Homo sapien
agcctctcaaattgctgggaattat

SEQ ID NO: 2678237 - DNA, 25 bp, Homo sapien
agcggctaggcttccggcggccaca

SEQ ID NO: 2678238 - DNA, 25 bp, Homo sapien
gtcccccccgagcagcggctaggct

SEQ ID NO: 2678239 - DNA, 25 bp, Homo sapien
gagcagcggctaggcttccggcggc

SEQ ID NO: 2678240 - DNA, 25 bp, Homo sapien
cccgagcagcggctaggcttccggc

SEQ ID NO: 2678241 - DNA, 25 bp, Homo sapien
caacagccaacaacagtacctggga

SEQ ID NO: 2678242 - DNA, 25 bp, Homo sapien
tgggaacagcatcgagccaacctcg

SEQ ID NO: 2678243 - DNA, 25 bp, Homo sapien
ggaacagcatcgagccaacctcggt

SEQ ID NO: 2678244 - DNA, 25 bp, Homo sapien
tacctgggaacagcatcgagccaac

SEQ ID NO: 2678245 - DNA, 25 bp, Homo sapien
ggcgccgaggcccgagaaggcaact

SEQ ID NO: 2678246 - DNA, 25 bp, Homo sapien
ccgaggcccgagaaggcaactgagt

SEQ ID NO: 2678247 - DNA, 25 bp, Homo sapien
gaggcccgagaaggcaactgagtgc

SEQ ID NO: 2678248 - DNA, 25 bp, Homo sapien
cgccgaggcccgagaaggcaactga

SEQ ID NO: 2678249 - DNA, 25 bp, Homo sapien
ctgagggtggtacagaagcgggcaa

SEQ ID NO: 2678250 - DNA, 25 bp, Homo sapien
tgagggtggtacagaagcgggcaaa

SEQ ID NO: 2678251 - DNA, 25 bp, Homo sapien
gcgccgcccgggctcttcgtctcct

SEQ ID NO: 2678252 - DNA, 25 bp, Homo sapien
tcctgccggacgcagctcctgctgc

SEQ ID NO: 2678253 - DNA, 25 bp, Homo sapien
ctgccagacgctcgcccagtggcca

SEQ ID NO: 2678254 - DNA, 25 bp, Homo sapien
agtggccagaagtacgagcgccgcc

SEQ ID NO: 2678255 - DNA, 25 bp, Homo sapien
aaggtggaggacggcgggcgtcgcg

SEQ ID NO: 2678256 - DNA, 25 bp, Homo sapien
gtcgcgacccccatccactgcgtga

SEQ ID NO: 2678257 - DNA, 25 bp, Homo sapien
gacccccatccactgcgtgagaatg

SEQ ID NO: 2678258 - DNA, 25 bp, Homo sapien
cacctaacgcgaatggggcaccact

SEQ ID NO: 2678259 - DNA, 25 bp, Homo sapien
aaacagcattggcttccggctgaga

SEQ ID NO: 2678260 - DNA, 25 bp, Homo sapien
tttgttgcctgcattgcaggcacag

SEQ ID NO: 2678261 - DNA, 25 bp, Homo sapien
tggcttccggctgagaccctaaagg

SEQ ID NO: 2678262 - DNA, 25 bp, Homo sapien
tgagcttggttgtttgttgcctgca

SEQ ID NO: 2678263 - DNA, 25 bp, Homo sapien
gattcagattttgtggtgaccagca

SEQ ID NO: 2678264 - DNA, 25 bp, Homo sapien
aattcaagattgctagggctgctcc

SEQ ID NO: 2678265 - DNA, 25 bp, Homo sapien
taacctgtggccaaaggcagattca

SEQ ID NO: 2678266 - DNA, 25 bp, Homo sapien
gaaagggccatgcaattaggttcac

SEQ ID NO: 2678267 - DNA, 25 bp, Homo sapien
ttctctctccgcttcccgacccgca

SEQ ID NO: 2678268 - DNA, 25 bp, Homo sapien
cttctctctccgcttcccgacccgc

SEQ ID NO: 2678269 - DNA, 25 bp, Homo sapien
cccatttccgagtccggcagcacct

SEQ ID NO: 2678270 - DNA, 25 bp, Homo sapien
tacagccacatgtcggtcacgtgcg

SEQ ID NO: 2678271 - DNA, 25 bp, Homo sapien
tccagtgacaccctggcgggctgca

SEQ ID NO: 2678272 - DNA, 25 bp, Homo sapien
caatcggcgggctcccgacgggaat

SEQ ID NO: 2678273 - DNA, 25 bp, Homo sapien
gggtagagcttttgctcctcgccat

SEQ ID NO: 2678274 - DNA, 25 bp, Homo sapien
cattctttgttgtcctctacccgtt

SEQ ID NO: 2678275 - DNA, 25 bp, Homo sapien
cgtttccttagatactgttattcca

SEQ ID NO: 2678276 - DNA, 25 bp, Homo sapien
gctcctcgccatgaatatgctccat

SEQ ID NO: 2678277 - DNA, 25 bp, Homo sapien
atccccagtagctctttccactaga

SEQ ID NO: 2678278 - DNA, 25 bp, Homo sapien
tcagccatctgcagcggttttgtct

SEQ ID NO: 2678279 - DNA, 25 bp, Homo sapien
cactagattcacatcagccatctgc

SEQ ID NO: 2678280 - DNA, 25 bp, Homo sapien
catctgcagcggttttgtctcctct

SEQ ID NO: 2678281 - DNA, 25 bp, Homo sapien
ttattcctctgcagttgtcttttcg

SEQ ID NO: 2678282 - DNA, 25 bp, Homo sapien
tattcctctgcagttgtcttttcgg

SEQ ID NO: 2678283 - DNA, 25 bp, Homo sapien
attcctctgcagttgtcttttcggc

SEQ ID NO: 2678284 - DNA, 25 bp, Homo sapien
tgacggatactcaaaagaggtgcca

SEQ ID NO: 2678285 - DNA, 25 bp, Homo sapien
tttttgaatgttgacctatcctcca

SEQ ID NO: 2678286 - DNA, 25 bp, Homo sapien
gaggtgccattttagagctaagatt

SEQ ID NO: 2678287 - DNA, 25 bp, Homo sapien
catgttttatgcttttacgagcctg

SEQ ID NO: 2678288 - DNA, 25 bp, Homo sapien
accacaaaaagagccggatgggcaa

SEQ ID NO: 2678289 - DNA, 25 bp, Homo sapien
tataaaccatatgacagaggtaggg

SEQ ID NO: 2678290 - DNA, 25 bp, Homo sapien
taagatgaccactaaagacactgct

SEQ ID NO: 2678291 - DNA, 25 bp, Homo sapien
tgggcatgcacaagtttactgagac

SEQ ID NO: 2678292 - DNA, 25 bp, Homo sapien
tctaagaggatgaaacagtggagtc

SEQ ID NO: 2678293 - DNA, 25 bp, Homo sapien
ggctaatcttacacatcctccatgg

SEQ ID NO: 2678294 - DNA, 25 bp, Homo sapien
gccagaatggattaatgagattaca

SEQ ID NO: 2678295 - DNA, 25 bp, Homo sapien
tgttcaagtagcagcatctaagagg

SEQ ID NO: 2678296 - DNA, 25 bp, Homo sapien
aacaactgatcatatgaagctgcag

SEQ ID NO: 2678297 - DNA, 25 bp, Homo sapien
ctcttgtcgaagatttgagttctcc

SEQ ID NO: 2678298 - DNA, 25 bp, Homo sapien
cttgctttaacaactgatcatatga

SEQ ID NO: 2678299 - DNA, 25 bp, Homo sapien
gatgattggaattatcttctagctc

SEQ ID NO: 2678300 - DNA, 25 bp, Homo sapien
caagtttacaagagggaatactgaa

SEQ ID NO: 2678301 - DNA, 25 bp, Homo sapien
aaccttgcctcagtacagtgatgct

SEQ ID NO: 2678302 - DNA, 25 bp, Homo sapien
gaaggctacacttaatattcaaggc

SEQ ID NO: 2678303 - DNA, 25 bp, Homo sapien
gaactaagaactaactagccattgg

SEQ ID NO: 2678304 - DNA, 25 bp, Homo sapien
gacgattttctaacctgtcttggag

SEQ ID NO: 2678305 - DNA, 25 bp, Homo sapien
gcttgaaggtgccatggaaatcatc

SEQ ID NO: 2678306 - DNA, 25 bp, Homo sapien
gactagtgtgatgcctgtacttgcc

SEQ ID NO: 2678307 - DNA, 25 bp, Homo sapien
agaagagaatctgcctaagtgggaa

SEQ ID NO: 2678308 - DNA, 25 bp, Homo sapien
taggtctccctctaataggtctttc

SEQ ID NO: 2678309 - DNA, 25 bp, Homo sapien
tcatgtttgatatactaggtaggtc

SEQ ID NO: 2678310 - DNA, 25 bp, Homo sapien
aaaaaatggattgagacctagttgc

SEQ ID NO: 2678311 - DNA, 25 bp, Homo sapien
gcagttaacttcttaccctatacag

SEQ ID NO: 2678312 - DNA, 25 bp, Homo sapien
ttaaaatccttgactactaactgca

SEQ ID NO: 2678313 - DNA, 25 bp, Homo sapien
ctaattcagtgttcagcctgctgtt

SEQ ID NO: 2678314 - DNA, 25 bp, Homo sapien
taagcccatccaatgttaatttcaa

SEQ ID NO: 2678315 - DNA, 25 bp, Homo sapien
attccttttaattatagactccaat

SEQ ID NO: 2678316 - DNA, 25 bp, Homo sapien
acgctctaataaatcaatctgtcca

SEQ ID NO: 2678317 - DNA, 25 bp, Homo sapien
taagacgctctaataaatcaatctg

SEQ ID NO: 2678318 - DNA, 25 bp, Homo sapien
ctttaagacgctctaataaatcaat

SEQ ID NO: 2678319 - DNA, 25 bp, Homo sapien
agacgctctaataaatcaatctgtc

SEQ ID NO: 2678320 - DNA, 25 bp, Homo sapien
aacaagtttttatacaacaattgct

SEQ ID NO: 2678321 - DNA, 25 bp, Homo sapien
caacaattgctttaagcagtctaaa

SEQ ID NO: 2678322 - DNA, 25 bp, Homo sapien
tttatacaacaattgctttaagcag

SEQ ID NO: 2678323 - DNA, 25 bp, Homo sapien
caattgctttaagcagtctaaaata

SEQ ID NO: 2678324 - DNA, 25 bp, Homo sapien
cggcttccataagaacggagggaca

SEQ ID NO: 2678325 - DNA, 25 bp, Homo sapien
gaacccataggaacaggactgcact

SEQ ID NO: 2678326 - DNA, 25 bp, Homo sapien
ggcttgatacagatccttcccggct

SEQ ID NO: 2678327 - DNA, 25 bp, Homo sapien
ggactgcactctccagaacggcttg

SEQ ID NO: 2678328 - DNA, 25 bp, Homo sapien
ctcaagttcttctaaatatccagta

SEQ ID NO: 2678329 - DNA, 25 bp, Homo sapien
tctcaagttcttctaaatatccagt

SEQ ID NO: 2678330 - DNA, 25 bp, Homo sapien
caagttcttctaaatatccagtact

SEQ ID NO: 2678331 - DNA, 25 bp, Homo sapien
tcaagttcttctaaatatccagtac

SEQ ID NO: 2678332 - DNA, 25 bp, Homo sapien
caaggcaatgtttactatatgaaga

SEQ ID NO: 2678333 - DNA, 25 bp, Homo sapien
aatgtaagtgcaatcaataacatgc

SEQ ID NO: 2678334 - DNA, 25 bp, Homo sapien
caataaactggagtacacaaggcaa

SEQ ID NO: 2678335 - DNA, 25 bp, Homo sapien
aatgcaaaatgctctaagtgttagc

SEQ ID NO: 2678336 - DNA, 25 bp, Homo sapien
agtcttggccaagtgtagtgcctca

SEQ ID NO: 2678337 - DNA, 25 bp, Homo sapien
gagtcttggccaagtgtagtgcctc

SEQ ID NO: 2678338 - DNA, 25 bp, Homo sapien
agagtcttggccaagtgtagtgcct

SEQ ID NO: 2678339 - DNA, 25 bp, Homo sapien
cagagtcttggccaagtgtagtgcc

SEQ ID NO: 2678340 - DNA, 25 bp, Homo sapien
ggacataaaacatttgacgaagttc

SEQ ID NO: 2678341 - DNA, 25 bp, Homo sapien
cataaaacatttgacgaagttcctg

SEQ ID NO: 2678342 - DNA, 25 bp, Homo sapien
aagttcctgataatgatctatattt

SEQ ID NO: 2678343 - DNA, 25 bp, Homo sapien
aaacatttgacgaagttcctgataa

SEQ ID NO: 2678344 - DNA, 25 bp, Homo sapien
tgggatgctcaatctatactaggta

SEQ ID NO: 2678345 - DNA, 25 bp, Homo sapien
tacttaccagttgggcatctcaaat

SEQ ID NO: 2678346 - DNA, 25 bp, Homo sapien
gggatacactacaaccaactcttag

SEQ ID NO: 2678347 - DNA, 25 bp, Homo sapien
atttttaacttactgcccttgtgag

SEQ ID NO: 2678348 - DNA, 25 bp, Homo sapien
tagtgtatgttgtcctgcaactttt

SEQ ID NO: 2678349 - DNA, 25 bp, Homo sapien
taatgccaatacttagggaagccga

SEQ ID NO: 2678350 - DNA, 25 bp, Homo sapien
atatgtgcatacttatatgtacatt

SEQ ID NO: 2678351 - DNA, 25 bp, Homo sapien
tattattatagtgtatgttgtcctg

SEQ ID NO: 2678352 - DNA, 25 bp, Homo sapien
gattctgaagttgagcgtaatacca

SEQ ID NO: 2678353 - DNA, 25 bp, Homo sapien
aaaggaagactatctattcttttag

SEQ ID NO: 2678354 - DNA, 25 bp, Homo sapien
gaagttgagcgtaataccagtcttt

SEQ ID NO: 2678355 - DNA, 25 bp, Homo sapien
tcagttaaaggaagactatctattc

SEQ ID NO: 2678356 - DNA, 25 bp, Homo sapien
taaaatcattgacatggagagggag

SEQ ID NO: 2678357 - DNA, 25 bp, Homo sapien
gcagacctataacccagagcagctt

SEQ ID NO: 2678358 - DNA, 25 bp, Homo sapien
cagcttggaggtggtgaatatcagc

SEQ ID NO: 2678359 - DNA, 25 bp, Homo sapien
gatgttgacaacacttgggaaccta

SEQ ID NO: 2678360 - DNA, 25 bp, Homo sapien
tagaatacttcatcaatttccatgt

SEQ ID NO: 2678361 - DNA, 25 bp, Homo sapien
caaattatgggttgcaatagagatg

SEQ ID NO: 2678362 - DNA, 25 bp, Homo sapien
tcctactgagccagttgtaactcca

SEQ ID NO: 2678363 - DNA, 25 bp, Homo sapien
tagagatgaaatagtctgcatgtta

SEQ ID NO: 2678364 - DNA, 25 bp, Homo sapien
tgtaactccacttattagtcctcca

SEQ ID NO: 2678365 - DNA, 25 bp, Homo sapien
atatgcagaatgcattcccttaggc

SEQ ID NO: 2678366 - DNA, 25 bp, Homo sapien
tgcaacatacagatgacattcatat

SEQ ID NO: 2678367 - DNA, 25 bp, Homo sapien
gcagaatgcattcccttaggcatac

SEQ ID NO: 2678368 - DNA, 25 bp, Homo sapien
tttccctttgcaacatacagatgac

SEQ ID NO: 2678369 - DNA, 25 bp, Homo sapien
tatcctggcaggtacctagttgttc

SEQ ID NO: 2678370 - DNA, 25 bp, Homo sapien
tcatattccaattgccttctggtca

SEQ ID NO: 2678371 - DNA, 25 bp, Homo sapien
gttcttccatcgcaactctgatttg

SEQ ID NO: 2678372 - DNA, 25 bp, Homo sapien
cgcaactctgatttgccttgcttca

SEQ ID NO: 2678373 - DNA, 25 bp, Homo sapien
gactgtaaaagctgtcgtatacgaa

SEQ ID NO: 2678374 - DNA, 25 bp, Homo sapien
aagctgtcgtatacgaagtatgtcc

SEQ ID NO: 2678375 - DNA, 25 bp, Homo sapien
gtccttttcgatttgctgaattctg

SEQ ID NO: 2678376 - DNA, 25 bp, Homo sapien
gaagtatgtccttttcgatttgctg

SEQ ID NO: 2678377 - DNA, 25 bp, Homo sapien
gaaaggagcagtcacctagctgtac

SEQ ID NO: 2678378 - DNA, 25 bp, Homo sapien
tcattcctattgctgccttatgggt

SEQ ID NO: 2678379 - DNA, 25 bp, Homo sapien
ggtcaaccctctctgatatgctaga

SEQ ID NO: 2678380 - DNA, 25 bp, Homo sapien
agaggtatctagttgcttcatgact

SEQ ID NO: 2678381 - DNA, 25 bp, Homo sapien
tgtgtcccttgagcattagagctgc

SEQ ID NO: 2678382 - DNA, 25 bp, Homo sapien
gagctgcacgagacaaaggattttc

SEQ ID NO: 2678383 - DNA, 25 bp, Homo sapien
gattggcggtcgactatctcggtaa

SEQ ID NO: 2678384 - DNA, 25 bp, Homo sapien
tcataacctccagtacgattggcgg

SEQ ID NO: 2678385 - DNA, 25 bp, Homo sapien
tcattctgccgctcagcatcatgtg

SEQ ID NO: 2678386 - DNA, 25 bp, Homo sapien
tgtgagccggtttcatgcttgttct

SEQ ID NO: 2678387 - DNA, 25 bp, Homo sapien
ctcagcatcatgtgagccggtttca

SEQ ID NO: 2678388 - DNA, 25 bp, Homo sapien
ttgaccttcattctgccgctcagca

SEQ ID NO: 2678389 - DNA, 25 bp, Homo sapien
taaattgcatcactacccttctagc

SEQ ID NO: 2678390 - DNA, 25 bp, Homo sapien
tctagctgcctaacagaaacctgcg

SEQ ID NO: 2678391 - DNA, 25 bp, Homo sapien
gtgcatttctgctttgatgtctcag

SEQ ID NO: 2678392 - DNA, 25 bp, Homo sapien
taaacactcatatccaatccctaag

SEQ ID NO: 2678393 - DNA, 25 bp, Homo sapien
gatgtgctctggatcctttctctct

SEQ ID NO: 2678394 - DNA, 25 bp, Homo sapien
agagttcccctcctcctatctaagg

SEQ ID NO: 2678395 - DNA, 25 bp, Homo sapien
tttgatcttagggatcttcaactct

SEQ ID NO: 2678396 - DNA, 25 bp, Homo sapien
tatccatcgccaccttttgctgtga

SEQ ID NO: 2678397 - DNA, 25 bp, Homo sapien
gaataagacattctcacccacacta

SEQ ID NO: 2678398 - DNA, 25 bp, Homo sapien
gcaagggtcagaagaatatggtata

SEQ ID NO: 2678399 - DNA, 25 bp, Homo sapien
acgtgtgggtaagtgctttgacaga

SEQ ID NO: 2678400 - DNA, 25 bp, Homo sapien
gaggagctgaacatgaaaatacgtg

SEQ ID NO: 2678401 - DNA, 25 bp, Homo sapien
tcttccctgttagctagcaacgtaa

SEQ ID NO: 2678402 - DNA, 25 bp, Homo sapien
caatgagcccagctatggtgacgta

SEQ ID NO: 2678403 - DNA, 25 bp, Homo sapien
gataacttccactttggtagacaac

SEQ ID NO: 2678404 - DNA, 25 bp, Homo sapien
tgtattcctaagtgattcgtcagga

SEQ ID NO: 2678405 - DNA, 25 bp, Homo sapien
cagagtgtgtgctactagaactcaa

SEQ ID NO: 2678406 - DNA, 25 bp, Homo sapien
aacactggctgtttcatggtccatt

SEQ ID NO: 2678407 - DNA, 25 bp, Homo sapien
catggtccattcgtgtagttgaacc

SEQ ID NO: 2678408 - DNA, 25 bp, Homo sapien
gatgacttgtcagccttcgaggtgc

SEQ ID NO: 2678409 - DNA, 25 bp, Homo sapien
tacctttcccaagagctattatatt

SEQ ID NO: 2678410 - DNA, 25 bp, Homo sapien
ctcctggcacagtgaatggcatatg

SEQ ID NO: 2678411 - DNA, 25 bp, Homo sapien
taaacaggattaagcctcatagtga

SEQ ID NO: 2678412 - DNA, 25 bp, Homo sapien
gaatggcatatgaggtcccaagaag

SEQ ID NO: 2678413 - DNA, 25 bp, Homo sapien
aaccaattaagtgatgaatgggata

SEQ ID NO: 2678414 - DNA, 25 bp, Homo sapien
tacgactttaatatccaaaagccaa

SEQ ID NO: 2678415 - DNA, 25 bp, Homo sapien
ccaaaaaccaattaagtgatgaatg

SEQ ID NO: 2678416 - DNA, 25 bp, Homo sapien
ttacgactttaatatccaaaagcca

SEQ ID NO: 2678417 - DNA, 25 bp, Homo sapien
tgacaacaatgaatacaccatttcc

SEQ ID NO: 2678418 - DNA, 25 bp, Homo sapien
agctagcaaagttcgcgacatatca

SEQ ID NO: 2678419 - DNA, 25 bp, Homo sapien
tcatgagtaccaagcattgacaaca

SEQ ID NO: 2678420 - DNA, 25 bp, Homo sapien
tatcatccttatcatgagtaccaag

SEQ ID NO: 2678421 - DNA, 25 bp, Homo sapien
cccaacaggtttcacagtaagcgcg

SEQ ID NO: 2678422 - DNA, 25 bp, Homo sapien
gaaggactcggatttcacgcctgcc

SEQ ID NO: 2678423 - DNA, 25 bp, Homo sapien
cgcatggatatacagctgtcttggg

SEQ ID NO: 2678424 - DNA, 25 bp, Homo sapien
agtaagcgcgtatctgttccaaaag

SEQ ID NO: 2678425 - DNA, 25 bp, Homo sapien
agcaggacagatctgatgttcaaca

SEQ ID NO: 2678426 - DNA, 25 bp, Homo sapien
ttcattcattgcatgtctatgctct

SEQ ID NO: 2678427 - DNA, 25 bp, Homo sapien
cattcattgcatgtctatgctcttc

SEQ ID NO: 2678428 - DNA, 25 bp, Homo sapien
acagatctgatgttcaacaggagct

SEQ ID NO: 2678429 - DNA, 25 bp, Homo sapien
agttggtggccttatatcctaattc

SEQ ID NO: 2678430 - DNA, 25 bp, Homo sapien
cagaagttggtggccttatatccta

SEQ ID NO: 2678431 - DNA, 25 bp, Homo sapien
acagaagttggtggccttatatcct

SEQ ID NO: 2678432 - DNA, 25 bp, Homo sapien
gaagttggtggccttatatcctaat

SEQ ID NO: 2678433 - DNA, 25 bp, Homo sapien
ctgtgatgaaatgccccgggtagcc

SEQ ID NO: 2678434 - DNA, 25 bp, Homo sapien
gctcctgtgatgaaatgccccgggt

SEQ ID NO: 2678435 - DNA, 25 bp, Homo sapien
agctcctgtgatgaaatgccccggg

SEQ ID NO: 2678436 - DNA, 25 bp, Homo sapien
tcctgtgatgaaatgccccgggtag

SEQ ID NO: 2678437 - DNA, 25 bp, Homo sapien
cccagaggccccatcctgctcctca

SEQ ID NO: 2678438 - DNA, 25 bp, Homo sapien
ccagaggccccatcctgctcctcac

SEQ ID NO: 2678439 - DNA, 25 bp, Homo sapien
ccccagaggccccatcctgctcctc

SEQ ID NO: 2678440 - DNA, 25 bp, Homo sapien
gagtgagaagaaggtaatcccctgt

SEQ ID NO: 2678441 - DNA, 25 bp, Homo sapien
tgagaagaaggtaatcccctgtggc

SEQ ID NO: 2678442 - DNA, 25 bp, Homo sapien
gtgagaagaaggtaatcccctgtgg

SEQ ID NO: 2678443 - DNA, 25 bp, Homo sapien
agaagaaggtaatcccctgtggcta

SEQ ID NO: 2678444 - DNA, 25 bp, Homo sapien
cagggaagaccttaagacttggcct

SEQ ID NO: 2678445 - DNA, 25 bp, Homo sapien
gatccccaagatgtcgagtatttta

SEQ ID NO: 2678446 - DNA, 25 bp, Homo sapien
cctagggcagagcttcaaggaattc

SEQ ID NO: 2678447 - DNA, 25 bp, Homo sapien
gacttggcctggtatactaatgaga

SEQ ID NO: 2678448 - DNA, 25 bp, Homo sapien
tatgaagagcgtacagattggagca

SEQ ID NO: 2678449 - DNA, 25 bp, Homo sapien
tcactgtctttatgaagagcgtaca

SEQ ID NO: 2678450 - DNA, 25 bp, Homo sapien
tacagattggagcaaagatagatga

SEQ ID NO: 2678451 - DNA, 25 bp, Homo sapien
gtgaacaaaaatcagtcactgtctt

SEQ ID NO: 2678452 - DNA, 25 bp, Homo sapien
agggcaagaggaaaaagacaatcat

SEQ ID NO: 2678453 - DNA, 25 bp, Homo sapien
aagggcaagaggaaaaagacaatca

SEQ ID NO: 2678454 - DNA, 25 bp, Homo sapien
ttcacagtccacttgcaataattct

SEQ ID NO: 2678455 - DNA, 25 bp, Homo sapien
tgtcaaagccattccagcatatcgt

SEQ ID NO: 2678456 - DNA, 25 bp, Homo sapien
ggtcattagtaagcccatacatttc

SEQ ID NO: 2678457 - DNA, 25 bp, Homo sapien
tcttagtgtaatactgtagtggtca

SEQ ID NO: 2678458 - DNA, 25 bp, Homo sapien
tttcagattttagttgggccacaag

SEQ ID NO: 2678459 - DNA, 25 bp, Homo sapien
cacaagtgctctcatgcagcctttc

SEQ ID NO: 2678460 - DNA, 25 bp, Homo sapien
cagcctttcatagagcatagcgtag

SEQ ID NO: 2678461 - DNA, 25 bp, Homo sapien
agcctttcatagagcatagcgtagc

SEQ ID NO: 2678462 - DNA, 25 bp, Homo sapien
actatttacatctgctcgccaagac

SEQ ID NO: 2678463 - DNA, 25 bp, Homo sapien
caacttctcgcaacgtctttttact

SEQ ID NO: 2678464 - DNA, 25 bp, Homo sapien
aattcctcaaaacactcgcaataac

SEQ ID NO: 2678465 - DNA, 25 bp, Homo sapien
ttctaaagcacattccatcaatgct

SEQ ID NO: 2678466 - DNA, 25 bp, Homo sapien
gacaattttgatcggcataactagg

SEQ ID NO: 2678467 - DNA, 25 bp, Homo sapien
gatggactgcctggagatatttcct

SEQ ID NO: 2678468 - DNA, 25 bp, Homo sapien
ggtcagccccagcaaaacgaagaat

SEQ ID NO: 2678469 - DNA, 25 bp, Homo sapien
ggtactctaaaactatggactggtg

SEQ ID NO: 2678470 - DNA, 25 bp, Homo sapien
tctctccattcaacagtgatacagg

SEQ ID NO: 2678471 - DNA, 25 bp, Homo sapien
tttcaagggcttatcggccatgttc

SEQ ID NO: 2678472 - DNA, 25 bp, Homo sapien
tagctgggtgaaaggaaacctagac

SEQ ID NO: 2678473 - DNA, 25 bp, Homo sapien
aacctagactagctaagacaacttg

SEQ ID NO: 2678474 - DNA, 25 bp, Homo sapien
caaaagtttcctaccctctcataat

SEQ ID NO: 2678475 - DNA, 25 bp, Homo sapien
cagccgaatcctattactttgtaca

SEQ ID NO: 2678476 - DNA, 25 bp, Homo sapien
tgaagaacagtaaactgcacacatt

SEQ ID NO: 2678477 - DNA, 25 bp, Homo sapien
tatacacccataaaactgccagtcc

SEQ ID NO: 2678478 - DNA, 25 bp, Homo sapien
aatgtgctgacaaattccataaggc

SEQ ID NO: 2678479 - DNA, 25 bp, Homo sapien
tagctatcaagctggacacattccg

SEQ ID NO: 2678480 - DNA, 25 bp, Homo sapien
gctccggtaagtaagagtgccaacc

SEQ ID NO: 2678481 - DNA, 25 bp, Homo sapien
taaagtgtttgtctggctccggtaa

SEQ ID NO: 2678482 - DNA, 25 bp, Homo sapien
tctgaacggagctggcaatcgaacg

SEQ ID NO: 2678483 - DNA, 25 bp, Homo sapien
tgaatcattgtcctgcctcgagaga

SEQ ID NO: 2678484 - DNA, 25 bp, Homo sapien
tctgagatggccgagctgaagtgct

SEQ ID NO: 2678485 - DNA, 25 bp, Homo sapien
tactacgatgagatgccttgggact

SEQ ID NO: 2678486 - DNA, 25 bp, Homo sapien
ttcatgcagtaaagcaaagcaggct

SEQ ID NO: 2678487 - DNA, 25 bp, Homo sapien
gagtgcctcccaaaataagaccagt

SEQ ID NO: 2678488 - DNA, 25 bp, Homo sapien
gttcatcgggaaccatattactgtg

SEQ ID NO: 2678489 - DNA, 25 bp, Homo sapien
ttttttcctaaccatcaagagtgcc

SEQ ID NO: 2678490 - DNA, 25 bp, Homo sapien
tttactcttaatgcatagaagctga

SEQ ID NO: 2678491 - DNA, 25 bp, Homo sapien
gaattttactcttaatgcatagaag

SEQ ID NO: 2678492 - DNA, 25 bp, Homo sapien
caagacccttcaaacaaataccaat

SEQ ID NO: 2678493 - DNA, 25 bp, Homo sapien
tacaaatgtgaaacaagacccttca

SEQ ID NO: 2678494 - DNA, 25 bp, Homo sapien
gaagacttccctccactgtataagg

SEQ ID NO: 2678495 - DNA, 25 bp, Homo sapien
gataagtgccaacgcatggaatggt

SEQ ID NO: 2678496 - DNA, 25 bp, Homo sapien
cactgtaaagcctcgaagagactgc

SEQ ID NO: 2678497 - DNA, 25 bp, Homo sapien
gagtgccccaccatgcttaaaaagg

SEQ ID NO: 2678498 - DNA, 25 bp, Homo sapien
agaagtagatggtattcatagacaa

SEQ ID NO: 2678499 - DNA, 25 bp, Homo sapien
tgtttacaaagtggtgcagtagaca

SEQ ID NO: 2678500 - DNA, 25 bp, Homo sapien
caaagatagtaaattgaagtgttta

SEQ ID NO: 2678501 - DNA, 25 bp, Homo sapien
tagacacagtacaggcattggagtc

SEQ ID NO: 2678502 - DNA, 25 bp, Homo sapien
cctggtaatctgtaaagttgtcctc

SEQ ID NO: 2678503 - DNA, 25 bp, Homo sapien
tctttcatgtaattaacctgtggca

SEQ ID NO: 2678504 - DNA, 25 bp, Homo sapien
tatacactctatttcagccaccatg

SEQ ID NO: 2678505 - DNA, 25 bp, Homo sapien
caggagccacagtctataggtttca

SEQ ID NO: 2678506 - DNA, 25 bp, Homo sapien
cgctcccggccccaatgatgttttt

SEQ ID NO: 2678507 - DNA, 25 bp, Homo sapien
atggcaggaactgagtgactccagg

SEQ ID NO: 2678508 - DNA, 25 bp, Homo sapien
agtgcagtggcgagaacgatcctct

SEQ ID NO: 2678509 - DNA, 25 bp, Homo sapien
tgactccaggagctagggactcttt

SEQ ID NO: 2678510 - DNA, 25 bp, Homo sapien
gaaaaggatcctctgagaaacgtcc

SEQ ID NO: 2678511 - DNA, 25 bp, Homo sapien
tcatgtaatatagaacagtgctgaa

SEQ ID NO: 2678512 - DNA, 25 bp, Homo sapien
cattttagccactgcatcatgggca

SEQ ID NO: 2678513 - DNA, 25 bp, Homo sapien
catgggcatattacttcacctagaa

SEQ ID NO: 2678514 - DNA, 25 bp, Homo sapien
catggaattgtttttgtagagccat

SEQ ID NO: 2678515 - DNA, 25 bp, Homo sapien
agccgcagggagaaacccggcagaa

SEQ ID NO: 2678516 - DNA, 25 bp, Homo sapien
aggagccgcagggagaaacccggca

SEQ ID NO: 2678517 - DNA, 25 bp, Homo sapien
gccgcagggagaaacccggcagaaa

SEQ ID NO: 2678518 - DNA, 25 bp, Homo sapien
gagccgcagggagaaacccggcaga

SEQ ID NO: 2678519 - DNA, 25 bp, Homo sapien
gtcggccggggaccgcgcggcagcg

SEQ ID NO: 2678520 - DNA, 25 bp, Homo sapien
ctggtcggccggggaccgcgcggca

SEQ ID NO: 2678521 - DNA, 25 bp, Homo sapien
gccggggaccgcgcggcagcgcaag

SEQ ID NO: 2678522 - DNA, 25 bp, Homo sapien
cggggaccgcgcggcagcgcaagcc

SEQ ID NO: 2678523 - DNA, 25 bp, Homo sapien
cctagatatcagatgggtactccct

SEQ ID NO: 2678524 - DNA, 25 bp, Homo sapien
ctgccatagacaatagcataagtgg

SEQ ID NO: 2678525 - DNA, 25 bp, Homo sapien
tggtatcactagagcagtaagaggc

SEQ ID NO: 2678526 - DNA, 25 bp, Homo sapien
tgctgcctagatatcagatgggtac

SEQ ID NO: 2678527 - DNA, 25 bp, Homo sapien
tacttatggggattcgccttccctc

SEQ ID NO: 2678528 - DNA, 25 bp, Homo sapien
cttccctctgcgatggtcttcttat

SEQ ID NO: 2678529 - DNA, 25 bp, Homo sapien
gggattcgccttccctctgcgatgg

SEQ ID NO: 2678530 - DNA, 25 bp, Homo sapien
ccctctgcgatggtcttcttattat

SEQ ID NO: 2678531 - DNA, 25 bp, Homo sapien
aaataaatgcagtgaagagaacccc

SEQ ID NO: 2678532 - DNA, 25 bp, Homo sapien
actgaggaacgcaccccaattcttg

SEQ ID NO: 2678533 - DNA, 25 bp, Homo sapien
cattccctcgaggatcaaggtgcca

SEQ ID NO: 2678534 - DNA, 25 bp, Homo sapien
ctaacaagattacgtggcccgacca

SEQ ID NO: 2678535 - DNA, 25 bp, Homo sapien
tatctagctcaaatcggcaatggtg

SEQ ID NO: 2678536 - DNA, 25 bp, Homo sapien
gaagtcataacggtggtcatcctgg

SEQ ID NO: 2678537 - DNA, 25 bp, Homo sapien
gagaattcactgcatcaaacctagg

SEQ ID NO: 2678538 - DNA, 25 bp, Homo sapien
tttttgagcatatgcggaggcgaca

SEQ ID NO: 2678539 - DNA, 25 bp, Homo sapien
caggagtttgagacaagcctggaca

SEQ ID NO: 2678540 - DNA, 25 bp, Homo sapien
caagcctggacaacatggagaaatc

SEQ ID NO: 2678541 - DNA, 25 bp, Homo sapien
gtaatcccagcagatcacttcagct

SEQ ID NO: 2678542 - DNA, 25 bp, Homo sapien
gcctggacaacatggagaaatctca

SEQ ID NO: 2678543 - DNA, 25 bp, Homo sapien
catacatcttgaatctctgtagctg

SEQ ID NO: 2678544 - DNA, 25 bp, Homo sapien
acatacatcttgaatctctgtagct

SEQ ID NO: 2678545 - DNA, 25 bp, Homo sapien
ctcaagaaatacgttaagtccaact

SEQ ID NO: 2678546 - DNA, 25 bp, Homo sapien
tacatcttgaatctctgtagctgta

SEQ ID NO: 2678547 - DNA, 25 bp, Homo sapien
ttacatcaattagatgagtatggaa

SEQ ID NO: 2678548 - DNA, 25 bp, Homo sapien
attacatcaattagatgagtatgga

SEQ ID NO: 2678549 - DNA, 25 bp, Homo sapien
tattacatcaattagatgagtatgg

SEQ ID NO: 2678550 - DNA, 25 bp, Homo sapien
ctgcctctgtattggacatcacgat

SEQ ID NO: 2678551 - DNA, 25 bp, Homo sapien
cacgattccattctctagagtacat

SEQ ID NO: 2678552 - DNA, 25 bp, Homo sapien
gacatcacgattccattctctagag

SEQ ID NO: 2678553 - DNA, 25 bp, Homo sapien
tctgtattggacatcacgattccat

SEQ ID NO: 2678554 - DNA, 25 bp, Homo sapien
cactagagatgatgcaacagtcttc

SEQ ID NO: 2678555 - DNA, 25 bp, Homo sapien
tctctccatgagcagtagtcctgtc

SEQ ID NO: 2678556 - DNA, 25 bp, Homo sapien
tgtaggagaaacctatccctgagcc

SEQ ID NO: 2678557 - DNA, 25 bp, Homo sapien
gagcaatgacagacttccagaggtt

SEQ ID NO: 2678558 - DNA, 25 bp, Homo sapien
gcaatacctaccaatcctgatgggt

SEQ ID NO: 2678559 - DNA, 25 bp, Homo sapien
ctgcactcaacctcgatgacagagt

SEQ ID NO: 2678560 - DNA, 25 bp, Homo sapien
aaatcatgtgccgatattcccagct

SEQ ID NO: 2678561 - DNA, 25 bp, Homo sapien
cacgagtttgagactggcttaggaa

SEQ ID NO: 2678562 - DNA, 25 bp, Homo sapien
cttacatgcattcctgctctgcaca

SEQ ID NO: 2678563 - DNA, 25 bp, Homo sapien
cagtatcatcaagttacaagcgatc

SEQ ID NO: 2678564 - DNA, 25 bp, Homo sapien
tccgatgggtaagatcagatgatct

SEQ ID NO: 2678565 - DNA, 25 bp, Homo sapien
gatctacacttacatgcattcctgc

SEQ ID NO: 2678566 - DNA, 25 bp, Homo sapien
tgtatccaaatatacctcaggtaga

SEQ ID NO: 2678567 - DNA, 25 bp, Homo sapien
gaatatcactgtatcttaagacact

SEQ ID NO: 2678568 - DNA, 25 bp, Homo sapien
gaagatctaaggagtatgtatccaa

SEQ ID NO: 2678569 - DNA, 25 bp, Homo sapien
caggtagaaacagagtcagaatatc

SEQ ID NO: 2678570 - DNA, 25 bp, Homo sapien
caaaaggcaaaacactaagtatgaa

SEQ ID NO: 2678571 - DNA, 25 bp, Homo sapien
caaagtgtaagaaactatcacatca

SEQ ID NO: 2678572 - DNA, 25 bp, Homo sapien
gacactgactagctcaagtcggggg

SEQ ID NO: 2678573 - DNA, 25 bp, Homo sapien
ggaaatgtactgagagtgagaataa

SEQ ID NO: 2678574 - DNA, 25 bp, Homo sapien
gctgcatacaacattactgacttac

SEQ ID NO: 2678575 - DNA, 25 bp, Homo sapien
tccgatacaaattagaagtctccat

SEQ ID NO: 2678576 - DNA, 25 bp, Homo sapien
tgtttccctccgatacaaattagaa

SEQ ID NO: 2678577 - DNA, 25 bp, Homo sapien
gcatatacgcgagatgcaaacttct

SEQ ID NO: 2678578 - DNA, 25 bp, Homo sapien
aattcttttatacggcatatacgcg

SEQ ID NO: 2678579 - DNA, 25 bp, Homo sapien
gaaggaaagtgtacctcaaggtgct

SEQ ID NO: 2678580 - DNA, 25 bp, Homo sapien
gactggctttttacagactcccctg

SEQ ID NO: 2678581 - DNA, 25 bp, Homo sapien
gaagagctaaaccaggcctcaggaa

SEQ ID NO: 2678582 - DNA, 25 bp, Homo sapien
gaaaccgctctgaaattctggagca

SEQ ID NO: 2678583 - DNA, 25 bp, Homo sapien
gcatcactgagagctaaaccaacca

SEQ ID NO: 2678584 - DNA, 25 bp, Homo sapien
tatgtcatggacagcagagcggaaa

SEQ ID NO: 2678585 - DNA, 25 bp, Homo sapien
gaaactaagtgaaagcctgctggga

SEQ ID NO: 2678586 - DNA, 25 bp, Homo sapien
tgcagctagagatggacctgtcaca

SEQ ID NO: 2678587 - DNA, 25 bp, Homo sapien
agctacttaacatgatagggatcaa

SEQ ID NO: 2678588 - DNA, 25 bp, Homo sapien
ccatgaactgagaatagaatgctag

SEQ ID NO: 2678589 - DNA, 25 bp, Homo sapien
tgcagatgacaagagcttaaagaag

SEQ ID NO: 2678590 - DNA, 25 bp, Homo sapien
ccaggccagatctcaacttataatc

SEQ ID NO: 2678591 - DNA, 25 bp, Homo sapien
ggaaaacagtggtgattaccggcat

SEQ ID NO: 2678592 - DNA, 25 bp, Homo sapien
tgaaaaactaattgagcctgtgcct

SEQ ID NO: 2678593 - DNA, 25 bp, Homo sapien
taatgacgacacctagctctaagag

SEQ ID NO: 2678594 - DNA, 25 bp, Homo sapien
taaagtaacccataatctgcttggc

SEQ ID NO: 2678595 - DNA, 25 bp, Homo sapien
cttgctgtttcaggtcactcatttg

SEQ ID NO: 2678596 - DNA, 25 bp, Homo sapien
tcatggttctcaactacgagtccat

SEQ ID NO: 2678597 - DNA, 25 bp, Homo sapien
acttgctgtttcaggtcactcattt

SEQ ID NO: 2678598 - DNA, 25 bp, Homo sapien
tcaactacgagtccatgcattttct

SEQ ID NO: 2678599 - DNA, 25 bp, Homo sapien
gggagctgctccaggctggcagacc

SEQ ID NO: 2678600 - DNA, 25 bp, Homo sapien
ctgggagctgctccaggctggcaga

SEQ ID NO: 2678601 - DNA, 25 bp, Homo sapien
tgggagctgctccaggctggcagac

SEQ ID NO: 2678602 - DNA, 25 bp, Homo sapien
ctctgggagctgctccaggctggca

SEQ ID NO: 2678603 - DNA, 25 bp, Homo sapien
taaaaggctgagaggtgcttccttg

SEQ ID NO: 2678604 - DNA, 25 bp, Homo sapien
taccgcattagcttggctctctgtc

SEQ ID NO: 2678605 - DNA, 25 bp, Homo sapien
ccttgattttcactaccgcattagc

SEQ ID NO: 2678606 - DNA, 25 bp, Homo sapien
ttttcactaccgcattagcttggct

SEQ ID NO: 2678607 - DNA, 25 bp, Homo sapien
ctgagaccacgaattctgggtgatc

SEQ ID NO: 2678608 - DNA, 25 bp, Homo sapien
accacgaattctgggtgatcattct

SEQ ID NO: 2678609 - DNA, 25 bp, Homo sapien
gagaccacgaattctgggtgatcat

SEQ ID NO: 2678610 - DNA, 25 bp, Homo sapien
gaccacgaattctgggtgatcattc

SEQ ID NO: 2678611 - DNA, 25 bp, Homo sapien
aaaggggagccctcatacccacagt

SEQ ID NO: 2678612 - DNA, 25 bp, Homo sapien
ctggatggaagtagattggagatac

SEQ ID NO: 2678613 - DNA, 25 bp, Homo sapien
caagtggagaggccatgtcgctgaa

SEQ ID NO: 2678614 - DNA, 25 bp, Homo sapien
agattggagatacccaggtctggaa

SEQ ID NO: 2678615 - DNA, 25 bp, Homo sapien
gtctcctccttagaatggtttgcac

SEQ ID NO: 2678616 - DNA, 25 bp, Homo sapien
cagtctcctccttagaatggtttgc

SEQ ID NO: 2678617 - DNA, 25 bp, Homo sapien
gccagtctcctccttagaatggttt

SEQ ID NO: 2678618 - DNA, 25 bp, Homo sapien
ggccagtctcctccttagaatggtt

SEQ ID NO: 2678619 - DNA, 25 bp, Homo sapien
tctcaatggcaaagtagagctgtaa

SEQ ID NO: 2678620 - DNA, 25 bp, Homo sapien
gatattaggcttatctgtacagggc

SEQ ID NO: 2678621 - DNA, 25 bp, Homo sapien
gaaggctaagatctacccaaaactg

SEQ ID NO: 2678622 - DNA, 25 bp, Homo sapien
ttaccaagataagcctaccaagcac

SEQ ID NO: 2678623 - DNA, 25 bp, Homo sapien
ggaagattttgttcatagctgccac

SEQ ID NO: 2678624 - DNA, 25 bp, Homo sapien
tggaagattttgttcatagctgcca

SEQ ID NO: 2678625 - DNA, 25 bp, Homo sapien
gaagattttgttcatagctgccact

SEQ ID NO: 2678626 - DNA, 25 bp, Homo sapien
cgcctgacccctcagacattcttaa

SEQ ID NO: 2678627 - DNA, 25 bp, Homo sapien
gcctgacccctcagacattcttaac

SEQ ID NO: 2678628 - DNA, 25 bp, Homo sapien
aaacgtcatcttctcaagtgcagcc

SEQ ID NO: 2678629 - DNA, 25 bp, Homo sapien
aacgtcatcttctcaagtgcagcca

SEQ ID NO: 2678630 - DNA, 25 bp, Homo sapien
cgagcaagttcctgccgacgtttct

SEQ ID NO: 2678631 - DNA, 25 bp, Homo sapien
tctcagtcgagcaagttcctgccga

SEQ ID NO: 2678632 - DNA, 25 bp, Homo sapien
tctctcagtcgagcaagttcctgcc

SEQ ID NO: 2678633 - DNA, 25 bp, Homo sapien
agtcgagcaagttcctgccgacgtt

SEQ ID NO: 2678634 - DNA, 25 bp, Homo sapien
ctgaaatccacgggtggttctgggt

SEQ ID NO: 2678635 - DNA, 25 bp, Homo sapien
caattagctcgatccttctccatta

SEQ ID NO: 2678636 - DNA, 25 bp, Homo sapien
acaattagctcgatccttctccatt

SEQ ID NO: 2678637 - DNA, 25 bp, Homo sapien
attagctcgatccttctccattact

SEQ ID NO: 2678638 - DNA, 25 bp, Homo sapien
aattagctcgatccttctccattac

SEQ ID NO: 2678639 - DNA, 25 bp, Homo sapien
gcttgcgtcagggtcatagtcatcc

SEQ ID NO: 2678640 - DNA, 25 bp, Homo sapien
cattgttgggatttctgaacacatg

SEQ ID NO: 2678641 - DNA, 25 bp, Homo sapien
caagtagatgtctctattagcttcc

SEQ ID NO: 2678642 - DNA, 25 bp, Homo sapien
gatgtgcgtttgtgagatttcttcc

SEQ ID NO: 2678643 - DNA, 25 bp, Homo sapien
tgcttggtgaattgtgcctctcccg

SEQ ID NO: 2678644 - DNA, 25 bp, Homo sapien
cttggtgaattgtgcctctcccgac

SEQ ID NO: 2678645 - DNA, 25 bp, Homo sapien
cagctgcggtgcctatttcttcctc

SEQ ID NO: 2678646 - DNA, 25 bp, Homo sapien
cccagctgcggtgcctatttcttcc

SEQ ID NO: 2678647 - DNA, 25 bp, Homo sapien
cctagaggaactttggctccggctg

SEQ ID NO: 2678648 - DNA, 25 bp, Homo sapien
ctagaggaactttggctccggctgc

SEQ ID NO: 2678649 - DNA, 25 bp, Homo sapien
tagaggaactttggctccggctgcg

SEQ ID NO: 2678650 - DNA, 25 bp, Homo sapien
acctagaggaactttggctccggct

SEQ ID NO: 2678651 - DNA, 25 bp, Homo sapien
ttatttggattggggactctgaaca

SEQ ID NO: 2678652 - DNA, 25 bp, Homo sapien
attggggactctgaacagttctgtc

SEQ ID NO: 2678653 - DNA, 25 bp, Homo sapien
tggattggggactctgaacagttct

SEQ ID NO: 2678654 - DNA, 25 bp, Homo sapien
atttggattggggactctgaacagt

SEQ ID NO: 2678655 - DNA, 25 bp, Homo sapien
tatggcagtgaatcccattggattg

SEQ ID NO: 2678656 - DNA, 25 bp, Homo sapien
ggagattatggcagtgaatcccatt

SEQ ID NO: 2678657 - DNA, 25 bp, Homo sapien
gtgaatcccattggattgaatggtc

SEQ ID NO: 2678658 - DNA, 25 bp, Homo sapien
ttgaatggtctgatatggaaagcag

SEQ ID NO: 2678659 - DNA, 25 bp, Homo sapien
tctgtgctcagtaaacaagctttgg

SEQ ID NO: 2678660 - DNA, 25 bp, Homo sapien
catctactgtcatgctttcccaagt

SEQ ID NO: 2678661 - DNA, 25 bp, Homo sapien
cctgttttccaagatctgtgctcag

SEQ ID NO: 2678662 - DNA, 25 bp, Homo sapien
ctttccatcatctactgtcatgctt

SEQ ID NO: 2678663 - DNA, 25 bp, Homo sapien
tactatccatgtgtagcgagactac

SEQ ID NO: 2678664 - DNA, 25 bp, Homo sapien
taaacttagggcatgctagagcaga

SEQ ID NO: 2678665 - DNA, 25 bp, Homo sapien
tcgaactacttgcacatactgaggg

SEQ ID NO: 2678666 - DNA, 25 bp, Homo sapien
tactgagggtacctcaaggcgctgg

SEQ ID NO: 2678667 - DNA, 25 bp, Homo sapien
gaagggttggcatctacataggcag

SEQ ID NO: 2678668 - DNA, 25 bp, Homo sapien
gaaagtagtcaattaacagtctgca

SEQ ID NO: 2678669 - DNA, 25 bp, Homo sapien
cataggcaggtaatatttcagagat

SEQ ID NO: 2678670 - DNA, 25 bp, Homo sapien
gcagtctagcctacaaagtaatcac

SEQ ID NO: 2678671 - DNA, 25 bp, Homo sapien
gctaaggatgtagctagagagcagt

SEQ ID NO: 2678672 - DNA, 25 bp, Homo sapien
gatgtagctagagagcagtaattat

SEQ ID NO: 2678673 - DNA, 25 bp, Homo sapien
aaaatgctaaggatgtagctagaga

SEQ ID NO: 2678674 - DNA, 25 bp, Homo sapien
agctagagagcagtaattattttac

SEQ ID NO: 2678675 - DNA, 25 bp, Homo sapien
cacatggtgacagcattagaagcac

SEQ ID NO: 2678676 - DNA, 25 bp, Homo sapien
gaagcacagacggaatagaatggcc

SEQ ID NO: 2678677 - DNA, 25 bp, Homo sapien
catgctgagcaatgtagcctgtaac

SEQ ID NO: 2678678 - DNA, 25 bp, Homo sapien
tgctaatagtgccaagagtccagtt

SEQ ID NO: 2678679 - DNA, 25 bp, Homo sapien
gacatttgtcatgcgattatacata

SEQ ID NO: 2678680 - DNA, 25 bp, Homo sapien
gctgtcttaacatatgtgtggctta

SEQ ID NO: 2678681 - DNA, 25 bp, Homo sapien
tacctacttcccaattgaaagacat

SEQ ID NO: 2678682 - DNA, 25 bp, Homo sapien
catttgtaatcctacatcttagagt

SEQ ID NO: 2678683 - DNA, 25 bp, Homo sapien
taagatccatctaatcgtagggacc

SEQ ID NO: 2678684 - DNA, 25 bp, Homo sapien
gggcccacttgcttgtggcagtgaa

SEQ ID NO: 2678685 - DNA, 25 bp, Homo sapien
tggcagtgaacactatcttgtcagc

SEQ ID NO: 2678686 - DNA, 25 bp, Homo sapien
gacttcaccacagaatgccttgtaa

SEQ ID NO: 2678687 - DNA, 25 bp, Homo sapien
aaatttctatatgacagtgggcagc

SEQ ID NO: 2678688 - DNA, 25 bp, Homo sapien
tagtcactgtgcattaaagagctgc

SEQ ID NO: 2678689 - DNA, 25 bp, Homo sapien
taagggatacttaacagcctagtgg

SEQ ID NO: 2678690 - DNA, 25 bp, Homo sapien
tgagtgcccacataatgatcaaagg

SEQ ID NO: 2678691 - DNA, 25 bp, Homo sapien
ccaggctctagctattctcactcca

SEQ ID NO: 2678692 - DNA, 25 bp, Homo sapien
tcccaggctctagctattctcactc

SEQ ID NO: 2678693 - DNA, 25 bp, Homo sapien
ggctctagctattctcactccactg

SEQ ID NO: 2678694 - DNA, 25 bp, Homo sapien
aggctctagctattctcactccact

SEQ ID NO: 2678695 - DNA, 25 bp, Homo sapien
tcttcaagggtctttacaaggcaac

SEQ ID NO: 2678696 - DNA, 25 bp, Homo sapien
aagagttctttcacgatgctcaaac

SEQ ID NO: 2678697 - DNA, 25 bp, Homo sapien
caaactcatcgcagtgaattgcagg

SEQ ID NO: 2678698 - DNA, 25 bp, Homo sapien
caaaaatgccttaggtttagcacag

SEQ ID NO: 2678699 - DNA, 25 bp, Homo sapien
aaatgctggtgactcagtagccttc

SEQ ID NO: 2678700 - DNA, 25 bp, Homo sapien
tctgtgagatccatagagcttggac

SEQ ID NO: 2678701 - DNA, 25 bp, Homo sapien
ccttcgaggatgaaggaatgcattc

SEQ ID NO: 2678702 - DNA, 25 bp, Homo sapien
caattttcctatgctgaaagacagg

SEQ ID NO: 2678703 - DNA, 25 bp, Homo sapien
gagacaaactctcactttgccccct

SEQ ID NO: 2678704 - DNA, 25 bp, Homo sapien
tgagacaaactctcactttgccccc

SEQ ID NO: 2678705 - DNA, 25 bp, Homo sapien
caaactctcactttgccccctaggc

SEQ ID NO: 2678706 - DNA, 25 bp, Homo sapien
gacaaactctcactttgccccctag

SEQ ID NO: 2678707 - DNA, 25 bp, Homo sapien
cctgtcctcttccttctaaccccat

SEQ ID NO: 2678708 - DNA, 25 bp, Homo sapien
tcctgtcctcttccttctaacccca

SEQ ID NO: 2678709 - DNA, 25 bp, Homo sapien
ctctcctgtcctcttccttctaacc

SEQ ID NO: 2678710 - DNA, 25 bp, Homo sapien
tctcctgtcctcttccttctaaccc

SEQ ID NO: 2678711 - DNA, 25 bp, Homo sapien
tatatcccatgtaactttctgtcag

SEQ ID NO: 2678712 - DNA, 25 bp, Homo sapien
tgtaactttctgtcagcacgactaa

SEQ ID NO: 2678713 - DNA, 25 bp, Homo sapien
ctttctgtcagcacgactaagcacc

SEQ ID NO: 2678714 - DNA, 25 bp, Homo sapien
cccatgtaactttctgtcagcacga

SEQ ID NO: 2678715 - DNA, 25 bp, Homo sapien
ctgttctgactgaatgtcttttctc

SEQ ID NO: 2678716 - DNA, 25 bp, Homo sapien
gctcacttccgtcccgctccctcag

SEQ ID NO: 2678717 - DNA, 25 bp, Homo sapien
ggacccgctcacttccgtcccgctc

SEQ ID NO: 2678718 - DNA, 25 bp, Homo sapien
gccttggaccccaagactgggccaa

SEQ ID NO: 2678719 - DNA, 25 bp, Homo sapien
ctccaacggagacgagaaggggaag

SEQ ID NO: 2678720 - DNA, 25 bp, Homo sapien
gccgaggaagccgcggcagagacga

SEQ ID NO: 2678721 - DNA, 25 bp, Homo sapien
gcagccgaggaagccgcggcagaga

SEQ ID NO: 2678722 - DNA, 25 bp, Homo sapien
ctggcagccgaggaagccgcggcag

SEQ ID NO: 2678723 - DNA, 25 bp, Homo sapien
tggcagccgaggaagccgcggcaga

SEQ ID NO: 2678724 - DNA, 25 bp, Homo sapien
ggcactaggactccggctcgccgga

SEQ ID NO: 2678725 - DNA, 25 bp, Homo sapien
ggactgacggtacggcactaggact

SEQ ID NO: 2678726 - DNA, 25 bp, Homo sapien
ctgacggtacggcactaggactccg

SEQ ID NO: 2678727 - DNA, 25 bp, Homo sapien
ggtacggcactaggactccggctcg

SEQ ID NO: 2678728 - DNA, 25 bp, Homo sapien
gacccacagcaggaacagtgcatcc

SEQ ID NO: 2678729 - DNA, 25 bp, Homo sapien
aggacccacagcaggaacagtgcat

SEQ ID NO: 2678730 - DNA, 25 bp, Homo sapien
ccacagcaggaacagtgcatcccgg

SEQ ID NO: 2678731 - DNA, 25 bp, Homo sapien
gatgaggacccacagcaggaacagt

SEQ ID NO: 2678732 - DNA, 25 bp, Homo sapien
ctgccgggaatctccacccgtttgg

SEQ ID NO: 2678733 - DNA, 25 bp, Homo sapien
ggaatctccacccgtttggtctcca

SEQ ID NO: 2678734 - DNA, 25 bp, Homo sapien
gaatctccacccgtttggtctccat

SEQ ID NO: 2678735 - DNA, 25 bp, Homo sapien
ggacgctgccgggaatctccacccg

SEQ ID NO: 2678736 - DNA, 25 bp, Homo sapien
aatgaggaaattccgggtgttctgc

SEQ ID NO: 2678737 - DNA, 25 bp, Homo sapien
tctgggggtccgcgaaactgagaaa

SEQ ID NO: 2678738 - DNA, 25 bp, Homo sapien
atggaaagcgagcagcggcgggagc

SEQ ID NO: 2678739 - DNA, 25 bp, Homo sapien
gggcggtgtcgtcggagagcagggt

SEQ ID NO: 2678740 - DNA, 25 bp, Homo sapien
ctacgcctgcgggaaagcaaaatag

SEQ ID NO: 2678741 - DNA, 25 bp, Homo sapien
ctgggatcctaagccttaaattact

SEQ ID NO: 2678742 - DNA, 25 bp, Homo sapien
tgcacggcgtggaaaagtcacagag

SEQ ID NO: 2678743 - DNA, 25 bp, Homo sapien
ggcggcaaaacgctaagacccaggc

SEQ ID NO: 2678744 - DNA, 25 bp, Homo sapien
ccgaaaatttgctccttgcgcaggt

SEQ ID NO: 2678745 - DNA, 25 bp, Homo sapien
agaaaagcagcgctacactttttcc

SEQ ID NO: 2678746 - DNA, 25 bp, Homo sapien
ggaatttacagagaacgccacggac

SEQ ID NO: 2678747 - DNA, 25 bp, Homo sapien
cacgcaggcgtcagaataagtccga

SEQ ID NO: 2678748 - DNA, 25 bp, Homo sapien
catcaccaaagaagtacagcgccat

SEQ ID NO: 2678749 - DNA, 25 bp, Homo sapien
tccttggtatgagagaaaaagcaca

SEQ ID NO: 2678750 - DNA, 25 bp, Homo sapien
cctgaatctgtttgcgcagatgaaa

SEQ ID NO: 2678751 - DNA, 25 bp, Homo sapien
ccaaacacggctgactgaggattaa

SEQ ID NO: 2678752 - DNA, 25 bp, Homo sapien
atcatgcctgggcaatggtgcaaga

SEQ ID NO: 2678753 - DNA, 25 bp, Homo sapien
aggaggctgagccaagtggatagct

SEQ ID NO: 2678754 - DNA, 25 bp, Homo sapien
gctgagccaagtggatagcttgagt

SEQ ID NO: 2678755 - DNA, 25 bp, Homo sapien
tatgatcatgcctgggcaatggtgc

SEQ ID NO: 2678756 - DNA, 25 bp, Homo sapien
tgtgaaatccttgagcccaacttga

SEQ ID NO: 2678757 - DNA, 25 bp, Homo sapien
taccatctaaggaaaatgtgaagca

SEQ ID NO: 2678758 - DNA, 25 bp, Homo sapien
cccttggcatggcagtctgtgtgat

SEQ ID NO: 2678759 - DNA, 25 bp, Homo sapien
cctcaagtgtaagagccagctccct

SEQ ID NO: 2678760 - DNA, 25 bp, Homo sapien
tcagtgctgaaaggtctcgtaagtc

SEQ ID NO: 2678761 - DNA, 25 bp, Homo sapien
gaaattccagctactaaagccaagg

SEQ ID NO: 2678762 - DNA, 25 bp, Homo sapien
tatgtttctatactgccttgccagg

SEQ ID NO: 2678763 - DNA, 25 bp, Homo sapien
tcgtaagtcaatcctactgtgagtc

SEQ ID NO: 2678764 - DNA, 25 bp, Homo sapien
ggtatggttatctctccaggcggtt

SEQ ID NO: 2678765 - DNA, 25 bp, Homo sapien
ccaggcggttgatcaggcccagtat

SEQ ID NO: 2678766 - DNA, 25 bp, Homo sapien
gagacacaagtctagcaagcagcta

SEQ ID NO: 2678767 - DNA, 25 bp, Homo sapien
cattcaggcaaggttaggcagagct

SEQ ID NO: 2678768 - DNA, 25 bp, Homo sapien
caagtaaaaccaatgggcaagttca

SEQ ID NO: 2678769 - DNA, 25 bp, Homo sapien
gattgcattgtctctttcctcgctg

SEQ ID NO: 2678770 - DNA, 25 bp, Homo sapien
ctgaaaacacactcggattgcattg

SEQ ID NO: 2678771 - DNA, 25 bp, Homo sapien
gcaaagtctcttatcccacactgag

SEQ ID NO: 2678772 - DNA, 25 bp, Homo sapien
gaaagtcagtcattatagtaataaa

SEQ ID NO: 2678773 - DNA, 25 bp, Homo sapien
ccctactccaactctagttctagta

SEQ ID NO: 2678774 - DNA, 25 bp, Homo sapien
cttgtgggtacaaatccattaaaca

SEQ ID NO: 2678775 - DNA, 25 bp, Homo sapien
tacacgaacttgtgggtacaaatcc

SEQ ID NO: 2678776 - DNA, 25 bp, Homo sapien
tagttctagtacacgaacttgtggg

SEQ ID NO: 2678777 - DNA, 25 bp, Homo sapien
ccctagaagggctgtaagtccatac

SEQ ID NO: 2678778 - DNA, 25 bp, Homo sapien
caagattttcgagtggccaagatgg

SEQ ID NO: 2678779 - DNA, 25 bp, Homo sapien
gatttattgccctgaacgtcaagtg

SEQ ID NO: 2678780 - DNA, 25 bp, Homo sapien
taatagcaggcaaagtgtaaaactc

SEQ ID NO: 2678781 - DNA, 25 bp, Homo sapien
cttgaggcagcaaaaacggacaatg

SEQ ID NO: 2678782 - DNA, 25 bp, Homo sapien
ttgaggcagcaaaaacggacaatga

SEQ ID NO: 2678783 - DNA, 25 bp, Homo sapien
catatgttggtactcccattttata

SEQ ID NO: 2678784 - DNA, 25 bp, Homo sapien
gcaccatatgttggtactcccattt

SEQ ID NO: 2678785 - DNA, 25 bp, Homo sapien
tgttggtactcccattttatattcc

SEQ ID NO: 2678786 - DNA, 25 bp, Homo sapien
attgcaccatatgttggtactccca

SEQ ID NO: 2678787 - DNA, 25 bp, Homo sapien
gctaggtacccctgaactagtagta

SEQ ID NO: 2678788 - DNA, 25 bp, Homo sapien
tgctaggtacccctgaactagtagt

SEQ ID NO: 2678789 - DNA, 25 bp, Homo sapien
tggaaatccccagcctgattttgct

SEQ ID NO: 2678790 - DNA, 25 bp, Homo sapien
gaaatccccagcctgattttgctag

SEQ ID NO: 2678791 - DNA, 25 bp, Homo sapien
ttaaactttatcctataggcagtgg

SEQ ID NO: 2678792 - DNA, 25 bp, Homo sapien
taaaggccgaaacaaatcaatcaag

SEQ ID NO: 2678793 - DNA, 25 bp, Homo sapien
tcggcctcccatattcaggcgtgag

SEQ ID NO: 2678794 - DNA, 25 bp, Homo sapien
tgcctggccataacagcaaaaattt

SEQ ID NO: 2678795 - DNA, 25 bp, Homo sapien
tgtataatctgaattcctcgtgggc

SEQ ID NO: 2678796 - DNA, 25 bp, Homo sapien
catacatgcagaagcaattaaggac

SEQ ID NO: 2678797 - DNA, 25 bp, Homo sapien
cagcaagtaagcatggattggatcc

SEQ ID NO: 2678798 - DNA, 25 bp, Homo sapien
cctcgtgggcagagcctgttatctt

SEQ ID NO: 2678799 - DNA, 25 bp, Homo sapien
gaattcctggaatgatgtacaaacg

SEQ ID NO: 2678800 - DNA, 25 bp, Homo sapien
gatatcaaaaccagtttcttcaaag

SEQ ID NO: 2678801 - DNA, 25 bp, Homo sapien
tcgaagttcaatgtaatcatcctta

SEQ ID NO: 2678802 - DNA, 25 bp, Homo sapien
caagctggtcattgattcgaagttc

SEQ ID NO: 2678803 - DNA, 25 bp, Homo sapien
tcatttgggatactgtccagtaacc

SEQ ID NO: 2678804 - DNA, 25 bp, Homo sapien
catttgggatactgtccagtaacct

SEQ ID NO: 2678805 - DNA, 25 bp, Homo sapien
ttcatttgggatactgtccagtaac

SEQ ID NO: 2678806 - DNA, 25 bp, Homo sapien
tattcatttgggatactgtccagta

SEQ ID NO: 2678807 - DNA, 25 bp, Homo sapien
aggtgccaaaccaagtttggatttg

SEQ ID NO: 2678808 - DNA, 25 bp, Homo sapien
tgttaggtgccaaaccaagtttgga

SEQ ID NO: 2678809 - DNA, 25 bp, Homo sapien
ttctcaatagagaaccactcaatgt

SEQ ID NO: 2678810 - DNA, 25 bp, Homo sapien
caatttctcaatagagaaccactca

SEQ ID NO: 2678811 - DNA, 25 bp, Homo sapien
cacagtgggtttagccggcgtgcta

SEQ ID NO: 2678812 - DNA, 25 bp, Homo sapien
ccggcgtgctaccagttgaggaaaa

SEQ ID NO: 2678813 - DNA, 25 bp, Homo sapien
ctgaggaatcgccaaatcttcgaga

SEQ ID NO: 2678814 - DNA, 25 bp, Homo sapien
ccaaatcttcgagaaagccagtccc

SEQ ID NO: 2678815 - DNA, 25 bp, Homo sapien
ccaggagaaccgtcaggaaataact

SEQ ID NO: 2678816 - DNA, 25 bp, Homo sapien
ctgactgtggcggaatttggttcga

SEQ ID NO: 2678817 - DNA, 25 bp, Homo sapien
gctttacccactggtcaccaggaga

SEQ ID NO: 2678818 - DNA, 25 bp, Homo sapien
gttgcctgtgctttacccactggtc

SEQ ID NO: 2678819 - DNA, 25 bp, Homo sapien
ctggctgaagcccatttgttctttt

SEQ ID NO: 2678820 - DNA, 25 bp, Homo sapien
ttcttttgattaggtgaatcttgat

SEQ ID NO: 2678821 - DNA, 25 bp, Homo sapien
tacagaaaagataacgcaggagact

SEQ ID NO: 2678822 - DNA, 25 bp, Homo sapien
caagtcagctacacaaaaatcctac

SEQ ID NO: 2678823 - DNA, 25 bp, Homo sapien
tagtgtgaatagtgcacaagtcagc

SEQ ID NO: 2678824 - DNA, 25 bp, Homo sapien
gaacaggtttgagtacacattgata

SEQ ID NO: 2678825 - DNA, 25 bp, Homo sapien
atcctgaagtttccgtggatgaagt

SEQ ID NO: 2678826 - DNA, 25 bp, Homo sapien
aattatcctgaagtttccgtggatg

SEQ ID NO: 2678827 - DNA, 25 bp, Homo sapien
cctgaagtttccgtggatgaagttt

SEQ ID NO: 2678828 - DNA, 25 bp, Homo sapien
tgaagtttccgtggatgaagtttct

SEQ ID NO: 2678829 - DNA, 25 bp, Homo sapien
ctcctgtatgtgctttacctatttt

SEQ ID NO: 2678830 - DNA, 25 bp, Homo sapien
cctgtatgtgctttacctattttat

SEQ ID NO: 2678831 - DNA, 25 bp, Homo sapien
tgtgctttacctattttatgtgcat

SEQ ID NO: 2678832 - DNA, 25 bp, Homo sapien
gtatgtgctttacctattttatgtg

SEQ ID NO: 2678833 - DNA, 25 bp, Homo sapien
tgttctagcaactggtcttcactgg

SEQ ID NO: 2678834 - DNA, 25 bp, Homo sapien
tgtccattacatgccacgggctgtc

SEQ ID NO: 2678835 - DNA, 25 bp, Homo sapien
gaaactcaaaaaggctctggatgaa

SEQ ID NO: 2678836 - DNA, 25 bp, Homo sapien
tcttcactggagctaggcaagtcat

SEQ ID NO: 2678837 - DNA, 25 bp, Homo sapien
tctacgagactaaagggttggaggc

SEQ ID NO: 2678838 - DNA, 25 bp, Homo sapien
gagaaatccagttcgctaagcatgg

SEQ ID NO: 2678839 - DNA, 25 bp, Homo sapien
ctgtaacaggtagatggagcattcc

SEQ ID NO: 2678840 - DNA, 25 bp, Homo sapien
caaatgctcatgtctcaggagggta

SEQ ID NO: 2678841 - DNA, 25 bp, Homo sapien
aataacgatattcaaagctcagaac

SEQ ID NO: 2678842 - DNA, 25 bp, Homo sapien
tatgtcttcattagctatacttact

SEQ ID NO: 2678843 - DNA, 25 bp, Homo sapien
gaaaagtaccaattcaatcttacag

SEQ ID NO: 2678844 - DNA, 25 bp, Homo sapien
ccacaattcctttgacagcactggg

SEQ ID NO: 2678845 - DNA, 25 bp, Homo sapien
tggtaactaaaaccgcccaagcagc

SEQ ID NO: 2678846 - DNA, 25 bp, Homo sapien
gagactcaaaagagcacaggtgtcc

SEQ ID NO: 2678847 - DNA, 25 bp, Homo sapien
tactcagctggtggaagtcaaccct

SEQ ID NO: 2678848 - DNA, 25 bp, Homo sapien
tcttcctgtaagaaagcagtgcact

SEQ ID NO: 2678849 - DNA, 25 bp, Homo sapien
ccaaagagcaaccacaatgagcaac

SEQ ID NO: 2678850 - DNA, 25 bp, Homo sapien
gagcaactcagaacctacgatgata

SEQ ID NO: 2678851 - DNA, 25 bp, Homo sapien
tacgatgataaataacagtagcaga

SEQ ID NO: 2678852 - DNA, 25 bp, Homo sapien
acaatgagcaactcagaacctacga

SEQ ID NO: 2678853 - DNA, 25 bp, Homo sapien
gactctcgacaatatttcttcctgg

SEQ ID NO: 2678854 - DNA, 25 bp, Homo sapien
aaatcaagagccctagtcaaagcag

SEQ ID NO: 2678855 - DNA, 25 bp, Homo sapien
gggtaaggctatccttctgtagaac

SEQ ID NO: 2678856 - DNA, 25 bp, Homo sapien
tcaaggactggaaatgcaaggaagt

SEQ ID NO: 2678857 - DNA, 25 bp, Homo sapien
aggtgaaatatcagctcagcagaac

SEQ ID NO: 2678858 - DNA, 25 bp, Homo sapien
ggtgaaatatcagctcagcagaaca

SEQ ID NO: 2678859 - DNA, 25 bp, Homo sapien
caggtgaaatatcagctcagcagaa

SEQ ID NO: 2678860 - DNA, 25 bp, Homo sapien
ttcagtcccggaaatagcaactgct

SEQ ID NO: 2678861 - DNA, 25 bp, Homo sapien
taagaaataatgctgactgctgtca

SEQ ID NO: 2678862 - DNA, 25 bp, Homo sapien
aaagacagtttcacatgcagatcac

SEQ ID NO: 2678863 - DNA, 25 bp, Homo sapien
tgagattttgcatgtgaccaagagg

SEQ ID NO: 2678864 - DNA, 25 bp, Homo sapien
cctggccattcctgtgattttttag

SEQ ID NO: 2678865 - DNA, 25 bp, Homo sapien
ctggccattcctgtgattttttaga

SEQ ID NO: 2678866 - DNA, 25 bp, Homo sapien
caagacttagctcctgttgtcatga

SEQ ID NO: 2678867 - DNA, 25 bp, Homo sapien
cagggctaggcagtaccaaagtaac

SEQ ID NO: 2678868 - DNA, 25 bp, Homo sapien
taatatccaagacttagagctggga

SEQ ID NO: 2678869 - DNA, 25 bp, Homo sapien
tctacactgatacacttgaaggacc

SEQ ID NO: 2678870 - DNA, 25 bp, Homo sapien
catggaatggacctacctgggctca

SEQ ID NO: 2678871 - DNA, 25 bp, Homo sapien
taatttaatattccgagtcccacca

SEQ ID NO: 2678872 - DNA, 25 bp, Homo sapien
gaagacagctaggttctcacatttg

SEQ ID NO: 2678873 - DNA, 25 bp, Homo sapien
tgtatattgagaacacctggcatca

SEQ ID NO: 2678874 - DNA, 25 bp, Homo sapien
attgatacttctcatgttagaacta

SEQ ID NO: 2678875 - DNA, 25 bp, Homo sapien
tattgatacttctcatgttagaact

SEQ ID NO: 2678876 - DNA, 25 bp, Homo sapien
ttgatacttctcatgttagaactaa

SEQ ID NO: 2678877 - DNA, 25 bp, Homo sapien
ttattgatacttctcatgttagaac

SEQ ID NO: 2678878 - DNA, 25 bp, Homo sapien
caggcagttctaagctcccagcaat

SEQ ID NO: 2678879 - DNA, 25 bp, Homo sapien
tccttccagcttagcagaggcgggt

SEQ ID NO: 2678880 - DNA, 25 bp, Homo sapien
tacagtttggcctcgtctttgcatc

SEQ ID NO: 2678881 - DNA, 25 bp, Homo sapien
gactgctctaggtagcatcccagag

SEQ ID NO: 2678882 - DNA, 25 bp, Homo sapien
taccatgttgcagcgggaggttcct

SEQ ID NO: 2678883 - DNA, 25 bp, Homo sapien
gaacatatgtgggttatggtcctca

SEQ ID NO: 2678884 - DNA, 25 bp, Homo sapien
gaggttcctaatgtcagtttgtcca

SEQ ID NO: 2678885 - DNA, 25 bp, Homo sapien
cttgtcttaggtagacagaggcaac

SEQ ID NO: 2678886 - DNA, 25 bp, Homo sapien
caacaaagccgggaagactggccca

SEQ ID NO: 2678887 - DNA, 25 bp, Homo sapien
cagccctcagcaccatgaggtgcct

SEQ ID NO: 2678888 - DNA, 25 bp, Homo sapien
tcccaacaaagccgggaagactggc

SEQ ID NO: 2678889 - DNA, 25 bp, Homo sapien
gcaccatgaggtgcctcagcagcat

SEQ ID NO: 2678890 - DNA, 25 bp, Homo sapien
caagaatattcgcagattttggcat

SEQ ID NO: 2678891 - DNA, 25 bp, Homo sapien
aaagtgtatgaagcatgcagtgcgg

SEQ ID NO: 2678892 - DNA, 25 bp, Homo sapien
cattattactgcctggtgacctgga

SEQ ID NO: 2678893 - DNA, 25 bp, Homo sapien
tttggcattgggatttgacactgcc

SEQ ID NO: 2678894 - DNA, 25 bp, Homo sapien
ctctttcaagggtgtcacagagtcc

SEQ ID NO: 2678895 - DNA, 25 bp, Homo sapien
catcatggtggcctcctctttattc

SEQ ID NO: 2678896 - DNA, 25 bp, Homo sapien
ctgctttctctttcaagggtgtcac

SEQ ID NO: 2678897 - DNA, 25 bp, Homo sapien
agcccatcatggtggcctcctcttt

SEQ ID NO: 2678898 - DNA, 25 bp, Homo sapien
gtggtaaaggaaagcttgctgttga

SEQ ID NO: 2678899 - DNA, 25 bp, Homo sapien
gcctgtgtggtaaaggaaagcttgc

SEQ ID NO: 2678900 - DNA, 25 bp, Homo sapien
aagcctgtgtggtaaaggaaagctt

SEQ ID NO: 2678901 - DNA, 25 bp, Homo sapien
gtgtggtaaaggaaagcttgctgtt

SEQ ID NO: 2678902 - DNA, 25 bp, Homo sapien
ggttttctgcctggagcattgtctc

SEQ ID NO: 2678903 - DNA, 25 bp, Homo sapien
agctcagggcctgctcgctctctgc

SEQ ID NO: 2678904 - DNA, 25 bp, Homo sapien
agggcctgctcgctctctgcctggc

SEQ ID NO: 2678905 - DNA, 25 bp, Homo sapien
gttttctgcctggagcattgtctct

SEQ ID NO: 2678906 - DNA, 25 bp, Homo sapien
acagctttggaatggctcttcgctt

SEQ ID NO: 2678907 - DNA, 25 bp, Homo sapien
tgggacagagaacagctttggaatg

SEQ ID NO: 2678908 - DNA, 25 bp, Homo sapien
ggaatggctcttcgcttgcacaatt

SEQ ID NO: 2678909 - DNA, 25 bp, Homo sapien
cctgtgatcataaccgtgggacaga

SEQ ID NO: 2678910 - DNA, 25 bp, Homo sapien
tgtttagttttccagactaatccac

SEQ ID NO: 2678911 - DNA, 25 bp, Homo sapien
ttgtttagttttccagactaatcca

SEQ ID NO: 2678912 - DNA, 25 bp, Homo sapien
tagccctgtcatctgttgaatacgg

SEQ ID NO: 2678913 - DNA, 25 bp, Homo sapien
tataaaaccagtccatagccccaaa

SEQ ID NO: 2678914 - DNA, 25 bp, Homo sapien
tgcagggttccacttttcattaggt

SEQ ID NO: 2678915 - DNA, 25 bp, Homo sapien
agcagtctttggtgatggaattatc

SEQ ID NO: 2678916 - DNA, 25 bp, Homo sapien
acacagagcagattttacaaatgca

SEQ ID NO: 2678917 - DNA, 25 bp, Homo sapien
agatacacagagcagattttacaaa

SEQ ID NO: 2678918 - DNA, 25 bp, Homo sapien
ctggtagatacacagagcagatttt

SEQ ID NO: 2678919 - DNA, 25 bp, Homo sapien
gtagatacacagagcagattttaca

SEQ ID NO: 2678920 - DNA, 25 bp, Homo sapien
gatagcatcgtcagttttgtaatat

SEQ ID NO: 2678921 - DNA, 25 bp, Homo sapien
gcattgcttaagtttcctgttgacc

SEQ ID NO: 2678922 - DNA, 25 bp, Homo sapien
gccctctgatagcatcgtcagtttt

SEQ ID NO: 2678923 - DNA, 25 bp, Homo sapien
gacagactggtaagaacatgccctc

SEQ ID NO: 2678924 - DNA, 25 bp, Homo sapien
gccgatataacttgccatgtaaata

SEQ ID NO: 2678925 - DNA, 25 bp, Homo sapien
ctctgatagcctcagataaagtgga

SEQ ID NO: 2678926 - DNA, 25 bp, Homo sapien
aagtggatgggcctataacactcat

SEQ ID NO: 2678927 - DNA, 25 bp, Homo sapien
atttgccgatataacttgccatgta

SEQ ID NO: 2678928 - DNA, 25 bp, Homo sapien
cagggtttcagagaatctgtcaagt

SEQ ID NO: 2678929 - DNA, 25 bp, Homo sapien
gtagtatgaataccttggtcacctt

SEQ ID NO: 2678930 - DNA, 25 bp, Homo sapien
tggagcaggtagtatgaataccttg

SEQ ID NO: 2678931 - DNA, 25 bp, Homo sapien
tccttggaatgagggcttaagatac

SEQ ID NO: 2678932 - DNA, 25 bp, Homo sapien
catatacactgtatctccctgttct

SEQ ID NO: 2678933 - DNA, 25 bp, Homo sapien
tcttttgcatatacactgtatctcc

SEQ ID NO: 2678934 - DNA, 25 bp, Homo sapien
tttgcatatacactgtatctccctg

SEQ ID NO: 2678935 - DNA, 25 bp, Homo sapien
cactgtatctccctgttctttttcc

SEQ ID NO: 2678936 - DNA, 25 bp, Homo sapien
catagaatttactcttcaaaggcac

SEQ ID NO: 2678937 - DNA, 25 bp, Homo sapien
ctgaacatgaggaaatccgacctac

SEQ ID NO: 2678938 - DNA, 25 bp, Homo sapien
caaggggcccaacctgaacatgagg

SEQ ID NO: 2678939 - DNA, 25 bp, Homo sapien
tgtcatagaatttactcttcaaagg

SEQ ID NO: 2678940 - DNA, 25 bp, Homo sapien
acaccgggccaactactctgctggg

SEQ ID NO: 2678941 - DNA, 25 bp, Homo sapien
gggagaagggtatcctgactgtcct

SEQ ID NO: 2678942 - DNA, 25 bp, Homo sapien
ggccttgctctctcactagctttta

SEQ ID NO: 2678943 - DNA, 25 bp, Homo sapien
gggtatatttaggccttgctctctc

SEQ ID NO: 2678944 - DNA, 25 bp, Homo sapien
gagccttgccaagactccggatctc

SEQ ID NO: 2678945 - DNA, 25 bp, Homo sapien
gagcagactctgaaatggaccgaac

SEQ ID NO: 2678946 - DNA, 25 bp, Homo sapien
gaaatggaccgaacagtggactgag

SEQ ID NO: 2678947 - DNA, 25 bp, Homo sapien
tttgaggacaaaggtgaaagagcag

SEQ ID NO: 2678948 - DNA, 25 bp, Homo sapien
ctttccagtgtccagcaccttcctt

SEQ ID NO: 2678949 - DNA, 25 bp, Homo sapien
tttccagtgtccagcaccttccttt

SEQ ID NO: 2678950 - DNA, 25 bp, Homo sapien
ttccagtgtccagcaccttcctttg

SEQ ID NO: 2678951 - DNA, 25 bp, Homo sapien
tttctgtacgtctaatctcagatgc

SEQ ID NO: 2678952 - DNA, 25 bp, Homo sapien
tttcagtttctgtacgtctaatctc

SEQ ID NO: 2678953 - DNA, 25 bp, Homo sapien
tcagtttctgtacgtctaatctcag

SEQ ID NO: 2678954 - DNA, 25 bp, Homo sapien
cagtttctgtacgtctaatctcaga

SEQ ID NO: 2678955 - DNA, 25 bp, Homo sapien
catcctgcaggcagttttgcagatg

SEQ ID NO: 2678956 - DNA, 25 bp, Homo sapien
ccactgagctgttgattgtcttaga

SEQ ID NO: 2678957 - DNA, 25 bp, Homo sapien
tgaacgttccctctctataaggtag

SEQ ID NO: 2678958 - DNA, 25 bp, Homo sapien
tattagggccagtcttgaacgttcc

SEQ ID NO: 2678959 - DNA, 25 bp, Homo sapien
cacagtcgcatagatttagctgcaa

SEQ ID NO: 2678960 - DNA, 25 bp, Homo sapien
cataagcattctttatcagttaagg

SEQ ID NO: 2678961 - DNA, 25 bp, Homo sapien
tgcagtagagtctgttgaagtcaaa

SEQ ID NO: 2678962 - DNA, 25 bp, Homo sapien
tgttgaagtcaaaaggcccagtccc

SEQ ID NO: 2678963 - DNA, 25 bp, Homo sapien
tcagttaaggtatcattgaaaaagg

SEQ ID NO: 2678964 - DNA, 25 bp, Homo sapien
actgtggccttgagattcttgccac

SEQ ID NO: 2678965 - DNA, 25 bp, Homo sapien
cactgtggccttgagattcttgcca

SEQ ID NO: 2678966 - DNA, 25 bp, Homo sapien
agcatgggctgctgtgctgttccca

SEQ ID NO: 2678967 - DNA, 25 bp, Homo sapien
tgctgtgctgttcccacactggtta

SEQ ID NO: 2678968 - DNA, 25 bp, Homo sapien
gcagcttggggagccagcatgggct

SEQ ID NO: 2678969 - DNA, 25 bp, Homo sapien
caggggaggcgtgtggggcaaggag

SEQ ID NO: 2678970 - DNA, 25 bp, Homo sapien
tgctttcaccatttgcgtgttgagt

SEQ ID NO: 2678971 - DNA, 25 bp, Homo sapien
ggccatagaggcaactctccatgct

SEQ ID NO: 2678972 - DNA, 25 bp, Homo sapien
catttgcgtgttgagtaactcctga

SEQ ID NO: 2678973 - DNA, 25 bp, Homo sapien
tccacttctgaattaggccatagag

SEQ ID NO: 2678974 - DNA, 25 bp, Homo sapien
gaaaagtgatgagaagcccgtagaa

SEQ ID NO: 2678975 - DNA, 25 bp, Homo sapien
gcaaaagtagcataagtagtccgtg

SEQ ID NO: 2678976 - DNA, 25 bp, Homo sapien
gcccgtagaactgggtgctgaaaag

SEQ ID NO: 2678977 - DNA, 25 bp, Homo sapien
gaagtctgtgtgcttagtgtctaca

SEQ ID NO: 2678978 - DNA, 25 bp, Homo sapien
ttggctcccacgtgcgatgcgtttg

SEQ ID NO: 2678979 - DNA, 25 bp, Homo sapien
tacgttcaggcaaggtggtctcttc

SEQ ID NO: 2678980 - DNA, 25 bp, Homo sapien
ttccctgatcggtaaaatacacgga

SEQ ID NO: 2678981 - DNA, 25 bp, Homo sapien
cattcccgatgagtttaagccgacg

SEQ ID NO: 2678982 - DNA, 25 bp, Homo sapien
tccttctctggaatccgaggcgcgg

SEQ ID NO: 2678983 - DNA, 25 bp, Homo sapien
gcaatggctcgtccgtgaaacgcga

SEQ ID NO: 2678984 - DNA, 25 bp, Homo sapien
aaacttcggcgtgaagtgcagctcc

SEQ ID NO: 2678985 - DNA, 25 bp, Homo sapien
agagtgcctgcatcctccgtttgcg

SEQ ID NO: 2678986 - DNA, 25 bp, Homo sapien
ctggactcgggtccttaattactat

SEQ ID NO: 2678987 - DNA, 25 bp, Homo sapien
gaactggaaggatgcctgctctgct

SEQ ID NO: 2678988 - DNA, 25 bp, Homo sapien
ccgtggccagcagctagacagctgt

SEQ ID NO: 2678989 - DNA, 25 bp, Homo sapien
tagacagctgtgttcaatcagaaac

SEQ ID NO: 2678990 - DNA, 25 bp, Homo sapien
agaggagctggtccggtaattgatc

SEQ ID NO: 2678991 - DNA, 25 bp, Homo sapien
gagctggtccggtaattgatcagaa

SEQ ID NO: 2678992 - DNA, 25 bp, Homo sapien
gagttcttcatgttgtagttccttg

SEQ ID NO: 2678993 - DNA, 25 bp, Homo sapien
ccttgagcaaatgatgtccgttatg

SEQ ID NO: 2678994 - DNA, 25 bp, Homo sapien
gcaaactcagaaattgcaagccaag

SEQ ID NO: 2678995 - DNA, 25 bp, Homo sapien
agcaaactcagaaattgcaagccaa

SEQ ID NO: 2678996 - DNA, 25 bp, Homo sapien
caaactcagaaattgcaagccaagc

SEQ ID NO: 2678997 - DNA, 25 bp, Homo sapien
tagcaaactcagaaattgcaagcca

SEQ ID NO: 2678998 - DNA, 25 bp, Homo sapien
agagaaccagttgcttcaggttcca

SEQ ID NO: 2678999 - DNA, 25 bp, Homo sapien
agaaccagttgcttcaggttccaga

SEQ ID NO: 2679000 - DNA, 25 bp, Homo sapien
gagaaccagttgcttcaggttccag

SEQ ID NO: 2679001 - DNA, 25 bp, Homo sapien
gtggcctattgaaacaccaggcaag

SEQ ID NO: 2679002 - DNA, 25 bp, Homo sapien
tgcctccaaagtggcctattgaaac

SEQ ID NO: 2679003 - DNA, 25 bp, Homo sapien
agtgcttggttagttcctcatgatg

SEQ ID NO: 2679004 - DNA, 25 bp, Homo sapien
gggctgcatgcataccgtcatgaca

SEQ ID NO: 2679005 - DNA, 25 bp, Homo sapien
tagtctctgtcatggatcagggcaa

SEQ ID NO: 2679006 - DNA, 25 bp, Homo sapien
gggcagagggataatctcttcccta

SEQ ID NO: 2679007 - DNA, 25 bp, Homo sapien
tgtatcttttaggtaatagtctctg

SEQ ID NO: 2679008 - DNA, 25 bp, Homo sapien
tagccctgtcccacttgtatctttt

SEQ ID NO: 2679009 - DNA, 25 bp, Homo sapien
tggcttttagtcattcttgacgttt

SEQ ID NO: 2679010 - DNA, 25 bp, Homo sapien
gaatgttggcttttagtcattcttg

SEQ ID NO: 2679011 - DNA, 25 bp, Homo sapien
atgttggcttttagtcattcttgac

SEQ ID NO: 2679012 - DNA, 25 bp, Homo sapien
cttgaatgttggcttttagtcattc

SEQ ID NO: 2679013 - DNA, 25 bp, Homo sapien
cctgatggcaatcccgctgggggct

SEQ ID NO: 2679014 - DNA, 25 bp, Homo sapien
gggggcttacagctcgctccctctg

SEQ ID NO: 2679015 - DNA, 25 bp, Homo sapien
tcccgctgggggcttacagctcgct

SEQ ID NO: 2679016 - DNA, 25 bp, Homo sapien
tggcaatcccgctgggggcttacag

SEQ ID NO: 2679017 - DNA, 25 bp, Homo sapien
attctctttgtaaggtgcgtgtaac

SEQ ID NO: 2679018 - DNA, 25 bp, Homo sapien
catgcaggacttctggttgaacctg

SEQ ID NO: 2679019 - DNA, 25 bp, Homo sapien
tgctggtaggatatcagtgactcta

SEQ ID NO: 2679020 - DNA, 25 bp, Homo sapien
gagatccacgcaaacctcactgagg

SEQ ID NO: 2679021 - DNA, 25 bp, Homo sapien
ctgggcctgctgtcacgtggattct

SEQ ID NO: 2679022 - DNA, 25 bp, Homo sapien
ctatttataagcacactggtgtgca

SEQ ID NO: 2679023 - DNA, 25 bp, Homo sapien
gggcctgctgtcacgtggattctta

SEQ ID NO: 2679024 - DNA, 25 bp, Homo sapien
tgctgtcacgtggattcttagtttt

SEQ ID NO: 2679025 - DNA, 25 bp, Homo sapien
ccagactcacttgatgatgtcttat

SEQ ID NO: 2679026 - DNA, 25 bp, Homo sapien
cagactcacttgatgatgtcttatt

SEQ ID NO: 2679027 - DNA, 25 bp, Homo sapien
tgagcttctgcctgggttccgccct

SEQ ID NO: 2679028 - DNA, 25 bp, Homo sapien
ctttgagcttctgcctgggttccgc

SEQ ID NO: 2679029 - DNA, 25 bp, Homo sapien
ctattttgaggatgagttttgtgga

SEQ ID NO: 2679030 - DNA, 25 bp, Homo sapien
aaggctattttgaggatgagttttg

SEQ ID NO: 2679031 - DNA, 25 bp, Homo sapien
tttgtttgtggagaggtagttactc

SEQ ID NO: 2679032 - DNA, 25 bp, Homo sapien
gagaggtagttactccaaacaggag

SEQ ID NO: 2679033 - DNA, 25 bp, Homo sapien
aagaagatgtgtccctcagagtccc

SEQ ID NO: 2679034 - DNA, 25 bp, Homo sapien
ggctagacctgaagaagatgtgtcc

SEQ ID NO: 2679035 - DNA, 25 bp, Homo sapien
atcctaacaaattggctagacctga

SEQ ID NO: 2679036 - DNA, 25 bp, Homo sapien
aaattggctagacctgaagaagatg

SEQ ID NO: 2679037 - DNA, 25 bp, Homo sapien
ccccttaaattcttccttgagattg

SEQ ID NO: 2679038 - DNA, 25 bp, Homo sapien
ccctaggattacacttgggatcaac

SEQ ID NO: 2679039 - DNA, 25 bp, Homo sapien
gttccctaggattacacttgggatc

SEQ ID NO: 2679040 - DNA, 25 bp, Homo sapien
ttgtgttcttcagatggggaggcct

SEQ ID NO: 2679041 - DNA, 25 bp, Homo sapien
tgaacagaacaccaccaactgatct

SEQ ID NO: 2679042 - DNA, 25 bp, Homo sapien
aactgatctagccagggcctgaaaa

SEQ ID NO: 2679043 - DNA, 25 bp, Homo sapien
aatatgtgtaccactcttgagtcaa

SEQ ID NO: 2679044 - DNA, 25 bp, Homo sapien
tggatagactttaggccatgaccca

SEQ ID NO: 2679045 - DNA, 25 bp, Homo sapien
gaagctgatttaacatcaagtttat

SEQ ID NO: 2679046 - DNA, 25 bp, Homo sapien
tggctttctcctgttcaaaccttgc

SEQ ID NO: 2679047 - DNA, 25 bp, Homo sapien
tcctgttcaaaccttgcagcgataa

SEQ ID NO: 2679048 - DNA, 25 bp, Homo sapien
accttgcagcgataatatttggaaa

SEQ ID NO: 2679049 - DNA, 25 bp, Homo sapien
tttcagtattatcctagatcctcag

SEQ ID NO: 2679050 - DNA, 25 bp, Homo sapien
ctttcagtattatcctagatcctca

SEQ ID NO: 2679051 - DNA, 25 bp, Homo sapien
ttcagtattatcctagatcctcagg

SEQ ID NO: 2679052 - DNA, 25 bp, Homo sapien
cagctctgggcaagatccataaact

SEQ ID NO: 2679053 - DNA, 25 bp, Homo sapien
aaagcattaagctttaaagtgctag

SEQ ID NO: 2679054 - DNA, 25 bp, Homo sapien
ctgggcaagatccataaacttttaa

SEQ ID NO: 2679055 - DNA, 25 bp, Homo sapien
aaagtgctagaaatcttgtgcccca

SEQ ID NO: 2679056 - DNA, 25 bp, Homo sapien
gaaggcaccgctgtccaccttgggc

SEQ ID NO: 2679057 - DNA, 25 bp, Homo sapien
cttcggctgggccacgggctcgcgg

SEQ ID NO: 2679058 - DNA, 25 bp, Homo sapien
ccgcaacggctcagtgacagcaaga

SEQ ID NO: 2679059 - DNA, 25 bp, Homo sapien
cccggggcagttgcgtgaccctgct

SEQ ID NO: 2679060 - DNA, 25 bp, Homo sapien
ggcaaggtctacatcgtcatggagc

SEQ ID NO: 2679061 - DNA, 25 bp, Homo sapien
caagccgtcgactatggagacagag

SEQ ID NO: 2679062 - DNA, 25 bp, Homo sapien
caaatgtccaggcagtcggagatcc

SEQ ID NO: 2679063 - DNA, 25 bp, Homo sapien
tgaggacgaagctcgcaagaagttc

SEQ ID NO: 2679064 - DNA, 25 bp, Homo sapien
tcctggcaccatggatgacgctgct

SEQ ID NO: 2679065 - DNA, 25 bp, Homo sapien
cagcaagacacgaggccactttctg

SEQ ID NO: 2679066 - DNA, 25 bp, Homo sapien
tatccaggatgtaaatgagcacact

SEQ ID NO: 2679067 - DNA, 25 bp, Homo sapien
aaatgttccactccagagtcttggc

SEQ ID NO: 2679068 - DNA, 25 bp, Homo sapien
ctcttcttggccctgctctgcactc

SEQ ID NO: 2679069 - DNA, 25 bp, Homo sapien
cctgctctgcactcctgagggtcac

SEQ ID NO: 2679070 - DNA, 25 bp, Homo sapien
ttcttgacacaccactcttcttggc

SEQ ID NO: 2679071 - DNA, 25 bp, Homo sapien
ttgacacaccactcttcttggccct

SEQ ID NO: 2679072 - DNA, 25 bp, Homo sapien
cactgccagaagaaatgatggttgc

SEQ ID NO: 2679073 - DNA, 25 bp, Homo sapien
caaccacgcacaaaggactggcagt

SEQ ID NO: 2679074 - DNA, 25 bp, Homo sapien
tggacacagaaccagtcacagcaga

SEQ ID NO: 2679075 - DNA, 25 bp, Homo sapien
gcatctcaaactgcgtgactccggg

SEQ ID NO: 2679076 - DNA, 25 bp, Homo sapien
ctgacaacaagtgcccaaagggata

SEQ ID NO: 2679077 - DNA, 25 bp, Homo sapien
ggacagccccagaagatcctgacaa

SEQ ID NO: 2679078 - DNA, 25 bp, Homo sapien
gtctctgtgtcgatgttactgctgc

SEQ ID NO: 2679079 - DNA, 25 bp, Homo sapien
gaatcaatagaagggactgtctctg

SEQ ID NO: 2679080 - DNA, 25 bp, Homo sapien
tgtgcattcctgttctatcagacat

SEQ ID NO: 2679081 - DNA, 25 bp, Homo sapien
gtttggagggttgtgcattcctgtt

SEQ ID NO: 2679082 - DNA, 25 bp, Homo sapien
tggagggttgtgcattcctgttcta

SEQ ID NO: 2679083 - DNA, 25 bp, Homo sapien
gggttgtgcattcctgttctatcag

SEQ ID NO: 2679084 - DNA, 25 bp, Homo sapien
ggagcagcctaagttgtgcattaca

SEQ ID NO: 2679085 - DNA, 25 bp, Homo sapien
gttgacaccggccattgaagacttg

SEQ ID NO: 2679086 - DNA, 25 bp, Homo sapien
gaaggcaatcgcaacattttctggt

SEQ ID NO: 2679087 - DNA, 25 bp, Homo sapien
aattgccttggatgaaggagcagcc

SEQ ID NO: 2679088 - DNA, 25 bp, Homo sapien
agaggcggtatttaagcttcctgcc

SEQ ID NO: 2679089 - DNA, 25 bp, Homo sapien
cccgcacttcctacagaggcggtat

SEQ ID NO: 2679090 - DNA, 25 bp, Homo sapien
gcctcccggcttggccaaataatta

SEQ ID NO: 2679091 - DNA, 25 bp, Homo sapien
gccaaataattacttctgcccaaat

SEQ ID NO: 2679092 - DNA, 25 bp, Homo sapien
caagttgctcagaagctcgcgggaa

SEQ ID NO: 2679093 - DNA, 25 bp, Homo sapien
gagacatctccttaggatgcgcact

SEQ ID NO: 2679094 - DNA, 25 bp, Homo sapien
ttcccagcgctgtctttgtctaggc

SEQ ID NO: 2679095 - DNA, 25 bp, Homo sapien
aaaccgacaggagcgagatcagtcc

SEQ ID NO: 2679096 - DNA, 25 bp, Homo sapien
tcgggcgattccagagcgcccatct

SEQ ID NO: 2679097 - DNA, 25 bp, Homo sapien
cgttgccggatgcacaatgctgaca

SEQ ID NO: 2679098 - DNA, 25 bp, Homo sapien
tgtgttcccgttgccacccttagct

SEQ ID NO: 2679099 - DNA, 25 bp, Homo sapien
ccggagaggtggaatccctcgcccg

SEQ ID NO: 2679100 - DNA, 25 bp, Homo sapien
tcataaaaaggccagtcattccggt

SEQ ID NO: 2679101 - DNA, 25 bp, Homo sapien
tcattccggttctcattggtggcta

SEQ ID NO: 2679102 - DNA, 25 bp, Homo sapien
caatgccacacagcgtgcagactct

SEQ ID NO: 2679103 - DNA, 25 bp, Homo sapien
ccaggtttcttgacaggtgtcaaaa

SEQ ID NO: 2679104 - DNA, 25 bp, Homo sapien
gaatagtgcagtgtttaaaggctcc

SEQ ID NO: 2679105 - DNA, 25 bp, Homo sapien
gggaaattctagtgatgcctggcca

SEQ ID NO: 2679106 - DNA, 25 bp, Homo sapien
tctgtagtgtggatcaaatgagacc

SEQ ID NO: 2679107 - DNA, 25 bp, Homo sapien
tgcctggccagtagagtgagccgtt

SEQ ID NO: 2679108 - DNA, 25 bp, Homo sapien
caaggcttcaaaggtaagtgtccca

SEQ ID NO: 2679109 - DNA, 25 bp, Homo sapien
cccaagggagagagccaagtgcaat

SEQ ID NO: 2679110 - DNA, 25 bp, Homo sapien
taagatccagggctagaacagctgt

SEQ ID NO: 2679111 - DNA, 25 bp, Homo sapien
cagggtctccaatgcagttgcagca

SEQ ID NO: 2679112 - DNA, 25 bp, Homo sapien
tgcgggtgtgttgcgtaggcattag

SEQ ID NO: 2679113 - DNA, 25 bp, Homo sapien
gatgcgggtgtgttgcgtaggcatt

SEQ ID NO: 2679114 - DNA, 25 bp, Homo sapien
atgcgggtgtgttgcgtaggcatta

SEQ ID NO: 2679115 - DNA, 25 bp, Homo sapien
cttcttggtccaccaggagaacacc

SEQ ID NO: 2679116 - DNA, 25 bp, Homo sapien
tgactgctttgcctggtagaggaga

SEQ ID NO: 2679117 - DNA, 25 bp, Homo sapien
tgaagcaggttagccttcttggtcc

SEQ ID NO: 2679118 - DNA, 25 bp, Homo sapien
cctggtagaggagataaatgaagca

SEQ ID NO: 2679119 - DNA, 25 bp, Homo sapien
gccgcccaccaagggtcgctcctca

SEQ ID NO: 2679120 - DNA, 25 bp, Homo sapien
tatggtgcggttctcttcccgcgcc

SEQ ID NO: 2679121 - DNA, 25 bp, Homo sapien
taaaggaggctgtctgcggagctat

SEQ ID NO: 2679122 - DNA, 25 bp, Homo sapien
gccgctgcgcgcctaaaggaggctg

SEQ ID NO: 2679123 - DNA, 25 bp, Homo sapien
ggaagctccggagacggcctgtgtt

SEQ ID NO: 2679124 - DNA, 25 bp, Homo sapien
caccgccacagcagaagtgaagcct

SEQ ID NO: 2679125 - DNA, 25 bp, Homo sapien
gaagcctgcgccattgatatcacgg

SEQ ID NO: 2679126 - DNA, 25 bp, Homo sapien
agaaaggcctcagtcaccgccacag

SEQ ID NO: 2679127 - DNA, 25 bp, Homo sapien
gccaatgacaaagaccgtgggaatc

SEQ ID NO: 2679128 - DNA, 25 bp, Homo sapien
atgacaaagaccgtgggaatccggg

SEQ ID NO: 2679129 - DNA, 25 bp, Homo sapien
ccaatgacaaagaccgtgggaatcc

SEQ ID NO: 2679130 - DNA, 25 bp, Homo sapien
caatgacaaagaccgtgggaatccg

SEQ ID NO: 2679131 - DNA, 25 bp, Homo sapien
tggtctctccgcacgggagcggcca

SEQ ID NO: 2679132 - DNA, 25 bp, Homo sapien
agagatggtctctccgcacgggagc

SEQ ID NO: 2679133 - DNA, 25 bp, Homo sapien
tgccctgaagagatggtctctccgc

SEQ ID NO: 2679134 - DNA, 25 bp, Homo sapien
gaagagatggtctctccgcacggga

SEQ ID NO: 2679135 - DNA, 25 bp, Homo sapien
gggagacgctgctcggcctggacat

SEQ ID NO: 2679136 - DNA, 25 bp, Homo sapien
ccgcggggagacgctgctcggcctg

SEQ ID NO: 2679137 - DNA, 25 bp, Homo sapien
ggggagacgctgctcggcctggaca

SEQ ID NO: 2679138 - DNA, 25 bp, Homo sapien
gcggggagacgctgctcggcctgga

SEQ ID NO: 2679139 - DNA, 25 bp, Homo sapien
tcaatgcgaatgtccttcagcccct

SEQ ID NO: 2679140 - DNA, 25 bp, Homo sapien
ctcatcaatgcgaatgtccttcagc

SEQ ID NO: 2679141 - DNA, 25 bp, Homo sapien
gggccacaaggcgaggggccgccgc

SEQ ID NO: 2679142 - DNA, 25 bp, Homo sapien
aatgcgaatgtccttcagccccttg

SEQ ID NO: 2679143 - DNA, 25 bp, Homo sapien
tctggtccccgtatcggaagcgctc

SEQ ID NO: 2679144 - DNA, 25 bp, Homo sapien
gcgatattgactgcgatcttcacct

SEQ ID NO: 2679145 - DNA, 25 bp, Homo sapien
tctctggtccccgtatcggaagcgc

SEQ ID NO: 2679146 - DNA, 25 bp, Homo sapien
ggaagcgctccagcgcgatattgac

SEQ ID NO: 2679147 - DNA, 25 bp, Homo sapien
gaccaaaccaagagactgactgagt

SEQ ID NO: 2679148 - DNA, 25 bp, Homo sapien
gactgagtcgatgaataaaggctct

SEQ ID NO: 2679149 - DNA, 25 bp, Homo sapien
ccaagagactgactgagtcgatgaa

SEQ ID NO: 2679150 - DNA, 25 bp, Homo sapien
gctctttcagtactggtcaaagaag

SEQ ID NO: 2679151 - DNA, 25 bp, Homo sapien
taaaagtaaccgatgcattttggca

SEQ ID NO: 2679152 - DNA, 25 bp, Homo sapien
tacagttgagagcatcataacacct

SEQ ID NO: 2679153 - DNA, 25 bp, Homo sapien
gagcccaaatctcaaatgactgctt

SEQ ID NO: 2679154 - DNA, 25 bp, Homo sapien
agatgctagctaagtgaaattcaca

SEQ ID NO: 2679155 - DNA, 25 bp, Homo sapien
cattgcatgagctgtttctgatcca

SEQ ID NO: 2679156 - DNA, 25 bp, Homo sapien
cacagttaggtatctatttgctccc

SEQ ID NO: 2679157 - DNA, 25 bp, Homo sapien
gaaatctttgaattaggctcctaac

SEQ ID NO: 2679158 - DNA, 25 bp, Homo sapien
gagtcaaattacaggtcatcattgc

SEQ ID NO: 2679159 - DNA, 25 bp, Homo sapien
tgatcaacacggaaaaagaagtgtt

SEQ ID NO: 2679160 - DNA, 25 bp, Homo sapien
gaacctcagacatatttctggtaca

SEQ ID NO: 2679161 - DNA, 25 bp, Homo sapien
tatcaattagaaagtgaacctcaga

SEQ ID NO: 2679162 - DNA, 25 bp, Homo sapien
taagatctgtcacgtacattacgaa

SEQ ID NO: 2679163 - DNA, 25 bp, Homo sapien
gaatctgaggtatgccattgttgag

SEQ ID NO: 2679164 - DNA, 25 bp, Homo sapien
caaacactggtaaagactgcctaaa

SEQ ID NO: 2679165 - DNA, 25 bp, Homo sapien
tgttgagtcgcccacttgtcttgct

SEQ ID NO: 2679166 - DNA, 25 bp, Homo sapien
gacccagtttctcctacaatcaaaa

SEQ ID NO: 2679167 - DNA, 25 bp, Homo sapien
tcatacatgtgctggcccctaggat

SEQ ID NO: 2679168 - DNA, 25 bp, Homo sapien
tgatgggaccgcagctacaactctt

SEQ ID NO: 2679169 - DNA, 25 bp, Homo sapien
tcactgggtcaggatctgcgggtca

SEQ ID NO: 2679170 - DNA, 25 bp, Homo sapien
aaagctgagctcgtagacacagagg

SEQ ID NO: 2679171 - DNA, 25 bp, Homo sapien
gctttctaatcggatctgataacca

SEQ ID NO: 2679172 - DNA, 25 bp, Homo sapien
ccaatcgtcttggttgagtacaaaa

SEQ ID NO: 2679173 - DNA, 25 bp, Homo sapien
gataaccaattgtttgaccaatcct

SEQ ID NO: 2679174 - DNA, 25 bp, Homo sapien
gtctctctgcggcaactctttcagc

SEQ ID NO: 2679175 - DNA, 25 bp, Homo sapien
cacgataacatgtgtcacagtcgac

SEQ ID NO: 2679176 - DNA, 25 bp, Homo sapien
gacaacgtactatctcctgccatca

SEQ ID NO: 2679177 - DNA, 25 bp, Homo sapien
gcaataccccattagtacaaaatgt

SEQ ID NO: 2679178 - DNA, 25 bp, Homo sapien
catcaatgtacgaagcaatacccca

SEQ ID NO: 2679179 - DNA, 25 bp, Homo sapien
aatcactaaatcgatccctttcatg

SEQ ID NO: 2679180 - DNA, 25 bp, Homo sapien
caacaaatctcttaactttgtaagt

SEQ ID NO: 2679181 - DNA, 25 bp, Homo sapien
tcaaagttgggtgcttttgcaacaa

SEQ ID NO: 2679182 - DNA, 25 bp, Homo sapien
aaatcgatccctttcatgcacttca

SEQ ID NO: 2679183 - DNA, 25 bp, Homo sapien
aaagagatttacatccaaggcagca

SEQ ID NO: 2679184 - DNA, 25 bp, Homo sapien
cttataaagagatttacatccaagg

SEQ ID NO: 2679185 - DNA, 25 bp, Homo sapien
cactggacaacttccaaaatatctt

SEQ ID NO: 2679186 - DNA, 25 bp, Homo sapien
tatcactggacaacttccaaaatat

SEQ ID NO: 2679187 - DNA, 25 bp, Homo sapien
tctttgtttgtatatccagttgttc

SEQ ID NO: 2679188 - DNA, 25 bp, Homo sapien
atatcagtaattcagtgcttcccaa

SEQ ID NO: 2679189 - DNA, 25 bp, Homo sapien
cagtgcttcccaatgaaatcagcat

SEQ ID NO: 2679190 - DNA, 25 bp, Homo sapien
cagtaattcagtgcttcccaatgaa

SEQ ID NO: 2679191 - DNA, 25 bp, Homo sapien
ttcagtgcttcccaatgaaatcagc

SEQ ID NO: 2679192 - DNA, 25 bp, Homo sapien
aaagaaagaatatgtagacaaatca

SEQ ID NO: 2679193 - DNA, 25 bp, Homo sapien
aagaaagaatatgtagacaaatcat

SEQ ID NO: 2679194 - DNA, 25 bp, Homo sapien
catccagtaagtcatactcatcagt

SEQ ID NO: 2679195 - DNA, 25 bp, Homo sapien
ctgagattcaggcttgaaactattt

SEQ ID NO: 2679196 - DNA, 25 bp, Homo sapien
tgagtaccattctgtaagtgtggtt

SEQ ID NO: 2679197 - DNA, 25 bp, Homo sapien
tctgtaagtgtggtttgttgtttct

SEQ ID NO: 2679198 - DNA, 25 bp, Homo sapien
tcaaggcaattcacatctttttcag

SEQ ID NO: 2679199 - DNA, 25 bp, Homo sapien
tattaaccatggttcaaggcaattc

SEQ ID NO: 2679200 - DNA, 25 bp, Homo sapien
tcagaaaggcaagcatccatttcct

SEQ ID NO: 2679201 - DNA, 25 bp, Homo sapien
catatatcagaaaggcaagcatcca

SEQ ID NO: 2679202 - DNA, 25 bp, Homo sapien
caaccatcagagctgttgcactggt

SEQ ID NO: 2679203 - DNA, 25 bp, Homo sapien
ttggctcccatactgattaactgtt

SEQ ID NO: 2679204 - DNA, 25 bp, Homo sapien
gctttactatggacattggctccca

SEQ ID NO: 2679205 - DNA, 25 bp, Homo sapien
gccacgtcctgcagcaaccatcaga

SEQ ID NO: 2679206 - DNA, 25 bp, Homo sapien
aagtgtttagcccaatccaatgcca

SEQ ID NO: 2679207 - DNA, 25 bp, Homo sapien
gtgtttagcccaatccaatgccatc

SEQ ID NO: 2679208 - DNA, 25 bp, Homo sapien
tttcagtctgcccaaagtgtttagc

SEQ ID NO: 2679209 - DNA, 25 bp, Homo sapien
cagtctgcccaaagtgtttagccca

SEQ ID NO: 2679210 - DNA, 25 bp, Homo sapien
cagatacggcaaatttgggtaggcc

SEQ ID NO: 2679211 - DNA, 25 bp, Homo sapien
gttcttgaacaagcagacaataagc

SEQ ID NO: 2679212 - DNA, 25 bp, Homo sapien
ggtaggcctcatgaagacaaaatct

SEQ ID NO: 2679213 - DNA, 25 bp, Homo sapien
caggttaaagaggatggacattgcg

SEQ ID NO: 2679214 - DNA, 25 bp, Homo sapien
cacttccatttgtttgaaccagaga

SEQ ID NO: 2679215 - DNA, 25 bp, Homo sapien
tagatttccaaattccagtgtagca

SEQ ID NO: 2679216 - DNA, 25 bp, Homo sapien
gcatcacaactatggcagatattgt

SEQ ID NO: 2679217 - DNA, 25 bp, Homo sapien
gaagatgcatgatcaaatccaagtc

SEQ ID NO: 2679218 - DNA, 25 bp, Homo sapien
gcaaaccgcttgtcatcaaacagga

SEQ ID NO: 2679219 - DNA, 25 bp, Homo sapien
gtgtactgtcagcaaaccgcttgtc

SEQ ID NO: 2679220 - DNA, 25 bp, Homo sapien
aacaatttcgtcatatccaggcaga

SEQ ID NO: 2679221 - DNA, 25 bp, Homo sapien
caggatgcgatctctcagtccaaca

SEQ ID NO: 2679222 - DNA, 25 bp, Homo sapien
aatactttcttttgatcggatgttt

SEQ ID NO: 2679223 - DNA, 25 bp, Homo sapien
cttttgatcggatgtttgcatattt

SEQ ID NO: 2679224 - DNA, 25 bp, Homo sapien
tttcttttgatcggatgtttgcata

SEQ ID NO: 2679225 - DNA, 25 bp, Homo sapien
atactttcttttgatcggatgtttg

SEQ ID NO: 2679226 - DNA, 25 bp, Homo sapien
gactgtgatgctggtttcagcaata

SEQ ID NO: 2679227 - DNA, 25 bp, Homo sapien
actgtgatgctggtttcagcaatat

SEQ ID NO: 2679228 - DNA, 25 bp, Homo sapien
aatttagctgctggttatcccatgg

SEQ ID NO: 2679229 - DNA, 25 bp, Homo sapien
gaactgagtatcttttgaacacctg

SEQ ID NO: 2679230 - DNA, 25 bp, Homo sapien
tagactagctgagttccaatgaaac

SEQ ID NO: 2679231 - DNA, 25 bp, Homo sapien
gaaggcagcaaccatagagaaaagg

SEQ ID NO: 2679232 - DNA, 25 bp, Homo sapien
ccgctgtatggcactagctttggaa

SEQ ID NO: 2679233 - DNA, 25 bp, Homo sapien
ctgcctttccgctgtatggcactag

SEQ ID NO: 2679234 - DNA, 25 bp, Homo sapien
tagctttggaaatccataccatttt

SEQ ID NO: 2679235 - DNA, 25 bp, Homo sapien
tggcactagctttggaaatccatac

SEQ ID NO: 2679236 - DNA, 25 bp, Homo sapien
gagctcacaacccagataggcaatc

SEQ ID NO: 2679237 - DNA, 25 bp, Homo sapien
ttacacagctccaagggaatgccat

SEQ ID NO: 2679238 - DNA, 25 bp, Homo sapien
ggcccagtgattagagtcatacaaa

SEQ ID NO: 2679239 - DNA, 25 bp, Homo sapien
gtcactatatcagctaatggcaggg

SEQ ID NO: 2679240 - DNA, 25 bp, Homo sapien
gaaaacaaattccaggtctacatcg

SEQ ID NO: 2679241 - DNA, 25 bp, Homo sapien
agttccggagtctgaaattccaaca

SEQ ID NO: 2679242 - DNA, 25 bp, Homo sapien
tggcattctcaaaagttccggagtc

SEQ ID NO: 2679243 - DNA, 25 bp, Homo sapien
ttctggaatcggagtctactgaaca

SEQ ID NO: 2679244 - DNA, 25 bp, Homo sapien
ggttcaggagctttcataagaaaat

SEQ ID NO: 2679245 - DNA, 25 bp, Homo sapien
acagcttggtatgtaagcaaagttc

SEQ ID NO: 2679246 - DNA, 25 bp, Homo sapien
taactggggctaacagcttggtatg

SEQ ID NO: 2679247 - DNA, 25 bp, Homo sapien
tggtggaggttcaggagctttcata

SEQ ID NO: 2679248 - DNA, 25 bp, Homo sapien
gccatatggtcactgaaagctcctg

SEQ ID NO: 2679249 - DNA, 25 bp, Homo sapien
ggatctcgataagctagtgtgcaag

SEQ ID NO: 2679250 - DNA, 25 bp, Homo sapien
gatgtggttctactggcaagtcagc

SEQ ID NO: 2679251 - DNA, 25 bp, Homo sapien
gcatagctgcacgtttttgagaggc

SEQ ID NO: 2679252 - DNA, 25 bp, Homo sapien
tgtcttccccaggatcctattttcc

SEQ ID NO: 2679253 - DNA, 25 bp, Homo sapien
caaaattaagttctcagcatagtgt

SEQ ID NO: 2679254 - DNA, 25 bp, Homo sapien
caacttgccattaccattatcttaa

SEQ ID NO: 2679255 - DNA, 25 bp, Homo sapien
ccttgcccaagacatgatttaaaga

SEQ ID NO: 2679256 - DNA, 25 bp, Homo sapien
gcagtataaaaagctctcctctgtg

SEQ ID NO: 2679257 - DNA, 25 bp, Homo sapien
tcgcaaagagaactaagtgtcaagt

SEQ ID NO: 2679258 - DNA, 25 bp, Homo sapien
ccctggactctacctaagaatggaa

SEQ ID NO: 2679259 - DNA, 25 bp, Homo sapien
taatcgcttcttagtgaggcaacaa

SEQ ID NO: 2679260 - DNA, 25 bp, Homo sapien
tttcacaaaaggctcgctcccaccc

SEQ ID NO: 2679261 - DNA, 25 bp, Homo sapien
atttccatagtagcctgtgaaagaa

SEQ ID NO: 2679262 - DNA, 25 bp, Homo sapien
tgaccaagcaactgtgttctcatgc

SEQ ID NO: 2679263 - DNA, 25 bp, Homo sapien
gcaactgtgttctcatgcctatgat

SEQ ID NO: 2679264 - DNA, 25 bp, Homo sapien
tctcagagtttgtgttaacgtcccg

SEQ ID NO: 2679265 - DNA, 25 bp, Homo sapien
tgtccacgtggactaaattaggata

SEQ ID NO: 2679266 - DNA, 25 bp, Homo sapien
tcctttggccctgtcaacactagat

SEQ ID NO: 2679267 - DNA, 25 bp, Homo sapien
caatgcagctttaacgacagcccaa

SEQ ID NO: 2679268 - DNA, 25 bp, Homo sapien
gaataccaatatagtgacaggcgtc

SEQ ID NO: 2679269 - DNA, 25 bp, Homo sapien
cataaataagccaatctgtgggcag

SEQ ID NO: 2679270 - DNA, 25 bp, Homo sapien
ggttcctgaagagcattacttgcca

SEQ ID NO: 2679271 - DNA, 25 bp, Homo sapien
tacttgccaatctagctggtccaca

SEQ ID NO: 2679272 - DNA, 25 bp, Homo sapien
gaagatgtcaatgtagcaatgcccc

SEQ ID NO: 2679273 - DNA, 25 bp, Homo sapien
tacttagagtgtcttagccatctca

SEQ ID NO: 2679274 - DNA, 25 bp, Homo sapien
taatttctcccctacacgacttgct

SEQ ID NO: 2679275 - DNA, 25 bp, Homo sapien
caaatttgtattgctagcccagaca

SEQ ID NO: 2679276 - DNA, 25 bp, Homo sapien
tacatccggaataacagagtgaaac

SEQ ID NO: 2679277 - DNA, 25 bp, Homo sapien
taaatcacacttagtccaaggaagg

SEQ ID NO: 2679278 - DNA, 25 bp, Homo sapien
cctgtaatgagacaaatctaaacct

SEQ ID NO: 2679279 - DNA, 25 bp, Homo sapien
gaaatccagaataccaagtctctca

SEQ ID NO: 2679280 - DNA, 25 bp, Homo sapien
attagctgtagttttgtcctccatt

SEQ ID NO: 2679281 - DNA, 25 bp, Homo sapien
aatggagccactcatcaagtttcaa

SEQ ID NO: 2679282 - DNA, 25 bp, Homo sapien
gtcctccatttcactatcactactg

SEQ ID NO: 2679283 - DNA, 25 bp, Homo sapien
aagtttcaaggctgccaaattagct

SEQ ID NO: 2679284 - DNA, 25 bp, Homo sapien
tagttcaaatagatacaagcaaatg

SEQ ID NO: 2679285 - DNA, 25 bp, Homo sapien
acacctatgtgttgattagtttcca

SEQ ID NO: 2679286 - DNA, 25 bp, Homo sapien
tattttagtgcctgtagaacatcca

SEQ ID NO: 2679287 - DNA, 25 bp, Homo sapien
gattcacagaaaggtctaagacaga

SEQ ID NO: 2679288 - DNA, 25 bp, Homo sapien
ccaagatgaggccaaaggaagctct

SEQ ID NO: 2679289 - DNA, 25 bp, Homo sapien
gatggagctctcattcggcgtaaaa

SEQ ID NO: 2679290 - DNA, 25 bp, Homo sapien
tatggtagcttcatcaacttgagac

SEQ ID NO: 2679291 - DNA, 25 bp, Homo sapien
tgtaaacctgcagactgttcttcag

SEQ ID NO: 2679292 - DNA, 25 bp, Homo sapien
tcataggctggtttaggaataactc

SEQ ID NO: 2679293 - DNA, 25 bp, Homo sapien
gattcctttgaatcagcatacaaga

SEQ ID NO: 2679294 - DNA, 25 bp, Homo sapien
cagggtctagaccagaaagaaaggt

SEQ ID NO: 2679295 - DNA, 25 bp, Homo sapien
cattgtccttacataaccaaagtgg

SEQ ID NO: 2679296 - DNA, 25 bp, Homo sapien
gatcggtcctcagtacctcgtttag

SEQ ID NO: 2679297 - DNA, 25 bp, Homo sapien
cagagaagactgatctgatcggtcc

SEQ ID NO: 2679298 - DNA, 25 bp, Homo sapien
gaaggactagcacaaggacttgggt

SEQ ID NO: 2679299 - DNA, 25 bp, Homo sapien
gacttgggtaactactgctgtctgt

SEQ ID NO: 2679300 - DNA, 25 bp, Homo sapien
aaataatgaacagatatactatgct

SEQ ID NO: 2679301 - DNA, 25 bp, Homo sapien
tggattagaagactaagaagtgtta

SEQ ID NO: 2679302 - DNA, 25 bp, Homo sapien
tgtaatacttgtactctgaaattta

SEQ ID NO: 2679303 - DNA, 25 bp, Homo sapien
gaaattaaagactatccaaataatg

SEQ ID NO: 2679304 - DNA, 25 bp, Homo sapien
tataaaagaaaacataagttcttga

SEQ ID NO: 2679305 - DNA, 25 bp, Homo sapien
ctataaaagaaaacataagttcttg

SEQ ID NO: 2679306 - DNA, 25 bp, Homo sapien
ccaaaaggctcgatttagcttccgt

SEQ ID NO: 2679307 - DNA, 25 bp, Homo sapien
gaccagatacccttctgttgagaaa

SEQ ID NO: 2679308 - DNA, 25 bp, Homo sapien
cattatgaagtatcgaacaggcatg

SEQ ID NO: 2679309 - DNA, 25 bp, Homo sapien
caagtaaactatgctgctttcccaa

SEQ ID NO: 2679310 - DNA, 25 bp, Homo sapien
gaaggctttcttttcgtatccactc

SEQ ID NO: 2679311 - DNA, 25 bp, Homo sapien
actccaccttaaatactcctcctag

SEQ ID NO: 2679312 - DNA, 25 bp, Homo sapien
tcattccatggattgagtaaatggt

SEQ ID NO: 2679313 - DNA, 25 bp, Homo sapien
atactcctcctagtccagcagagcc

SEQ ID NO: 2679314 - DNA, 25 bp, Homo sapien
tctgactgcaaggagcaatcagaca

SEQ ID NO: 2679315 - DNA, 25 bp, Homo sapien
ttttctcctcaattaaagcactgga

SEQ ID NO: 2679316 - DNA, 25 bp, Homo sapien
aaagcagctagcatagtatttggtc

SEQ ID NO: 2679317 - DNA, 25 bp, Homo sapien
cccctgtttcccatgtgcatatgga

SEQ ID NO: 2679318 - DNA, 25 bp, Homo sapien
cctaccagcgtatgctaaaatcatc

SEQ ID NO: 2679319 - DNA, 25 bp, Homo sapien
taatctgcaaaatctctcaactttt

SEQ ID NO: 2679320 - DNA, 25 bp, Homo sapien
atgaccaaaacctacactgataaaa

SEQ ID NO: 2679321 - DNA, 25 bp, Homo sapien
ggagttgacttccagatttaagatt

SEQ ID NO: 2679322 - DNA, 25 bp, Homo sapien
ggaagacgttcccataactggagca

SEQ ID NO: 2679323 - DNA, 25 bp, Homo sapien
taactggagcaactgttcaccaacc

SEQ ID NO: 2679324 - DNA, 25 bp, Homo sapien
ccaagggaagacgttcccataactg

SEQ ID NO: 2679325 - DNA, 25 bp, Homo sapien
ttcccataactggagcaactgttca

SEQ ID NO: 2679326 - DNA, 25 bp, Homo sapien
aaaggttcctaatgatcacaaatac

SEQ ID NO: 2679327 - DNA, 25 bp, Homo sapien
agataaataatctgaaaggttccta

SEQ ID NO: 2679328 - DNA, 25 bp, Homo sapien
cacaaatactgccaatactcaaagt

SEQ ID NO: 2679329 - DNA, 25 bp, Homo sapien
actgccaatactcaaagtcaagatg

SEQ ID NO: 2679330 - DNA, 25 bp, Homo sapien
taggcatgatgttcttccacagcta

SEQ ID NO: 2679331 - DNA, 25 bp, Homo sapien
tgatgttcttccacagctaagagtt

SEQ ID NO: 2679332 - DNA, 25 bp, Homo sapien
ttgaaagtcagtgcattcagtggtt

SEQ ID NO: 2679333 - DNA, 25 bp, Homo sapien
tgcattcagtggttataaataggca

SEQ ID NO: 2679334 - DNA, 25 bp, Homo sapien
gttctaaagcaacactctaaaagtg

SEQ ID NO: 2679335 - DNA, 25 bp, Homo sapien
ttctcctgtatatgaagatggtagt

SEQ ID NO: 2679336 - DNA, 25 bp, Homo sapien
taaaaagcccattcgtaacacacac

SEQ ID NO: 2679337 - DNA, 25 bp, Homo sapien
tgttaaaaagcccattcgtaacaca

SEQ ID NO: 2679338 - DNA, 25 bp, Homo sapien
tcatcaataagaactgtaattcagt

SEQ ID NO: 2679339 - DNA, 25 bp, Homo sapien
cttcttttcataggtgttgacgtat

SEQ ID NO: 2679340 - DNA, 25 bp, Homo sapien
tctaaaatggtgctcagatgttctg

SEQ ID NO: 2679341 - DNA, 25 bp, Homo sapien
tatattcaggcctttcttaaacaac

SEQ ID NO: 2679342 - DNA, 25 bp, Homo sapien
gaatagcccttagttagcacacact

SEQ ID NO: 2679343 - DNA, 25 bp, Homo sapien
ttattcagattttattgcatttcat

SEQ ID NO: 2679344 - DNA, 25 bp, Homo sapien
tgccctttattcagattttattgca

SEQ ID NO: 2679345 - DNA, 25 bp, Homo sapien
ctttattcagattttattgcatttc

SEQ ID NO: 2679346 - DNA, 25 bp, Homo sapien
tttgccctttattcagattttattg

SEQ ID NO: 2679347 - DNA, 25 bp, Homo sapien
gcaagcaagctaccagttgagaatt

SEQ ID NO: 2679348 - DNA, 25 bp, Homo sapien
gaattgtggcgcttgcaggctttag

SEQ ID NO: 2679349 - DNA, 25 bp, Homo sapien
gggaggaaagagtaaggtacacatc

SEQ ID NO: 2679350 - DNA, 25 bp, Homo sapien
gctcatataagagatgtgacgaggg

SEQ ID NO: 2679351 - DNA, 25 bp, Homo sapien
gacttggcacaagcacggatttaca

SEQ ID NO: 2679352 - DNA, 25 bp, Homo sapien
gagccataatacacatacagtggaa

SEQ ID NO: 2679353 - DNA, 25 bp, Homo sapien
cactatataatgctttcccagagaa

SEQ ID NO: 2679354 - DNA, 25 bp, Homo sapien
gtctatttagagctcagtaaccaag

SEQ ID NO: 2679355 - DNA, 25 bp, Homo sapien
tagaatttcattttaataagtatat

SEQ ID NO: 2679356 - DNA, 25 bp, Homo sapien
tgtacgtgaccagttcatccaatga

SEQ ID NO: 2679357 - DNA, 25 bp, Homo sapien
ttttggccatttataagcaccaggc

SEQ ID NO: 2679358 - DNA, 25 bp, Homo sapien
tgcacgcatgcactgatcagcagct

SEQ ID NO: 2679359 - DNA, 25 bp, Homo sapien
gacacacgaggattatggaagctac

SEQ ID NO: 2679360 - DNA, 25 bp, Homo sapien
gcagaaggcaaggaggagcaagtca

SEQ ID NO: 2679361 - DNA, 25 bp, Homo sapien
ccatgtggctagggaagcctcacat

SEQ ID NO: 2679362 - DNA, 25 bp, Homo sapien
catgtggctagggaagcctcacatc

SEQ ID NO: 2679363 - DNA, 25 bp, Homo sapien
gtggctagggaagcctcacatcatg

SEQ ID NO: 2679364 - DNA, 25 bp, Homo sapien
ccagaaacgtgggtcctgagcacat

SEQ ID NO: 2679365 - DNA, 25 bp, Homo sapien
atggtctgaacatgaaggatgccac

SEQ ID NO: 2679366 - DNA, 25 bp, Homo sapien
cattgaggaagacccactgcttgtg

SEQ ID NO: 2679367 - DNA, 25 bp, Homo sapien
tctcgcagcccatgtgacttgaggc

SEQ ID NO: 2679368 - DNA, 25 bp, Homo sapien
atataggagaaaggtctgaacatcc

SEQ ID NO: 2679369 - DNA, 25 bp, Homo sapien
tagagttaatccttactgcatcagg

SEQ ID NO: 2679370 - DNA, 25 bp, Homo sapien
tttgaaaccgaatggtgccccagtc

SEQ ID NO: 2679371 - DNA, 25 bp, Homo sapien
gatgtggaatttagctgtctgctgc

SEQ ID NO: 2679372 - DNA, 25 bp, Homo sapien
ttcaatgagatttttacctccagcc

SEQ ID NO: 2679373 - DNA, 25 bp, Homo sapien
aatgagatttttacctccagccaat

SEQ ID NO: 2679374 - DNA, 25 bp, Homo sapien
ccactgacaaagattttcaatgaga

SEQ ID NO: 2679375 - DNA, 25 bp, Homo sapien
ttttcaatgagatttttacctccag

SEQ ID NO: 2679376 - DNA, 25 bp, Homo sapien
tagaagcttcaagggccgaattctg

SEQ ID NO: 2679377 - DNA, 25 bp, Homo sapien
ccatgcccacttagctggtcatata

SEQ ID NO: 2679378 - DNA, 25 bp, Homo sapien
gaattctgacacaacctaggcaccg

SEQ ID NO: 2679379 - DNA, 25 bp, Homo sapien
aagatacttcgagggcggagttcac

SEQ ID NO: 2679380 - DNA, 25 bp, Homo sapien
cagggttgatatcacaaggtacagg

SEQ ID NO: 2679381 - DNA, 25 bp, Homo sapien
actgagctgcgttcccgggagttta

SEQ ID NO: 2679382 - DNA, 25 bp, Homo sapien
tgcgttcccgggagtttaggcattc

SEQ ID NO: 2679383 - DNA, 25 bp, Homo sapien
tggcagggttgatatcacaaggtac

SEQ ID NO: 2679384 - DNA, 25 bp, Homo sapien
gggtgtatagcatctcctaggccat

SEQ ID NO: 2679385 - DNA, 25 bp, Homo sapien
aaattgttcatgtccagaggctccc

SEQ ID NO: 2679386 - DNA, 25 bp, Homo sapien
cagccaaaaggtatggccaccttgg

SEQ ID NO: 2679387 - DNA, 25 bp, Homo sapien
atgcccaggaagagtgcttgattcc

SEQ ID NO: 2679388 - DNA, 25 bp, Homo sapien
gaccataggttctcaagctgcaccc

SEQ ID NO: 2679389 - DNA, 25 bp, Homo sapien
aggttctcaagctgcaccccatgct

SEQ ID NO: 2679390 - DNA, 25 bp, Homo sapien
tgcaccccatgcttctgtgcacctg

SEQ ID NO: 2679391 - DNA, 25 bp, Homo sapien
ctgaacactgaccataggttctcaa

SEQ ID NO: 2679392 - DNA, 25 bp, Homo sapien
tcgccaaatgttcggtctttctgat

SEQ ID NO: 2679393 - DNA, 25 bp, Homo sapien
tagtttgcatgatctcttttggatg

SEQ ID NO: 2679394 - DNA, 25 bp, Homo sapien
tgattttgcaccctcacttccaact

SEQ ID NO: 2679395 - DNA, 25 bp, Homo sapien
tgaatcagacccttcgccaaatgtt

SEQ ID NO: 2679396 - DNA, 25 bp, Homo sapien
tcagagctcattaccaatgccacac

SEQ ID NO: 2679397 - DNA, 25 bp, Homo sapien
cagagctcattaccaatgccacaca

SEQ ID NO: 2679398 - DNA, 25 bp, Homo sapien
ctctgaggcaggaacgtgtctactc

SEQ ID NO: 2679399 - DNA, 25 bp, Homo sapien
aggttctgtgggtcctaggccaagc

SEQ ID NO: 2679400 - DNA, 25 bp, Homo sapien
caggttctgtgggtcctaggccaag

SEQ ID NO: 2679401 - DNA, 25 bp, Homo sapien
ggttctgtgggtcctaggccaagct

SEQ ID NO: 2679402 - DNA, 25 bp, Homo sapien
tgtgggcgagtttgtgaacctgctc

SEQ ID NO: 2679403 - DNA, 25 bp, Homo sapien
ttagcagtaactgcaagaagactgg

SEQ ID NO: 2679404 - DNA, 25 bp, Homo sapien
actggcatccattcggcagggggac

SEQ ID NO: 2679405 - DNA, 25 bp, Homo sapien
ctttgagcagagagtaaaagggaat

SEQ ID NO: 2679406 - DNA, 25 bp, Homo sapien
gaagcttagccatttcatttggaac

SEQ ID NO: 2679407 - DNA, 25 bp, Homo sapien
tgttcaaaggggtgaagcttagcca

SEQ ID NO: 2679408 - DNA, 25 bp, Homo sapien
gaactagccaccataccataccaat

SEQ ID NO: 2679409 - DNA, 25 bp, Homo sapien
ttcacttaacagctggacatttcac

SEQ ID NO: 2679410 - DNA, 25 bp, Homo sapien
aggtgtggccatcaagatgactgca

SEQ ID NO: 2679411 - DNA, 25 bp, Homo sapien
tagtgaagcaaaggagtagcagaca

SEQ ID NO: 2679412 - DNA, 25 bp, Homo sapien
catcaaaatgggcagatgcagtcag

SEQ ID NO: 2679413 - DNA, 25 bp, Homo sapien
ggatctgcaaatcctagttccagca

SEQ ID NO: 2679414 - DNA, 25 bp, Homo sapien
acagctttgggctctttgggtccac

SEQ ID NO: 2679415 - DNA, 25 bp, Homo sapien
caaaaatggacgccactggccgaga

SEQ ID NO: 2679416 - DNA, 25 bp, Homo sapien
gcccccaaaaatggacgccactggc

SEQ ID NO: 2679417 - DNA, 25 bp, Homo sapien
ccccaaaaatggacgccactggccg

SEQ ID NO: 2679418 - DNA, 25 bp, Homo sapien
cccaaaaatggacgccactggccga

SEQ ID NO: 2679419 - DNA, 25 bp, Homo sapien
tcttgatctgtcaggtggatggctg

SEQ ID NO: 2679420 - DNA, 25 bp, Homo sapien
aggtgttgctcatgacagttgagac

SEQ ID NO: 2679421 - DNA, 25 bp, Homo sapien
gcttcttgatctgtcaggtggatgg

SEQ ID NO: 2679422 - DNA, 25 bp, Homo sapien
catgacagttgagactcctcagcat

SEQ ID NO: 2679423 - DNA, 25 bp, Homo sapien
tttaatctttgctatgccattgggc

SEQ ID NO: 2679424 - DNA, 25 bp, Homo sapien
ccattgggctgccatatatttccat

SEQ ID NO: 2679425 - DNA, 25 bp, Homo sapien
aatctttgctatgccattgggctgc

SEQ ID NO: 2679426 - DNA, 25 bp, Homo sapien
gccattgggctgccatatatttcca

SEQ ID NO: 2679427 - DNA, 25 bp, Homo sapien
ttttatgggccctgggtcacaagga

SEQ ID NO: 2679428 - DNA, 25 bp, Homo sapien
tagttcttccgacaattctgctgcc

SEQ ID NO: 2679429 - DNA, 25 bp, Homo sapien
caaaatgctcctggacggatgcgtc

SEQ ID NO: 2679430 - DNA, 25 bp, Homo sapien
cagaggcactaagcgctcaaagact

SEQ ID NO: 2679431 - DNA, 25 bp, Homo sapien
caaacctgagactcatctgggctaa

SEQ ID NO: 2679432 - DNA, 25 bp, Homo sapien
tcaaacctgagactcatctgggcta

SEQ ID NO: 2679433 - DNA, 25 bp, Homo sapien
aaacctgagactcatctgggctaac

SEQ ID NO: 2679434 - DNA, 25 bp, Homo sapien
ctggatggagtgtatctaaatcaag

SEQ ID NO: 2679435 - DNA, 25 bp, Homo sapien
aaagggctccctcataatttattgt

SEQ ID NO: 2679436 - DNA, 25 bp, Homo sapien
taatcaatggcagagataacacaaa

SEQ ID NO: 2679437 - DNA, 25 bp, Homo sapien
tgtaactaagtaatgccaagcaata

SEQ ID NO: 2679438 - DNA, 25 bp, Homo sapien
ccagagcagctccaaatatagagtg

SEQ ID NO: 2679439 - DNA, 25 bp, Homo sapien
gtcaggattgttccagccttccaaa

SEQ ID NO: 2679440 - DNA, 25 bp, Homo sapien
tgagttgagtcaggattgttccagc

SEQ ID NO: 2679441 - DNA, 25 bp, Homo sapien
atctgtctgcttgagcacttccttt

SEQ ID NO: 2679442 - DNA, 25 bp, Homo sapien
ttgagcacttcctttcaagtaaact

SEQ ID NO: 2679443 - DNA, 25 bp, Homo sapien
agcttggagttggatttggatcaga

SEQ ID NO: 2679444 - DNA, 25 bp, Homo sapien
tggagttggatttggatcagaaaca

SEQ ID NO: 2679445 - DNA, 25 bp, Homo sapien
agttggatttggatcagaaacagcc

SEQ ID NO: 2679446 - DNA, 25 bp, Homo sapien
ttggatttggatcagaaacagccag

SEQ ID NO: 2679447 - DNA, 25 bp, Homo sapien
tttccttccctattgggagcactga

SEQ ID NO: 2679448 - DNA, 25 bp, Homo sapien
ccctattgggagcactgaacccagg

SEQ ID NO: 2679449 - DNA, 25 bp, Homo sapien
aaagagagcctgaaacataagtgct

SEQ ID NO: 2679450 - DNA, 25 bp, Homo sapien
gagcctgaaacataagtgctctgtc

SEQ ID NO: 2679451 - DNA, 25 bp, Homo sapien
tcttaactggcgtcaactccatttt

SEQ ID NO: 2679452 - DNA, 25 bp, Homo sapien
aaatatcttaactggcgtcaactcc

SEQ ID NO: 2679453 - DNA, 25 bp, Homo sapien
actggcgtcaactccattttctggg

SEQ ID NO: 2679454 - DNA, 25 bp, Homo sapien
tgcaaatatcttaactggcgtcaac

SEQ ID NO: 2679455 - DNA, 25 bp, Homo sapien
ttcatggcccttaatgtcatgtttt

SEQ ID NO: 2679456 - DNA, 25 bp, Homo sapien
tgttcatggcccttaatgtcatgtt

SEQ ID NO: 2679457 - DNA, 25 bp, Homo sapien
gttcatggcccttaatgtcatgttt

SEQ ID NO: 2679458 - DNA, 25 bp, Homo sapien
tgggagtagtaaagagaaccaggaa

SEQ ID NO: 2679459 - DNA, 25 bp, Homo sapien
gagtagtaaagagaaccaggaagcc

SEQ ID NO: 2679460 - DNA, 25 bp, Homo sapien
agtaaagagaaccaggaagccagag

SEQ ID NO: 2679461 - DNA, 25 bp, Homo sapien
ctattgggagtagtaaagagaacca

SEQ ID NO: 2679462 - DNA, 25 bp, Homo sapien
tattcatattgttacgtgtatcacg

SEQ ID NO: 2679463 - DNA, 25 bp, Homo sapien
cgtgtatcacgaaaccctcttgtct

SEQ ID NO: 2679464 - DNA, 25 bp, Homo sapien
gacatactacgatttgttttcccat

SEQ ID NO: 2679465 - DNA, 25 bp, Homo sapien
tcttgtcttttgctaattggtagta

SEQ ID NO: 2679466 - DNA, 25 bp, Homo sapien
tatcgccgaccttgaggctaccgag

SEQ ID NO: 2679467 - DNA, 25 bp, Homo sapien
gggcccgaatgctcagggtatcgcc

SEQ ID NO: 2679468 - DNA, 25 bp, Homo sapien
gccaaaaataaacgcgcgcgcgcac

SEQ ID NO: 2679469 - DNA, 25 bp, Homo sapien
tgtgcatgcgccaaaaataaacgcg

SEQ ID NO: 2679470 - DNA, 25 bp, Homo sapien
aaatattgaaccgaatcccaggcgc

SEQ ID NO: 2679471 - DNA, 25 bp, Homo sapien
atattgaaccgaatcccaggcgccc

SEQ ID NO: 2679472 - DNA, 25 bp, Homo sapien
ggactggggactccctccttcttga

SEQ ID NO: 2679473 - DNA, 25 bp, Homo sapien
ctaaatattgaaccgaatcccaggc

SEQ ID NO: 2679474 - DNA, 25 bp, Homo sapien
cctcaaagcggtaaatgcggccttg

SEQ ID NO: 2679475 - DNA, 25 bp, Homo sapien
tgcctctcgggcgtcaaattccgtg

SEQ ID NO: 2679476 - DNA, 25 bp, Homo sapien
gagaattccggcaggttcaccggga

SEQ ID NO: 2679477 - DNA, 25 bp, Homo sapien
ccttggtgaaatgcgccagtggaca

SEQ ID NO: 2679478 - DNA, 25 bp, Homo sapien
accaggagtcccgctccatttgaag

SEQ ID NO: 2679479 - DNA, 25 bp, Homo sapien
ccaggagtcccgctccatttgaagc

SEQ ID NO: 2679480 - DNA, 25 bp, Homo sapien
ctgtatccttgcattcccatcaaca

SEQ ID NO: 2679481 - DNA, 25 bp, Homo sapien
ttcccatcaacagctgggacatgca

SEQ ID NO: 2679482 - DNA, 25 bp, Homo sapien
gcattcccatcaacagctgggacat

SEQ ID NO: 2679483 - DNA, 25 bp, Homo sapien
tcccatcaacagctgggacatgcat

SEQ ID NO: 2679484 - DNA, 25 bp, Homo sapien
ctggaagagacagcccgggaagctt

SEQ ID NO: 2679485 - DNA, 25 bp, Homo sapien
catcaaaaacatgctagttgggcag

SEQ ID NO: 2679486 - DNA, 25 bp, Homo sapien
gggccttgcctgacagctaactagt

SEQ ID NO: 2679487 - DNA, 25 bp, Homo sapien
tagctcaggtaaaggcatggctcgt

SEQ ID NO: 2679488 - DNA, 25 bp, Homo sapien
caacaataacatcagtccaagcatt

SEQ ID NO: 2679489 - DNA, 25 bp, Homo sapien
cccagccttgaccttgcttttataa

SEQ ID NO: 2679490 - DNA, 25 bp, Homo sapien
tccaagcattaaagcagcacctaca

SEQ ID NO: 2679491 - DNA, 25 bp, Homo sapien
ttataaccaacccatgctcacaata

SEQ ID NO: 2679492 - DNA, 25 bp, Homo sapien
tctttcgagcattcttcttggtgtt

SEQ ID NO: 2679493 - DNA, 25 bp, Homo sapien
aatctgaaatgagcaaggtccacta

SEQ ID NO: 2679494 - DNA, 25 bp, Homo sapien
cagtgattaatctgttctttcgagc

SEQ ID NO: 2679495 - DNA, 25 bp, Homo sapien
tccactattggcagtgattaatctg

SEQ ID NO: 2679496 - DNA, 25 bp, Homo sapien
ttggaagtctgggtaccaacagctg

SEQ ID NO: 2679497 - DNA, 25 bp, Homo sapien
aagtgtcaaatctttggaagtctgg

SEQ ID NO: 2679498 - DNA, 25 bp, Homo sapien
tctgggtaccaacagctgctagaaa

SEQ ID NO: 2679499 - DNA, 25 bp, Homo sapien
caggattcaaacaaagtgtcaaatc

SEQ ID NO: 2679500 - DNA, 25 bp, Homo sapien
agtggaagcattccactaccacttc

SEQ ID NO: 2679501 - DNA, 25 bp, Homo sapien
tggaagcattccactaccacttcac

SEQ ID NO: 2679502 - DNA, 25 bp, Homo sapien
gtggaagcattccactaccacttca

SEQ ID NO: 2679503 - DNA, 25 bp, Homo sapien
tggtgctgactactcccaggtggcc

SEQ ID NO: 2679504 - DNA, 25 bp, Homo sapien
cccctgtcagggaataagctgtggt

SEQ ID NO: 2679505 - DNA, 25 bp, Homo sapien
cccaagtacattttgccgttgctga

SEQ ID NO: 2679506 - DNA, 25 bp, Homo sapien
ttgccgttgctgaagaaacagaggc

SEQ ID NO: 2679507 - DNA, 25 bp, Homo sapien
tgacttcttgtcacaggaaaagacg

SEQ ID NO: 2679508 - DNA, 25 bp, Homo sapien
aagatacaggtatttggcccttggt

SEQ ID NO: 2679509 - DNA, 25 bp, Homo sapien
aaaagacgggtctgattcctgagcc

SEQ ID NO: 2679510 - DNA, 25 bp, Homo sapien
cttggtgtagtttccatttgacttc

SEQ ID NO: 2679511 - DNA, 25 bp, Homo sapien
ttcagaaacactttctgcgttgttt

SEQ ID NO: 2679512 - DNA, 25 bp, Homo sapien
cttcagaaacactttctgcgttgtt

SEQ ID NO: 2679513 - DNA, 25 bp, Homo sapien
gaaacactttctgcgttgttttcta

SEQ ID NO: 2679514 - DNA, 25 bp, Homo sapien
cagaaacactttctgcgttgttttc

SEQ ID NO: 2679515 - DNA, 25 bp, Homo sapien
gatgctaatgtctttgcattcaaag

SEQ ID NO: 2679516 - DNA, 25 bp, Homo sapien
tggagggatctcaaaaagcctacag

SEQ ID NO: 2679517 - DNA, 25 bp, Homo sapien
tcaaagtctccaggggctagaccat

SEQ ID NO: 2679518 - DNA, 25 bp, Homo sapien
gctagaccatattcatattccctct

SEQ ID NO: 2679519 - DNA, 25 bp, Homo sapien
ccaatgctaaacacagatcatccat

SEQ ID NO: 2679520 - DNA, 25 bp, Homo sapien
taacattccagtgctatgactgctg

SEQ ID NO: 2679521 - DNA, 25 bp, Homo sapien
gctgtactggcccaatgctaaacac

SEQ ID NO: 2679522 - DNA, 25 bp, Homo sapien
gggatctggaactaacattccagtg

SEQ ID NO: 2679523 - DNA, 25 bp, Homo sapien
gtcactgtgatttatcatttggaga

SEQ ID NO: 2679524 - DNA, 25 bp, Homo sapien
gagttctactagcaaactctaagtc

SEQ ID NO: 2679525 - DNA, 25 bp, Homo sapien
agtgaatagtccctaagtacttgga

SEQ ID NO: 2679526 - DNA, 25 bp, Homo sapien
gaaataaggttcgatgtactcagag

SEQ ID NO: 2679527 - DNA, 25 bp, Homo sapien
gaggactttggagcaagaggaaaca

SEQ ID NO: 2679528 - DNA, 25 bp, Homo sapien
gagaggtgtgcgttgaggactttgg

SEQ ID NO: 2679529 - DNA, 25 bp, Homo sapien
cagtactcagaatatgttctgtata

SEQ ID NO: 2679530 - DNA, 25 bp, Homo sapien
ggaacactattatctgtctgaaggc

SEQ ID NO: 2679531 - DNA, 25 bp, Homo sapien
ccttgaatggcagggcaaatgtgta

SEQ ID NO: 2679532 - DNA, 25 bp, Homo sapien
ctttgttaaataaggatgattctag

SEQ ID NO: 2679533 - DNA, 25 bp, Homo sapien
ctagagtttggaccctattagagct

SEQ ID NO: 2679534 - DNA, 25 bp, Homo sapien
tgtgtaatggctttccttcacagcc

SEQ ID NO: 2679535 - DNA, 25 bp, Homo sapien
gtttttatctctctgagaaatcgcc

SEQ ID NO: 2679536 - DNA, 25 bp, Homo sapien
ttttatctctctgagaaatcgccac

SEQ ID NO: 2679537 - DNA, 25 bp, Homo sapien
ctgtttttatctctctgagaaatcg

SEQ ID NO: 2679538 - DNA, 25 bp, Homo sapien
tttttatctctctgagaaatcgcca

SEQ ID NO: 2679539 - DNA, 25 bp, Homo sapien
tacaaaggaatacagctaagcaagc

SEQ ID NO: 2679540 - DNA, 25 bp, Homo sapien
cctagggcctatccatgtgcacttg

SEQ ID NO: 2679541 - DNA, 25 bp, Homo sapien
gattctatcactttgcacctagggc

SEQ ID NO: 2679542 - DNA, 25 bp, Homo sapien
tgggacactcactcaagtcatgaaa

SEQ ID NO: 2679543 - DNA, 25 bp, Homo sapien
tgagcttgtcctggctatcaagtta

SEQ ID NO: 2679544 - DNA, 25 bp, Homo sapien
acacagagtgccatgaaaacaccaa

SEQ ID NO: 2679545 - DNA, 25 bp, Homo sapien
ttctgctctcctaactaaatagaaa

SEQ ID NO: 2679546 - DNA, 25 bp, Homo sapien
tgctacacagagtgccatgaaaaca

SEQ ID NO: 2679547 - DNA, 25 bp, Homo sapien
agtggagcggcagccagataactct

SEQ ID NO: 2679548 - DNA, 25 bp, Homo sapien
ggcagccagataactctcacgtcct

SEQ ID NO: 2679549 - DNA, 25 bp, Homo sapien
atcaaccctggcactcagtggagcg

SEQ ID NO: 2679550 - DNA, 25 bp, Homo sapien
gactggggacaaggtcgtcctcttc

SEQ ID NO: 2679551 - DNA, 25 bp, Homo sapien
tatctgtggcatctacggagcaggg

SEQ ID NO: 2679552 - DNA, 25 bp, Homo sapien
ctccaactgagagtacttctgtgtc

SEQ ID NO: 2679553 - DNA, 25 bp, Homo sapien
aaggcactagaagcttggtcctcca

SEQ ID NO: 2679554 - DNA, 25 bp, Homo sapien
tgtgtccctttcctagcagaaccat

SEQ ID NO: 2679555 - DNA, 25 bp, Homo sapien
taaagaggtgactcatggtcagtcc

SEQ ID NO: 2679556 - DNA, 25 bp, Homo sapien
agtcccttgggtcacatatcagctg

SEQ ID NO: 2679557 - DNA, 25 bp, Homo sapien
tagactctcccaagtgataggagtg

SEQ ID NO: 2679558 - DNA, 25 bp, Homo sapien
taatgatgccccaatacaactctgg

SEQ ID NO: 2679559 - DNA, 25 bp, Homo sapien
gcagttttagccctcatattcatac

SEQ ID NO: 2679560 - DNA, 25 bp, Homo sapien
gtagcaaaaagagctgtagcagttt

SEQ ID NO: 2679561 - DNA, 25 bp, Homo sapien
gccctcatattcatacccaaatcat

SEQ ID NO: 2679562 - DNA, 25 bp, Homo sapien
catggtagcaaaaagagctgtagca

SEQ ID NO: 2679563 - DNA, 25 bp, Homo sapien
cttaaaaagcagggttctcttgact

SEQ ID NO: 2679564 - DNA, 25 bp, Homo sapien
cagggttctcttgactttgggtgtt

SEQ ID NO: 2679565 - DNA, 25 bp, Homo sapien
aaaaagcagggttctcttgactttg

SEQ ID NO: 2679566 - DNA, 25 bp, Homo sapien
caaattcaatcagaccaggggtccc

SEQ ID NO: 2679567 - DNA, 25 bp, Homo sapien
gtgcgtgtgtgcgctttcaatgcca

SEQ ID NO: 2679568 - DNA, 25 bp, Homo sapien
gtgtgtgcgctttcaatgccatgga

SEQ ID NO: 2679569 - DNA, 25 bp, Homo sapien
cgtgtgtgcgctttcaatgccatgg

SEQ ID NO: 2679570 - DNA, 25 bp, Homo sapien
gcgtgtgtgcgctttcaatgccatg

SEQ ID NO: 2679571 - DNA, 25 bp, Homo sapien
gcgcgggctgattcaccccggtagt

SEQ ID NO: 2679572 - DNA, 25 bp, Homo sapien
tgaatagtcgctgcccacggacagt

SEQ ID NO: 2679573 - DNA, 25 bp, Homo sapien
attcaccccggtagtcgcagcctgg

SEQ ID NO: 2679574 - DNA, 25 bp, Homo sapien
tgatagcttgggctgaatagtcgct

SEQ ID NO: 2679575 - DNA, 25 bp, Homo sapien
tgcagcgcagacacaaagcaaagac

SEQ ID NO: 2679576 - DNA, 25 bp, Homo sapien
caaagaccggtcacaaatacgcaaa

SEQ ID NO: 2679577 - DNA, 25 bp, Homo sapien
cggtcacaaatacgcaaatatcgag

SEQ ID NO: 2679578 - DNA, 25 bp, Homo sapien
aatatcgagcatctttgccaagtcc

SEQ ID NO: 2679579 - DNA, 25 bp, Homo sapien
gccggcctccagctgctcttctgct

SEQ ID NO: 2679580 - DNA, 25 bp, Homo sapien
ccggcctccagctgctcttctgctt

SEQ ID NO: 2679581 - DNA, 25 bp, Homo sapien
cctccagctgctcttctgcttctct

SEQ ID NO: 2679582 - DNA, 25 bp, Homo sapien
ccagctgctcttctgcttctcttcc

SEQ ID NO: 2679583 - DNA, 25 bp, Homo sapien
cttgccggtggagaggcaggcggct

SEQ ID NO: 2679584 - DNA, 25 bp, Homo sapien
gcggctcgctcaaaggtgtgggggc

SEQ ID NO: 2679585 - DNA, 25 bp, Homo sapien
ggctcgctcaaaggtgtgggggctg

SEQ ID NO: 2679586 - DNA, 25 bp, Homo sapien
gcaggcggctcgctcaaaggtgtgg

SEQ ID NO: 2679587 - DNA, 25 bp, Homo sapien
acatgaggggatggcgcccccggcc

SEQ ID NO: 2679588 - DNA, 25 bp, Homo sapien
tttgcgccttctccagaacatgagg

SEQ ID NO: 2679589 - DNA, 25 bp, Homo sapien
cgggtcctgggctctggcgctcagg

SEQ ID NO: 2679590 - DNA, 25 bp, Homo sapien
gaacatgaggggatggcgcccccgg

SEQ ID NO: 2679591 - DNA, 25 bp, Homo sapien
cgagaccggatctttcccagccggc

SEQ ID NO: 2679592 - DNA, 25 bp, Homo sapien
ctgcgggatcatagccgaccccgag

SEQ ID NO: 2679593 - DNA, 25 bp, Homo sapien
gggatcatagccgaccccgagaccg

SEQ ID NO: 2679594 - DNA, 25 bp, Homo sapien
atagccgaccccgagaccggatctt

SEQ ID NO: 2679595 - DNA, 25 bp, Homo sapien
cggctgcccgccaagtaactgcggg

SEQ ID NO: 2679596 - DNA, 25 bp, Homo sapien
gagaaaaagtttggcgaccggctgc

SEQ ID NO: 2679597 - DNA, 25 bp, Homo sapien
accggctgcgccagtgcagcagcgt

SEQ ID NO: 2679598 - DNA, 25 bp, Homo sapien
gatcatcccgccgagagtgggctgc

SEQ ID NO: 2679599 - DNA, 25 bp, Homo sapien
cagccactgcagcacgtcgggccac

SEQ ID NO: 2679600 - DNA, 25 bp, Homo sapien
ccagccactgcagcacgtcgggcca

SEQ ID NO: 2679601 - DNA, 25 bp, Homo sapien
cgccagccactgcagcacgtcgggc

SEQ ID NO: 2679602 - DNA, 25 bp, Homo sapien
tgcgccagccactgcagcacgtcgg

SEQ ID NO: 2679603 - DNA, 25 bp, Homo sapien
ggattccgcctgctgattgcgtgga

SEQ ID NO: 2679604 - DNA, 25 bp, Homo sapien
cggcgcgcgcggcttagggaagcgt

SEQ ID NO: 2679605 - DNA, 25 bp, Homo sapien
accgagactgagtttgcggcgcgcg

SEQ ID NO: 2679606 - DNA, 25 bp, Homo sapien
gggaggggaatctgcaggacaaacc

SEQ ID NO: 2679607 - DNA, 25 bp, Homo sapien
tccggtagaatccaggcggcgagtc

SEQ ID NO: 2679608 - DNA, 25 bp, Homo sapien
tggttgggcgcaccaaaacaatggg

SEQ ID NO: 2679609 - DNA, 25 bp, Homo sapien
cgagtccgattggttgggcgcacca

SEQ ID NO: 2679610 - DNA, 25 bp, Homo sapien
ggcccatgccggctccggtagaatc

SEQ ID NO: 2679611 - DNA, 25 bp, Homo sapien
agaagccgcgctggaactgcaatgg

SEQ ID NO: 2679612 - DNA, 25 bp, Homo sapien
tggaactgcaatggggtttccatgt

SEQ ID NO: 2679613 - DNA, 25 bp, Homo sapien
gcagggagaccaagcggtggtgcac

SEQ ID NO: 2679614 - DNA, 25 bp, Homo sapien
ctgggaagaagccgcgctggaactg

SEQ ID NO: 2679615 - DNA, 25 bp, Homo sapien
ctggcaatgcaggtgtgaggagcgc

SEQ ID NO: 2679616 - DNA, 25 bp, Homo sapien
ccggctgctggtgcgcgaggtgcgg

SEQ ID NO: 2679617 - DNA, 25 bp, Homo sapien
ccgctggccggctgctggtgcgcga

SEQ ID NO: 2679618 - DNA, 25 bp, Homo sapien
gcgaagggcgggcacggcttgtcct

SEQ ID NO: 2679619 - DNA, 25 bp, Homo sapien
tgcgcgtactgctgccggagcgcac

SEQ ID NO: 2679620 - DNA, 25 bp, Homo sapien
tggctggacggcgtcagctcgctca

SEQ ID NO: 2679621 - DNA, 25 bp, Homo sapien
agcagggacaggttatctcccgccc

SEQ ID NO: 2679622 - DNA, 25 bp, Homo sapien
tgctgcgcggactgctgcgcgtact

SEQ ID NO: 2679623 - DNA, 25 bp, Homo sapien
gcgctcaagttgctgagcggccgca

SEQ ID NO: 2679624 - DNA, 25 bp, Homo sapien
tccatctcgtgcaggttccggcggg

SEQ ID NO: 2679625 - DNA, 25 bp, Homo sapien
ttccggcgggacgcgctcaagttgc

SEQ ID NO: 2679626 - DNA, 25 bp, Homo sapien
gggctgcgcctctgagtccatctcg

SEQ ID NO: 2679627 - DNA, 25 bp, Homo sapien
agcggctgcagacggggaggacgcg

SEQ ID NO: 2679628 - DNA, 25 bp, Homo sapien
cacgatctcgggggctgaggacgaa

SEQ ID NO: 2679629 - DNA, 25 bp, Homo sapien
gcagcggctgcagacggggaggacg

SEQ ID NO: 2679630 - DNA, 25 bp, Homo sapien
ggggctgaggacgaaacagcggcgg

SEQ ID NO: 2679631 - DNA, 25 bp, Homo sapien
gccggttccatagagcgccaggttg

SEQ ID NO: 2679632 - DNA, 25 bp, Homo sapien
tgttggagttgttgtgctcgggctt

SEQ ID NO: 2679633 - DNA, 25 bp, Homo sapien
agttgttgtgctcgggcttagacac

SEQ ID NO: 2679634 - DNA, 25 bp, Homo sapien
gccgccggttccatagagcgccagg

SEQ ID NO: 2679635 - DNA, 25 bp, Homo sapien
ggtgccactgctgctgccgtgcccg

SEQ ID NO: 2679636 - DNA, 25 bp, Homo sapien
ttggtgccactgctgctgccgtgcc

SEQ ID NO: 2679637 - DNA, 25 bp, Homo sapien
tggtgccactgctgctgccgtgccc

SEQ ID NO: 2679638 - DNA, 25 bp, Homo sapien
cttggtgccactgctgctgccgtgc

SEQ ID NO: 2679639 - DNA, 25 bp, Homo sapien
gtggcccagcttgtagccgatgttc

SEQ ID NO: 2679640 - DNA, 25 bp, Homo sapien
cagcttgtagccgatgttctggttt

SEQ ID NO: 2679641 - DNA, 25 bp, Homo sapien
gcccagcttgtagccgatgttctgg

SEQ ID NO: 2679642 - DNA, 25 bp, Homo sapien
cttttcgaacagggcgcgccggtgg

SEQ ID NO: 2679643 - DNA, 25 bp, Homo sapien
ggtctcgatgaccatgaccacgatg

SEQ ID NO: 2679644 - DNA, 25 bp, Homo sapien
cacgacagctcggtctcgatgacca

SEQ ID NO: 2679645 - DNA, 25 bp, Homo sapien
tgccgaagatgagcgcgtagtcgct

SEQ ID NO: 2679646 - DNA, 25 bp, Homo sapien
cacgatgccgaacatgccgaagatg

SEQ ID NO: 2679647 - DNA, 25 bp, Homo sapien
ttaaggtgcccgaatgcgctgagca

SEQ ID NO: 2679648 - DNA, 25 bp, Homo sapien
tggctgcacgcggaaagggttcatc

SEQ ID NO: 2679649 - DNA, 25 bp, Homo sapien
gctgactacggatgcgcgtcctaga

SEQ ID NO: 2679650 - DNA, 25 bp, Homo sapien
taactgcctcgagaactttggctgc

SEQ ID NO: 2679651 - DNA, 25 bp, Homo sapien
gagttcaagagagcgggttgaaagg

SEQ ID NO: 2679652 - DNA, 25 bp, Homo sapien
tgagttcaagagagcgggttgaaag

SEQ ID NO: 2679653 - DNA, 25 bp, Homo sapien
tctgagttcaagagagcgggttgaa

SEQ ID NO: 2679654 - DNA, 25 bp, Homo sapien
ctgagttcaagagagcgggttgaaa

SEQ ID NO: 2679655 - DNA, 25 bp, Homo sapien
tcagaccgagcaggatgatcgtgga

SEQ ID NO: 2679656 - DNA, 25 bp, Homo sapien
tacacgatgatcagaccgagcagga

SEQ ID NO: 2679657 - DNA, 25 bp, Homo sapien
caggatgatcgtggagagactgata

SEQ ID NO: 2679658 - DNA, 25 bp, Homo sapien
ctgtatttccctggcgtggtacacg

SEQ ID NO: 2679659 - DNA, 25 bp, Homo sapien
ttttgccagagtgtgtataaacatt

SEQ ID NO: 2679660 - DNA, 25 bp, Homo sapien
ttccagaggacatagagccagaaag

SEQ ID NO: 2679661 - DNA, 25 bp, Homo sapien
gctttccaaggttctccatgaaaat

SEQ ID NO: 2679662 - DNA, 25 bp, Homo sapien
tgaaccatcttgttttgccagagtg

SEQ ID NO: 2679663 - DNA, 25 bp, Homo sapien
ctgtggccttggtgcacgaatgaag

SEQ ID NO: 2679664 - DNA, 25 bp, Homo sapien
ccttggtgcacgaatgaagagaaat

SEQ ID NO: 2679665 - DNA, 25 bp, Homo sapien
gagctatagagccatctctgaaaag

SEQ ID NO: 2679666 - DNA, 25 bp, Homo sapien
tgttcttccgattatagagctatag

SEQ ID NO: 2679667 - DNA, 25 bp, Homo sapien
ttttaggagtgcttcacttaactct

SEQ ID NO: 2679668 - DNA, 25 bp, Homo sapien
tcttgctgctgggtaaatgctgcag

SEQ ID NO: 2679669 - DNA, 25 bp, Homo sapien
agagcagatgcaggcccactgagtg

SEQ ID NO: 2679670 - DNA, 25 bp, Homo sapien
atcacactgatcaccttgctgcagc

SEQ ID NO: 2679671 - DNA, 25 bp, Homo sapien
ggcccactgagtgttccgtgtggtc

SEQ ID NO: 2679672 - DNA, 25 bp, Homo sapien
tagatagaaggcgtccctcgggctt

SEQ ID NO: 2679673 - DNA, 25 bp, Homo sapien
agccaggtggcatctatcaccttca

SEQ ID NO: 2679674 - DNA, 25 bp, Homo sapien
tcctcttggggtctacactctgtgc

SEQ ID NO: 2679675 - DNA, 25 bp, Homo sapien
tggggtctacactctgtgctgccac

SEQ ID NO: 2679676 - DNA, 25 bp, Homo sapien
tgcagtcggggacaattcattaaac

SEQ ID NO: 2679677 - DNA, 25 bp, Homo sapien
gcaaggtaactgcaagctcttgcag

SEQ ID NO: 2679678 - DNA, 25 bp, Homo sapien
tcttgcagtcggggacaattcatta

SEQ ID NO: 2679679 - DNA, 25 bp, Homo sapien
ctgcaaggtaactgcaagctcttgc

SEQ ID NO: 2679680 - DNA, 25 bp, Homo sapien
catcctttacctttaggtgatcctg

SEQ ID NO: 2679681 - DNA, 25 bp, Homo sapien
ctgtccaggtaaactctcaatctgg

SEQ ID NO: 2679682 - DNA, 25 bp, Homo sapien
cttcaaccataatcctactgccatt

SEQ ID NO: 2679683 - DNA, 25 bp, Homo sapien
taatcctactgccattctcagcagc

SEQ ID NO: 2679684 - DNA, 25 bp, Homo sapien
cgctcataagtcatggctattctcc

SEQ ID NO: 2679685 - DNA, 25 bp, Homo sapien
gaaaatacgctcataagtcatggct

SEQ ID NO: 2679686 - DNA, 25 bp, Homo sapien
gatgaagaaaatacgctcataagtc

SEQ ID NO: 2679687 - DNA, 25 bp, Homo sapien
catggctattctccagtcatctgct

SEQ ID NO: 2679688 - DNA, 25 bp, Homo sapien
aaaccaagagtacagttcctgggca

SEQ ID NO: 2679689 - DNA, 25 bp, Homo sapien
ctttcacaagctcggacagtccatg

SEQ ID NO: 2679690 - DNA, 25 bp, Homo sapien
taagtgctccaatgcttctagagga

SEQ ID NO: 2679691 - DNA, 25 bp, Homo sapien
gccgggccgtccatgtgaatgtata

SEQ ID NO: 2679692 - DNA, 25 bp, Homo sapien
tatatgcctaggtctagaccaccag

SEQ ID NO: 2679693 - DNA, 25 bp, Homo sapien
cagagcgctgcagacattaaaacaa

SEQ ID NO: 2679694 - DNA, 25 bp, Homo sapien
tgattaagatcactgagccactcct

SEQ ID NO: 2679695 - DNA, 25 bp, Homo sapien
gcatgaaggcatttgctctacgaaa

SEQ ID NO: 2679696 - DNA, 25 bp, Homo sapien
tccatccccaatttgccccctaaca

SEQ ID NO: 2679697 - DNA, 25 bp, Homo sapien
atccccaatttgccccctaacacag

SEQ ID NO: 2679698 - DNA, 25 bp, Homo sapien
catccccaatttgccccctaacaca

SEQ ID NO: 2679699 - DNA, 25 bp, Homo sapien
ccccaatttgccccctaacacagca

SEQ ID NO: 2679700 - DNA, 25 bp, Homo sapien
tgtggacggtcataaaaaccagcaa

SEQ ID NO: 2679701 - DNA, 25 bp, Homo sapien
actgtggacggtcataaaaaccagc

SEQ ID NO: 2679702 - DNA, 25 bp, Homo sapien
tcatgactgtggacggtcataaaaa

SEQ ID NO: 2679703 - DNA, 25 bp, Homo sapien
atgactgtggacggtcataaaaacc

SEQ ID NO: 2679704 - DNA, 25 bp, Homo sapien
gctgtgggggtgagtaggaacccat

SEQ ID NO: 2679705 - DNA, 25 bp, Homo sapien
tccctgtgggctcgtgggctcgctg

SEQ ID NO: 2679706 - DNA, 25 bp, Homo sapien
cctccctgtgggctcgtgggctcgc

SEQ ID NO: 2679707 - DNA, 25 bp, Homo sapien
cgaagccccggaccctggcggtgag

SEQ ID NO: 2679708 - DNA, 25 bp, Homo sapien
aaggcggtgcatctggagttgttca

SEQ ID NO: 2679709 - DNA, 25 bp, Homo sapien
gtgaattctggagggacaggctgtg

SEQ ID NO: 2679710 - DNA, 25 bp, Homo sapien
agtgtgaattctggagggacaggct

SEQ ID NO: 2679711 - DNA, 25 bp, Homo sapien
ctcagtgtgaattctggagggacag

SEQ ID NO: 2679712 - DNA, 25 bp, Homo sapien
tctcagtgtgaattctggagggaca

SEQ ID NO: 2679713 - DNA, 25 bp, Homo sapien
gtttgagaaatgggattctgagcta

SEQ ID NO: 2679714 - DNA, 25 bp, Homo sapien
gtgtttgagaaatgggattctgagc

SEQ ID NO: 2679715 - DNA, 25 bp, Homo sapien
ttgtgtttgagaaatgggattctga

SEQ ID NO: 2679716 - DNA, 25 bp, Homo sapien
ttgagaaatgggattctgagctata

SEQ ID NO: 2679717 - DNA, 25 bp, Homo sapien
ggtttatggtctgagtcttccgtcg

SEQ ID NO: 2679718 - DNA, 25 bp, Homo sapien
tctggcgaggcatacttcaaaaagg

SEQ ID NO: 2679719 - DNA, 25 bp, Homo sapien
taagccccaatagcatctggcgagg

SEQ ID NO: 2679720 - DNA, 25 bp, Homo sapien
cgtcgtttgccattcataagcccca

SEQ ID NO: 2679721 - DNA, 25 bp, Homo sapien
caaggtgacatacctgagggctgct

SEQ ID NO: 2679722 - DNA, 25 bp, Homo sapien
tgtgagcacggagataacaaaacgc

SEQ ID NO: 2679723 - DNA, 25 bp, Homo sapien
gactgtctacctcaccaggtggctg

SEQ ID NO: 2679724 - DNA, 25 bp, Homo sapien
tgcatcctaatgtctgagcctcgct

SEQ ID NO: 2679725 - DNA, 25 bp, Homo sapien
caaagtaagttcaagtgggagcctt

SEQ ID NO: 2679726 - DNA, 25 bp, Homo sapien
ggcctttgctacctcgatttcctga

SEQ ID NO: 2679727 - DNA, 25 bp, Homo sapien
tgacgatgggctaacacctcttcat

SEQ ID NO: 2679728 - DNA, 25 bp, Homo sapien
atgaattatgatgttccctttgctt

SEQ ID NO: 2679729 - DNA, 25 bp, Homo sapien
cgctccaaggaagttgctagtaaca

SEQ ID NO: 2679730 - DNA, 25 bp, Homo sapien
tccaaggaagttgctagtaacatcc

SEQ ID NO: 2679731 - DNA, 25 bp, Homo sapien
gctagtaacatcctgttgatcatgg

SEQ ID NO: 2679732 - DNA, 25 bp, Homo sapien
ccaaggaagttgctagtaacatcct

SEQ ID NO: 2679733 - DNA, 25 bp, Homo sapien
gagaaaagttattgatatcaaccac

SEQ ID NO: 2679734 - DNA, 25 bp, Homo sapien
caccataaccaatggagagaaaagt

SEQ ID NO: 2679735 - DNA, 25 bp, Homo sapien
ccttttccacagtatgtgttaggta

SEQ ID NO: 2679736 - DNA, 25 bp, Homo sapien
tgtgttaggtaccatgtcaccataa

SEQ ID NO: 2679737 - DNA, 25 bp, Homo sapien
tcatgaaattgtgcacgtgtttttc

SEQ ID NO: 2679738 - DNA, 25 bp, Homo sapien
catgaaattgtgcacgtgtttttct

SEQ ID NO: 2679739 - DNA, 25 bp, Homo sapien
cttccttgccactacagctaccacc

SEQ ID NO: 2679740 - DNA, 25 bp, Homo sapien
tctagcttccttgccactacagcta

SEQ ID NO: 2679741 - DNA, 25 bp, Homo sapien
tacttcctaactgacctcaaggtag

SEQ ID NO: 2679742 - DNA, 25 bp, Homo sapien
caaccctgtcttgagaacagtgact

SEQ ID NO: 2679743 - DNA, 25 bp, Homo sapien
gaattggcctcatatactatactga

SEQ ID NO: 2679744 - DNA, 25 bp, Homo sapien
gactcgtctttatccaaataccaag

SEQ ID NO: 2679745 - DNA, 25 bp, Homo sapien
tctcaagtgactatcaagaaaggct

SEQ ID NO: 2679746 - DNA, 25 bp, Homo sapien
gattgcattccacattgagcagtag

SEQ ID NO: 2679747 - DNA, 25 bp, Homo sapien
gctaatatttggacagcgattgccc

SEQ ID NO: 2679748 - DNA, 25 bp, Homo sapien
gcgattgcccaactggatggtatac

SEQ ID NO: 2679749 - DNA, 25 bp, Homo sapien
cctttaggtcaggtgtatgaggcct

SEQ ID NO: 2679750 - DNA, 25 bp, Homo sapien
agcagcagggatagatttgttcatg

SEQ ID NO: 2679751 - DNA, 25 bp, Homo sapien
gatttgttcatgctccaacctctct

SEQ ID NO: 2679752 - DNA, 25 bp, Homo sapien
gcagggatagatttgttcatgctcc

SEQ ID NO: 2679753 - DNA, 25 bp, Homo sapien
ccagatgttctgttgtaacttgaaa

SEQ ID NO: 2679754 - DNA, 25 bp, Homo sapien
catagcgatcagaacaatgtgtatt

SEQ ID NO: 2679755 - DNA, 25 bp, Homo sapien
gtcaccaattttacattaagtgcca

SEQ ID NO: 2679756 - DNA, 25 bp, Homo sapien
gttgctatcaggtccactcgatcca

SEQ ID NO: 2679757 - DNA, 25 bp, Homo sapien
acttgatttcaatttgtattcccat

SEQ ID NO: 2679758 - DNA, 25 bp, Homo sapien
tagaacatagcacttgatttcaatt

SEQ ID NO: 2679759 - DNA, 25 bp, Homo sapien
acatagcacttgatttcaatttgta

SEQ ID NO: 2679760 - DNA, 25 bp, Homo sapien
gaacatagcacttgatttcaatttg

SEQ ID NO: 2679761 - DNA, 25 bp, Homo sapien
gaagcctagatccctgcctggtgag

SEQ ID NO: 2679762 - DNA, 25 bp, Homo sapien
gagaagcctagatccctgcctggtg

SEQ ID NO: 2679763 - DNA, 25 bp, Homo sapien
aagcctagatccctgcctggtgagg

SEQ ID NO: 2679764 - DNA, 25 bp, Homo sapien
agaagcctagatccctgcctggtga

SEQ ID NO: 2679765 - DNA, 25 bp, Homo sapien
gcagcatgagtagttgttatttgag

SEQ ID NO: 2679766 - DNA, 25 bp, Homo sapien
gtgcagcatgagtagttgttatttg

SEQ ID NO: 2679767 - DNA, 25 bp, Homo sapien
tgcagcatgagtagttgttatttga

SEQ ID NO: 2679768 - DNA, 25 bp, Homo sapien
ccgtgtattgcaattgttgtctcca

SEQ ID NO: 2679769 - DNA, 25 bp, Homo sapien
ggtgttgagttctccaccgtgtatt

SEQ ID NO: 2679770 - DNA, 25 bp, Homo sapien
aatcaaggggtgttgagttctccac

SEQ ID NO: 2679771 - DNA, 25 bp, Homo sapien
tctccaccgtgtattgcaattgttg

SEQ ID NO: 2679772 - DNA, 25 bp, Homo sapien
tgatgaatagcttgcaggaattttc

SEQ ID NO: 2679773 - DNA, 25 bp, Homo sapien
tttcttacttttgcatgatctatct

SEQ ID NO: 2679774 - DNA, 25 bp, Homo sapien
acttttgcatgatctatctttttca

SEQ ID NO: 2679775 - DNA, 25 bp, Homo sapien
caggaattttcgttgatgttttctt

SEQ ID NO: 2679776 - DNA, 25 bp, Homo sapien
gatgtgaccatatctgctcttctcc

SEQ ID NO: 2679777 - DNA, 25 bp, Homo sapien
tctccatatagaattaagagcaagt

SEQ ID NO: 2679778 - DNA, 25 bp, Homo sapien
cattactaccctcgtaggtttcata

SEQ ID NO: 2679779 - DNA, 25 bp, Homo sapien
tttctgagccacagatgtgaccata

SEQ ID NO: 2679780 - DNA, 25 bp, Homo sapien
gcatccaacagagtagagaggctat

SEQ ID NO: 2679781 - DNA, 25 bp, Homo sapien
tgcccttaggaatcgagccctgtgt

SEQ ID NO: 2679782 - DNA, 25 bp, Homo sapien
taaggtctgattgtacccagtgccg

SEQ ID NO: 2679783 - DNA, 25 bp, Homo sapien
tgccgacagataaggccgagggtct

SEQ ID NO: 2679784 - DNA, 25 bp, Homo sapien
tgcaaatgttgaaaggagcggctca

SEQ ID NO: 2679785 - DNA, 25 bp, Homo sapien
tctggaacaaaataacacaatgtgg

SEQ ID NO: 2679786 - DNA, 25 bp, Homo sapien
tccaaattaggacaactcagaagcc

SEQ ID NO: 2679787 - DNA, 25 bp, Homo sapien
ggaagatcctgttatggttctgcag

SEQ ID NO: 2679788 - DNA, 25 bp, Homo sapien
aagtccaccaaagtgtttgcttggt

SEQ ID NO: 2679789 - DNA, 25 bp, Homo sapien
tgcttgtcgtagctctccatctgag

SEQ ID NO: 2679790 - DNA, 25 bp, Homo sapien
tgtttccagggtaacaatcctcttc

SEQ ID NO: 2679791 - DNA, 25 bp, Homo sapien
gcctgatggtctggcttatgagccc

SEQ ID NO: 2679792 - DNA, 25 bp, Homo sapien
ggatgctaccaatcaaagtctctag

SEQ ID NO: 2679793 - DNA, 25 bp, Homo sapien
tagctactctctgatgaagttggtg

SEQ ID NO: 2679794 - DNA, 25 bp, Homo sapien
tcctggacgaggaccgggaccgctc

SEQ ID NO: 2679795 - DNA, 25 bp, Homo sapien
tgctgtggaagaggaccgccgcctc

SEQ ID NO: 2679796 - DNA, 25 bp, Homo sapien
gggaccgctcagcattgtaagtgac

SEQ ID NO: 2679797 - DNA, 25 bp, Homo sapien
tctgacatcagaacccggataacgc

SEQ ID NO: 2679798 - DNA, 25 bp, Homo sapien
tagcaataataggtgcattccctgt

SEQ ID NO: 2679799 - DNA, 25 bp, Homo sapien
gataacgctgattagaaccataggg

SEQ ID NO: 2679800 - DNA, 25 bp, Homo sapien
tagtgaaattacaggaggaacaatc

SEQ ID NO: 2679801 - DNA, 25 bp, Homo sapien
tgataatccgctattttaccttgaa

SEQ ID NO: 2679802 - DNA, 25 bp, Homo sapien
gaaatgtcaagtgaccaaacgagta

SEQ ID NO: 2679803 - DNA, 25 bp, Homo sapien
caaccagccaaacttttggctatca

SEQ ID NO: 2679804 - DNA, 25 bp, Homo sapien
ttggctatcaaaattatcagtgtgc

SEQ ID NO: 2679805 - DNA, 25 bp, Homo sapien
atgtcattatctccttcacatggga

SEQ ID NO: 2679806 - DNA, 25 bp, Homo sapien
gaaagttttgcttgtgtctggcaca

SEQ ID NO: 2679807 - DNA, 25 bp, Homo sapien
catgggaaacattctactgcttctt

SEQ ID NO: 2679808 - DNA, 25 bp, Homo sapien
gcttcttcatgaatttggctttgga

SEQ ID NO: 2679809 - DNA, 25 bp, Homo sapien
gcataggaataccatataaatccag

SEQ ID NO: 2679810 - DNA, 25 bp, Homo sapien
aatccagctccttacatcgggagtg

SEQ ID NO: 2679811 - DNA, 25 bp, Homo sapien
caaaggaagaatcatccagcgtgtg

SEQ ID NO: 2679812 - DNA, 25 bp, Homo sapien
gaagagtacagggtcctgatggcat

SEQ ID NO: 2679813 - DNA, 25 bp, Homo sapien
cttccaatatatccaaggtatgcct

SEQ ID NO: 2679814 - DNA, 25 bp, Homo sapien
ttccaatatatccaaggtatgcctg

SEQ ID NO: 2679815 - DNA, 25 bp, Homo sapien
cgtggtcagcactcagatactggtg

SEQ ID NO: 2679816 - DNA, 25 bp, Homo sapien
tgtaagcgcagaagcctaccgtggt

SEQ ID NO: 2679817 - DNA, 25 bp, Homo sapien
cagatactggtgctttcatgagaga

SEQ ID NO: 2679818 - DNA, 25 bp, Homo sapien
tgctttcatgagagatttttagcct

SEQ ID NO: 2679819 - DNA, 25 bp, Homo sapien
gaattgtcttcatgtttatgggagg

SEQ ID NO: 2679820 - DNA, 25 bp, Homo sapien
gctttctgctcaattgtagttgaag

SEQ ID NO: 2679821 - DNA, 25 bp, Homo sapien
gtttatgggaggctttctgctcaat

SEQ ID NO: 2679822 - DNA, 25 bp, Homo sapien
ttacgaattgtcttcatgtttatgg

SEQ ID NO: 2679823 - DNA, 25 bp, Homo sapien
gaccctaagatgaagtacgtttgct

SEQ ID NO: 2679824 - DNA, 25 bp, Homo sapien
cagtctgtaacaaaggatgagatcc

SEQ ID NO: 2679825 - DNA, 25 bp, Homo sapien
tatttttacaatgcttccagactgg

SEQ ID NO: 2679826 - DNA, 25 bp, Homo sapien
tccagactggatcacttttgcatga

SEQ ID NO: 2679827 - DNA, 25 bp, Homo sapien
taaatgaacctggtcgggctcaaca

SEQ ID NO: 2679828 - DNA, 25 bp, Homo sapien
aatgaacctggtcgggctcaacagg

SEQ ID NO: 2679829 - DNA, 25 bp, Homo sapien
tgaacctggtcgggctcaacaggtt

SEQ ID NO: 2679830 - DNA, 25 bp, Homo sapien
cttaaatgaacctggtcgggctcaa

SEQ ID NO: 2679831 - DNA, 25 bp, Homo sapien
ttggcttggtggttacatcatcact

SEQ ID NO: 2679832 - DNA, 25 bp, Homo sapien
actcagctaagccattgagcacctg

SEQ ID NO: 2679833 - DNA, 25 bp, Homo sapien
tggcttggtggttacatcatcactc

SEQ ID NO: 2679834 - DNA, 25 bp, Homo sapien
gcacctggaagagcattagaactcc

SEQ ID NO: 2679835 - DNA, 25 bp, Homo sapien
cattagaactccaaatggcaggttg

SEQ ID NO: 2679836 - DNA, 25 bp, Homo sapien
agcattagaactccaaatggcaggt

SEQ ID NO: 2679837 - DNA, 25 bp, Homo sapien
tagaactccaaatggcaggttgagt

SEQ ID NO: 2679838 - DNA, 25 bp, Homo sapien
gccgtgtagtgtccctcagaaacgt

SEQ ID NO: 2679839 - DNA, 25 bp, Homo sapien
ccaggatattgactagactttttgc

SEQ ID NO: 2679840 - DNA, 25 bp, Homo sapien
gaaacgttgttgcaaatcccaggat

SEQ ID NO: 2679841 - DNA, 25 bp, Homo sapien
tagtgtccctcagaaacgttgttgc

SEQ ID NO: 2679842 - DNA, 25 bp, Homo sapien
gtcatgtttatcatataggtttctc

SEQ ID NO: 2679843 - DNA, 25 bp, Homo sapien
tcatgtttatcatataggtttctca

SEQ ID NO: 2679844 - DNA, 25 bp, Homo sapien
ggtcatgtttatcatataggtttct

SEQ ID NO: 2679845 - DNA, 25 bp, Homo sapien
tattctattgtaacataatgtgatg

SEQ ID NO: 2679846 - DNA, 25 bp, Homo sapien
aaacagtgtctgatatgagcagatg

SEQ ID NO: 2679847 - DNA, 25 bp, Homo sapien
ggaggtggttcaggatattctattg

SEQ ID NO: 2679848 - DNA, 25 bp, Homo sapien
aactgtttgtgaagcatgttgacaa

SEQ ID NO: 2679849 - DNA, 25 bp, Homo sapien
ggcttcatggcctgcccaattgaga

SEQ ID NO: 2679850 - DNA, 25 bp, Homo sapien
gagcaccagggaccctgctgtttgg

SEQ ID NO: 2679851 - DNA, 25 bp, Homo sapien
ggcctgcccaattgagagcaccagg

SEQ ID NO: 2679852 - DNA, 25 bp, Homo sapien
gaaacgctggcttcatggcctgccc

SEQ ID NO: 2679853 - DNA, 25 bp, Homo sapien
aggaccagaagcacaacggatacca

SEQ ID NO: 2679854 - DNA, 25 bp, Homo sapien
cggataccagcactctagttggaga

SEQ ID NO: 2679855 - DNA, 25 bp, Homo sapien
gttggagatgccagttccaaatcat

SEQ ID NO: 2679856 - DNA, 25 bp, Homo sapien
caaccccatactagcccgagaaagg

SEQ ID NO: 2679857 - DNA, 25 bp, Homo sapien
ctattcatgttagatgtctgcagga

SEQ ID NO: 2679858 - DNA, 25 bp, Homo sapien
tattcatgttagatgtctgcaggaa

SEQ ID NO: 2679859 - DNA, 25 bp, Homo sapien
acagggtaggtccagtcatggtgat

SEQ ID NO: 2679860 - DNA, 25 bp, Homo sapien
atgtatcactggcattttgttcaat

SEQ ID NO: 2679861 - DNA, 25 bp, Homo sapien
tgtatcactggcattttgttcaatc

SEQ ID NO: 2679862 - DNA, 25 bp, Homo sapien
aaccaaggtttgagtatgaagcgga

SEQ ID NO: 2679863 - DNA, 25 bp, Homo sapien
gtggagaaccaaggtttgagtatga

SEQ ID NO: 2679864 - DNA, 25 bp, Homo sapien
aaggtttgagtatgaagcggagttc

SEQ ID NO: 2679865 - DNA, 25 bp, Homo sapien
gagaaccaaggtttgagtatgaagc

SEQ ID NO: 2679866 - DNA, 25 bp, Homo sapien
tcagctgtagggtcatggcatgacc

SEQ ID NO: 2679867 - DNA, 25 bp, Homo sapien
tgtggcaagaggtgagttccaatca

SEQ ID NO: 2679868 - DNA, 25 bp, Homo sapien
gaagaaatgtaaagaagatgcacag

SEQ ID NO: 2679869 - DNA, 25 bp, Homo sapien
caagaggtgagttccaatcagctgt

SEQ ID NO: 2679870 - DNA, 25 bp, Homo sapien
atttgcatttgcacactttcctgca

SEQ ID NO: 2679871 - DNA, 25 bp, Homo sapien
tttgcatttgcacactttcctgcat

SEQ ID NO: 2679872 - DNA, 25 bp, Homo sapien
gatttgcatttgcacactttcctgc

SEQ ID NO: 2679873 - DNA, 25 bp, Homo sapien
aaaatgcagggggcaggaggcctgg

SEQ ID NO: 2679874 - DNA, 25 bp, Homo sapien
cttgagtcaaaatgcagggggcagg

SEQ ID NO: 2679875 - DNA, 25 bp, Homo sapien
tcaaaatgcagggggcaggaggcct

SEQ ID NO: 2679876 - DNA, 25 bp, Homo sapien
tgagtcaaaatgcagggggcaggag

SEQ ID NO: 2679877 - DNA, 25 bp, Homo sapien
cctggactccggaaagcggagacct

SEQ ID NO: 2679878 - DNA, 25 bp, Homo sapien
tgatgtaagccctgaaaggtccggt

SEQ ID NO: 2679879 - DNA, 25 bp, Homo sapien
cactgacgcaatggctcgggcagaa

SEQ ID NO: 2679880 - DNA, 25 bp, Homo sapien
cctgcaggatatttggctagtgcgg

SEQ ID NO: 2679881 - DNA, 25 bp, Homo sapien
gccttctgtttaactattctttgct

SEQ ID NO: 2679882 - DNA, 25 bp, Homo sapien
aagccttctgtttaactattctttg

SEQ ID NO: 2679883 - DNA, 25 bp, Homo sapien
ttatgaatgtgtttagtgttaccat

SEQ ID NO: 2679884 - DNA, 25 bp, Homo sapien
cttctgtttaactattctttgcttc

SEQ ID NO: 2679885 - DNA, 25 bp, Homo sapien
tcaggttcatctgcattggattttc

SEQ ID NO: 2679886 - DNA, 25 bp, Homo sapien
agtgacctcctgcttgtcactttca

SEQ ID NO: 2679887 - DNA, 25 bp, Homo sapien
tgccagtgacctcctgcttgtcact

SEQ ID NO: 2679888 - DNA, 25 bp, Homo sapien
actttcaggttcatctgcattggat

SEQ ID NO: 2679889 - DNA, 25 bp, Homo sapien
agtcccaaatggcatatatggtcag

SEQ ID NO: 2679890 - DNA, 25 bp, Homo sapien
gctgagtcccaaatggcatatatgg

SEQ ID NO: 2679891 - DNA, 25 bp, Homo sapien
cccaaatggcatatatggtcagaag

SEQ ID NO: 2679892 - DNA, 25 bp, Homo sapien
atggcatatatggtcagaagaaagg

SEQ ID NO: 2679893 - DNA, 25 bp, Homo sapien
tatggataaacttgggagattcaca

SEQ ID NO: 2679894 - DNA, 25 bp, Homo sapien
acgtctccattcagagcatttatgg

SEQ ID NO: 2679895 - DNA, 25 bp, Homo sapien
acagtcactcctgtcattcagtgtg

SEQ ID NO: 2679896 - DNA, 25 bp, Homo sapien
gtcactcctgtcattcagtgtgtac

SEQ ID NO: 2679897 - DNA, 25 bp, Homo sapien
ttaatagtacttgaatagtgcaacc

SEQ ID NO: 2679898 - DNA, 25 bp, Homo sapien
atttccatattctcatcctgggtct

SEQ ID NO: 2679899 - DNA, 25 bp, Homo sapien
tcttcctgagaccacaggtctgcct

SEQ ID NO: 2679900 - DNA, 25 bp, Homo sapien
ttgaatagtgcaaccaacttctcag

SEQ ID NO: 2679901 - DNA, 25 bp, Homo sapien
tgcataaaatctggtgtaaagtaag

SEQ ID NO: 2679902 - DNA, 25 bp, Homo sapien
tgtaaagtaagaactattaaggaga

SEQ ID NO: 2679903 - DNA, 25 bp, Homo sapien
ctattaaggagagttaaggaagtca

SEQ ID NO: 2679904 - DNA, 25 bp, Homo sapien
taaggagagttaaggaagtcataga

SEQ ID NO: 2679905 - DNA, 25 bp, Homo sapien
taactgggcccatttttagagtgga

SEQ ID NO: 2679906 - DNA, 25 bp, Homo sapien
cagcagggagaatccgaagacttat

SEQ ID NO: 2679907 - DNA, 25 bp, Homo sapien
cattaaagatgcctccacaagggag

SEQ ID NO: 2679908 - DNA, 25 bp, Homo sapien
caactggtcagattgataactgggc

SEQ ID NO: 2679909 - DNA, 25 bp, Homo sapien
ctgtctctgttcctttcacccagga

SEQ ID NO: 2679910 - DNA, 25 bp, Homo sapien
tgtctctgttcctttcacccaggat

SEQ ID NO: 2679911 - DNA, 25 bp, Homo sapien
tctgttcctttcacccaggatttct

SEQ ID NO: 2679912 - DNA, 25 bp, Homo sapien
tctctgttcctttcacccaggattt

SEQ ID NO: 2679913 - DNA, 25 bp, Homo sapien
taagcagtacaagaccaatatggtg

SEQ ID NO: 2679914 - DNA, 25 bp, Homo sapien
gctgtatgccaatctaaactttggg

SEQ ID NO: 2679915 - DNA, 25 bp, Homo sapien
tgttgtctaagatggatgcacgggt

SEQ ID NO: 2679916 - DNA, 25 bp, Homo sapien
tgcacgggttctgctgtcacagcca

SEQ ID NO: 2679917 - DNA, 25 bp, Homo sapien
gttagtgtggtcatctgtactccga

SEQ ID NO: 2679918 - DNA, 25 bp, Homo sapien
tgaaacatctgtctggcatcccata

SEQ ID NO: 2679919 - DNA, 25 bp, Homo sapien
aaaagcttgcattatattcagattc

SEQ ID NO: 2679920 - DNA, 25 bp, Homo sapien
ctgagaatcctcagttctttgttag

SEQ ID NO: 2679921 - DNA, 25 bp, Homo sapien
aaaagtgtgactgccctgatgctct

SEQ ID NO: 2679922 - DNA, 25 bp, Homo sapien
aagtgtgactgccctgatgctcttc

SEQ ID NO: 2679923 - DNA, 25 bp, Homo sapien
aaaaagtgtgactgccctgatgctc

SEQ ID NO: 2679924 - DNA, 25 bp, Homo sapien
aaagtgtgactgccctgatgctctt

SEQ ID NO: 2679925 - DNA, 25 bp, Homo sapien
gctgttttagcatctttgtatttct

SEQ ID NO: 2679926 - DNA, 25 bp, Homo sapien
gcatctttgtatttctggaactcca

SEQ ID NO: 2679927 - DNA, 25 bp, Homo sapien
ctgagttactgctgttttagcatct

SEQ ID NO: 2679928 - DNA, 25 bp, Homo sapien
tgctgtaaactctgctctgagttac

SEQ ID NO: 2679929 - DNA, 25 bp, Homo sapien
tgacccccacctactggtaaacatg

SEQ ID NO: 2679930 - DNA, 25 bp, Homo sapien
gtaaacatggcccacctagtgttct

SEQ ID NO: 2679931 - DNA, 25 bp, Homo sapien
ggatgattagggactaggtagggag

SEQ ID NO: 2679932 - DNA, 25 bp, Homo sapien
tctcatgtctgacgaatccgcatca

SEQ ID NO: 2679933 - DNA, 25 bp, Homo sapien
catggatgaagttaattctccatcc

SEQ ID NO: 2679934 - DNA, 25 bp, Homo sapien
ccttggtcttggaagacattatcat

SEQ ID NO: 2679935 - DNA, 25 bp, Homo sapien
gcttctccgagtgcctcaggtggta

SEQ ID NO: 2679936 - DNA, 25 bp, Homo sapien
caggtggtaaccaatatgaagtggg

SEQ ID NO: 2679937 - DNA, 25 bp, Homo sapien
tcctatcgctgcctcagtaccagtg

SEQ ID NO: 2679938 - DNA, 25 bp, Homo sapien
cagtaccagtggtttccaagggcag

SEQ ID NO: 2679939 - DNA, 25 bp, Homo sapien
tcgctgcctcagtaccagtggtttc

SEQ ID NO: 2679940 - DNA, 25 bp, Homo sapien
accttcctatcgctgcctcagtacc

SEQ ID NO: 2679941 - DNA, 25 bp, Homo sapien
gtgctgactttgtagagatccaccc

SEQ ID NO: 2679942 - DNA, 25 bp, Homo sapien
ggtgctgactttgtagagatccacc

SEQ ID NO: 2679943 - DNA, 25 bp, Homo sapien
gctgactttgtagagatccacccat

SEQ ID NO: 2679944 - DNA, 25 bp, Homo sapien
tgctgactttgtagagatccaccca

SEQ ID NO: 2679945 - DNA, 25 bp, Homo sapien
cacaacttgtactttgcttctccgg

SEQ ID NO: 2679946 - DNA, 25 bp, Homo sapien
ctcgagcacaacttgtactttgctt

SEQ ID NO: 2679947 - DNA, 25 bp, Homo sapien
acttgtactttgcttctccggtcat

SEQ ID NO: 2679948 - DNA, 25 bp, Homo sapien
caacttgtactttgcttctccggtc

SEQ ID NO: 2679949 - DNA, 25 bp, Homo sapien
aagttatctgatcttgctgactgaa

SEQ ID NO: 2679950 - DNA, 25 bp, Homo sapien
gagtttgattgtccaccctcacatg

SEQ ID NO: 2679951 - DNA, 25 bp, Homo sapien
acatccattctgttttaagggactc

SEQ ID NO: 2679952 - DNA, 25 bp, Homo sapien
ctcacatggcccgatggattctctt

SEQ ID NO: 2679953 - DNA, 25 bp, Homo sapien
aaacagcaagaacttgagggttgtg

SEQ ID NO: 2679954 - DNA, 25 bp, Homo sapien
attgtgtgggactgtgaagaattcc

SEQ ID NO: 2679955 - DNA, 25 bp, Homo sapien
acagcaagaacttgagggttgtgtg

SEQ ID NO: 2679956 - DNA, 25 bp, Homo sapien
tggttttgatcttgcagggttattg

SEQ ID NO: 2679957 - DNA, 25 bp, Homo sapien
tagcagaggcatcgtgttcaattct

SEQ ID NO: 2679958 - DNA, 25 bp, Homo sapien
tagaatatttagcagaggcatcgtg

SEQ ID NO: 2679959 - DNA, 25 bp, Homo sapien
aatatttagcagaggcatcgtgttc

SEQ ID NO: 2679960 - DNA, 25 bp, Homo sapien
agggctagaatatttagcagaggca

SEQ ID NO: 2679961 - DNA, 25 bp, Homo sapien
tctttgtgaattgtcttgtttgcta

SEQ ID NO: 2679962 - DNA, 25 bp, Homo sapien
aattgtcttgtttgctactgctgag

SEQ ID NO: 2679963 - DNA, 25 bp, Homo sapien
ttgtcttgtttgctactgctgagtg

SEQ ID NO: 2679964 - DNA, 25 bp, Homo sapien
tgtgaattgtcttgtttgctactgc

SEQ ID NO: 2679965 - DNA, 25 bp, Homo sapien
tccctgttgagtctggctccctggt

SEQ ID NO: 2679966 - DNA, 25 bp, Homo sapien
tatggaagcattaacgggcacccca

SEQ ID NO: 2679967 - DNA, 25 bp, Homo sapien
taatgggatgatcagaccttcttcc

SEQ ID NO: 2679968 - DNA, 25 bp, Homo sapien
cttgcacttggaaggttatggaagc

SEQ ID NO: 2679969 - DNA, 25 bp, Homo sapien
aggatggtggtgatcttgctgcaac

SEQ ID NO: 2679970 - DNA, 25 bp, Homo sapien
gggaaaataattggcagtactgagg

SEQ ID NO: 2679971 - DNA, 25 bp, Homo sapien
tctccaatctaggctttctacagcc

SEQ ID NO: 2679972 - DNA, 25 bp, Homo sapien
catattgctagtctggcttctccaa

SEQ ID NO: 2679973 - DNA, 25 bp, Homo sapien
aggctggtagcattaaattagcttt

SEQ ID NO: 2679974 - DNA, 25 bp, Homo sapien
tttaatggaaatctgttactcaggc

SEQ ID NO: 2679975 - DNA, 25 bp, Homo sapien
ttttaccctcaactcaagtagcaaa

SEQ ID NO: 2679976 - DNA, 25 bp, Homo sapien
gcaaatatcatggagaacttcagtg

SEQ ID NO: 2679977 - DNA, 25 bp, Homo sapien
tcatgtgtggaaacctgcgattata

SEQ ID NO: 2679978 - DNA, 25 bp, Homo sapien
tatcccgttactttaattggtcata

SEQ ID NO: 2679979 - DNA, 25 bp, Homo sapien
ggtgtcaccagcatacatgttaaag

SEQ ID NO: 2679980 - DNA, 25 bp, Homo sapien
gaggacccaattctgggtgtcacca

SEQ ID NO: 2679981 - DNA, 25 bp, Homo sapien
gaacctattttggatatcccggaca

SEQ ID NO: 2679982 - DNA, 25 bp, Homo sapien
tgtttctccctcaatgacagatgaa

SEQ ID NO: 2679983 - DNA, 25 bp, Homo sapien
gacaagtaaacctgaactgaccata

SEQ ID NO: 2679984 - DNA, 25 bp, Homo sapien
caagacactgctttatgtacaagaa

SEQ ID NO: 2679985 - DNA, 25 bp, Homo sapien
tgagtggaacgtgccgctgatgaca

SEQ ID NO: 2679986 - DNA, 25 bp, Homo sapien
ccatggagggcgatggctcagattc

SEQ ID NO: 2679987 - DNA, 25 bp, Homo sapien
tttctatccccgagagccggacgtg

SEQ ID NO: 2679988 - DNA, 25 bp, Homo sapien
gcaaatccgatggttgcccacctga

SEQ ID NO: 2679989 - DNA, 25 bp, Homo sapien
tctgctgcagcggagcctccccgcc

SEQ ID NO: 2679990 - DNA, 25 bp, Homo sapien
gctctgctgcagcggagcctccccg

SEQ ID NO: 2679991 - DNA, 25 bp, Homo sapien
tgctctgctgcagcggagcctcccc

SEQ ID NO: 2679992 - DNA, 25 bp, Homo sapien
agggcggaatggcagcgcagggcca

SEQ ID NO: 2679993 - DNA, 25 bp, Homo sapien
gaagggcggaatggcagcgcagggc

SEQ ID NO: 2679994 - DNA, 25 bp, Homo sapien
ctgaagggcggaatggcagcgcagg

SEQ ID NO: 2679995 - DNA, 25 bp, Homo sapien
ggcggaatggcagcgcagggccagg

SEQ ID NO: 2679996 - DNA, 25 bp, Homo sapien
gtgaagaaagcgcagtgagagcaaa

SEQ ID NO: 2679997 - DNA, 25 bp, Homo sapien
gcttcgaaccgcgagtgaagaaagc

SEQ ID NO: 2679998 - DNA, 25 bp, Homo sapien
ctcgccgcggccattcagggaaggt

SEQ ID NO: 2679999 - DNA, 25 bp, Homo sapien
ccgcaccgtcctgtgccgagcctgg

SEQ ID NO: 2680000 - DNA, 25 bp, Homo sapien
aagcgggatatgactgctcggtgcc

SEQ ID NO: 2680001 - DNA, 25 bp, Homo sapien
gggactattaagttcacccagcaag

SEQ ID NO: 2680002 - DNA, 25 bp, Homo sapien
caagaacgtgcggtgacatcgcgac

SEQ ID NO: 2680003 - DNA, 25 bp, Homo sapien
ccagcatccgggagaggaatctcca

SEQ ID NO: 2680004 - DNA, 25 bp, Homo sapien
taaattaatttgttctccgtgtgtc

SEQ ID NO: 2680005 - DNA, 25 bp, Homo sapien
tgtgcgccgccagtccttgagctgg

SEQ ID NO: 2680006 - DNA, 25 bp, Homo sapien
gtgcgtgatctaataatcctaaatt

SEQ ID NO: 2680007 - DNA, 25 bp, Homo sapien
cagaaacacacttgggccgtggcag

SEQ ID NO: 2680008 - DNA, 25 bp, Homo sapien
ccggattggagacgaggctaccgct

SEQ ID NO: 2680009 - DNA, 25 bp, Homo sapien
atttagatgccggattggagacgag

SEQ ID NO: 2680010 - DNA, 25 bp, Homo sapien
gagacgaggctaccgctgcagacag

SEQ ID NO: 2680011 - DNA, 25 bp, Homo sapien
actccttatttagatgccggattgg

SEQ ID NO: 2680012 - DNA, 25 bp, Homo sapien
gaattagtcttggaaagtcctcaaa

SEQ ID NO: 2680013 - DNA, 25 bp, Homo sapien
gaagacacttacactctgaaagaat

SEQ ID NO: 2680014 - DNA, 25 bp, Homo sapien
tactgttcaggcacatctaagagca

SEQ ID NO: 2680015 - DNA, 25 bp, Homo sapien
tagccagaaggtacattcggttccc

SEQ ID NO: 2680016 - DNA, 25 bp, Homo sapien
tatgagagttaagagagtagaggcc

SEQ ID NO: 2680017 - DNA, 25 bp, Homo sapien
atccctcaaagttgagaccactgag

SEQ ID NO: 2680018 - DNA, 25 bp, Homo sapien
aacttcacagaaaggttcacagagt

SEQ ID NO: 2680019 - DNA, 25 bp, Homo sapien
cctggaatatatgcttgttgtaaag

SEQ ID NO: 2680020 - DNA, 25 bp, Homo sapien
tttttccagatcttcgcgccgagag

SEQ ID NO: 2680021 - DNA, 25 bp, Homo sapien
gctgacttgagatgcgccgttgcca

SEQ ID NO: 2680022 - DNA, 25 bp, Homo sapien
tttgttccgttagatcgcgcagccc

SEQ ID NO: 2680023 - DNA, 25 bp, Homo sapien
gacaaattcgatacacccgcgtcgg

SEQ ID NO: 2680024 - DNA, 25 bp, Homo sapien
gaaggcactgtactcgctaccctag

SEQ ID NO: 2680025 - DNA, 25 bp, Homo sapien
taaagtatctaacacctgaaggcac

SEQ ID NO: 2680026 - DNA, 25 bp, Homo sapien
cctccgtggcatgctttaaaaggcc

SEQ ID NO: 2680027 - DNA, 25 bp, Homo sapien
gcctctttccgacccaatgatagta

SEQ ID NO: 2680028 - DNA, 25 bp, Homo sapien
tcaacaacaaggtatgagagtgcct

SEQ ID NO: 2680029 - DNA, 25 bp, Homo sapien
tactgccaagaattgccatccagaa

SEQ ID NO: 2680030 - DNA, 25 bp, Homo sapien
tcctcatatcctttgtgacaccgga

SEQ ID NO: 2680031 - DNA, 25 bp, Homo sapien
ggttacttacagctcataaacgttg

SEQ ID NO: 2680032 - DNA, 25 bp, Homo sapien
gtaagtgaaagggaaatgcgaccat

SEQ ID NO: 2680033 - DNA, 25 bp, Homo sapien
cagtgacattcagaactattgcgtc

SEQ ID NO: 2680034 - DNA, 25 bp, Homo sapien
cagattcagtggtgtaactcaatac

SEQ ID NO: 2680035 - DNA, 25 bp, Homo sapien
catatccgttacttgctcagtgaca

SEQ ID NO: 2680036 - DNA, 25 bp, Homo sapien
gaagcagcctgttaaaagtatcgca

SEQ ID NO: 2680037 - DNA, 25 bp, Homo sapien
gacaagcaggtaactcgtggcacag

SEQ ID NO: 2680038 - DNA, 25 bp, Homo sapien
tgcggcagagactaagcgacttcat

SEQ ID NO: 2680039 - DNA, 25 bp, Homo sapien
ttatgtgtaggagcggcagagaacc

SEQ ID NO: 2680040 - DNA, 25 bp, Homo sapien
gatgcttttgaccttgcgcttccca

SEQ ID NO: 2680041 - DNA, 25 bp, Homo sapien
caaggcctgcgaggtgtttacaagc

SEQ ID NO: 2680042 - DNA, 25 bp, Homo sapien
catgcgctagctagggagatatcgg

SEQ ID NO: 2680043 - DNA, 25 bp, Homo sapien
gccagaattgtctcaaagcgtactt

SEQ ID NO: 2680044 - DNA, 25 bp, Homo sapien
aggcttgcgaggctttttggcagca

SEQ ID NO: 2680045 - DNA, 25 bp, Homo sapien
tttggcagcagaaataggtggaatc

SEQ ID NO: 2680046 - DNA, 25 bp, Homo sapien
cacctaaaagtggtattgctggttc

SEQ ID NO: 2680047 - DNA, 25 bp, Homo sapien
catctcgccgcaacacctaaaagtg

SEQ ID NO: 2680048 - DNA, 25 bp, Homo sapien
ttttctcaacaggactctcattcca

SEQ ID NO: 2680049 - DNA, 25 bp, Homo sapien
ggtgcaggagcttcttaaatatgag

SEQ ID NO: 2680050 - DNA, 25 bp, Homo sapien
ttggtgcaggagcttcttaaatatg

SEQ ID NO: 2680051 - DNA, 25 bp, Homo sapien
tctcaacaggactctcattccattg

SEQ ID NO: 2680052 - DNA, 25 bp, Homo sapien
caagtgacataatcgtctttcctgc

SEQ ID NO: 2680053 - DNA, 25 bp, Homo sapien
agtgacataatcgtctttcctgcag

SEQ ID NO: 2680054 - DNA, 25 bp, Homo sapien
gacataatcgtctttcctgcagtcc

SEQ ID NO: 2680055 - DNA, 25 bp, Homo sapien
taatcgtctttcctgcagtccattc

SEQ ID NO: 2680056 - DNA, 25 bp, Homo sapien
ctggttgggcaggagtctttctgaa

SEQ ID NO: 2680057 - DNA, 25 bp, Homo sapien
tgggcaggagtctttctgaactttg

SEQ ID NO: 2680058 - DNA, 25 bp, Homo sapien
tctgcgcaaacaggatcctcaagac

SEQ ID NO: 2680059 - DNA, 25 bp, Homo sapien
atttttttcctctgcgcaaacagga

SEQ ID NO: 2680060 - DNA, 25 bp, Homo sapien
cagggtctccacaccttagggagga

SEQ ID NO: 2680061 - DNA, 25 bp, Homo sapien
taagaggctgaacacaagcaatggc

SEQ ID NO: 2680062 - DNA, 25 bp, Homo sapien
gaagagactccctccgttccataag

SEQ ID NO: 2680063 - DNA, 25 bp, Homo sapien
tagatggtaccttctccgcacttgg

SEQ ID NO: 2680064 - DNA, 25 bp, Homo sapien
gagaacagctcatcactatccaggg

SEQ ID NO: 2680065 - DNA, 25 bp, Homo sapien
gaatggagagaacagctcatcacta

SEQ ID NO: 2680066 - DNA, 25 bp, Homo sapien
tctgaatggagagaacagctcatca

SEQ ID NO: 2680067 - DNA, 25 bp, Homo sapien
tggagagaacagctcatcactatcc

SEQ ID NO: 2680068 - DNA, 25 bp, Homo sapien
agctgtagagaatgccgaggtcttt

SEQ ID NO: 2680069 - DNA, 25 bp, Homo sapien
gatgcatgtgatgattcatatccag

SEQ ID NO: 2680070 - DNA, 25 bp, Homo sapien
agctgcttgaaagcaggatgcatgt

SEQ ID NO: 2680071 - DNA, 25 bp, Homo sapien
ctgcagaggattatgcagcagctgc

SEQ ID NO: 2680072 - DNA, 25 bp, Homo sapien
tctcggcagggagttcattgtccct

SEQ ID NO: 2680073 - DNA, 25 bp, Homo sapien
tgcagcaaggtcaaggccgagatgc

SEQ ID NO: 2680074 - DNA, 25 bp, Homo sapien
tccctggaatggacagcgctacgtc

SEQ ID NO: 2680075 - DNA, 25 bp, Homo sapien
gatgcagaatctcggcagggagttc

SEQ ID NO: 2680076 - DNA, 25 bp, Homo sapien
gctgcaaagaaaattgcggaggcag

SEQ ID NO: 2680077 - DNA, 25 bp, Homo sapien
aggatccaggatggacaagcttggc

SEQ ID NO: 2680078 - DNA, 25 bp, Homo sapien
tagatgtaatcagtgctgcaaagaa

SEQ ID NO: 2680079 - DNA, 25 bp, Homo sapien
tgcaaagaaaattgcggaggcagga

SEQ ID NO: 2680080 - DNA, 25 bp, Homo sapien
tctggcgtctgttgggcgctgctcc

SEQ ID NO: 2680081 - DNA, 25 bp, Homo sapien
cctgtgtggccaatagctggcatgt

SEQ ID NO: 2680082 - DNA, 25 bp, Homo sapien
ataatacccgggcacagtagcctgc

SEQ ID NO: 2680083 - DNA, 25 bp, Homo sapien
ttcacaggacacaggattagcaagc

SEQ ID NO: 2680084 - DNA, 25 bp, Homo sapien
ttattgccaggccttgtagagcacc

SEQ ID NO: 2680085 - DNA, 25 bp, Homo sapien
ttgtagagcaccttgccgccagagc

SEQ ID NO: 2680086 - DNA, 25 bp, Homo sapien
gcaccttgccgccagagctgccatc

SEQ ID NO: 2680087 - DNA, 25 bp, Homo sapien
tattgccaggccttgtagagcacct

SEQ ID NO: 2680088 - DNA, 25 bp, Homo sapien
ccaatccggaaggacaccactctca

SEQ ID NO: 2680089 - DNA, 25 bp, Homo sapien
accaatccggaaggacaccactctc

SEQ ID NO: 2680090 - DNA, 25 bp, Homo sapien
caccaatccggaaggacaccactct

SEQ ID NO: 2680091 - DNA, 25 bp, Homo sapien
taggaagtggatcctccttttttgc

SEQ ID NO: 2680092 - DNA, 25 bp, Homo sapien
gttctgatagttctgtgctcccacg

SEQ ID NO: 2680093 - DNA, 25 bp, Homo sapien
cagatgaggcaacttggcccctgga

SEQ ID NO: 2680094 - DNA, 25 bp, Homo sapien
tcctctgtgactcggctcaggctct

SEQ ID NO: 2680095 - DNA, 25 bp, Homo sapien
cactgagctatcatgggtggtgaca

SEQ ID NO: 2680096 - DNA, 25 bp, Homo sapien
gggtggattctcactgagctatcat

SEQ ID NO: 2680097 - DNA, 25 bp, Homo sapien
gattctcactgagctatcatgggtg

SEQ ID NO: 2680098 - DNA, 25 bp, Homo sapien
gagctatcatgggtggtgacaccta

SEQ ID NO: 2680099 - DNA, 25 bp, Homo sapien
ggaagaagtctgagctcaggcttcc

SEQ ID NO: 2680100 - DNA, 25 bp, Homo sapien
tttggagagataatggatgtcttcg

SEQ ID NO: 2680101 - DNA, 25 bp, Homo sapien
gataatggatgtcttcgggaagaag

SEQ ID NO: 2680102 - DNA, 25 bp, Homo sapien
tgtcttcgggaagaagtctgagctc

SEQ ID NO: 2680103 - DNA, 25 bp, Homo sapien
gcaccaagacactggtgcagacaag

SEQ ID NO: 2680104 - DNA, 25 bp, Homo sapien
cagggaccaagtaagaagaggcagg

SEQ ID NO: 2680105 - DNA, 25 bp, Homo sapien
cagcagcaccaagacactggtgcag

SEQ ID NO: 2680106 - DNA, 25 bp, Homo sapien
cagcaccaagacactggtgcagaca

SEQ ID NO: 2680107 - DNA, 25 bp, Homo sapien
aatggagttgttattgagaatttca

SEQ ID NO: 2680108 - DNA, 25 bp, Homo sapien
gaagtagctccctcatggcctgaca

SEQ ID NO: 2680109 - DNA, 25 bp, Homo sapien
tgatggccacaaggcccatgtaagc

SEQ ID NO: 2680110 - DNA, 25 bp, Homo sapien
ggcctgacattcaaaatggctacca

SEQ ID NO: 2680111 - DNA, 25 bp, Homo sapien
tgcttccagtgaggtatgaaaggag

SEQ ID NO: 2680112 - DNA, 25 bp, Homo sapien
atgttgcttccagtgaggtatgaaa

SEQ ID NO: 2680113 - DNA, 25 bp, Homo sapien
tgttgcttccagtgaggtatgaaag

SEQ ID NO: 2680114 - DNA, 25 bp, Homo sapien
gttgcttccagtgaggtatgaaagg

SEQ ID NO: 2680115 - DNA, 25 bp, Homo sapien
cccttggctgcaccatgctgagtgt

SEQ ID NO: 2680116 - DNA, 25 bp, Homo sapien
ttcccttggctgcaccatgctgagt

SEQ ID NO: 2680117 - DNA, 25 bp, Homo sapien
gcttcccttggctgcaccatgctga

SEQ ID NO: 2680118 - DNA, 25 bp, Homo sapien
tcatgcttcccttggctgcaccatg

SEQ ID NO: 2680119 - DNA, 25 bp, Homo sapien
tctaaaacctttgagcttctgagct

SEQ ID NO: 2680120 - DNA, 25 bp, Homo sapien
gctccggagtgtggatgcttctgaa

SEQ ID NO: 2680121 - DNA, 25 bp, Homo sapien
tgtgatgattcagctccggagtgtg

SEQ ID NO: 2680122 - DNA, 25 bp, Homo sapien
gagtctatatttccctgaatttagg

SEQ ID NO: 2680123 - DNA, 25 bp, Homo sapien
tggtagcagtgggatctgattttga

SEQ ID NO: 2680124 - DNA, 25 bp, Homo sapien
gtctccacaaccacttcttgtctct

SEQ ID NO: 2680125 - DNA, 25 bp, Homo sapien
ttcattctgagcaagctttctcatc

SEQ ID NO: 2680126 - DNA, 25 bp, Homo sapien
gtagcagtgggatctgattttgaat

SEQ ID NO: 2680127 - DNA, 25 bp, Homo sapien
ctttgtggcactcatatcagtcttc

SEQ ID NO: 2680128 - DNA, 25 bp, Homo sapien
tgtggcactcatatcagtcttctcc

SEQ ID NO: 2680129 - DNA, 25 bp, Homo sapien
tttgtggcactcatatcagtcttct

SEQ ID NO: 2680130 - DNA, 25 bp, Homo sapien
tggcactcatatcagtcttctccat

SEQ ID NO: 2680131 - DNA, 25 bp, Homo sapien
cctcaggtgaatatgctttcttgcc

SEQ ID NO: 2680132 - DNA, 25 bp, Homo sapien
ccctcaggtgaatatgctttcttgc

SEQ ID NO: 2680133 - DNA, 25 bp, Homo sapien
caccctcaggtgaatatgctttctt

SEQ ID NO: 2680134 - DNA, 25 bp, Homo sapien
tacaccctcaggtgaatatgctttc

SEQ ID NO: 2680135 - DNA, 25 bp, Homo sapien
tcaaaggcgagggttcccatggatg

SEQ ID NO: 2680136 - DNA, 25 bp, Homo sapien
caaaggcgagggttcccatggatgc

SEQ ID NO: 2680137 - DNA, 25 bp, Homo sapien
aaaggcgagggttcccatggatgcc

SEQ ID NO: 2680138 - DNA, 25 bp, Homo sapien
atcaaaggcgagggttcccatggat

SEQ ID NO: 2680139 - DNA, 25 bp, Homo sapien
tatgagacttaagggcctcagtccc

SEQ ID NO: 2680140 - DNA, 25 bp, Homo sapien
tcaagcccatttggcccaagtgatg

SEQ ID NO: 2680141 - DNA, 25 bp, Homo sapien
gacccatcgttagttacagtcatat

SEQ ID NO: 2680142 - DNA, 25 bp, Homo sapien
ttttctgccactatatgagacttaa

SEQ ID NO: 2680143 - DNA, 25 bp, Homo sapien
aggactaccactcctgtggttccaa

SEQ ID NO: 2680144 - DNA, 25 bp, Homo sapien
atcctgagacttggacagttccgcc

SEQ ID NO: 2680145 - DNA, 25 bp, Homo sapien
cagcttagcaatctgatgatcgaca

SEQ ID NO: 2680146 - DNA, 25 bp, Homo sapien
ggacagttccgccatcagcttagca

SEQ ID NO: 2680147 - DNA, 25 bp, Homo sapien
tcagtctagcaactgcttggcttct

SEQ ID NO: 2680148 - DNA, 25 bp, Homo sapien
ctcagtctagcaactgcttggcttc

SEQ ID NO: 2680149 - DNA, 25 bp, Homo sapien
tccaggtgttcaacagcaacgctgg

SEQ ID NO: 2680150 - DNA, 25 bp, Homo sapien
aaggacactatgactgatcttgtcc

SEQ ID NO: 2680151 - DNA, 25 bp, Homo sapien
caggtgttcaacagcaacgctggca

SEQ ID NO: 2680152 - DNA, 25 bp, Homo sapien
tgtccaggtgttcaacagcaacgct

SEQ ID NO: 2680153 - DNA, 25 bp, Homo sapien
tctacgttgacgagctcaaagtcag

SEQ ID NO: 2680154 - DNA, 25 bp, Homo sapien
gctcaaagtcagtatctctccgctc

SEQ ID NO: 2680155 - DNA, 25 bp, Homo sapien
cactttgccttctacgttgacgagc

SEQ ID NO: 2680156 - DNA, 25 bp, Homo sapien
aaagtcagtatctctccgctccata

SEQ ID NO: 2680157 - DNA, 25 bp, Homo sapien
ctataggtgactggaaatccttgtc

SEQ ID NO: 2680158 - DNA, 25 bp, Homo sapien
ataggtgactggaaatccttgtcca

SEQ ID NO: 2680159 - DNA, 25 bp, Homo sapien
taggtgactggaaatccttgtccac

SEQ ID NO: 2680160 - DNA, 25 bp, Homo sapien
tataggtgactggaaatccttgtcc

SEQ ID NO: 2680161 - DNA, 25 bp, Homo sapien
ttagcatcttccacttttttcggca

SEQ ID NO: 2680162 - DNA, 25 bp, Homo sapien
tagcatcttccacttttttcggcac

SEQ ID NO: 2680163 - DNA, 25 bp, Homo sapien
tgaagagctttatgatctatggagg

SEQ ID NO: 2680164 - DNA, 25 bp, Homo sapien
aagagctttatgatctatggaggtc

SEQ ID NO: 2680165 - DNA, 25 bp, Homo sapien
ttgtgaagagctttatgatctatgg

SEQ ID NO: 2680166 - DNA, 25 bp, Homo sapien
agctttatgatctatggaggtcaca

SEQ ID NO: 2680167 - DNA, 25 bp, Homo sapien
ggcaatcagttcaatttcaagtccc

SEQ ID NO: 2680168 - DNA, 25 bp, Homo sapien
acccagcgaaccacaggcaagttgt

SEQ ID NO: 2680169 - DNA, 25 bp, Homo sapien
agtccccctacccagcgaaccacag

SEQ ID NO: 2680170 - DNA, 25 bp, Homo sapien
ggacaatccgccctcttgttgagat

SEQ ID NO: 2680171 - DNA, 25 bp, Homo sapien
acaagaccggtaaagcccagcatct

SEQ ID NO: 2680172 - DNA, 25 bp, Homo sapien
gtacaagaccggtaaagcccagcat

SEQ ID NO: 2680173 - DNA, 25 bp, Homo sapien
aagaccggtaaagcccagcatcttg

SEQ ID NO: 2680174 - DNA, 25 bp, Homo sapien
tgtacaagaccggtaaagcccagca

SEQ ID NO: 2680175 - DNA, 25 bp, Homo sapien
aaccctcctctgtatgccacacgat

SEQ ID NO: 2680176 - DNA, 25 bp, Homo sapien
cctcctctgtatgccacacgattat

SEQ ID NO: 2680177 - DNA, 25 bp, Homo sapien
cctctgtatgccacacgattatcgc

SEQ ID NO: 2680178 - DNA, 25 bp, Homo sapien
aaaccctcctctgtatgccacacga

SEQ ID NO: 2680179 - DNA, 25 bp, Homo sapien
cttatggtgtactggtctaaggtgg

SEQ ID NO: 2680180 - DNA, 25 bp, Homo sapien
gtcggcaaacgctcttatggtgtac

SEQ ID NO: 2680181 - DNA, 25 bp, Homo sapien
gggcgactccagagcgtcggcaaac

SEQ ID NO: 2680182 - DNA, 25 bp, Homo sapien
cgactccagagcgtcggcaaacgct

SEQ ID NO: 2680183 - DNA, 25 bp, Homo sapien
ctggatgggattcatgccactgttt

SEQ ID NO: 2680184 - DNA, 25 bp, Homo sapien
gggattcatgccactgttttcagaa

SEQ ID NO: 2680185 - DNA, 25 bp, Homo sapien
gatgggattcatgccactgttttca

SEQ ID NO: 2680186 - DNA, 25 bp, Homo sapien
gattcatgccactgttttcagaaag

SEQ ID NO: 2680187 - DNA, 25 bp, Homo sapien
cagtcagtaccgagagcagggttca

SEQ ID NO: 2680188 - DNA, 25 bp, Homo sapien
aaccatttgtgttgcgaaagatgtc

SEQ ID NO: 2680189 - DNA, 25 bp, Homo sapien
gacatgttgtcgcttcatatcattt

SEQ ID NO: 2680190 - DNA, 25 bp, Homo sapien
gtctggctcggacttttgtcgtagt

SEQ ID NO: 2680191 - DNA, 25 bp, Homo sapien
cccttttgtcagttcccattgtgta

SEQ ID NO: 2680192 - DNA, 25 bp, Homo sapien
acaatggaaaatcatatgccacaac

SEQ ID NO: 2680193 - DNA, 25 bp, Homo sapien
gccagctaataaattgtcacacaat

SEQ ID NO: 2680194 - DNA, 25 bp, Homo sapien
caaaagaagtactgtattcggatgc

SEQ ID NO: 2680195 - DNA, 25 bp, Homo sapien
tttgctaatgccacagaaagggctc

SEQ ID NO: 2680196 - DNA, 25 bp, Homo sapien
tatcaaaggtcagtaacagtgttct

SEQ ID NO: 2680197 - DNA, 25 bp, Homo sapien
taaagtgacccacctttcatgctgc

SEQ ID NO: 2680198 - DNA, 25 bp, Homo sapien
cccagttaaacatgaaaggttgcag

SEQ ID NO: 2680199 - DNA, 25 bp, Homo sapien
taggacggaacatactcttcgtggt

SEQ ID NO: 2680200 - DNA, 25 bp, Homo sapien
cagtatttaacgcagctcgggatgg

SEQ ID NO: 2680201 - DNA, 25 bp, Homo sapien
cttgcctgtgtcgatagagttaaac

SEQ ID NO: 2680202 - DNA, 25 bp, Homo sapien
tcgggatggcaaactccggcttctc

SEQ ID NO: 2680203 - DNA, 25 bp, Homo sapien
tctcggtctgattaggtgggtgaca

SEQ ID NO: 2680204 - DNA, 25 bp, Homo sapien
gacactgcttggaagttggaacaca

SEQ ID NO: 2680205 - DNA, 25 bp, Homo sapien
cagtaaatagatgcctctggatggt

SEQ ID NO: 2680206 - DNA, 25 bp, Homo sapien
caaagcacttgtcttaccggctagt

SEQ ID NO: 2680207 - DNA, 25 bp, Homo sapien
ggcgacctccaagggtgaggcctct

SEQ ID NO: 2680208 - DNA, 25 bp, Homo sapien
cagcagtcaggcctgacaagcggcg

SEQ ID NO: 2680209 - DNA, 25 bp, Homo sapien
ggcaaagcagcagtccggcctcgag

SEQ ID NO: 2680210 - DNA, 25 bp, Homo sapien
gtccgggctctgcaagcgcggtggg

SEQ ID NO: 2680211 - DNA, 25 bp, Homo sapien
gagacccaggtatggaccttcactc

SEQ ID NO: 2680212 - DNA, 25 bp, Homo sapien
tccatggtctcatccgatgttcagt

SEQ ID NO: 2680213 - DNA, 25 bp, Homo sapien
tcatccgatgttcagtaactgggtt

SEQ ID NO: 2680214 - DNA, 25 bp, Homo sapien
ttcactcccaatttactatccatgg

SEQ ID NO: 2680215 - DNA, 25 bp, Homo sapien
tcagagtcacctgggatagtctccc

SEQ ID NO: 2680216 - DNA, 25 bp, Homo sapien
tataagcagtgtaacgtgacatgcc

SEQ ID NO: 2680217 - DNA, 25 bp, Homo sapien
gctgaactgcattgtcatctggagc

SEQ ID NO: 2680218 - DNA, 25 bp, Homo sapien
aagagtttcagcatggcttaactgg

SEQ ID NO: 2680219 - DNA, 25 bp, Homo sapien
ggatagccatcctagtcacttacca

SEQ ID NO: 2680220 - DNA, 25 bp, Homo sapien
tacggtgtttgaagaccagctactc

SEQ ID NO: 2680221 - DNA, 25 bp, Homo sapien
tcagatgccaccgtatagcaaaggg

SEQ ID NO: 2680222 - DNA, 25 bp, Homo sapien
gcggctttgcaagtgtccctttata

SEQ ID NO: 2680223 - DNA, 25 bp, Homo sapien
gactcttctaataggttaatgcagt

SEQ ID NO: 2680224 - DNA, 25 bp, Homo sapien
tactttggcagaacttcattaaaca

SEQ ID NO: 2680225 - DNA, 25 bp, Homo sapien
ttcctttcatacttactttggcaga

SEQ ID NO: 2680226 - DNA, 25 bp, Homo sapien
taatgcagtttgttggcctcataat

SEQ ID NO: 2680227 - DNA, 25 bp, Homo sapien
tccttcatgaattttaacttgtata

SEQ ID NO: 2680228 - DNA, 25 bp, Homo sapien
gagcagtgttccaatcttctgaagc

SEQ ID NO: 2680229 - DNA, 25 bp, Homo sapien
ttcctagtgagaaccgagtcagtgc

SEQ ID NO: 2680230 - DNA, 25 bp, Homo sapien
gaaggaatgttgctgtcatactcag

SEQ ID NO: 2680231 - DNA, 25 bp, Homo sapien
gagtcagtgctcttacccaggtaaa

SEQ ID NO: 2680232 - DNA, 25 bp, Homo sapien
gaatgtcaggatgctaaccaagaga

SEQ ID NO: 2680233 - DNA, 25 bp, Homo sapien
caatcacatggtggtttgggaaccc

SEQ ID NO: 2680234 - DNA, 25 bp, Homo sapien
tgtaactgattaagcataagccgtg

SEQ ID NO: 2680235 - DNA, 25 bp, Homo sapien
tcctctgtacaacccaaatggctgg

SEQ ID NO: 2680236 - DNA, 25 bp, Homo sapien
tccccctgtactcttcaaatattgc

SEQ ID NO: 2680237 - DNA, 25 bp, Homo sapien
tcttcaaatattgcacaatccagtc

SEQ ID NO: 2680238 - DNA, 25 bp, Homo sapien
caaatattgcacaatccagtccagg

SEQ ID NO: 2680239 - DNA, 25 bp, Homo sapien
cacaatccagtccaggattttaagg

SEQ ID NO: 2680240 - DNA, 25 bp, Homo sapien
tactatatgtcaaggattgtccata

SEQ ID NO: 2680241 - DNA, 25 bp, Homo sapien
tgtgatactactatatgtcaaggat

SEQ ID NO: 2680242 - DNA, 25 bp, Homo sapien
tactactatatgtcaaggattgtcc

SEQ ID NO: 2680243 - DNA, 25 bp, Homo sapien
tatgtcaaggattgtccatacccca

SEQ ID NO: 2680244 - DNA, 25 bp, Homo sapien
ctgtgttggaacaaaacagttagag

SEQ ID NO: 2680245 - DNA, 25 bp, Homo sapien
agttgccgtagtgaatcagaagctg

SEQ ID NO: 2680246 - DNA, 25 bp, Homo sapien
acagttagagttgccgtagtgaatc

SEQ ID NO: 2680247 - DNA, 25 bp, Homo sapien
tggaacaaaacagttagagttgccg

SEQ ID NO: 2680248 - DNA, 25 bp, Homo sapien
caatctcatagggagcaaaataagg

SEQ ID NO: 2680249 - DNA, 25 bp, Homo sapien
tataaaatggactgcgttttgtggc

SEQ ID NO: 2680250 - DNA, 25 bp, Homo sapien
taaatctccttaagaagggagtcac

SEQ ID NO: 2680251 - DNA, 25 bp, Homo sapien
tgagtacagttattcagcataagca

SEQ ID NO: 2680252 - DNA, 25 bp, Homo sapien
gaatagtcaacagttctttgctgaa

SEQ ID NO: 2680253 - DNA, 25 bp, Homo sapien
agaatagtcaacagttctttgctga

SEQ ID NO: 2680254 - DNA, 25 bp, Homo sapien
tccttccatgaggttgaccacttcc

SEQ ID NO: 2680255 - DNA, 25 bp, Homo sapien
ttgtttggcaagtctggatccataa

SEQ ID NO: 2680256 - DNA, 25 bp, Homo sapien
tgaattctgaaaggtgttgggtctc

SEQ ID NO: 2680257 - DNA, 25 bp, Homo sapien
aaagataccagctttgtttggcaag

SEQ ID NO: 2680258 - DNA, 25 bp, Homo sapien
cctcactagcatggccatgtgaaga

SEQ ID NO: 2680259 - DNA, 25 bp, Homo sapien
aatgaggagcactcctcactagcat

SEQ ID NO: 2680260 - DNA, 25 bp, Homo sapien
tgaggagcactcctcactagcatgg

SEQ ID NO: 2680261 - DNA, 25 bp, Homo sapien
catggccatgtgaagagagctgccc

SEQ ID NO: 2680262 - DNA, 25 bp, Homo sapien
ctatcaaacgcagagaaaggggaaa

SEQ ID NO: 2680263 - DNA, 25 bp, Homo sapien
ttttctatcaaacgcagagaaaggg

SEQ ID NO: 2680264 - DNA, 25 bp, Homo sapien
tctatcaaacgcagagaaaggggaa

SEQ ID NO: 2680265 - DNA, 25 bp, Homo sapien
ttcttttctatcaaacgcagagaaa

SEQ ID NO: 2680266 - DNA, 25 bp, Homo sapien
tccaatggactagagctggcagaac

SEQ ID NO: 2680267 - DNA, 25 bp, Homo sapien
caagcagattggaagtcaggtaggc

SEQ ID NO: 2680268 - DNA, 25 bp, Homo sapien
tgaccctttaagacttggccccaga

SEQ ID NO: 2680269 - DNA, 25 bp, Homo sapien
ggaaacctcctgatagggccttgca

SEQ ID NO: 2680270 - DNA, 25 bp, Homo sapien
cccatgagatgggagcatggactga

SEQ ID NO: 2680271 - DNA, 25 bp, Homo sapien
ggtggttccaggatgatattcaaag

SEQ ID NO: 2680272 - DNA, 25 bp, Homo sapien
tactgttccgatgcatttaagactc

SEQ ID NO: 2680273 - DNA, 25 bp, Homo sapien
agttgttggtattgcagaagcaccc

SEQ ID NO: 2680274 - DNA, 25 bp, Homo sapien
gtttaatttctcggagtgccacaga

SEQ ID NO: 2680275 - DNA, 25 bp, Homo sapien
atttctccaccagatactgaaaggg

SEQ ID NO: 2680276 - DNA, 25 bp, Homo sapien
agtgccacagaaccggcctgtaaca

SEQ ID NO: 2680277 - DNA, 25 bp, Homo sapien
tttctccaccagatactgaaaggga

SEQ ID NO: 2680278 - DNA, 25 bp, Homo sapien
ctgactctggagcaagggtactgga

SEQ ID NO: 2680279 - DNA, 25 bp, Homo sapien
gagacccttgccgattggctgttat

SEQ ID NO: 2680280 - DNA, 25 bp, Homo sapien
cagctaccttactgtggtcactgga

SEQ ID NO: 2680281 - DNA, 25 bp, Homo sapien
tatgtaggttttcagaatcctgaca

SEQ ID NO: 2680282 - DNA, 25 bp, Homo sapien
aatgaacaacttcattacccaaaga

SEQ ID NO: 2680283 - DNA, 25 bp, Homo sapien
gaatgaacaacttcattacccaaag

SEQ ID NO: 2680284 - DNA, 25 bp, Homo sapien
tgaatgaacaacttcattacccaaa

SEQ ID NO: 2680285 - DNA, 25 bp, Homo sapien
gctgaatgaacaacttcattaccca

SEQ ID NO: 2680286 - DNA, 25 bp, Homo sapien
tatgtgcaggcacagtagtcacctg

SEQ ID NO: 2680287 - DNA, 25 bp, Homo sapien
cacagtagtcacctgttaacaggaa

SEQ ID NO: 2680288 - DNA, 25 bp, Homo sapien
tgggagcagacaaagttcctccttt

SEQ ID NO: 2680289 - DNA, 25 bp, Homo sapien
agttcctcctttggccagaggttga

SEQ ID NO: 2680290 - DNA, 25 bp, Homo sapien
gccgtgaaagctagcagagagtcta

SEQ ID NO: 2680291 - DNA, 25 bp, Homo sapien
gtcttctatcgatagcggctccagg

SEQ ID NO: 2680292 - DNA, 25 bp, Homo sapien
tgcattaaataggtgcctagcgctg

SEQ ID NO: 2680293 - DNA, 25 bp, Homo sapien
cttttgaagtgcaaccagctgggtt

SEQ ID NO: 2680294 - DNA, 25 bp, Homo sapien
catgggcggtttcaactgtatttta

SEQ ID NO: 2680295 - DNA, 25 bp, Homo sapien
gttggcatgggcggtttcaactgta

SEQ ID NO: 2680296 - DNA, 25 bp, Homo sapien
ggcatgggcggtttcaactgtattt

SEQ ID NO: 2680297 - DNA, 25 bp, Homo sapien
ttggcatgggcggtttcaactgtat

SEQ ID NO: 2680298 - DNA, 25 bp, Homo sapien
aaaatagcgtcttgtggccgtcagc

SEQ ID NO: 2680299 - DNA, 25 bp, Homo sapien
catcatggaagcctacgagagcgac

SEQ ID NO: 2680300 - DNA, 25 bp, Homo sapien
gagcactacatcagccatcgggaga

SEQ ID NO: 2680301 - DNA, 25 bp, Homo sapien
tacgccaagttcgaccagtacaggt

SEQ ID NO: 2680302 - DNA, 25 bp, Homo sapien
ttgtgattagcaaagtatgacagct

SEQ ID NO: 2680303 - DNA, 25 bp, Homo sapien
taaaaacacttagagcaaactacca

SEQ ID NO: 2680304 - DNA, 25 bp, Homo sapien
tattctggtttttatctggtaccca

SEQ ID NO: 2680305 - DNA, 25 bp, Homo sapien
tgcatactgcctcagagccatgtgt

SEQ ID NO: 2680306 - DNA, 25 bp, Homo sapien
caaagaattattctgcgctaaattt

SEQ ID NO: 2680307 - DNA, 25 bp, Homo sapien
caataattaagcctggatccgataa

SEQ ID NO: 2680308 - DNA, 25 bp, Homo sapien
ggatccgataagttattgggtgact

SEQ ID NO: 2680309 - DNA, 25 bp, Homo sapien
tattctgcgctaaatttgcaacatt

SEQ ID NO: 2680310 - DNA, 25 bp, Homo sapien
caaaagcacttgatgagtaaaccca

SEQ ID NO: 2680311 - DNA, 25 bp, Homo sapien
gagagcaagcacataggacagactg

SEQ ID NO: 2680312 - DNA, 25 bp, Homo sapien
ttgagtcccaatcacataactgtgg

SEQ ID NO: 2680313 - DNA, 25 bp, Homo sapien
cattgacctgctggctgaatacctc

SEQ ID NO: 2680314 - DNA, 25 bp, Homo sapien
aaattatacaatgattgaagaacca

SEQ ID NO: 2680315 - DNA, 25 bp, Homo sapien
taaattatacaatgattgaagaacc

SEQ ID NO: 2680316 - DNA, 25 bp, Homo sapien
attatacaatgattgaagaaccaag

SEQ ID NO: 2680317 - DNA, 25 bp, Homo sapien
aattatacaatgattgaagaaccaa

SEQ ID NO: 2680318 - DNA, 25 bp, Homo sapien
agtttcactgtgtaattgcgtcccc

SEQ ID NO: 2680319 - DNA, 25 bp, Homo sapien
gtagtcgcggagaaacacatgttgc

SEQ ID NO: 2680320 - DNA, 25 bp, Homo sapien
cgttactaacgttcagaggtctgcg

SEQ ID NO: 2680321 - DNA, 25 bp, Homo sapien
gatttgaatgactagccgggaacac

SEQ ID NO: 2680322 - DNA, 25 bp, Homo sapien
cgagccagcggcctaactggagtgt

SEQ ID NO: 2680323 - DNA, 25 bp, Homo sapien
attcgaccgagcacagacacgttgc

SEQ ID NO: 2680324 - DNA, 25 bp, Homo sapien
gggcgcgcgagcctcgcctcgtaat

SEQ ID NO: 2680325 - DNA, 25 bp, Homo sapien
gaaacatttctaggtccgagccagc

SEQ ID NO: 2680326 - DNA, 25 bp, Homo sapien
gagccgcggcttcccgtggttgttg

SEQ ID NO: 2680327 - DNA, 25 bp, Homo sapien
gcggcttcccgtggttgttgaagat

SEQ ID NO: 2680328 - DNA, 25 bp, Homo sapien
cgcggcttcccgtggttgttgaaga

SEQ ID NO: 2680329 - DNA, 25 bp, Homo sapien
ccgcggcttcccgtggttgttgaag

SEQ ID NO: 2680330 - DNA, 25 bp, Homo sapien
agaacgagttccacgccgtcttcct

SEQ ID NO: 2680331 - DNA, 25 bp, Homo sapien
gggcgagaagaacgagttccacgcc

SEQ ID NO: 2680332 - DNA, 25 bp, Homo sapien
gagaagaacgagttccacgccgtct

SEQ ID NO: 2680333 - DNA, 25 bp, Homo sapien
gcgagaagaacgagttccacgccgt

SEQ ID NO: 2680334 - DNA, 25 bp, Homo sapien
tgtctgactctagcagaatgaacca

SEQ ID NO: 2680335 - DNA, 25 bp, Homo sapien
tcctatctcagcctcgagcgagtag

SEQ ID NO: 2680336 - DNA, 25 bp, Homo sapien
ttagcaaaacaggtgcgcaacttcc

SEQ ID NO: 2680337 - DNA, 25 bp, Homo sapien
gagcgagtagctgcacttataggcg

SEQ ID NO: 2680338 - DNA, 25 bp, Homo sapien
aaagcttgatcacaggtctcattga

SEQ ID NO: 2680339 - DNA, 25 bp, Homo sapien
ggctatacagaactggagcactcat

SEQ ID NO: 2680340 - DNA, 25 bp, Homo sapien
tcacaggtctcattgatagagaggc

SEQ ID NO: 2680341 - DNA, 25 bp, Homo sapien
agagaggctatacagaactggagca

SEQ ID NO: 2680342 - DNA, 25 bp, Homo sapien
atatgatttggcaattttactccca

SEQ ID NO: 2680343 - DNA, 25 bp, Homo sapien
tttggcaattttactcccagttata

SEQ ID NO: 2680344 - DNA, 25 bp, Homo sapien
tatgatttggcaattttactcccag

SEQ ID NO: 2680345 - DNA, 25 bp, Homo sapien
ggcaattttactcccagttatatac

SEQ ID NO: 2680346 - DNA, 25 bp, Homo sapien
ttctcacacactggcatagctatag

SEQ ID NO: 2680347 - DNA, 25 bp, Homo sapien
gctggattttcaatacgacgtaaaa

SEQ ID NO: 2680348 - DNA, 25 bp, Homo sapien
tagctatagctacagattcatgaat

SEQ ID NO: 2680349 - DNA, 25 bp, Homo sapien
tgttcaggcagacatcttttctctg

SEQ ID NO: 2680350 - DNA, 25 bp, Homo sapien
tctcttagataccaaatggaaagtc

SEQ ID NO: 2680351 - DNA, 25 bp, Homo sapien
aaatggaaagtctccctgatgattt

SEQ ID NO: 2680352 - DNA, 25 bp, Homo sapien
atgatttgctgttgtgtatcttcac

SEQ ID NO: 2680353 - DNA, 25 bp, Homo sapien
aacattttcatctctcttagatacc

SEQ ID NO: 2680354 - DNA, 25 bp, Homo sapien
cgttgcataatgtctataaatcagt

SEQ ID NO: 2680355 - DNA, 25 bp, Homo sapien
aaatataacgttgcataatgtctat

SEQ ID NO: 2680356 - DNA, 25 bp, Homo sapien
aatcagtttgttgtcagatcctcca

SEQ ID NO: 2680357 - DNA, 25 bp, Homo sapien
agacaaaatataacgttgcataatg

SEQ ID NO: 2680358 - DNA, 25 bp, Homo sapien
gttcatttcctcactgccgccaatc

SEQ ID NO: 2680359 - DNA, 25 bp, Homo sapien
tcatttcctcactgccgccaatctt

SEQ ID NO: 2680360 - DNA, 25 bp, Homo sapien
ttcatttcctcactgccgccaatct

SEQ ID NO: 2680361 - DNA, 25 bp, Homo sapien
atttgtctaatgtttccacaaatac

SEQ ID NO: 2680362 - DNA, 25 bp, Homo sapien
aaatccagctcacagacattttcaa

SEQ ID NO: 2680363 - DNA, 25 bp, Homo sapien
aacatttgtctaatgtttccacaaa

SEQ ID NO: 2680364 - DNA, 25 bp, Homo sapien
cttgtctacatggaaaatcaaatcc

SEQ ID NO: 2680365 - DNA, 25 bp, Homo sapien
agccttcaagttctactagtcccca

SEQ ID NO: 2680366 - DNA, 25 bp, Homo sapien
tagctgtatgtgataaagggtctga

SEQ ID NO: 2680367 - DNA, 25 bp, Homo sapien
ttcaagttctactagtccccattcc

SEQ ID NO: 2680368 - DNA, 25 bp, Homo sapien
tgtgataaagggtctgactccattt

SEQ ID NO: 2680369 - DNA, 25 bp, Homo sapien
attccccccatcaccatttctgcaa

SEQ ID NO: 2680370 - DNA, 25 bp, Homo sapien
accattccccccatcaccatttctg

SEQ ID NO: 2680371 - DNA, 25 bp, Homo sapien
taccattccccccatcaccatttct

SEQ ID NO: 2680372 - DNA, 25 bp, Homo sapien
gcataacggctgaacctaaagggtg

SEQ ID NO: 2680373 - DNA, 25 bp, Homo sapien
caatgctaaagtgctggctgttcct

SEQ ID NO: 2680374 - DNA, 25 bp, Homo sapien
gagaacagtcacagaacctttagca

SEQ ID NO: 2680375 - DNA, 25 bp, Homo sapien
tacccaaggcagctatgactgtggc

SEQ ID NO: 2680376 - DNA, 25 bp, Homo sapien
gtctgggagactgaaagataaaggt

SEQ ID NO: 2680377 - DNA, 25 bp, Homo sapien
tacctgtcctgtctgggagactgaa

SEQ ID NO: 2680378 - DNA, 25 bp, Homo sapien
tcctgtctgggagactgaaagataa

SEQ ID NO: 2680379 - DNA, 25 bp, Homo sapien
cttgtctacctgtcctgtctgggag

SEQ ID NO: 2680380 - DNA, 25 bp, Homo sapien
cattacaagtgacctcaagggttct

SEQ ID NO: 2680381 - DNA, 25 bp, Homo sapien
caaaataacatggatagagggacca

SEQ ID NO: 2680382 - DNA, 25 bp, Homo sapien
aaaaggccaattaacagttctagca

SEQ ID NO: 2680383 - DNA, 25 bp, Homo sapien
gcaataaagttaacagacccaagtg

SEQ ID NO: 2680384 - DNA, 25 bp, Homo sapien
cattttgtacggattatcttcaatt

SEQ ID NO: 2680385 - DNA, 25 bp, Homo sapien
agtcattttgtacggattatcttca

SEQ ID NO: 2680386 - DNA, 25 bp, Homo sapien
tagtcattttgtacggattatcttc

SEQ ID NO: 2680387 - DNA, 25 bp, Homo sapien
attagtcattttgtacggattatct

SEQ ID NO: 2680388 - DNA, 25 bp, Homo sapien
ctaaaatgtatttcgaagaccctga

SEQ ID NO: 2680389 - DNA, 25 bp, Homo sapien
ggtaaaactgcagcgactacaccaa

SEQ ID NO: 2680390 - DNA, 25 bp, Homo sapien
tgagcaccaccatggcaggtaaaac

SEQ ID NO: 2680391 - DNA, 25 bp, Homo sapien
tctgcaagtataccaaaatgaggcc

SEQ ID NO: 2680392 - DNA, 25 bp, Homo sapien
gtacaatattgtgatagagaaaggc

SEQ ID NO: 2680393 - DNA, 25 bp, Homo sapien
gtggtctgaaaataagtgtgtgcag

SEQ ID NO: 2680394 - DNA, 25 bp, Homo sapien
acttgttagcagtacagtagtcccc

SEQ ID NO: 2680395 - DNA, 25 bp, Homo sapien
cctgacttgttagcagtacagtagt

SEQ ID NO: 2680396 - DNA, 25 bp, Homo sapien
cataagcagcaagccatagacatgc

SEQ ID NO: 2680397 - DNA, 25 bp, Homo sapien
gacattcatgaaagtgatgcctgaa

SEQ ID NO: 2680398 - DNA, 25 bp, Homo sapien
gataggaactattcagaacacgcaa

SEQ ID NO: 2680399 - DNA, 25 bp, Homo sapien
aaagatggtgtcgactgttggctgc

SEQ ID NO: 2680400 - DNA, 25 bp, Homo sapien
taaaagccatggattatcaattcag

SEQ ID NO: 2680401 - DNA, 25 bp, Homo sapien
tacttatacctacctgaagcaatga

SEQ ID NO: 2680402 - DNA, 25 bp, Homo sapien
ccccaaagatgttggagatacaact

SEQ ID NO: 2680403 - DNA, 25 bp, Homo sapien
tctagctaccaaaatttagagtggg

SEQ ID NO: 2680404 - DNA, 25 bp, Homo sapien
tcttatgtaatcctacctttgttaa

SEQ ID NO: 2680405 - DNA, 25 bp, Homo sapien
tacaaaataggccagtgtaaactat

SEQ ID NO: 2680406 - DNA, 25 bp, Homo sapien
ataataaagctgttacctgagaaaa

SEQ ID NO: 2680407 - DNA, 25 bp, Homo sapien
gaaaaatcttgactgatacaaaata

SEQ ID NO: 2680408 - DNA, 25 bp, Homo sapien
tatggaatggttactttgaaatact

SEQ ID NO: 2680409 - DNA, 25 bp, Homo sapien
ctcaggtgtagctcatcataaaaca

SEQ ID NO: 2680410 - DNA, 25 bp, Homo sapien
catataacaagcttagggaccagat

SEQ ID NO: 2680411 - DNA, 25 bp, Homo sapien
aaacacttacaatggaagacaatga

SEQ ID NO: 2680412 - DNA, 25 bp, Homo sapien
agcacgggctggagctcctgctaag

SEQ ID NO: 2680413 - DNA, 25 bp, Homo sapien
gcacgggctggagctcctgctaagc

SEQ ID NO: 2680414 - DNA, 25 bp, Homo sapien
cacgggctggagctcctgctaagcc

SEQ ID NO: 2680415 - DNA, 25 bp, Homo sapien
aagagggcaggtttggcacttttat

SEQ ID NO: 2680416 - DNA, 25 bp, Homo sapien
gcaggtttggcacttttatactgat

SEQ ID NO: 2680417 - DNA, 25 bp, Homo sapien
gggcaggtttggcacttttatactg

SEQ ID NO: 2680418 - DNA, 25 bp, Homo sapien
tttggcacttttatactgatgtcac

SEQ ID NO: 2680419 - DNA, 25 bp, Homo sapien
tacttggttctccaaataacaactg

SEQ ID NO: 2680420 - DNA, 25 bp, Homo sapien
agaggcatgccgtaggtgggcacag

SEQ ID NO: 2680421 - DNA, 25 bp, Homo sapien
caaataacaactgtgtgacatatag

SEQ ID NO: 2680422 - DNA, 25 bp, Homo sapien
tggttctccaaataacaactgtgtg

SEQ ID NO: 2680423 - DNA, 25 bp, Homo sapien
ttgttgagtcagagggttgtaaaaa

SEQ ID NO: 2680424 - DNA, 25 bp, Homo sapien
tactttgttgagtcagagggttgta

SEQ ID NO: 2680425 - DNA, 25 bp, Homo sapien
tatttactttgttgagtcagagggt

SEQ ID NO: 2680426 - DNA, 25 bp, Homo sapien
tttactttgttgagtcagagggttg

SEQ ID NO: 2680427 - DNA, 25 bp, Homo sapien
gattcattccaattaccggctccgc

SEQ ID NO: 2680428 - DNA, 25 bp, Homo sapien
ccctggccaatagcagaaagacaca

SEQ ID NO: 2680429 - DNA, 25 bp, Homo sapien
ggctccgccgtaagtcattccgatt

SEQ ID NO: 2680430 - DNA, 25 bp, Homo sapien
tgtgcgctcatcgttgctccatctg

SEQ ID NO: 2680431 - DNA, 25 bp, Homo sapien
tatccgaagagcaggtcttcaaatg

SEQ ID NO: 2680432 - DNA, 25 bp, Homo sapien
taaactgtctcgagggattccctgc

SEQ ID NO: 2680433 - DNA, 25 bp, Homo sapien
ccggcgtcctgtggttcctaaactg

SEQ ID NO: 2680434 - DNA, 25 bp, Homo sapien
gctctgtgtgctggtatccgaagag

SEQ ID NO: 2680435 - DNA, 25 bp, Homo sapien
ttgacaaccacgtagaaaggtgatt

SEQ ID NO: 2680436 - DNA, 25 bp, Homo sapien
ccagggaggccagacctgttcagat

SEQ ID NO: 2680437 - DNA, 25 bp, Homo sapien
ctgaatgtaggaggttttgtccccg

SEQ ID NO: 2680438 - DNA, 25 bp, Homo sapien
ctagaggaagagatacaaagggcga

SEQ ID NO: 2680439 - DNA, 25 bp, Homo sapien
cactggagtatagaaattaagcctg

SEQ ID NO: 2680440 - DNA, 25 bp, Homo sapien
ggagtatagaaattaagcctgtgtt

SEQ ID NO: 2680441 - DNA, 25 bp, Homo sapien
gtatagaaattaagcctgtgtttca

SEQ ID NO: 2680442 - DNA, 25 bp, Homo sapien
tatcactggagtatagaaattaagc

SEQ ID NO: 2680443 - DNA, 25 bp, Homo sapien
gaatccaggaggcatggtgtccttg

SEQ ID NO: 2680444 - DNA, 25 bp, Homo sapien
ggtcctttgtcgaatccaggaggca

SEQ ID NO: 2680445 - DNA, 25 bp, Homo sapien
ctctgcagggtcctttgtcgaatcc

SEQ ID NO: 2680446 - DNA, 25 bp, Homo sapien
tgtcgaatccaggaggcatggtgtc

SEQ ID NO: 2680447 - DNA, 25 bp, Homo sapien
ggtggtcaagccaaacgaatccgga

SEQ ID NO: 2680448 - DNA, 25 bp, Homo sapien
tttgggttcgaagagacagacccca

SEQ ID NO: 2680449 - DNA, 25 bp, Homo sapien
aagccagcgatgagctaccagcaac

SEQ ID NO: 2680450 - DNA, 25 bp, Homo sapien
gatacggtttcaggtgttgtcggaa

SEQ ID NO: 2680451 - DNA, 25 bp, Homo sapien
agctcagcagacagcggttgggacc

SEQ ID NO: 2680452 - DNA, 25 bp, Homo sapien
agggtgttcagtgctgcgacccctg

SEQ ID NO: 2680453 - DNA, 25 bp, Homo sapien
cagctgtcaaaaccccggccagggt

SEQ ID NO: 2680454 - DNA, 25 bp, Homo sapien
gttcaggcgcgaggctggagctcag

SEQ ID NO: 2680455 - DNA, 25 bp, Homo sapien
gtacaaggcggcgagtacggccagc

SEQ ID NO: 2680456 - DNA, 25 bp, Homo sapien
gcaggagggcggctaccagcccagc

SEQ ID NO: 2680457 - DNA, 25 bp, Homo sapien
ctcgcagtggccgtacaaggcggcg

SEQ ID NO: 2680458 - DNA, 25 bp, Homo sapien
actgcgcggctcacatagaagcctg

SEQ ID NO: 2680459 - DNA, 25 bp, Homo sapien
gtccaggcagctccgacggtgggac

SEQ ID NO: 2680460 - DNA, 25 bp, Homo sapien
tccaagtccctgagtccaggcagct

SEQ ID NO: 2680461 - DNA, 25 bp, Homo sapien
gaagactcggcttccaagtccctga

SEQ ID NO: 2680462 - DNA, 25 bp, Homo sapien
gaggggaagactcggcttccaagtc

SEQ ID NO: 2680463 - DNA, 25 bp, Homo sapien
tgcagcgcaccgtgatgttcacgcg

SEQ ID NO: 2680464 - DNA, 25 bp, Homo sapien
agctccagatcgtagtgcagcggca

SEQ ID NO: 2680465 - DNA, 25 bp, Homo sapien
gctagctcgcgtgcactgctgggtt

SEQ ID NO: 2680466 - DNA, 25 bp, Homo sapien
tcacgcggccagtgaagggcaaaga

SEQ ID NO: 2680467 - DNA, 25 bp, Homo sapien
cacctcggcgcgctcgcagtcctgg

SEQ ID NO: 2680468 - DNA, 25 bp, Homo sapien
ggtccccgcacctcggcgcgctcgc

SEQ ID NO: 2680469 - DNA, 25 bp, Homo sapien
ccgcacctcggcgcgctcgcagtcc

SEQ ID NO: 2680470 - DNA, 25 bp, Homo sapien
gtccccgcacctcggcgcgctcgca

SEQ ID NO: 2680471 - DNA, 25 bp, Homo sapien
accatgtattccgtgtccagcgcga

SEQ ID NO: 2680472 - DNA, 25 bp, Homo sapien
gaggaagagtccctccctgaggtct

SEQ ID NO: 2680473 - DNA, 25 bp, Homo sapien
accaggcccgagaagctaagctgca

SEQ ID NO: 2680474 - DNA, 25 bp, Homo sapien
tcgtagctgctaccaggtttcaggg

SEQ ID NO: 2680475 - DNA, 25 bp, Homo sapien
ctggacacggtagtcagctggaccc

SEQ ID NO: 2680476 - DNA, 25 bp, Homo sapien
tggacacggtagtcagctggacccg

SEQ ID NO: 2680477 - DNA, 25 bp, Homo sapien
ggacacggtagtcagctggacccgc

SEQ ID NO: 2680478 - DNA, 25 bp, Homo sapien
acacggtagtcagctggacccgcag

SEQ ID NO: 2680479 - DNA, 25 bp, Homo sapien
gaaaaaccaagcacgctgcccttaa

SEQ ID NO: 2680480 - DNA, 25 bp, Homo sapien
tatttccctggagttcgccggagga

SEQ ID NO: 2680481 - DNA, 25 bp, Homo sapien
tgagtggacaaagagatcgccggtt

SEQ ID NO: 2680482 - DNA, 25 bp, Homo sapien
tacatgcagttgtgtacggcgcaaa

SEQ ID NO: 2680483 - DNA, 25 bp, Homo sapien
aggtaggtgaacagaggaggattta

SEQ ID NO: 2680484 - DNA, 25 bp, Homo sapien
gtaggtgaacagaggaggatttact

SEQ ID NO: 2680485 - DNA, 25 bp, Homo sapien
taggtgaacagaggaggatttactg

SEQ ID NO: 2680486 - DNA, 25 bp, Homo sapien
ggtaggtgaacagaggaggatttac

SEQ ID NO: 2680487 - DNA, 25 bp, Homo sapien
gcatacttggatggatcgcaagggc

SEQ ID NO: 2680488 - DNA, 25 bp, Homo sapien
gctgagtcagaaaggtctaaaggat

SEQ ID NO: 2680489 - DNA, 25 bp, Homo sapien
taaccctcaatcgatgaatgactaa

SEQ ID NO: 2680490 - DNA, 25 bp, Homo sapien
gggaatgatctttaaggtggaacag

SEQ ID NO: 2680491 - DNA, 25 bp, Homo sapien
aaagacttagatctagaatatataa

SEQ ID NO: 2680492 - DNA, 25 bp, Homo sapien
agaccttactaagatgatgaaaaga

SEQ ID NO: 2680493 - DNA, 25 bp, Homo sapien
ttactaagatgatgaaaagacaagc

SEQ ID NO: 2680494 - DNA, 25 bp, Homo sapien
ccttactaagatgatgaaaagacaa

SEQ ID NO: 2680495 - DNA, 25 bp, Homo sapien
gctcaacagtatcctgagcaccaga

SEQ ID NO: 2680496 - DNA, 25 bp, Homo sapien
taaccaaaaagtaggagccaatgcc

SEQ ID NO: 2680497 - DNA, 25 bp, Homo sapien
tatctgggtcattgctatctggcga

SEQ ID NO: 2680498 - DNA, 25 bp, Homo sapien
tctcatctaaccaaaaagtaggagc

SEQ ID NO: 2680499 - DNA, 25 bp, Homo sapien
ttggcatgttggaaagggccacata

SEQ ID NO: 2680500 - DNA, 25 bp, Homo sapien
gcatgttggaaagggccacataact

SEQ ID NO: 2680501 - DNA, 25 bp, Homo sapien
tggaaagggccacataacttggatg

SEQ ID NO: 2680502 - DNA, 25 bp, Homo sapien
acataacttggatgatgaatcattg

SEQ ID NO: 2680503 - DNA, 25 bp, Homo sapien
cacatataacaaatgcgactaagta

SEQ ID NO: 2680504 - DNA, 25 bp, Homo sapien
tgcgactaagtaagttggcatgtgg

SEQ ID NO: 2680505 - DNA, 25 bp, Homo sapien
gacgtggtcatagtcacatataaca

SEQ ID NO: 2680506 - DNA, 25 bp, Homo sapien
tttctgttctgttgacgtggtcata

SEQ ID NO: 2680507 - DNA, 25 bp, Homo sapien
ggcttaatatggactctttccgtga

SEQ ID NO: 2680508 - DNA, 25 bp, Homo sapien
cttgccttgatgagtgggcttaata

SEQ ID NO: 2680509 - DNA, 25 bp, Homo sapien
taatatggactctttccgtgaaaac

SEQ ID NO: 2680510 - DNA, 25 bp, Homo sapien
tgatgagtgggcttaatatggactc

SEQ ID NO: 2680511 - DNA, 25 bp, Homo sapien
tcacatactaaacgcaaacatcaag

SEQ ID NO: 2680512 - DNA, 25 bp, Homo sapien
catactaaacgcaaacatcaaggtg

SEQ ID NO: 2680513 - DNA, 25 bp, Homo sapien
actaaacgcaaacatcaaggtgcca

SEQ ID NO: 2680514 - DNA, 25 bp, Homo sapien
tactaaacgcaaacatcaaggtgcc

SEQ ID NO: 2680515 - DNA, 25 bp, Homo sapien
gggtgatctttcacagataaatcga

SEQ ID NO: 2680516 - DNA, 25 bp, Homo sapien
gatctttcacagataaatcgatatc

SEQ ID NO: 2680517 - DNA, 25 bp, Homo sapien
tcacagataaatcgatatcatcccg

SEQ ID NO: 2680518 - DNA, 25 bp, Homo sapien
atccttttcggggtgatctttcaca

SEQ ID NO: 2680519 - DNA, 25 bp, Homo sapien
caattgcatctttccgggcccagat

SEQ ID NO: 2680520 - DNA, 25 bp, Homo sapien
ggaagagagtaactgatattaaaca

SEQ ID NO: 2680521 - DNA, 25 bp, Homo sapien
tgtgatgttcaaagcaaagtctgca

SEQ ID NO: 2680522 - DNA, 25 bp, Homo sapien
tattaaacaaatcctccagaaaaga

SEQ ID NO: 2680523 - DNA, 25 bp, Homo sapien
catggttgtcaaaactaggcaaggc

SEQ ID NO: 2680524 - DNA, 25 bp, Homo sapien
tgcatggttgtcaaaactaggcaag

SEQ ID NO: 2680525 - DNA, 25 bp, Homo sapien
gtcaaaactaggcaaggcaattata

SEQ ID NO: 2680526 - DNA, 25 bp, Homo sapien
ttgtcaaaactaggcaaggcaatta

SEQ ID NO: 2680527 - DNA, 25 bp, Homo sapien
gacaacataggagatcagagtcttt

SEQ ID NO: 2680528 - DNA, 25 bp, Homo sapien
ttttggttccaacaacaatcctgat

SEQ ID NO: 2680529 - DNA, 25 bp, Homo sapien
ctggtgtccaatctcgtgggagaca

SEQ ID NO: 2680530 - DNA, 25 bp, Homo sapien
tttctgtcagttgatcttttggttc

SEQ ID NO: 2680531 - DNA, 25 bp, Homo sapien
ctggagaataacttcaagtgaaata

SEQ ID NO: 2680532 - DNA, 25 bp, Homo sapien
gagaataacttcaagtgaaataaaa

SEQ ID NO: 2680533 - DNA, 25 bp, Homo sapien
ggagaataacttcaagtgaaataaa

SEQ ID NO: 2680534 - DNA, 25 bp, Homo sapien
tggagaataacttcaagtgaaataa

SEQ ID NO: 2680535 - DNA, 25 bp, Homo sapien
tggaaatgagaagaaaaaaagagct

SEQ ID NO: 2680536 - DNA, 25 bp, Homo sapien
ttggaaatgagaagaaaaaaagagc

SEQ ID NO: 2680537 - DNA, 25 bp, Homo sapien
tgcaaaaccctcgttgagccagata

SEQ ID NO: 2680538 - DNA, 25 bp, Homo sapien
aaaccctcgttgagccagatattgt

SEQ ID NO: 2680539 - DNA, 25 bp, Homo sapien
gagccagatattgttccaccaattc

SEQ ID NO: 2680540 - DNA, 25 bp, Homo sapien
tcgttgagccagatattgttccacc

SEQ ID NO: 2680541 - DNA, 25 bp, Homo sapien
tatataatgacgtccaaactttcct

SEQ ID NO: 2680542 - DNA, 25 bp, Homo sapien
tgggctggggaccttatagcatgtc

SEQ ID NO: 2680543 - DNA, 25 bp, Homo sapien
ttaacctttcagtacttcagtctcc

SEQ ID NO: 2680544 - DNA, 25 bp, Homo sapien
gaggcactgcggagtgactgggctg

SEQ ID NO: 2680545 - DNA, 25 bp, Homo sapien
cagggcgtgatcttctctgaggata

SEQ ID NO: 2680546 - DNA, 25 bp, Homo sapien
tcttctctgaggatattatgtaaaa

SEQ ID NO: 2680547 - DNA, 25 bp, Homo sapien
agtcaccagggcgtgatcttctctg

SEQ ID NO: 2680548 - DNA, 25 bp, Homo sapien
ctctagtcaccagggcgtgatcttc

SEQ ID NO: 2680549 - DNA, 25 bp, Homo sapien
ttgctgtaagtaaatatgtcaaaga

SEQ ID NO: 2680550 - DNA, 25 bp, Homo sapien
gaaacaagaaagcatccgggccata

SEQ ID NO: 2680551 - DNA, 25 bp, Homo sapien
aagaaacaagaaagcatccgggcca

SEQ ID NO: 2680552 - DNA, 25 bp, Homo sapien
aaacaagaaagcatccgggccatag

SEQ ID NO: 2680553 - DNA, 25 bp, Homo sapien
tcaagaaacaagaaagcatccgggc

SEQ ID NO: 2680554 - DNA, 25 bp, Homo sapien
tcagcgtttgagtaggaaaatgtct

SEQ ID NO: 2680555 - DNA, 25 bp, Homo sapien
tcatcttgctcagcgtttgagtagg

SEQ ID NO: 2680556 - DNA, 25 bp, Homo sapien
catagatcatcttgctcagcgtttg

SEQ ID NO: 2680557 - DNA, 25 bp, Homo sapien
tttgaaaatgcctccatagatcatc

SEQ ID NO: 2680558 - DNA, 25 bp, Homo sapien
atgtgtcagaaagtaggacaattac

SEQ ID NO: 2680559 - DNA, 25 bp, Homo sapien
gacctaagggagttctacaacaaga

SEQ ID NO: 2680560 - DNA, 25 bp, Homo sapien
tttattgatctaacatattccatgc

SEQ ID NO: 2680561 - DNA, 25 bp, Homo sapien
tgaagactaaagacactacccatga

SEQ ID NO: 2680562 - DNA, 25 bp, Homo sapien
ggcaaaataactgtactctggtcat

SEQ ID NO: 2680563 - DNA, 25 bp, Homo sapien
tgctggcaaaataactgtactctgg

SEQ ID NO: 2680564 - DNA, 25 bp, Homo sapien
tattgttgctggcaaaataactgta

SEQ ID NO: 2680565 - DNA, 25 bp, Homo sapien
ataactgtactctggtcatctatgg

SEQ ID NO: 2680566 - DNA, 25 bp, Homo sapien
aagataaaatggctcctgtttcatg

SEQ ID NO: 2680567 - DNA, 25 bp, Homo sapien
gtttcatgacgccagtagacacatt

SEQ ID NO: 2680568 - DNA, 25 bp, Homo sapien
ttaaagtgatcactggaaaaccact

SEQ ID NO: 2680569 - DNA, 25 bp, Homo sapien
gacacatttaaagtgatcactggaa

SEQ ID NO: 2680570 - DNA, 25 bp, Homo sapien
aatagcccacagcttgggtcgctga

SEQ ID NO: 2680571 - DNA, 25 bp, Homo sapien
gaatccctaactgcgggtctctggc

SEQ ID NO: 2680572 - DNA, 25 bp, Homo sapien
actgtgtcttgaatccctaactgcg

SEQ ID NO: 2680573 - DNA, 25 bp, Homo sapien
gtctctggcgttgcccggacacaag

SEQ ID NO: 2680574 - DNA, 25 bp, Homo sapien
gtctgagggatgaagaggaacacac

SEQ ID NO: 2680575 - DNA, 25 bp, Homo sapien
ctctgtctgagggatgaagaggaac

SEQ ID NO: 2680576 - DNA, 25 bp, Homo sapien
ctgtctgagggatgaagaggaacac

SEQ ID NO: 2680577 - DNA, 25 bp, Homo sapien
tctgtctgagggatgaagaggaaca

SEQ ID NO: 2680578 - DNA, 25 bp, Homo sapien
tgctgctttgatctagccagactaa

SEQ ID NO: 2680579 - DNA, 25 bp, Homo sapien
ccagactaaaggttgtgtagttcca

SEQ ID NO: 2680580 - DNA, 25 bp, Homo sapien
aagaatagggacaatccatgtgtca

SEQ ID NO: 2680581 - DNA, 25 bp, Homo sapien
tgatctagccagactaaaggttgtg

SEQ ID NO: 2680582 - DNA, 25 bp, Homo sapien
ctgaaacttgcatttctgggaatac

SEQ ID NO: 2680583 - DNA, 25 bp, Homo sapien
gaaacttgcatttctgggaatactt

SEQ ID NO: 2680584 - DNA, 25 bp, Homo sapien
tgaaacttgcatttctgggaatact

SEQ ID NO: 2680585 - DNA, 25 bp, Homo sapien
caacctaatttatcataattaactc

SEQ ID NO: 2680586 - DNA, 25 bp, Homo sapien
aaaatcacccagtcatggtcagaat

SEQ ID NO: 2680587 - DNA, 25 bp, Homo sapien
cctaatttatcataattaactctat

SEQ ID NO: 2680588 - DNA, 25 bp, Homo sapien
gatccttttcaagttgttgatttag

SEQ ID NO: 2680589 - DNA, 25 bp, Homo sapien
gagatttggctcgaatgtgccatac

SEQ ID NO: 2680590 - DNA, 25 bp, Homo sapien
ggagatttggctcgaatgtgccata

SEQ ID NO: 2680591 - DNA, 25 bp, Homo sapien
gatttggctcgaatgtgccatacat

SEQ ID NO: 2680592 - DNA, 25 bp, Homo sapien
ggggagatttggctcgaatgtgcca

SEQ ID NO: 2680593 - DNA, 25 bp, Homo sapien
agaattagacccaaatatgcccaga

SEQ ID NO: 2680594 - DNA, 25 bp, Homo sapien
tgcctataaagcaccttcacgtgac

SEQ ID NO: 2680595 - DNA, 25 bp, Homo sapien
gaattagacccaaatatgcccagaa

SEQ ID NO: 2680596 - DNA, 25 bp, Homo sapien
taaagattactgctgcctataaagc

SEQ ID NO: 2680597 - DNA, 25 bp, Homo sapien
ggcatcatcaatcaactgcagtctg

SEQ ID NO: 2680598 - DNA, 25 bp, Homo sapien
caatcaactgcagtctgtgaataac

SEQ ID NO: 2680599 - DNA, 25 bp, Homo sapien
caactgcagtctgtgaataacagga

SEQ ID NO: 2680600 - DNA, 25 bp, Homo sapien
gaaaaggcatcatcaatcaactgca

SEQ ID NO: 2680601 - DNA, 25 bp, Homo sapien
tcaatttggtactttcaagtgtcca

SEQ ID NO: 2680602 - DNA, 25 bp, Homo sapien
taaatgtcccatcttatagaaagga

SEQ ID NO: 2680603 - DNA, 25 bp, Homo sapien
tcaagaaacgagaaggtaaatgtcc

SEQ ID NO: 2680604 - DNA, 25 bp, Homo sapien
gatgaaacccaagcaaagttgacag

SEQ ID NO: 2680605 - DNA, 25 bp, Homo sapien
ggtacttggttaactcaagtgctgt

SEQ ID NO: 2680606 - DNA, 25 bp, Homo sapien
ttcttcagcaaggtacttggttaac

SEQ ID NO: 2680607 - DNA, 25 bp, Homo sapien
cttcttcagcaaggtacttggttaa

SEQ ID NO: 2680608 - DNA, 25 bp, Homo sapien
tgagtatatatcatagatgttcacc

SEQ ID NO: 2680609 - DNA, 25 bp, Homo sapien
cagaaacaagatccctggttaccaa

SEQ ID NO: 2680610 - DNA, 25 bp, Homo sapien
caagtttaccaagactgtatgccat

SEQ ID NO: 2680611 - DNA, 25 bp, Homo sapien
catagatgttcacctcagaaacaag

SEQ ID NO: 2680612 - DNA, 25 bp, Homo sapien
cacattttcacgaattatagttgaa

SEQ ID NO: 2680613 - DNA, 25 bp, Homo sapien
tcttgtaatgccaacacattttcac

SEQ ID NO: 2680614 - DNA, 25 bp, Homo sapien
agagctaagtagtcatcttgtaatg

SEQ ID NO: 2680615 - DNA, 25 bp, Homo sapien
ttccatattaaattaagtctcttta

SEQ ID NO: 2680616 - DNA, 25 bp, Homo sapien
aaacgcaagcgccaaatctctgtta

SEQ ID NO: 2680617 - DNA, 25 bp, Homo sapien
caggtaagtgatgccttgtggtccc

SEQ ID NO: 2680618 - DNA, 25 bp, Homo sapien
agtgaagaccaataataaatccagg

SEQ ID NO: 2680619 - DNA, 25 bp, Homo sapien
tgtggtccctactccagatttgcgg

SEQ ID NO: 2680620 - DNA, 25 bp, Homo sapien
aagttcttttgacagctgaaggcag

SEQ ID NO: 2680621 - DNA, 25 bp, Homo sapien
caaccaacacgcagttacaaaaagt

SEQ ID NO: 2680622 - DNA, 25 bp, Homo sapien
ggcagtcttcaaggcccaaccaaca

SEQ ID NO: 2680623 - DNA, 25 bp, Homo sapien
gatccacccattttgcgaaaagttc

SEQ ID NO: 2680624 - DNA, 25 bp, Homo sapien
aaaccacatctttaattggataagg

SEQ ID NO: 2680625 - DNA, 25 bp, Homo sapien
tttatcacttcccaaggcaatgcca

SEQ ID NO: 2680626 - DNA, 25 bp, Homo sapien
tgctgcagctcattgcataagcaag

SEQ ID NO: 2680627 - DNA, 25 bp, Homo sapien
agtatttaacaagatgtcccactct

SEQ ID NO: 2680628 - DNA, 25 bp, Homo sapien
tggagatgtgctgatggcatactcc

SEQ ID NO: 2680629 - DNA, 25 bp, Homo sapien
aatggagatgtgctgatggcatact

SEQ ID NO: 2680630 - DNA, 25 bp, Homo sapien
tgtgctgatggcatactccatatat

SEQ ID NO: 2680631 - DNA, 25 bp, Homo sapien
agatgtgctgatggcatactccata

SEQ ID NO: 2680632 - DNA, 25 bp, Homo sapien
gaagtcttttgcgacataccggcca

SEQ ID NO: 2680633 - DNA, 25 bp, Homo sapien
acagcttgccagttgttgactaaga

SEQ ID NO: 2680634 - DNA, 25 bp, Homo sapien
tgttgactaagaagtcttttgcgac

SEQ ID NO: 2680635 - DNA, 25 bp, Homo sapien
cttgccagttgttgactaagaagtc

SEQ ID NO: 2680636 - DNA, 25 bp, Homo sapien
gatgtactcaactccaacatgtgcc

SEQ ID NO: 2680637 - DNA, 25 bp, Homo sapien
cctgcactgctattggcgatgtact

SEQ ID NO: 2680638 - DNA, 25 bp, Homo sapien
ctgcatgtcactgtgagacatatgc

SEQ ID NO: 2680639 - DNA, 25 bp, Homo sapien
tgtgagacatatgcccatgaatgct

SEQ ID NO: 2680640 - DNA, 25 bp, Homo sapien
aaaatgtatttccagattaggcttt

SEQ ID NO: 2680641 - DNA, 25 bp, Homo sapien
ccaaaatgtatttccagattaggct

SEQ ID NO: 2680642 - DNA, 25 bp, Homo sapien
tccaaaatgtatttccagattaggc

SEQ ID NO: 2680643 - DNA, 25 bp, Homo sapien
caaaatgtatttccagattaggctt

SEQ ID NO: 2680644 - DNA, 25 bp, Homo sapien
taattgaggcaagcgaaactgtttc

SEQ ID NO: 2680645 - DNA, 25 bp, Homo sapien
ttttaactggccagctaggcagcaa

SEQ ID NO: 2680646 - DNA, 25 bp, Homo sapien
gaagcacctattagattacctggca

SEQ ID NO: 2680647 - DNA, 25 bp, Homo sapien
cactgggtctacctgagcaacgtga

SEQ ID NO: 2680648 - DNA, 25 bp, Homo sapien
ctcaaagtgtggctgtagttaaaaa

SEQ ID NO: 2680649 - DNA, 25 bp, Homo sapien
tgctcaaagtgtggctgtagttaaa

SEQ ID NO: 2680650 - DNA, 25 bp, Homo sapien
ctgctcaaagtgtggctgtagttaa

SEQ ID NO: 2680651 - DNA, 25 bp, Homo sapien
caaagtgtggctgtagttaaaaaag

SEQ ID NO: 2680652 - DNA, 25 bp, Homo sapien
cagtagttcatagaggatccatttc

SEQ ID NO: 2680653 - DNA, 25 bp, Homo sapien
tgaaggctgagcaccatggctctcc

SEQ ID NO: 2680654 - DNA, 25 bp, Homo sapien
ctctaaatgttggtgaccctgaagg

SEQ ID NO: 2680655 - DNA, 25 bp, Homo sapien
taggcgtggtcatggaaacttcccc

SEQ ID NO: 2680656 - DNA, 25 bp, Homo sapien
gattaatcaatgattgtgttccata

SEQ ID NO: 2680657 - DNA, 25 bp, Homo sapien
tgtagttacggttctccctattgta

SEQ ID NO: 2680658 - DNA, 25 bp, Homo sapien
caatctgtaaatctgtagttacggt

SEQ ID NO: 2680659 - DNA, 25 bp, Homo sapien
cggttctccctattgtatatattag

SEQ ID NO: 2680660 - DNA, 25 bp, Homo sapien
gaccctggttagaccaattagagta

SEQ ID NO: 2680661 - DNA, 25 bp, Homo sapien
cccaagtaggaccaatcaaagtgct

SEQ ID NO: 2680662 - DNA, 25 bp, Homo sapien
gaagctgtgagaaagtatccttcct

SEQ ID NO: 2680663 - DNA, 25 bp, Homo sapien
tgtctcctagtgtggccacaggacc

SEQ ID NO: 2680664 - DNA, 25 bp, Homo sapien
tgtctgtaagttggcatgaactctg

SEQ ID NO: 2680665 - DNA, 25 bp, Homo sapien
gtgtttctccttagccacgcagcta

SEQ ID NO: 2680666 - DNA, 25 bp, Homo sapien
gctatcctggcacttagcttcttgt

SEQ ID NO: 2680667 - DNA, 25 bp, Homo sapien
gttggcatgaactctgatcctctgg

SEQ ID NO: 2680668 - DNA, 25 bp, Homo sapien
gattataacccaacatgaagtgaca

SEQ ID NO: 2680669 - DNA, 25 bp, Homo sapien
cagcaacacgtggttcaatgcagga

SEQ ID NO: 2680670 - DNA, 25 bp, Homo sapien
gcttaggctgaaagggtgtccatcc

SEQ ID NO: 2680671 - DNA, 25 bp, Homo sapien
taagttggtccacattacaagtagg

SEQ ID NO: 2680672 - DNA, 25 bp, Homo sapien
gacactcagggagaatcctcttgtg

SEQ ID NO: 2680673 - DNA, 25 bp, Homo sapien
tagcctgtgctttcgtttgtccacg

SEQ ID NO: 2680674 - DNA, 25 bp, Homo sapien
ttgtccacgtggtgaagtcccacag

SEQ ID NO: 2680675 - DNA, 25 bp, Homo sapien
ctgtggccaagtctgagtagcctgt

SEQ ID NO: 2680676 - DNA, 25 bp, Homo sapien
gagaccagcctacatgctcttttgg

SEQ ID NO: 2680677 - DNA, 25 bp, Homo sapien
gagtgtcagcctcaaagcacgcttg

SEQ ID NO: 2680678 - DNA, 25 bp, Homo sapien
ttttaacagtctggagagaccagcc

SEQ ID NO: 2680679 - DNA, 25 bp, Homo sapien
taagaacaaccaggcagaagtaagg

SEQ ID NO: 2680680 - DNA, 25 bp, Homo sapien
tgagagcactcctcctggcttgtag

SEQ ID NO: 2680681 - DNA, 25 bp, Homo sapien
gaaggtccagtatcaaggtgccgac

SEQ ID NO: 2680682 - DNA, 25 bp, Homo sapien
cgacagcttcggttcctggtgagag

SEQ ID NO: 2680683 - DNA, 25 bp, Homo sapien
tgtgggctccaaccttaagacctca

SEQ ID NO: 2680684 - DNA, 25 bp, Homo sapien
aatcaataggttactgcttcactcc

SEQ ID NO: 2680685 - DNA, 25 bp, Homo sapien
gatgggaagcgttgactgaaacaag

SEQ ID NO: 2680686 - DNA, 25 bp, Homo sapien
aaagtgcattgcagttccagtaaca

SEQ ID NO: 2680687 - DNA, 25 bp, Homo sapien
tagtagataacttcaggattgtggc

SEQ ID NO: 2680688 - DNA, 25 bp, Homo sapien
accctgctaccagacagcaagggcg

SEQ ID NO: 2680689 - DNA, 25 bp, Homo sapien
cagcaagggcggtttgtctgtgcat

SEQ ID NO: 2680690 - DNA, 25 bp, Homo sapien
aagggcggtttgtctgtgcatttcc

SEQ ID NO: 2680691 - DNA, 25 bp, Homo sapien
taccagacagcaagggcggtttgtc

SEQ ID NO: 2680692 - DNA, 25 bp, Homo sapien
gatcaagaccagtaactgcagagct

SEQ ID NO: 2680693 - DNA, 25 bp, Homo sapien
tgtggatcaagaccagtaactgcag

SEQ ID NO: 2680694 - DNA, 25 bp, Homo sapien
ttgtggatcaagaccagtaactgca

SEQ ID NO: 2680695 - DNA, 25 bp, Homo sapien
tggatcaagaccagtaactgcagag

SEQ ID NO: 2680696 - DNA, 25 bp, Homo sapien
caagcacctatttgttgaaggatga

SEQ ID NO: 2680697 - DNA, 25 bp, Homo sapien
tgcttgaaggccatcctttccaagc

SEQ ID NO: 2680698 - DNA, 25 bp, Homo sapien
ttctgtttaatctgtgatctttgct

SEQ ID NO: 2680699 - DNA, 25 bp, Homo sapien
ctttgtagagatcccattctggttc

SEQ ID NO: 2680700 - DNA, 25 bp, Homo sapien
gaagcagctggcttatacataggag

SEQ ID NO: 2680701 - DNA, 25 bp, Homo sapien
tcattccttagggtcagcatcagat

SEQ ID NO: 2680702 - DNA, 25 bp, Homo sapien
tcagcatcagatgaagcagctggct

SEQ ID NO: 2680703 - DNA, 25 bp, Homo sapien
tggcttatacataggagccatgatg

SEQ ID NO: 2680704 - DNA, 25 bp, Homo sapien
gtctgctgctactctccgagcttcg

SEQ ID NO: 2680705 - DNA, 25 bp, Homo sapien
gagcttcgcaatgccgcccaaggac

SEQ ID NO: 2680706 - DNA, 25 bp, Homo sapien
cccaaggacgacgagaagaaggacg

SEQ ID NO: 2680707 - DNA, 25 bp, Homo sapien
gaagaaggacgctggaaagtcagcc

SEQ ID NO: 2680708 - DNA, 25 bp, Homo sapien
ttactgcagcctcaatccccggggc

SEQ ID NO: 2680709 - DNA, 25 bp, Homo sapien
taatttttgtgtacatatgcagtag

SEQ ID NO: 2680710 - DNA, 25 bp, Homo sapien
atttttgtgtacatatgcagtagag

SEQ ID NO: 2680711 - DNA, 25 bp, Homo sapien
gctaatttttgtgtacatatgcagt

SEQ ID NO: 2680712 - DNA, 25 bp, Homo sapien
ccctgggatgcatttcggagctact

SEQ ID NO: 2680713 - DNA, 25 bp, Homo sapien
ttaaaaccgcaaaacgccactcagc

SEQ ID NO: 2680714 - DNA, 25 bp, Homo sapien
gactttcagtcaaagccagattgga

SEQ ID NO: 2680715 - DNA, 25 bp, Homo sapien
gaagcccatgtagtgtctcaaacca

SEQ ID NO: 2680716 - DNA, 25 bp, Homo sapien
attcattcatctttgacatccgggc

SEQ ID NO: 2680717 - DNA, 25 bp, Homo sapien
tgtttcaggattaaagtctgctacc

SEQ ID NO: 2680718 - DNA, 25 bp, Homo sapien
agcattttaactgccgctctatttg

SEQ ID NO: 2680719 - DNA, 25 bp, Homo sapien
ctgtggtccagggtttcgaaatgcc

SEQ ID NO: 2680720 - DNA, 25 bp, Homo sapien
gctaacagtctccaagtgccatttc

SEQ ID NO: 2680721 - DNA, 25 bp, Homo sapien
tagaactgtcagttattacaccata

SEQ ID NO: 2680722 - DNA, 25 bp, Homo sapien
gttattacaccataatcatttgaag

SEQ ID NO: 2680723 - DNA, 25 bp, Homo sapien
gaaagaaaagcacctttgctaacag

SEQ ID NO: 2680724 - DNA, 25 bp, Homo sapien
tgccacttttgtcatacttcctcat

SEQ ID NO: 2680725 - DNA, 25 bp, Homo sapien
gcctgccacttttgtcatacttcct

SEQ ID NO: 2680726 - DNA, 25 bp, Homo sapien
agatgagcctgccacttttgtcata

SEQ ID NO: 2680727 - DNA, 25 bp, Homo sapien
atgagcctgccacttttgtcatact

SEQ ID NO: 2680728 - DNA, 25 bp, Homo sapien
tagtcaggaacattaaacggcagcg

SEQ ID NO: 2680729 - DNA, 25 bp, Homo sapien
atggcatcgtaaacccaccgtcggt

SEQ ID NO: 2680730 - DNA, 25 bp, Homo sapien
tcctgactcagtgacgatggcatcg

SEQ ID NO: 2680731 - DNA, 25 bp, Homo sapien
tacacttcgggcatgggtagaagca

SEQ ID NO: 2680732 - DNA, 25 bp, Homo sapien
ctgaagctatagcagaagaggaacc

SEQ ID NO: 2680733 - DNA, 25 bp, Homo sapien
tctaggcagccccactggaaaattc

SEQ ID NO: 2680734 - DNA, 25 bp, Homo sapien
cttccctggttccaatagaatagga

SEQ ID NO: 2680735 - DNA, 25 bp, Homo sapien
ggaactgagtcctgaagctatagca

SEQ ID NO: 2680736 - DNA, 25 bp, Homo sapien
tcaaagacctcacccaagactaggg

SEQ ID NO: 2680737 - DNA, 25 bp, Homo sapien
ccagcgtttgggctacagagaggca

SEQ ID NO: 2680738 - DNA, 25 bp, Homo sapien
gcaggtttaagcaagcccgtgtata

SEQ ID NO: 2680739 - DNA, 25 bp, Homo sapien
ggtttgccggcagtctaaatggaca

SEQ ID NO: 2680740 - DNA, 25 bp, Homo sapien
ggcgccgggagacttgtcccgcagt

SEQ ID NO: 2680741 - DNA, 25 bp, Homo sapien
gcgccgggagacttgtcccgcagtc

SEQ ID NO: 2680742 - DNA, 25 bp, Homo sapien
cactgccgccgtctgttagctgcgc

SEQ ID NO: 2680743 - DNA, 25 bp, Homo sapien
cttcggctttctcgcactgccgccg

SEQ ID NO: 2680744 - DNA, 25 bp, Homo sapien
cgtctgttagctgcgccgaacccag

SEQ ID NO: 2680745 - DNA, 25 bp, Homo sapien
tagctgcgccgaacccagccaatgg

SEQ ID NO: 2680746 - DNA, 25 bp, Homo sapien
gggctctcccgtaggatcagcgccg

SEQ ID NO: 2680747 - DNA, 25 bp, Homo sapien
ctctcccgtaggatcagcgccgcgg

SEQ ID NO: 2680748 - DNA, 25 bp, Homo sapien
tctcccgtaggatcagcgccgcggg

SEQ ID NO: 2680749 - DNA, 25 bp, Homo sapien
ctggggctctcccgtaggatcagcg

SEQ ID NO: 2680750 - DNA, 25 bp, Homo sapien
caaactccgcgaacagtgacgcaga

SEQ ID NO: 2680751 - DNA, 25 bp, Homo sapien
taccgttccacgtgattcggcagca

SEQ ID NO: 2680752 - DNA, 25 bp, Homo sapien
tgtctgaaccggaactgaaatcgga

SEQ ID NO: 2680753 - DNA, 25 bp, Homo sapien
ggcagcacccgggaacttctgatac

SEQ ID NO: 2680754 - DNA, 25 bp, Homo sapien
aacacatgttggctattaaagaccc

SEQ ID NO: 2680755 - DNA, 25 bp, Homo sapien
aaattcggtcccctattcgatactg

SEQ ID NO: 2680756 - DNA, 25 bp, Homo sapien
cctattcgatactgatttaaaaggg

SEQ ID NO: 2680757 - DNA, 25 bp, Homo sapien
tggctattaaagaccctccagcagc

SEQ ID NO: 2680758 - DNA, 25 bp, Homo sapien
gagcaaccgtggaaatcttcctgta

SEQ ID NO: 2680759 - DNA, 25 bp, Homo sapien
tgcatttatcagtgacactgctttc

SEQ ID NO: 2680760 - DNA, 25 bp, Homo sapien
agaatccgagtgagcaaccgtggaa

SEQ ID NO: 2680761 - DNA, 25 bp, Homo sapien
ggaaatcttcctgtatctattgcat

SEQ ID NO: 2680762 - DNA, 25 bp, Homo sapien
gctggatgagacaagtctttgtgca

SEQ ID NO: 2680763 - DNA, 25 bp, Homo sapien
ctggcacgctggatgagacaagtct

SEQ ID NO: 2680764 - DNA, 25 bp, Homo sapien
tttcccaatgcaaaccgctggcacg

SEQ ID NO: 2680765 - DNA, 25 bp, Homo sapien
gacttccatcagcatttcccaatgc

SEQ ID NO: 2680766 - DNA, 25 bp, Homo sapien
tctagagaaaatgccgcttgaagtt

SEQ ID NO: 2680767 - DNA, 25 bp, Homo sapien
aaatgatattgtttcaagaactagg

SEQ ID NO: 2680768 - DNA, 25 bp, Homo sapien
ttctctagagaaaatgccgcttgaa

SEQ ID NO: 2680769 - DNA, 25 bp, Homo sapien
aagaactaggtgaagatcttgtttc

SEQ ID NO: 2680770 - DNA, 25 bp, Homo sapien
cgtattgacaaatgcttcagctttg

SEQ ID NO: 2680771 - DNA, 25 bp, Homo sapien
gctgctggcttcacattgtgataca

SEQ ID NO: 2680772 - DNA, 25 bp, Homo sapien
agggagccagaattctctgccggaa

SEQ ID NO: 2680773 - DNA, 25 bp, Homo sapien
ttgacccatagaagaccacgtattg

SEQ ID NO: 2680774 - DNA, 25 bp, Homo sapien
cggagaacgagtttgacgaactgac

SEQ ID NO: 2680775 - DNA, 25 bp, Homo sapien
aaactcctccaagctaaaggcgcat

SEQ ID NO: 2680776 - DNA, 25 bp, Homo sapien
tggacggagaacgagtttgacgaac

SEQ ID NO: 2680777 - DNA, 25 bp, Homo sapien
ctcctccaagctaaaggcgcatgtt

SEQ ID NO: 2680778 - DNA, 25 bp, Homo sapien
tcatgtagatttctcaagaacctgt

SEQ ID NO: 2680779 - DNA, 25 bp, Homo sapien
tactccatataaaagataggtattc

SEQ ID NO: 2680780 - DNA, 25 bp, Homo sapien
tgtacttggcgaaataaagaacatt

SEQ ID NO: 2680781 - DNA, 25 bp, Homo sapien
acattcttagcaggagaaaatcaca

SEQ ID NO: 2680782 - DNA, 25 bp, Homo sapien
ttttgcttgagcagagtgagccatc

SEQ ID NO: 2680783 - DNA, 25 bp, Homo sapien
tgaatcttcattgttcactccgagt

SEQ ID NO: 2680784 - DNA, 25 bp, Homo sapien
catctgaaggttaagctgccatcca

SEQ ID NO: 2680785 - DNA, 25 bp, Homo sapien
cgagttgtaacacagcttgaggaga

SEQ ID NO: 2680786 - DNA, 25 bp, Homo sapien
agatccacttattaataactgttta

SEQ ID NO: 2680787 - DNA, 25 bp, Homo sapien
gatccacttattaataactgtttaa

SEQ ID NO: 2680788 - DNA, 25 bp, Homo sapien
cttgcaagataagctatttctgtca

SEQ ID NO: 2680789 - DNA, 25 bp, Homo sapien
gcaagataagctatttctgtcaaaa

SEQ ID NO: 2680790 - DNA, 25 bp, Homo sapien
catgaaacactcaggaatatctgca

SEQ ID NO: 2680791 - DNA, 25 bp, Homo sapien
aacactcaggaatatctgcaaatac

SEQ ID NO: 2680792 - DNA, 25 bp, Homo sapien
gaaacactcaggaatatctgcaaat

SEQ ID NO: 2680793 - DNA, 25 bp, Homo sapien
aacatgaaacactcaggaatatctg

SEQ ID NO: 2680794 - DNA, 25 bp, Homo sapien
ggctctagctggacaacaaacaata

SEQ ID NO: 2680795 - DNA, 25 bp, Homo sapien
ccaggctctagctggacaacaaaca

SEQ ID NO: 2680796 - DNA, 25 bp, Homo sapien
caggctctagctggacaacaaacaa

SEQ ID NO: 2680797 - DNA, 25 bp, Homo sapien
tctagctggacaacaaacaatattc

SEQ ID NO: 2680798 - DNA, 25 bp, Homo sapien
tataatctgggctagatacttctta

SEQ ID NO: 2680799 - DNA, 25 bp, Homo sapien
atataatctgggctagatacttctt

SEQ ID NO: 2680800 - DNA, 25 bp, Homo sapien
tcatataatctgggctagatacttc

SEQ ID NO: 2680801 - DNA, 25 bp, Homo sapien
ataatctgggctagatacttcttaa

SEQ ID NO: 2680802 - DNA, 25 bp, Homo sapien
cactgccatactatccctgtggatt

SEQ ID NO: 2680803 - DNA, 25 bp, Homo sapien
tcacagctcatactctctgaaaggt

SEQ ID NO: 2680804 - DNA, 25 bp, Homo sapien
gattactctatgcttgcctcaatgg

SEQ ID NO: 2680805 - DNA, 25 bp, Homo sapien
tgagtcctatagctgaaagctacta

SEQ ID NO: 2680806 - DNA, 25 bp, Homo sapien
taaaccaggtttgctgaatccaaag

SEQ ID NO: 2680807 - DNA, 25 bp, Homo sapien
ttatacagccggcactaaaccatta

SEQ ID NO: 2680808 - DNA, 25 bp, Homo sapien
cagatcagtacgatacacagataca

SEQ ID NO: 2680809 - DNA, 25 bp, Homo sapien
ccaccctaggagataagcattcaca

SEQ ID NO: 2680810 - DNA, 25 bp, Homo sapien
tgtatatatctaatgctgaattatc

SEQ ID NO: 2680811 - DNA, 25 bp, Homo sapien
attatctaaaaattactcactctgg

SEQ ID NO: 2680812 - DNA, 25 bp, Homo sapien
agatccagctactagacactaagaa

SEQ ID NO: 2680813 - DNA, 25 bp, Homo sapien
taaaaatctaagatccagctactag

SEQ ID NO: 2680814 - DNA, 25 bp, Homo sapien
gttatagccctaaacagcagtgtag

SEQ ID NO: 2680815 - DNA, 25 bp, Homo sapien
tagaatgtctaggtatgccacaagc

SEQ ID NO: 2680816 - DNA, 25 bp, Homo sapien
tgcaagctctttcggccatagaatg

SEQ ID NO: 2680817 - DNA, 25 bp, Homo sapien
tagtgagtctgccaccatagctgac

SEQ ID NO: 2680818 - DNA, 25 bp, Homo sapien
gggtatgtctggctacttagagtct

SEQ ID NO: 2680819 - DNA, 25 bp, Homo sapien
ccagaacttcccctagagtgcttgt

SEQ ID NO: 2680820 - DNA, 25 bp, Homo sapien
gagtgcttgtctatggagaattcca

SEQ ID NO: 2680821 - DNA, 25 bp, Homo sapien
ggattcaagtccttaagctctacaa

SEQ ID NO: 2680822 - DNA, 25 bp, Homo sapien
tagtatctggttgtctgtaaaggat

SEQ ID NO: 2680823 - DNA, 25 bp, Homo sapien
ttagctaggttggataggaaattct

SEQ ID NO: 2680824 - DNA, 25 bp, Homo sapien
gaatttagctaggttggataggaaa

SEQ ID NO: 2680825 - DNA, 25 bp, Homo sapien
ttatggaatttagctaggttggata

SEQ ID NO: 2680826 - DNA, 25 bp, Homo sapien
ttcaacgcaagagctaaggaggtca

SEQ ID NO: 2680827 - DNA, 25 bp, Homo sapien
gaacttgcagacactgaaatgagag

SEQ ID NO: 2680828 - DNA, 25 bp, Homo sapien
gaaatgccctctttacataggaccc

SEQ ID NO: 2680829 - DNA, 25 bp, Homo sapien
aaagtcaggtaacattcatccaggg

SEQ ID NO: 2680830 - DNA, 25 bp, Homo sapien
cctataaccagtgggatccctaatc

SEQ ID NO: 2680831 - DNA, 25 bp, Homo sapien
tccagtcctataaccagtgggatcc

SEQ ID NO: 2680832 - DNA, 25 bp, Homo sapien
cctctccagtcctataaccagtggg

SEQ ID NO: 2680833 - DNA, 25 bp, Homo sapien
cagtcctataaccagtgggatccct

SEQ ID NO: 2680834 - DNA, 25 bp, Homo sapien
gagatcatttaacctactttgtagc

SEQ ID NO: 2680835 - DNA, 25 bp, Homo sapien
tgtagcagtagtccaaatcactctt

SEQ ID NO: 2680836 - DNA, 25 bp, Homo sapien
ttacagccatatatagataggttgc

SEQ ID NO: 2680837 - DNA, 25 bp, Homo sapien
caaatatggtagcaatctctataca

SEQ ID NO: 2680838 - DNA, 25 bp, Homo sapien
acaggcgtcacccagctcttatgca

SEQ ID NO: 2680839 - DNA, 25 bp, Homo sapien
gttgtgcaacggactccatgagggt

SEQ ID NO: 2680840 - DNA, 25 bp, Homo sapien
tctgtcttccgctactagggtgggt

SEQ ID NO: 2680841 - DNA, 25 bp, Homo sapien
gattcccaggtcactagagctgtgt

SEQ ID NO: 2680842 - DNA, 25 bp, Homo sapien
catgattttgctgtggctggtacca

SEQ ID NO: 2680843 - DNA, 25 bp, Homo sapien
tgctgtggctggtaccagttgtgcc

SEQ ID NO: 2680844 - DNA, 25 bp, Homo sapien
tgtggctggtaccagttgtgccttt

SEQ ID NO: 2680845 - DNA, 25 bp, Homo sapien
tgttagctggttattgtgctcctta

SEQ ID NO: 2680846 - DNA, 25 bp, Homo sapien
gacaaagtttgcctctcaagtccaa

SEQ ID NO: 2680847 - DNA, 25 bp, Homo sapien
tactactattgtctgtaagccacag

SEQ ID NO: 2680848 - DNA, 25 bp, Homo sapien
gcatcccttaggcaatacaaaggtc

SEQ ID NO: 2680849 - DNA, 25 bp, Homo sapien
tccagaaagcaacagctaaaggttt

SEQ ID NO: 2680850 - DNA, 25 bp, Homo sapien
tatgcttctactgaaagcacaagaa

SEQ ID NO: 2680851 - DNA, 25 bp, Homo sapien
acctctaatctgtctaattggagaa

SEQ ID NO: 2680852 - DNA, 25 bp, Homo sapien
ttttctgattaatttgcgtctgtcc

SEQ ID NO: 2680853 - DNA, 25 bp, Homo sapien
catgtgtaacatctgctgatgactg

SEQ ID NO: 2680854 - DNA, 25 bp, Homo sapien
tacagtgtaataactgaagaacagg

SEQ ID NO: 2680855 - DNA, 25 bp, Homo sapien
aaatctatcccctcaaaacatcctg

SEQ ID NO: 2680856 - DNA, 25 bp, Homo sapien
ccaaatcttccctaaggtcatttat

SEQ ID NO: 2680857 - DNA, 25 bp, Homo sapien
atgtctactcaaaagtatcttcaaa

SEQ ID NO: 2680858 - DNA, 25 bp, Homo sapien
tctgacttctgttaagactaatatt

SEQ ID NO: 2680859 - DNA, 25 bp, Homo sapien
ttataatttataggtgacagcaaaa

SEQ ID NO: 2680860 - DNA, 25 bp, Homo sapien
tagtattaaaaagggcggctgagcg

SEQ ID NO: 2680861 - DNA, 25 bp, Homo sapien
tcaagagcaatctgaagatatcaac

SEQ ID NO: 2680862 - DNA, 25 bp, Homo sapien
aggttccccggctcaatcttaatag

SEQ ID NO: 2680863 - DNA, 25 bp, Homo sapien
tacaaagctaaggagattacgatgc

SEQ ID NO: 2680864 - DNA, 25 bp, Homo sapien
tatatgtcatgagatgttcaagagc

SEQ ID NO: 2680865 - DNA, 25 bp, Homo sapien
tcattaacagggagtaagctagtct

SEQ ID NO: 2680866 - DNA, 25 bp, Homo sapien
tacagacttcacaagggtcaaggac

SEQ ID NO: 2680867 - DNA, 25 bp, Homo sapien
tagtgcctggcccaatcgtaagcgt

SEQ ID NO: 2680868 - DNA, 25 bp, Homo sapien
tgttcgttagcaaagctgccctagt

SEQ ID NO: 2680869 - DNA, 25 bp, Homo sapien
taagtaacagcaaatctaacccagg

SEQ ID NO: 2680870 - DNA, 25 bp, Homo sapien
tctgatgggagaaatagaagcatat

SEQ ID NO: 2680871 - DNA, 25 bp, Homo sapien
gaacttcatcgagctcttcaataga

SEQ ID NO: 2680872 - DNA, 25 bp, Homo sapien
tcaacttgttgatgcagcatgctgc

SEQ ID NO: 2680873 - DNA, 25 bp, Homo sapien
catgctgctactatgctagaattgc

SEQ ID NO: 2680874 - DNA, 25 bp, Homo sapien
ttataagtagatagtgccaatcagt

SEQ ID NO: 2680875 - DNA, 25 bp, Homo sapien
ctgagactaccaccggccattctgg

SEQ ID NO: 2680876 - DNA, 25 bp, Homo sapien
gacacctcaactcttctactctgag

SEQ ID NO: 2680877 - DNA, 25 bp, Homo sapien
tcaagggtgtcgttatcttatgaca

SEQ ID NO: 2680878 - DNA, 25 bp, Homo sapien
caccttcatagctgttagcttcaga

SEQ ID NO: 2680879 - DNA, 25 bp, Homo sapien
ttttcacatgagttgagggatcctc

SEQ ID NO: 2680880 - DNA, 25 bp, Homo sapien
agataactcagggtcctatgactcc

SEQ ID NO: 2680881 - DNA, 25 bp, Homo sapien
ccaggtgacataggtctgccttttt

SEQ ID NO: 2680882 - DNA, 25 bp, Homo sapien
tgtgctcttaattcctgtccagggt

SEQ ID NO: 2680883 - DNA, 25 bp, Homo sapien
tctgcttgtcaaggtccatctcaaa

SEQ ID NO: 2680884 - DNA, 25 bp, Homo sapien
taggctttccctgaacatgtatgta

SEQ ID NO: 2680885 - DNA, 25 bp, Homo sapien
tgtttccccagatggagtccttcaa

SEQ ID NO: 2680886 - DNA, 25 bp, Homo sapien
ggctcttggattgactgctgttgat

SEQ ID NO: 2680887 - DNA, 25 bp, Homo sapien
tatcaatgtccaccaagcatagtga

SEQ ID NO: 2680888 - DNA, 25 bp, Homo sapien
gagatattttgcttccctagttagc

SEQ ID NO: 2680889 - DNA, 25 bp, Homo sapien
gttctacaaagaatctcaatggagg

SEQ ID NO: 2680890 - DNA, 25 bp, Homo sapien
gtaaaagtggtattcttggtcagtg

SEQ ID NO: 2680891 - DNA, 25 bp, Homo sapien
tacatgtgcatatttgctacatagg

SEQ ID NO: 2680892 - DNA, 25 bp, Homo sapien
tagaccccagagtttgtgttgttcc

SEQ ID NO: 2680893 - DNA, 25 bp, Homo sapien
tgcttaggtcttgaaatttctgtca

SEQ ID NO: 2680894 - DNA, 25 bp, Homo sapien
ttgatggagttgtttgatttttttc

SEQ ID NO: 2680895 - DNA, 25 bp, Homo sapien
tgatggagttgtttgatttttttct

SEQ ID NO: 2680896 - DNA, 25 bp, Homo sapien
atggagttgtttgatttttttcttg

SEQ ID NO: 2680897 - DNA, 25 bp, Homo sapien
aaatagaattcagtaaggtcttcag

SEQ ID NO: 2680898 - DNA, 25 bp, Homo sapien
gaaatagaattcagtaaggtcttca

SEQ ID NO: 2680899 - DNA, 25 bp, Homo sapien
ggaaatagaattcagtaaggtcttc

SEQ ID NO: 2680900 - DNA, 25 bp, Homo sapien
gaggccaggcctcaaaataacaggt

SEQ ID NO: 2680901 - DNA, 25 bp, Homo sapien
tcaatggatactgccattatgcagt

SEQ ID NO: 2680902 - DNA, 25 bp, Homo sapien
gcagtaagactaatacgaaacattg

SEQ ID NO: 2680903 - DNA, 25 bp, Homo sapien
tgggattagaagtgcgcttccacac

SEQ ID NO: 2680904 - DNA, 25 bp, Homo sapien
acaactccttgtgactgaattccac

SEQ ID NO: 2680905 - DNA, 25 bp, Homo sapien
ctgaattccacaagaactttctcca

SEQ ID NO: 2680906 - DNA, 25 bp, Homo sapien
tcaaacaactccttgtgactgaatt

SEQ ID NO: 2680907 - DNA, 25 bp, Homo sapien
gactgaattccacaagaactttctc

SEQ ID NO: 2680908 - DNA, 25 bp, Homo sapien
gaatccagctgtgcttgtatagtct

SEQ ID NO: 2680909 - DNA, 25 bp, Homo sapien
ggaatccagctgtgcttgtatagtc

SEQ ID NO: 2680910 - DNA, 25 bp, Homo sapien
tcatgtaagggaatccagctgtgct

SEQ ID NO: 2680911 - DNA, 25 bp, Homo sapien
tgtaagggaatccagctgtgcttgt

SEQ ID NO: 2680912 - DNA, 25 bp, Homo sapien
ctggcaatgtatcttcaatgcaaaa

SEQ ID NO: 2680913 - DNA, 25 bp, Homo sapien
ggcaatgtatcttcaatgcaaaata

SEQ ID NO: 2680914 - DNA, 25 bp, Homo sapien
tggcaatgtatcttcaatgcaaaat

SEQ ID NO: 2680915 - DNA, 25 bp, Homo sapien
gcaatgtatcttcaatgcaaaataa

SEQ ID NO: 2680916 - DNA, 25 bp, Homo sapien
tgaagttgacagagaagctcagact

SEQ ID NO: 2680917 - DNA, 25 bp, Homo sapien
ggacgctccttgatacattatggta

SEQ ID NO: 2680918 - DNA, 25 bp, Homo sapien
tacagaaagcaagtcactgaatcct

SEQ ID NO: 2680919 - DNA, 25 bp, Homo sapien
tatctgattcgaataatggtgccca

SEQ ID NO: 2680920 - DNA, 25 bp, Homo sapien
tcttttagggagcatacaacgaact

SEQ ID NO: 2680921 - DNA, 25 bp, Homo sapien
ggagagatcctacaagccacattat

SEQ ID NO: 2680922 - DNA, 25 bp, Homo sapien
ggatgatagaatgactcgcagcctc

SEQ ID NO: 2680923 - DNA, 25 bp, Homo sapien
tttgagaactggcaaaacagagcgt

SEQ ID NO: 2680924 - DNA, 25 bp, Homo sapien
tcctgaaatgcgctaagcctttccc

SEQ ID NO: 2680925 - DNA, 25 bp, Homo sapien
aattagctctgtacaacgactggac

SEQ ID NO: 2680926 - DNA, 25 bp, Homo sapien
aattgtagtgcactccactatgcca

SEQ ID NO: 2680927 - DNA, 25 bp, Homo sapien
tcctctgagattttgcatgggccat

SEQ ID NO: 2680928 - DNA, 25 bp, Homo sapien
gcagaattggcattgtgttagaatc

SEQ ID NO: 2680929 - DNA, 25 bp, Homo sapien
gacaagtggtgggtcatgtccatca

SEQ ID NO: 2680930 - DNA, 25 bp, Homo sapien
gagccacgtggaaaggtactcagaa

SEQ ID NO: 2680931 - DNA, 25 bp, Homo sapien
gggcttcatagcaagctttctacaa

SEQ ID NO: 2680932 - DNA, 25 bp, Homo sapien
cttccattcacaattcattagcaac

SEQ ID NO: 2680933 - DNA, 25 bp, Homo sapien
acacttagttccacggctgcagtag

SEQ ID NO: 2680934 - DNA, 25 bp, Homo sapien
gaagacaactggagatgaatgatca

SEQ ID NO: 2680935 - DNA, 25 bp, Homo sapien
aaatctgggtttcaatcacagaaag

SEQ ID NO: 2680936 - DNA, 25 bp, Homo sapien
gatgtaaatcagtccaacttgcaga

SEQ ID NO: 2680937 - DNA, 25 bp, Homo sapien
agatgatcaaatacgtttaaaaaag

SEQ ID NO: 2680938 - DNA, 25 bp, Homo sapien
aaaaggaggcacaaaggtaggcctg

SEQ ID NO: 2680939 - DNA, 25 bp, Homo sapien
ggtaggcctgaagcctcttggacat

SEQ ID NO: 2680940 - DNA, 25 bp, Homo sapien
agagagccgagaacaagctgtggct

SEQ ID NO: 2680941 - DNA, 25 bp, Homo sapien
ggactgctgttgattcatgcaggga

SEQ ID NO: 2680942 - DNA, 25 bp, Homo sapien
tctctgcctgtcctgggactgctgt

SEQ ID NO: 2680943 - DNA, 25 bp, Homo sapien
tgcagggagagagccgagaacaagc

SEQ ID NO: 2680944 - DNA, 25 bp, Homo sapien
acatttagtgagtgcatcaactggg

SEQ ID NO: 2680945 - DNA, 25 bp, Homo sapien
attaagctggctatgcacggtggct

SEQ ID NO: 2680946 - DNA, 25 bp, Homo sapien
aacagtgatttaaataagggaagct

SEQ ID NO: 2680947 - DNA, 25 bp, Homo sapien
taagggaagcttaatataaagaatg

SEQ ID NO: 2680948 - DNA, 25 bp, Homo sapien
cagttggagccagtgctgcttatcc

SEQ ID NO: 2680949 - DNA, 25 bp, Homo sapien
gccccacttggagaagcaatgcaat

SEQ ID NO: 2680950 - DNA, 25 bp, Homo sapien
caagaagagggctacatgacatggg

SEQ ID NO: 2680951 - DNA, 25 bp, Homo sapien
tcagcatgctggacctctcagtagg

SEQ ID NO: 2680952 - DNA, 25 bp, Homo sapien
ctaagtaagtatgtccaagtcctgg

SEQ ID NO: 2680953 - DNA, 25 bp, Homo sapien
gctttgttgaaaaccatcaggccag

SEQ ID NO: 2680954 - DNA, 25 bp, Homo sapien
caaaaagaagttgcacggagggctg

SEQ ID NO: 2680955 - DNA, 25 bp, Homo sapien
tcagctgctagaccagagtcctggg

SEQ ID NO: 2680956 - DNA, 25 bp, Homo sapien
ctcccagaatctgtaagtgaaggct

SEQ ID NO: 2680957 - DNA, 25 bp, Homo sapien
ggcagcaaagcatatactccacctg

SEQ ID NO: 2680958 - DNA, 25 bp, Homo sapien
gagttaagtgccttacttgcctacc

SEQ ID NO: 2680959 - DNA, 25 bp, Homo sapien
gaaggctcagctaagtgcagcttaa

SEQ ID NO: 2680960 - DNA, 25 bp, Homo sapien
aagcgctttctaggaggtagttatg

SEQ ID NO: 2680961 - DNA, 25 bp, Homo sapien
tttctaaggcttgacccttctcaag

SEQ ID NO: 2680962 - DNA, 25 bp, Homo sapien
tcacatagagaagcccttgttttag

SEQ ID NO: 2680963 - DNA, 25 bp, Homo sapien
tctctctttagtggtaagcgctttc

SEQ ID NO: 2680964 - DNA, 25 bp, Homo sapien
gtttcccttgtgatgtgatgggacc

SEQ ID NO: 2680965 - DNA, 25 bp, Homo sapien
gtgatgtgatgggaccacagctcat

SEQ ID NO: 2680966 - DNA, 25 bp, Homo sapien
atgtgatgggaccacagctcattgc

SEQ ID NO: 2680967 - DNA, 25 bp, Homo sapien
cccttgtgatgtgatgggaccacag

SEQ ID NO: 2680968 - DNA, 25 bp, Homo sapien
tatggggagttggtaagaaacatcc

SEQ ID NO: 2680969 - DNA, 25 bp, Homo sapien
gaaatcaacatgaagccattgtatg

SEQ ID NO: 2680970 - DNA, 25 bp, Homo sapien
ggtaagaaacatccacaatcaggtt

SEQ ID NO: 2680971 - DNA, 25 bp, Homo sapien
aatcaacatgaagccattgtatggg

SEQ ID NO: 2680972 - DNA, 25 bp, Homo sapien
agatttgtggcctttgaagactgga

SEQ ID NO: 2680973 - DNA, 25 bp, Homo sapien
ataagaagtccccttggctccagga

SEQ ID NO: 2680974 - DNA, 25 bp, Homo sapien
gaagactggaggaccctcttgtagg

SEQ ID NO: 2680975 - DNA, 25 bp, Homo sapien
tctgtggtgttacgctacacttcca

SEQ ID NO: 2680976 - DNA, 25 bp, Homo sapien
aatacctgcaattgtctcagtggcc

SEQ ID NO: 2680977 - DNA, 25 bp, Homo sapien
tggaccaggcagctagatgcacagg

SEQ ID NO: 2680978 - DNA, 25 bp, Homo sapien
tgcacaggaatcactctaggagggc

SEQ ID NO: 2680979 - DNA, 25 bp, Homo sapien
gcatgaggctttcacactgtgtagg

SEQ ID NO: 2680980 - DNA, 25 bp, Homo sapien
tgaatttctaattaagatcatgggt

SEQ ID NO: 2680981 - DNA, 25 bp, Homo sapien
tgagggtctgttacgggagtcttat

SEQ ID NO: 2680982 - DNA, 25 bp, Homo sapien
gacatctgaacctctactgaaatag

SEQ ID NO: 2680983 - DNA, 25 bp, Homo sapien
tcttgtgtattgaactgagtttctt

SEQ ID NO: 2680984 - DNA, 25 bp, Homo sapien
tagttctataccattgtggcctaaa

SEQ ID NO: 2680985 - DNA, 25 bp, Homo sapien
tccatagctgttgggcggaatcttc

SEQ ID NO: 2680986 - DNA, 25 bp, Homo sapien
gccttttggttacttgggagcatct

SEQ ID NO: 2680987 - DNA, 25 bp, Homo sapien
tgtggcctgaaatacgatctatcct

SEQ ID NO: 2680988 - DNA, 25 bp, Homo sapien
tctctgggatgaatcctacttgatt

SEQ ID NO: 2680989 - DNA, 25 bp, Homo sapien
ttttgaaatcaaagtaatgctggct

SEQ ID NO: 2680990 - DNA, 25 bp, Homo sapien
ggtctttgtctttcggtgtttcaca

SEQ ID NO: 2680991 - DNA, 25 bp, Homo sapien
taaggagaattggtactagtgtttg

SEQ ID NO: 2680992 - DNA, 25 bp, Homo sapien
tccggatatatggaggacatctctg

SEQ ID NO: 2680993 - DNA, 25 bp, Homo sapien
gctgtttcctctaagccaaggtgtt

SEQ ID NO: 2680994 - DNA, 25 bp, Homo sapien
gagaatgtacaatatgacccaaggt

SEQ ID NO: 2680995 - DNA, 25 bp, Homo sapien
tcatgccatgtgtgagaccttgcac

SEQ ID NO: 2680996 - DNA, 25 bp, Homo sapien
gatagagtagatgtgaggtacaaga

SEQ ID NO: 2680997 - DNA, 25 bp, Homo sapien
gaatttgctcatcattctcataata

SEQ ID NO: 2680998 - DNA, 25 bp, Homo sapien
tcatcattctcataatatgttgctg

SEQ ID NO: 2680999 - DNA, 25 bp, Homo sapien
gaggaagttggatctatctggaacc

SEQ ID NO: 2681000 - DNA, 25 bp, Homo sapien
tcagtccatggagcttgtatttggg

SEQ ID NO: 2681001 - DNA, 25 bp, Homo sapien
tcttcaaacttagaagtccaactct

SEQ ID NO: 2681002 - DNA, 25 bp, Homo sapien
ggaaaaccaggccaactacaatcag

SEQ ID NO: 2681003 - DNA, 25 bp, Homo sapien
tgtttaacagagcaacagtgaatct

SEQ ID NO: 2681004 - DNA, 25 bp, Homo sapien
ggggacctcaggactaacaaggata

SEQ ID NO: 2681005 - DNA, 25 bp, Homo sapien
ggacctcaggactaacaaggatagt

SEQ ID NO: 2681006 - DNA, 25 bp, Homo sapien
gggacctcaggactaacaaggatag

SEQ ID NO: 2681007 - DNA, 25 bp, Homo sapien
taacaaggatagtagcaggaggagg

SEQ ID NO: 2681008 - DNA, 25 bp, Homo sapien
cattgttcttccagacggcggctgg

SEQ ID NO: 2681009 - DNA, 25 bp, Homo sapien
gttctctaaggcttgctggccccca

SEQ ID NO: 2681010 - DNA, 25 bp, Homo sapien
ggctggaataggctgcagcttcggc

SEQ ID NO: 2681011 - DNA, 25 bp, Homo sapien
ttctctccttgagtcgctcttgttc

SEQ ID NO: 2681012 - DNA, 25 bp, Homo sapien
gatggaggagccctaaatctggagc

SEQ ID NO: 2681013 - DNA, 25 bp, Homo sapien
tagggtagacagcagccgccgcaag

SEQ ID NO: 2681014 - DNA, 25 bp, Homo sapien
aagagcaatcagatggaggagccct

SEQ ID NO: 2681015 - DNA, 25 bp, Homo sapien
aatctggagctgtttagggtagaca

SEQ ID NO: 2681016 - DNA, 25 bp, Homo sapien
cccgggagcgtgtcgggcccacttg

SEQ ID NO: 2681017 - DNA, 25 bp, Homo sapien
gcgtgtcgggcccacttgaaagcac

SEQ ID NO: 2681018 - DNA, 25 bp, Homo sapien
gtcgggcccacttgaaagcaccagg

SEQ ID NO: 2681019 - DNA, 25 bp, Homo sapien
gggcccacttgaaagcaccaggcgg

SEQ ID NO: 2681020 - DNA, 25 bp, Homo sapien
ctacagacattctacacagcagctt

SEQ ID NO: 2681021 - DNA, 25 bp, Homo sapien
acattctacacagcagcttcagagg

SEQ ID NO: 2681022 - DNA, 25 bp, Homo sapien
gacattctacacagcagcttcagag

SEQ ID NO: 2681023 - DNA, 25 bp, Homo sapien
cagacattctacacagcagcttcag

SEQ ID NO: 2681024 - DNA, 25 bp, Homo sapien
accttcctcaaagcaagccaatggt

SEQ ID NO: 2681025 - DNA, 25 bp, Homo sapien
aagccaatggttggctgtgcagcag

SEQ ID NO: 2681026 - DNA, 25 bp, Homo sapien
aaatattgctacttgccctttggcc

SEQ ID NO: 2681027 - DNA, 25 bp, Homo sapien
aaaaaatccctgcattgtgctgact

SEQ ID NO: 2681028 - DNA, 25 bp, Homo sapien
gtcaacatctctatactctccctgg

SEQ ID NO: 2681029 - DNA, 25 bp, Homo sapien
caactttaatgctagtttggctcag

SEQ ID NO: 2681030 - DNA, 25 bp, Homo sapien
agtgaatacccctaaatagctgtca

SEQ ID NO: 2681031 - DNA, 25 bp, Homo sapien
cgctagaaattctcgagtgtatctg

SEQ ID NO: 2681032 - DNA, 25 bp, Homo sapien
ccagttgtagtcatgtgcagaaatc

SEQ ID NO: 2681033 - DNA, 25 bp, Homo sapien
gttgaataggttgtttctccagttg

SEQ ID NO: 2681034 - DNA, 25 bp, Homo sapien
gcttttgcatcttcgccatcccaat

SEQ ID NO: 2681035 - DNA, 25 bp, Homo sapien
tccagtcatggcaatctgaagccgc

SEQ ID NO: 2681036 - DNA, 25 bp, Homo sapien
aagtgatgcacaataaatgcctagg

SEQ ID NO: 2681037 - DNA, 25 bp, Homo sapien
tgtgtacccagaaagttgcctccag

SEQ ID NO: 2681038 - DNA, 25 bp, Homo sapien
aatgcctaggccagggtgtgtaccc

SEQ ID NO: 2681039 - DNA, 25 bp, Homo sapien
gaccactatactctgaagctagatg

SEQ ID NO: 2681040 - DNA, 25 bp, Homo sapien
gagcatatcacaaaacagtatgtgt

SEQ ID NO: 2681041 - DNA, 25 bp, Homo sapien
tatgtgttgtgtgatcctatttgca

SEQ ID NO: 2681042 - DNA, 25 bp, Homo sapien
ctcttaacaagggagaaatgttctg

SEQ ID NO: 2681043 - DNA, 25 bp, Homo sapien
tgttttaaaggcacagagcatatca

SEQ ID NO: 2681044 - DNA, 25 bp, Homo sapien
ctggcaagcaacatacttttggttt

SEQ ID NO: 2681045 - DNA, 25 bp, Homo sapien
caagcaacatacttttggtttgaat

SEQ ID NO: 2681046 - DNA, 25 bp, Homo sapien
ggcaagcaacatacttttggtttga

SEQ ID NO: 2681047 - DNA, 25 bp, Homo sapien
agcaacatacttttggtttgaattc

SEQ ID NO: 2681048 - DNA, 25 bp, Homo sapien
aaatgtgtgtcaagttcttcaaaac

SEQ ID NO: 2681049 - DNA, 25 bp, Homo sapien
tcagtagcactgagccctggtgaaa

SEQ ID NO: 2681050 - DNA, 25 bp, Homo sapien
ccctggtgaaatgtgtgtcaagttc

SEQ ID NO: 2681051 - DNA, 25 bp, Homo sapien
ctcccggactcctcagtagcactga

SEQ ID NO: 2681052 - DNA, 25 bp, Homo sapien
tgctctctgtgctttgtgccgaatc

SEQ ID NO: 2681053 - DNA, 25 bp, Homo sapien
ggaggtcagattccgccacgtggcc

SEQ ID NO: 2681054 - DNA, 25 bp, Homo sapien
gaatccaaacaacaatcaggtgcaa

SEQ ID NO: 2681055 - DNA, 25 bp, Homo sapien
gagaaaagcgagctgagggaggtca

SEQ ID NO: 2681056 - DNA, 25 bp, Homo sapien
tgtggagactggagccggcctccag

SEQ ID NO: 2681057 - DNA, 25 bp, Homo sapien
aaaacgaagtaaacagcaggtgtgg

SEQ ID NO: 2681058 - DNA, 25 bp, Homo sapien
gcaggtgtggagactggagccggcc

SEQ ID NO: 2681059 - DNA, 25 bp, Homo sapien
tgcatctcagttgctgagaagccag

SEQ ID NO: 2681060 - DNA, 25 bp, Homo sapien
ctccactgacccacatttctatatt

SEQ ID NO: 2681061 - DNA, 25 bp, Homo sapien
ttctatatttgctggggatttcccc

SEQ ID NO: 2681062 - DNA, 25 bp, Homo sapien
gatttccccccaattgcaaggcctc

SEQ ID NO: 2681063 - DNA, 25 bp, Homo sapien
cagtttattctgctcatctttgcat

SEQ ID NO: 2681064 - DNA, 25 bp, Homo sapien
tggcaggtcacatgacttggacacc

SEQ ID NO: 2681065 - DNA, 25 bp, Homo sapien
tgatggactacagccacagtgcagg

SEQ ID NO: 2681066 - DNA, 25 bp, Homo sapien
ttggcaacaggactgcaagtgatgg

SEQ ID NO: 2681067 - DNA, 25 bp, Homo sapien
catgacttggacaccatccgggact

SEQ ID NO: 2681068 - DNA, 25 bp, Homo sapien
gccaaggctttacttctcagcctgc

SEQ ID NO: 2681069 - DNA, 25 bp, Homo sapien
cccttgccagaggttacattttgaa

SEQ ID NO: 2681070 - DNA, 25 bp, Homo sapien
tgagctgcaacaggcggccaaggct

SEQ ID NO: 2681071 - DNA, 25 bp, Homo sapien
tgaattttccctcctacggatgctc

SEQ ID NO: 2681072 - DNA, 25 bp, Homo sapien
gaatagacttgtaacctgagtgtgt

SEQ ID NO: 2681073 - DNA, 25 bp, Homo sapien
cctgagtgtgtcaggaccctccttc

SEQ ID NO: 2681074 - DNA, 25 bp, Homo sapien
tctgacagggggatgtccctcatta

SEQ ID NO: 2681075 - DNA, 25 bp, Homo sapien
tccttctttcggtctgacaggggga

SEQ ID NO: 2681076 - DNA, 25 bp, Homo sapien
tatagtggcccagtaacctttagat

SEQ ID NO: 2681077 - DNA, 25 bp, Homo sapien
aagtactgatgaagctccctagagg

SEQ ID NO: 2681078 - DNA, 25 bp, Homo sapien
tgaattacatccatagcgcctggca

SEQ ID NO: 2681079 - DNA, 25 bp, Homo sapien
gagagaccgacatggcccttgtagt

SEQ ID NO: 2681080 - DNA, 25 bp, Homo sapien
gacgtaagcggctgtcttgtccagt

SEQ ID NO: 2681081 - DNA, 25 bp, Homo sapien
tttcccatgcttgactcccgagagt

SEQ ID NO: 2681082 - DNA, 25 bp, Homo sapien
cacatgtattgagctggtcttctgc

SEQ ID NO: 2681083 - DNA, 25 bp, Homo sapien
cagtgcagcacccatcattgacgta

SEQ ID NO: 2681084 - DNA, 25 bp, Homo sapien
tgcagcgcaaggagaaggagctcac

SEQ ID NO: 2681085 - DNA, 25 bp, Homo sapien
tgagcagcgtcaccaagctcagcgg

SEQ ID NO: 2681086 - DNA, 25 bp, Homo sapien
ctcaaaggccacgaccagctggttc

SEQ ID NO: 2681087 - DNA, 25 bp, Homo sapien
tgatcatcggcgcaaagacgtggct

SEQ ID NO: 2681088 - DNA, 25 bp, Homo sapien
tatttgttggatcacagaatcttta

SEQ ID NO: 2681089 - DNA, 25 bp, Homo sapien
tattaccaagggtatttgttggatc

SEQ ID NO: 2681090 - DNA, 25 bp, Homo sapien
ccttatggtgaattgccttgactgc

SEQ ID NO: 2681091 - DNA, 25 bp, Homo sapien
tgtcacaattgaagggaggaggacc

SEQ ID NO: 2681092 - DNA, 25 bp, Homo sapien
catttattgggaatatccagtcccc

SEQ ID NO: 2681093 - DNA, 25 bp, Homo sapien
agcctggaagggtttcatgaaatac

SEQ ID NO: 2681094 - DNA, 25 bp, Homo sapien
ggccgtctagcctgtgttcaactcc

SEQ ID NO: 2681095 - DNA, 25 bp, Homo sapien
ggtgttcggtagaaccccatacata

SEQ ID NO: 2681096 - DNA, 25 bp, Homo sapien
tggggcactctgttgttgtaaataa

SEQ ID NO: 2681097 - DNA, 25 bp, Homo sapien
gcaaatactgagcaccattatagat

SEQ ID NO: 2681098 - DNA, 25 bp, Homo sapien
catttatcgtcatcgactcttttgg

SEQ ID NO: 2681099 - DNA, 25 bp, Homo sapien
tccatgacttcaaaagcaagggtga

SEQ ID NO: 2681100 - DNA, 25 bp, Homo sapien
taaccatttagcaccttatgactgg

SEQ ID NO: 2681101 - DNA, 25 bp, Homo sapien
gaatcacatgttgcagggtctaggg

SEQ ID NO: 2681102 - DNA, 25 bp, Homo sapien
cagagaaatctctaagccagggtgt

SEQ ID NO: 2681103 - DNA, 25 bp, Homo sapien
tgcttcctgcaataggaaggtggaa

SEQ ID NO: 2681104 - DNA, 25 bp, Homo sapien
gagagttcccatttcactttcagcg

SEQ ID NO: 2681105 - DNA, 25 bp, Homo sapien
ttaatagggattacagcgggccctg

SEQ ID NO: 2681106 - DNA, 25 bp, Homo sapien
tcacttcactatggagacagacaca

SEQ ID NO: 2681107 - DNA, 25 bp, Homo sapien
tatactgtcttgcaggaccgtgagc

SEQ ID NO: 2681108 - DNA, 25 bp, Homo sapien
gggtctcgcactccatgatttaaaa

SEQ ID NO: 2681109 - DNA, 25 bp, Homo sapien
caactcagcagatcaataagcacag

SEQ ID NO: 2681110 - DNA, 25 bp, Homo sapien
taaatataccctaagtgctgatggg

SEQ ID NO: 2681111 - DNA, 25 bp, Homo sapien
tagcactggacacaatcatctgaca

SEQ ID NO: 2681112 - DNA, 25 bp, Homo sapien
ctgctgctcccggccaaatcttttt

SEQ ID NO: 2681113 - DNA, 25 bp, Homo sapien
ccaagttgaagagattctccctgcc

SEQ ID NO: 2681114 - DNA, 25 bp, Homo sapien
agctgctgctcccggccaaatcttt

SEQ ID NO: 2681115 - DNA, 25 bp, Homo sapien
ctcccaagttgaagagattctccct

SEQ ID NO: 2681116 - DNA, 25 bp, Homo sapien
tgtggtggctccatagaagtcacta

SEQ ID NO: 2681117 - DNA, 25 bp, Homo sapien
tttagcagctggatacgaagcagac

SEQ ID NO: 2681118 - DNA, 25 bp, Homo sapien
gtgccatacagaaagggacctcttc

SEQ ID NO: 2681119 - DNA, 25 bp, Homo sapien
tatagcatggacgagccacttggct

SEQ ID NO: 2681120 - DNA, 25 bp, Homo sapien
taatggtgcttttacagggtggttc

SEQ ID NO: 2681121 - DNA, 25 bp, Homo sapien
ggcacgtgtttcctatcctcaagca

SEQ ID NO: 2681122 - DNA, 25 bp, Homo sapien
tttgaattcaaactgaggactgctg

SEQ ID NO: 2681123 - DNA, 25 bp, Homo sapien
taaaagattacaaacctcatgctgc

SEQ ID NO: 2681124 - DNA, 25 bp, Homo sapien
taatgcttccgtgttaacactttaa

SEQ ID NO: 2681125 - DNA, 25 bp, Homo sapien
tccgtgttaacactttaagggatga

SEQ ID NO: 2681126 - DNA, 25 bp, Homo sapien
acactttaagggatgatgctcattc

SEQ ID NO: 2681127 - DNA, 25 bp, Homo sapien
tgttaacactttaagggatgatgct

SEQ ID NO: 2681128 - DNA, 25 bp, Homo sapien
taagatcttgaaacgaattgaacca

SEQ ID NO: 2681129 - DNA, 25 bp, Homo sapien
cccagcattcatcaatcataccaag

SEQ ID NO: 2681130 - DNA, 25 bp, Homo sapien
gaaaaaaccgcacttagcatctgct

SEQ ID NO: 2681131 - DNA, 25 bp, Homo sapien
tcacctagttgagactgccttgagg

SEQ ID NO: 2681132 - DNA, 25 bp, Homo sapien
ggacaataccctctgctggcgaaaa

SEQ ID NO: 2681133 - DNA, 25 bp, Homo sapien
gacgcagtggaaatgatgtgcaaac

SEQ ID NO: 2681134 - DNA, 25 bp, Homo sapien
aatctatacaggatacacaggtcag

SEQ ID NO: 2681135 - DNA, 25 bp, Homo sapien
ggaataatgctcctaactgatagac

SEQ ID NO: 2681136 - DNA, 25 bp, Homo sapien
tgagacaattgatgtgggagactga

SEQ ID NO: 2681137 - DNA, 25 bp, Homo sapien
ttcctaaacatcatggaccagattc

SEQ ID NO: 2681138 - DNA, 25 bp, Homo sapien
catgaaatatgccaaccttagggaa

SEQ ID NO: 2681139 - DNA, 25 bp, Homo sapien
tcaaaaattactctgcctatgtgag

SEQ ID NO: 2681140 - DNA, 25 bp, Homo sapien
tgggatgacccttgactcctgaaac

SEQ ID NO: 2681141 - DNA, 25 bp, Homo sapien
catgctggtgtcgtgagggtccaat

SEQ ID NO: 2681142 - DNA, 25 bp, Homo sapien
tcgtccctcttgcagcagtcaggat

SEQ ID NO: 2681143 - DNA, 25 bp, Homo sapien
cctaatctgactttgctgggatgac

SEQ ID NO: 2681144 - DNA, 25 bp, Homo sapien
gccagggtggcttgcacagattcag

SEQ ID NO: 2681145 - DNA, 25 bp, Homo sapien
gaaatgactttatgtggctcggagc

SEQ ID NO: 2681146 - DNA, 25 bp, Homo sapien
cgtcgttcctgaaggcgcgcttgaa

SEQ ID NO: 2681147 - DNA, 25 bp, Homo sapien
ccagagagtagatcaaggtccctaa

SEQ ID NO: 2681148 - DNA, 25 bp, Homo sapien
ttgaatacatgccagacccacagac

SEQ ID NO: 2681149 - DNA, 25 bp, Homo sapien
tgctaggattagagcgtgcacagct

SEQ ID NO: 2681150 - DNA, 25 bp, Homo sapien
acagcttaggataagggcatttccg

SEQ ID NO: 2681151 - DNA, 25 bp, Homo sapien
ggcatttccgttgcatcactgtgtg

SEQ ID NO: 2681152 - DNA, 25 bp, Homo sapien
ttagccctcttgatgaacagatgtg

SEQ ID NO: 2681153 - DNA, 25 bp, Homo sapien
taaatatagccccacacctgagctg

SEQ ID NO: 2681154 - DNA, 25 bp, Homo sapien
tgctaaatgggatccggagacatct

SEQ ID NO: 2681155 - DNA, 25 bp, Homo sapien
ccttccaaggctagattggcagcaa

SEQ ID NO: 2681156 - DNA, 25 bp, Homo sapien
ttttatattcacgtgagtcggcctg

SEQ ID NO: 2681157 - DNA, 25 bp, Homo sapien
caaggaaaagcctcgagtcatctca

SEQ ID NO: 2681158 - DNA, 25 bp, Homo sapien
tgctgtcagcaatcgcaagccaagt

SEQ ID NO: 2681159 - DNA, 25 bp, Homo sapien
cactcacagtagctggcaagggaat

SEQ ID NO: 2681160 - DNA, 25 bp, Homo sapien
tgttttcacaccatacgcagccact

SEQ ID NO: 2681161 - DNA, 25 bp, Homo sapien
gagacctgggatgtacactaagatg

SEQ ID NO: 2681162 - DNA, 25 bp, Homo sapien
tctaggcagcaagtaacacgattta

SEQ ID NO: 2681163 - DNA, 25 bp, Homo sapien
tcttaaaggagttccatgcccacca

SEQ ID NO: 2681164 - DNA, 25 bp, Homo sapien
ccgagtatagaagggactccagggc

SEQ ID NO: 2681165 - DNA, 25 bp, Homo sapien
ccatttgaggtaagttttctgtctt

SEQ ID NO: 2681166 - DNA, 25 bp, Homo sapien
tttctgtcttggatgcccgagtata

SEQ ID NO: 2681167 - DNA, 25 bp, Homo sapien
cctgaaatagcagagtccacctaac

SEQ ID NO: 2681168 - DNA, 25 bp, Homo sapien
ttcctgcccaattagcattctgcat

SEQ ID NO: 2681169 - DNA, 25 bp, Homo sapien
ggctcatggcaaccaataatcacaa

SEQ ID NO: 2681170 - DNA, 25 bp, Homo sapien
tggctcatggcaaccaataatcaca

SEQ ID NO: 2681171 - DNA, 25 bp, Homo sapien
ctcctttgtttcgtcttcaatctgg

SEQ ID NO: 2681172 - DNA, 25 bp, Homo sapien
tgcattcacacggttttcagacagt

SEQ ID NO: 2681173 - DNA, 25 bp, Homo sapien
cagacagtccttttggtctcctttg

SEQ ID NO: 2681174 - DNA, 25 bp, Homo sapien
aaaaaatttatcagcgtgaatgcat

SEQ ID NO: 2681175 - DNA, 25 bp, Homo sapien
cccgctgtacatcaagggtgtggga

SEQ ID NO: 2681176 - DNA, 25 bp, Homo sapien
acaatgacccgctgtacatcaaggg

SEQ ID NO: 2681177 - DNA, 25 bp, Homo sapien
cttcatgcttggctgacacaatgac

SEQ ID NO: 2681178 - DNA, 25 bp, Homo sapien
ttggctgacacaatgacccgctgta

SEQ ID NO: 2681179 - DNA, 25 bp, Homo sapien
caggtactacgagtttgtgagcccc

SEQ ID NO: 2681180 - DNA, 25 bp, Homo sapien
cctgcgtggtactctggctgggtcc

SEQ ID NO: 2681181 - DNA, 25 bp, Homo sapien
taagatgtggcaattgatggactca

SEQ ID NO: 2681182 - DNA, 25 bp, Homo sapien
tcctcgtggcttgttaaactgactc

SEQ ID NO: 2681183 - DNA, 25 bp, Homo sapien
catggtccacttgctaaggctgctc

SEQ ID NO: 2681184 - DNA, 25 bp, Homo sapien
caacgttgatgtcctgtacctgggt

SEQ ID NO: 2681185 - DNA, 25 bp, Homo sapien
cgtttgctgcaaccggacatgtaga

SEQ ID NO: 2681186 - DNA, 25 bp, Homo sapien
tcagaaccttcaagggcaggcaggt

SEQ ID NO: 2681187 - DNA, 25 bp, Homo sapien
gtgaacagtcatgcaaccctctaag

SEQ ID NO: 2681188 - DNA, 25 bp, Homo sapien
acagtcatgcaaccctctaaggctt

SEQ ID NO: 2681189 - DNA, 25 bp, Homo sapien
tgcaaccctctaaggctttctccaa

SEQ ID NO: 2681190 - DNA, 25 bp, Homo sapien
gtcatgcaaccctctaaggctttct

SEQ ID NO: 2681191 - DNA, 25 bp, Homo sapien
agacaccatcaccaagtgcacaaaa

SEQ ID NO: 2681192 - DNA, 25 bp, Homo sapien
gacaccatcaccaagtgcacaaaaa

SEQ ID NO: 2681193 - DNA, 25 bp, Homo sapien
acaccatcaccaagtgcacaaaaag

SEQ ID NO: 2681194 - DNA, 25 bp, Homo sapien
gagacaccatcaccaagtgcacaaa

SEQ ID NO: 2681195 - DNA, 25 bp, Homo sapien
gatactgccagttgacaattgcttc

SEQ ID NO: 2681196 - DNA, 25 bp, Homo sapien
aaagcagagggcagatactgccagt

SEQ ID NO: 2681197 - DNA, 25 bp, Homo sapien
tctgatgccagggattggaaaatgc

SEQ ID NO: 2681198 - DNA, 25 bp, Homo sapien
ccgtgaccaggcatattccattggg

SEQ ID NO: 2681199 - DNA, 25 bp, Homo sapien
aggatccttctggaccatctgtggc

SEQ ID NO: 2681200 - DNA, 25 bp, Homo sapien
aagagtttgagtccacagcaggatc

SEQ ID NO: 2681201 - DNA, 25 bp, Homo sapien
tccttctggaccatctgtggcttcc

SEQ ID NO: 2681202 - DNA, 25 bp, Homo sapien
gagtttgagtccacagcaggatcct

SEQ ID NO: 2681203 - DNA, 25 bp, Homo sapien
tctttctagtttagtgggaactggc

SEQ ID NO: 2681204 - DNA, 25 bp, Homo sapien
tggcaggttatcagtaggtctaagc

SEQ ID NO: 2681205 - DNA, 25 bp, Homo sapien
catactgcgaagagacgggatcctg

SEQ ID NO: 2681206 - DNA, 25 bp, Homo sapien
tctattggctgaccatactgcgaag

SEQ ID NO: 2681207 - DNA, 25 bp, Homo sapien
tgatattgtaaaggcgaatgaggat

SEQ ID NO: 2681208 - DNA, 25 bp, Homo sapien
tatcagcttgatattgtaaaggcga

SEQ ID NO: 2681209 - DNA, 25 bp, Homo sapien
gcagtatcagcttgatattgtaaag

SEQ ID NO: 2681210 - DNA, 25 bp, Homo sapien
cagcttgatattgtaaaggcgaatg

SEQ ID NO: 2681211 - DNA, 25 bp, Homo sapien
tccagtaccgataagtctttactga

SEQ ID NO: 2681212 - DNA, 25 bp, Homo sapien
ttccagtaccgataagtctttactg

SEQ ID NO: 2681213 - DNA, 25 bp, Homo sapien
taaaaggctacgcaaaatgaccagc

SEQ ID NO: 2681214 - DNA, 25 bp, Homo sapien
caggaccgcatggaattagtaggac

SEQ ID NO: 2681215 - DNA, 25 bp, Homo sapien
gtgggtccccttgaaccttagctga

SEQ ID NO: 2681216 - DNA, 25 bp, Homo sapien
gacatttgttgaaagtgctgcctct

SEQ ID NO: 2681217 - DNA, 25 bp, Homo sapien
gctattcaagagttgcaggacctgg

SEQ ID NO: 2681218 - DNA, 25 bp, Homo sapien
tagtccacttacagttcgcaatgcg

SEQ ID NO: 2681219 - DNA, 25 bp, Homo sapien
aacacggcacatggagctattcaag

SEQ ID NO: 2681220 - DNA, 25 bp, Homo sapien
cgttactgtgtggactgagttccca

SEQ ID NO: 2681221 - DNA, 25 bp, Homo sapien
tgctgagaacatctcccgcggacaa

SEQ ID NO: 2681222 - DNA, 25 bp, Homo sapien
acatctcccgcggacaatgcagtac

SEQ ID NO: 2681223 - DNA, 25 bp, Homo sapien
taaaaagcttttcgaccattcagag

SEQ ID NO: 2681224 - DNA, 25 bp, Homo sapien
tcacacggggactgaataaaaagct

SEQ ID NO: 2681225 - DNA, 25 bp, Homo sapien
gcagtgctctccaggttaatcagtg

SEQ ID NO: 2681226 - DNA, 25 bp, Homo sapien
cttgcagtgctctccaggttaatca

SEQ ID NO: 2681227 - DNA, 25 bp, Homo sapien
caggttaatcagtgattctttgact

SEQ ID NO: 2681228 - DNA, 25 bp, Homo sapien
gattggcatgcctgtattttccttt

SEQ ID NO: 2681229 - DNA, 25 bp, Homo sapien
ttttctccaaggctctgctctcccc

SEQ ID NO: 2681230 - DNA, 25 bp, Homo sapien
ctgtggcaggcaattataattcact

SEQ ID NO: 2681231 - DNA, 25 bp, Homo sapien
tataattcacttttctccaaggctc

SEQ ID NO: 2681232 - DNA, 25 bp, Homo sapien
cacttttctccaaggctctgctctc

SEQ ID NO: 2681233 - DNA, 25 bp, Homo sapien
ttctctaatgccttcctattttccc

SEQ ID NO: 2681234 - DNA, 25 bp, Homo sapien
cttctctaatgccttcctattttcc

SEQ ID NO: 2681235 - DNA, 25 bp, Homo sapien
tctctaatgccttcctattttcccc

SEQ ID NO: 2681236 - DNA, 25 bp, Homo sapien
ctctaatgccttcctattttcccca

SEQ ID NO: 2681237 - DNA, 25 bp, Homo sapien
gtgtgttctaggaattccacttcat

SEQ ID NO: 2681238 - DNA, 25 bp, Homo sapien
tgttctaggaattccacttcatcag

SEQ ID NO: 2681239 - DNA, 25 bp, Homo sapien
ggaattccacttcatcagtacaaca

SEQ ID NO: 2681240 - DNA, 25 bp, Homo sapien
tctaggaattccacttcatcagtac

SEQ ID NO: 2681241 - DNA, 25 bp, Homo sapien
cctttgaatgaaaggctgctctgac

SEQ ID NO: 2681242 - DNA, 25 bp, Homo sapien
catggtactattcatcctggttgaa

SEQ ID NO: 2681243 - DNA, 25 bp, Homo sapien
taaaggagctagaatatgcccagca

SEQ ID NO: 2681244 - DNA, 25 bp, Homo sapien
ccaaggccgggtactattgagtcca

SEQ ID NO: 2681245 - DNA, 25 bp, Homo sapien
taactactcgtaccaataaactgaa

SEQ ID NO: 2681246 - DNA, 25 bp, Homo sapien
gctaaacagcaaagtggatagattg

SEQ ID NO: 2681247 - DNA, 25 bp, Homo sapien
cagattgagtcatggggtttaaaca

SEQ ID NO: 2681248 - DNA, 25 bp, Homo sapien
actgaggtgtaatgaggagatagaa

SEQ ID NO: 2681249 - DNA, 25 bp, Homo sapien
cacaccggaaagagtgggccttatt

SEQ ID NO: 2681250 - DNA, 25 bp, Homo sapien
tccacaccggaaagagtgggcctta

SEQ ID NO: 2681251 - DNA, 25 bp, Homo sapien
tccagactccacaccggaaagagtg

SEQ ID NO: 2681252 - DNA, 25 bp, Homo sapien
gactccacaccggaaagagtgggcc

SEQ ID NO: 2681253 - DNA, 25 bp, Homo sapien
cattgaagggtgcaacgatatggcg

SEQ ID NO: 2681254 - DNA, 25 bp, Homo sapien
cagtaatacccagttccttgcacct

SEQ ID NO: 2681255 - DNA, 25 bp, Homo sapien
tttgatgtgtaaggcagtaataccc

SEQ ID NO: 2681256 - DNA, 25 bp, Homo sapien
gtgcaacgatatggcggacaccaaa

SEQ ID NO: 2681257 - DNA, 25 bp, Homo sapien
cgagggggcaagggctcgagggccg

SEQ ID NO: 2681258 - DNA, 25 bp, Homo sapien
gagggggcaagggctcgagggccga

SEQ ID NO: 2681259 - DNA, 25 bp, Homo sapien
ggggacgtcctctatccaccccatc

SEQ ID NO: 2681260 - DNA, 25 bp, Homo sapien
gggacgtcctctatccaccccatct

SEQ ID NO: 2681261 - DNA, 25 bp, Homo sapien
gatgggggggacgtcctctatccac

SEQ ID NO: 2681262 - DNA, 25 bp, Homo sapien
caactctagaggcattgcggaggtc

SEQ ID NO: 2681263 - DNA, 25 bp, Homo sapien
tgtacagttcacctagagcatggat

SEQ ID NO: 2681264 - DNA, 25 bp, Homo sapien
cttttttgacagacaatgcacgtgg

SEQ ID NO: 2681265 - DNA, 25 bp, Homo sapien
tttgtcataacaaggccgaattcgt

SEQ ID NO: 2681266 - DNA, 25 bp, Homo sapien
tgtgctgcaagagcaactgagctat

SEQ ID NO: 2681267 - DNA, 25 bp, Homo sapien
caaatgagatgtcataccacacaaa

SEQ ID NO: 2681268 - DNA, 25 bp, Homo sapien
taatcccttcgaaatgggcaaatga

SEQ ID NO: 2681269 - DNA, 25 bp, Homo sapien
gagctattctctgctggcgaccaca

SEQ ID NO: 2681270 - DNA, 25 bp, Homo sapien
gtgatgccttgaggcgttctgctgg

SEQ ID NO: 2681271 - DNA, 25 bp, Homo sapien
gaaggtgatgccttgaggcgttctg

SEQ ID NO: 2681272 - DNA, 25 bp, Homo sapien
atgccttgaggcgttctgctgggcc

SEQ ID NO: 2681273 - DNA, 25 bp, Homo sapien
aggtgatgccttgaggcgttctgct

SEQ ID NO: 2681274 - DNA, 25 bp, Homo sapien
taggcgggtaacattgcactagtga

SEQ ID NO: 2681275 - DNA, 25 bp, Homo sapien
tgataaggcggcaataagtgcacct

SEQ ID NO: 2681276 - DNA, 25 bp, Homo sapien
tcaagtgagtggttatgataaggcg

SEQ ID NO: 2681277 - DNA, 25 bp, Homo sapien
cagttgtattttgagtaggcgggta

SEQ ID NO: 2681278 - DNA, 25 bp, Homo sapien
tcctgaaattgttcgtcgtccttcc

SEQ ID NO: 2681279 - DNA, 25 bp, Homo sapien
aaaagctatttaatgccccccagcg

SEQ ID NO: 2681280 - DNA, 25 bp, Homo sapien
aaggtcgagtgcctttgccttgtct

SEQ ID NO: 2681281 - DNA, 25 bp, Homo sapien
cagtgttgtgccagcaggtctcaga

SEQ ID NO: 2681282 - DNA, 25 bp, Homo sapien
cagatctgaaaagccgtttaaccca

SEQ ID NO: 2681283 - DNA, 25 bp, Homo sapien
tcagatctgaaaagccgtttaaccc

SEQ ID NO: 2681284 - DNA, 25 bp, Homo sapien
agcaggaccccggaggcaggtgcgg

SEQ ID NO: 2681285 - DNA, 25 bp, Homo sapien
gctcagtggcttgcaagtaggcagc

SEQ ID NO: 2681286 - DNA, 25 bp, Homo sapien
gtggcttgcaagtaggcagcttcag

SEQ ID NO: 2681287 - DNA, 25 bp, Homo sapien
caggtgcagaatcccgagccatctg

SEQ ID NO: 2681288 - DNA, 25 bp, Homo sapien
gtttgaaacccagactagggctctg

SEQ ID NO: 2681289 - DNA, 25 bp, Homo sapien
cctagggcgctaccatgggggcaat

SEQ ID NO: 2681290 - DNA, 25 bp, Homo sapien
aaacccagactagggctctgttccg

SEQ ID NO: 2681291 - DNA, 25 bp, Homo sapien
agactagggctctgttccgactcct

SEQ ID NO: 2681292 - DNA, 25 bp, Homo sapien
gctgccaccagaggttccgggcttt

SEQ ID NO: 2681293 - DNA, 25 bp, Homo sapien
tcgaataagtgtccgggagcagccg

SEQ ID NO: 2681294 - DNA, 25 bp, Homo sapien
ggcaaggatatagcccgtcgcggct

SEQ ID NO: 2681295 - DNA, 25 bp, Homo sapien
tccgggctttgtttgctcgaataag

SEQ ID NO: 2681296 - DNA, 25 bp, Homo sapien
taacagcgctgttttcgtccagtgc

SEQ ID NO: 2681297 - DNA, 25 bp, Homo sapien
aaatggtgggattctcggaagctcc

SEQ ID NO: 2681298 - DNA, 25 bp, Homo sapien
gctccgtggagtgcaagaaacttgt

SEQ ID NO: 2681299 - DNA, 25 bp, Homo sapien
tccctggcccggtgtgtcgaaggca

SEQ ID NO: 2681300 - DNA, 25 bp, Homo sapien
cgccccgggccgcgacggcgcgtat

SEQ ID NO: 2681301 - DNA, 25 bp, Homo sapien
ccccgggccgcgacggcgcgtatgg

SEQ ID NO: 2681302 - DNA, 25 bp, Homo sapien
gccccgggccgcgacggcgcgtatg

SEQ ID NO: 2681303 - DNA, 25 bp, Homo sapien
cggagagatcccctcgataatggat

SEQ ID NO: 2681304 - DNA, 25 bp, Homo sapien
tgcatcccagaaagtagtcgccgcg

SEQ ID NO: 2681305 - DNA, 25 bp, Homo sapien
ggattactaaatgggatacacgctg

SEQ ID NO: 2681306 - DNA, 25 bp, Homo sapien
tgtccgtcgatgcaccgaaaaggta

SEQ ID NO: 2681307 - DNA, 25 bp, Homo sapien
gaatccaagtggaatttggatttgg

SEQ ID NO: 2681308 - DNA, 25 bp, Homo sapien
aatccaagtggaatttggatttgga

SEQ ID NO: 2681309 - DNA, 25 bp, Homo sapien
tccaagtggaatttggatttggaga

SEQ ID NO: 2681310 - DNA, 25 bp, Homo sapien
tggaatccaagtggaatttggattt

SEQ ID NO: 2681311 - DNA, 25 bp, Homo sapien
agcagcgtgtagcagcggccagcat

SEQ ID NO: 2681312 - DNA, 25 bp, Homo sapien
cttagcagcgtgtagcagcggccag

SEQ ID NO: 2681313 - DNA, 25 bp, Homo sapien
cagcgtgtagcagcggccagcatca

SEQ ID NO: 2681314 - DNA, 25 bp, Homo sapien
gcatcaccacacccgcggcaccgcg

SEQ ID NO: 2681315 - DNA, 25 bp, Homo sapien
gctgcagccaactccgctccccgcg

SEQ ID NO: 2681316 - DNA, 25 bp, Homo sapien
agaggagtagtgagcggcacggggt

SEQ ID NO: 2681317 - DNA, 25 bp, Homo sapien
tccgcggtgccggtcgcccgcgatg

SEQ ID NO: 2681318 - DNA, 25 bp, Homo sapien
tgcccaggcgctcggaacccagcag

SEQ ID NO: 2681319 - DNA, 25 bp, Homo sapien
ctccgcccgggagcggcggcctctc

SEQ ID NO: 2681320 - DNA, 25 bp, Homo sapien
cccgggagcggcggcctctccggtg

SEQ ID NO: 2681321 - DNA, 25 bp, Homo sapien
cgggagcggcggcctctccggtgac

SEQ ID NO: 2681322 - DNA, 25 bp, Homo sapien
cgcccgggagcggcggcctctccgg

SEQ ID NO: 2681323 - DNA, 25 bp, Homo sapien
tctcctttgggtcggaggagacgcc

SEQ ID NO: 2681324 - DNA, 25 bp, Homo sapien
cggaaggagagtccgatctgcgcaa

SEQ ID NO: 2681325 - DNA, 25 bp, Homo sapien
gacgccagccaaagtaggcggagtt

SEQ ID NO: 2681326 - DNA, 25 bp, Homo sapien
tctgcgcaatccagtccgggacttg

SEQ ID NO: 2681327 - DNA, 25 bp, Homo sapien
cgcagttgatttcggggcgcagcgg

SEQ ID NO: 2681328 - DNA, 25 bp, Homo sapien
tggcccgacgagttggcacaagcct

SEQ ID NO: 2681329 - DNA, 25 bp, Homo sapien
cccttggggagcaagagccgcggcg

SEQ ID NO: 2681330 - DNA, 25 bp, Homo sapien
gaacgtggtgtggcccgacgagttg

SEQ ID NO: 2681331 - DNA, 25 bp, Homo sapien
taaaggttgcgactaggatccgtac

SEQ ID NO: 2681332 - DNA, 25 bp, Homo sapien
ttaaaggttgcgactaggatccgta

SEQ ID NO: 2681333 - DNA, 25 bp, Homo sapien
gaggccgaagggtccggagcttcga

SEQ ID NO: 2681334 - DNA, 25 bp, Homo sapien
gtccggagcttcgaaggggctgcag

SEQ ID NO: 2681335 - DNA, 25 bp, Homo sapien
atcggcggcggggagcgaagaagga

SEQ ID NO: 2681336 - DNA, 25 bp, Homo sapien
ttagcatgtaaatcggcggcgggga

SEQ ID NO: 2681337 - DNA, 25 bp, Homo sapien
agactaggatctagtaattgccagg

SEQ ID NO: 2681338 - DNA, 25 bp, Homo sapien
ttggatggtgagactaggatctagt

SEQ ID NO: 2681339 - DNA, 25 bp, Homo sapien
gaagattctgggtggtatttcttca

SEQ ID NO: 2681340 - DNA, 25 bp, Homo sapien
caggaagattctgggtggtatttct

SEQ ID NO: 2681341 - DNA, 25 bp, Homo sapien
aatgacatcatgaggtttcatagcc

SEQ ID NO: 2681342 - DNA, 25 bp, Homo sapien
gggagcctgacaatagctggctttt

SEQ ID NO: 2681343 - DNA, 25 bp, Homo sapien
catgaggtttcatagcctggcttcc

SEQ ID NO: 2681344 - DNA, 25 bp, Homo sapien
ggtttcgggagcctgacaatagctg

SEQ ID NO: 2681345 - DNA, 25 bp, Homo sapien
gaattacgccaatgcagaagacact

SEQ ID NO: 2681346 - DNA, 25 bp, Homo sapien
tgtctgtggcaagcaccttgatccc

SEQ ID NO: 2681347 - DNA, 25 bp, Homo sapien
tatcaaagaaagttgcaaggtgtct

SEQ ID NO: 2681348 - DNA, 25 bp, Homo sapien
agtcatcctggaaagttgaccccag

SEQ ID NO: 2681349 - DNA, 25 bp, Homo sapien
gaaaatcaactggtgtacacggcca

SEQ ID NO: 2681350 - DNA, 25 bp, Homo sapien
catgcccaacactgtcccgaagaaa

SEQ ID NO: 2681351 - DNA, 25 bp, Homo sapien
ttgaccacacacttggaagcgcaga

SEQ ID NO: 2681352 - DNA, 25 bp, Homo sapien
aattgaccacacacttggaagcgca

SEQ ID NO: 2681353 - DNA, 25 bp, Homo sapien
tgacatctgtcataatctgctcagg

SEQ ID NO: 2681354 - DNA, 25 bp, Homo sapien
ctgcaacaggccttaattaatattg

SEQ ID NO: 2681355 - DNA, 25 bp, Homo sapien
tatcagctaaggctgaagttctctt

SEQ ID NO: 2681356 - DNA, 25 bp, Homo sapien
aacagtatactacagactgtgtggc

SEQ ID NO: 2681357 - DNA, 25 bp, Homo sapien
gatagcccagaaagtaacacctaaa

SEQ ID NO: 2681358 - DNA, 25 bp, Homo sapien
gtaaaccatttgatgactaccaaaa

SEQ ID NO: 2681359 - DNA, 25 bp, Homo sapien
aaagctaagcgtatagatagcccag

SEQ ID NO: 2681360 - DNA, 25 bp, Homo sapien
aatggcctagatgtcgaccactggg

SEQ ID NO: 2681361 - DNA, 25 bp, Homo sapien
taggtttagctatagccccagatcc

SEQ ID NO: 2681362 - DNA, 25 bp, Homo sapien
tatagccccagatcctataaacaag

SEQ ID NO: 2681363 - DNA, 25 bp, Homo sapien
gcagctgcaaaactgtgaattttat

SEQ ID NO: 2681364 - DNA, 25 bp, Homo sapien
caaacaaaactgtaggtttagctat

SEQ ID NO: 2681365 - DNA, 25 bp, Homo sapien
gggcagcttacttcctcacggtcag

SEQ ID NO: 2681366 - DNA, 25 bp, Homo sapien
tgatcctgtcgggttagcagtccag

SEQ ID NO: 2681367 - DNA, 25 bp, Homo sapien
gatgccaccttctcatgctgaacca

SEQ ID NO: 2681368 - DNA, 25 bp, Homo sapien
taacaaactggccacaaacttagtg

SEQ ID NO: 2681369 - DNA, 25 bp, Homo sapien
catgtaaaatgagatccccgaggat

SEQ ID NO: 2681370 - DNA, 25 bp, Homo sapien
tagaccactttaggcctttgcaaaa

SEQ ID NO: 2681371 - DNA, 25 bp, Homo sapien
gcagttccaggaatcaccatgtaaa

SEQ ID NO: 2681372 - DNA, 25 bp, Homo sapien
gagaaccactgcctcatagggagat

SEQ ID NO: 2681373 - DNA, 25 bp, Homo sapien
tttagacacataacacatcaatggc

SEQ ID NO: 2681374 - DNA, 25 bp, Homo sapien
cacatcaatggcttaaaaaactttg

SEQ ID NO: 2681375 - DNA, 25 bp, Homo sapien
cagtcaaaaggaattttatccttat

SEQ ID NO: 2681376 - DNA, 25 bp, Homo sapien
ttattctcttgggagtggactgctg

SEQ ID NO: 2681377 - DNA, 25 bp, Homo sapien
gcagagtctcacatttggagttcat

SEQ ID NO: 2681378 - DNA, 25 bp, Homo sapien
tataggtttaagtcacatggagcat

SEQ ID NO: 2681379 - DNA, 25 bp, Homo sapien
gaaacttgttctatcggccatttga

SEQ ID NO: 2681380 - DNA, 25 bp, Homo sapien
tgagcctagtcgcagcttgaaagca

SEQ ID NO: 2681381 - DNA, 25 bp, Homo sapien
ggaagacttttataggacaactgta

SEQ ID NO: 2681382 - DNA, 25 bp, Homo sapien
gacaactgtagaagtaaagcaaagc

SEQ ID NO: 2681383 - DNA, 25 bp, Homo sapien
caaagcagacgtttgattggttaca

SEQ ID NO: 2681384 - DNA, 25 bp, Homo sapien
tgaggtcacttttgaggcctcactg

SEQ ID NO: 2681385 - DNA, 25 bp, Homo sapien
tccctccaaggcttactttagtatc

SEQ ID NO: 2681386 - DNA, 25 bp, Homo sapien
tcattcttcacgatatcatcagatt

SEQ ID NO: 2681387 - DNA, 25 bp, Homo sapien
tccactcattcttcacgatatcatc

SEQ ID NO: 2681388 - DNA, 25 bp, Homo sapien
cttcgtctatttaaattccactcat

SEQ ID NO: 2681389 - DNA, 25 bp, Homo sapien
cacgatatcatcagattttgcctct

SEQ ID NO: 2681390 - DNA, 25 bp, Homo sapien
tttggtgcgaatgaggcccatgttg

SEQ ID NO: 2681391 - DNA, 25 bp, Homo sapien
gttttggtgcgaatgaggcccatgt

SEQ ID NO: 2681392 - DNA, 25 bp, Homo sapien
ccccgaggcattttataattcatcc

SEQ ID NO: 2681393 - DNA, 25 bp, Homo sapien
ggctgagacctcagaaacataactg

SEQ ID NO: 2681394 - DNA, 25 bp, Homo sapien
acaggtccccgaggcattttataat

SEQ ID NO: 2681395 - DNA, 25 bp, Homo sapien
cgcgcttgttcgtgtggaagtcgtt

SEQ ID NO: 2681396 - DNA, 25 bp, Homo sapien
atttattgaaaataatacagcattg

SEQ ID NO: 2681397 - DNA, 25 bp, Homo sapien
attgaaaataatacagcattgcaga

SEQ ID NO: 2681398 - DNA, 25 bp, Homo sapien
agatttattgaaaataatacagcat

SEQ ID NO: 2681399 - DNA, 25 bp, Homo sapien
ttattgaaaataatacagcattgca

SEQ ID NO: 2681400 - DNA, 25 bp, Homo sapien
ttttccccaataaagtgctccttca

SEQ ID NO: 2681401 - DNA, 25 bp, Homo sapien
ttcacgtccagaggcaggatcatct

SEQ ID NO: 2681402 - DNA, 25 bp, Homo sapien
gctttcacgtccagaggcaggatca

SEQ ID NO: 2681403 - DNA, 25 bp, Homo sapien
tgctttcacgtccagaggcaggatc

SEQ ID NO: 2681404 - DNA, 25 bp, Homo sapien
cattggtatttgaaaggactttgga

SEQ ID NO: 2681405 - DNA, 25 bp, Homo sapien
gaactgatgcatcatcaatcattgg

SEQ ID NO: 2681406 - DNA, 25 bp, Homo sapien
actttggaccatgggatgcattatt

SEQ ID NO: 2681407 - DNA, 25 bp, Homo sapien
gcattattctcaaccataacctgca

SEQ ID NO: 2681408 - DNA, 25 bp, Homo sapien
ctggaaaggacaagttccagggcca

SEQ ID NO: 2681409 - DNA, 25 bp, Homo sapien
tggaaaggacaagttccagggccaa

SEQ ID NO: 2681410 - DNA, 25 bp, Homo sapien
aacctgattccagtaagagccagca

SEQ ID NO: 2681411 - DNA, 25 bp, Homo sapien
ctgattccagtaagagccagcagcc

SEQ ID NO: 2681412 - DNA, 25 bp, Homo sapien
acctgattccagtaagagccagcag

SEQ ID NO: 2681413 - DNA, 25 bp, Homo sapien
cctgattccagtaagagccagcagc

SEQ ID NO: 2681414 - DNA, 25 bp, Homo sapien
cctggtgggtataagctgacgatgc

SEQ ID NO: 2681415 - DNA, 25 bp, Homo sapien
cagagaccagttcagacaattagga

SEQ ID NO: 2681416 - DNA, 25 bp, Homo sapien
gaactaacacatttgcagagaccag

SEQ ID NO: 2681417 - DNA, 25 bp, Homo sapien
gacagcaagacacagattgagccat

SEQ ID NO: 2681418 - DNA, 25 bp, Homo sapien
tgctctgcggcaccgacagccttcc

SEQ ID NO: 2681419 - DNA, 25 bp, Homo sapien
tgtgagctgctctgcggcaccgaca

SEQ ID NO: 2681420 - DNA, 25 bp, Homo sapien
agctgctctgcggcaccgacagcct

SEQ ID NO: 2681421 - DNA, 25 bp, Homo sapien
gtgagctgctctgcggcaccgacag

SEQ ID NO: 2681422 - DNA, 25 bp, Homo sapien
ctgggcggagatagacaggaatctc

SEQ ID NO: 2681423 - DNA, 25 bp, Homo sapien
catgtgctttgaaagacgccgaaca

SEQ ID NO: 2681424 - DNA, 25 bp, Homo sapien
tttccttcctaagctgggcggagat

SEQ ID NO: 2681425 - DNA, 25 bp, Homo sapien
ccttcctaagctgggcggagataga

SEQ ID NO: 2681426 - DNA, 25 bp, Homo sapien
cagagcagctgctgcgatttgcaca

SEQ ID NO: 2681427 - DNA, 25 bp, Homo sapien
agagcagctgctgcgatttgcacat

SEQ ID NO: 2681428 - DNA, 25 bp, Homo sapien
gagcagctgctgcgatttgcacatc

SEQ ID NO: 2681429 - DNA, 25 bp, Homo sapien
tggagagctaaaaacgttggtgcac

SEQ ID NO: 2681430 - DNA, 25 bp, Homo sapien
ggtgcacagcaggtttcacaaaaac

SEQ ID NO: 2681431 - DNA, 25 bp, Homo sapien
gctactggttcctggagagctaaaa

SEQ ID NO: 2681432 - DNA, 25 bp, Homo sapien
gctttaagctagagcagacagtcag

SEQ ID NO: 2681433 - DNA, 25 bp, Homo sapien
gcgaaatcttcaccctgtgtctgca

SEQ ID NO: 2681434 - DNA, 25 bp, Homo sapien
tccacggcttccagaaccggctttg

SEQ ID NO: 2681435 - DNA, 25 bp, Homo sapien
tctcctgacaatcacttccatatgc

SEQ ID NO: 2681436 - DNA, 25 bp, Homo sapien
tttgggtgttgctgcgaaatcttca

SEQ ID NO: 2681437 - DNA, 25 bp, Homo sapien
gatgtaggaggcgttcaatccagtt

SEQ ID NO: 2681438 - DNA, 25 bp, Homo sapien
gagtaatgaatcttgtctgcacaga

SEQ ID NO: 2681439 - DNA, 25 bp, Homo sapien
tgtgctcacgatagaactgcattgt

SEQ ID NO: 2681440 - DNA, 25 bp, Homo sapien
caggaaaccgctgtgttgagaacgc

SEQ ID NO: 2681441 - DNA, 25 bp, Homo sapien
caactgaacagtgccaaggaagatg

SEQ ID NO: 2681442 - DNA, 25 bp, Homo sapien
catttgccaagagcccaaacgtgta

SEQ ID NO: 2681443 - DNA, 25 bp, Homo sapien
tcagaagctgttctcgttgagagca

SEQ ID NO: 2681444 - DNA, 25 bp, Homo sapien
gagcccaaacgtgtagacagcagac

SEQ ID NO: 2681445 - DNA, 25 bp, Homo sapien
gctttgccttggacaaccacggtca

SEQ ID NO: 2681446 - DNA, 25 bp, Homo sapien
ctttgccttggacaaccacggtcat

SEQ ID NO: 2681447 - DNA, 25 bp, Homo sapien
agctttgccttggacaaccacggtc

SEQ ID NO: 2681448 - DNA, 25 bp, Homo sapien
ttccctactaagctgttcatccaca

SEQ ID NO: 2681449 - DNA, 25 bp, Homo sapien
tccctactaagctgttcatccacac

SEQ ID NO: 2681450 - DNA, 25 bp, Homo sapien
ttctattgcatcttgagaacaggat

SEQ ID NO: 2681451 - DNA, 25 bp, Homo sapien
tagaaaaggtgtccagctggacact

SEQ ID NO: 2681452 - DNA, 25 bp, Homo sapien
agaaaaggtgtccagctggacactg

SEQ ID NO: 2681453 - DNA, 25 bp, Homo sapien
tttccagttgaccttgctaggaaaa

SEQ ID NO: 2681454 - DNA, 25 bp, Homo sapien
ccagttgaccttgctaggaaaaggg

SEQ ID NO: 2681455 - DNA, 25 bp, Homo sapien
gggatgtgcaggctctagtgggttc

SEQ ID NO: 2681456 - DNA, 25 bp, Homo sapien
ctcagaaggtctccagtacacattt

SEQ ID NO: 2681457 - DNA, 25 bp, Homo sapien
atcaatagctggtgaaaatgtgggc

SEQ ID NO: 2681458 - DNA, 25 bp, Homo sapien
tgtcctgactgtgtcgcacaaagcc

SEQ ID NO: 2681459 - DNA, 25 bp, Homo sapien
ggaaggtctacttgtaacaggagcc

SEQ ID NO: 2681460 - DNA, 25 bp, Homo sapien
agcctgtggataaggtttactctcc

SEQ ID NO: 2681461 - DNA, 25 bp, Homo sapien
ctaatgatgtttcaggtctgggaca

SEQ ID NO: 2681462 - DNA, 25 bp, Homo sapien
actgctgacagcgtctgatgatacc

SEQ ID NO: 2681463 - DNA, 25 bp, Homo sapien
tctgggacaatatccaagactttcg

SEQ ID NO: 2681464 - DNA, 25 bp, Homo sapien
taagtagtaggaaacaagaaactgc

SEQ ID NO: 2681465 - DNA, 25 bp, Homo sapien
ttttacgtctctgtcaatcctccct

SEQ ID NO: 2681466 - DNA, 25 bp, Homo sapien
tgagcacgcgatgctccatcgagct

SEQ ID NO: 2681467 - DNA, 25 bp, Homo sapien
aatcctccctcggccaatctgaaaa

SEQ ID NO: 2681468 - DNA, 25 bp, Homo sapien
gccaatctgaaaaacttcgtctatt

SEQ ID NO: 2681469 - DNA, 25 bp, Homo sapien
tctcttgtccattcaacttctggct

SEQ ID NO: 2681470 - DNA, 25 bp, Homo sapien
tgtgacttcacttctaccatccatg

SEQ ID NO: 2681471 - DNA, 25 bp, Homo sapien
gaagcccataccgttcaaatgaaga

SEQ ID NO: 2681472 - DNA, 25 bp, Homo sapien
ccagagaatagctcatctgcttgtc

SEQ ID NO: 2681473 - DNA, 25 bp, Homo sapien
cagtcgtttgacaatggctttcaag

SEQ ID NO: 2681474 - DNA, 25 bp, Homo sapien
gtgggccttgaggtagcctctggtc

SEQ ID NO: 2681475 - DNA, 25 bp, Homo sapien
tgggccttgaggtagcctctggtct

SEQ ID NO: 2681476 - DNA, 25 bp, Homo sapien
tgtgggccttgaggtagcctctggt

SEQ ID NO: 2681477 - DNA, 25 bp, Homo sapien
ggccttgaggtagcctctggtctct

SEQ ID NO: 2681478 - DNA, 25 bp, Homo sapien
gcagcaatgctgagatccctgagta

SEQ ID NO: 2681479 - DNA, 25 bp, Homo sapien
tgttctgtgatctcttggcccaaga

SEQ ID NO: 2681480 - DNA, 25 bp, Homo sapien
tagccacatagtcaaaggcagcaat

SEQ ID NO: 2681481 - DNA, 25 bp, Homo sapien
cagaactatgtaactgctgtcccag

SEQ ID NO: 2681482 - DNA, 25 bp, Homo sapien
tgtgcagaagaaggattccctgatg

SEQ ID NO: 2681483 - DNA, 25 bp, Homo sapien
gattccctgatgaaccccaaaatca

SEQ ID NO: 2681484 - DNA, 25 bp, Homo sapien
aggattccctgatgaaccccaaaat

SEQ ID NO: 2681485 - DNA, 25 bp, Homo sapien
agaagaaggattccctgatgaaccc

SEQ ID NO: 2681486 - DNA, 25 bp, Homo sapien
aataagtttatcaatgaatcagctg

SEQ ID NO: 2681487 - DNA, 25 bp, Homo sapien
tgaataagtttatcaatgaatcagc

SEQ ID NO: 2681488 - DNA, 25 bp, Homo sapien
gctgaataagtttatcaatgaatca

SEQ ID NO: 2681489 - DNA, 25 bp, Homo sapien
gggtctgcagagatctcccctcatt

SEQ ID NO: 2681490 - DNA, 25 bp, Homo sapien
gcagaaaacaagctgacacagcagc

SEQ ID NO: 2681491 - DNA, 25 bp, Homo sapien
aactgacacaggctttagcagcaga

SEQ ID NO: 2681492 - DNA, 25 bp, Homo sapien
ttccatattggtatgagtgggccag

SEQ ID NO: 2681493 - DNA, 25 bp, Homo sapien
tagttattgtgataaacctctacag

SEQ ID NO: 2681494 - DNA, 25 bp, Homo sapien
tattggtatgagtgggccagcctgt

SEQ ID NO: 2681495 - DNA, 25 bp, Homo sapien
gcagtttcataaacagccctagtta

SEQ ID NO: 2681496 - DNA, 25 bp, Homo sapien
tagagatatagattctaattgccct

SEQ ID NO: 2681497 - DNA, 25 bp, Homo sapien
tcaaagagtttagagatatagattc

SEQ ID NO: 2681498 - DNA, 25 bp, Homo sapien
agtttagagatatagattctaattg

SEQ ID NO: 2681499 - DNA, 25 bp, Homo sapien
tttagagatatagattctaattgcc

SEQ ID NO: 2681500 - DNA, 25 bp, Homo sapien
gaatgctcagtatgtcaaattgatc

SEQ ID NO: 2681501 - DNA, 25 bp, Homo sapien
tactcagttccaagtgtccatccca

SEQ ID NO: 2681502 - DNA, 25 bp, Homo sapien
ttgttggagaaaggcccgctgctct

SEQ ID NO: 2681503 - DNA, 25 bp, Homo sapien
tcttcagctatataaggatcttggg

SEQ ID NO: 2681504 - DNA, 25 bp, Homo sapien
cagaccatggtgaatagtatttaac

SEQ ID NO: 2681505 - DNA, 25 bp, Homo sapien
acccacacggggtttgggatgccag

SEQ ID NO: 2681506 - DNA, 25 bp, Homo sapien
gtttgtgtgggatggtcagaccatg

SEQ ID NO: 2681507 - DNA, 25 bp, Homo sapien
gatgaaggacgtgccctgaggaagt

SEQ ID NO: 2681508 - DNA, 25 bp, Homo sapien
tcaaaatgaactgagtccactccgg

SEQ ID NO: 2681509 - DNA, 25 bp, Homo sapien
tgccggatcccaaaacgtcaagagg

SEQ ID NO: 2681510 - DNA, 25 bp, Homo sapien
aaagcccgagcaccttcaaaacgtg

SEQ ID NO: 2681511 - DNA, 25 bp, Homo sapien
aagattgcacattctaaagcccgag

SEQ ID NO: 2681512 - DNA, 25 bp, Homo sapien
attgcaacatgaccataaagctgtg

SEQ ID NO: 2681513 - DNA, 25 bp, Homo sapien
tctgtcactacatcactaattgcaa

SEQ ID NO: 2681514 - DNA, 25 bp, Homo sapien
tacatcactaattgcaacatgacca

SEQ ID NO: 2681515 - DNA, 25 bp, Homo sapien
tcacattctgtcactacatcactaa

SEQ ID NO: 2681516 - DNA, 25 bp, Homo sapien
gccataacgtagagataaagaacct

SEQ ID NO: 2681517 - DNA, 25 bp, Homo sapien
gcgttttgagttgtagaggaaggcc

SEQ ID NO: 2681518 - DNA, 25 bp, Homo sapien
aggaaggaaagccataacgtagaga

SEQ ID NO: 2681519 - DNA, 25 bp, Homo sapien
agaaccttacgtgtagtgaaaatgg

SEQ ID NO: 2681520 - DNA, 25 bp, Homo sapien
gggatgcaggttaagacaagtctat

SEQ ID NO: 2681521 - DNA, 25 bp, Homo sapien
aggttaagacaagtctatcgccggg

SEQ ID NO: 2681522 - DNA, 25 bp, Homo sapien
tgcaggttaagacaagtctatcgcc

SEQ ID NO: 2681523 - DNA, 25 bp, Homo sapien
cgggagggatgcaggttaagacaag

SEQ ID NO: 2681524 - DNA, 25 bp, Homo sapien
cactatccgatgttctagcgattta

SEQ ID NO: 2681525 - DNA, 25 bp, Homo sapien
gttgcactatccgatgttctagcga

SEQ ID NO: 2681526 - DNA, 25 bp, Homo sapien
tacgttgcactatccgatgttctag

SEQ ID NO: 2681527 - DNA, 25 bp, Homo sapien
ttaaatacgttgcactatccgatgt

SEQ ID NO: 2681528 - DNA, 25 bp, Homo sapien
caaggtagaaatgttgctgctcagt

SEQ ID NO: 2681529 - DNA, 25 bp, Homo sapien
catagcgcctatattgcaaactgta

SEQ ID NO: 2681530 - DNA, 25 bp, Homo sapien
ttccaataaatctgacatagcgcct

SEQ ID NO: 2681531 - DNA, 25 bp, Homo sapien
agacatttctagtatctcctgggtg

SEQ ID NO: 2681532 - DNA, 25 bp, Homo sapien
tattcataaaataagattccaatac

SEQ ID NO: 2681533 - DNA, 25 bp, Homo sapien
attcataaaataagattccaatact

SEQ ID NO: 2681534 - DNA, 25 bp, Homo sapien
aaccttctacagtgggcacctccgt

SEQ ID NO: 2681535 - DNA, 25 bp, Homo sapien
tttgtgtatatagtccttgtacccc

SEQ ID NO: 2681536 - DNA, 25 bp, Homo sapien
aatcttaccattgatgccctttgtg

SEQ ID NO: 2681537 - DNA, 25 bp, Homo sapien
caagataaggcaattttaaccttct

SEQ ID NO: 2681538 - DNA, 25 bp, Homo sapien
tcagaagtgactatccaaactggac

SEQ ID NO: 2681539 - DNA, 25 bp, Homo sapien
catgggccgcaaatcaacagtcatg

SEQ ID NO: 2681540 - DNA, 25 bp, Homo sapien
ctggttgctggtgagttctccatgg

SEQ ID NO: 2681541 - DNA, 25 bp, Homo sapien
tctgttgtttccagtatccaagatg

SEQ ID NO: 2681542 - DNA, 25 bp, Homo sapien
ccacatgctgccgaccattgctaaa

SEQ ID NO: 2681543 - DNA, 25 bp, Homo sapien
atgtggcttctgttcgcattgatcc

SEQ ID NO: 2681544 - DNA, 25 bp, Homo sapien
acatgctgccgaccattgctaaatg

SEQ ID NO: 2681545 - DNA, 25 bp, Homo sapien
tgttcgcattgatccttggcatctt

SEQ ID NO: 2681546 - DNA, 25 bp, Homo sapien
cactcttttcctggggagtattcca

SEQ ID NO: 2681547 - DNA, 25 bp, Homo sapien
ctctgtcagatcattttccagacaa

SEQ ID NO: 2681548 - DNA, 25 bp, Homo sapien
cagtcactgaaataggtccattctg

SEQ ID NO: 2681549 - DNA, 25 bp, Homo sapien
gaaactttgcatgtgacagagttgg

SEQ ID NO: 2681550 - DNA, 25 bp, Homo sapien
tcatgaatagtaagactcagtcact

SEQ ID NO: 2681551 - DNA, 25 bp, Homo sapien
gagatagtaagcaggatagtgtacc

SEQ ID NO: 2681552 - DNA, 25 bp, Homo sapien
ctgtgaccaggtacctgtgacttgc

SEQ ID NO: 2681553 - DNA, 25 bp, Homo sapien
gtgaccaggtacctgtgacttgcca

SEQ ID NO: 2681554 - DNA, 25 bp, Homo sapien
ctaaataccatgcattggagcctgc

SEQ ID NO: 2681555 - DNA, 25 bp, Homo sapien
aataccatgcattggagcctgctgt

SEQ ID NO: 2681556 - DNA, 25 bp, Homo sapien
ggacagactgggtctgtttttagcc

SEQ ID NO: 2681557 - DNA, 25 bp, Homo sapien
gaataggctatgtttggacagactg

SEQ ID NO: 2681558 - DNA, 25 bp, Homo sapien
tgtggctgctttccatggtctgctg

SEQ ID NO: 2681559 - DNA, 25 bp, Homo sapien
aaactgaattgttttgacgagagct

SEQ ID NO: 2681560 - DNA, 25 bp, Homo sapien
ctacaaatatccttccgttccacaa

SEQ ID NO: 2681561 - DNA, 25 bp, Homo sapien
aaatatccttccgttccacaatatc

SEQ ID NO: 2681562 - DNA, 25 bp, Homo sapien
tccgttccacaatatcctcaagcat

SEQ ID NO: 2681563 - DNA, 25 bp, Homo sapien
tccttccgttccacaatatcctcaa

SEQ ID NO: 2681564 - DNA, 25 bp, Homo sapien
ggaatagtagatctcctcaccaatg

SEQ ID NO: 2681565 - DNA, 25 bp, Homo sapien
aagtcatcattgagaacagccacag

SEQ ID NO: 2681566 - DNA, 25 bp, Homo sapien
caatgtcctgattgcgaaagtcatc

SEQ ID NO: 2681567 - DNA, 25 bp, Homo sapien
gacctgccacctcatttgaaagaga

SEQ ID NO: 2681568 - DNA, 25 bp, Homo sapien
gatccttttacgtgctactggtagg

SEQ ID NO: 2681569 - DNA, 25 bp, Homo sapien
tggctaccacgttgaccataaagca

SEQ ID NO: 2681570 - DNA, 25 bp, Homo sapien
cagtatgattacatgctcagcaaga

SEQ ID NO: 2681571 - DNA, 25 bp, Homo sapien
catccttgaaatctggcaggttgga

SEQ ID NO: 2681572 - DNA, 25 bp, Homo sapien
tgaaggttgtcgaatgtccatccaa

SEQ ID NO: 2681573 - DNA, 25 bp, Homo sapien
gaatgtccatccaaagacatgtcca

SEQ ID NO: 2681574 - DNA, 25 bp, Homo sapien
tatgacgctgctgtgaaggttgtcg

SEQ ID NO: 2681575 - DNA, 25 bp, Homo sapien
ttgccttatctatgacgctgctgtg

SEQ ID NO: 2681576 - DNA, 25 bp, Homo sapien
ttgctgtaatatgccccagagggca

SEQ ID NO: 2681577 - DNA, 25 bp, Homo sapien
ctgtgaggtgcatcagttctgatgc

SEQ ID NO: 2681578 - DNA, 25 bp, Homo sapien
catcagttctgatgcaggcgggtaa

SEQ ID NO: 2681579 - DNA, 25 bp, Homo sapien
tgcaggcgggtaagttcaggagcct

SEQ ID NO: 2681580 - DNA, 25 bp, Homo sapien
cgagaacagcattaggacccagcat

SEQ ID NO: 2681581 - DNA, 25 bp, Homo sapien
ggagtatgtaacgagaacagcatta

SEQ ID NO: 2681582 - DNA, 25 bp, Homo sapien
ctcttgggaggagtatgtaacgaga

SEQ ID NO: 2681583 - DNA, 25 bp, Homo sapien
tatgtaacgagaacagcattaggac

SEQ ID NO: 2681584 - DNA, 25 bp, Homo sapien
tcttgaacatgacagcagcttccat

SEQ ID NO: 2681585 - DNA, 25 bp, Homo sapien
catcccgcaacttgaagctcttgaa

SEQ ID NO: 2681586 - DNA, 25 bp, Homo sapien
ggtggtgcctctcctactgctactt

SEQ ID NO: 2681587 - DNA, 25 bp, Homo sapien
ctactgctacttgcaatgaatgacc

SEQ ID NO: 2681588 - DNA, 25 bp, Homo sapien
taactgctctaaataggctttagaa

SEQ ID NO: 2681589 - DNA, 25 bp, Homo sapien
ttctaactgctctaaataggcttta

SEQ ID NO: 2681590 - DNA, 25 bp, Homo sapien
tctaactgctctaaataggctttag

SEQ ID NO: 2681591 - DNA, 25 bp, Homo sapien
cattctaactgctctaaataggctt

SEQ ID NO: 2681592 - DNA, 25 bp, Homo sapien
tctgcatatttctcccaaaatagtc

SEQ ID NO: 2681593 - DNA, 25 bp, Homo sapien
cttctgcatatttctcccaaaatag

SEQ ID NO: 2681594 - DNA, 25 bp, Homo sapien
gcatatttctcccaaaatagtctaa

SEQ ID NO: 2681595 - DNA, 25 bp, Homo sapien
catatttctcccaaaatagtctaac

SEQ ID NO: 2681596 - DNA, 25 bp, Homo sapien
aaatttcctgatatcatagagagac

SEQ ID NO: 2681597 - DNA, 25 bp, Homo sapien
tagagagactcactagcttgaattc

SEQ ID NO: 2681598 - DNA, 25 bp, Homo sapien
caatatcacatttcgtgaacatctg

SEQ ID NO: 2681599 - DNA, 25 bp, Homo sapien
cacatttcgtgaacatctgtgcttt

SEQ ID NO: 2681600 - DNA, 25 bp, Homo sapien
ctccacaaaggatttccagcagaga

SEQ ID NO: 2681601 - DNA, 25 bp, Homo sapien
cctccacaaaggatttccagcagag

SEQ ID NO: 2681602 - DNA, 25 bp, Homo sapien
cacaaaggatttccagcagagagca

SEQ ID NO: 2681603 - DNA, 25 bp, Homo sapien
aaaggatttccagcagagagcagct

SEQ ID NO: 2681604 - DNA, 25 bp, Homo sapien
tcatgactcaggtattaaactgaag

SEQ ID NO: 2681605 - DNA, 25 bp, Homo sapien
cagtgatttttatgcgaatcagaat

SEQ ID NO: 2681606 - DNA, 25 bp, Homo sapien
gaagagatggagatagccaatgact

SEQ ID NO: 2681607 - DNA, 25 bp, Homo sapien
gaagttaaataccagttgacttata

SEQ ID NO: 2681608 - DNA, 25 bp, Homo sapien
ccccactctcactaatgccatctca

SEQ ID NO: 2681609 - DNA, 25 bp, Homo sapien
ccaccccactctcactaatgccatc

SEQ ID NO: 2681610 - DNA, 25 bp, Homo sapien
cactctcactaatgccatctcacta

SEQ ID NO: 2681611 - DNA, 25 bp, Homo sapien
ctcactaatgccatctcactaatat

SEQ ID NO: 2681612 - DNA, 25 bp, Homo sapien
tgatactgtcaactgtaggaataat

SEQ ID NO: 2681613 - DNA, 25 bp, Homo sapien
tactgtcaactgtaggaataatgtt

SEQ ID NO: 2681614 - DNA, 25 bp, Homo sapien
tatctgcttgagtctgatactgtca

SEQ ID NO: 2681615 - DNA, 25 bp, Homo sapien
tcaactgtaggaataatgtttgtga

SEQ ID NO: 2681616 - DNA, 25 bp, Homo sapien
cacaggagatacaaacatattgtgg

SEQ ID NO: 2681617 - DNA, 25 bp, Homo sapien
ttcattgggtgtaaagatggaggtt

SEQ ID NO: 2681618 - DNA, 25 bp, Homo sapien
tcattgggtgtaaagatggaggttc

SEQ ID NO: 2681619 - DNA, 25 bp, Homo sapien
tgcagaattacagccttcacacttg

SEQ ID NO: 2681620 - DNA, 25 bp, Homo sapien
ccttcacacttgaaacttccagcat

SEQ ID NO: 2681621 - DNA, 25 bp, Homo sapien
ctgcagaattacagccttcacactt

SEQ ID NO: 2681622 - DNA, 25 bp, Homo sapien
cagcttggatatcccttcactgcta

SEQ ID NO: 2681623 - DNA, 25 bp, Homo sapien
gagcatttccagttccttcagcttg

SEQ ID NO: 2681624 - DNA, 25 bp, Homo sapien
ttagcagagtttccctttaggcgaa

SEQ ID NO: 2681625 - DNA, 25 bp, Homo sapien
catttctgtgggatgttacagttag

SEQ ID NO: 2681626 - DNA, 25 bp, Homo sapien
cacattcgccagacccatgactgaa

SEQ ID NO: 2681627 - DNA, 25 bp, Homo sapien
aaataatttcacattcgccagaccc

SEQ ID NO: 2681628 - DNA, 25 bp, Homo sapien
ccagacccatgactgaaaggacagg

SEQ ID NO: 2681629 - DNA, 25 bp, Homo sapien
aaaggacagggtcacttgcaaccat

SEQ ID NO: 2681630 - DNA, 25 bp, Homo sapien
atttgggtcttcagcattcaaatgt

SEQ ID NO: 2681631 - DNA, 25 bp, Homo sapien
ctgctgcctttggctatttgggtct

SEQ ID NO: 2681632 - DNA, 25 bp, Homo sapien
ggtagcctcagagcacttgcttctc

SEQ ID NO: 2681633 - DNA, 25 bp, Homo sapien
ttaggtagcctcagagcacttgctt

SEQ ID NO: 2681634 - DNA, 25 bp, Homo sapien
ctgccttgagagtgtcccgtttttt

SEQ ID NO: 2681635 - DNA, 25 bp, Homo sapien
ggattccaaggtatactgtggtcat

SEQ ID NO: 2681636 - DNA, 25 bp, Homo sapien
aaggattccaaggtatactgtggtc

SEQ ID NO: 2681637 - DNA, 25 bp, Homo sapien
caaggattccaaggtatactgtggt

SEQ ID NO: 2681638 - DNA, 25 bp, Homo sapien
gtctctgagcacaaggattccaagg

SEQ ID NO: 2681639 - DNA, 25 bp, Homo sapien
aaacgcctagccaggccattcactg

SEQ ID NO: 2681640 - DNA, 25 bp, Homo sapien
gggctggcaatacctcaggcctaac

SEQ ID NO: 2681641 - DNA, 25 bp, Homo sapien
ttcccgtactatggactgggctggc

SEQ ID NO: 2681642 - DNA, 25 bp, Homo sapien
tggagccctgtccaaacaaacgcct

SEQ ID NO: 2681643 - DNA, 25 bp, Homo sapien
cttggacgtaatcctgtaaacttca

SEQ ID NO: 2681644 - DNA, 25 bp, Homo sapien
tgcttgcttgggcaaatagagactt

SEQ ID NO: 2681645 - DNA, 25 bp, Homo sapien
gcttgggcaaatagagacttggacg

SEQ ID NO: 2681646 - DNA, 25 bp, Homo sapien
tagagacttggacgtaatcctgtaa

SEQ ID NO: 2681647 - DNA, 25 bp, Homo sapien
tacaacgttcccgaaaggtgcaagc

SEQ ID NO: 2681648 - DNA, 25 bp, Homo sapien
cgttcccgaaaggtgcaagcagtaa

SEQ ID NO: 2681649 - DNA, 25 bp, Homo sapien
caacgttcccgaaaggtgcaagcag

SEQ ID NO: 2681650 - DNA, 25 bp, Homo sapien
gttcccgaaaggtgcaagcagtaaa

SEQ ID NO: 2681651 - DNA, 25 bp, Homo sapien
tacattgcatctattaccatgtcct

SEQ ID NO: 2681652 - DNA, 25 bp, Homo sapien
gaaaggtattgccatcaattcagcc

SEQ ID NO: 2681653 - DNA, 25 bp, Homo sapien
tcagccattctatcagaaacctggg

SEQ ID NO: 2681654 - DNA, 25 bp, Homo sapien
ggagtcaagcttgatacctctctct

SEQ ID NO: 2681655 - DNA, 25 bp, Homo sapien
tgatgagggcctatggctggttcca

SEQ ID NO: 2681656 - DNA, 25 bp, Homo sapien
ctggttccactcatgtcagaaggaa

SEQ ID NO: 2681657 - DNA, 25 bp, Homo sapien
ggttccactcatgtcagaaggaaaa

SEQ ID NO: 2681658 - DNA, 25 bp, Homo sapien
atggctggttccactcatgtcagaa

SEQ ID NO: 2681659 - DNA, 25 bp, Homo sapien
acctccagtcttctcatagtcaccc

SEQ ID NO: 2681660 - DNA, 25 bp, Homo sapien
gtcttctcatagtcacccagtgaca

SEQ ID NO: 2681661 - DNA, 25 bp, Homo sapien
tcttctcatagtcacccagtgacat

SEQ ID NO: 2681662 - DNA, 25 bp, Homo sapien
agtcttctcatagtcacccagtgac

SEQ ID NO: 2681663 - DNA, 25 bp, Homo sapien
atcatattatccattaggaacttgc

SEQ ID NO: 2681664 - DNA, 25 bp, Homo sapien
catcatattatccattaggaacttg

SEQ ID NO: 2681665 - DNA, 25 bp, Homo sapien
ttacatcatattatccattaggaac

SEQ ID NO: 2681666 - DNA, 25 bp, Homo sapien
tacatcatattatccattaggaact

SEQ ID NO: 2681667 - DNA, 25 bp, Homo sapien
tctggagagacctcggcacatttca

SEQ ID NO: 2681668 - DNA, 25 bp, Homo sapien
cagcttgaagatagacggcagtgtc

SEQ ID NO: 2681669 - DNA, 25 bp, Homo sapien
tcctcgcagtggagaacagatgacc

SEQ ID NO: 2681670 - DNA, 25 bp, Homo sapien
ttgaactgagacacatgagacccgg

SEQ ID NO: 2681671 - DNA, 25 bp, Homo sapien
aataggtaaatattacatgtaatga

SEQ ID NO: 2681672 - DNA, 25 bp, Homo sapien
tcccaagaaataggtaaatattaca

SEQ ID NO: 2681673 - DNA, 25 bp, Homo sapien
aaatattacatgtaatgatttagca

SEQ ID NO: 2681674 - DNA, 25 bp, Homo sapien
attacatgtaatgatttagcatcca

SEQ ID NO: 2681675 - DNA, 25 bp, Homo sapien
gggatagggagttggcaaggagggc

SEQ ID NO: 2681676 - DNA, 25 bp, Homo sapien
aaagggatagggagttggcaaggag

SEQ ID NO: 2681677 - DNA, 25 bp, Homo sapien
agggatagggagttggcaaggaggg

SEQ ID NO: 2681678 - DNA, 25 bp, Homo sapien
aagggatagggagttggcaaggagg

SEQ ID NO: 2681679 - DNA, 25 bp, Homo sapien
catagctacataatggagatgactg

SEQ ID NO: 2681680 - DNA, 25 bp, Homo sapien
cgagccatagctacataatggagat

SEQ ID NO: 2681681 - DNA, 25 bp, Homo sapien
ctgcgagccatagctacataatgga

SEQ ID NO: 2681682 - DNA, 25 bp, Homo sapien
ccatagctacataatggagatgact

SEQ ID NO: 2681683 - DNA, 25 bp, Homo sapien
agagtttcagtctgcttgtgatctt

SEQ ID NO: 2681684 - DNA, 25 bp, Homo sapien
cagtctgcttgtgatcttcacttcc

SEQ ID NO: 2681685 - DNA, 25 bp, Homo sapien
tcatcatgaagcttcagagtttcag

SEQ ID NO: 2681686 - DNA, 25 bp, Homo sapien
gcttcatcatgaagcttcagagttt

SEQ ID NO: 2681687 - DNA, 25 bp, Homo sapien
ttatagaaccttcccttcctcatta

SEQ ID NO: 2681688 - DNA, 25 bp, Homo sapien
tatagaaccttcccttcctcattac

SEQ ID NO: 2681689 - DNA, 25 bp, Homo sapien
gaagtttgctatatcaattgacttt

SEQ ID NO: 2681690 - DNA, 25 bp, Homo sapien
tgctggtgtacagtctcgtctcaat

SEQ ID NO: 2681691 - DNA, 25 bp, Homo sapien
atctgagccttcattgagttgggat

SEQ ID NO: 2681692 - DNA, 25 bp, Homo sapien
ttttgctggtgtacagtctcgtctc

SEQ ID NO: 2681693 - DNA, 25 bp, Homo sapien
tgagccttcattgagttgggatctt

SEQ ID NO: 2681694 - DNA, 25 bp, Homo sapien
tttagctccagatcagcacaataaa

SEQ ID NO: 2681695 - DNA, 25 bp, Homo sapien
tatctcagatatatttagctccaga

SEQ ID NO: 2681696 - DNA, 25 bp, Homo sapien
taatcatcagtacaagcatatctca

SEQ ID NO: 2681697 - DNA, 25 bp, Homo sapien
cactttactgtattctgaatgtgca

SEQ ID NO: 2681698 - DNA, 25 bp, Homo sapien
tgtgtcgtaactctcagctctcatg

SEQ ID NO: 2681699 - DNA, 25 bp, Homo sapien
tattactagtaagcttttcacccag

SEQ ID NO: 2681700 - DNA, 25 bp, Homo sapien
cacagggatcctgtatgtagctgca

SEQ ID NO: 2681701 - DNA, 25 bp, Homo sapien
gcttttgatgaaacaaggctacaac

SEQ ID NO: 2681702 - DNA, 25 bp, Homo sapien
caaaggcaagcctgccttgttttct

SEQ ID NO: 2681703 - DNA, 25 bp, Homo sapien
ctctgatgttagacggaagtggcac

SEQ ID NO: 2681704 - DNA, 25 bp, Homo sapien
ttggtgctggcaaaggcaagcctgc

SEQ ID NO: 2681705 - DNA, 25 bp, Homo sapien
tctggagagtgtgctatcctgtttc

SEQ ID NO: 2681706 - DNA, 25 bp, Homo sapien
gcagccaactgatataggtctatca

SEQ ID NO: 2681707 - DNA, 25 bp, Homo sapien
gttttgtccttttagcagccaactg

SEQ ID NO: 2681708 - DNA, 25 bp, Homo sapien
ctatcaatggagtagcagtcttatc

SEQ ID NO: 2681709 - DNA, 25 bp, Homo sapien
gatataggtctatcaatggagtagc

SEQ ID NO: 2681710 - DNA, 25 bp, Homo sapien
tctccatcaaaaaagcagggttgta

SEQ ID NO: 2681711 - DNA, 25 bp, Homo sapien
agcagggttgtattccaacccatgg

SEQ ID NO: 2681712 - DNA, 25 bp, Homo sapien
caaagcgccagtattcactgtagca

SEQ ID NO: 2681713 - DNA, 25 bp, Homo sapien
gggaaaaacgagcaacaaagcgcca

SEQ ID NO: 2681714 - DNA, 25 bp, Homo sapien
agacattggcacacacgccccttca

SEQ ID NO: 2681715 - DNA, 25 bp, Homo sapien
cagtgcattttcaccactcagttcc

SEQ ID NO: 2681716 - DNA, 25 bp, Homo sapien
cattggcacacacgccccttcagct

SEQ ID NO: 2681717 - DNA, 25 bp, Homo sapien
ttcagacattggcacacacgcccct

SEQ ID NO: 2681718 - DNA, 25 bp, Homo sapien
tatttatcgtgtcaataaccagctt

SEQ ID NO: 2681719 - DNA, 25 bp, Homo sapien
gggctgcttttatttatcgtgtcaa

SEQ ID NO: 2681720 - DNA, 25 bp, Homo sapien
taattgttcttaggaccagaaataa

SEQ ID NO: 2681721 - DNA, 25 bp, Homo sapien
ttcagaaagccctaacctcttgata

SEQ ID NO: 2681722 - DNA, 25 bp, Homo sapien
gcagcctgggcaatcatggacctgt

SEQ ID NO: 2681723 - DNA, 25 bp, Homo sapien
cctgcagtaatctttgctcacaaag

SEQ ID NO: 2681724 - DNA, 25 bp, Homo sapien
ggcaatcatggacctgtcttccacc

SEQ ID NO: 2681725 - DNA, 25 bp, Homo sapien
tcttccaccctgcagtaatctttgc

SEQ ID NO: 2681726 - DNA, 25 bp, Homo sapien
ccggttatgtggaatgcctggaaat

SEQ ID NO: 2681727 - DNA, 25 bp, Homo sapien
caagatgagatatggtgccatcata

SEQ ID NO: 2681728 - DNA, 25 bp, Homo sapien
tcttgttagatgatcattgaggtgc

SEQ ID NO: 2681729 - DNA, 25 bp, Homo sapien
ttttcctccggttatgtggaatgcc

SEQ ID NO: 2681730 - DNA, 25 bp, Homo sapien
gatataaaacgtaagattagccttg

SEQ ID NO: 2681731 - DNA, 25 bp, Homo sapien
gtatgtgactaaatggataagctct

SEQ ID NO: 2681732 - DNA, 25 bp, Homo sapien
taagattagccttgctgctgagcag

SEQ ID NO: 2681733 - DNA, 25 bp, Homo sapien
taaaacgtaagattagccttgctgc

SEQ ID NO: 2681734 - DNA, 25 bp, Homo sapien
cagatgtagtgctaaagtaatgtaa

SEQ ID NO: 2681735 - DNA, 25 bp, Homo sapien
gcagccagcagatgtagtgctaaag

SEQ ID NO: 2681736 - DNA, 25 bp, Homo sapien
tcagagatactggtctccaggagag

SEQ ID NO: 2681737 - DNA, 25 bp, Homo sapien
tactggtctccaggagagccactgc

SEQ ID NO: 2681738 - DNA, 25 bp, Homo sapien
ggcatatcatatacccgaagctgtg

SEQ ID NO: 2681739 - DNA, 25 bp, Homo sapien
tccccaggcttttacaagagatatg

SEQ ID NO: 2681740 - DNA, 25 bp, Homo sapien
gattatagtgccattcagggaaagg

SEQ ID NO: 2681741 - DNA, 25 bp, Homo sapien
taaattgtctcattggctgaccaac

SEQ ID NO: 2681742 - DNA, 25 bp, Homo sapien
aatttgactctctcgaagtttcaaa

SEQ ID NO: 2681743 - DNA, 25 bp, Homo sapien
tttgactctctcgaagtttcaaaat

SEQ ID NO: 2681744 - DNA, 25 bp, Homo sapien
gaatttgactctctcgaagtttcaa

SEQ ID NO: 2681745 - DNA, 25 bp, Homo sapien
atttgactctctcgaagtttcaaaa

SEQ ID NO: 2681746 - DNA, 25 bp, Homo sapien
caggcagctcctgtgcaaaaatgcc

SEQ ID NO: 2681747 - DNA, 25 bp, Homo sapien
gacagcatccacatggttgtttgaa

SEQ ID NO: 2681748 - DNA, 25 bp, Homo sapien
gatccttaaaccagtgcccactcat

SEQ ID NO: 2681749 - DNA, 25 bp, Homo sapien
gcttctttgaaaacccacttagtca

SEQ ID NO: 2681750 - DNA, 25 bp, Homo sapien
tataagccatactccttagaaacca

SEQ ID NO: 2681751 - DNA, 25 bp, Homo sapien
ttctataagccatactccttagaaa

SEQ ID NO: 2681752 - DNA, 25 bp, Homo sapien
tattctataagccatactccttaga

SEQ ID NO: 2681753 - DNA, 25 bp, Homo sapien
tctataagccatactccttagaaac

SEQ ID NO: 2681754 - DNA, 25 bp, Homo sapien
gggatatacggtctccactcagttg

SEQ ID NO: 2681755 - DNA, 25 bp, Homo sapien
tacttttgggatatacggtctccac

SEQ ID NO: 2681756 - DNA, 25 bp, Homo sapien
tctccactcagttgctttgccgggt

SEQ ID NO: 2681757 - DNA, 25 bp, Homo sapien
tgctttgccgggttgttcaaaagtg

SEQ ID NO: 2681758 - DNA, 25 bp, Homo sapien
ctacttatttaggcctggaagtact

SEQ ID NO: 2681759 - DNA, 25 bp, Homo sapien
tgaaaacggcaaggagccggattct

SEQ ID NO: 2681760 - DNA, 25 bp, Homo sapien
gaatgagtgcaacacctaaaagctg

SEQ ID NO: 2681761 - DNA, 25 bp, Homo sapien
tccagaaatgatcacagccctactg

SEQ ID NO: 2681762 - DNA, 25 bp, Homo sapien
actgtggctcaaaacagagactgag

SEQ ID NO: 2681763 - DNA, 25 bp, Homo sapien
aacatgagtccctctaactccttca

SEQ ID NO: 2681764 - DNA, 25 bp, Homo sapien
cacagagcagggaaggtttattata

SEQ ID NO: 2681765 - DNA, 25 bp, Homo sapien
tccttcagctgccctaatctgccct

SEQ ID NO: 2681766 - DNA, 25 bp, Homo sapien
ttataaaacatgagtccctctaact

SEQ ID NO: 2681767 - DNA, 25 bp, Homo sapien
gttcaggcccgctttccaggagtcc

SEQ ID NO: 2681768 - DNA, 25 bp, Homo sapien
tgttcaggcccgctttccaggagtc

SEQ ID NO: 2681769 - DNA, 25 bp, Homo sapien
tcaggcccgctttccaggagtccca

SEQ ID NO: 2681770 - DNA, 25 bp, Homo sapien
ggcccgctttccaggagtcccaaga

SEQ ID NO: 2681771 - DNA, 25 bp, Homo sapien
ctttcatcccattccgcttattctc

SEQ ID NO: 2681772 - DNA, 25 bp, Homo sapien
cccaaatctacctctacttttacag

SEQ ID NO: 2681773 - DNA, 25 bp, Homo sapien
caaatctacctctacttttacagat

SEQ ID NO: 2681774 - DNA, 25 bp, Homo sapien
ccaaatctacctctacttttacaga

SEQ ID NO: 2681775 - DNA, 25 bp, Homo sapien
attccaactccgatctctcttgttc

SEQ ID NO: 2681776 - DNA, 25 bp, Homo sapien
ttccaactccgatctctcttgttca

SEQ ID NO: 2681777 - DNA, 25 bp, Homo sapien
tattccaactccgatctctcttgtt

SEQ ID NO: 2681778 - DNA, 25 bp, Homo sapien
cttattccaactccgatctctcttg

SEQ ID NO: 2681779 - DNA, 25 bp, Homo sapien
atcagcaaaacacgggaaaccatat

SEQ ID NO: 2681780 - DNA, 25 bp, Homo sapien
cagcaaaacacgggaaaccatattt

SEQ ID NO: 2681781 - DNA, 25 bp, Homo sapien
tatcagcaaaacacgggaaaccata

SEQ ID NO: 2681782 - DNA, 25 bp, Homo sapien
ctatcagcaaaacacgggaaaccat

SEQ ID NO: 2681783 - DNA, 25 bp, Homo sapien
tcctagactggtgccagggactttg

SEQ ID NO: 2681784 - DNA, 25 bp, Homo sapien
tatcctgctctaatgaaccgagtcc

SEQ ID NO: 2681785 - DNA, 25 bp, Homo sapien
tagtctctgagatttgtaatcctag

SEQ ID NO: 2681786 - DNA, 25 bp, Homo sapien
tctgtgttttcggctgtagtctctg

SEQ ID NO: 2681787 - DNA, 25 bp, Homo sapien
tccaaatagaggatggggatcctgg

SEQ ID NO: 2681788 - DNA, 25 bp, Homo sapien
cctccaaatagaggatggggatcct

SEQ ID NO: 2681789 - DNA, 25 bp, Homo sapien
gatggggatcctggtcatgttttta

SEQ ID NO: 2681790 - DNA, 25 bp, Homo sapien
tcctccaaatagaggatggggatcc

SEQ ID NO: 2681791 - DNA, 25 bp, Homo sapien
tctgcattttgtaaatgattttgga

SEQ ID NO: 2681792 - DNA, 25 bp, Homo sapien
ttaggattcacattctgcattttgt

SEQ ID NO: 2681793 - DNA, 25 bp, Homo sapien
gcattttgtaaatgattttggagtc

SEQ ID NO: 2681794 - DNA, 25 bp, Homo sapien
tgattttggagtcccaaaacagaaa

SEQ ID NO: 2681795 - DNA, 25 bp, Homo sapien
tttaacaacctaaggtcacaatgaa

SEQ ID NO: 2681796 - DNA, 25 bp, Homo sapien
gcaaaccaaccccaaggctagaaga

SEQ ID NO: 2681797 - DNA, 25 bp, Homo sapien
taacaatctatttcgtagaccacag

SEQ ID NO: 2681798 - DNA, 25 bp, Homo sapien
tcaagacgttatttgaaactaacta

SEQ ID NO: 2681799 - DNA, 25 bp, Homo sapien
acagccgaaaccaaccctgatagca

SEQ ID NO: 2681800 - DNA, 25 bp, Homo sapien
cgtgaggacactgcgagaagatagc

SEQ ID NO: 2681801 - DNA, 25 bp, Homo sapien
gaggacactgcgagaagatagctgt

SEQ ID NO: 2681802 - DNA, 25 bp, Homo sapien
ttcacacaaagaggccacgtgagga

SEQ ID NO: 2681803 - DNA, 25 bp, Homo sapien
tgagttcatcttacatagaatttgt

SEQ ID NO: 2681804 - DNA, 25 bp, Homo sapien
tatcttgatttgttgaacacgtccc

SEQ ID NO: 2681805 - DNA, 25 bp, Homo sapien
ttgttttaacgtgactctctttgag

SEQ ID NO: 2681806 - DNA, 25 bp, Homo sapien
tacttttcccttgctgccgtcaagg

SEQ ID NO: 2681807 - DNA, 25 bp, Homo sapien
gcagctgattgggtggaagacagca

SEQ ID NO: 2681808 - DNA, 25 bp, Homo sapien
gttgcagctgattgggtggaagaca

SEQ ID NO: 2681809 - DNA, 25 bp, Homo sapien
gacagcacgtgacccaagacggcca

SEQ ID NO: 2681810 - DNA, 25 bp, Homo sapien
cagctgattgggtggaagacagcac

SEQ ID NO: 2681811 - DNA, 25 bp, Homo sapien
gaagagtaaaaggttgatctgttca

SEQ ID NO: 2681812 - DNA, 25 bp, Homo sapien
agagtaaaaggttgatctgttcatt

SEQ ID NO: 2681813 - DNA, 25 bp, Homo sapien
atgtctttgcagtatgctgttcgga

SEQ ID NO: 2681814 - DNA, 25 bp, Homo sapien
tattttcccctgaatgtctttgcag

SEQ ID NO: 2681815 - DNA, 25 bp, Homo sapien
gaagcctgtgtctaaatttaggtta

SEQ ID NO: 2681816 - DNA, 25 bp, Homo sapien
tctggttatatttggactggttgaa

SEQ ID NO: 2681817 - DNA, 25 bp, Homo sapien
ctaaatttaggttaagtggagcaga

SEQ ID NO: 2681818 - DNA, 25 bp, Homo sapien
gaggacttgtgtgtgatcaacagag

SEQ ID NO: 2681819 - DNA, 25 bp, Homo sapien
catgataggatatgaccaatggaga

SEQ ID NO: 2681820 - DNA, 25 bp, Homo sapien
taccctgcaatccaagtagcttaat

SEQ ID NO: 2681821 - DNA, 25 bp, Homo sapien
tatgtatcataatgcagtgagaacc

SEQ ID NO: 2681822 - DNA, 25 bp, Homo sapien
cagttgggtaaacagctggtctttg

SEQ ID NO: 2681823 - DNA, 25 bp, Homo sapien
tcctttaggtgatggaatgagggag

SEQ ID NO: 2681824 - DNA, 25 bp, Homo sapien
ctgtgcataagctttgggtccttta

SEQ ID NO: 2681825 - DNA, 25 bp, Homo sapien
catgatcaactgtgcataagctttg

SEQ ID NO: 2681826 - DNA, 25 bp, Homo sapien
gggctgcaggaatgtccatgatcaa

SEQ ID NO: 2681827 - DNA, 25 bp, Homo sapien
tgggtcagcaactttatccggactt

SEQ ID NO: 2681828 - DNA, 25 bp, Homo sapien
gaattgctgactcaactacctgggt

SEQ ID NO: 2681829 - DNA, 25 bp, Homo sapien
aatgagaattgctgactcaactacc

SEQ ID NO: 2681830 - DNA, 25 bp, Homo sapien
ttatccggacttgttgatttgatga

SEQ ID NO: 2681831 - DNA, 25 bp, Homo sapien
gcaaagcagtgcctcaaccctgtct

SEQ ID NO: 2681832 - DNA, 25 bp, Homo sapien
aaaagaaggtgtcaagcaaagcagt

SEQ ID NO: 2681833 - DNA, 25 bp, Homo sapien
ggcaggcagcgtcatcagaaaggct

SEQ ID NO: 2681834 - DNA, 25 bp, Homo sapien
ccacctttaagaatcggctgggcat

SEQ ID NO: 2681835 - DNA, 25 bp, Homo sapien
tcctgtttctgttgaccaagccaat

SEQ ID NO: 2681836 - DNA, 25 bp, Homo sapien
ccctattatatgttgtcatagtacc

SEQ ID NO: 2681837 - DNA, 25 bp, Homo sapien
tatgttgtcatagtaccatgaacca

SEQ ID NO: 2681838 - DNA, 25 bp, Homo sapien
cattcctgtttctgttgaccaagcc

SEQ ID NO: 2681839 - DNA, 25 bp, Homo sapien
aagcatctacaccaatccctttctg

SEQ ID NO: 2681840 - DNA, 25 bp, Homo sapien
ttaagcatctacaccaatccctttc

SEQ ID NO: 2681841 - DNA, 25 bp, Homo sapien
taagcatctacaccaatccctttct

SEQ ID NO: 2681842 - DNA, 25 bp, Homo sapien
gcatctacaccaatccctttctgta

SEQ ID NO: 2681843 - DNA, 25 bp, Homo sapien
tcatgtttcacttcctttgggtagg

SEQ ID NO: 2681844 - DNA, 25 bp, Homo sapien
taaccgtgcctagccagcacttaat

SEQ ID NO: 2681845 - DNA, 25 bp, Homo sapien
catgtttcacttcctttgggtaggt

SEQ ID NO: 2681846 - DNA, 25 bp, Homo sapien
gcatctgtaaccgtgcctagccagc

SEQ ID NO: 2681847 - DNA, 25 bp, Homo sapien
catgagtttagagttctttgccggg

SEQ ID NO: 2681848 - DNA, 25 bp, Homo sapien
tagaaggctagtctcaaatatctgc

SEQ ID NO: 2681849 - DNA, 25 bp, Homo sapien
catgtatgattctcttagggcacta

SEQ ID NO: 2681850 - DNA, 25 bp, Homo sapien
ggcagatggcaaggctagtcctcaa

SEQ ID NO: 2681851 - DNA, 25 bp, Homo sapien
tattttatttgcaatcgcaggtatc

SEQ ID NO: 2681852 - DNA, 25 bp, Homo sapien
tctccgatcctagtaatagtttatg

SEQ ID NO: 2681853 - DNA, 25 bp, Homo sapien
gcaatcgcaggtatctccgatccta

SEQ ID NO: 2681854 - DNA, 25 bp, Homo sapien
ggtatctccgatcctagtaatagtt

SEQ ID NO: 2681855 - DNA, 25 bp, Homo sapien
tgagtataaataaacgtttccctga

SEQ ID NO: 2681856 - DNA, 25 bp, Homo sapien
aatatgcgaagtaaatgctctcgta

SEQ ID NO: 2681857 - DNA, 25 bp, Homo sapien
tgcgaagtaaatgctctcgtagagg

SEQ ID NO: 2681858 - DNA, 25 bp, Homo sapien
aaaaatatgcgaagtaaatgctctc

SEQ ID NO: 2681859 - DNA, 25 bp, Homo sapien
tggtggctctgtgtcattagacgtt

SEQ ID NO: 2681860 - DNA, 25 bp, Homo sapien
tgtgtcattagacgtttgccaaaac

SEQ ID NO: 2681861 - DNA, 25 bp, Homo sapien
tgctggagccagttcaaaatgaatc

SEQ ID NO: 2681862 - DNA, 25 bp, Homo sapien
tgaatcaacttggtgaaagacagtg

SEQ ID NO: 2681863 - DNA, 25 bp, Homo sapien
tattgccttgttttagtcaagcaca

SEQ ID NO: 2681864 - DNA, 25 bp, Homo sapien
ctggaccagaatctttcgtttttgg

SEQ ID NO: 2681865 - DNA, 25 bp, Homo sapien
tctttgtgcgcatgatggatcccat

SEQ ID NO: 2681866 - DNA, 25 bp, Homo sapien
cttcaccttttctttgtgcgcatga

SEQ ID NO: 2681867 - DNA, 25 bp, Homo sapien
catgaggcagataactaaaggtttc

SEQ ID NO: 2681868 - DNA, 25 bp, Homo sapien
tgagcttaccaacctacatccttga

SEQ ID NO: 2681869 - DNA, 25 bp, Homo sapien
ggttagaatgccatccttctggaac

SEQ ID NO: 2681870 - DNA, 25 bp, Homo sapien
tctggaacaccctgagaagtccagg

SEQ ID NO: 2681871 - DNA, 25 bp, Homo sapien
tcacttgacgagagaaaaacttttc

SEQ ID NO: 2681872 - DNA, 25 bp, Homo sapien
tgcttctagtgtggtgagactcata

SEQ ID NO: 2681873 - DNA, 25 bp, Homo sapien
tagtgcagtcagttagcaaagctgc

SEQ ID NO: 2681874 - DNA, 25 bp, Homo sapien
gcaaagctgcctatgaaatacacca

SEQ ID NO: 2681875 - DNA, 25 bp, Homo sapien
ggtggcgatcgggcagagacactca

SEQ ID NO: 2681876 - DNA, 25 bp, Homo sapien
gcgatcgggcagagacactcatcag

SEQ ID NO: 2681877 - DNA, 25 bp, Homo sapien
gtggcgatcgggcagagacactcat

SEQ ID NO: 2681878 - DNA, 25 bp, Homo sapien
gatcgggcagagacactcatcagtt

SEQ ID NO: 2681879 - DNA, 25 bp, Homo sapien
gataggtccgcaaacaaatgtctct

SEQ ID NO: 2681880 - DNA, 25 bp, Homo sapien
caaagtctgagaatgactgtcccga

SEQ ID NO: 2681881 - DNA, 25 bp, Homo sapien
cgtgacctaccagctatgcaagtgg

SEQ ID NO: 2681882 - DNA, 25 bp, Homo sapien
tggtcctgggaagttaggcctcacc

SEQ ID NO: 2681883 - DNA, 25 bp, Homo sapien
tagagaggatggcataacactggac

SEQ ID NO: 2681884 - DNA, 25 bp, Homo sapien
cgtggagtccaacatgacacaaaga

SEQ ID NO: 2681885 - DNA, 25 bp, Homo sapien
gaattcactgaacttattgagggaa

SEQ ID NO: 2681886 - DNA, 25 bp, Homo sapien
gttgcttagaaatccgtggagtcca

SEQ ID NO: 2681887 - DNA, 25 bp, Homo sapien
aagacactgaatgtcacgtaagtcg

SEQ ID NO: 2681888 - DNA, 25 bp, Homo sapien
ctgaatgtcacgtaagtcggtttgc

SEQ ID NO: 2681889 - DNA, 25 bp, Homo sapien
tttgctgctgtttagaggccagaaa

SEQ ID NO: 2681890 - DNA, 25 bp, Homo sapien
cacgtaagtcggtttgctgctgttt

SEQ ID NO: 2681891 - DNA, 25 bp, Homo sapien
tctggagactcttcgaaccagtgac

SEQ ID NO: 2681892 - DNA, 25 bp, Homo sapien
ttgagactagatcacaaacctctgg

SEQ ID NO: 2681893 - DNA, 25 bp, Homo sapien
gactcttcgaaccagtgactgcctg

SEQ ID NO: 2681894 - DNA, 25 bp, Homo sapien
tcacaaacctctggagactcttcga

SEQ ID NO: 2681895 - DNA, 25 bp, Homo sapien
tacactgtaaaacgcccctgaagct

SEQ ID NO: 2681896 - DNA, 25 bp, Homo sapien
tgtagggaatactaagactttctgc

SEQ ID NO: 2681897 - DNA, 25 bp, Homo sapien
catctgcgttgggttggactttcca

SEQ ID NO: 2681898 - DNA, 25 bp, Homo sapien
gagagtttccttgtagggaatacta

SEQ ID NO: 2681899 - DNA, 25 bp, Homo sapien
gcagacatattgaagcttctttgat

SEQ ID NO: 2681900 - DNA, 25 bp, Homo sapien
cgtggcctttggacacagccctttg

SEQ ID NO: 2681901 - DNA, 25 bp, Homo sapien
ggtgctgaggctgaaatcccacttc

SEQ ID NO: 2681902 - DNA, 25 bp, Homo sapien
agctgcagacacatgaggcacgtgg

SEQ ID NO: 2681903 - DNA, 25 bp, Homo sapien
gacagcccttgcagtgtaaatctct

SEQ ID NO: 2681904 - DNA, 25 bp, Homo sapien
attgtgttggaattccctctgacag

SEQ ID NO: 2681905 - DNA, 25 bp, Homo sapien
tagcatagagaccacatctagggaa

SEQ ID NO: 2681906 - DNA, 25 bp, Homo sapien
tgaggcaacagctgtataagggatt

SEQ ID NO: 2681907 - DNA, 25 bp, Homo sapien
actgataattgcacaggtctcttcc

SEQ ID NO: 2681908 - DNA, 25 bp, Homo sapien
gagaatcgtcccacgattacccgct

SEQ ID NO: 2681909 - DNA, 25 bp, Homo sapien
tttgctgccaatttgaatccctaca

SEQ ID NO: 2681910 - DNA, 25 bp, Homo sapien
tatatcactgataattgcacaggtc

SEQ ID NO: 2681911 - DNA, 25 bp, Homo sapien
cagcctgatggatgccacgggccat

SEQ ID NO: 2681912 - DNA, 25 bp, Homo sapien
caaacagcctgatggatgccacggg

SEQ ID NO: 2681913 - DNA, 25 bp, Homo sapien
aacagcctgatggatgccacgggcc

SEQ ID NO: 2681914 - DNA, 25 bp, Homo sapien
aaacagcctgatggatgccacgggc

SEQ ID NO: 2681915 - DNA, 25 bp, Homo sapien
agagcatcagatttggtggtactgt

SEQ ID NO: 2681916 - DNA, 25 bp, Homo sapien
agcatcagatttggtggtactgtca

SEQ ID NO: 2681917 - DNA, 25 bp, Homo sapien
tggctgaactgttaaagaagaaact

SEQ ID NO: 2681918 - DNA, 25 bp, Homo sapien
gaggctgtcctctgacagggtgaaa

SEQ ID NO: 2681919 - DNA, 25 bp, Homo sapien
ctttcacccgtggagtgcatggaat

SEQ ID NO: 2681920 - DNA, 25 bp, Homo sapien
gagtgcatggaattcgtgcactgta

SEQ ID NO: 2681921 - DNA, 25 bp, Homo sapien
ctgtatgtataggacttagctgcca

SEQ ID NO: 2681922 - DNA, 25 bp, Homo sapien
cgtgcactgtatgtataggacttag

SEQ ID NO: 2681923 - DNA, 25 bp, Homo sapien
ttggtattaccccagggaatcagca

SEQ ID NO: 2681924 - DNA, 25 bp, Homo sapien
agcaatgcctgaatcctgcctaggg

SEQ ID NO: 2681925 - DNA, 25 bp, Homo sapien
aatcctgcctagggaaagctgctct

SEQ ID NO: 2681926 - DNA, 25 bp, Homo sapien
ctgaaacttcttggtattaccccag

SEQ ID NO: 2681927 - DNA, 25 bp, Homo sapien
tccaaatgcatctctcaggatgctc

SEQ ID NO: 2681928 - DNA, 25 bp, Homo sapien
aggatgctctcatcctgtcctctct

SEQ ID NO: 2681929 - DNA, 25 bp, Homo sapien
tttccaggtagccactgtcttttgc

SEQ ID NO: 2681930 - DNA, 25 bp, Homo sapien
gggttaggtccttctccaaatgcat

SEQ ID NO: 2681931 - DNA, 25 bp, Homo sapien
tgtcactgggaaagatttttgggtc

SEQ ID NO: 2681932 - DNA, 25 bp, Homo sapien
cactgggaaagatttttgggtctgt

SEQ ID NO: 2681933 - DNA, 25 bp, Homo sapien
tcactgggaaagatttttgggtctg

SEQ ID NO: 2681934 - DNA, 25 bp, Homo sapien
cagttgattaagagcttgttggtct

SEQ ID NO: 2681935 - DNA, 25 bp, Homo sapien
tgcttttgccgggactgagtcatga

SEQ ID NO: 2681936 - DNA, 25 bp, Homo sapien
tcttggacacatgggaatcattcag

SEQ ID NO: 2681937 - DNA, 25 bp, Homo sapien
catgatgaacccttgcagttgatta

SEQ ID NO: 2681938 - DNA, 25 bp, Homo sapien
ggcagagttacatctgcggtcatac

SEQ ID NO: 2681939 - DNA, 25 bp, Homo sapien
gtcccatctggcagagttacatctg

SEQ ID NO: 2681940 - DNA, 25 bp, Homo sapien
agagttacatctgcggtcataccca

SEQ ID NO: 2681941 - DNA, 25 bp, Homo sapien
tctggcagagttacatctgcggtca

SEQ ID NO: 2681942 - DNA, 25 bp, Homo sapien
cacaaagccaggtggagaagatccc

SEQ ID NO: 2681943 - DNA, 25 bp, Homo sapien
cagaggtctctggtgcttgatgtgt

SEQ ID NO: 2681944 - DNA, 25 bp, Homo sapien
tggagaagatcccagaggtctctgg

SEQ ID NO: 2681945 - DNA, 25 bp, Homo sapien
aggtctctggtgcttgatgtgtttc

SEQ ID NO: 2681946 - DNA, 25 bp, Homo sapien
gaaagccagggatatgagaagattg

SEQ ID NO: 2681947 - DNA, 25 bp, Homo sapien
aaagccagggatatgagaagattgt

SEQ ID NO: 2681948 - DNA, 25 bp, Homo sapien
tctgccgcgacattttttgagtgtc

SEQ ID NO: 2681949 - DNA, 25 bp, Homo sapien
tttctgccgcgacattttttgagtg

SEQ ID NO: 2681950 - DNA, 25 bp, Homo sapien
ttctgccgcgacattttttgagtgt

SEQ ID NO: 2681951 - DNA, 25 bp, Homo sapien
tgatgttcagacacctggcgttctg

SEQ ID NO: 2681952 - DNA, 25 bp, Homo sapien
ggccagtcagttccctgatgttcag

SEQ ID NO: 2681953 - DNA, 25 bp, Homo sapien
gctggccagtcagttccctgatgtt

SEQ ID NO: 2681954 - DNA, 25 bp, Homo sapien
gcgttctggagtgctttgtcaagag

SEQ ID NO: 2681955 - DNA, 25 bp, Homo sapien
cctaagggcttgtttgtgatgttgt

SEQ ID NO: 2681956 - DNA, 25 bp, Homo sapien
tggctgcagacgacctaagggcttg

SEQ ID NO: 2681957 - DNA, 25 bp, Homo sapien
gatcacgaccacacatcagtgggaa

SEQ ID NO: 2681958 - DNA, 25 bp, Homo sapien
ttcccagagcttgatcacgaccaca

SEQ ID NO: 2681959 - DNA, 25 bp, Homo sapien
gaaattatctgagtctttgcgaagg

SEQ ID NO: 2681960 - DNA, 25 bp, Homo sapien
gagtctttgcgaagggccaagttgt

SEQ ID NO: 2681961 - DNA, 25 bp, Homo sapien
aggtcttaggtgtgcccaatccatc

SEQ ID NO: 2681962 - DNA, 25 bp, Homo sapien
ctaggtcttaggtgtgcccaatcca

SEQ ID NO: 2681963 - DNA, 25 bp, Homo sapien
gagtctgagtatctgcttttctcag

SEQ ID NO: 2681964 - DNA, 25 bp, Homo sapien
tctgagtatctgcttttctcagacc

SEQ ID NO: 2681965 - DNA, 25 bp, Homo sapien
tgagtatctgcttttctcagacctg

SEQ ID NO: 2681966 - DNA, 25 bp, Homo sapien
agtatctgcttttctcagacctgag

SEQ ID NO: 2681967 - DNA, 25 bp, Homo sapien
ttcagaggtgcggctctctccagaa

SEQ ID NO: 2681968 - DNA, 25 bp, Homo sapien
tctccagaaggtcatgccttgtgga

SEQ ID NO: 2681969 - DNA, 25 bp, Homo sapien
gggctgtaggtgaagccccactctg

SEQ ID NO: 2681970 - DNA, 25 bp, Homo sapien
gccttgtggacatagctgtcttgtg

SEQ ID NO: 2681971 - DNA, 25 bp, Homo sapien
aaattgcttagctttcacaagaacc

SEQ ID NO: 2681972 - DNA, 25 bp, Homo sapien
ccacccttctgagaagaagaaccat

SEQ ID NO: 2681973 - DNA, 25 bp, Homo sapien
gcttagctttcacaagaaccaccct

SEQ ID NO: 2681974 - DNA, 25 bp, Homo sapien
tagctttcacaagaaccacccttct

SEQ ID NO: 2681975 - DNA, 25 bp, Homo sapien
gatttgcagggagcatgcacagcct

SEQ ID NO: 2681976 - DNA, 25 bp, Homo sapien
gattagtcttgggtaggccatcttg

SEQ ID NO: 2681977 - DNA, 25 bp, Homo sapien
tcttccaagggtacttgtagatgga

SEQ ID NO: 2681978 - DNA, 25 bp, Homo sapien
cctctggcctgtatggagtccatcc

SEQ ID NO: 2681979 - DNA, 25 bp, Homo sapien
gctgctggtgctaacaaagatctga

SEQ ID NO: 2681980 - DNA, 25 bp, Homo sapien
gagaagcagggcgatatctccggcc

SEQ ID NO: 2681981 - DNA, 25 bp, Homo sapien
tgtccacacatatgccttgagttgc

SEQ ID NO: 2681982 - DNA, 25 bp, Homo sapien
caggagcctgctatttgtagagaga

SEQ ID NO: 2681983 - DNA, 25 bp, Homo sapien
ctggtgattgcttggagggttttta

SEQ ID NO: 2681984 - DNA, 25 bp, Homo sapien
ggtttttatcgactctctttgctgc

SEQ ID NO: 2681985 - DNA, 25 bp, Homo sapien
gggtgtatttctcccacgagcttta

SEQ ID NO: 2681986 - DNA, 25 bp, Homo sapien
cagccaatcagcagtaattggtaaa

SEQ ID NO: 2681987 - DNA, 25 bp, Homo sapien
gtctataggaacattccggaacgca

SEQ ID NO: 2681988 - DNA, 25 bp, Homo sapien
gaacgcagcggctttggtaaagcct

SEQ ID NO: 2681989 - DNA, 25 bp, Homo sapien
gaacattccggaacgcagcggcttt

SEQ ID NO: 2681990 - DNA, 25 bp, Homo sapien
tggtaaagcctgatccctgggtcat

SEQ ID NO: 2681991 - DNA, 25 bp, Homo sapien
accacacatgggtgttccctgcggg

SEQ ID NO: 2681992 - DNA, 25 bp, Homo sapien
gctcaggaccacacatgggtgttcc

SEQ ID NO: 2681993 - DNA, 25 bp, Homo sapien
caggaccacacatgggtgttccctg

SEQ ID NO: 2681994 - DNA, 25 bp, Homo sapien
atgggtgttccctgcgggggtgttg

SEQ ID NO: 2681995 - DNA, 25 bp, Homo sapien
tgagtggaaggtgaatttccctttc

SEQ ID NO: 2681996 - DNA, 25 bp, Homo sapien
cctgagtggaaggtgaatttccctt

SEQ ID NO: 2681997 - DNA, 25 bp, Homo sapien
ttcaaggccacagcctgagtggaag

SEQ ID NO: 2681998 - DNA, 25 bp, Homo sapien
gccacagcctgagtggaaggtgaat

SEQ ID NO: 2681999 - DNA, 25 bp, Homo sapien
caagatggttgctgtagcctgaact

SEQ ID NO: 2682000 - DNA, 25 bp, Homo sapien
ttcctccaagatggttgctgtagcc

SEQ ID NO: 2682001 - DNA, 25 bp, Homo sapien
gtttcgtgatccagacacttcagag

SEQ ID NO: 2682002 - DNA, 25 bp, Homo sapien
ttagtttcgtgatccagacacttca

SEQ ID NO: 2682003 - DNA, 25 bp, Homo sapien
aaacatcgccagtgaccttctgctt

SEQ ID NO: 2682004 - DNA, 25 bp, Homo sapien
agcaaacatcgccagtgaccttctg

SEQ ID NO: 2682005 - DNA, 25 bp, Homo sapien
catcgccagtgaccttctgctttca

SEQ ID NO: 2682006 - DNA, 25 bp, Homo sapien
caaacatcgccagtgaccttctgct

SEQ ID NO: 2682007 - DNA, 25 bp, Homo sapien
gtttgtgacaggtgcacatcctgga

SEQ ID NO: 2682008 - DNA, 25 bp, Homo sapien
gtgtttgtgacaggtgcacatcctg

SEQ ID NO: 2682009 - DNA, 25 bp, Homo sapien
tgtgacaggtgcacatcctggacca

SEQ ID NO: 2682010 - DNA, 25 bp, Homo sapien
acaggtgcacatcctggaccaccat

SEQ ID NO: 2682011 - DNA, 25 bp, Homo sapien
tgaataccttgagggtcacaagctg

SEQ ID NO: 2682012 - DNA, 25 bp, Homo sapien
acaaggtgctgatcagtggaccggc

SEQ ID NO: 2682013 - DNA, 25 bp, Homo sapien
gctgatcagtggaccggcactgact

SEQ ID NO: 2682014 - DNA, 25 bp, Homo sapien
acaagctgagtcctccgtgctacca

SEQ ID NO: 2682015 - DNA, 25 bp, Homo sapien
gtggcttcagtgttgcagacaaaga

SEQ ID NO: 2682016 - DNA, 25 bp, Homo sapien
tgctctgtggcttcagtgttgcaga

SEQ ID NO: 2682017 - DNA, 25 bp, Homo sapien
tccaattgcactggcgtttcctggg

SEQ ID NO: 2682018 - DNA, 25 bp, Homo sapien
tcaaagttgtatacagagacgttat

SEQ ID NO: 2682019 - DNA, 25 bp, Homo sapien
tctgctaccacatgactgaacaaat

SEQ ID NO: 2682020 - DNA, 25 bp, Homo sapien
gattcggtgtcgatttgaagtctga

SEQ ID NO: 2682021 - DNA, 25 bp, Homo sapien
gagcagtcccaagagaggtgaagac

SEQ ID NO: 2682022 - DNA, 25 bp, Homo sapien
tgagcagtcccaagagaggtgaaga

SEQ ID NO: 2682023 - DNA, 25 bp, Homo sapien
ctgagcagtcccaagagaggtgaag

SEQ ID NO: 2682024 - DNA, 25 bp, Homo sapien
agcagtcccaagagaggtgaagacc

SEQ ID NO: 2682025 - DNA, 25 bp, Homo sapien
gtggagcttgagtaggagcttgggc

SEQ ID NO: 2682026 - DNA, 25 bp, Homo sapien
aagtggagcttgagtaggagcttgg

SEQ ID NO: 2682027 - DNA, 25 bp, Homo sapien
gtaaaagtggagcttgagtaggagc

SEQ ID NO: 2682028 - DNA, 25 bp, Homo sapien
aaaagtggagcttgagtaggagctt

SEQ ID NO: 2682029 - DNA, 25 bp, Homo sapien
aacacgctccactttaggttctgtg

SEQ ID NO: 2682030 - DNA, 25 bp, Homo sapien
tctgtgcacaaaggtgtcactctta

SEQ ID NO: 2682031 - DNA, 25 bp, Homo sapien
ggtgtcactcttacaaccctaaaca

SEQ ID NO: 2682032 - DNA, 25 bp, Homo sapien
tccactttaggttctgtgcacaaag

SEQ ID NO: 2682033 - DNA, 25 bp, Homo sapien
catgctttccttgccgtacttcctg

SEQ ID NO: 2682034 - DNA, 25 bp, Homo sapien
tttcctgaacctttcacactcagaa

SEQ ID NO: 2682035 - DNA, 25 bp, Homo sapien
tcagaatctataactaatacctcgt

SEQ ID NO: 2682036 - DNA, 25 bp, Homo sapien
gtctctgaagttcccacaacatgct

SEQ ID NO: 2682037 - DNA, 25 bp, Homo sapien
aggtaatgggccctgataagtgtcc

SEQ ID NO: 2682038 - DNA, 25 bp, Homo sapien
taaataacaagccaatgtaaatagc

SEQ ID NO: 2682039 - DNA, 25 bp, Homo sapien
aatgtaaatagcaggtaatgggccc

SEQ ID NO: 2682040 - DNA, 25 bp, Homo sapien
ccctgataagtgtcctgaactgaag

SEQ ID NO: 2682041 - DNA, 25 bp, Homo sapien
tggtcacagataaagcacctccctg

SEQ ID NO: 2682042 - DNA, 25 bp, Homo sapien
aaaaaagctggcagtaaacatcgtt

SEQ ID NO: 2682043 - DNA, 25 bp, Homo sapien
gcagctttttggctccatatttgcc

SEQ ID NO: 2682044 - DNA, 25 bp, Homo sapien
gtagagccctgttactgctttcagg

SEQ ID NO: 2682045 - DNA, 25 bp, Homo sapien
cagggaaggagaaggtccagaagtc

SEQ ID NO: 2682046 - DNA, 25 bp, Homo sapien
tttgaggtaggaggggaaaagcagc

SEQ ID NO: 2682047 - DNA, 25 bp, Homo sapien
gaaggagaaggtccagaagtcagaa

SEQ ID NO: 2682048 - DNA, 25 bp, Homo sapien
ggagaaggtccagaagtcagaaagc

SEQ ID NO: 2682049 - DNA, 25 bp, Homo sapien
aaacggcttggctttctgtctcagg

SEQ ID NO: 2682050 - DNA, 25 bp, Homo sapien
agggaaacggcttggctttctgtct

SEQ ID NO: 2682051 - DNA, 25 bp, Homo sapien
gaaacggcttggctttctgtctcag

SEQ ID NO: 2682052 - DNA, 25 bp, Homo sapien
attcagagctacaaagggaaacggc

SEQ ID NO: 2682053 - DNA, 25 bp, Homo sapien
actcctcctttgtcggaagaggaca

SEQ ID NO: 2682054 - DNA, 25 bp, Homo sapien
cattcttgcgaggactataggcccc

SEQ ID NO: 2682055 - DNA, 25 bp, Homo sapien
ctttgtcggaagaggacatcttggc

SEQ ID NO: 2682056 - DNA, 25 bp, Homo sapien
tcttggccattcttgcgaggactat

SEQ ID NO: 2682057 - DNA, 25 bp, Homo sapien
ttgcttcataaaatacttggacttt

SEQ ID NO: 2682058 - DNA, 25 bp, Homo sapien
ttattgcttcataaaatacttggac

SEQ ID NO: 2682059 - DNA, 25 bp, Homo sapien
tattgcttcataaaatacttggact

SEQ ID NO: 2682060 - DNA, 25 bp, Homo sapien
attgcttcataaaatacttggactt

SEQ ID NO: 2682061 - DNA, 25 bp, Homo sapien
aaacttccgtttgcctgcaactggg

SEQ ID NO: 2682062 - DNA, 25 bp, Homo sapien
accatgggtactttgatgatggaag

SEQ ID NO: 2682063 - DNA, 25 bp, Homo sapien
tgttttccaagtgaccatgggtact

SEQ ID NO: 2682064 - DNA, 25 bp, Homo sapien
ggatggacaatgctgtagccccttg

SEQ ID NO: 2682065 - DNA, 25 bp, Homo sapien
taagcatttccagtgttgttgtctc

SEQ ID NO: 2682066 - DNA, 25 bp, Homo sapien
ctaagcatttccagtgttgttgtct

SEQ ID NO: 2682067 - DNA, 25 bp, Homo sapien
ggagttttctgtgacaaatgcctgc

SEQ ID NO: 2682068 - DNA, 25 bp, Homo sapien
gactgagtccctattcaggcatccg

SEQ ID NO: 2682069 - DNA, 25 bp, Homo sapien
tcttgccgcagacaaccctttcagc

SEQ ID NO: 2682070 - DNA, 25 bp, Homo sapien
gcatccggtatcagctcttgccgca

SEQ ID NO: 2682071 - DNA, 25 bp, Homo sapien
caatgtggaatagcctccctgagct

SEQ ID NO: 2682072 - DNA, 25 bp, Homo sapien
tcccaatgtggaatagcctccctga

SEQ ID NO: 2682073 - DNA, 25 bp, Homo sapien
tcttcccaatgtggaatagcctccc

SEQ ID NO: 2682074 - DNA, 25 bp, Homo sapien
gccttcttcccaatgtggaatagcc

SEQ ID NO: 2682075 - DNA, 25 bp, Homo sapien
ctaggatggggtttgcggtaatgcc

SEQ ID NO: 2682076 - DNA, 25 bp, Homo sapien
taggatggggtttgcggtaatgccc

SEQ ID NO: 2682077 - DNA, 25 bp, Homo sapien
ggatggggtttgcggtaatgcccca

SEQ ID NO: 2682078 - DNA, 25 bp, Homo sapien
atggggtttgcggtaatgccccatc

SEQ ID NO: 2682079 - DNA, 25 bp, Homo sapien
gacatgaccagaacaatcagaggca

SEQ ID NO: 2682080 - DNA, 25 bp, Homo sapien
gaaaaccattactccacaaagcagc

SEQ ID NO: 2682081 - DNA, 25 bp, Homo sapien
catgcaatgtatgatggccgaaaac

SEQ ID NO: 2682082 - DNA, 25 bp, Homo sapien
tgcaatctctgcatcaaagctacat

SEQ ID NO: 2682083 - DNA, 25 bp, Homo sapien
gttttgaatactggccttcaggcat

SEQ ID NO: 2682084 - DNA, 25 bp, Homo sapien
ctctgcatcctgatgttttgaatac

SEQ ID NO: 2682085 - DNA, 25 bp, Homo sapien
tgctctgcatcctgatgttttgaat

SEQ ID NO: 2682086 - DNA, 25 bp, Homo sapien
ctgcttgacaatttgctctgcatcc

SEQ ID NO: 2682087 - DNA, 25 bp, Homo sapien
tttgtttttgtttcaaaatgcacat

SEQ ID NO: 2682088 - DNA, 25 bp, Homo sapien
gtttttgtttcaaaatgcacataac

SEQ ID NO: 2682089 - DNA, 25 bp, Homo sapien
tgtttttgtttcaaaatgcacataa

SEQ ID NO: 2682090 - DNA, 25 bp, Homo sapien
tttttgtttcaaaatgcacataacc

SEQ ID NO: 2682091 - DNA, 25 bp, Homo sapien
tgtggtttcttgtatatggccgtag

SEQ ID NO: 2682092 - DNA, 25 bp, Homo sapien
gtgctgacccagttccaatttttca

SEQ ID NO: 2682093 - DNA, 25 bp, Homo sapien
caatttttcatagactcctaggacc

SEQ ID NO: 2682094 - DNA, 25 bp, Homo sapien
ttgtatatggccgtagtgctgaccc

SEQ ID NO: 2682095 - DNA, 25 bp, Homo sapien
catcaccatagggatgccattccat

SEQ ID NO: 2682096 - DNA, 25 bp, Homo sapien
ccatatttgtcattgctatctccca

SEQ ID NO: 2682097 - DNA, 25 bp, Homo sapien
ccgaccagatgttccattatcaggc

SEQ ID NO: 2682098 - DNA, 25 bp, Homo sapien
taacatctgcaatcccgaccagatg

SEQ ID NO: 2682099 - DNA, 25 bp, Homo sapien
gtgtcattccctttctgagacttac

SEQ ID NO: 2682100 - DNA, 25 bp, Homo sapien
ctgactgtgtcattccctttctgag

SEQ ID NO: 2682101 - DNA, 25 bp, Homo sapien
ttcaaatctgactgtgtcattccct

SEQ ID NO: 2682102 - DNA, 25 bp, Homo sapien
ctgaaattcaaatctgactgtgtca

SEQ ID NO: 2682103 - DNA, 25 bp, Homo sapien
gctgtctctggggatgtgaggagag

SEQ ID NO: 2682104 - DNA, 25 bp, Homo sapien
cttgtcttctccagtgacttgccct

SEQ ID NO: 2682105 - DNA, 25 bp, Homo sapien
ttctccagtgacttgccctttgcct

SEQ ID NO: 2682106 - DNA, 25 bp, Homo sapien
tcttctccagtgacttgccctttgc

SEQ ID NO: 2682107 - DNA, 25 bp, Homo sapien
aaagcctctcagctgagtcctgctc

SEQ ID NO: 2682108 - DNA, 25 bp, Homo sapien
ctgtcgatccaatgtgtgagactga

SEQ ID NO: 2682109 - DNA, 25 bp, Homo sapien
gctcttctgtcgatccaatgtgtga

SEQ ID NO: 2682110 - DNA, 25 bp, Homo sapien
gagtcctgctcttctgtcgatccaa

SEQ ID NO: 2682111 - DNA, 25 bp, Homo sapien
tgtagaaaaactgtggctgataaca

SEQ ID NO: 2682112 - DNA, 25 bp, Homo sapien
gctggtgtctgctgtagaaaaactg

SEQ ID NO: 2682113 - DNA, 25 bp, Homo sapien
tgctgtagaaaaactgtggctgata

SEQ ID NO: 2682114 - DNA, 25 bp, Homo sapien
gtctgctgtagaaaaactgtggctg

SEQ ID NO: 2682115 - DNA, 25 bp, Homo sapien
tttccacaccatagttatcttgatt

SEQ ID NO: 2682116 - DNA, 25 bp, Homo sapien
tcttgatttaatatgcaagtctttt

SEQ ID NO: 2682117 - DNA, 25 bp, Homo sapien
tccacaccatagttatcttgattta

SEQ ID NO: 2682118 - DNA, 25 bp, Homo sapien
aagtctttttttcagggttgtgcat

SEQ ID NO: 2682119 - DNA, 25 bp, Homo sapien
gaattattcacttgagccaagcgtg

SEQ ID NO: 2682120 - DNA, 25 bp, Homo sapien
tagctctctgagacccttatgacct

SEQ ID NO: 2682121 - DNA, 25 bp, Homo sapien
tagtggaagggtcgagctagctctc

SEQ ID NO: 2682122 - DNA, 25 bp, Homo sapien
tcctaatactatacctcgggaatta

SEQ ID NO: 2682123 - DNA, 25 bp, Homo sapien
caagacctgggcatctaacttgtat

SEQ ID NO: 2682124 - DNA, 25 bp, Homo sapien
gtggtccatggcactaatgtgagag

SEQ ID NO: 2682125 - DNA, 25 bp, Homo sapien
tccatggcactaatgtgagagaaat

SEQ ID NO: 2682126 - DNA, 25 bp, Homo sapien
ctaacttgtatgtggtccatggcac

SEQ ID NO: 2682127 - DNA, 25 bp, Homo sapien
ctacaagagaggtaaggtcgttgct

SEQ ID NO: 2682128 - DNA, 25 bp, Homo sapien
atgtgttgcaaatcaaaagtggttc

SEQ ID NO: 2682129 - DNA, 25 bp, Homo sapien
gcttaagtatgtgttgcaaatcaaa

SEQ ID NO: 2682130 - DNA, 25 bp, Homo sapien
gaggtaaggtcgttgcttaagtatg

SEQ ID NO: 2682131 - DNA, 25 bp, Homo sapien
ttactggttgtcagctgctctggag

SEQ ID NO: 2682132 - DNA, 25 bp, Homo sapien
ctctggagcaagctttgatgatatt

SEQ ID NO: 2682133 - DNA, 25 bp, Homo sapien
gagcaagctttgatgatattaaggt

SEQ ID NO: 2682134 - DNA, 25 bp, Homo sapien
actggttgtcagctgctctggagca

SEQ ID NO: 2682135 - DNA, 25 bp, Homo sapien
tcagcctaaaaatgtcttttcaact

SEQ ID NO: 2682136 - DNA, 25 bp, Homo sapien
tatgtatgctgttcaattttaaact

SEQ ID NO: 2682137 - DNA, 25 bp, Homo sapien
tagtcattactacatttgtcagaat

SEQ ID NO: 2682138 - DNA, 25 bp, Homo sapien
cttgtctgtttcaggccaatataaa

SEQ ID NO: 2682139 - DNA, 25 bp, Homo sapien
cccaagggctgttgagttgagtttc

SEQ ID NO: 2682140 - DNA, 25 bp, Homo sapien
ctgtggggcatctgcagtgacccca

SEQ ID NO: 2682141 - DNA, 25 bp, Homo sapien
gtggggcatctgcagtgaccccaag

SEQ ID NO: 2682142 - DNA, 25 bp, Homo sapien
tgtggggcatctgcagtgaccccaa

SEQ ID NO: 2682143 - DNA, 25 bp, Homo sapien
aggcccttgttagtaaaagctgttg

SEQ ID NO: 2682144 - DNA, 25 bp, Homo sapien
tagcttaggcaagtgaagtctgaga

SEQ ID NO: 2682145 - DNA, 25 bp, Homo sapien
ggctattggtttcctcagtggtgaa

SEQ ID NO: 2682146 - DNA, 25 bp, Homo sapien
gttgcccatggtgatgcttactaag

SEQ ID NO: 2682147 - DNA, 25 bp, Homo sapien
gcgcttgcagggtctgattgcagca

SEQ ID NO: 2682148 - DNA, 25 bp, Homo sapien
catgtgtgcgcttgcagggtctgat

SEQ ID NO: 2682149 - DNA, 25 bp, Homo sapien
tggtggaagctgaacctggtggcag

SEQ ID NO: 2682150 - DNA, 25 bp, Homo sapien
ggcactggggcttcagccctgaaat

SEQ ID NO: 2682151 - DNA, 25 bp, Homo sapien
tggaatcgtgataaaagagcattag

SEQ ID NO: 2682152 - DNA, 25 bp, Homo sapien
aatgtacattctctatttagggatg

SEQ ID NO: 2682153 - DNA, 25 bp, Homo sapien
gagcattagccacgctattttgaat

SEQ ID NO: 2682154 - DNA, 25 bp, Homo sapien
ttctgtgtgaataggtacctggtag

SEQ ID NO: 2682155 - DNA, 25 bp, Homo sapien
acatttgatggcaaatactgtgttc

SEQ ID NO: 2682156 - DNA, 25 bp, Homo sapien
atttgatggcaaatactgtgttcat

SEQ ID NO: 2682157 - DNA, 25 bp, Homo sapien
catttgatggcaaatactgtgttca

SEQ ID NO: 2682158 - DNA, 25 bp, Homo sapien
taggaactgaggacatcatagacgc

SEQ ID NO: 2682159 - DNA, 25 bp, Homo sapien
taactactccatttggtggacaacc

SEQ ID NO: 2682160 - DNA, 25 bp, Homo sapien
ggatcacttgaagactttaacagag

SEQ ID NO: 2682161 - DNA, 25 bp, Homo sapien
gacgcagtcaagctttctaagaagg

SEQ ID NO: 2682162 - DNA, 25 bp, Homo sapien
cagtgtggggcagaacaatcattgg

SEQ ID NO: 2682163 - DNA, 25 bp, Homo sapien
aatccagtgtggggcagaacaatca

SEQ ID NO: 2682164 - DNA, 25 bp, Homo sapien
ctgagaggaaatccagtgtggggca

SEQ ID NO: 2682165 - DNA, 25 bp, Homo sapien
gggcagaacaatcattggaaatcat

SEQ ID NO: 2682166 - DNA, 25 bp, Homo sapien
ctttcttatagcagtcctcgatctg

SEQ ID NO: 2682167 - DNA, 25 bp, Homo sapien
ctactgagtgaggaatcctttctta

SEQ ID NO: 2682168 - DNA, 25 bp, Homo sapien
tcttttgtgtttactcctgtgacca

SEQ ID NO: 2682169 - DNA, 25 bp, Homo sapien
cattgcaccctgtttcatcagttgg

SEQ ID NO: 2682170 - DNA, 25 bp, Homo sapien
gcggacgaggaacaatgcaaagatg

SEQ ID NO: 2682171 - DNA, 25 bp, Homo sapien
cgaggaacaatgcaaagatggcttt

SEQ ID NO: 2682172 - DNA, 25 bp, Homo sapien
ggaacaatgcaaagatggcttttca

SEQ ID NO: 2682173 - DNA, 25 bp, Homo sapien
gacgaggaacaatgcaaagatggct

SEQ ID NO: 2682174 - DNA, 25 bp, Homo sapien
ggaggcggctgcggcgagcaaggag

SEQ ID NO: 2682175 - DNA, 25 bp, Homo sapien
cggaggcggctgcggcgagcaagga

SEQ ID NO: 2682176 - DNA, 25 bp, Homo sapien
tgccggagtccgcggcggcggagga

SEQ ID NO: 2682177 - DNA, 25 bp, Homo sapien
cggaggaggcgcgtggcggaggcgg

SEQ ID NO: 2682178 - DNA, 25 bp, Homo sapien
ggcacgccggtgatccgatgcaggc

SEQ ID NO: 2682179 - DNA, 25 bp, Homo sapien
ccgatgcaggcgattaaaaagaaag

SEQ ID NO: 2682180 - DNA, 25 bp, Homo sapien
tccgatgcaggcgattaaaaagaaa

SEQ ID NO: 2682181 - DNA, 25 bp, Homo sapien
cgccggtgatccgatgcaggcgatt

SEQ ID NO: 2682182 - DNA, 25 bp, Homo sapien
tgtaagtccttggtggtgatttcgg

SEQ ID NO: 2682183 - DNA, 25 bp, Homo sapien
tggtgatttcggagctggtgtctac

SEQ ID NO: 2682184 - DNA, 25 bp, Homo sapien
cggagctggtgtctacggctgcgtc

SEQ ID NO: 2682185 - DNA, 25 bp, Homo sapien
tggtggtgatttcggagctggtgtc

SEQ ID NO: 2682186 - DNA, 25 bp, Homo sapien
cattcccgttagcaggggcgtctct

SEQ ID NO: 2682187 - DNA, 25 bp, Homo sapien
ttttcctcattagcattcccgttag

SEQ ID NO: 2682188 - DNA, 25 bp, Homo sapien
attagcattcccgttagcaggggcg

SEQ ID NO: 2682189 - DNA, 25 bp, Homo sapien
attttctgcctcttccacaacttcc

SEQ ID NO: 2682190 - DNA, 25 bp, Homo sapien
ctcttcctcaccatcaccttcttcc

SEQ ID NO: 2682191 - DNA, 25 bp, Homo sapien
ccatcctcttcctcaccatcacctt

SEQ ID NO: 2682192 - DNA, 25 bp, Homo sapien
atctccatcctcttcctcaccatca

SEQ ID NO: 2682193 - DNA, 25 bp, Homo sapien
atcctcttcctcaccatcaccttct

SEQ ID NO: 2682194 - DNA, 25 bp, Homo sapien
catcttcagctgcccgcttgcccgt

SEQ ID NO: 2682195 - DNA, 25 bp, Homo sapien
cagctgcccgcttgcccgtagctgt

SEQ ID NO: 2682196 - DNA, 25 bp, Homo sapien
atcttcagctgcccgcttgcccgta

SEQ ID NO: 2682197 - DNA, 25 bp, Homo sapien
ttcagctgcccgcttgcccgtagct

SEQ ID NO: 2682198 - DNA, 25 bp, Homo sapien
atcctcgtcggtcttctgcttcttg

SEQ ID NO: 2682199 - DNA, 25 bp, Homo sapien
tcatcctcgtcggtcttctgcttct

SEQ ID NO: 2682200 - DNA, 25 bp, Homo sapien
agtcatcctcgtcggtcttctgctt

SEQ ID NO: 2682201 - DNA, 25 bp, Homo sapien
ctagtcatcctcgtcggtcttctgc

SEQ ID NO: 2682202 - DNA, 25 bp, Homo sapien
tgttgcaaattctcatggtttgggt

SEQ ID NO: 2682203 - DNA, 25 bp, Homo sapien
gttgcaaattctcatggtttgggtt

SEQ ID NO: 2682204 - DNA, 25 bp, Homo sapien
ttgcaaattctcatggtttgggttg

SEQ ID NO: 2682205 - DNA, 25 bp, Homo sapien
tggaataatgtctaaaaacagcatg

SEQ ID NO: 2682206 - DNA, 25 bp, Homo sapien
gaataatggaataatgtctaaaaac

SEQ ID NO: 2682207 - DNA, 25 bp, Homo sapien
cacttgcaaatcattggtcatagga

SEQ ID NO: 2682208 - DNA, 25 bp, Homo sapien
gaggatgagtcataaaccacttgca

SEQ ID NO: 2682209 - DNA, 25 bp, Homo sapien
gtcatccttgtgcagtggccatgtt

SEQ ID NO: 2682210 - DNA, 25 bp, Homo sapien
tccttgtgcagtggccatgttaatc

SEQ ID NO: 2682211 - DNA, 25 bp, Homo sapien
ttctctgtatcattccaatttttgt

SEQ ID NO: 2682212 - DNA, 25 bp, Homo sapien
gtatatgtgctgctgaagtgagcac

SEQ ID NO: 2682213 - DNA, 25 bp, Homo sapien
gccatgtcgatgagcatgctgtcca

SEQ ID NO: 2682214 - DNA, 25 bp, Homo sapien
cctggccatgtcgatgagcatgctg

SEQ ID NO: 2682215 - DNA, 25 bp, Homo sapien
tggccatgtcgatgagcatgctgtc

SEQ ID NO: 2682216 - DNA, 25 bp, Homo sapien
ccatgtcgatgagcatgctgtccag

SEQ ID NO: 2682217 - DNA, 25 bp, Homo sapien
ttctccagtcaattttctattggcg

SEQ ID NO: 2682218 - DNA, 25 bp, Homo sapien
ccagtcaattttctattggcggcac

SEQ ID NO: 2682219 - DNA, 25 bp, Homo sapien
tcaattttctattggcggcaccatc

SEQ ID NO: 2682220 - DNA, 25 bp, Homo sapien
gtcaattttctattggcggcaccat

SEQ ID NO: 2682221 - DNA, 25 bp, Homo sapien
cattccttaataaaaataggcagac

SEQ ID NO: 2682222 - DNA, 25 bp, Homo sapien
cccattccttaataaaaataggcag

SEQ ID NO: 2682223 - DNA, 25 bp, Homo sapien
ccattccttaataaaaataggcaga

SEQ ID NO: 2682224 - DNA, 25 bp, Homo sapien
cgtggaaatacgactgacaggcaca

SEQ ID NO: 2682225 - DNA, 25 bp, Homo sapien
tgctctccacctccaatagcgtgga

SEQ ID NO: 2682226 - DNA, 25 bp, Homo sapien
gtatcactgaccatcatacagtccc

SEQ ID NO: 2682227 - DNA, 25 bp, Homo sapien
tggacgtcggtttctaacgtatcac

SEQ ID NO: 2682228 - DNA, 25 bp, Homo sapien
ttttgtaagagagcaggtaactcca

SEQ ID NO: 2682229 - DNA, 25 bp, Homo sapien
tgtggtgtatactttttgtaagaga

SEQ ID NO: 2682230 - DNA, 25 bp, Homo sapien
tttgtggtgtatactttttgtaaga

SEQ ID NO: 2682231 - DNA, 25 bp, Homo sapien
gagagcaggtaactccagcacagaa

SEQ ID NO: 2682232 - DNA, 25 bp, Homo sapien
ctggtgggaaggatgaagtaactcc

SEQ ID NO: 2682233 - DNA, 25 bp, Homo sapien
tctggtgggaaggatgaagtaactc

SEQ ID NO: 2682234 - DNA, 25 bp, Homo sapien
cttctggtgggaaggatgaagtaac

SEQ ID NO: 2682235 - DNA, 25 bp, Homo sapien
ttctggtgggaaggatgaagtaact

SEQ ID NO: 2682236 - DNA, 25 bp, Homo sapien
ttatggagaagcacactagctggtg

SEQ ID NO: 2682237 - DNA, 25 bp, Homo sapien
tggagaagcacactagctggtgttg

SEQ ID NO: 2682238 - DNA, 25 bp, Homo sapien
tgaggctttatggagaagcacacta

SEQ ID NO: 2682239 - DNA, 25 bp, Homo sapien
ggctttatggagaagcacactagct

SEQ ID NO: 2682240 - DNA, 25 bp, Homo sapien
agatgaggaagatgacgaagtttgt

SEQ ID NO: 2682241 - DNA, 25 bp, Homo sapien
tgaggaagatgacgaagtttgtgaa

SEQ ID NO: 2682242 - DNA, 25 bp, Homo sapien
gaggaagatgacgaagtttgtgaag

SEQ ID NO: 2682243 - DNA, 25 bp, Homo sapien
atgaggaagatgacgaagtttgtga

SEQ ID NO: 2682244 - DNA, 25 bp, Homo sapien
atcttttgctgggcccaaggatatt

SEQ ID NO: 2682245 - DNA, 25 bp, Homo sapien
gctgggcccaaggatattgaagcca

SEQ ID NO: 2682246 - DNA, 25 bp, Homo sapien
ttgctgggcccaaggatattgaagc

SEQ ID NO: 2682247 - DNA, 25 bp, Homo sapien
ttttgctgggcccaaggatattgaa

SEQ ID NO: 2682248 - DNA, 25 bp, Homo sapien
tccagactacaaaattaatccttcc

SEQ ID NO: 2682249 - DNA, 25 bp, Homo sapien
gggtaaagaaacttatggactgcga

SEQ ID NO: 2682250 - DNA, 25 bp, Homo sapien
caaaaactcagtctaaaataatggg

SEQ ID NO: 2682251 - DNA, 25 bp, Homo sapien
gattgtttgctctgattgatcaaga

SEQ ID NO: 2682252 - DNA, 25 bp, Homo sapien
ccgtgctggcctacaactcttatgt

SEQ ID NO: 2682253 - DNA, 25 bp, Homo sapien
caccgtgctggcctacaactcttat

SEQ ID NO: 2682254 - DNA, 25 bp, Homo sapien
gccaccgtgctggcctacaactctt

SEQ ID NO: 2682255 - DNA, 25 bp, Homo sapien
agccaccgtgctggcctacaactct

SEQ ID NO: 2682256 - DNA, 25 bp, Homo sapien
gtagtaattcccatgtgaagaggat

SEQ ID NO: 2682257 - DNA, 25 bp, Homo sapien
tccagggccctacactgaattaagg

SEQ ID NO: 2682258 - DNA, 25 bp, Homo sapien
gtccaaattccagtagtaattccca

SEQ ID NO: 2682259 - DNA, 25 bp, Homo sapien
tacactgaattaagggaacggtcca

SEQ ID NO: 2682260 - DNA, 25 bp, Homo sapien
cgccactcactacgcgcctctggat

SEQ ID NO: 2682261 - DNA, 25 bp, Homo sapien
ggcgcaagcagtacgcgctcgcact

SEQ ID NO: 2682262 - DNA, 25 bp, Homo sapien
tgacccagcccgagtggcgcaagca

SEQ ID NO: 2682263 - DNA, 25 bp, Homo sapien
ccgagtggcgcaagcagtacgcgct

SEQ ID NO: 2682264 - DNA, 25 bp, Homo sapien
acggcagaagcagcgacaggcgcct

SEQ ID NO: 2682265 - DNA, 25 bp, Homo sapien
aacggacaccgcatccagctcatgc

SEQ ID NO: 2682266 - DNA, 25 bp, Homo sapien
ggcggccgctcttcggtggcgacgg

SEQ ID NO: 2682267 - DNA, 25 bp, Homo sapien
atgccacgggtcagcggctgcttcc

SEQ ID NO: 2682268 - DNA, 25 bp, Homo sapien
tgaagcgctggtcgccaatgctgcc

SEQ ID NO: 2682269 - DNA, 25 bp, Homo sapien
cagtggtcgccagggttcacagccc

SEQ ID NO: 2682270 - DNA, 25 bp, Homo sapien
cgtgaagcgctggtcgccaatgctg

SEQ ID NO: 2682271 - DNA, 25 bp, Homo sapien
tggtcgccagggttcacagccccgg

SEQ ID NO: 2682272 - DNA, 25 bp, Homo sapien
tatttactaggccctaccttgccag

SEQ ID NO: 2682273 - DNA, 25 bp, Homo sapien
gtatttactaggccctaccttgcca

SEQ ID NO: 2682274 - DNA, 25 bp, Homo sapien
tcttctttgccttgcccagaacaga

SEQ ID NO: 2682275 - DNA, 25 bp, Homo sapien
gcccaaacgcagctgtcttctttgc

SEQ ID NO: 2682276 - DNA, 25 bp, Homo sapien
gaggcagcccaaacgcagctgtctt

SEQ ID NO: 2682277 - DNA, 25 bp, Homo sapien
cagacagcttagtccttggagctct

SEQ ID NO: 2682278 - DNA, 25 bp, Homo sapien
cctaaggccttccaagaagtcatct

SEQ ID NO: 2682279 - DNA, 25 bp, Homo sapien
taaggccttccaagaagtcatctgg

SEQ ID NO: 2682280 - DNA, 25 bp, Homo sapien
tccaagaagtcatctggatttgact

SEQ ID NO: 2682281 - DNA, 25 bp, Homo sapien
ggccttccaagaagtcatctggatt

SEQ ID NO: 2682282 - DNA, 25 bp, Homo sapien
gactggaaatagcagatgttctcaa

SEQ ID NO: 2682283 - DNA, 25 bp, Homo sapien
aagactggaaatagcagatgttctc

SEQ ID NO: 2682284 - DNA, 25 bp, Homo sapien
aaaatggcttttaacaagaagactg

SEQ ID NO: 2682285 - DNA, 25 bp, Homo sapien
tggcttttaacaagaagactggaaa

SEQ ID NO: 2682286 - DNA, 25 bp, Homo sapien
tctagttctgaattacccttgttct

SEQ ID NO: 2682287 - DNA, 25 bp, Homo sapien
tgacttatctagttctgaattaccc

SEQ ID NO: 2682288 - DNA, 25 bp, Homo sapien
cttatctagttctgaattacccttg

SEQ ID NO: 2682289 - DNA, 25 bp, Homo sapien
tcaatgacttatctagttctgaatt

SEQ ID NO: 2682290 - DNA, 25 bp, Homo sapien
gccttgttgcattgaacagtctaca

SEQ ID NO: 2682291 - DNA, 25 bp, Homo sapien
gaatatttccatgtttagctcctgg

SEQ ID NO: 2682292 - DNA, 25 bp, Homo sapien
tattacaatgtcacatccagatgca

SEQ ID NO: 2682293 - DNA, 25 bp, Homo sapien
gtaatctttcaaaatcgcttcccag

SEQ ID NO: 2682294 - DNA, 25 bp, Homo sapien
ctgagccaggttgtaaaaggcctca

SEQ ID NO: 2682295 - DNA, 25 bp, Homo sapien
gcagatctgagccaggttgtaaaag

SEQ ID NO: 2682296 - DNA, 25 bp, Homo sapien
aaggcagatctgagccaggttgtaa

SEQ ID NO: 2682297 - DNA, 25 bp, Homo sapien
gatctgagccaggttgtaaaaggcc

SEQ ID NO: 2682298 - DNA, 25 bp, Homo sapien
taacatttccataagacgctgcaat

SEQ ID NO: 2682299 - DNA, 25 bp, Homo sapien
taactggttcaaaaatggagataac

SEQ ID NO: 2682300 - DNA, 25 bp, Homo sapien
agataacatttccataagacgctgc

SEQ ID NO: 2682301 - DNA, 25 bp, Homo sapien
gttaactggttcaaaaatggagata

SEQ ID NO: 2682302 - DNA, 25 bp, Homo sapien
gattttacactctttcaatacttaa

SEQ ID NO: 2682303 - DNA, 25 bp, Homo sapien
atgatcactctgattttacactctt

SEQ ID NO: 2682304 - DNA, 25 bp, Homo sapien
aatggaatttaacatgtaggttcaa

SEQ ID NO: 2682305 - DNA, 25 bp, Homo sapien
taataccgatttactcaatgatcac

SEQ ID NO: 2682306 - DNA, 25 bp, Homo sapien
tatattgtgtgctattgattccaga

SEQ ID NO: 2682307 - DNA, 25 bp, Homo sapien
gtgtgctattgattccagaaaaaat

SEQ ID NO: 2682308 - DNA, 25 bp, Homo sapien
cccaggttatattgtgtgctattga

SEQ ID NO: 2682309 - DNA, 25 bp, Homo sapien
ctgtgggatcccaggttatattgtg

SEQ ID NO: 2682310 - DNA, 25 bp, Homo sapien
tctccaagttagtattggaccagag

SEQ ID NO: 2682311 - DNA, 25 bp, Homo sapien
tcagttggcttctccaagttagtat

SEQ ID NO: 2682312 - DNA, 25 bp, Homo sapien
caatctccaaagttaagatctgttt

SEQ ID NO: 2682313 - DNA, 25 bp, Homo sapien
gttagtattggaccagagttgcaaa

SEQ ID NO: 2682314 - DNA, 25 bp, Homo sapien
tcccagcagtggcaaaaaattctcc

SEQ ID NO: 2682315 - DNA, 25 bp, Homo sapien
catctggagaagtaacagctgtccg

SEQ ID NO: 2682316 - DNA, 25 bp, Homo sapien
tttctacattataccaaaccttcaa

SEQ ID NO: 2682317 - DNA, 25 bp, Homo sapien
aatccatttactgctcgaggatggg

SEQ ID NO: 2682318 - DNA, 25 bp, Homo sapien
gaggatgggccagatacacaaaaga

SEQ ID NO: 2682319 - DNA, 25 bp, Homo sapien
tccgtatagcaaacaatcatttggt

SEQ ID NO: 2682320 - DNA, 25 bp, Homo sapien
tttgaactcgttctttactggaagc

SEQ ID NO: 2682321 - DNA, 25 bp, Homo sapien
gattcagtccaatggctgcagtcac

SEQ ID NO: 2682322 - DNA, 25 bp, Homo sapien
tctctacccaaagacgacacacatt

SEQ ID NO: 2682323 - DNA, 25 bp, Homo sapien
catgatgaggatcctgctgatgtgg

SEQ ID NO: 2682324 - DNA, 25 bp, Homo sapien
tcctccgacctctacgaaaatgtct

SEQ ID NO: 2682325 - DNA, 25 bp, Homo sapien
caagagcaagtgatctcctccgacc

SEQ ID NO: 2682326 - DNA, 25 bp, Homo sapien
gatatcccgtatgtgctacaagagc

SEQ ID NO: 2682327 - DNA, 25 bp, Homo sapien
gcaatatgaaagtggcaaagtgcat

SEQ ID NO: 2682328 - DNA, 25 bp, Homo sapien
aagtggcaaagtgcattggcatgca

SEQ ID NO: 2682329 - DNA, 25 bp, Homo sapien
tgaaagtggcaaagtgcattggcat

SEQ ID NO: 2682330 - DNA, 25 bp, Homo sapien
tatgaaagtggcaaagtgcattggc

SEQ ID NO: 2682331 - DNA, 25 bp, Homo sapien
gaagaaccctgaagtctacgtggga

SEQ ID NO: 2682332 - DNA, 25 bp, Homo sapien
cattctacgggtctgaacaaattta

SEQ ID NO: 2682333 - DNA, 25 bp, Homo sapien
gtatgtcagtcagcaagagatctgc

SEQ ID NO: 2682334 - DNA, 25 bp, Homo sapien
catggtagctcaacggaagaaccct

SEQ ID NO: 2682335 - DNA, 25 bp, Homo sapien
tgtttagccagtgtacaacaaaagg

SEQ ID NO: 2682336 - DNA, 25 bp, Homo sapien
ttttcatttagactcagagatgtaa

SEQ ID NO: 2682337 - DNA, 25 bp, Homo sapien
tagactcagagatgtaatagatgga

SEQ ID NO: 2682338 - DNA, 25 bp, Homo sapien
caaaaggtccggtcttctcttcatt

SEQ ID NO: 2682339 - DNA, 25 bp, Homo sapien
tgcctgattagaatcttctacactg

SEQ ID NO: 2682340 - DNA, 25 bp, Homo sapien
cctcagaagatggttgttcaaaact

SEQ ID NO: 2682341 - DNA, 25 bp, Homo sapien
ttctacactggcctcagaagatggt

SEQ ID NO: 2682342 - DNA, 25 bp, Homo sapien
tgattagaatcttctacactggcct

SEQ ID NO: 2682343 - DNA, 25 bp, Homo sapien
tgttaccataacacctaccaagtag

SEQ ID NO: 2682344 - DNA, 25 bp, Homo sapien
tataggactaattgtcaacccagaa

SEQ ID NO: 2682345 - DNA, 25 bp, Homo sapien
cccagaaaagggacttgctccattt

SEQ ID NO: 2682346 - DNA, 25 bp, Homo sapien
cctttggtggtgagtttcatagcca

SEQ ID NO: 2682347 - DNA, 25 bp, Homo sapien
tcttttcgggatttattttcagatc

SEQ ID NO: 2682348 - DNA, 25 bp, Homo sapien
gatgaatactaaatagcatatctgc

SEQ ID NO: 2682349 - DNA, 25 bp, Homo sapien
ggtattcatccagccaatccacatg

SEQ ID NO: 2682350 - DNA, 25 bp, Homo sapien
aactagcaaagaaccatccatggga

SEQ ID NO: 2682351 - DNA, 25 bp, Homo sapien
tacttgacgaaacataccaggctgg

SEQ ID NO: 2682352 - DNA, 25 bp, Homo sapien
gtagctctccagaaataacagtagt

SEQ ID NO: 2682353 - DNA, 25 bp, Homo sapien
ataaacaaggaagtagctctccaga

SEQ ID NO: 2682354 - DNA, 25 bp, Homo sapien
aaacaaggaagtagctctccagaaa

SEQ ID NO: 2682355 - DNA, 25 bp, Homo sapien
agctctccagaaataacagtagtac

SEQ ID NO: 2682356 - DNA, 25 bp, Homo sapien
agagagagtttgcatcacctgtggg

SEQ ID NO: 2682357 - DNA, 25 bp, Homo sapien
aataagcattgatgtggaacgggtg

SEQ ID NO: 2682358 - DNA, 25 bp, Homo sapien
tcaacattcttggtacaggcataca

SEQ ID NO: 2682359 - DNA, 25 bp, Homo sapien
tagatgatttattgtgaccagaaga

SEQ ID NO: 2682360 - DNA, 25 bp, Homo sapien
agattcctcggcaaaactgaccagc

SEQ ID NO: 2682361 - DNA, 25 bp, Homo sapien
ggcagccatgccacattggaaaagg

SEQ ID NO: 2682362 - DNA, 25 bp, Homo sapien
taatccgggcaagctcagaaactcc

SEQ ID NO: 2682363 - DNA, 25 bp, Homo sapien
gggatcctgaaatgccacgtcaaca

SEQ ID NO: 2682364 - DNA, 25 bp, Homo sapien
cagatattgtccatcactggctaca

SEQ ID NO: 2682365 - DNA, 25 bp, Homo sapien
gcatgcactaggagagttgcagtat

SEQ ID NO: 2682366 - DNA, 25 bp, Homo sapien
ggctacaaagcatgcactaggagag

SEQ ID NO: 2682367 - DNA, 25 bp, Homo sapien
gctcagataaaagtttcttagcatc

SEQ ID NO: 2682368 - DNA, 25 bp, Homo sapien
catttatgcaactctgtaagccgag

SEQ ID NO: 2682369 - DNA, 25 bp, Homo sapien
gctttggaaaaccttgtgttctgca

SEQ ID NO: 2682370 - DNA, 25 bp, Homo sapien
taaatagaaagcttggtacagccga

SEQ ID NO: 2682371 - DNA, 25 bp, Homo sapien
gatggcttgaatctcctaaatagaa

SEQ ID NO: 2682372 - DNA, 25 bp, Homo sapien
caacacgtgggaagtataattcaag

SEQ ID NO: 2682373 - DNA, 25 bp, Homo sapien
taccaaacatgctccggccttggga

SEQ ID NO: 2682374 - DNA, 25 bp, Homo sapien
tggctgtccgttttcccaaatcaca

SEQ ID NO: 2682375 - DNA, 25 bp, Homo sapien
ccttgggatctctgaactggctgtc

SEQ ID NO: 2682376 - DNA, 25 bp, Homo sapien
cgcagctgtaccacggcccctttta

SEQ ID NO: 2682377 - DNA, 25 bp, Homo sapien
gcttaggcctctggacctctgatgg

SEQ ID NO: 2682378 - DNA, 25 bp, Homo sapien
taggtggttgctgccaagcctcaac

SEQ ID NO: 2682379 - DNA, 25 bp, Homo sapien
acaggcccaataccatgtggcagct

SEQ ID NO: 2682380 - DNA, 25 bp, Homo sapien
tatgaccaaagccagactcttgaat

SEQ ID NO: 2682381 - DNA, 25 bp, Homo sapien
tctatatagccaccagaggaatcat

SEQ ID NO: 2682382 - DNA, 25 bp, Homo sapien
taactatagtctcacccttggcaat

SEQ ID NO: 2682383 - DNA, 25 bp, Homo sapien
tattcaatcacaaaccttgggagtc

SEQ ID NO: 2682384 - DNA, 25 bp, Homo sapien
ttacttcttaagatggtgtctctct

SEQ ID NO: 2682385 - DNA, 25 bp, Homo sapien
tcaatctattacttcttaagatggt

SEQ ID NO: 2682386 - DNA, 25 bp, Homo sapien
tctattacttcttaagatggtgtct

SEQ ID NO: 2682387 - DNA, 25 bp, Homo sapien
cattcaatctattacttcttaagat

SEQ ID NO: 2682388 - DNA, 25 bp, Homo sapien
agccatgctcatcttctcagtatta

SEQ ID NO: 2682389 - DNA, 25 bp, Homo sapien
tcttctcagtattattccaatttca

SEQ ID NO: 2682390 - DNA, 25 bp, Homo sapien
tctcagtattattccaatttcagtt

SEQ ID NO: 2682391 - DNA, 25 bp, Homo sapien
gagccatgctcatcttctcagtatt

SEQ ID NO: 2682392 - DNA, 25 bp, Homo sapien
tcaggatggcaacccggcttctttc

SEQ ID NO: 2682393 - DNA, 25 bp, Homo sapien
cttgtaaggcaaactccctcaacat

SEQ ID NO: 2682394 - DNA, 25 bp, Homo sapien
ctcttgaagaccacataccattgtt

SEQ ID NO: 2682395 - DNA, 25 bp, Homo sapien
tatattaggtggtagtgatctttcc

SEQ ID NO: 2682396 - DNA, 25 bp, Homo sapien
gttgactgacgatgttaaagacttc

SEQ ID NO: 2682397 - DNA, 25 bp, Homo sapien
ctggcctggctgttgattgttgact

SEQ ID NO: 2682398 - DNA, 25 bp, Homo sapien
gacgatgttaaagacttcaccaaca

SEQ ID NO: 2682399 - DNA, 25 bp, Homo sapien
aagtttggtaatgggatctaatgca

SEQ ID NO: 2682400 - DNA, 25 bp, Homo sapien
ttcaaaaacatgaagcagttgggtt

SEQ ID NO: 2682401 - DNA, 25 bp, Homo sapien
tctcaaggttattcaaaatgaagtc

SEQ ID NO: 2682402 - DNA, 25 bp, Homo sapien
ctgcattagataaaatgctgtcttt

SEQ ID NO: 2682403 - DNA, 25 bp, Homo sapien
aaatgctgtctttgccaaggctttt

SEQ ID NO: 2682404 - DNA, 25 bp, Homo sapien
ggttgtcttgagtgcattctattac

SEQ ID NO: 2682405 - DNA, 25 bp, Homo sapien
attccacatgtgtaacagtgaacgg

SEQ ID NO: 2682406 - DNA, 25 bp, Homo sapien
taatgagacaggaattgactttaga

SEQ ID NO: 2682407 - DNA, 25 bp, Homo sapien
gacaggaattgactttagatgtaaa

SEQ ID NO: 2682408 - DNA, 25 bp, Homo sapien
tgcaattcttggctataaaccattt

SEQ ID NO: 2682409 - DNA, 25 bp, Homo sapien
ttctggctgccaaaccgcttcggat

SEQ ID NO: 2682410 - DNA, 25 bp, Homo sapien
ctcaactccttctggtaaatgcaat

SEQ ID NO: 2682411 - DNA, 25 bp, Homo sapien
ggagatttgctctgcaagcctgata

SEQ ID NO: 2682412 - DNA, 25 bp, Homo sapien
aaatacctggtaaatactcatgtgt

SEQ ID NO: 2682413 - DNA, 25 bp, Homo sapien
tactcatgtgttacaaaattagtct

SEQ ID NO: 2682414 - DNA, 25 bp, Homo sapien
taaatacctggtaaatactcatgtg

SEQ ID NO: 2682415 - DNA, 25 bp, Homo sapien
tgtgttacaaaattagtctcttttc

SEQ ID NO: 2682416 - DNA, 25 bp, Homo sapien
taaggagcactgcatgcaggatata

SEQ ID NO: 2682417 - DNA, 25 bp, Homo sapien
aaggagcactgcatgcaggatatat

SEQ ID NO: 2682418 - DNA, 25 bp, Homo sapien
tatgtgcacagctaacttctacagg

SEQ ID NO: 2682419 - DNA, 25 bp, Homo sapien
cttctacaggcctaccaggtacagt

SEQ ID NO: 2682420 - DNA, 25 bp, Homo sapien
gatgcaggctgcttataagctactg

SEQ ID NO: 2682421 - DNA, 25 bp, Homo sapien
tatactactattgctctgaagtcca

SEQ ID NO: 2682422 - DNA, 25 bp, Homo sapien
cttgttatagatggagtgctcccac

SEQ ID NO: 2682423 - DNA, 25 bp, Homo sapien
gatggccttggctctccgaacttta

SEQ ID NO: 2682424 - DNA, 25 bp, Homo sapien
cactgattgtgagagacctaaggcg

SEQ ID NO: 2682425 - DNA, 25 bp, Homo sapien
caaaagctgcaagggatgatactga

SEQ ID NO: 2682426 - DNA, 25 bp, Homo sapien
ccggctgagtcctggtaaactagaa

SEQ ID NO: 2682427 - DNA, 25 bp, Homo sapien
gcaattgtatctgctaaggccatca

SEQ ID NO: 2682428 - DNA, 25 bp, Homo sapien
tgtgaaaggtcaataactctaggct

SEQ ID NO: 2682429 - DNA, 25 bp, Homo sapien
tctccaaagatgagtaacagctatc

SEQ ID NO: 2682430 - DNA, 25 bp, Homo sapien
aattttaacccacattcatcaagag

SEQ ID NO: 2682431 - DNA, 25 bp, Homo sapien
taagaaaggtatggagtcgaacagc

SEQ ID NO: 2682432 - DNA, 25 bp, Homo sapien
tggagtcgaacagccaaaagaaatt

SEQ ID NO: 2682433 - DNA, 25 bp, Homo sapien
tgaaggagttgagctcgataggctg

SEQ ID NO: 2682434 - DNA, 25 bp, Homo sapien
ccagcgttgggtgacagaagcgaga

SEQ ID NO: 2682435 - DNA, 25 bp, Homo sapien
ctccagcgttgggtgacagaagcga

SEQ ID NO: 2682436 - DNA, 25 bp, Homo sapien
cagcgttgggtgacagaagcgagac

SEQ ID NO: 2682437 - DNA, 25 bp, Homo sapien
tccagcgttgggtgacagaagcgag

SEQ ID NO: 2682438 - DNA, 25 bp, Homo sapien
ttaggaatagcactgcaaagactcc

SEQ ID NO: 2682439 - DNA, 25 bp, Homo sapien
aataactgtatcactccaatgagca

SEQ ID NO: 2682440 - DNA, 25 bp, Homo sapien
cactgtgctgatgtatttcggatcc

SEQ ID NO: 2682441 - DNA, 25 bp, Homo sapien
gaaaaaatgcttatggcaaattcca

SEQ ID NO: 2682442 - DNA, 25 bp, Homo sapien
ttctatgcatttgcgtaagatgcgg

SEQ ID NO: 2682443 - DNA, 25 bp, Homo sapien
taagatgcgggtattccggacccac

SEQ ID NO: 2682444 - DNA, 25 bp, Homo sapien
tggctggcaacatgttcagcagttc

SEQ ID NO: 2682445 - DNA, 25 bp, Homo sapien
tcttagttcagaccaagtgggatca

SEQ ID NO: 2682446 - DNA, 25 bp, Homo sapien
acaaaagtgacttacagtggtggct

SEQ ID NO: 2682447 - DNA, 25 bp, Homo sapien
taggactattgcctttcattacaag

SEQ ID NO: 2682448 - DNA, 25 bp, Homo sapien
gaaaggctggcacatatccattgaa

SEQ ID NO: 2682449 - DNA, 25 bp, Homo sapien
caatggatacagagaataataggac

SEQ ID NO: 2682450 - DNA, 25 bp, Homo sapien
tttctataaaaggctgctttagcta

SEQ ID NO: 2682451 - DNA, 25 bp, Homo sapien
ttctataaaaggctgctttagctac

SEQ ID NO: 2682452 - DNA, 25 bp, Homo sapien
aaaatggcagcatctaaaggatcat

SEQ ID NO: 2682453 - DNA, 25 bp, Homo sapien
aatggcagcatctaaaggatcattc

SEQ ID NO: 2682454 - DNA, 25 bp, Homo sapien
aaagctgctttacgccacctctcat

SEQ ID NO: 2682455 - DNA, 25 bp, Homo sapien
caaaattgtgtccaaaaaactgtgt

SEQ ID NO: 2682456 - DNA, 25 bp, Homo sapien
tcaaaattgtgtccaaaaaactgtg

SEQ ID NO: 2682457 - DNA, 25 bp, Homo sapien
tttaaagctgctttacgccacctct

SEQ ID NO: 2682458 - DNA, 25 bp, Homo sapien
ttcactgacaggagaatcgattccc

SEQ ID NO: 2682459 - DNA, 25 bp, Homo sapien
ccaatatgccatgctccgaagaaaa

SEQ ID NO: 2682460 - DNA, 25 bp, Homo sapien
tgcagatgtatcaaattcagactca

SEQ ID NO: 2682461 - DNA, 25 bp, Homo sapien
ccgaagaaaaggatcatgatgcata

SEQ ID NO: 2682462 - DNA, 25 bp, Homo sapien
ggattactggctgataaaacttgat

SEQ ID NO: 2682463 - DNA, 25 bp, Homo sapien
tgtatcagatgatccaaaatgacgt

SEQ ID NO: 2682464 - DNA, 25 bp, Homo sapien
aaaatgtatcagatgatccaaaatg

SEQ ID NO: 2682465 - DNA, 25 bp, Homo sapien
aatgacgtctcagcaaaagaggatg

SEQ ID NO: 2682466 - DNA, 25 bp, Homo sapien
gatgatccaaaatgacgtctcagca

SEQ ID NO: 2682467 - DNA, 25 bp, Homo sapien
attaattgttcctgccagtccactt

SEQ ID NO: 2682468 - DNA, 25 bp, Homo sapien
aaagccaacattgggcagccagctt

SEQ ID NO: 2682469 - DNA, 25 bp, Homo sapien
ttaaattaattgttcctgccagtcc

SEQ ID NO: 2682470 - DNA, 25 bp, Homo sapien
aaattaattgttcctgccagtccac

SEQ ID NO: 2682471 - DNA, 25 bp, Homo sapien
tccagaaaactagaagccctataaa

SEQ ID NO: 2682472 - DNA, 25 bp, Homo sapien
ctagaagccctataaaaaggtcttg

SEQ ID NO: 2682473 - DNA, 25 bp, Homo sapien
gaacagtctttactagtatccagaa

SEQ ID NO: 2682474 - DNA, 25 bp, Homo sapien
actagtatccagaaaactagaagcc

SEQ ID NO: 2682475 - DNA, 25 bp, Homo sapien
tgaggaaccctctgaagaagatcca

SEQ ID NO: 2682476 - DNA, 25 bp, Homo sapien
gcaaaagtcacaagtcctctgaaga

SEQ ID NO: 2682477 - DNA, 25 bp, Homo sapien
ggttggctccagtcaaaagaaagag

SEQ ID NO: 2682478 - DNA, 25 bp, Homo sapien
catgggatccatgaagtatgcagta

SEQ ID NO: 2682479 - DNA, 25 bp, Homo sapien
tggagaatatcatgtgtcagattac

SEQ ID NO: 2682480 - DNA, 25 bp, Homo sapien
tggattggcaactactgttttggca

SEQ ID NO: 2682481 - DNA, 25 bp, Homo sapien
tactaaggtgcaataatggattggc

SEQ ID NO: 2682482 - DNA, 25 bp, Homo sapien
tgttttggcattggctgtacaagca

SEQ ID NO: 2682483 - DNA, 25 bp, Homo sapien
caaagtactgcctatcctagaagga

SEQ ID NO: 2682484 - DNA, 25 bp, Homo sapien
taagataagccagtctacaaccaga

SEQ ID NO: 2682485 - DNA, 25 bp, Homo sapien
actctaccgggtgtaagtaacatga

SEQ ID NO: 2682486 - DNA, 25 bp, Homo sapien
cctgggacatactctcacaaactga

SEQ ID NO: 2682487 - DNA, 25 bp, Homo sapien
gcaaaaggtaactgatacaccacag

SEQ ID NO: 2682488 - DNA, 25 bp, Homo sapien
cagttcttaagcagcaaaaggtaac

SEQ ID NO: 2682489 - DNA, 25 bp, Homo sapien
tacaccacaggtatgctataattag

SEQ ID NO: 2682490 - DNA, 25 bp, Homo sapien
aatatagtttggctaaaatgagcac

SEQ ID NO: 2682491 - DNA, 25 bp, Homo sapien
gtataaaaggcagtaactgaaaggc

SEQ ID NO: 2682492 - DNA, 25 bp, Homo sapien
gaaaggatataaggtataaaaggca

SEQ ID NO: 2682493 - DNA, 25 bp, Homo sapien
ggatataaggtataaaaggcagtaa

SEQ ID NO: 2682494 - DNA, 25 bp, Homo sapien
taaggtataaaaggcagtaactgaa

SEQ ID NO: 2682495 - DNA, 25 bp, Homo sapien
cagcctgataactgacagttcacca

SEQ ID NO: 2682496 - DNA, 25 bp, Homo sapien
tcaccaacggacaggtcactgaaga

SEQ ID NO: 2682497 - DNA, 25 bp, Homo sapien
gctaccacatattctagttacctta

SEQ ID NO: 2682498 - DNA, 25 bp, Homo sapien
gtcactgaagaatatgctaccacat

SEQ ID NO: 2682499 - DNA, 25 bp, Homo sapien
gaaaacacgctaaagtcttcagcag

SEQ ID NO: 2682500 - DNA, 25 bp, Homo sapien
ctccagtagagcatgaaccatgtat

SEQ ID NO: 2682501 - DNA, 25 bp, Homo sapien
caaaggggaacagatgtcagctctc

SEQ ID NO: 2682502 - DNA, 25 bp, Homo sapien
tgtattaaagtaagccctccaacac

SEQ ID NO: 2682503 - DNA, 25 bp, Homo sapien
gaaagtgaagctgctaaagtatgca

SEQ ID NO: 2682504 - DNA, 25 bp, Homo sapien
aaagtgaagctgctaaagtatgcat

SEQ ID NO: 2682505 - DNA, 25 bp, Homo sapien
gaagcagtactgtctgatataccat

SEQ ID NO: 2682506 - DNA, 25 bp, Homo sapien
aatgcttcatctaagcttcctgttt

SEQ ID NO: 2682507 - DNA, 25 bp, Homo sapien
ccattgagctggtgacgtattggga

SEQ ID NO: 2682508 - DNA, 25 bp, Homo sapien
caaagaaggtcgatgaggaagcagt

SEQ ID NO: 2682509 - DNA, 25 bp, Homo sapien
gatacactgctgtgagaatctcaca

SEQ ID NO: 2682510 - DNA, 25 bp, Homo sapien
tgactgggcttcctcgccagaagaa

SEQ ID NO: 2682511 - DNA, 25 bp, Homo sapien
ctcatttagaggatgggccacaatc

SEQ ID NO: 2682512 - DNA, 25 bp, Homo sapien
taggaacatgtgcacctccaccaaa

SEQ ID NO: 2682513 - DNA, 25 bp, Homo sapien
tgggagggctatgagaactgatggc

SEQ ID NO: 2682514 - DNA, 25 bp, Homo sapien
ccactacctggtgggggctaggcat

SEQ ID NO: 2682515 - DNA, 25 bp, Homo sapien
ccatggagaataccactacctggtg

SEQ ID NO: 2682516 - DNA, 25 bp, Homo sapien
ggggctaggcatagcaaagtgcctt

SEQ ID NO: 2682517 - DNA, 25 bp, Homo sapien
tttctatgattagcactgacagtgt

SEQ ID NO: 2682518 - DNA, 25 bp, Homo sapien
tgccctccataattggaaaactaag

SEQ ID NO: 2682519 - DNA, 25 bp, Homo sapien
caatggccggaatcataatatgcaa

SEQ ID NO: 2682520 - DNA, 25 bp, Homo sapien
gaaaactaagattatcacacatggg

SEQ ID NO: 2682521 - DNA, 25 bp, Homo sapien
tagtccaaggcaaatttcatgtgaa

SEQ ID NO: 2682522 - DNA, 25 bp, Homo sapien
aactcaacagagctatggatcctac

SEQ ID NO: 2682523 - DNA, 25 bp, Homo sapien
tctcaagtataaatatagtccaagg

SEQ ID NO: 2682524 - DNA, 25 bp, Homo sapien
aaatatggtcaaaattaatttgcca

SEQ ID NO: 2682525 - DNA, 25 bp, Homo sapien
tctggatcgatagtagtagacatca

SEQ ID NO: 2682526 - DNA, 25 bp, Homo sapien
gccacaacacggttctgtatataag

SEQ ID NO: 2682527 - DNA, 25 bp, Homo sapien
gaagtcactgccctagagtagtact

SEQ ID NO: 2682528 - DNA, 25 bp, Homo sapien
caagcatgttttatggataaggtaa

SEQ ID NO: 2682529 - DNA, 25 bp, Homo sapien
tatagggaggctacaaagtggctga

SEQ ID NO: 2682530 - DNA, 25 bp, Homo sapien
ttagcgatgccacccagtaaacaag

SEQ ID NO: 2682531 - DNA, 25 bp, Homo sapien
aatttacagactcaacaccaggaag

SEQ ID NO: 2682532 - DNA, 25 bp, Homo sapien
cgataaaaactatagctgctgggtg

SEQ ID NO: 2682533 - DNA, 25 bp, Homo sapien
gtgactcctggcttactggtgccga

SEQ ID NO: 2682534 - DNA, 25 bp, Homo sapien
tgcaagacatttttgacggcctaaa

SEQ ID NO: 2682535 - DNA, 25 bp, Homo sapien
cttagctatgaaatagtcccagata

SEQ ID NO: 2682536 - DNA, 25 bp, Homo sapien
tagtcccagatactgagctcaggtg

SEQ ID NO: 2682537 - DNA, 25 bp, Homo sapien
tagaatgttcctggagatggaaatc

SEQ ID NO: 2682538 - DNA, 25 bp, Homo sapien
aatcatattcggctctactttgaga

SEQ ID NO: 2682539 - DNA, 25 bp, Homo sapien
tcctctgaatcatattcggctctac

SEQ ID NO: 2682540 - DNA, 25 bp, Homo sapien
cagactctcctctgaatcatattcg

SEQ ID NO: 2682541 - DNA, 25 bp, Homo sapien
ctgcgaagggataaaaagtcttcaa

SEQ ID NO: 2682542 - DNA, 25 bp, Homo sapien
tgcgaagggataaaaagtcttcaaa

SEQ ID NO: 2682543 - DNA, 25 bp, Homo sapien
gacaaactctcttcggcggtatgac

SEQ ID NO: 2682544 - DNA, 25 bp, Homo sapien
tgtggcgaagaattgcaggacctgc

SEQ ID NO: 2682545 - DNA, 25 bp, Homo sapien
tttagaaccgcatgacaaagaggtg

SEQ ID NO: 2682546 - DNA, 25 bp, Homo sapien
ggtggcccaccatggatttcaagtc

SEQ ID NO: 2682547 - DNA, 25 bp, Homo sapien
tcaccaaatactgccaaagcctctt

SEQ ID NO: 2682548 - DNA, 25 bp, Homo sapien
caccttataagaagcatgtgtgagg

SEQ ID NO: 2682549 - DNA, 25 bp, Homo sapien
acaatgatgggagttgtcaagtccc

SEQ ID NO: 2682550 - DNA, 25 bp, Homo sapien
taaattgctgggaagcacatacact

SEQ ID NO: 2682551 - DNA, 25 bp, Homo sapien
tcagagctactggtgtcagagtact

SEQ ID NO: 2682552 - DNA, 25 bp, Homo sapien
tactggggattgtttcaatgctata

SEQ ID NO: 2682553 - DNA, 25 bp, Homo sapien
gatgtaacatgcaaaatactgggga

SEQ ID NO: 2682554 - DNA, 25 bp, Homo sapien
accacatgacaaagagtaaagatga

SEQ ID NO: 2682555 - DNA, 25 bp, Homo sapien
agagtaaagatgagatgtaacatgc

SEQ ID NO: 2682556 - DNA, 25 bp, Homo sapien
tttggctcctccatcatagaatttt

SEQ ID NO: 2682557 - DNA, 25 bp, Homo sapien
cctccatcatagaatttttgatggt

SEQ ID NO: 2682558 - DNA, 25 bp, Homo sapien
tggctcctccatcatagaatttttg

SEQ ID NO: 2682559 - DNA, 25 bp, Homo sapien
gctcctccatcatagaatttttgat

SEQ ID NO: 2682560 - DNA, 25 bp, Homo sapien
tattctaatctaaagtataacttgc

SEQ ID NO: 2682561 - DNA, 25 bp, Homo sapien
tcagtattcgctgaacattctggct

SEQ ID NO: 2682562 - DNA, 25 bp, Homo sapien
cactgttcaattggaaagttcaaag

SEQ ID NO: 2682563 - DNA, 25 bp, Homo sapien
tcagttgccagatataaagagtcaa

SEQ ID NO: 2682564 - DNA, 25 bp, Homo sapien
tattaacagcaaacgcagtaatgat

SEQ ID NO: 2682565 - DNA, 25 bp, Homo sapien
acagcaaacgcagtaatgatatcag

SEQ ID NO: 2682566 - DNA, 25 bp, Homo sapien
attcttgctttacctccaggatatc

SEQ ID NO: 2682567 - DNA, 25 bp, Homo sapien
cttgctttacctccaggatatccca

SEQ ID NO: 2682568 - DNA, 25 bp, Homo sapien
ggaagcgattgctatgcagtttcta

SEQ ID NO: 2682569 - DNA, 25 bp, Homo sapien
aacatcatgactggaagcgattgct

SEQ ID NO: 2682570 - DNA, 25 bp, Homo sapien
ccaagtgtagacctgtgtggccaga

SEQ ID NO: 2682571 - DNA, 25 bp, Homo sapien
cgattgctatgcagtttctatttgc

SEQ ID NO: 2682572 - DNA, 25 bp, Homo sapien
gagcatgtataaccaagaaatcttc

SEQ ID NO: 2682573 - DNA, 25 bp, Homo sapien
cttgaacagctgttaaatcatcacg

SEQ ID NO: 2682574 - DNA, 25 bp, Homo sapien
gctgttaaatcatcacgagcatgta

SEQ ID NO: 2682575 - DNA, 25 bp, Homo sapien
tcatcacgagcatgtataaccaaga

SEQ ID NO: 2682576 - DNA, 25 bp, Homo sapien
ttggagtgccaggattgctatgtgt

SEQ ID NO: 2682577 - DNA, 25 bp, Homo sapien
gccatggcatgttgattggagtgcc

SEQ ID NO: 2682578 - DNA, 25 bp, Homo sapien
tgtgtactaccaagccatggcatgt

SEQ ID NO: 2682579 - DNA, 25 bp, Homo sapien
gccagtctgtgtactaccaagccat

SEQ ID NO: 2682580 - DNA, 25 bp, Homo sapien
gagaagtcattcttctaacattatt

SEQ ID NO: 2682581 - DNA, 25 bp, Homo sapien
tggatgagaagtcattcttctaaca

SEQ ID NO: 2682582 - DNA, 25 bp, Homo sapien
taaggaagagttggatgagaagtca

SEQ ID NO: 2682583 - DNA, 25 bp, Homo sapien
agagttggatgagaagtcattcttc

SEQ ID NO: 2682584 - DNA, 25 bp, Homo sapien
gccaccagatcgaaaacaggttatt

SEQ ID NO: 2682585 - DNA, 25 bp, Homo sapien
cttatttccctgatagttaaatctc

SEQ ID NO: 2682586 - DNA, 25 bp, Homo sapien
tcttgtaactcttgaattgccacca

SEQ ID NO: 2682587 - DNA, 25 bp, Homo sapien
gatagttaaatctcattcttgtaac

SEQ ID NO: 2682588 - DNA, 25 bp, Homo sapien
ccactaagggaggtattcttgatac

SEQ ID NO: 2682589 - DNA, 25 bp, Homo sapien
tcccagggtgaacataaagagaaca

SEQ ID NO: 2682590 - DNA, 25 bp, Homo sapien
taattccgctatgggagctcagggc

SEQ ID NO: 2682591 - DNA, 25 bp, Homo sapien
tatttatccttaccctcagtgtgac

SEQ ID NO: 2682592 - DNA, 25 bp, Homo sapien
taaatatccatcagcatcaactatt

SEQ ID NO: 2682593 - DNA, 25 bp, Homo sapien
taacagtaccagctataggatgtcc

SEQ ID NO: 2682594 - DNA, 25 bp, Homo sapien
gacagaatcttacagcaaagtgact

SEQ ID NO: 2682595 - DNA, 25 bp, Homo sapien
gaaaagggctctagtaatccacaag

SEQ ID NO: 2682596 - DNA, 25 bp, Homo sapien
gacgcattggtctggtaatcattct

SEQ ID NO: 2682597 - DNA, 25 bp, Homo sapien
gctgttttgttatgacactgccaag

SEQ ID NO: 2682598 - DNA, 25 bp, Homo sapien
gaactaacgaagacaaaatcattgg

SEQ ID NO: 2682599 - DNA, 25 bp, Homo sapien
ccagctgtagctatcagagaggagg

SEQ ID NO: 2682600 - DNA, 25 bp, Homo sapien
ctattgtcagttgaaagaccagctg

SEQ ID NO: 2682601 - DNA, 25 bp, Homo sapien
caagagtatcccacaaacatacgtt

SEQ ID NO: 2682602 - DNA, 25 bp, Homo sapien
tggactaaactattggcaggtgcta

SEQ ID NO: 2682603 - DNA, 25 bp, Homo sapien
ttggcaggtgctacaagagtatccc

SEQ ID NO: 2682604 - DNA, 25 bp, Homo sapien
catggactaaactattggcaggtgc

SEQ ID NO: 2682605 - DNA, 25 bp, Homo sapien
aaaagctgcctctgttgtcgttgac

SEQ ID NO: 2682606 - DNA, 25 bp, Homo sapien
gccttcggcagatcctgtaacaaag

SEQ ID NO: 2682607 - DNA, 25 bp, Homo sapien
gctccactgtcatggcaggtaaatg

SEQ ID NO: 2682608 - DNA, 25 bp, Homo sapien
caacagcaacggctttaacaggaga

SEQ ID NO: 2682609 - DNA, 25 bp, Homo sapien
tgtagatgttgtggcatcaactgtg

SEQ ID NO: 2682610 - DNA, 25 bp, Homo sapien
cattttgtagatgttgtggcatcaa

SEQ ID NO: 2682611 - DNA, 25 bp, Homo sapien
tcattttgtagatgttgtggcatca

SEQ ID NO: 2682612 - DNA, 25 bp, Homo sapien
tttgtagatgttgtggcatcaactg

SEQ ID NO: 2682613 - DNA, 25 bp, Homo sapien
ggagtgagacccagcaatttgcata

SEQ ID NO: 2682614 - DNA, 25 bp, Homo sapien
gcactgctgactacaaaggaattaa

SEQ ID NO: 2682615 - DNA, 25 bp, Homo sapien
tgaaaaactggcgagcaatgtggga

SEQ ID NO: 2682616 - DNA, 25 bp, Homo sapien
tggactctgaaaaggactgctaaag

SEQ ID NO: 2682617 - DNA, 25 bp, Homo sapien
agtacaaactaaagaaccaatctag

SEQ ID NO: 2682618 - DNA, 25 bp, Homo sapien
aaaagaaccgacttaactatggcat

SEQ ID NO: 2682619 - DNA, 25 bp, Homo sapien
ctaaagaaccaatctaggccaggtg

SEQ ID NO: 2682620 - DNA, 25 bp, Homo sapien
tatggcatattctaaactagagagt

SEQ ID NO: 2682621 - DNA, 25 bp, Homo sapien
aaacggaaaattagggttgatgatg

SEQ ID NO: 2682622 - DNA, 25 bp, Homo sapien
caaacggaaaattagggttgatgat

SEQ ID NO: 2682623 - DNA, 25 bp, Homo sapien
catgttcactgacaaaagtatggag

SEQ ID NO: 2682624 - DNA, 25 bp, Homo sapien
gaccaaaggtagagagactccaaat

SEQ ID NO: 2682625 - DNA, 25 bp, Homo sapien
tctaaaaatggactgccgagcatgt

SEQ ID NO: 2682626 - DNA, 25 bp, Homo sapien
tcaacacttcatttaaagggctaaa

SEQ ID NO: 2682627 - DNA, 25 bp, Homo sapien
tctggtggcaatagttgttatggca

SEQ ID NO: 2682628 - DNA, 25 bp, Homo sapien
tacatacatacaacttgggttccgg

SEQ ID NO: 2682629 - DNA, 25 bp, Homo sapien
tactgaaaaccttacatattgagcc

SEQ ID NO: 2682630 - DNA, 25 bp, Homo sapien
tcagtgcatcaagggcaaagctcca

SEQ ID NO: 2682631 - DNA, 25 bp, Homo sapien
tctccatggcaaaatagtcgcatat

SEQ ID NO: 2682632 - DNA, 25 bp, Homo sapien
taaacacttagtcccatctgcctgt

SEQ ID NO: 2682633 - DNA, 25 bp, Homo sapien
taatttccaagataatcgttgccca

SEQ ID NO: 2682634 - DNA, 25 bp, Homo sapien
tattgcacgatttataggtacaggt

SEQ ID NO: 2682635 - DNA, 25 bp, Homo sapien
tgtggtccctgccatatgacattta

SEQ ID NO: 2682636 - DNA, 25 bp, Homo sapien
taattcacacccagataactttgcc

SEQ ID NO: 2682637 - DNA, 25 bp, Homo sapien
agatcacttccaccctaaggttgta

SEQ ID NO: 2682638 - DNA, 25 bp, Homo sapien
tctctttgtatacagggacactgac

SEQ ID NO: 2682639 - DNA, 25 bp, Homo sapien
ctgggtcctcgatgatcactttctt

SEQ ID NO: 2682640 - DNA, 25 bp, Homo sapien
tctgggtcctcgatgatcactttct

SEQ ID NO: 2682641 - DNA, 25 bp, Homo sapien
tgggtcctcgatgatcactttcttc

SEQ ID NO: 2682642 - DNA, 25 bp, Homo sapien
gaccttagccaagcgcgggttagag

SEQ ID NO: 2682643 - DNA, 25 bp, Homo sapien
tctcggtggctcacgggttcccgcg

SEQ ID NO: 2682644 - DNA, 25 bp, Homo sapien
gcgagctgggctgtttggcggcgcc

SEQ ID NO: 2682645 - DNA, 25 bp, Homo sapien
cgagttctctgctctctcggtggct

SEQ ID NO: 2682646 - DNA, 25 bp, Homo sapien
cacaacacattcaatatctaaggga

SEQ ID NO: 2682647 - DNA, 25 bp, Homo sapien
gaatgccagaggcaattaatgtgta

SEQ ID NO: 2682648 - DNA, 25 bp, Homo sapien
aacaattacttgtgggcccctgtag

SEQ ID NO: 2682649 - DNA, 25 bp, Homo sapien
gagtaggtggtagtctacttcccta

SEQ ID NO: 2682650 - DNA, 25 bp, Homo sapien
gggactccttcttatcaacagacat

SEQ ID NO: 2682651 - DNA, 25 bp, Homo sapien
cttcagggactccttcttatcaaca

SEQ ID NO: 2682652 - DNA, 25 bp, Homo sapien
cagggactccttcttatcaacagac

SEQ ID NO: 2682653 - DNA, 25 bp, Homo sapien
tcagggactccttcttatcaacaga

SEQ ID NO: 2682654 - DNA, 25 bp, Homo sapien
gggaagtctcaagtactggcaaaac

SEQ ID NO: 2682655 - DNA, 25 bp, Homo sapien
ttccatggcccctattagaatgata

SEQ ID NO: 2682656 - DNA, 25 bp, Homo sapien
catttccctaatggtaaggctgaaa

SEQ ID NO: 2682657 - DNA, 25 bp, Homo sapien
tatgatcagtagcaaacctttatta

SEQ ID NO: 2682658 - DNA, 25 bp, Homo sapien
gggttctcacaaatacaagatgaca

SEQ ID NO: 2682659 - DNA, 25 bp, Homo sapien
cagctacacaaaaggttgaggcgag

SEQ ID NO: 2682660 - DNA, 25 bp, Homo sapien
ccagaattgcaatgaacagtcgggc

SEQ ID NO: 2682661 - DNA, 25 bp, Homo sapien
tgacacatctcacactccatgaggt

SEQ ID NO: 2682662 - DNA, 25 bp, Homo sapien
tctaggcatatcagcacagtagcca

SEQ ID NO: 2682663 - DNA, 25 bp, Homo sapien
tttggtccctctggcaaagttctat

SEQ ID NO: 2682664 - DNA, 25 bp, Homo sapien
ccataaagagatgcaaggaagtaat

SEQ ID NO: 2682665 - DNA, 25 bp, Homo sapien
gtagccaactgacggaaaaaattgc

SEQ ID NO: 2682666 - DNA, 25 bp, Homo sapien
tggaagctatcctagtaaggcacag

SEQ ID NO: 2682667 - DNA, 25 bp, Homo sapien
gctgcaaactaaggaggaatgctgt

SEQ ID NO: 2682668 - DNA, 25 bp, Homo sapien
catctgaactggctcctaaagggta

SEQ ID NO: 2682669 - DNA, 25 bp, Homo sapien
taaagggtaggctaatgatgtccag

SEQ ID NO: 2682670 - DNA, 25 bp, Homo sapien
agaattcaaacccagtacggcccat

SEQ ID NO: 2682671 - DNA, 25 bp, Homo sapien
gagcaaatcaatcgcttccggtcct

SEQ ID NO: 2682672 - DNA, 25 bp, Homo sapien
tcccggtgagccctgcaggcatttt

SEQ ID NO: 2682673 - DNA, 25 bp, Homo sapien
ttcctggcattctgtgagcaaatca

SEQ ID NO: 2682674 - DNA, 25 bp, Homo sapien
gctgggttagccaagccacctgtaa

SEQ ID NO: 2682675 - DNA, 25 bp, Homo sapien
gcacaacattcccaaccagagagta

SEQ ID NO: 2682676 - DNA, 25 bp, Homo sapien
tatcgtagaaagatcgctcaagcca

SEQ ID NO: 2682677 - DNA, 25 bp, Homo sapien
gaggactaggcatcatattcaggta

SEQ ID NO: 2682678 - DNA, 25 bp, Homo sapien
gccaaaaggtatagcttgttctcca

SEQ ID NO: 2682679 - DNA, 25 bp, Homo sapien
ttgccaaaaggtatagcttgttctc

SEQ ID NO: 2682680 - DNA, 25 bp, Homo sapien
caaaaggtatagcttgttctccacg

SEQ ID NO: 2682681 - DNA, 25 bp, Homo sapien
agttttgccaaaaggtatagcttgt

SEQ ID NO: 2682682 - DNA, 25 bp, Homo sapien
gcaccttagaattgaaacacgatgg

SEQ ID NO: 2682683 - DNA, 25 bp, Homo sapien
ggtgtctgcaaaactctggcttgtt

SEQ ID NO: 2682684 - DNA, 25 bp, Homo sapien
catgtgcagactccaaaggacagta

SEQ ID NO: 2682685 - DNA, 25 bp, Homo sapien
gactgtagtattatctgtgcacctg

SEQ ID NO: 2682686 - DNA, 25 bp, Homo sapien
cctctggcggtgtcatttgagtccc

SEQ ID NO: 2682687 - DNA, 25 bp, Homo sapien
tgagcacttaccacttactatgagc

SEQ ID NO: 2682688 - DNA, 25 bp, Homo sapien
gagccaggcattgaactaagtattt

SEQ ID NO: 2682689 - DNA, 25 bp, Homo sapien
tgagtcccggtgtatgtcattaagc

SEQ ID NO: 2682690 - DNA, 25 bp, Homo sapien
ggtcgagatgcgaggatcacttgaa

SEQ ID NO: 2682691 - DNA, 25 bp, Homo sapien
ttagtctggagtaggcctgaggcac

SEQ ID NO: 2682692 - DNA, 25 bp, Homo sapien
tgtgcagccaagtgtgagaatctct

SEQ ID NO: 2682693 - DNA, 25 bp, Homo sapien
tgcattgtatctctccacactaggg

SEQ ID NO: 2682694 - DNA, 25 bp, Homo sapien
ctttttattatcttgccgggtggct

SEQ ID NO: 2682695 - DNA, 25 bp, Homo sapien
caggcatatacattgctctggcatt

SEQ ID NO: 2682696 - DNA, 25 bp, Homo sapien
gaaatcggaaccaggaggtgcacca

SEQ ID NO: 2682697 - DNA, 25 bp, Homo sapien
caataaatttatggactacaggaag

SEQ ID NO: 2682698 - DNA, 25 bp, Homo sapien
tgaggactagaacaggccatgggat

SEQ ID NO: 2682699 - DNA, 25 bp, Homo sapien
gaggcccttggagagaacagttatt

SEQ ID NO: 2682700 - DNA, 25 bp, Homo sapien
ggatgatgccaactactactgagag

SEQ ID NO: 2682701 - DNA, 25 bp, Homo sapien
tagggaccctgaaccaatgaatctg

SEQ ID NO: 2682702 - DNA, 25 bp, Homo sapien
tttatgcccctgttccccactggga

SEQ ID NO: 2682703 - DNA, 25 bp, Homo sapien
gacaagtctcaacaagtctcaggta

SEQ ID NO: 2682704 - DNA, 25 bp, Homo sapien
tgatttgctaacagaagcccacatg

SEQ ID NO: 2682705 - DNA, 25 bp, Homo sapien
ggagttttactgcagaagcccattc

SEQ ID NO: 2682706 - DNA, 25 bp, Homo sapien
aatagaggctgccaatcaggaggcg

SEQ ID NO: 2682707 - DNA, 25 bp, Homo sapien
aaagcgcctggaatgatgatatgca

SEQ ID NO: 2682708 - DNA, 25 bp, Homo sapien
ctgcggctggccagtaatgcaatct

SEQ ID NO: 2682709 - DNA, 25 bp, Homo sapien
ggcatagcagagaggatatcccatg

SEQ ID NO: 2682710 - DNA, 25 bp, Homo sapien
gcatggtccatgtctagacaaggct

SEQ ID NO: 2682711 - DNA, 25 bp, Homo sapien
tggtccatgtctagacaaggctggg

SEQ ID NO: 2682712 - DNA, 25 bp, Homo sapien
tggacatggacttgcatggtccatg

SEQ ID NO: 2682713 - DNA, 25 bp, Homo sapien
ggacatggacttgcatggtccatgt

SEQ ID NO: 2682714 - DNA, 25 bp, Homo sapien
gccttgcacagcacaggatttcccc

SEQ ID NO: 2682715 - DNA, 25 bp, Homo sapien
ataaaggaggccttgcacagcacag

SEQ ID NO: 2682716 - DNA, 25 bp, Homo sapien
tgcacagcacaggatttccccaaac

SEQ ID NO: 2682717 - DNA, 25 bp, Homo sapien
cttgcacagcacaggatttccccaa

SEQ ID NO: 2682718 - DNA, 25 bp, Homo sapien
ggacagggctgagaggagaggccat

SEQ ID NO: 2682719 - DNA, 25 bp, Homo sapien
aataggacagggctgagaggagagg

SEQ ID NO: 2682720 - DNA, 25 bp, Homo sapien
ctgcacaataggacagggctgagag

SEQ ID NO: 2682721 - DNA, 25 bp, Homo sapien
taggacagggctgagaggagaggcc

SEQ ID NO: 2682722 - DNA, 25 bp, Homo sapien
gagaggttaagcagcatattcagca

SEQ ID NO: 2682723 - DNA, 25 bp, Homo sapien
gttaagcagcatattcagcaggacc

SEQ ID NO: 2682724 - DNA, 25 bp, Homo sapien
agtgggtggcaatcccagtttccaa

SEQ ID NO: 2682725 - DNA, 25 bp, Homo sapien
aagtgggtggcaatcccagtttcca

SEQ ID NO: 2682726 - DNA, 25 bp, Homo sapien
tctgcggccaccttatctggtactt

SEQ ID NO: 2682727 - DNA, 25 bp, Homo sapien
agcccctgagagtgcaactggcatt

SEQ ID NO: 2682728 - DNA, 25 bp, Homo sapien
gcaactggcattggcagtcatggag

SEQ ID NO: 2682729 - DNA, 25 bp, Homo sapien
taagctgtcattagggaagtctgcg

SEQ ID NO: 2682730 - DNA, 25 bp, Homo sapien
aggaatatagttggctcttggcctt

SEQ ID NO: 2682731 - DNA, 25 bp, Homo sapien
cagcagaagcgcagggctaatctgt

SEQ ID NO: 2682732 - DNA, 25 bp, Homo sapien
tggcctttttcttggtgggcacaac

SEQ ID NO: 2682733 - DNA, 25 bp, Homo sapien
atctgtccaggcctagcttcgtgaa

SEQ ID NO: 2682734 - DNA, 25 bp, Homo sapien
aacaggaagtctaacgtttcaacat

SEQ ID NO: 2682735 - DNA, 25 bp, Homo sapien
acaggaagtctaacgtttcaacatg

SEQ ID NO: 2682736 - DNA, 25 bp, Homo sapien
aagcagaaacaggaagtctaacgtt

SEQ ID NO: 2682737 - DNA, 25 bp, Homo sapien
cagaaacaggaagtctaacgtttca

SEQ ID NO: 2682738 - DNA, 25 bp, Homo sapien
agtttcagcattttctccccgtgtg

SEQ ID NO: 2682739 - DNA, 25 bp, Homo sapien
tagtttcagcattttctccccgtgt

SEQ ID NO: 2682740 - DNA, 25 bp, Homo sapien
ctagtttcagcattttctccccgtg

SEQ ID NO: 2682741 - DNA, 25 bp, Homo sapien
tgtcctacagttaataaacgcatgg

SEQ ID NO: 2682742 - DNA, 25 bp, Homo sapien
cactgggaaccagaggtgtcctaca

SEQ ID NO: 2682743 - DNA, 25 bp, Homo sapien
ggttgccccacggtgttaccactgc

SEQ ID NO: 2682744 - DNA, 25 bp, Homo sapien
ttaccactgctaccagaccactggg

SEQ ID NO: 2682745 - DNA, 25 bp, Homo sapien
gttgatgtttattgcccacacctag

SEQ ID NO: 2682746 - DNA, 25 bp, Homo sapien
actgccttagtacctggaaggtgcc

SEQ ID NO: 2682747 - DNA, 25 bp, Homo sapien
tccaagagcagggatttctatctgc

SEQ ID NO: 2682748 - DNA, 25 bp, Homo sapien
cctagaatatcagctctccaagagc

SEQ ID NO: 2682749 - DNA, 25 bp, Homo sapien
tgcggctccgcagacagcaaactgc

SEQ ID NO: 2682750 - DNA, 25 bp, Homo sapien
ctgcggctccgcagacagcaaactg

SEQ ID NO: 2682751 - DNA, 25 bp, Homo sapien
gcggctccgcagacagcaaactgca

SEQ ID NO: 2682752 - DNA, 25 bp, Homo sapien
cggctccgcagacagcaaactgcat

SEQ ID NO: 2682753 - DNA, 25 bp, Homo sapien
gagggtagcccgaaagcctcctctc

SEQ ID NO: 2682754 - DNA, 25 bp, Homo sapien
agcagggccatgtctggcctgtctg

SEQ ID NO: 2682755 - DNA, 25 bp, Homo sapien
cagagggtagcccgaaagcctcctc

SEQ ID NO: 2682756 - DNA, 25 bp, Homo sapien
aggccagagggtagcccgaaagcct

SEQ ID NO: 2682757 - DNA, 25 bp, Homo sapien
agcccaaggatgcacaactgatcaa

SEQ ID NO: 2682758 - DNA, 25 bp, Homo sapien
gagcccaaggatgcacaactgatca

SEQ ID NO: 2682759 - DNA, 25 bp, Homo sapien
tctttcttgtacagtaaaagccaca

SEQ ID NO: 2682760 - DNA, 25 bp, Homo sapien
ttgctgctggctttacaacattccc

SEQ ID NO: 2682761 - DNA, 25 bp, Homo sapien
taaaagccacaacggatgtaacatc

SEQ ID NO: 2682762 - DNA, 25 bp, Homo sapien
gctggctttacaacattcccaacac

SEQ ID NO: 2682763 - DNA, 25 bp, Homo sapien
cctctattcggtgaactaaggccat

SEQ ID NO: 2682764 - DNA, 25 bp, Homo sapien
caggagtcactgagcttccttcatg

SEQ ID NO: 2682765 - DNA, 25 bp, Homo sapien
cacaataccccgacatctggatgtc

SEQ ID NO: 2682766 - DNA, 25 bp, Homo sapien
ttccttcatgtgcaccgctcccaca

SEQ ID NO: 2682767 - DNA, 25 bp, Homo sapien
caagaattttcgtggactctgacat

SEQ ID NO: 2682768 - DNA, 25 bp, Homo sapien
actctgacatgggtctgaataatgc

SEQ ID NO: 2682769 - DNA, 25 bp, Homo sapien
gataaagtcaaaaccttcttcatgt

SEQ ID NO: 2682770 - DNA, 25 bp, Homo sapien
gctggtgctggttccgcagctctaa

SEQ ID NO: 2682771 - DNA, 25 bp, Homo sapien
taagaactaacatccggcactggac

SEQ ID NO: 2682772 - DNA, 25 bp, Homo sapien
catcctcggattggaaactttgttt

SEQ ID NO: 2682773 - DNA, 25 bp, Homo sapien
tagactaataaatcccagatgggaa

SEQ ID NO: 2682774 - DNA, 25 bp, Homo sapien
ttaagttaagaactaacatccggca

SEQ ID NO: 2682775 - DNA, 25 bp, Homo sapien
tgatgaatcatgacaccctgtgtgg

SEQ ID NO: 2682776 - DNA, 25 bp, Homo sapien
tgttagttgtctttgaggcagctcc

SEQ ID NO: 2682777 - DNA, 25 bp, Homo sapien
tctatgagttcatgcgagagctggt

SEQ ID NO: 2682778 - DNA, 25 bp, Homo sapien
caaaatcatgaatgtgcgcccacac

SEQ ID NO: 2682779 - DNA, 25 bp, Homo sapien
tacagtgatgcggtcaagagttgct

SEQ ID NO: 2682780 - DNA, 25 bp, Homo sapien
gagatggtatatcagcctccaacct

SEQ ID NO: 2682781 - DNA, 25 bp, Homo sapien
catgattttagttctgaggtcccca

SEQ ID NO: 2682782 - DNA, 25 bp, Homo sapien
tactcgtagtcttaaccaaattggc

SEQ ID NO: 2682783 - DNA, 25 bp, Homo sapien
ggaactcccaccttttgtgtcaaga

SEQ ID NO: 2682784 - DNA, 25 bp, Homo sapien
taatttacttcttagccccagtgaa

SEQ ID NO: 2682785 - DNA, 25 bp, Homo sapien
ccccagtgaataatggtccagtaca

SEQ ID NO: 2682786 - DNA, 25 bp, Homo sapien
aacaaactattaccgcccgcctgat

SEQ ID NO: 2682787 - DNA, 25 bp, Homo sapien
ctccctcaccagtcacaagtggctt

SEQ ID NO: 2682788 - DNA, 25 bp, Homo sapien
gctccctcaccagtcacaagtggct

SEQ ID NO: 2682789 - DNA, 25 bp, Homo sapien
tgctccctcaccagtcacaagtggc

SEQ ID NO: 2682790 - DNA, 25 bp, Homo sapien
gctgatatgtataccttgcactcag

SEQ ID NO: 2682791 - DNA, 25 bp, Homo sapien
tgagtcaggagctgctgatatgtat

SEQ ID NO: 2682792 - DNA, 25 bp, Homo sapien
taatctcagacttatggggagatac

SEQ ID NO: 2682793 - DNA, 25 bp, Homo sapien
atcctgagtcaggagctgctgatat

SEQ ID NO: 2682794 - DNA, 25 bp, Homo sapien
gccaccgaaagggtaacagactgca

SEQ ID NO: 2682795 - DNA, 25 bp, Homo sapien
ttccgaaagtcacagttaacttcat

SEQ ID NO: 2682796 - DNA, 25 bp, Homo sapien
taacagactgcacccttccgaaagt

SEQ ID NO: 2682797 - DNA, 25 bp, Homo sapien
ctcgccaccgaaagggtaacagact

SEQ ID NO: 2682798 - DNA, 25 bp, Homo sapien
aattggctgagaggaagtcccctta

SEQ ID NO: 2682799 - DNA, 25 bp, Homo sapien
gatagaataaagaagccggacagcc

SEQ ID NO: 2682800 - DNA, 25 bp, Homo sapien
ctcattcagtatagccccgggcgag

SEQ ID NO: 2682801 - DNA, 25 bp, Homo sapien
gctgcagttactccaaagggccttc

SEQ ID NO: 2682802 - DNA, 25 bp, Homo sapien
atcgcgtgtcagctgggcggcggga

SEQ ID NO: 2682803 - DNA, 25 bp, Homo sapien
ctgcaagagtgacgaatcgcgtgtc

SEQ ID NO: 2682804 - DNA, 25 bp, Homo sapien
agagtgacgaatcgcgtgtcagctg

SEQ ID NO: 2682805 - DNA, 25 bp, Homo sapien
caagagtgacgaatcgcgtgtcagc

SEQ ID NO: 2682806 - DNA, 25 bp, Homo sapien
tctggtgcagggattttcaggggga

SEQ ID NO: 2682807 - DNA, 25 bp, Homo sapien
ctgcagcgaaatccgcacacgacgg

SEQ ID NO: 2682808 - DNA, 25 bp, Homo sapien
atccgcacacgacggaaaataaaag

SEQ ID NO: 2682809 - DNA, 25 bp, Homo sapien
cagcgaaatccgcacacgacggaaa

SEQ ID NO: 2682810 - DNA, 25 bp, Homo sapien
tgtactcggacgagccgcaagttcg

SEQ ID NO: 2682811 - DNA, 25 bp, Homo sapien
tactcggacgagccgcaagttcgct

SEQ ID NO: 2682812 - DNA, 25 bp, Homo sapien
gtactcggacgagccgcaagttcgc

SEQ ID NO: 2682813 - DNA, 25 bp, Homo sapien
atgtactcggacgagccgcaagttc

SEQ ID NO: 2682814 - DNA, 25 bp, Homo sapien
tggattcttctgcttcggagtgcat

SEQ ID NO: 2682815 - DNA, 25 bp, Homo sapien
aattcctccgcagaacttggccggc

SEQ ID NO: 2682816 - DNA, 25 bp, Homo sapien
caaattcctccgcagaacttggccg

SEQ ID NO: 2682817 - DNA, 25 bp, Homo sapien
ccaaattcctccgcagaacttggcc

SEQ ID NO: 2682818 - DNA, 25 bp, Homo sapien
aaattcctccgcagaacttggccgg

SEQ ID NO: 2682819 - DNA, 25 bp, Homo sapien
tggctgaactaggtccgacttttcc

SEQ ID NO: 2682820 - DNA, 25 bp, Homo sapien
tgggctggctgaactaggtccgact

SEQ ID NO: 2682821 - DNA, 25 bp, Homo sapien
ttagtgggctggctgaactaggtcc

SEQ ID NO: 2682822 - DNA, 25 bp, Homo sapien
ggctggctgaactaggtccgacttt

SEQ ID NO: 2682823 - DNA, 25 bp, Homo sapien
aagtggggctctttcgtttccagag

SEQ ID NO: 2682824 - DNA, 25 bp, Homo sapien
agggatcccgctttcagtctttctg

SEQ ID NO: 2682825 - DNA, 25 bp, Homo sapien
agcccttttccaagcacattttgca

SEQ ID NO: 2682826 - DNA, 25 bp, Homo sapien
tcttccagggatcccgctttcagtc

SEQ ID NO: 2682827 - DNA, 25 bp, Homo sapien
cggaaacatatagcgtttctaattt

SEQ ID NO: 2682828 - DNA, 25 bp, Homo sapien
tagccggaaacatatagcgtttcta

SEQ ID NO: 2682829 - DNA, 25 bp, Homo sapien
ttagccggaaacatatagcgtttct

SEQ ID NO: 2682830 - DNA, 25 bp, Homo sapien
gccggaaacatatagcgtttctaat

SEQ ID NO: 2682831 - DNA, 25 bp, Homo sapien
ttcaagggctcttcctaactggtgt

SEQ ID NO: 2682832 - DNA, 25 bp, Homo sapien
gtctaccaaatggagaaatgatggg

SEQ ID NO: 2682833 - DNA, 25 bp, Homo sapien
ggctcttcctaactggtgtctacca

SEQ ID NO: 2682834 - DNA, 25 bp, Homo sapien
gaagaggacaagtttcaagggctct

SEQ ID NO: 2682835 - DNA, 25 bp, Homo sapien
atagctcgcttcatcgacatctgag

SEQ ID NO: 2682836 - DNA, 25 bp, Homo sapien
gctggcctccaaggacttagattca

SEQ ID NO: 2682837 - DNA, 25 bp, Homo sapien
gacatctgagtggtggtagctaacc

SEQ ID NO: 2682838 - DNA, 25 bp, Homo sapien
tacagcgtatcaggcatgaagcatc

SEQ ID NO: 2682839 - DNA, 25 bp, Homo sapien
tctttgtgaaatagcaggcctggtg

SEQ ID NO: 2682840 - DNA, 25 bp, Homo sapien
gcaagtgccaatgtcctagaatggg

SEQ ID NO: 2682841 - DNA, 25 bp, Homo sapien
cctggtgaggcatgagagtaagaac

SEQ ID NO: 2682842 - DNA, 25 bp, Homo sapien
tctgcagtaggaatgacacctgttc

SEQ ID NO: 2682843 - DNA, 25 bp, Homo sapien
tgtgatgccctgaaccaaaaactct

SEQ ID NO: 2682844 - DNA, 25 bp, Homo sapien
gaagcaggagtctactggacagtcc

SEQ ID NO: 2682845 - DNA, 25 bp, Homo sapien
cagaggaggtgctatctcagttaac

SEQ ID NO: 2682846 - DNA, 25 bp, Homo sapien
gcctggctgcgtaggccacatgaaa

SEQ ID NO: 2682847 - DNA, 25 bp, Homo sapien
gctaagtgactacctgacaaatgaa

SEQ ID NO: 2682848 - DNA, 25 bp, Homo sapien
gaagtcatgtagtgtacctggcaca

SEQ ID NO: 2682849 - DNA, 25 bp, Homo sapien
ctacaagactgatgggaagcaactt

SEQ ID NO: 2682850 - DNA, 25 bp, Homo sapien
aaatgctatttcaagtggaccacag

SEQ ID NO: 2682851 - DNA, 25 bp, Homo sapien
gacgctactgttggacaagaaatgc

SEQ ID NO: 2682852 - DNA, 25 bp, Homo sapien
tataggcaacgaacaagtgcttctc

SEQ ID NO: 2682853 - DNA, 25 bp, Homo sapien
actgatgttgggtcatagtaaccac

SEQ ID NO: 2682854 - DNA, 25 bp, Homo sapien
cacagtccaatgcagggtatattct

SEQ ID NO: 2682855 - DNA, 25 bp, Homo sapien
ttgggaaacaaccacacgtccagtc

SEQ ID NO: 2682856 - DNA, 25 bp, Homo sapien
gcattttggataagcgatacgctac

SEQ ID NO: 2682857 - DNA, 25 bp, Homo sapien
tatacctgggacctcctaaaatcag

SEQ ID NO: 2682858 - DNA, 25 bp, Homo sapien
gatcacatagcccaaaacgcaggca

SEQ ID NO: 2682859 - DNA, 25 bp, Homo sapien
tccatcccaggatctttgctggaat

SEQ ID NO: 2682860 - DNA, 25 bp, Homo sapien
tgctggaatctctcttcccctgaaa

SEQ ID NO: 2682861 - DNA, 25 bp, Homo sapien
ttctccatcccaggatctttgctgg

SEQ ID NO: 2682862 - DNA, 25 bp, Homo sapien
catcccaggatctttgctggaatct

SEQ ID NO: 2682863 - DNA, 25 bp, Homo sapien
ttaacgtagggatcacaacatgacc

SEQ ID NO: 2682864 - DNA, 25 bp, Homo sapien
gctgagctagaaggcgtccaactct

SEQ ID NO: 2682865 - DNA, 25 bp, Homo sapien
gatgcaaagagctacagccctctgt

SEQ ID NO: 2682866 - DNA, 25 bp, Homo sapien
gctaccccgcattgaaatgatcagg

SEQ ID NO: 2682867 - DNA, 25 bp, Homo sapien
cccccagataaagcaactcctcgaa

SEQ ID NO: 2682868 - DNA, 25 bp, Homo sapien
gcagaatcccacttcttagagcctg

SEQ ID NO: 2682869 - DNA, 25 bp, Homo sapien
aatcccacttcttagagcctgcctg

SEQ ID NO: 2682870 - DNA, 25 bp, Homo sapien
gctgcagaatcccacttcttagagc

SEQ ID NO: 2682871 - DNA, 25 bp, Homo sapien
aaagagacaggggaatggcctctat

SEQ ID NO: 2682872 - DNA, 25 bp, Homo sapien
ctaggaaaaagagacaggggaatgg

SEQ ID NO: 2682873 - DNA, 25 bp, Homo sapien
taggaaaaagagacaggggaatggc

SEQ ID NO: 2682874 - DNA, 25 bp, Homo sapien
agacaggggaatggcctctatactg

SEQ ID NO: 2682875 - DNA, 25 bp, Homo sapien
tcacaggagtggaccttcttactac

SEQ ID NO: 2682876 - DNA, 25 bp, Homo sapien
ctcacaggagtggaccttcttacta

SEQ ID NO: 2682877 - DNA, 25 bp, Homo sapien
caggagtggaccttcttactacatc

SEQ ID NO: 2682878 - DNA, 25 bp, Homo sapien
cacaggagtggaccttcttactaca

SEQ ID NO: 2682879 - DNA, 25 bp, Homo sapien
tgggagtataaccaagaaatcttac

SEQ ID NO: 2682880 - DNA, 25 bp, Homo sapien
caaagtgccacccttattgggagta

SEQ ID NO: 2682881 - DNA, 25 bp, Homo sapien
ctgtccctggtaaaactcctctggc

SEQ ID NO: 2682882 - DNA, 25 bp, Homo sapien
tctggccaaagtgccacccttattg

SEQ ID NO: 2682883 - DNA, 25 bp, Homo sapien
tacaagacaggcagtcaggtaaacc

SEQ ID NO: 2682884 - DNA, 25 bp, Homo sapien
tcatctgcaaatgggactaccaaga

SEQ ID NO: 2682885 - DNA, 25 bp, Homo sapien
aaacgttctgctggtataggatgcc

SEQ ID NO: 2682886 - DNA, 25 bp, Homo sapien
tatggtaattgcaagcaccggctct

SEQ ID NO: 2682887 - DNA, 25 bp, Homo sapien
tcaaaagtcagaatatacagaatgg

SEQ ID NO: 2682888 - DNA, 25 bp, Homo sapien
caaaagtcagaatatacagaatgga

SEQ ID NO: 2682889 - DNA, 25 bp, Homo sapien
tctctgtctctgtatctcctccctt

SEQ ID NO: 2682890 - DNA, 25 bp, Homo sapien
tctctgtatctcctcccttggccat

SEQ ID NO: 2682891 - DNA, 25 bp, Homo sapien
tctgtctctgtatctcctcccttgg

SEQ ID NO: 2682892 - DNA, 25 bp, Homo sapien
tgtctctgtatctcctcccttggcc

SEQ ID NO: 2682893 - DNA, 25 bp, Homo sapien
caatctctgagtcgagtggcaactg

SEQ ID NO: 2682894 - DNA, 25 bp, Homo sapien
actgcagttctttgggtgtctactc

SEQ ID NO: 2682895 - DNA, 25 bp, Homo sapien
tcgagtggcaactgttctctccata

SEQ ID NO: 2682896 - DNA, 25 bp, Homo sapien
tctctcgcttctcctaaggcttaag

SEQ ID NO: 2682897 - DNA, 25 bp, Homo sapien
gtggcgatggatttggacaccattt

SEQ ID NO: 2682898 - DNA, 25 bp, Homo sapien
tgcctgaacggccaggtttttggaa

SEQ ID NO: 2682899 - DNA, 25 bp, Homo sapien
tgtcgtctattaaggtggtggcgat

SEQ ID NO: 2682900 - DNA, 25 bp, Homo sapien
gcacctcactacttgtgtcgtctat

SEQ ID NO: 2682901 - DNA, 25 bp, Homo sapien
tgcctccttcttgttttgggtgtac

SEQ ID NO: 2682902 - DNA, 25 bp, Homo sapien
ctgcctccttcttgttttgggtgta

SEQ ID NO: 2682903 - DNA, 25 bp, Homo sapien
tgttttgggtgtactccctggtcac

SEQ ID NO: 2682904 - DNA, 25 bp, Homo sapien
cttcttgttttgggtgtactccctg

SEQ ID NO: 2682905 - DNA, 25 bp, Homo sapien
ttattcctataaagaatggccagct

SEQ ID NO: 2682906 - DNA, 25 bp, Homo sapien
tttctccatcaatgctagctcatct

SEQ ID NO: 2682907 - DNA, 25 bp, Homo sapien
gctagctcatcttgattaaactgat

SEQ ID NO: 2682908 - DNA, 25 bp, Homo sapien
cctataaagaatggccagcttgatg

SEQ ID NO: 2682909 - DNA, 25 bp, Homo sapien
tattaacccgtccatgtgacttggc

SEQ ID NO: 2682910 - DNA, 25 bp, Homo sapien
tgcattcatttaacagcctggataa

SEQ ID NO: 2682911 - DNA, 25 bp, Homo sapien
cacattccggtcaaaggtataatcc

SEQ ID NO: 2682912 - DNA, 25 bp, Homo sapien
gaatgatttggtgcagcatctctct

SEQ ID NO: 2682913 - DNA, 25 bp, Homo sapien
tcccatggtctgttacccgttagga

SEQ ID NO: 2682914 - DNA, 25 bp, Homo sapien
taaatcctgaatgtcgatgactcaa

SEQ ID NO: 2682915 - DNA, 25 bp, Homo sapien
tagaaatatccaatgtgccaccaac

SEQ ID NO: 2682916 - DNA, 25 bp, Homo sapien
tcaatcttaacaaaacagtcagctg

SEQ ID NO: 2682917 - DNA, 25 bp, Homo sapien
ttattgctggtggttgggtctgtca

SEQ ID NO: 2682918 - DNA, 25 bp, Homo sapien
tcctagaggacatagctggccagca

SEQ ID NO: 2682919 - DNA, 25 bp, Homo sapien
gaaacgcacgcatttttatgctcat

SEQ ID NO: 2682920 - DNA, 25 bp, Homo sapien
gccttcttaaacactgaaacgcacg

SEQ ID NO: 2682921 - DNA, 25 bp, Homo sapien
cattctagcctaaacaacagagcga

SEQ ID NO: 2682922 - DNA, 25 bp, Homo sapien
tgcattctagcctaaacaacagagc

SEQ ID NO: 2682923 - DNA, 25 bp, Homo sapien
gcattctagcctaaacaacagagcg

SEQ ID NO: 2682924 - DNA, 25 bp, Homo sapien
gcaagaagcatccatggactgccca

SEQ ID NO: 2682925 - DNA, 25 bp, Homo sapien
ctatagctacagatgagcaagaagc

SEQ ID NO: 2682926 - DNA, 25 bp, Homo sapien
tctggttggtcctgtctatagctac

SEQ ID NO: 2682927 - DNA, 25 bp, Homo sapien
tgcccagggctttcgtttcccatac

SEQ ID NO: 2682928 - DNA, 25 bp, Homo sapien
caggttttgtatgctaaattgcaac

SEQ ID NO: 2682929 - DNA, 25 bp, Homo sapien
taaaacgcaatatttctgtacgatc

SEQ ID NO: 2682930 - DNA, 25 bp, Homo sapien
tacactcatcaagtatctcaaggat

SEQ ID NO: 2682931 - DNA, 25 bp, Homo sapien
taaaaatccaactgaccggtacaga

SEQ ID NO: 2682932 - DNA, 25 bp, Homo sapien
tatacataagtgaccgtgcagacac

SEQ ID NO: 2682933 - DNA, 25 bp, Homo sapien
cagcagatggtacgatttgggactc

SEQ ID NO: 2682934 - DNA, 25 bp, Homo sapien
gactcgcttgttccctataacgtgg

SEQ ID NO: 2682935 - DNA, 25 bp, Homo sapien
tcagggaaggcggagaatttcctca

SEQ ID NO: 2682936 - DNA, 25 bp, Homo sapien
catctgtaagcttttgaatggaaaa

SEQ ID NO: 2682937 - DNA, 25 bp, Homo sapien
cagcctggcagttttaaacgaatga

SEQ ID NO: 2682938 - DNA, 25 bp, Homo sapien
gaattcatctgtaagcttttgaatg

SEQ ID NO: 2682939 - DNA, 25 bp, Homo sapien
gcagttttaaacgaatgaattcatc

SEQ ID NO: 2682940 - DNA, 25 bp, Homo sapien
taagtggtcattcttgctggcctaa

SEQ ID NO: 2682941 - DNA, 25 bp, Homo sapien
aaaatgtgactcctcggtcatgaga

SEQ ID NO: 2682942 - DNA, 25 bp, Homo sapien
tttctaggaagacgaaacctcagct

SEQ ID NO: 2682943 - DNA, 25 bp, Homo sapien
cttagaagagagcagcaaaagatgc

SEQ ID NO: 2682944 - DNA, 25 bp, Homo sapien
gcctctcccagaggaaggcatgcca

SEQ ID NO: 2682945 - DNA, 25 bp, Homo sapien
gaaggcatgccaaattcctgacacg

SEQ ID NO: 2682946 - DNA, 25 bp, Homo sapien
gacacgtggcgtttgaaaataccat

SEQ ID NO: 2682947 - DNA, 25 bp, Homo sapien
aaattcctgacacgtggcgtttgaa

SEQ ID NO: 2682948 - DNA, 25 bp, Homo sapien
tcagagacaacatgagcgagctccc

SEQ ID NO: 2682949 - DNA, 25 bp, Homo sapien
tcacataggaatagccttcaggagg

SEQ ID NO: 2682950 - DNA, 25 bp, Homo sapien
ttgaacaaaattctctcaggctgct

SEQ ID NO: 2682951 - DNA, 25 bp, Homo sapien
tggaaatagtgaaaggccacccgta

SEQ ID NO: 2682952 - DNA, 25 bp, Homo sapien
gaaccaaatggtgagcagtacccac

SEQ ID NO: 2682953 - DNA, 25 bp, Homo sapien
tagggacaagccaacagacagaacc

SEQ ID NO: 2682954 - DNA, 25 bp, Homo sapien
tggcatggctagtcacaaactgaac

SEQ ID NO: 2682955 - DNA, 25 bp, Homo sapien
cttcttcaagactcagggagctcag

SEQ ID NO: 2682956 - DNA, 25 bp, Homo sapien
gcctacatcacccagcattcccggt

SEQ ID NO: 2682957 - DNA, 25 bp, Homo sapien
atcacccagcattcccggtcggaat

SEQ ID NO: 2682958 - DNA, 25 bp, Homo sapien
cattcccggtcggaatcccatccaa

SEQ ID NO: 2682959 - DNA, 25 bp, Homo sapien
cgagatcagatgagactgggtgctt

SEQ ID NO: 2682960 - DNA, 25 bp, Homo sapien
gaatagttaactcgacaccttgcgt

SEQ ID NO: 2682961 - DNA, 25 bp, Homo sapien
tgactccactcgctggaagacttgc

SEQ ID NO: 2682962 - DNA, 25 bp, Homo sapien
catttctgcggctggaagcaatggg

SEQ ID NO: 2682963 - DNA, 25 bp, Homo sapien
gaaatgtagttaagagtgactccac

SEQ ID NO: 2682964 - DNA, 25 bp, Homo sapien
ccgcgccggtgaccagtaccacccg

SEQ ID NO: 2682965 - DNA, 25 bp, Homo sapien
tgaccagtaccacccgcccgtcgaa

SEQ ID NO: 2682966 - DNA, 25 bp, Homo sapien
cgtcgaacctcagcggtgagcccat

SEQ ID NO: 2682967 - DNA, 25 bp, Homo sapien
acccgcccgtcgaacctcagcggtg

SEQ ID NO: 2682968 - DNA, 25 bp, Homo sapien
gcttgagagaccaggtgtttccggc

SEQ ID NO: 2682969 - DNA, 25 bp, Homo sapien
gcggtgcctcaagaataaccattcc

SEQ ID NO: 2682970 - DNA, 25 bp, Homo sapien
gtatgccggcccgaaaagagcagcc

SEQ ID NO: 2682971 - DNA, 25 bp, Homo sapien
tgtttccggctctttcctcctcaag

SEQ ID NO: 2682972 - DNA, 25 bp, Homo sapien
ccagttttgcaatcagcagcccagc

SEQ ID NO: 2682973 - DNA, 25 bp, Homo sapien
caggagctgacatctctgcgcttca

SEQ ID NO: 2682974 - DNA, 25 bp, Homo sapien
gaagagtaacaatcgatgcccacag

SEQ ID NO: 2682975 - DNA, 25 bp, Homo sapien
gacccctgtgcgcatttgagcttac

SEQ ID NO: 2682976 - DNA, 25 bp, Homo sapien
caaaagccagggcataggctcggcc

SEQ ID NO: 2682977 - DNA, 25 bp, Homo sapien
aacaactaacgctcctctttctgca

SEQ ID NO: 2682978 - DNA, 25 bp, Homo sapien
caacaactaacgctcctctttctgc

SEQ ID NO: 2682979 - DNA, 25 bp, Homo sapien
aagtaatttagacagacagccttag

SEQ ID NO: 2682980 - DNA, 25 bp, Homo sapien
cctagcccttcgttatcaattctgt

SEQ ID NO: 2682981 - DNA, 25 bp, Homo sapien
tcactggagttatagccacaagcca

SEQ ID NO: 2682982 - DNA, 25 bp, Homo sapien
tgtatttcagttatcagctacagat

SEQ ID NO: 2682983 - DNA, 25 bp, Homo sapien
ggttattatcattgccttcagtctg

SEQ ID NO: 2682984 - DNA, 25 bp, Homo sapien
gtgagaatgcctgttaccccacatt

SEQ ID NO: 2682985 - DNA, 25 bp, Homo sapien
tagcctgaaaatagaaccacgtgtt

SEQ ID NO: 2682986 - DNA, 25 bp, Homo sapien
tacaaggtaccaaattatcaggcat

SEQ ID NO: 2682987 - DNA, 25 bp, Homo sapien
gagacctcggaagcataggcaacaa

SEQ ID NO: 2682988 - DNA, 25 bp, Homo sapien
aatgagacctcggaagcataggcaa

SEQ ID NO: 2682989 - DNA, 25 bp, Homo sapien
ttttataaatgagacctcggaagca

SEQ ID NO: 2682990 - DNA, 25 bp, Homo sapien
tataaatgagacctcggaagcatag

SEQ ID NO: 2682991 - DNA, 25 bp, Homo sapien
tgtgaaatgatcttctccatagggt

SEQ ID NO: 2682992 - DNA, 25 bp, Homo sapien
catagggttattgcatagattttga

SEQ ID NO: 2682993 - DNA, 25 bp, Homo sapien
cttctccatagggttattgcataga

SEQ ID NO: 2682994 - DNA, 25 bp, Homo sapien
ttgtgaaatgatcttctccataggg

SEQ ID NO: 2682995 - DNA, 25 bp, Homo sapien
cagctaaggagcctttaccaactcc

SEQ ID NO: 2682996 - DNA, 25 bp, Homo sapien
agcagctaaggagcctttaccaact

SEQ ID NO: 2682997 - DNA, 25 bp, Homo sapien
cagcagctaaggagcctttaccaac

SEQ ID NO: 2682998 - DNA, 25 bp, Homo sapien
agctaaggagcctttaccaactcct

SEQ ID NO: 2682999 - DNA, 25 bp, Homo sapien
catccagggctgtcttcacaacctt

SEQ ID NO: 2683000 - DNA, 25 bp, Homo sapien
caaaagcatccagggctgtcttcac

SEQ ID NO: 2683001 - DNA, 25 bp, Homo sapien
tccagggctgtcttcacaaccttct

SEQ ID NO: 2683002 - DNA, 25 bp, Homo sapien
agcatccagggctgtcttcacaacc

SEQ ID NO: 2683003 - DNA, 25 bp, Homo sapien
caatataaaaagatacaagttacat

SEQ ID NO: 2683004 - DNA, 25 bp, Homo sapien
ctacaatataaaaagatacaagtta

SEQ ID NO: 2683005 - DNA, 25 bp, Homo sapien
acaatataaaaagatacaagttaca

SEQ ID NO: 2683006 - DNA, 25 bp, Homo sapien
tacaatataaaaagatacaagttac

SEQ ID NO: 2683007 - DNA, 25 bp, Homo sapien
tcctagcaaaggaacgatccctcag

SEQ ID NO: 2683008 - DNA, 25 bp, Homo sapien
tagcaaaggaacgatccctcagaat

SEQ ID NO: 2683009 - DNA, 25 bp, Homo sapien
tatcctagcaaaggaacgatccctc

SEQ ID NO: 2683010 - DNA, 25 bp, Homo sapien
acttatcctagcaaaggaacgatcc

SEQ ID NO: 2683011 - DNA, 25 bp, Homo sapien
gggaagcagaaactaaaagctcttc

SEQ ID NO: 2683012 - DNA, 25 bp, Homo sapien
taccccagttgttacaagggaagca

SEQ ID NO: 2683013 - DNA, 25 bp, Homo sapien
tcagtcccgttgcagcaccaagaaa

SEQ ID NO: 2683014 - DNA, 25 bp, Homo sapien
agtcccgttgcagcaccaagaaaag

SEQ ID NO: 2683015 - DNA, 25 bp, Homo sapien
tagatccctattgttaccatttgca

SEQ ID NO: 2683016 - DNA, 25 bp, Homo sapien
taatgctacgcccttattttatgcc

SEQ ID NO: 2683017 - DNA, 25 bp, Homo sapien
tggcacccaacactaacatcagtta

SEQ ID NO: 2683018 - DNA, 25 bp, Homo sapien
tgcaaatgagttagtgagaggcctg

SEQ ID NO: 2683019 - DNA, 25 bp, Homo sapien
cccatgctgcccgtgtcacttggaa

SEQ ID NO: 2683020 - DNA, 25 bp, Homo sapien
cgtgtcacttggaatgaaccccgca

SEQ ID NO: 2683021 - DNA, 25 bp, Homo sapien
tgcccgtgtcacttggaatgaaccc

SEQ ID NO: 2683022 - DNA, 25 bp, Homo sapien
tgctgcccgtgtcacttggaatgaa

SEQ ID NO: 2683023 - DNA, 25 bp, Homo sapien
tgaagctgatgaagtcataataatc

SEQ ID NO: 2683024 - DNA, 25 bp, Homo sapien
ctgaagctgatgaagtcataataat

SEQ ID NO: 2683025 - DNA, 25 bp, Homo sapien
gagtcatccgtgatcccgcattagg

SEQ ID NO: 2683026 - DNA, 25 bp, Homo sapien
ccgcattaggagcaatggtgttaca

SEQ ID NO: 2683027 - DNA, 25 bp, Homo sapien
ggcctggccaaagttgccatatatt

SEQ ID NO: 2683028 - DNA, 25 bp, Homo sapien
tgcagcactataattggcctggcca

SEQ ID NO: 2683029 - DNA, 25 bp, Homo sapien
tctcctcacaactctcgtgacaaag

SEQ ID NO: 2683030 - DNA, 25 bp, Homo sapien
gacaaagccaaaggacaagaggtgc

SEQ ID NO: 2683031 - DNA, 25 bp, Homo sapien
acaactctcgtgacaaagccaaagg

SEQ ID NO: 2683032 - DNA, 25 bp, Homo sapien
ctcacaactctcgtgacaaagccaa

SEQ ID NO: 2683033 - DNA, 25 bp, Homo sapien
attttccaatccatcctgctccaac

SEQ ID NO: 2683034 - DNA, 25 bp, Homo sapien
tgactatgccagacagtactaaagg

SEQ ID NO: 2683035 - DNA, 25 bp, Homo sapien
catactgagcacatagttgagagac

SEQ ID NO: 2683036 - DNA, 25 bp, Homo sapien
gataactgaatagagcttcgctgag

SEQ ID NO: 2683037 - DNA, 25 bp, Homo sapien
cacaagaagtcagttagaatgcaca

SEQ ID NO: 2683038 - DNA, 25 bp, Homo sapien
tacaatagctccaagagtccgctcc

SEQ ID NO: 2683039 - DNA, 25 bp, Homo sapien
gactgcctcaggagtcattgggtga

SEQ ID NO: 2683040 - DNA, 25 bp, Homo sapien
tccagttagccttgactgcctcagg

SEQ ID NO: 2683041 - DNA, 25 bp, Homo sapien
cattgggtgattcttttgtcttaca

SEQ ID NO: 2683042 - DNA, 25 bp, Homo sapien
tgttgctgtagacgttgcacgacta

SEQ ID NO: 2683043 - DNA, 25 bp, Homo sapien
gacgttgcacgactagtatgatttg

SEQ ID NO: 2683044 - DNA, 25 bp, Homo sapien
gttgcacgactagtatgatttgctg

SEQ ID NO: 2683045 - DNA, 25 bp, Homo sapien
gctgtagacgttgcacgactagtat

SEQ ID NO: 2683046 - DNA, 25 bp, Homo sapien
taactccgaaggtgggcaaacagga

SEQ ID NO: 2683047 - DNA, 25 bp, Homo sapien
catagatttctgacctatgataact

SEQ ID NO: 2683048 - DNA, 25 bp, Homo sapien
gcaaagttgattgaaagtccaggaa

SEQ ID NO: 2683049 - DNA, 25 bp, Homo sapien
tgattgaaagtccaggaatttctgc

SEQ ID NO: 2683050 - DNA, 25 bp, Homo sapien
ctgctctgggaagtggtttatataa

SEQ ID NO: 2683051 - DNA, 25 bp, Homo sapien
tatataactctaagtactgctctcc

SEQ ID NO: 2683052 - DNA, 25 bp, Homo sapien
tggtttatataactctaagtactgc

SEQ ID NO: 2683053 - DNA, 25 bp, Homo sapien
ctaagtactgctctccatgaagaac

SEQ ID NO: 2683054 - DNA, 25 bp, Homo sapien
aactatggtttgaaatagtgttcct

SEQ ID NO: 2683055 - DNA, 25 bp, Homo sapien
ggtttgaaatagtgttcctgaacaa

SEQ ID NO: 2683056 - DNA, 25 bp, Homo sapien
tgaaatagtgttcctgaacaacaga

SEQ ID NO: 2683057 - DNA, 25 bp, Homo sapien
agtgttcctgaacaacagatgctgc

SEQ ID NO: 2683058 - DNA, 25 bp, Homo sapien
taataatcactacaccggatccttt

SEQ ID NO: 2683059 - DNA, 25 bp, Homo sapien
gcaacaactgcttcacattttaatt

SEQ ID NO: 2683060 - DNA, 25 bp, Homo sapien
ttatctaggacatcagcaacaactg

SEQ ID NO: 2683061 - DNA, 25 bp, Homo sapien
tacaccggatcctttatctaggaca

SEQ ID NO: 2683062 - DNA, 25 bp, Homo sapien
aacacagcctaattgtcaagtgagg

SEQ ID NO: 2683063 - DNA, 25 bp, Homo sapien
tcaagtgaggactatctaatattcc

SEQ ID NO: 2683064 - DNA, 25 bp, Homo sapien
ccagcctaagcccagaaataaatgc

SEQ ID NO: 2683065 - DNA, 25 bp, Homo sapien
aatccaatgaaatgcctcacccttc

SEQ ID NO: 2683066 - DNA, 25 bp, Homo sapien
gaaaggcatgccaatgtagttcaaa

SEQ ID NO: 2683067 - DNA, 25 bp, Homo sapien
taaatggagcagatcaagagagaac

SEQ ID NO: 2683068 - DNA, 25 bp, Homo sapien
gacagctgtccctctatttactaac

SEQ ID NO: 2683069 - DNA, 25 bp, Homo sapien
tatactaaggaccattaccaagttg

SEQ ID NO: 2683070 - DNA, 25 bp, Homo sapien
ctgattgtggcatataagttccttc

SEQ ID NO: 2683071 - DNA, 25 bp, Homo sapien
agaactgattgtggcatataagttc

SEQ ID NO: 2683072 - DNA, 25 bp, Homo sapien
gattgtggcatataagttccttctc

SEQ ID NO: 2683073 - DNA, 25 bp, Homo sapien
tgtggcatataagttccttctcaga

SEQ ID NO: 2683074 - DNA, 25 bp, Homo sapien
actggctgccacctcatctgaaatc

SEQ ID NO: 2683075 - DNA, 25 bp, Homo sapien
agtacgtattaccaagtctctatgc

SEQ ID NO: 2683076 - DNA, 25 bp, Homo sapien
gctaggaaacgttttctacactggc

SEQ ID NO: 2683077 - DNA, 25 bp, Homo sapien
taaacaatgtgcagcttgggagcac

SEQ ID NO: 2683078 - DNA, 25 bp, Homo sapien
catttaagatggacagtgccgcgat

SEQ ID NO: 2683079 - DNA, 25 bp, Homo sapien
tgtaatcagataaatcctccaggcc

SEQ ID NO: 2683080 - DNA, 25 bp, Homo sapien
ttcaatctataggtcccgagcagtc

SEQ ID NO: 2683081 - DNA, 25 bp, Homo sapien
tagaaactcgtttatggcacagggc

SEQ ID NO: 2683082 - DNA, 25 bp, Homo sapien
cagcatcaggaggtctattaggtat

SEQ ID NO: 2683083 - DNA, 25 bp, Homo sapien
tatctgtaagtacagcatcaggagg

SEQ ID NO: 2683084 - DNA, 25 bp, Homo sapien
gtctattaggtatggctacagctac

SEQ ID NO: 2683085 - DNA, 25 bp, Homo sapien
ctgattaagagaggtggtatctgta

SEQ ID NO: 2683086 - DNA, 25 bp, Homo sapien
gcattagatgcataatgttataagg

SEQ ID NO: 2683087 - DNA, 25 bp, Homo sapien
agctataaattaaaaagtgtcatca

SEQ ID NO: 2683088 - DNA, 25 bp, Homo sapien
tagatgcataatgttataaggtatc

SEQ ID NO: 2683089 - DNA, 25 bp, Homo sapien
catcaaccaggtggatttatcattt

SEQ ID NO: 2683090 - DNA, 25 bp, Homo sapien
tgaatactggtgacttgcaaggtcc

SEQ ID NO: 2683091 - DNA, 25 bp, Homo sapien
aaggtcccatatgagatgctaagag

SEQ ID NO: 2683092 - DNA, 25 bp, Homo sapien
ttaggtcagcctcaagacttcttcc

SEQ ID NO: 2683093 - DNA, 25 bp, Homo sapien
tgctgtgtaaagactagccatatct

SEQ ID NO: 2683094 - DNA, 25 bp, Homo sapien
taggatcaatgtgtaagggattcca

SEQ ID NO: 2683095 - DNA, 25 bp, Homo sapien
ctgctagactagcaaagttaggatc

SEQ ID NO: 2683096 - DNA, 25 bp, Homo sapien
agtctccactgaggcggtacaaagc

SEQ ID NO: 2683097 - DNA, 25 bp, Homo sapien
tgtaagggattccagtctccactga

SEQ ID NO: 2683098 - DNA, 25 bp, Homo sapien
taatccatgtaatatgggcttgtca

SEQ ID NO: 2683099 - DNA, 25 bp, Homo sapien
cataatccatgtaatatgggcttgt

SEQ ID NO: 2683100 - DNA, 25 bp, Homo sapien
gaaaatccaaatgtacataatccat

SEQ ID NO: 2683101 - DNA, 25 bp, Homo sapien
tccatgtaatatgggcttgtcaaaa

SEQ ID NO: 2683102 - DNA, 25 bp, Homo sapien
tccttccacatctcagtttgtagag

SEQ ID NO: 2683103 - DNA, 25 bp, Homo sapien
atctcagtttgtagagtttgtcctg

SEQ ID NO: 2683104 - DNA, 25 bp, Homo sapien
tcctggatatactggttttgcaaaa

SEQ ID NO: 2683105 - DNA, 25 bp, Homo sapien
tttgtagagtttgtcctggatatac

SEQ ID NO: 2683106 - DNA, 25 bp, Homo sapien
gatgttggtgcaagatccacatatg

SEQ ID NO: 2683107 - DNA, 25 bp, Homo sapien
gctgaagtaccagatgttggtgcaa

SEQ ID NO: 2683108 - DNA, 25 bp, Homo sapien
cttagctgaagtaccagatgttggt

SEQ ID NO: 2683109 - DNA, 25 bp, Homo sapien
ttggtgcaagatccacatatgcatt

SEQ ID NO: 2683110 - DNA, 25 bp, Homo sapien
tgaggaagtggcttggatactaatt

SEQ ID NO: 2683111 - DNA, 25 bp, Homo sapien
ttctaacgtagcctaaccactctta

SEQ ID NO: 2683112 - DNA, 25 bp, Homo sapien
accactcttaaagtcaccttaactg

SEQ ID NO: 2683113 - DNA, 25 bp, Homo sapien
tattccaagctgttttgaattaatg

SEQ ID NO: 2683114 - DNA, 25 bp, Homo sapien
cgtgaggcaccgagcccgctctaag

SEQ ID NO: 2683115 - DNA, 25 bp, Homo sapien
gtgaggcaccgagcccgctctaagt

SEQ ID NO: 2683116 - DNA, 25 bp, Homo sapien
ggcgtgaggcaccgagcccgctcta

SEQ ID NO: 2683117 - DNA, 25 bp, Homo sapien
aggcaccgagcccgctctaagtttt

SEQ ID NO: 2683118 - DNA, 25 bp, Homo sapien
caaaggtactctgaagcttcccgcc

SEQ ID NO: 2683119 - DNA, 25 bp, Homo sapien
tccgcctttggttatatgccactca

SEQ ID NO: 2683120 - DNA, 25 bp, Homo sapien
ttaggcggcgtcctatttcctcaaa

SEQ ID NO: 2683121 - DNA, 25 bp, Homo sapien
cttagccccaatatttccgcctttg

SEQ ID NO: 2683122 - DNA, 25 bp, Homo sapien
cagcttaaacctatcatcctaaaga

SEQ ID NO: 2683123 - DNA, 25 bp, Homo sapien
caaaacagattttgctcagcaacat

SEQ ID NO: 2683124 - DNA, 25 bp, Homo sapien
tacaggtattggatacatacaaaca

SEQ ID NO: 2683125 - DNA, 25 bp, Homo sapien
aaacctgtgggccaaattctatgat

SEQ ID NO: 2683126 - DNA, 25 bp, Homo sapien
tgtttggaaccaacacccttgagat

SEQ ID NO: 2683127 - DNA, 25 bp, Homo sapien
ggtatcaaaagaatgccagttccca

SEQ ID NO: 2683128 - DNA, 25 bp, Homo sapien
gctagaagatgagcaccaacccagg

SEQ ID NO: 2683129 - DNA, 25 bp, Homo sapien
tatccaagttgagaatcctaagcgg

SEQ ID NO: 2683130 - DNA, 25 bp, Homo sapien
tatagacacctataagatcacagct

SEQ ID NO: 2683131 - DNA, 25 bp, Homo sapien
tcacaaagggtcactacaggagaaa

SEQ ID NO: 2683132 - DNA, 25 bp, Homo sapien
tggcatttgaaaacttggagacccc

SEQ ID NO: 2683133 - DNA, 25 bp, Homo sapien
tctgtagtggctcaggtcatggtct

SEQ ID NO: 2683134 - DNA, 25 bp, Homo sapien
agggtcaagcttgcccaggaccacc

SEQ ID NO: 2683135 - DNA, 25 bp, Homo sapien
cagcagcaccttttgcagggccttg

SEQ ID NO: 2683136 - DNA, 25 bp, Homo sapien
aatcttcatctgaaagtatgattgt

SEQ ID NO: 2683137 - DNA, 25 bp, Homo sapien
gtatgattgttgtatcagcagcacc

SEQ ID NO: 2683138 - DNA, 25 bp, Homo sapien
cacgacatggtaacagctaacttgg

SEQ ID NO: 2683139 - DNA, 25 bp, Homo sapien
gacagaggctaggatcacagtgata

SEQ ID NO: 2683140 - DNA, 25 bp, Homo sapien
taagtggagccaagttcctcgcacg

SEQ ID NO: 2683141 - DNA, 25 bp, Homo sapien
tctaggctaggctgaatatctgtcc

SEQ ID NO: 2683142 - DNA, 25 bp, Homo sapien
aatgcttagatacgtggcctctgtg

SEQ ID NO: 2683143 - DNA, 25 bp, Homo sapien
tctgggagttctgtttcaacctacg

SEQ ID NO: 2683144 - DNA, 25 bp, Homo sapien
gctgtgccccttaatagcaaggtga

SEQ ID NO: 2683145 - DNA, 25 bp, Homo sapien
gatcacagctgtagcatcagaatgc

SEQ ID NO: 2683146 - DNA, 25 bp, Homo sapien
ctctggccttcagcctgccactaaa

SEQ ID NO: 2683147 - DNA, 25 bp, Homo sapien
gccttcagcctgccactaaagaatg

SEQ ID NO: 2683148 - DNA, 25 bp, Homo sapien
ccttcagcctgccactaaagaatgc

SEQ ID NO: 2683149 - DNA, 25 bp, Homo sapien
aacagaaggataattatgtgctagc

SEQ ID NO: 2683150 - DNA, 25 bp, Homo sapien
ttattatgaagatacagatctaaga

SEQ ID NO: 2683151 - DNA, 25 bp, Homo sapien
tcttagttctaatcacttttgcaga

SEQ ID NO: 2683152 - DNA, 25 bp, Homo sapien
tctgcagttatctgatatctgaaaa

SEQ ID NO: 2683153 - DNA, 25 bp, Homo sapien
ggtatcaaaggcctttattgattta

SEQ ID NO: 2683154 - DNA, 25 bp, Homo sapien
tcaacttatcaatgctatcacaaat

SEQ ID NO: 2683155 - DNA, 25 bp, Homo sapien
ttcctttcaacttatcaatgctatc

SEQ ID NO: 2683156 - DNA, 25 bp, Homo sapien
cctttcaacttatcaatgctatcac

SEQ ID NO: 2683157 - DNA, 25 bp, Homo sapien
gcacccgatatatggtctctaagcg

SEQ ID NO: 2683158 - DNA, 25 bp, Homo sapien
aaatatgacagttctttcggctgga

SEQ ID NO: 2683159 - DNA, 25 bp, Homo sapien
ttgtttaaggcaaataaatatgaca

SEQ ID NO: 2683160 - DNA, 25 bp, Homo sapien
aattaatgcgcttattgaacacatt

SEQ ID NO: 2683161 - DNA, 25 bp, Homo sapien
tcagttgtgagtgtgttccgttttt

SEQ ID NO: 2683162 - DNA, 25 bp, Homo sapien
cagttgtgagtgtgttccgtttttg

SEQ ID NO: 2683163 - DNA, 25 bp, Homo sapien
cagcggtgagcatgtatttttaaca

SEQ ID NO: 2683164 - DNA, 25 bp, Homo sapien
ctgcagcggtgagcatgtattttta

SEQ ID NO: 2683165 - DNA, 25 bp, Homo sapien
gaagatccaagacattatctgagca

SEQ ID NO: 2683166 - DNA, 25 bp, Homo sapien
aatgttgatcgggatgaaaagggaa

SEQ ID NO: 2683167 - DNA, 25 bp, Homo sapien
atgtagtgattcataaatgttgatc

SEQ ID NO: 2683168 - DNA, 25 bp, Homo sapien
ccagttggaaaaccgagtggatgct

SEQ ID NO: 2683169 - DNA, 25 bp, Homo sapien
tcaagggaatcaggctaaggaacac

SEQ ID NO: 2683170 - DNA, 25 bp, Homo sapien
aatcaggtccacaaccctcaaggga

SEQ ID NO: 2683171 - DNA, 25 bp, Homo sapien
tctgacccatctgcaggtagattgg

SEQ ID NO: 2683172 - DNA, 25 bp, Homo sapien
tcacccatgagaaggatctgaccca

SEQ ID NO: 2683173 - DNA, 25 bp, Homo sapien
ggtcgtcctccatctgcttcaagta

SEQ ID NO: 2683174 - DNA, 25 bp, Homo sapien
tacctgttgtgtagcagccagcacc

SEQ ID NO: 2683175 - DNA, 25 bp, Homo sapien
tggtgggtaacctatgccctcaaat

SEQ ID NO: 2683176 - DNA, 25 bp, Homo sapien
caccttcttggcacttggtgggtaa

SEQ ID NO: 2683177 - DNA, 25 bp, Homo sapien
tttgacaaagacagctccggtgtgg

SEQ ID NO: 2683178 - DNA, 25 bp, Homo sapien
caggtatttaaggagcctgttacaa

SEQ ID NO: 2683179 - DNA, 25 bp, Homo sapien
tcaaccagaagcaatggattctgtt

SEQ ID NO: 2683180 - DNA, 25 bp, Homo sapien
gttacaatgtcaagcaatgaacatt

SEQ ID NO: 2683181 - DNA, 25 bp, Homo sapien
tggattctgttttagtgaactttac

SEQ ID NO: 2683182 - DNA, 25 bp, Homo sapien
taattaaacaggtaagttcaggatg

SEQ ID NO: 2683183 - DNA, 25 bp, Homo sapien
gaattaatatcatttcagtccctgc

SEQ ID NO: 2683184 - DNA, 25 bp, Homo sapien
caaatagaggaattaatatcatttc

SEQ ID NO: 2683185 - DNA, 25 bp, Homo sapien
caggatgaagtccatttacaaatag

SEQ ID NO: 2683186 - DNA, 25 bp, Homo sapien
tcccctcactcaactgaaagccttt

SEQ ID NO: 2683187 - DNA, 25 bp, Homo sapien
cccctcactcaactgaaagcctttg

SEQ ID NO: 2683188 - DNA, 25 bp, Homo sapien
tgtctcccctcactcaactgaaagc

SEQ ID NO: 2683189 - DNA, 25 bp, Homo sapien
tctcccctcactcaactgaaagcct

SEQ ID NO: 2683190 - DNA, 25 bp, Homo sapien
gatgagtaacattttcaatcaagtc

SEQ ID NO: 2683191 - DNA, 25 bp, Homo sapien
tcaaaaccctgcctttgggtctgcc

SEQ ID NO: 2683192 - DNA, 25 bp, Homo sapien
gcaactgtgaaatcccacaggcctg

SEQ ID NO: 2683193 - DNA, 25 bp, Homo sapien
gagtaacattttcaatcaagtcgtt

SEQ ID NO: 2683194 - DNA, 25 bp, Homo sapien
ggaaggcctattccacaattgtaga

SEQ ID NO: 2683195 - DNA, 25 bp, Homo sapien
taggaaggcctattccacaattgta

SEQ ID NO: 2683196 - DNA, 25 bp, Homo sapien
cactgggtaggaaggcctattccac

SEQ ID NO: 2683197 - DNA, 25 bp, Homo sapien
ccacaattgtagactctgcattttg

SEQ ID NO: 2683198 - DNA, 25 bp, Homo sapien
gaatctccgagatagctaaagaact

SEQ ID NO: 2683199 - DNA, 25 bp, Homo sapien
cagaccgcttagtgaaggagcagca

SEQ ID NO: 2683200 - DNA, 25 bp, Homo sapien
ttcctgtagattggcccttcttggc

SEQ ID NO: 2683201 - DNA, 25 bp, Homo sapien
gatgcttaatgtccacctcccactt

SEQ ID NO: 2683202 - DNA, 25 bp, Homo sapien
tcctcccttctcagcggtttcctgg

SEQ ID NO: 2683203 - DNA, 25 bp, Homo sapien
tgtttcctcttttgtcgtcgtttca

SEQ ID NO: 2683204 - DNA, 25 bp, Homo sapien
ccttctcagcggtttcctgggactc

SEQ ID NO: 2683205 - DNA, 25 bp, Homo sapien
ttcctgggactcttcattttccaaa

SEQ ID NO: 2683206 - DNA, 25 bp, Homo sapien
actgtggatgagcttgcgtgaagaa

SEQ ID NO: 2683207 - DNA, 25 bp, Homo sapien
tgagcttgcgtgaagaagaaacgca

SEQ ID NO: 2683208 - DNA, 25 bp, Homo sapien
tattcggaggtagaagtaacttctc

SEQ ID NO: 2683209 - DNA, 25 bp, Homo sapien
gaagaaacgcaggagcagtattcgg

SEQ ID NO: 2683210 - DNA, 25 bp, Homo sapien
gggctgtctcgatgtattctctgga

SEQ ID NO: 2683211 - DNA, 25 bp, Homo sapien
ggggctgtctcgatgtattctctgg

SEQ ID NO: 2683212 - DNA, 25 bp, Homo sapien
tgggggctgtctcgatgtattctct

SEQ ID NO: 2683213 - DNA, 25 bp, Homo sapien
ctgggggctgtctcgatgtattctc

SEQ ID NO: 2683214 - DNA, 25 bp, Homo sapien
gagtctctcctcgttcctgaacctg

SEQ ID NO: 2683215 - DNA, 25 bp, Homo sapien
gagaggacacacaagtcttatagga

SEQ ID NO: 2683216 - DNA, 25 bp, Homo sapien
taggacgacaaggagacatgttgtg

SEQ ID NO: 2683217 - DNA, 25 bp, Homo sapien
tcttataggatgaataggacgacaa

SEQ ID NO: 2683218 - DNA, 25 bp, Homo sapien
gctgcttttctaaggactccaaagt

SEQ ID NO: 2683219 - DNA, 25 bp, Homo sapien
ccaggagacagccacacctttgttc

SEQ ID NO: 2683220 - DNA, 25 bp, Homo sapien
cttggctgcttttctaaggactcca

SEQ ID NO: 2683221 - DNA, 25 bp, Homo sapien
cccaggagacagccacacctttgtt

SEQ ID NO: 2683222 - DNA, 25 bp, Homo sapien
ggaggtttctggtggacacatcaga

SEQ ID NO: 2683223 - DNA, 25 bp, Homo sapien
gtgtgtcctcaacggtgggtgagcc

SEQ ID NO: 2683224 - DNA, 25 bp, Homo sapien
tcaacggtgggtgagcctggcaggc

SEQ ID NO: 2683225 - DNA, 25 bp, Homo sapien
acaggaggtttctggtggacacatc

SEQ ID NO: 2683226 - DNA, 25 bp, Homo sapien
ggagggcttccatggtggtgaacac

SEQ ID NO: 2683227 - DNA, 25 bp, Homo sapien
catggtggtgaacacccggcagcag

SEQ ID NO: 2683228 - DNA, 25 bp, Homo sapien
tgaacacccggcagcaggccatgca

SEQ ID NO: 2683229 - DNA, 25 bp, Homo sapien
agggcttccatggtggtgaacaccc

SEQ ID NO: 2683230 - DNA, 25 bp, Homo sapien
tgattccatgttgcctgtcagctga

SEQ ID NO: 2683231 - DNA, 25 bp, Homo sapien
ctgattccatgttgcctgtcagctg

SEQ ID NO: 2683232 - DNA, 25 bp, Homo sapien
gctgagccatggtgagatgaaagac

SEQ ID NO: 2683233 - DNA, 25 bp, Homo sapien
tgtcagctgagccatggtgagatga

SEQ ID NO: 2683234 - DNA, 25 bp, Homo sapien
aaggtcttcttctgtgggctgcccc

SEQ ID NO: 2683235 - DNA, 25 bp, Homo sapien
tcaggccaaggtcttcttctgtggg

SEQ ID NO: 2683236 - DNA, 25 bp, Homo sapien
gtcttcttctgtgggctgcccctcc

SEQ ID NO: 2683237 - DNA, 25 bp, Homo sapien
caggccaaggtcttcttctgtgggc

SEQ ID NO: 2683238 - DNA, 25 bp, Homo sapien
agcctggacattggctccaggatct

SEQ ID NO: 2683239 - DNA, 25 bp, Homo sapien
cctggacattggctccaggatctcc

SEQ ID NO: 2683240 - DNA, 25 bp, Homo sapien
gcctggacattggctccaggatctc

SEQ ID NO: 2683241 - DNA, 25 bp, Homo sapien
ctgtcctttggagaatgaaacacac

SEQ ID NO: 2683242 - DNA, 25 bp, Homo sapien
tccagtatcttctggcccataagtc

SEQ ID NO: 2683243 - DNA, 25 bp, Homo sapien
cttgcaagagaaggccacaccatct

SEQ ID NO: 2683244 - DNA, 25 bp, Homo sapien
acaccatcttccagtatcttctggc

SEQ ID NO: 2683245 - DNA, 25 bp, Homo sapien
ctcttgcaagagaaggccacaccat

SEQ ID NO: 2683246 - DNA, 25 bp, Homo sapien
gggcagcctgtctgctactatctcc

SEQ ID NO: 2683247 - DNA, 25 bp, Homo sapien
agcctgtctgctactatctccatgg

SEQ ID NO: 2683248 - DNA, 25 bp, Homo sapien
ctgtctgctactatctccatggctc

SEQ ID NO: 2683249 - DNA, 25 bp, Homo sapien
tgtctgctactatctccatggctct

SEQ ID NO: 2683250 - DNA, 25 bp, Homo sapien
cctttattacgtatgatgtttacat

SEQ ID NO: 2683251 - DNA, 25 bp, Homo sapien
tagactgagtgctggtccctcatct

SEQ ID NO: 2683252 - DNA, 25 bp, Homo sapien
tgtttacatgttagactgagtgctg

SEQ ID NO: 2683253 - DNA, 25 bp, Homo sapien
gaaacacaacctttattacgtatga

SEQ ID NO: 2683254 - DNA, 25 bp, Homo sapien
ggcagtggcttagatctccccatgt

SEQ ID NO: 2683255 - DNA, 25 bp, Homo sapien
agtggcttagatctccccatgtggg

SEQ ID NO: 2683256 - DNA, 25 bp, Homo sapien
tcctttcatctgtgcttcaaattcc

SEQ ID NO: 2683257 - DNA, 25 bp, Homo sapien
ctgggcagtggcttagatctcccca

SEQ ID NO: 2683258 - DNA, 25 bp, Homo sapien
ctttatgaagatagggactccctgg

SEQ ID NO: 2683259 - DNA, 25 bp, Homo sapien
tttatgaagatagggactccctggg

SEQ ID NO: 2683260 - DNA, 25 bp, Homo sapien
catcatctcttgttggccacatgca

SEQ ID NO: 2683261 - DNA, 25 bp, Homo sapien
cataggcatcaaagctgtgttcatc

SEQ ID NO: 2683262 - DNA, 25 bp, Homo sapien
ccaagacagaaaaaccacataggca

SEQ ID NO: 2683263 - DNA, 25 bp, Homo sapien
tcatccagtttcacaagcctcatca

SEQ ID NO: 2683264 - DNA, 25 bp, Homo sapien
aaacatctaagtttgcatctgtctg

SEQ ID NO: 2683265 - DNA, 25 bp, Homo sapien
tgtgcactctgacccactagagcct

SEQ ID NO: 2683266 - DNA, 25 bp, Homo sapien
gatccttataaacatctaagtttgc

SEQ ID NO: 2683267 - DNA, 25 bp, Homo sapien
atctgtctgtgcactctgacccact

SEQ ID NO: 2683268 - DNA, 25 bp, Homo sapien
gaagaagagttttctggagcccctg

SEQ ID NO: 2683269 - DNA, 25 bp, Homo sapien
agaagagttttctggagcccctgag

SEQ ID NO: 2683270 - DNA, 25 bp, Homo sapien
aagaagagttttctggagcccctga

SEQ ID NO: 2683271 - DNA, 25 bp, Homo sapien
catttgattcctggacttcagcaca

SEQ ID NO: 2683272 - DNA, 25 bp, Homo sapien
tcctggacttcagcacagaagacct

SEQ ID NO: 2683273 - DNA, 25 bp, Homo sapien
ggaagtttagttcatttgattcctg

SEQ ID NO: 2683274 - DNA, 25 bp, Homo sapien
agaagacctcagttccacttttcat

SEQ ID NO: 2683275 - DNA, 25 bp, Homo sapien
taatccactggcagcatagcagtaa

SEQ ID NO: 2683276 - DNA, 25 bp, Homo sapien
gatgcacaaggagctgccagtgagc

SEQ ID NO: 2683277 - DNA, 25 bp, Homo sapien
taacgaaatacctgcccacaatggc

SEQ ID NO: 2683278 - DNA, 25 bp, Homo sapien
gctaaagcacatcatgacagaagga

SEQ ID NO: 2683279 - DNA, 25 bp, Homo sapien
caaagcctctatcgaagttcagaag

SEQ ID NO: 2683280 - DNA, 25 bp, Homo sapien
ctggaggagggaaagcgggcgtctg

SEQ ID NO: 2683281 - DNA, 25 bp, Homo sapien
tctgagtagactccacaaagcctct

SEQ ID NO: 2683282 - DNA, 25 bp, Homo sapien
tgctgctcttatcagctgtactgag

SEQ ID NO: 2683283 - DNA, 25 bp, Homo sapien
ggagccatagcggacagtctggagg

SEQ ID NO: 2683284 - DNA, 25 bp, Homo sapien
cttggagccatagcggacagtctgg

SEQ ID NO: 2683285 - DNA, 25 bp, Homo sapien
gagccatagcggacagtctggaggg

SEQ ID NO: 2683286 - DNA, 25 bp, Homo sapien
gtcggggggatatattcagtcacag

SEQ ID NO: 2683287 - DNA, 25 bp, Homo sapien
cagccatcagcttctgtcgctgaaa

SEQ ID NO: 2683288 - DNA, 25 bp, Homo sapien
ttctgtcgctgaaagtgcatcacac

SEQ ID NO: 2683289 - DNA, 25 bp, Homo sapien
catcagcttctgtcgctgaaagtgc

SEQ ID NO: 2683290 - DNA, 25 bp, Homo sapien
gagatggcaggcatgttgggttgac

SEQ ID NO: 2683291 - DNA, 25 bp, Homo sapien
ctctgggtaagttctagggcttcca

SEQ ID NO: 2683292 - DNA, 25 bp, Homo sapien
taagttctagggcttccagtgatgc

SEQ ID NO: 2683293 - DNA, 25 bp, Homo sapien
caaccttgctccctctgggtaagtt

SEQ ID NO: 2683294 - DNA, 25 bp, Homo sapien
tgctccctctgggtaagttctaggg

SEQ ID NO: 2683295 - DNA, 25 bp, Homo sapien
aataaccaagggtacatcagccgtc

SEQ ID NO: 2683296 - DNA, 25 bp, Homo sapien
aagcaataaccaagggtacatcagc

SEQ ID NO: 2683297 - DNA, 25 bp, Homo sapien
taaccaagggtacatcagccgtcac

SEQ ID NO: 2683298 - DNA, 25 bp, Homo sapien
caataaccaagggtacatcagccgt

SEQ ID NO: 2683299 - DNA, 25 bp, Homo sapien
cataagaagcttgtctgctacgctc

SEQ ID NO: 2683300 - DNA, 25 bp, Homo sapien
gaagcttgtctgctacgctcagagc

SEQ ID NO: 2683301 - DNA, 25 bp, Homo sapien
tcagagccacgctctggcagatagc

SEQ ID NO: 2683302 - DNA, 25 bp, Homo sapien
cgctctggcagatagctatcattcg

SEQ ID NO: 2683303 - DNA, 25 bp, Homo sapien
ccagcagcatgttgtgccccacaaa

SEQ ID NO: 2683304 - DNA, 25 bp, Homo sapien
atggcacagtccttaagatccttac

SEQ ID NO: 2683305 - DNA, 25 bp, Homo sapien
ggaatggcacagtccttaagatcct

SEQ ID NO: 2683306 - DNA, 25 bp, Homo sapien
cagcagcaggaatggcacagtcctt

SEQ ID NO: 2683307 - DNA, 25 bp, Homo sapien
agcaggaatggcacagtccttaaga

SEQ ID NO: 2683308 - DNA, 25 bp, Homo sapien
gagtagttgataaagccctgcctgc

SEQ ID NO: 2683309 - DNA, 25 bp, Homo sapien
tggagtagttgataaagccctgcct

SEQ ID NO: 2683310 - DNA, 25 bp, Homo sapien
ggagtagttgataaagccctgcctg

SEQ ID NO: 2683311 - DNA, 25 bp, Homo sapien
gtagttgataaagccctgcctgctg

SEQ ID NO: 2683312 - DNA, 25 bp, Homo sapien
ccatgagtagggtgaggcctcccac

SEQ ID NO: 2683313 - DNA, 25 bp, Homo sapien
atgagtagggtgaggcctcccacaa

SEQ ID NO: 2683314 - DNA, 25 bp, Homo sapien
tgggtctgggccatgagtagggtga

SEQ ID NO: 2683315 - DNA, 25 bp, Homo sapien
tctgggccatgagtagggtgaggcc

SEQ ID NO: 2683316 - DNA, 25 bp, Homo sapien
actggtccaatagggtggtcaactt

SEQ ID NO: 2683317 - DNA, 25 bp, Homo sapien
ggtccaatagggtggtcaacttcag

SEQ ID NO: 2683318 - DNA, 25 bp, Homo sapien
tggtccaatagggtggtcaacttca

SEQ ID NO: 2683319 - DNA, 25 bp, Homo sapien
tccaatagggtggtcaacttcaggg

SEQ ID NO: 2683320 - DNA, 25 bp, Homo sapien
taggacagagtgtatttatgggcag

SEQ ID NO: 2683321 - DNA, 25 bp, Homo sapien
cgagtccggaacagggtcaggagga

SEQ ID NO: 2683322 - DNA, 25 bp, Homo sapien
cacatctcccatggaggacagcaca

SEQ ID NO: 2683323 - DNA, 25 bp, Homo sapien
gacagcacagccaataggacagagt

SEQ ID NO: 2683324 - DNA, 25 bp, Homo sapien
ttgttagtgaaagcccagtgacaaa

SEQ ID NO: 2683325 - DNA, 25 bp, Homo sapien
cccagtgacaaatgcactcccccac

SEQ ID NO: 2683326 - DNA, 25 bp, Homo sapien
ctgacaatatcattgttagtgaaag

SEQ ID NO: 2683327 - DNA, 25 bp, Homo sapien
tatcattgttagtgaaagcccagtg

SEQ ID NO: 2683328 - DNA, 25 bp, Homo sapien
agagcaagcatgtgcgggatgccat

SEQ ID NO: 2683329 - DNA, 25 bp, Homo sapien
gcctttaatagagcaagcatgtgcg

SEQ ID NO: 2683330 - DNA, 25 bp, Homo sapien
ggatgccatttgtgggaacagatac

SEQ ID NO: 2683331 - DNA, 25 bp, Homo sapien
aagcatgtgcgggatgccatttgtg

SEQ ID NO: 2683332 - DNA, 25 bp, Homo sapien
agtcagggttcgtttgcagttcaag

SEQ ID NO: 2683333 - DNA, 25 bp, Homo sapien
tagaagtcagggttcgtttgcagtt

SEQ ID NO: 2683334 - DNA, 25 bp, Homo sapien
cagggttcgtttgcagttcaagcat

SEQ ID NO: 2683335 - DNA, 25 bp, Homo sapien
tcatagaagtcagggttcgtttgca

SEQ ID NO: 2683336 - DNA, 25 bp, Homo sapien
ctggcagagcataaggtttgctcta

SEQ ID NO: 2683337 - DNA, 25 bp, Homo sapien
tggcagagcataaggtttgctctaa

SEQ ID NO: 2683338 - DNA, 25 bp, Homo sapien
gctggcagagcataaggtttgctct

SEQ ID NO: 2683339 - DNA, 25 bp, Homo sapien
tgctggcagagcataaggtttgctc

SEQ ID NO: 2683340 - DNA, 25 bp, Homo sapien
cagtgaagtgatagagcagagtgct

SEQ ID NO: 2683341 - DNA, 25 bp, Homo sapien
tgagaggtcaagagtgagtcaatgt

SEQ ID NO: 2683342 - DNA, 25 bp, Homo sapien
caagagtgagtcaatgtcagtgaag

SEQ ID NO: 2683343 - DNA, 25 bp, Homo sapien
aaggaatgagcatgtaagattcatt

SEQ ID NO: 2683344 - DNA, 25 bp, Homo sapien
aagttatacctgtcattgccaacca

SEQ ID NO: 2683345 - DNA, 25 bp, Homo sapien
cctgggagaagttatacctgtcatt

SEQ ID NO: 2683346 - DNA, 25 bp, Homo sapien
gagaagttatacctgtcattgccaa

SEQ ID NO: 2683347 - DNA, 25 bp, Homo sapien
cggaacctgggagaagttatacctg

SEQ ID NO: 2683348 - DNA, 25 bp, Homo sapien
ggctgaatcctttgctatcacttcc

SEQ ID NO: 2683349 - DNA, 25 bp, Homo sapien
cccacacgtggagtgcctactggct

SEQ ID NO: 2683350 - DNA, 25 bp, Homo sapien
agttcaatttgtgtcaggccataac

SEQ ID NO: 2683351 - DNA, 25 bp, Homo sapien
gcttggctgaatcctttgctatcac

SEQ ID NO: 2683352 - DNA, 25 bp, Homo sapien
tccagaaaaatgtacagagtggaac

SEQ ID NO: 2683353 - DNA, 25 bp, Homo sapien
actccagaaaaatgtacagagtgga

SEQ ID NO: 2683354 - DNA, 25 bp, Homo sapien
agaaaaatgtacagagtggaactca

SEQ ID NO: 2683355 - DNA, 25 bp, Homo sapien
tcaaactccagaaaaatgtacagag

SEQ ID NO: 2683356 - DNA, 25 bp, Homo sapien
tccttcagaacaatctgatcagcct

SEQ ID NO: 2683357 - DNA, 25 bp, Homo sapien
tcagaacaatctgatcagcctcatt

SEQ ID NO: 2683358 - DNA, 25 bp, Homo sapien
gaacaatctgatcagcctcattctc

SEQ ID NO: 2683359 - DNA, 25 bp, Homo sapien
tgtttccttcagaacaatctgatca

SEQ ID NO: 2683360 - DNA, 25 bp, Homo sapien
tcactccttaggcttctcaagagtc

SEQ ID NO: 2683361 - DNA, 25 bp, Homo sapien
ctccttaggcttctcaagagtcttc

SEQ ID NO: 2683362 - DNA, 25 bp, Homo sapien
taggcttctcaagagtcttcccctc

SEQ ID NO: 2683363 - DNA, 25 bp, Homo sapien
ccttaggcttctcaagagtcttccc

SEQ ID NO: 2683364 - DNA, 25 bp, Homo sapien
agtgagcttgttcgcaatctgggtc

SEQ ID NO: 2683365 - DNA, 25 bp, Homo sapien
gtgagcttgttcgcaatctgggtca

SEQ ID NO: 2683366 - DNA, 25 bp, Homo sapien
cgcaatctgggtcacaagacaaggt

SEQ ID NO: 2683367 - DNA, 25 bp, Homo sapien
cacccatgtctcagatactggagcc

SEQ ID NO: 2683368 - DNA, 25 bp, Homo sapien
catattcccgacgtggatgcaccga

SEQ ID NO: 2683369 - DNA, 25 bp, Homo sapien
gtggatgcaccgaaccacccatgtc

SEQ ID NO: 2683370 - DNA, 25 bp, Homo sapien
caagtgatggctgcaccacaagtgc

SEQ ID NO: 2683371 - DNA, 25 bp, Homo sapien
atacgcgtaagtgttgccaaaacag

SEQ ID NO: 2683372 - DNA, 25 bp, Homo sapien
ctaaaatacgcgtaagtgttgccaa

SEQ ID NO: 2683373 - DNA, 25 bp, Homo sapien
taaaatacgcgtaagtgttgccaaa

SEQ ID NO: 2683374 - DNA, 25 bp, Homo sapien
aatacgcgtaagtgttgccaaaaca

SEQ ID NO: 2683375 - DNA, 25 bp, Homo sapien
atgtagatagaaaaatccccaactt

SEQ ID NO: 2683376 - DNA, 25 bp, Homo sapien
tcaatgtagatagaaaaatccccaa

SEQ ID NO: 2683377 - DNA, 25 bp, Homo sapien
aatgtagatagaaaaatccccaact

SEQ ID NO: 2683378 - DNA, 25 bp, Homo sapien
caatgtagatagaaaaatccccaac

SEQ ID NO: 2683379 - DNA, 25 bp, Homo sapien
cttgatcagtgaagggtaagccttc

SEQ ID NO: 2683380 - DNA, 25 bp, Homo sapien
ttgatcagtgaagggtaagccttca

SEQ ID NO: 2683381 - DNA, 25 bp, Homo sapien
tgatcagtgaagggtaagccttcat

SEQ ID NO: 2683382 - DNA, 25 bp, Homo sapien
tcttgatcagtgaagggtaagcctt

SEQ ID NO: 2683383 - DNA, 25 bp, Homo sapien
gttctccatctattccaagtccttt

SEQ ID NO: 2683384 - DNA, 25 bp, Homo sapien
ggacagacttagtgtgatagctgtg

SEQ ID NO: 2683385 - DNA, 25 bp, Homo sapien
cagttctccatctattccaagtcct

SEQ ID NO: 2683386 - DNA, 25 bp, Homo sapien
gacttagtgtgatagctgtgccaca

SEQ ID NO: 2683387 - DNA, 25 bp, Homo sapien
caaaaggatgttgactaggactggc

SEQ ID NO: 2683388 - DNA, 25 bp, Homo sapien
caatactgctagtttttataagcct

SEQ ID NO: 2683389 - DNA, 25 bp, Homo sapien
tataagccttctctgaagcagagtc

SEQ ID NO: 2683390 - DNA, 25 bp, Homo sapien
ctactgatacacaatactgctagtt

SEQ ID NO: 2683391 - DNA, 25 bp, Homo sapien
catgcaaacagtgcatgctgtccca

SEQ ID NO: 2683392 - DNA, 25 bp, Homo sapien
tgagtgttctccaaagaggaacctc

SEQ ID NO: 2683393 - DNA, 25 bp, Homo sapien
caaagaggaacctcagggtgcatgc

SEQ ID NO: 2683394 - DNA, 25 bp, Homo sapien
ctgactccttctttcctcggcatga

SEQ ID NO: 2683395 - DNA, 25 bp, Homo sapien
ccctcggatgcagatatgtagcata

SEQ ID NO: 2683396 - DNA, 25 bp, Homo sapien
cctcggatgcagatatgtagcatac

SEQ ID NO: 2683397 - DNA, 25 bp, Homo sapien
tagcatacaggctttcatagttcat

SEQ ID NO: 2683398 - DNA, 25 bp, Homo sapien
atatgtagcatacaggctttcatag

SEQ ID NO: 2683399 - DNA, 25 bp, Homo sapien
tgtttactgaagcaatgaggaatgt

SEQ ID NO: 2683400 - DNA, 25 bp, Homo sapien
tcagagatgggcttatgagacaact

SEQ ID NO: 2683401 - DNA, 25 bp, Homo sapien
gaagtgccagaaacagtgagaaatg

SEQ ID NO: 2683402 - DNA, 25 bp, Homo sapien
gagatgctgtacagtttggtctagc

SEQ ID NO: 2683403 - DNA, 25 bp, Homo sapien
cattcatcacgaacacacagcctat

SEQ ID NO: 2683404 - DNA, 25 bp, Homo sapien
cttcacattcatcacgaacacacag

SEQ ID NO: 2683405 - DNA, 25 bp, Homo sapien
gtttctttcacctgatcacgggtac

SEQ ID NO: 2683406 - DNA, 25 bp, Homo sapien
acagcctattttctgagggagtttc

SEQ ID NO: 2683407 - DNA, 25 bp, Homo sapien
ttcccttctatattggtcccaccga

SEQ ID NO: 2683408 - DNA, 25 bp, Homo sapien
cactactacaattagaacttcaatg

SEQ ID NO: 2683409 - DNA, 25 bp, Homo sapien
gaacttcaatgtattctgaaggttt

SEQ ID NO: 2683410 - DNA, 25 bp, Homo sapien
ggtcccaccgaatttcactactaca

SEQ ID NO: 2683411 - DNA, 25 bp, Homo sapien
aaatcatatggataagtgccacaga

SEQ ID NO: 2683412 - DNA, 25 bp, Homo sapien
aaaatcatatggataagtgccacag

SEQ ID NO: 2683413 - DNA, 25 bp, Homo sapien
atggatgaaggggataagttataag

SEQ ID NO: 2683414 - DNA, 25 bp, Homo sapien
cctggaagtggtgtgcggaatggat

SEQ ID NO: 2683415 - DNA, 25 bp, Homo sapien
aagtggtgtgcggaatggatgaagg

SEQ ID NO: 2683416 - DNA, 25 bp, Homo sapien
ttaacctggaagtggtgtgcggaat

SEQ ID NO: 2683417 - DNA, 25 bp, Homo sapien
tcagacaagaaattcacgtgatctt

SEQ ID NO: 2683418 - DNA, 25 bp, Homo sapien
agaaattcacgtgatcttgtcctgg

SEQ ID NO: 2683419 - DNA, 25 bp, Homo sapien
tcttgtcctggattattaggcttgc

SEQ ID NO: 2683420 - DNA, 25 bp, Homo sapien
ttaggcttgcaacaagcaatttgtt

SEQ ID NO: 2683421 - DNA, 25 bp, Homo sapien
tgagctctcatgatgttttcctaga

SEQ ID NO: 2683422 - DNA, 25 bp, Homo sapien
atctgagctctcatgatgttttcct

SEQ ID NO: 2683423 - DNA, 25 bp, Homo sapien
gttgccttcttctacatcaacttcc

SEQ ID NO: 2683424 - DNA, 25 bp, Homo sapien
tttcctagataaatggagttgcctt

SEQ ID NO: 2683425 - DNA, 25 bp, Homo sapien
gaaatcagtaccagatcaaatggac

SEQ ID NO: 2683426 - DNA, 25 bp, Homo sapien
gacctgaaatcagtaccagatcaaa

SEQ ID NO: 2683427 - DNA, 25 bp, Homo sapien
atagtggtagacaaagatattcagg

SEQ ID NO: 2683428 - DNA, 25 bp, Homo sapien
ataatagtggtagacaaagatattc

SEQ ID NO: 2683429 - DNA, 25 bp, Homo sapien
gactctgctcatatagtgcatgcca

SEQ ID NO: 2683430 - DNA, 25 bp, Homo sapien
caaagcccactcattgctgaaatcc

SEQ ID NO: 2683431 - DNA, 25 bp, Homo sapien
gaaatccaaccatatccttctggta

SEQ ID NO: 2683432 - DNA, 25 bp, Homo sapien
ccttctggtaatggagtctgaaaaa

SEQ ID NO: 2683433 - DNA, 25 bp, Homo sapien
gcaatcatttgcagccccaggtaac

SEQ ID NO: 2683434 - DNA, 25 bp, Homo sapien
caaaactcatataaacaaggcaaac

SEQ ID NO: 2683435 - DNA, 25 bp, Homo sapien
ctctctccccaaacgcaagtgatga

SEQ ID NO: 2683436 - DNA, 25 bp, Homo sapien
ccaggtaactgtcctaaggcataca

SEQ ID NO: 2683437 - DNA, 25 bp, Homo sapien
ctctccacgacttaaaataccttct

SEQ ID NO: 2683438 - DNA, 25 bp, Homo sapien
tctcttcctctccacgacttaaaat

SEQ ID NO: 2683439 - DNA, 25 bp, Homo sapien
aaataccttctagcaacttaagcat

SEQ ID NO: 2683440 - DNA, 25 bp, Homo sapien
tcttcctctccacgacttaaaatac

SEQ ID NO: 2683441 - DNA, 25 bp, Homo sapien
gtcgtgcggtacatgttgcattgaa

SEQ ID NO: 2683442 - DNA, 25 bp, Homo sapien
caaaaaattatacgagtcgtgcggt

SEQ ID NO: 2683443 - DNA, 25 bp, Homo sapien
gaacagcgtctatgattgatgataa

SEQ ID NO: 2683444 - DNA, 25 bp, Homo sapien
gagctgagaacagcgtctatgattg

SEQ ID NO: 2683445 - DNA, 25 bp, Homo sapien
ataacttccaccagagtccaagaga

SEQ ID NO: 2683446 - DNA, 25 bp, Homo sapien
cagaggctgagtcattaaatagaga

SEQ ID NO: 2683447 - DNA, 25 bp, Homo sapien
agagaaagtacttcaggttcccact

SEQ ID NO: 2683448 - DNA, 25 bp, Homo sapien
gccaatgaatcttcagtgctagctg

SEQ ID NO: 2683449 - DNA, 25 bp, Homo sapien
agtccaagtcccatgacagtaatgg

SEQ ID NO: 2683450 - DNA, 25 bp, Homo sapien
tgtttatcccattccttctctactc

SEQ ID NO: 2683451 - DNA, 25 bp, Homo sapien
ttatcccattccttctctactcctt

SEQ ID NO: 2683452 - DNA, 25 bp, Homo sapien
tccaagtcccatgacagtaatggct

SEQ ID NO: 2683453 - DNA, 25 bp, Homo sapien
catgcgtaattctcttggagccaca

SEQ ID NO: 2683454 - DNA, 25 bp, Homo sapien
gcgtaattctcttggagccacaaga

SEQ ID NO: 2683455 - DNA, 25 bp, Homo sapien
tccatgcgtaattctcttggagcca

SEQ ID NO: 2683456 - DNA, 25 bp, Homo sapien
taaactccatgcgtaattctcttgg

SEQ ID NO: 2683457 - DNA, 25 bp, Homo sapien
gaatccctttgagtaatctgttgaa

SEQ ID NO: 2683458 - DNA, 25 bp, Homo sapien
tgaagaagctcacggggatagaatc

SEQ ID NO: 2683459 - DNA, 25 bp, Homo sapien
tagtggggtaccttctgttatcttc

SEQ ID NO: 2683460 - DNA, 25 bp, Homo sapien
gttatcttcagaacagattgggccc

SEQ ID NO: 2683461 - DNA, 25 bp, Homo sapien
tttgtgattattttgctgcctgcag

SEQ ID NO: 2683462 - DNA, 25 bp, Homo sapien
caaagaattgtgttcctgttagatg

SEQ ID NO: 2683463 - DNA, 25 bp, Homo sapien
gggtccagtggattcttagcttcct

SEQ ID NO: 2683464 - DNA, 25 bp, Homo sapien
ctgcctgcaggtccaaagaattgtg

SEQ ID NO: 2683465 - DNA, 25 bp, Homo sapien
ctcctttgggcagcaagtcaatatt

SEQ ID NO: 2683466 - DNA, 25 bp, Homo sapien
tcctttgggcagcaagtcaatattt

SEQ ID NO: 2683467 - DNA, 25 bp, Homo sapien
actcctttgggcagcaagtcaatat

SEQ ID NO: 2683468 - DNA, 25 bp, Homo sapien
gccataggccttgacatacccaaca

SEQ ID NO: 2683469 - DNA, 25 bp, Homo sapien
cagatactgtcaacattgtgtaaaa

SEQ ID NO: 2683470 - DNA, 25 bp, Homo sapien
taagattacagtgaacatgcttctc

SEQ ID NO: 2683471 - DNA, 25 bp, Homo sapien
ataagagttcctattacttagggct

SEQ ID NO: 2683472 - DNA, 25 bp, Homo sapien
cttgatgccccaaatatttcccctg

SEQ ID NO: 2683473 - DNA, 25 bp, Homo sapien
cactttgattgtggtcaaatattca

SEQ ID NO: 2683474 - DNA, 25 bp, Homo sapien
ttgattgtggtcaaatattcagcaa

SEQ ID NO: 2683475 - DNA, 25 bp, Homo sapien
gccccaaatatttcccctgacattg

SEQ ID NO: 2683476 - DNA, 25 bp, Homo sapien
gacagcactgtcattaggccgtttc

SEQ ID NO: 2683477 - DNA, 25 bp, Homo sapien
gccgtttcgctaagcaccttaaata

SEQ ID NO: 2683478 - DNA, 25 bp, Homo sapien
cattaggccgtttcgctaagcacct

SEQ ID NO: 2683479 - DNA, 25 bp, Homo sapien
ttagcttttttcatagacagcactg

SEQ ID NO: 2683480 - DNA, 25 bp, Homo sapien
gtccttttcaaatcggaggatggca

SEQ ID NO: 2683481 - DNA, 25 bp, Homo sapien
tccttttcaaatcggaggatggcaa

SEQ ID NO: 2683482 - DNA, 25 bp, Homo sapien
cttcttcacagctaggactcttaaa

SEQ ID NO: 2683483 - DNA, 25 bp, Homo sapien
cagctaggactcttaaataaacctg

SEQ ID NO: 2683484 - DNA, 25 bp, Homo sapien
tcacagctaggactcttaaataaac

SEQ ID NO: 2683485 - DNA, 25 bp, Homo sapien
tcttcacagctaggactcttaaata

SEQ ID NO: 2683486 - DNA, 25 bp, Homo sapien
acaatgtgtttctccggtgccagcc

SEQ ID NO: 2683487 - DNA, 25 bp, Homo sapien
tgctcttgcgggtagacagcaggca
